United States Patent Application Publication US 2026/0103690 A1 - sequence listing, part 77

SEQ ID NO: 378511 - protein, 360 aa, unidentified
MAKAKTLVGLDVHATKIVAAVLDAETGQLQTFSMTGETAKAVKFCAALPRPVRVAYEAGPTGYGLARELARRRVECVVAAPSKIPRASGDRVKTDRRDAEHLVRLLLAGKLHAVRVPGPEEEALRDLVRARESVRMDLMRTRHRLSKLLLRHGIRFDDGHAWTERHRQWLAGVLLDWPAAQTTLLDVRGAIDALVIRRDSLEREILAILPACPWTVQVGRLRCLRGVDTLTAVGLCAEIGDFERFGKAEQLMSYIGVVPSEATTGQQRRLGAITKTGSGHARRLLVEAAWHYRPRPNLGKALVERQDGQPQAAVAVSWKAQLRLHRTWTRLEARAKRRTLIALAAARELSGFCWAITQIE

SEQ ID NO: 378512 - protein, 355 aa, unidentified
MLHNKIVDKVSTNKQMIEPQLDGYDHYIALDWSKVNMAIARMTKLGRGNPNVIDVPTSIKELKIYLSNLKGKKILTIEETTTAQWLYVELSDFVDKLLICDPYRNKLLSDGPKNDKIDATKLCLLLKSGMLKEVYHSTDKLYKLSKYVSSYEDIIKAGVRLLNQRTAIYQSCGQNSKKAKLQMDKTEKFIMNQFDKGVEVYEENKSQYKEYFKKLCKKEATLKALTSIPGIGEVSAVKILSRVVNAHRFRNAGKYLAYCGLVKHKKDSGGRNYGIRNPRYNRTMKSVYKTAAIVAIGLENPIREYYEYLIGKGTAEHNARNAVARYIARISYGIMKTNKKYEPYKWRKSSKTNKE

SEQ ID NO: 378513 - protein, 408 aa, unidentified
MNAVGIDVSKGKSMVAALRPMGEVALLPQEFLHTGVGLEQMAYAILALGEDTRVVMEATGRYHEPVAAALHEYGIYVCVLNPLYIKQSGGGSIRKVKTDKADAMKIAKYGLDNWVNLREYTPMDTVRQQLKLCSRQYNLYMKTVVSLQNNLISLTDKTFPGVSELFSSPERTDGHQKWVDFVMTFWHCDCICRVSEKAFTERYQKWCKRKGYHCSVEKALDIYASSCGHFTTLPKNDNTKLLIVTAAQQLLAGKTTLAALRAEMTRLASQLPEYETVRAMYGVGETTAAQLMAEIGDVRRFPRRSSIVGFAGVDPAVDQSGKHETQSTPTTKRGSPHLRKTLYQIVCTYLRKAPADEPVYQFLDKKRAEGKPYFVYMTAAQNKFLRIYYARVKECLEAFDAQQSTSQG

SEQ ID NO: 378514 - protein, 349 aa, unidentified
MKTYYVGMDVHSASIRIVVLNGAGKVVMESVIETGAERVRDFLKQLRGKVYVTFEEGTQANWLHDVVRGMVTEVVVCDPRHNKLLQSGNKNDRVDAQKLAELLRLGSLKAVYHGDNGVRTLKELVRTYDCLVSDMTRVMNRLKAIYRGRAIACGGHEIYRQDRRGQWLAKLREPGAKQRAGFLYEQLAALKPLRRKAKVAMVQEGRRQPAYRWLMSMPQLGSVSVAQLIAVVGTPHRFRSKQQFWTYVGLAVVTRSTADHEVVNGVLRRSQRPVSTRGLNRNHNHLLKRVFKNAATSACHSGPFKAGYDVRVARGMAPSLARLTIARQLAATTLAIWKRGEQFDPERKK

SEQ ID NO: 378515 - protein, 409 aa, unidentified
MSVGHDSSMRRPTAGIDWASTEHALAIVNCDGVEVQRMLVEHTAAGLRKLLRCLQQAMVLEVVIERPDGPLVEALLDAGLTVFVIAPNQIKHLRRRYGAAGNKDDRFDAYVLADTVRTDRHRLRPLTVDSPATLTLRMTVRARKDLIAARVAMANQLRAHLEHVLPAVIGLFRDIDSAITLSFLTRFATQDKVDWLSPRRLQNWLRGVSYPNPARAGLLHAHLLAATRGTTGPEATARAHVTAALVAGLTALREQINALEEQIELQLLQHPDAAVFTSLPRAGIVRAARLLAEIGDARGRFPTPEALTCLAGAAPSTRQSGKVKVVSFRWAVDKQLRGAVIDFAGDSHHANPWAADLYRRARARGHDHPHATRILARAWLHVIWRCWQDRVAYDPTRHRALQAVLAPPA

SEQ ID NO: 378516 - protein, 369 aa, unidentified
MQRKEISFKGQKVFIGIDVHKDSWRVAIAPEVGVVKGHSQKPSAQELLDFLKKYYPDGEYHAVYESGFSGFSTYYALQDVGIDCIIIHAADVPTTQYEETMKTDKVDAAKLVRSLKSGLLTGIYIHKRDDIDARSVVRLRKTVQKQLGSYKSRVKHLLHSNGVTFPERFSTPGSHWSKVFIRWLKEEVALLSATRISLDLLIAQVEAIRKTLLMATRNVRELSRSERYRHGCELLTSIPGVGVNVAMTLLTEIGDINRFHNEKEFASYLGLVPTSHSSGGKVAHGEKTFRGNKYLGPQIVEASWVSIYRDKGLGCAYLNYKKRMKPQEAIVRVARKLSNIIFSVLKTGQKYKPYEWDEQQKHTDLQATS

SEQ ID NO: 378517 - protein, 332 aa, unidentified
MSKVTLGIDVSKLKLDAALWIPASRKWYSSKAPNDAAGVQKLLEWACTKAAVAPADCTVVLEATGVYHEVAAQSFRDGGCPVVIANPRRARDFAKGMGILGKSDTLDARALARYGAEAEKLVIWEPAPEPVRILRALLIRIDAVEQDLRREENRLEKAQNGQTPQLVHDSLQRSLDNLRAERDCLRRDIDDHFGRHPQLKEEFQRLQTIPGVGPATAARLLCLLRRIHFDSARKAAAFAGLNVLPFESGTSVHKPPRLSKHGDPMLRAKLYMAAIVAAQHNPPLRAIYLDMTRRGKSKMSALGALMRRLVHIAYGMLKHQADFDPGKIPTPA

SEQ ID NO: 378518 - protein, 354 aa, unidentified
MRDEQKPVSEAVVWVGVDVSKSTFDAALAEGGQGGCQPLGKLPARCFSRSPEGVAELLAWLRASGVAPASARVVMEATGRYSVELAAWMAQTCPPLSPAIESPRQTTAFIKSLGLRNKTDRMDARALALYGVERRPRAYQPPPASEGELRELVRYRDFLVQQKVAAGNRAEEMRDSKFIQREMRRQIRQLERDIEKTEKEMARVKQATPELENDIALMTSIYGVAFLTAATIRAELGDLRRFEKARQLTAFAGLNPSLRQSGSSVRGRTHISKAGNPRVRRALYLSAMVAVRGDNDFRHDYERLRAQGLSKMAALCAIMRKILVLMRALLISGKPYVPLWKNRPQLQEKMFLEA

SEQ ID NO: 378519 - protein, 462 aa, unidentified
MKNKPSTDRARKRLTKHLEQINLYAAGIDIGSESHYVAVPEGLDDEPVRCFSCNTGDLEKLADWLVQIGIQSVAMESTGIYWIPLFEILEERGLEVLLVNARHVKNVSGRKSDVLDCQWLQQLHTYGLLAGAFRPPEQVTALRAYMRQRGTLVRYAGSHIQHMQKALRQMNLLLDNVVTDITGKTGMTIIRTILQGERDPHKLAAYRDRRCKKSEQAIAQSLHGHYREEHLFALRQSVELYDTYHAKILACDEAIEQQLKRFDAQGDPQQLRAGKKNKAANAPAFDVRGELYRMSGVDLTAIDGINDITALKVLAETGTDMSRWKSEKHFSSWLGLSPGNKISGGKILSSKTKPTTNRAAAALRMAAFTLSNSKSALGAYYRRMRSRQGAPKAITATAHKLARLIYSMLKHGTEYVDQGQDYYEQRYQDRVMKNLKQRAAQMGFTLVPSSTDNGSVVKESTG

SEQ ID NO: 378520 - protein, 340 aa, unidentified
MRVIIGIDPHKASHTAVAIGCDEQQLAEIRVRATCQQTAKLLAWAEPLGERTWAVESAGGLGYLLSQQLVEAGEHVLDVPATLASRVRVLGTGRSNKNDPNDALAVAIAALRSPGLRSVEPANHGEVLRLLGKRNHDIGRLRNIVVSRLHAALANLSPGGIAKELNASDAVRLLGDFNPKTAVEQTRYDLALELLDDVRRLDVQLKESHKRIKTAVQASGTTLTELYGVGPILACELIGYTGDVRRFTTRDKFASYAGVAPIELSSGGRIVHRLSRRGNRQLNHAIHMVAICQIRQTNSEGRAYFERKVAEGKTKREAIRSLKRHVANAVYRQLLVDANK

SEQ ID NO: 378521 - protein, 321 aa, unidentified
MTPPEVYVGIDVAKDQLQVALRPSGEQWPVSYDRPGLEELTKRLRTVKPTMVVLEATAGMEMPVAAALAAIKLPVVVVNPRQVREFARATGRLAKTDAIDAQVLAHFAQAVQPPLRPLPDAATQQLNALVTRRHQLVEMLAAEKNRLAQAAKSVRIDIQEHIRWLEQRLADLDRDLAATVHQSPIWREKDNLLRSAPGVGPVLSTTLLANLTELGRLNGKQIAALVGVAPLNRDSGRFRGKRTIWGGRARVRTALYMGTLVATRYNPAIRPFYQRLLAAGKPKKVALTACMRKLITILNAMVRSQSSWQITHPTLARQDGC

SEQ ID NO: 378522 - protein, 367 aa, unidentified
MKKVSTVVAKQSRNFSQLKLTIGLDLGDRSSWYCVLDEQGEVVLEQRLGTTPKAMKEGFGGMPRSRIALETGMHSPWVSRLLGELGHEVIVAHARNVRLIGESRKKDDRLDAQTLARLARIDPQLLSPVKHRSAKAQADLTVIRARAGLVRARTALVNTARGLAKSYGERLRGCNVRNMNPEKAEGLSPELQKALEPLLAGIESLSERIREYNEGIEELAERSYPQVALLKQVKGVGTLIALTFLLTLEDAHRFHKSRDVGCYLGLQPGRRNSGQSEPQMHISKEGDPYLRTLLVQGAQHILGPFGADSDLRRWGLKLAERGGRNGKKRAIIATARKLAVLLHRLWVSGEVYEPLHNSQQSPLAIAA

SEQ ID NO: 378523 - protein, 397 aa, unidentified
MIKLKYSICCGLDVHKNVIVATIVTTNKDGISEYNQKSFSTINSDIQKFHNWLIENNCYHVCLESTGKYWIPIFNYLENDVDVCLTHPKYVKAIKGKKTEKKDSKWIADLYEFNLVRCSFIPPKDFRQLRELSRYRFKLVCMKSSEKNRIQNCMTISNVGIASVLSDPFGKTATEIISYLLEHTADSMDEKAVRKLIKKGAKSKSDEIIEAIKGYTIETDQAKKLELARGHLEYLDDMITQTEVELYVRIKPYYEFVEFVSTMPGMTELSSTIVLAETGVDMDIFDDAKHLCSWCGLSPANNESAGKKKSVRIAKAGDYLKPMMVQCALAAIKSKKQPYFAIKYGRIKKRRGHKKAIIAIARMMMVCIYHMVSEKKPFTPTDYERLMNPQNHIEYVE

SEQ ID NO: 378524 - protein, 315 aa, unidentified
MTTTKKEIFIGIDISKTQMDVAVWDNEETWEFENEAAGWQEMVEIAKELKPSLIVVEASGGIEQRVVAELYLEELPIAIVNPTRVRNFARSTGQLAKTDKLDARLIAHFAQAVRPKVRPLRTAEQEHLNALVTRRRQVVQILTAEKNRRSTTHSTLRKRLQQHIEWLNAELEGLDEEIEQYIQESPSWRKNAALLRSVPGVGPVTASTLLAALPELGTRNRQQIAALVGVAPLNKDSGKMRGKRRVFGGRAPVRRALYMATLVATRVNPVIRSFYEHLLAQGKEKKVALTACMRKLLVILNSMIRNQQTWSPYRT

SEQ ID NO: 378525 - protein, 389 aa, unidentified
MPAIADRPAAPTAIQTNLAAIFISLELSRSIWLITSLSPGSGEKMSKHSVRAGDVAALLARFSELKRKASERTGKSFPIVVIQEAGLDGFWLHRVLQSEGVESHVVDPSSIATSRRRRRAKTDRIDGEALLRALLAYKRGEPRVCAMVKAPTPEEEDRRRLCRERKVLIAERVKHVNRVKGLLFSQGISGYEPLRRDRRQRLDELTTGDGRPLPVHLKTQIRRELDRLELLLDQIKEAEAERDALLAAPQPAAPAPAGRMLLEFKGIGAELAAVLWLEALFRHFDNRRQLASYAGLAPTPWQSGSVDHEQGVSKAGNPRLRTSLIQLAWLWLRHQPQSALTLWFKERVSGNGGHFKKSTIVALARKLLVALWKYVTAGVVIDGAVMKDA

SEQ ID NO: 378526 - protein, 290 aa, unidentified
MSRLAKVERFFKNVNLTSDDEVYVGVDVHKKSYHVSLFLNDTPSIDFNMIADPKQLNKKLQRIAQSIKDVSYETGPTGYGLVRYLRKNKLPANVVATSKVPRTASVDDKTDRLDSRKLAEYSAKGMLRSITVPTARQEADRQLYRMRHRQALQFAKVKVQIKSFLLMHGISEPEGLKDWNKASVSELRNIRLLDALRLSLDELLSDYDYLNGRLKELRKILADNLDKGVLGRRMDLLKTHPSVGAVVSCQFATELYHYKDFSSTRQLYKYLGLSPRISQSGEKKEHRSDQ

SEQ ID NO: 378527 - protein, 344 aa, unidentified
MDNHTQYSGFAGVDLAKKVMQIHFVSGDGEITDKQVKRAEFLDFFRNRTKCLIGMEACGASQDWARKLEAMGHEVHLMSPKAVKPFVSGQKNDYNDAIGIYKAMFNGVRRVPVKSTEIRDLQTLRRIRSQVTKDRVKEINHVRGLLAEYGIVMGKSITAFNKGISSALESLKERGDVSSLVAEELRTTAEAIKTKIERQKKLDREIEQLARGCKNYENFLKTPGVGPFTAAMLCVLLCDPSIFANGRRFAAYIGLAPRSRGSGGKNFVTSIPLKFNCDSESRAVFVECAQAIARYKNKSFWVEDILRRKPKKVALIAIANKLARQAWAMANKGESFKQMTTLTA

SEQ ID NO: 378528 - protein, 410 aa, unidentified
MKEQKRKVKANTVLVDHRNIVGIDIGKRKHAATAVTPKGTVIASLKSFENNQAGVDLLERQVLRPAINRSKPLIAMEATGQYWNALHDELQRRGYTCVVLNPIQTNNRSNKQIRKAKTDPLDSAVIARTILAGDAQATLVPSESIYELRLLVRHRWRMIKVHGCILRYAIGLLDQVFPEYDGVFCKPFLASTRALVRDIGLTPKSLNSKKAEVILTLQKTSRKRLSTETIDDFLKRAKDSIGTQQANDVINEQFRMVVDYLDFVETQVQTINKDLRSRMEKLSSPLMSLGIGAEVVATILAESGDLTRFPGPSEYSAFCGLDPSVRDSGDSIRGISHISKRGSPLLRWALYVSAQTMVNKHQDFARVYERHVKRRKGHRFSLIAVAHKLARVIWRLAKDGRNYTKRPPKR

SEQ ID NO: 378529 - protein, 388 aa, unidentified
MQFAADRLEAPTAIRTDLGAIFISLELSRSSWVVTSLSPGGGEKMSKHTVRGGDVAGLLKRFAQLREKAKGRTGKVFPLIVIQEAGLDGFWIDRVLQNEGIESHVVDPASIATSRRRRRAKTDGIDGEALVRALLAYKRGEPRVCSMVRLPTPEDEDRRRLCRERKVLIMERVQHVNRIKGLLFSQGVSGYEPVRCDRRERLDALQTGDGRPLPLHLKAQVRRELDRLELLLAQIKAVEAERDALLAAEQTKAPVAPAMLLGVKGIGPEFAAVLWSEGLSRPFENRRQIAAYAGLAPTPWQSGSVDREQGISQSGNPRLRTTMIQLAWLWLRHQPDSALALWFHDRVKRNGGRLRKTTIVALARKLLVALWKYVTAGVVIEGAAMKTA

SEQ ID NO: 378530 - protein, 358 aa, unidentified
MQKYNISFKGQKIFIGIDVHKKNWDVAIAPEVGIVKRHSQKPSAKVLFDFLKKHYPDGDYLAVYESGFSGFSTYYALKEVGIDSIVIHAADVPTTQYEEVMKTDRLDSIKLVKSLKAGLLKGIYIREKENLDDRSVIRIRKTIQKELSRYKVMVKHILHNNGVTLPDCFEKPTTHWSGAFMTWLKKDVTLLSSTRNSLDLLIIQVETIRVNMLNATRMLRSLSRTERYRHRCELLMTIPGIGVIVAMSILTEIYNVNRFHNEREFAAYLGLIPTSHSSGEKIIHGEKTFRGNKQLGPMIIEAAWASIARDAGLGSLYLRYRERMKPQEAIIRIARKLSNIILAVLKSEKEYVPYHMGN

SEQ ID NO: 378531 - protein, 317 aa, unidentified
MIYVGIDISKDFFDCVFTKEEKNHHKQFDNNEKGFAEAIAWVGEEAHWTMEATGPYFQRFAYYLASKEMRVSVINPLVIKRYMQMELQLAKTDKRDAMYIADYARLKQPEQWQMPSKEQQELRDLVAWSEALKKTQRQYENRCHAYQHAQAHSAFIDEKAVELLAVIAQQLADVEAQIATLIKAVYPNEYGCLLSIPSVGPETAVAVLALTDGLKHFENAKQLVAYTGLAPRVDRSGNRKTGCRRIAKRGNGNLRRLLYMCSWTGQRYNPACRALAKRLLAKGKAKRQIKMAIAAKLLRQIFAVVKSGNKYDEKLAF

SEQ ID NO: 378532 - protein, 362 aa, unidentified
MESMRWVGVDVHAKESVAVVLDQATGEVNTQRIAGRPEQVVEWLATVAQPFRAVYEAGPTGYGLVRRARERGLDVVVCAPGHILKNATDHIKVDKRDAARLARLLSAGELRLVRVPEPDEEQLRDLVRSREDLRVDLTRIRNRIGKFLLRREIYAPQHTETWGVLHRKWLQGLRFDDRASELVFEDAMHAHDILVARREQLERALAEIAETSVWARTIGRLRCLRGIDTLSALGLVAEVGDFRRFQHPRFLSSYLGLVPSEHSSGEKRRQGGITKAGSKHARRLLVEAAWQYRHVPRTSHHISLRQRGQDQRVIDIAWRAQRRLYKRWQRLHDERRKRRTVVAVAVGRELAAYCWEIATLTG

SEQ ID NO: 378533 - protein, 448 aa, unidentified
MSNGSGVSRGDRNRNTRLARLREAVPVSNAIAGVDLADSKQMVVVTDHESRVLARRTFRRRAWEVGTALDWAATCAARAGFAGATVAVEPTGHRWRVVGQLAAERGMSFVCVQPLMSSWARRAEDLTFDKTDDKDAVLIARLTAQLRCYLPEPADETWARLRHLGIRRARLVADSVSQVQQMRDLLECVWPAVLDAARQPFKSTCWRAALTVALSRAGGDLSRVTRLGRRRFDAAVRRQVARWDAVNPWQKIIDAVFTACADPAGVTALRLGALERVALLLADWRDTQARLADTEQRMVTVLGELGLTELVTSITGLSAVGAASILAETGNLARFTTGRALVKHSGLAPRQKSSGSYTGRTRTTGQGRPALRLAAWRAVWGALKSNSVYAARFAYLTSREHNKLSTGQAHAAIAAALLRHLHAVITTGQRWDPATAAGGRPTPTLIAA

SEQ ID NO: 378534 - protein, 344 aa, unidentified
MDKSITVIGLDLAKSVFQVHGINAEGEVVVRRKLSRSRVLAYFNQLEPCLVGMEACATAHYWGRELRALGHDVKLMPPQFVKPYLKSQKNDMRDAEAICEAVTRPTMRFVPIKTPDQQALLALHGVRDHWVRLSTRLINTLRGYLAEFGIVAARGRMGVEAILDTLADDQDDRIPDLARECLMPLANELRHVKRQILETDRKIMRAHRSSDMCQRLETIPGVGPVIATRVVAEVPDPRVFKSGRAFSAWVGLVPKQHSSGGRDRMGRITKTGNPELRRLLVAGAMSMIIRAKQLGFTKHPWLSRLLERKPMMVVAIAMANKIGRMIWALMVKGEKFNPAKLMPA

SEQ ID NO: 378535 - protein, 453 aa, unidentified
MEAVYARCAGLDVHKKSVVACRARPASGGGQERETRQFGTTTAELVALVEWLHAWGCTHVAMESTGSYWKAVYNLLEGEFEVLVVNAQHVKRVPGRKTDVGDAEWLCQLLEHGLLQGSFIPPVAQRDLRDLTRYRTALIEERAREVNRVQKLLESANIKLASVATDILGTSGRAMLAALASGEMEPAAMAELARGRLRAKIPALEQALTGRMRRHHRYMLAHYLRHIEFLDEQIAAVSEQIVEQLAAIPDAAGEDEPTDDSGTSGHPSQDAASRDGEVATQERGALGGMSAVQLLTTIPGVDQRIAEVIVAELGTDMRRFPTADHAAAWAGVAPGNNESGGKHYSGRVRQGNHALRRALVQAAWAASRTADTYLAAQYHRLAGRRGKKRAVVAVAHSILVIAYHMLSRHEPYRELGGNYFDERKKESVVNRLMRRIQNLGYHVSLEPIAAAVT

SEQ ID NO: 378536 - protein, 373 aa, unidentified
MDARFPKRHQSAKVETFITTTKEGASEMKITTIGVDLAKNIFQLHGVDERGHAAVRRAMKRDDMLPYFANLEPCLIGMEACGSAHHWARKLIALGHTVKLMAPQFVKPYVKSSKNDARDAEAICEAVTRPNMRFVPLKNVEQQAELSIHRARQGFIKARTAQGNQIRGLLSEFGIVIPKGIAHVYKRVPEILEDGENGLPGSMRQLILRLTDNLKGLDEQVVSLEKEIKQLHAGNELGRKLAEVNGIGPLTASALVATVGDAKNFDRGSQMAAWIGLVPKQHSSGGKTVLLGISKRGDTYLRTLLIHGARAVIRHAENKPEYADSWLGKLIARRGKNVAAVALANKNARIAWALLSKESKFRPDYATVQPTAA

SEQ ID NO: 378537 - protein, 389 aa, unidentified
MYLVGIDISKYKHDCFIATETGEIIKDAFSFQNNSIGFQTLRELLSFLDKPNEIRIGLDATGHYGKNLKRFLNDNGYSFMEFNPYLVKRFATSLTLRKTKTDKADAKLLSLILNSVTYQSYPLQSYHMNDLKSLSRYHKKLIHKHSKELVSLTIILDQIFPEFKPFFGNKFTQTALFILNNYKTPERIMSINIKSFEKIRKISQYSFNTVKFVKLKTLAKNTVGYTSKSLELKLDMILDSVNHLSDQINVLESYLTKQIKLINPPTLSIRGIGPLSALSIITEYGDINNFSSPKQMLSYAGLDPSIIQSGMIDKTGKLVKRGSSFLRETLMNSASTFAIHNPVIYEYYMKKKAEGKAHRVVLTHIAKKLIRIIHHLEKNNIAFDSSKLR

SEQ ID NO: 378538 - protein, 358 aa, unidentified
MAVTGGTRRVVGGVDTHKDLHVAAVLDEQDRVIGTRSFATTRQGYRQMLAWMRSFGELQRIGIESTGSYGAGLLRSMQQAKVAVLEVTTPDKQDRRRRGKNDDLDAQNAAHAAFAGQRTVTPRSRDGMIESLRILMACRRTAVSARRVALQMIHNTIVCAPDGLRDQLRSLTRMQLVRTLASWRPDLTGYRDLDSAYRIGLKSLARRYLELHDEIADLDVMIAAIVDELAPNLVARNSIGHIGAAQLLLTAGDNPERLRSEASFASLCGVSPVPASSGKTVRHRLNRGGDRAANSALHIIAIGRLRTDQRTKDYVARRIAEGHSKLDAIRALKRYLAREVFTLITQRRREINATRIAA

SEQ ID NO: 378539 - protein, 336 aa, unidentified
MDTIKAFVGIDVSKKKLDIALLRDNKVKPKAIPNTAAGFEKIEKWLVLQKVDLASVWICLEATGPYSDSLATWLDDHGFKVSVVNPARIKGYAQSELVRNKTDKSDAATIARFCQSVKPEQWHAPSAQIRVLRALVDRLDELKQTRQQELNRIEAYQSQQQERLIDGVQKHIDWLSAEIDKLQSEIDDHIDNNPDLKKDADLIQSIPGMGSISTAKFMAYVGDISRFDNAKALAAFAGVTPRNRRSGTSVRGRAMISRMGNTQLRTSLYMPGLVARRHNPTLKVFADRLSERGMRNKAVIGAVTRKLVHIIFGVIKSGIPFDPKLGHKPLASQDGI

SEQ ID NO: 378540 - protein, 391 aa, unidentified
MFLLGIDIAKLNHVASCIDSSTNEVVFSNFKFKNDFKGFSALLNKIKSFDAKNLIIGLESTSHYGENLINFLFIHDFKVALINPLQTSHLRKANIRDAKNDNLDSLNIAKSLVFTKLNFVSKKNIECFSLKKLTRFRSNLIKQRSKAKIQLISLLDLLFPELQYLFKSKIHSKAIYSLLKKYPSAEEIAALKDDEISNLLYASSKGHFKKEKSVELKSLAKTTVGIKDTSISLHLIQLIELIELYTKQIKDIEIKITDIVNNLDTTLLSVPGISVIACAIILGETNNFENFSSSKKLLAFAGLDPKIRQSGNFNASSCRMSKKGSPYLRYALIFTAWNIVRHSEKFNKYYSLKRSQGKSHYNALGHVAHKLVRILFTLIKKNISYQEEKLE

SEQ ID NO: 378541 - protein, 310 aa, unidentified
MSNPSVVGLDVAKAHVDVAIHPSQRTFRVAHTDTGLTELVRELTAITPQLVVLEATGGYETDVATALALAGLPLAIVNPRQVRDFAKALGRLAKTDAIDAHVLALFADRVRPTPRALPDAAHQALTALVTRRRQLVEMLTAERHRFALAQGAVRRDLRQHIHWLERRLADLDDEIRTQLRDSPLWAATHHLLRSVPGIGPVTAATLIAYLPELGHLTRRQIAALVGCAPFNRDSGTQRGKRTTWGGRATVRAPLYLATLTATRCNPAIRTFYRRLTTAGKHHKVALVAAMRKLLTILNAILKHQQAWNPA

SEQ ID NO: 378542 - protein, 360 aa, unidentified
MFTERTSVGLDVHARSVAAAAIDGVTGELFQARLTPSHEHIQAWLADLPGPVAVAYEAGPTGFGLARALDAAGIRCVVAAPSKLQRPSGDRVKTDARDAVHLARLLRLDEVTTVTIPTPATEAARDLVRAREDCRGDLMRARHRLSKLLLRQGIVYSGGKAWTGGHEAWLRRQRFDAPATAMAFESDFEAVLAVRARRDRLDAAITALAADSEFTPVVHRLGCLRGVSTLTAFALAVEIGDWHRFTGNTIGSFVGLVPSEHSSGSSRIQGPVTKTGNSHARRLLVEAAWHHRARYAPGTTMRERWELAPAAARARGDQGNRRLHHRWVVFNERRKRHTVANVAIARELAGWCWSLAVMDD

SEQ ID NO: 378543 - protein, 450 aa, unidentified
MRMQPEEIPDDDHELVIERVCAIDVAKASGKVCVRTPHPNRPDRRTSRVWDVSATSRAVTELAEHLIGEGIERVTVESTSDYWRIWFYVLEAAGLDVQLVNAREVKNVPGRPKTDKLDAVWLAKLTEKGLLRPSFVPPVEVRQLRDYTRLRVDVTRERTRYWQRMEKLLEDALIKVSSVVSRLDSMSVRDMLEALIAGERDPRRLAELARGKMRPKRAALIEALTGRFDDHHAELARLLLSQIDALSTHIDTLTRRIDELLAILTDPTRGPDGGYRIGDDGAAPFVNGLQAAKRLAEITGIGPVSAPVILAEIGMDMTRFPTAAHLVSWAKLSPRTIQSGATQRGGKTGKGNPYLKGVLGEAAAVAARTDTFLGERYRRIVKRRGKLKALVAVARSILVVVWNLLADPTAHFHDLGADYHTRRADTDRRLRNHLAQLAALGYRVTVEPAA

SEQ ID NO: 378544 - protein, 357 aa, unidentified
MGKSIRKLSSVTRVGLDLAKKVFQVHAIDANGEIVVARKLARGRLIRFFSELPRCVVAMEACSSAHHWGRQLLALGFEVRLIPPAHVKPYVRRNKNDAVDAAAICEAAGRPGQRFVPVRSIENQAELMRHRARELLAGQRTAALNALRGHLAEIGVVAPQGAQHAYDLKRLAVDGFDEYGEVVVPDYVCVALRPLVSQIDALDEAIGAIDKEIAMSVKADETAKRLMTVPGVGPVTASAIVATIQDMGDFASGREFAAFLGLTPRQSSTGGKPRLGRITKMGDRYLRKLLVVGACATLRHRKGHNDALRLWASGMLERKTVKYKFKLTAVALANKVARIVFVLMTRGGQYDDRPVAA

SEQ ID NO: 378545 - protein, 346 aa, unidentified
MTILEDTRVITGGVDTHADMHVAAALDPLGGLLGVREFPATAAGYADLLGWLSGFGPVALVGVEGTGSYGAGLARYLATARVRIVEVDRADRQDRHRQGKSDPLDAISAARAAQSGRAGGAPKGRDGAVEAIRALMVAKRSARNERTQAINQARALLVTGPDDLRARFAGLTAAALAEAIAALRPRPGDAAQYAVRIALRELGRRVEFLDGQLERLDDLIVPLVTARAPGLLGLYGVGPDTAALLLVAAGDHPERLRSEAAWAHLCGAAPIPASSGKTRRHRLNRGGNREANHALWRIVITRMSAHPATRAYIERRTKEGLSKKEIIRCLKRYVAREVYHHLRAGG

SEQ ID NO: 378546 - protein, 367 aa, unidentified
MTNEKLNNSKARVEQDASTKPQTIKLGLDVHADSIMMVRIVDQSAPQPAQKFTPAKFREWVKGQLGLAKEVHSCYEAGPFGYGLHRYLVELGVQNLVVQPVCLDERHTGVNHDKSDAKELALRLDRYVAGNTHALATVRVPTVAEEQKRIASRQREQLKREVRRLTAQGRSLLLTQGYRAKGGWWGARRWAQLQVQLPAWLDERLEVFRRLLAVLTVELDAATAALEAAAPAVRPKGLGGLTYEVIEREVGDWGRFANRRQVASYTGLCGGVSASGQSHHLLSITKHGNVRLRTALVELAWRLVIWQRECKLVKKWWPVLGQAKATKAARKKAIVAIARQLAVDCWRWRTGKVTPQDLGWVMVGPPA

SEQ ID NO: 378547 - protein, 343 aa, unidentified
MHIASVGIDLGKTTFHLIALDDHSKVVIRKRFSRKQLLAYTANLPSSLIGIEACSGAHFIGAALRNQEHDVRLIPAQFVKPFVKSNKNDFLDAEAIAEAVTRENMRFVPIKTDEQLDLQALHRVRDRLVQRRTAIINQIRGFLLERGITFAKGPANLRNHLPTLLEDAEQNITPRMRGLLGRVWQEWKQLETEIAEVSDDIERIANEDAGCQRLRQIPGVGPLVSTATVAAIGNGAAFRKGREFAAWLGLIPKQHSTGGQARLYGISKRGNIYLRRMFIHGARAVLLRVKYDTAGLGHWVHQLEARAPRNKVIVAIANKLARIAWAVLFRAEPYRHSAVCATA

SEQ ID NO: 378548 - protein, 364 aa, unidentified
MKEEKSKTRFVGIDLGKRTYHMAVVGKGGKVTMSNGTTYTAGRQGLYKKLRPGDKVALESCSLAFIMTKEIEAAVGCKVYVLNPGRLSIIYKSMKKTDKEDALKIAHILEDFAEERLPVVPVPSDKEINRRKITANTRRAQNNRTRLINLLHALFVSQGITTKIRKDLATEEIRKEAIKELTGIERDEAEYLVQCLDLSEKRIEKLDEMTAKESAGDKEIEMLQSIPGVGPKVAFAFVAHVGAARFENSGQLSNYLGLVPRVYMSGDTVRYGQITKRGNSYVRALLVQGAWALVRSRTGGKLKEMYEYMTIEKSKNKKKAIVAVARQLAELMYTMMRDKTWYACRKFKPGKEAAVELAQLAISA

SEQ ID NO: 378549 - protein, 382 aa, unidentified
MTTAAATHNAQSNTTEATLFVAFELSEKTWKLGFTTGHGQKPRERTVTARQQEHVLDEIAQAKRRLGLPETAPVVSCYEAGREGFWLHRFLQGHGITNQVVDSSSIEVNRRRRRAKSDGLDVRKLLSMLIRYHHGERQVWQVVKVPSVEAEDQRHLHRDLETLKQERASTTTRIEGLLSSQGLRVTSLTKLPEQLDALRLWDGSPIPPGLRRRVLRVYAHHTFLSEQIAEVEAERRAQLQTSSEASIDKVRQLMQLKGVGINGAWLLVMEFFGWRAFKNRREVGGLAGFTPTPYQSGESAREQGITKSGNRHVRWMTTELAWSWLRFQPDSALSCWFRERFGGGGKRLRRIGIVAVARKLLIALWRFLETGVLPAGAVLKEA

SEQ ID NO: 378550 - protein, 412 aa, unidentified
MDTVFRCCAGLDVHQATVVACVRRADAAGRARREVRTFRTMTADLLALADWLAGAGVTHVAMESTGVYWKPVFHVLEGRFEVLLVNAHHIKQVPGRKTDVKDCEWIAQLLQHGLLKPSFVPPRPIRDLRDLTRQRAQLIHERVAVANRIQKVLEDANVKLASVATDVLGASGRAMLLAMIAGETDPERLADLAKKRLRAKLPELRRALTGRVTDHHRFLLRVHLDHLQHLEGLVARLGERIEAALAPHAEAVRRLATIPGMSARTAEVLLAEVGPDVGPFPTAGHLASWAGMCPGNDESAGKRRTGRTTRGSRWLRTALVQAAWAASHTKGTYLAAQYRRLSVRRGAKRAAMAVGHTLLVIAYHVLRDGAPYAELGAGYLDRLEPERATKQLVRRLERLGHRVVLETPEPTT

SEQ ID NO: 378551 - protein, 286 aa, unidentified
MQSPLFIGVDVAKAEVVLACSQNSFPVQKVANALPALRKFLKTLPPGTHIAMEATGLYHQDLADLAVQMGFPVYVLNPKDTWHYAKGIGMRAKTDRVDAQMIARYIAHEVAHLRAYEPATPEQRAMDQLLKRRAKVVSLKTALRLSCDGVPSLSARATKLIAGFTDLLKHIDREIAALNNSIPQRAEQIERLKSIAGVGPLTSAWLANLFDRVKFKNSDAAVAFVGMDPRPCDSGQSGDGDVCPSVVRRKVDGSCSMRQWQQQNRRFGRLPTSIIASSGGLLLRPS

SEQ ID NO: 378552 - protein, 273 aa, unidentified
MSVSNQRCAGMDVSKGTLDIAISNIASQFTVPNGTDGFTQIIGELKKNETRLILMEATGGLESGVACYLQSEGFDVVVINPRQARDFARAMGYLAKTNRIDARILLQMSEVISQHPEREKYIRPLPDAQRQILAAMVVRCRQLTVMLTAERNRLHPSHPQSYESIRSIISVLKSDLTRIQGEMSIHIKSHFSELSDLLSAVKGIGAATVAVLLAEVHELGSLSRREISALIGGARVNRDSGTMRGRRTVFGGRASVRTALYMSALVVPRPNQG

SEQ ID NO: 378553 - protein, 367 aa, unidentified
MRKHNTAKGSVGTGKRANRKLTVGIDLGDRSSRYCILDEQGEVLAEGSVATTKKGFAQVFGSKPRSRLALEVGTHSPWVSRYLADLGHEVIVANARRVRLITDSTRKNDRLDAKTLARLMRIDPELLSPIRHRSAQAQADLMVIRARAVLVEARTMLVNAARGLTKSHGERLASCGTGQIREQLAESLSEPLQNALRPLLAEMESLSKRIREYDEQIESLGKSRYPETELLKQVHGVGALTALTYVLTVDDPYRFQHSRDAGAYFGLRPQRRESGDSRPQLRITKEGDAYMRKLLVQCAHYILGPFGSDSDLRQWGLELAARGGKNAKKRALVAVARKLAVLLHKLWVTGEAYEPLHIRTHSQTAAA

SEQ ID NO: 378554 - protein, 372 aa, unidentified
MNEVIKFFVGLDVHKDKIAIAIAELGLASARHLGCIAHDLNALLKVLARYGNPAQVRVVYEAGPTGFGLYRALRERGYSVQVIAPSLIPRRAADRIKNDRRDSLRLAELARAGELKAIWVPDVEHEALRNLWRAREDAVDMRHKARQQLKAFLLRHGRRYAGKTSWTKMHARWIADQRFEQPADHMALTEYQLAAQAAEERVTRLSTALTQAINGWRFEPVVGALRALRGIDMVSAIGLVAEIGDIGRFATARQLMGYLGLVPSEHSSGERVRRGSITKTGNGHARRLLTEAAWNYRHPARISNVLRDRSRHLAEPIRQHAWKAQVRLCARFARLHSRGVQENKVCVAVARELVGFIWAIARLAQPAMPTAN

SEQ ID NO: 378555 - protein, 363 aa, unidentified
MNSVYHTELSSLEETRGQFNGGKADIKLGIDVHQDFYVVVMQEGGSNPKPPQRFQKQAFLLWAAKLKSRSAEVHAVYEACGFGFSLQRQLSQLSIHCYVSCPQKLDEHNKRVKTDSLDAKTLCLRLDRFVRGNREALAMVRVPSEEEERSRAIHRQREQLVKVRKILEAQGRSLMVNHGIEPVKNWWKGNNFAALPLPAWIKELLQNSQPILIALQQKISALTLQLQVAAAFNQPRGLGAMTSVMIDREIGDWHRFNNRRQIASYTGLCPGEYSSGHTRLQSCVTKHGNPRLRAALVELAWRLVRFQPNYSAVRKWKERLAKGTLTTGAARKKAIVALARQLAIDLWRIRTGRLSAEALGLEI

SEQ ID NO: 378556 - protein, 344 aa, unidentified
MTYYAGLDVSLRTVNICVINDQGEFIAETKVDSEVTDVVAYFDGLDLEILSVGLEAGTMTQFLTYGLQSAGFDVVCMEARQVKAALSAMRNKTDKNDARGIAQLLRSGWYSPVHIKSMASHRIRLLLSSRKAVLSKCIDLENEIRGLFKVFGIKLPPKLGHGSFDPAVRDIIETDVTLSESLLPLLDARLVLYHCFRKLDNRTRHMAHADVVCQLLMSAPGVGFVTALTYKAGVDDPYRFKHSRTVAAHFGLTPRRFQSGEIDIEGHISRCGDRDVRSTLYTAANALMTRSSKWSSLKAWGMQLAKTRGHRRAVIAVARKLAVILHRMWIDDTQFQWGSEGARS

SEQ ID NO: 378557 - protein, 347 aa, unidentified
MLHAGLDLSRKKLDVCLLSDDGEHLDQLAVPPDVDSLRTLARRIEEVHGEPICAVIESMTGARIVHDTLEACGWSVEIADAQKVKGLAPLACKTDKIDSMVLAVLSHRDLVPAIWLPDPRVREERELARFRLHLVKHKSALKCRIHSTLINFGRACPVTDLFGAEGRRLLERLEVPEPWRSNVTASVRLIDDLECQIADINRRLKEGHADHPYIPLLMSVPGIRWVLAFTIAGEIGEIERFPSPEKLAGYTGLCPRVNQSGEKDRRGPLTKHGPTYLRWALLEATMHALKHPAYSERYQRNKRRLGKQRGAKVAQIDIARRLAHAIWHMLTRNQPFAPRGAAFRLAA

SEQ ID NO: 378558 - protein, 414 aa, unidentified
MALKIVYQICCGIDVHKTFVVACIASTNSKGVTVYKSHRFSTYTKGLKELLQWLSDSNCKDVCMESTGKYWIPVFNVLENSCNIVLAHPKYVKAIRGKKTDKKDAKWIADLFKHDLVAGSFMPPSDIRQLRDLMRYRFKLTCFMSSEKNRLQNCLTVSNIQLGNVVSDTFGKSSQKILDKILENPLDTSFDIESLIHSSMKKKLPELQLAVDGYITPEQADKLKIIKKHLEDLKNRKAELESIITGLVNPYQREIDIILTAPSFKSVFTAITLISEIGANMSVFTTAKHLCSWAGLTPTNNESAGKKKSVRVSKAGCYIKPLLVQCATAIVKSEKHPEIRNRYLRIKKRRGHKKAIIAVARMLLTAIYNMLKNKEPYNAELYKKSDVFPVDREITIDQALLLVQNQGYRIKSAS

SEQ ID NO: 378559 - protein, 328 aa, unidentified
MKYIGLDVHKEYIHGTVLDESGRVMKSGKFKYAKEGFEEFFQELGKAKVAMEAGYCWQPCYELLEDMGHDVSLAHPLKTRLIADVKIKTDAKASEALAQLLLMGWLPTSYVPPEDIRRLRELVRLREYLVNIQTRFKNKVHSALMKEGIRGQRGIFAKKRRGLLQSFEIDEVNRCVSILDVLDKHIRELSAMIKSIAGESQEAKWFMSIQGVGYYSAVAVLAEIGDVSRFSDPEKLCAYAGLVPSTQESGGKSAHGKITHQGSPILRWVLIECVWNHLINAEDTSLTRFFHRVARNRGKQKAAVATARKLLKVMYVLLKEKREFRDFR

SEQ ID NO: 378560 - protein, 414 aa, unidentified
MSAGVITAVGIDVSKYKSTVAARRPGGEVALLPFDVSHDVAGIKKLLEKLHSLEDEDGEIRVVMEHTGMYWRPVALALQQAGFFVSVVNAILIHNFSDNSLRKIKTDKADALKIANYGLTFWMDLREYSTEDETRQMLKIQSRLYERTTTTGTMLRNGLISLLDQTFPGANKLFLNEGRNTKGHVKWVDFVIRFWHKECVAALSLHTFADTFQKWCKRTGYRFSTSDAERIHTAARNAVATLPKNDSTKLLITQAAISLNTVYDSLHALRTEMNRLASLLPEYELVMAMEGVGKITGPQLMAEIGDVTRFTHREALTAFAGVDPGKNDSGQRLRKSVRTSKKGSPILRKTLFQVMDSLVKRSPVDDPVYAFMDKKRAQGKPYYVYMTAGANKFLRIYYGRVKEYLSTLTGNGEM

SEQ ID NO: 378561 - protein, 374 aa, unidentified
MSICENITFVGLDAHAKDINVAVILPGSGLVDAQWQIAHEPRSLRRLAKRLINMAPGAIRAAYEAGPCGYALKRTLDGLGIACEVVAPSLIPVKPGDRVKTDRRDACKLATLFKGGLLTLVHPPNPTEEALRDLMRAREDAKKDLMSARHRLSKMLLRYGLRSTETKNWTLKHRAWLKRLRFDARHAQQVFDNYLLAIEQVEERLKALDAHVEEASADEAYAKQVGWLRCLRGVDTVTAMTILAELHDFRRFTHPRDLMAYLGLTPSEYTSGSRTKRGAITKAGNSHVRRVLIEAAWSYRHRPAVSALLRKRRQGQPPAVLAIADRAQHRLHQRYYRLKEGHRKPHNVVAVAIARELVGFIWAVLHHEHASPAA

SEQ ID NO: 378562 - protein, 412 aa, unidentified
MDVYCGIDWAEDHHDIALADRDGNLLARRRISDDAAGLTVLLALLAEHGDTPDDPVPVAIETPRGLLVACLRATGRQVYPINPMSVARYRDRHSVAGRKSDHGDSFVLANVLRTDMHAHRPLPADSELAQAIAVLARAQQDAVWDRTTAHNKLRSHLREYYPGFLAAFADARGGILRPEARAILAAAPTPADAATLTLTQLRGLLRTAGRTRGIDTEATRLREAFRAPQMRQLPLVEAAMGRQALALLGQLNAACAAAGDLEQAAAESFNLHPDAGIITSFPGLGALTGARVLAEIGDDRSRFQDAKGLKAYAGAAPITRASGKTRSVTHRRIKNNRLNAAGYTWAFSALTASPGARAHYDRRRDAGDRHAAAQRNLFGRLLGCLHRCLTTGQHYDENIAFPTTPEKLPKAA

SEQ ID NO: 378563 - protein, 346 aa, unidentified
MMEYVGLDVSKEETSFCVKDCAGKVLASGKVASDPQALFEGLREHCLCPDTIVMETGSLSNWLARELLHLGLKVDVIDARQAHAVLRLQHNKTDANDAAVLADLARTGFCRQIHVKSDKASRMRVLLKARDHMVGQHRSRQNTIRGLLASLGHRLPKGAGKFARRVKAVLDNHRDLAVIFDPMLDEMAALQKSIEELDRAVAAAAKHSAACRLLMSAPGVGPVASVAFAATMDDPARFAKSRSVGAYLGLTSRRLQSGEMDYSGRISRHGDKMLRALLYGAANSFLSVVHRAHPLKDWARRVKRRSSHKKAVVALARKMAIILHRMLITGEAFRWPKENQKEAFSA

SEQ ID NO: 378564 - protein, 354 aa, unidentified
MSEKLNSEIAVIGIDIGKNSFHLVGQDRRGKIVLRQKWSRGQVEARLANLPPCLIGMEACVGAHHLSRKLKAFGHDARLMPAKYVRPYSKGEKNDYRDADAIAEAVQRPTMKFVATKSADQLDLQALHRVRERLVGQRTGIINQIRAFLLERGIAVRQGLHFLRAELPGILAKRTDVLSPRMLRVIEDLAGDWRRLDERIDALSDEIMTLARQDKGCERLMTVPGIGPIISSAMVAAIGSGDAFSKGRDFGAWLGLVPKQMSTGDRTILGSISKRGNRYLRTLFVQAAWVVLVKIKPEGWERYGLKSWIEAAQQRLHRNVLAIALANKLARIAWAVLHEGRAFECVKTNASQPV

SEQ ID NO: 378565 - protein, 470 aa, unidentified
MNSEQTIFVGMDVSKGYADLHAINCSRSVLAKTRVDDTATGHETVRHLVREWLQQTPTTHVLVGVESSGGLERNWVSMLRTSGTRVTVITLNPLIVKRFLSQNLHRSVTDAHSAAGIARYLADGMRQYQEQNDPGEDGLREIYRCVGAANHRLTEVKNQLQGLLPRVHPDLVQFTRSGFPHWVLDVLERYPTAAALSRARVSALARIPHVTEARARTLVTAAKESVASQTDAYTGSVIIVLAREVRNQMQVIDDLKAALCAALGDDRPVHVMTTIAGIGQWTAVSLRIEIGRIERFPSAEALTAYAGLDPRIHQSGDTQRRMRISKCGSRRIRAALYMATLTAIRVNPVIAAFYERLRAAGKPTKVCLTACMRKLLHIIYACWLSDQPFDPTYEEKRRAERPVQHVRTTQQEGSVTDTAHHIVTSAAITAPVSRREAQRRKAAAVPQTRITRVMRGLGAASRRLSSEGGR

SEQ ID NO: 378566 - protein, 329 aa, unidentified
MYYVGIDISKRFIDVCLLVDGIKGKRKTKVLPNDPNSAQALAQWLILQKCDPSQAHIIMEATGVYHEHLAYGLHVAGILVSVANPHRVREFAKGMGILTKTDSVDAYVLASYGCLKQPDSWAPPSQEIRKLRALLQHRDSLLNDKRRVENRLGTLKSTIALEEVVTSLESMVQHLKDELEHIEHLIKAHIEKHPGLKKDLALLKSIDGVGEQIGWNMLAIIRGNHFRSAEQVAAYLGVIPVERRSGTSVHGRASLSKIGPPGIRAKLYMGAIAAISHNRHVKAQYTRLLLKGKVKMLAIGAAMRKLVHLCYGVLHTQQPYDKNYGVVTD

SEQ ID NO: 378567 - protein, 391 aa, unidentified
MVCVGIDVAKDKHDCCILDSEGTTLVDCFTIPNNMDGFKSLLQTIQDCSQKSDKIKVGLEATGHYSYNILGFLLDNDLPVYVMNPLHTNLYRKSLSLRKTKTDRVDAKTIATMLLSDVDLKSYTDTAYHNEELKSLTRYRFDKVQERAKLKQSVSRLATILFPELEGLVSSIHGTSIYALLSEYPGAKQISEAHLTRLANILVKTSRGHYRKDKATHIRDAARTSIGSVMPAKSLELKHTIKLIQELTSEINEIEDAIRKIMDELKPPILSIPGMGFHSAAMILAEVGDFSNFNSPDKVLAYAGCSPSTYQSGKLTNCYAHMEKRGSRYLRYALYTATKYVCYWNPVFTEYLTKKQAEGKHYNVALSHATKKLVRLIYALQKSGKAYLAVT

SEQ ID NO: 378568 - protein, 420 aa, unidentified
MAPLSNQQFNAFVGIDWADTKHDICLQQAGDDRREFDCIPHQVTRINEWAKALHQRFGGPIAIALELARGPIVSVLQKHAFFTLFPINPAMLAKYREAFKPSRAKDDPTDAELALDLLLRHPERFSPLRPQSAGMRFLLSLIEQRRELVGDKTRFTNRLTNALKQYYPQALEWFDDIDTVLFCDFLTRWPTLPAVRRASRKTLETFFHAHNCRRAKLIEGRLESIRCAVSLTDDPGIVAPHRLLALMLVAQLRTALAAIDVFDKEIAAVARTLPDFDLFDSLPGAGPHLTPRLLAAFGEQRDRFKGADELQKYSGIAPVTERSGKKCWVHWRWQCPTFLRQTFVEWAGQTINKSFWAGAYYRQQRAKGSSYQAAVRALAFKWIRILYRCWQTGTRYDESVYLNALRKRGSSLLRNLELPG

SEQ ID NO: 378569 - protein, 327 aa, unidentified
MVDAATGGVLDEITVEATAEGYAELVEFADNHAILRAWAIEGTGGHGAGLSRHLLESSEIVIELDRPKRAARRNGAKSDPLDAIRAAREAMARPRLGTPRAGGERQALSVLLAARRSAINASTEAQQQVFSLVIAAPEPIRLKFRGQKLAAMLTTAANLRVHASWDTETTSTVVALRTLARRAHAMLKEARELQKAIVAIIRSWRPDLLEEFGVGPIVAATVLCAWSHPGRIHSEAAFAMLAGVAPIPANSGQITTRYRLNRYGDRQLNNALHTVVQSRIQYQPATRDYVARRTAEGKTNREIKRCLARYIARDLYRLLENGAAAAA

SEQ ID NO: 378570 - protein, 312 aa, unidentified
MDKAPVFVGIDVSKRRLDVHLRPAGESFTIDYDAEEVAALVERLLPLEPTLVVLEAAGGLEVRIAGALAAAGLPVGVVNPRQVRSFARALGRLAKTDRLDAKAIAHFAEAVRPPVRPLPDEATRHLGALVARRRQLLEMLVPERNRRQAADRALHQRIDAHLRWLEEALAEIERDLGGAVRDSPVWPAKEELLRSVPGGGPVSARTLLAQLPELGSLTRRQVAALVGVAPFSRDSGKMRGRRTVWAGRAALRACLHMAAVAAARGANPMIAAFYRRLRLAGEPAKLALTACMRKLVVTLNAMLRTNTAGKQA

SEQ ID NO: 378571 - protein, 348 aa, unidentified
MNAGYAGQRQFVGVDLARRRSVITRMDTEGTVLECVQIDNSPAALVAEVGKAGPAAPVAVEATYGWYWAVEALQGAGFEVHLAHPKGNASMHNRRVKTDARDATELARLLRMGDLAESWIAPPVVRGRRELVRHRHKLVKSRASLKASVHAVLGKCGVLLPLNDIFGPVGLAALAAVELPQPYALRVASQCRLITAISTEVDLVETAIAAEFKDDPGYRNLLSINGIGPVFASVFVAEIGDVTRFPTPQALASWAGLTPRHYASDDKTRRGHITKQGSRLLRWAATEASQRIREPYLADKRRLITDRRGRTAANISKVAAGRRLLHVVYYTLRDGHARCLDQPSRQPA

SEQ ID NO: 378572 - protein, 454 aa, unidentified
MKKSPSTSLDTLTCIHPNAAGLDIGSREIWAAVPGDRAPEPVRMFSTFTPDLVRLADWLVACRVETIALESTGVYWIPVFELLEARGFKVSLVEPRQLKRVPGRKSDYLDCQWIQKLHSLGLLTASFRPDGEMCALRTYLRHRAQLLQHRAPHILHMQKALQQMNLQLHHVLSDVTGVTGLKIIRAILAGERDPLKLAHLRDPGCKSSEDRIAQALTGTWRPEHLFALKQSLALFDFYTQQVAECDTTLERQFAAMKPRWPGEVPTDLPPLKPDSHSKNQPSRRTRADLLRLTGVDLVAVHGISASLAQTILAEIGTDLSAWPTEKQFCSWLGLAPHTDISGGRVLRSRVLKTDNRAGQAFRQAAASVLRSQCAFGAYYRRKKAQLGPMPALVATAHKMARTVYYMLKHHVPYRDIGADAYEKSQQEREVATLKRKAAKLGFTLTLHEPILATT

SEQ ID NO: 378573 - protein, 424 aa, unidentified
MKFKMQDKQNQLIERISDRHLVVGVDIAQQFHVARAVNYRGIVVGDPLTFENNEEGFNRFLEWINKLKAKNSLDTTIVGMEPTGHYWINISKWLSNEKIDVVTVNPHLVKRNKENRDNTQSKSDKKDALVIADMVKNGYYAFVRSSPESFEKLRVLMSNRDVIVKRLVSSINQLNRWVDVVFPELRQVFKDVKGKGAIATLRLFPTPIELQSMQPQDIVGKWKSVMKRQPGLKKAYLLKDLAKRSIGTHQALDAYKLHLEQLLEEYDLATTQLERVEQEVTNVLQQIPFAKKLLAIKGISEISLAGILGEAGDLSGFAHGNSLLRHAGLHLSEASSGKWKGQIVISKRGRSRLRRFLYLATMSLVMNNPEFKALHANNVKVKKIKKMKSIMKLCGKLARLFVGIAKRNETYSPEKLQPLTTLAA

SEQ ID NO: 378574 - protein, 362 aa, unidentified
MRIIGCDLHARQQTLAMLDTTKGEVVELTLKHEGDNVREFYSSLPRPVRVGIEATGSMQWFLNLMEELGIECLVGHPAQIRAAEPRKQKHDRRDADLILKLLAENRFPAIWLPSKELQDLRSLLRHRHQWVRMRTRIQNALQSIALANGLRRGTALWSHDGQSRIASLPLAPHTAYRRSELQALYEKFEDEIEKLNQRVEEQARKRLGARLLMTHPGVGPITALATEVFLGDPARFADSKALASYVGMIPREYSSGGRQRLGGLSKQGNPLLRFLWGEAGAHAARKDPELQRFYRRKLVQKGLGKASVAVARKLGIRLWIMLRDQIAYNEFCRRGQKQQKSSDACAGMPETRYGAKSHRPVD

SEQ ID NO: 378575 - protein, 316 aa, unidentified
MTSKRFLGIDVSKDWLDIAVDGQDRPVRIANAPHPIAAFLAGLCRDEIGLIAFEPTGGYEQILRRALVAAGLPFARVHPNQLAAFRTRSGVQAKTDARDARLLADFAATDLARRGLRPLVEGDEVLRELAVRRRQLVDLLQAERCRAALARTDTVRASLASVIDALEASLEALEAAIAQRIAAQTELAQRAALLQSLKGVGPVTVATLMAELPELGQLSGKEIAALVGLAPRTRESGKRRARATTGHGRPGVRRVLFNVARTAIRWNPILRAFYQRLVHERQRPGKVALTAVMRKVLVILNAIARDNQPWNHAAAA

SEQ ID NO: 378576 - protein, 337 aa, unidentified
MYQHYLGVDLHRRRSYVVLMDYQGKIIDQRRLSNDAVADYVTQLPESTFAVLEATGNWSFMYDILEAGTDEVVLAHPKRVRAIAAARVKTDKIDATILAHLARADLLPTAYAPPAEIRELRDLVRHRSKLVRERTRHKNRIHMILSRYNLHSPCTDLFGKQGRAFLEEIRNLLSSIHQMMLDQYLDLIDSLNERIKSVNQVIRAWAKDDPRAQLLISMPGIGIYSAAVLVAEIGYIQRFEGPKQLCSYAGLVPSTRSSDTRVRHGRITKEGSPWLRWIMVSAAQRAACASPRLAVYFERTLQQHGKKTARVALARQMLSIVYYMLLRKTPYQERQQG

SEQ ID NO: 378577 - protein, 365 aa, unidentified
MNFIGVDLHKKLITVCVMNQNLKVVARKTLSCDQPDQIVEFFRQFAPFKAVIEATASYLWLVELLDPLAEKVALANPKKLRIIAESTKKTDRLDAQILAEFLARDMIPEAHMPTPRQRQHRILVRHRQYLRGRMTCVRCKIRHILADHNADRKNLFAPTGGGKAYIKEVALSDAERFVIRQLWSEYEDLQAQLLALTKKLKAFAAKAPAREAKARQMLKTAPGVGFVTAEVILSELGDVSRFRNAKAVCAYAGLVPVVKQSGGKRSKDLCISKQGSGLLRWALVESAWRLTSTSLRWSALFARFKARGGNKRAIVAVARRLLCVLYAMLRTSTPYKYAALDIKPDKPPRKLRLVRKSTVEQSVTT

SEQ ID NO: 378578 - protein, 365 aa, unidentified
MQKISTMRRNGKNIFKGQLTIGLDLGDRFSAYCVLDEAGEIILEQKLPTTPEAMKQTLGKMRRSRIAMETGTHSPWVSRLLKALGHEVIVAHAQNVRLITKSRRKDDRLDARTLARLARIDPELLSPVQHRSAQAQLHLTEIRARAGLVSARTALVHAARGLVKSYGERLRKCGTQQFRRETMSGLSAGLREALEPLLQEVESLNERIQEYDQRIERMAKERYPETALLKQVKGVGDLIATTYVLTIEDPHRFRKSRDAGCFVGLQPGRRNSGESEPQMHISKEGDEYLRTLLVQGAHYILGPFGEDSDLRRWGQKLAERGGKNAKKRAVVAVARKLAVLLHRLWVSAEVYEPLHNSQKVMSAVA

SEQ ID NO: 378579 - protein, 391 aa, unidentified
MISVGIDVAKDKHDCFIINSEGEVFADVFTIPNSLGGFQHLLQRIRDCSSHQGKIKVGLEATGHYSYNILGFLLNNGLATYVLNPLHTNLYRKSLSLRKTKTDRVDARTIAAMLLSDVGLKPYTDTAYYNEELKSLTRYRFDKVKERGRLKQSITRLVCILFPELEKLVPTLHIVSVYALLEEFPGAKQIAEANLTRLKTLLYNASKGRYGQDMAVKIREAARKSIGSVMPAKSLELRHTIHLIRELDAEIDEIETAIQRIMNELHSPITTIPGIGSRMGAMILAEVGDFSRFGSPDKLLAYAGLSPSTYQSGQLKNCYAHMEKRGSRYLRFAIFNAAKYVCHWDRIFAAYLAKKRAEGKHYNVAISHAAKKLVRLIYALEKSGEPYRLAA

SEQ ID NO: 378580 - protein, 335 aa, unidentified
MEFTYVIGTDVSKNELDFAVMHGKTFLFHKEIANNPQDINAFLKELAKLPGFALNSAVFCMEHTGIYNNHLLCCLHKKKANICLEAATQIKNSLGNIRGKNDKIDAIRIAEYAYKNREELRLWTPKREVVQQLAHLATTRTRLIDAKKMLQTPLKETGAFVSKHIARQNESVCAKTLNAIEADLKKVDQLMDKIIGSDEELTRVFTLVTSVTGIGKVTAVQVVVTTNEFKDICNPKQFACHAGVAPFTDDSGKVTKKARVSPMANKKIKTLLHLAAMVAIQFDPEIKLYYLRMVNVEKKNKMSVINAVRNKLILRIFACVKQNRLYENKYQRLVA

SEQ ID NO: 378581 - protein, 419 aa, unidentified
MSNSNISKRLAQVKPGTLHAGVDLALDHNVVTLVDENARQCDRFSFPQDADGYRYFLTRLEKVCQKQGCSQVVVAMEPTNYFWKLLANWLEEKGVVYHLVNAYTVNKHREGDQIDRSKDDPRDSFVISDLSRTGKYTDTQLQRGCYAELREYAALYYQVMKSITREKSILWGLVGQVFPELRQVFKAFDGVTASALLKTCPAAVSIRALSEEDFIARVSTAFTGKRLVLSKLRHAYRLASTSIGLVDGIQANAFAVRLHLNLMETLQKELLQIITALKDCLQKVEAAKYILSIKAISTLSVALILAEIGDPERYSSAGQLVKLAGIQPVPTRSGTKQRSSTPMSHQGRPGLRTALYFICLRLIQVDSRFQEVYRYLQKRAKNPLTKMQALGVLMNKLLHILWALISKKAPYDPHFLSAV

SEQ ID NO: 378582 - protein, 264 aa, unidentified
MSWAHTNLLGEYDFSDQKLKDAALLLDGKVKTKKFNNTFKGFAELKQWLASKSIFTANVCMEATGGYEASLAEYLYDNGFKVSVVNPARIKGFAINKLSRVKTDKADCELIAYFCEAMKSDLWRPIAKHIQELQQWIKRLDNLIANKIQESNRIKGAVPKVVSHIDFLNIEIKEVEQLIADHIKQHKDLEDKHELLSSITGVGDKTIAIVLAFLDAGNFNSAKQVAAFVGLNPKPRLSGSSVHGVSRISKTGIQIYARLFICQL

SEQ ID NO: 378583 - protein, 436 aa, unidentified
MTSHCQFYYYKSKEVIFLSFKIIRKNCCGLDVHKTWIFACIGITDSNGRTEYKQARFSSFAKGLQVLCDWLVKYNCNDICMESTGKYWIPVFNILEKNNLWVTLSHPKYTKPQKGNKTDRKDAKWICDLYMCGMVKPSFIPPADIRQLRDLVRYRFKLTCMITGEKNRAHNCLTVSNLKLDDVFSDIFGKSARSITEHILQHPGEFFDVQPFVDRRCKTPIEEIQAAVDGAISPEQAVKLRQCLKHIDELEDHKAEIEREIFRLSDKYEGALNLIRTVPGFDKNPHTAIQVLSEIGGDMSVFPTAKNLVSWAGCCPRNDQSNHKIKSTRISRAGTYFKPVLVQVANALIKSKKHPEFTNRYRRIKARRGHKKAIIAICRMILTAIWHILTDLKPYTPEGFLESRPVNESKVLTASQALNLMRQRGYIIKDDAPAMN

SEQ ID NO: 378584 - protein, 414 aa, unidentified
MEMLYPRCAGLDVHKKTVVACVMLTDGQGKCQKEPRTWGTMTADLLALSDWLQERGVTHVAIESTGGYWKPVFNLLEGSFEVLLVNPQHVKAVPGRKADVSDAEWLADLLRHGLLRASFIPPVAQRELRDLTRFRSTFIRERATLVNRVQKVLEDAHIKLASVASDVMGASGRAMMAAIVAGHTDPETLADLAKGRLREKREPLVKALGGRIKDHHRFILAELLCQIDNLEETITRFDQLIEEYCAPFEEAVALLDTIPGVGRETAEIIVAEIGTDMSRFPTAAHLAAWAGVAPGNNESGGKRRTGKTRKGSKPLGVALNQAAHAAARTKNTYLAAQYHRLARRRGKKKAIMAVAHSILVIAYHLIQRKEPYRDLGADYFDKRRPEALANHLVKRLEGLGYTVSLEPQAIAVPS

SEQ ID NO: 378585 - protein, 381 aa, unidentified
MENIAFDSHRRYTLCSVADGTGRILQEARIDHASGALSGFLRRWTRGSPVAVETIGNWYWIVDEIEQAGMVPRLVHARKAKLMIGNVNKTDRLDARGLNQLQRAGTLPTVWIPPGELRDQRDLARTRMYLVHQRTCLKNRIHATLARYALAVPGVRDPFGKRARSGLDQQVMRLPECTRFATQQQLAQLGSLETAIHQLDERIKVVFVETQTARLLQTMPGVGLWLGVVIMLEVGDVDRFAGPEKLASYAGTTPRVHSSGGHTRYGSLRSDVNRYLKWAYVEAANSIALNCAHHPERHTSQLYQRLLHRKGYAKAIGAVARHLAEATFWILHKQQPYQDPAFGHVSPTDAPARCSHESLVDSRNDCDRRLKQNHAPPRAKR

SEQ ID NO: 378586 - protein, 368 aa, unidentified
MQQIYYSLGLDIDKSSFKACLKAKEANNKSIVKATKTFNNNLLGFKELDGWIKKHLKLSSAPLKIIMEATGVYHEYLAWYLYEHNYQVHIILPLRAKRYMQSLGLKSKTDKIDAHGLADMAMQQELQQWKPCSKNILLLRSLTRQLEMLQETRTAFKNQLESVTHLAICDKTVIKNLKSLIKKVEKEISKLKDLIEKFIRKDSVLASKFKLVENIKGLGVLTFATLVAETGGFELFENQKQLVSYAGYDVVENQSGKYTGKTKISKKGNTHIRRIMFMAAFNMVTYKVNPFLQLYNRVYNRTKIKMKGYVAIQRKLLCLIYALWKNDSPYNPDYQAKSPSGNHDPKPLFSVGPIGPETKVATDMQWLR

SEQ ID NO: 378587 - protein, 338 aa, unidentified
MEVAVIGIDLAKDVFQVFGVDARGRAVLTKRLRRPQLAPFVAALSPCLIGLEACASAFHWARQFQARGHTVRIISPQFVKPFIRGNKNDGNDAAAICEAVQRPNMRFVPLKSVEQQDVQSLHRARQRLVNHRTALISQMRGILLDRGIVFAKSATRARRFLPLILSDPTSELSPLMRETLASLLELLRELDARVKRFDRQIADVFQASPVCQRIAQVEGVGPKTATAVVAAVGNAHDFKNGRHLAAWLGLVPRHRASGDRITLGAISKRGDQHLRTLLVHGARAVVRAAARKTDARSQWVNALVARRGVNRAIVAVANKNARIIWAVLHSGEAYRSAA

SEQ ID NO: 378588 - protein, 525 aa, unidentified
MSDRQVAADISVAVIHERAKRFCTARRREVVNNCAAGENFAGGRPAPARSQSQSPNPKRVIGRPLAEPEALAPTSYRKRPQEGHYISTMDGRAKRRKSQKQQQKTMNDSTQWQPHRAFGALDWASEKHSVIVVNPAGKVIEDFEIEHSALGWKKFREKLQPYGSIPFAIETSQGVAVEQLVEAGMLVYPLNPKSAQAYRQRKAPSGVKDDRLDAWSFADALRVDGQDWKALRPEEPLIKELRLLCRDEVTLIEQRTAFVNQLRHALAEYYPAALEAFKEWTSVSAWMFLQRFPTPELLAQAGKGQWQKFLHSRRLWGSDQGPRRMEIFAHATEFAGTAPTLKAKSLLALSLVQMLFTIEKQLALYRQQIEALFARHPDHDLFGSLPGAGPKIAPRLLSEIGDDRQRFGGDPQNLQCLAGSAPVTKRSGKQRKYWHVHQRWACDKHLRHAIHLFAEQSLSRCAWAEIYYQHHRQKNQSHANALRRLSHRWLKIIYKMWIDRTPYNAELHHRNQLQHGSWVFQLQQS

SEQ ID NO: 378589 - protein, 369 aa, unidentified
MQRKEISFKGQKVFIGIDVHKDSWRVAIAPEVGVVKGHSQKPSARELLDFLKKYYPDGEYHAVYESGFSGFSTYYALQDVGIDCIVIHAADVPTTQYEETMKTDKVDAAKLVRSLKSGLLTGIYIHKRDDIDARSVVRLRKTIQKQLGSYKSRVKHLLHSNGVTFPERFSTPGSHWSKVFIRWLKEEVVLLSATRTSLDLLIVQVEAIRKTLLMATRNVRELSRSERYRHGCELLTSIPGVGVNVAMTLLTEIGDINRFHNEKEFASYLGLVPTSHSSGGKVAHGEKTFRGNKYLGPQIVEASWVSIYRDRGLGCAYINYKKRMKPQEAIVRVARKLSNIVFSVLKTGKKYKPYEWDEKQKHTDLQATS

SEQ ID NO: 378590 - protein, 340 aa, unidentified
MVEITRIAVDTSKSVFTVHAVDAQARPVLRRNVRRQELVAFFAKLAPAEVVMEACGGSHHWARVLAGLGHRVRLIPAQYVKPFVKRGKNDRNDAEAICEAAGRPGMRDVGIKSAETQGRAMLLSVRELLVRQRTQMVNALRGHAAEMGLVAAQGDKGLAALRAEIAGDTALPQPAAEALHLLGSEVDRIEARLAEADKRLMAQFKADAAGRRLADIPGVGPMIALSFVLRVEATQFASGRHFAAWLGLVPRENSTGGKQRLGGISRAGNERLRQLLVLGATSVIRHAKPGRPGASAWLLALLERKPRKLAAVALANKMARVIWAMLTSGETYRRQTPVAA

SEQ ID NO: 378591 - protein, 334 aa, unidentified
MEQITTVGIDLAKSVFSLHGLDGAGRVVFRRTVRRDQLLEVVAGLSPCLIGMEACSGAHEWGRRFQQHGHTVRLMAPKFVVPYRRSGKNDGNDAEAICEAVTRPSMRFVPVKSAEQQALLAMHRVRQGFVVERTATINRLRGLLTEFGVVLPLRAITVRRQAAAAAENLPELARHAIGDLLEQLRVLDERIGGYDREIEAQAKLCEPAQRLMKIRGIGPTTALAIVATVGNAREFKNGRQFAAWIGLVPGQYSTGGKTRLGHISKRGDAYLRNLLVQGARSVLHTASAHLDPVSRWALELQPRRGYYRTLVAIANKNARIAWALLAKNETLRTA

SEQ ID NO: 378592 - protein, 339 aa, unidentified
MQVSTIGLDIAKNVFQAHGVDAGGKTTLTRQLRRGQVIGYFEKLPPCLVGIEACATGHHWARELTKLGHTVRLMPASYVKAYVKRSKNDAADAAAICEAVTRPSMRFVPVKTIDQQAALTLHRCRDLLIRQRTQLINALRAHLAELGMVAATGKAGVKDVIAIVTGTQLPEPMRQALQALVKQLAALQEQIGELERSIHAQHRASDRSRRLETIPGIGVIGATAIAATITDPSAFKSGRELAAWIGLVPRQNSTGGKERLGGISKQGDRYLRRLLVAGGMSMIRHARTHPDKHPWVMKLLAKKPAKVVAVALANKMARIAWAVLAKGGSYRAPALVAAV

SEQ ID NO: 378593 - protein, 343 aa, unidentified
MNSTTIAVDVAKSVFEVAVSEQPGEVRERQRLSRERFRRFLAERPPATVLMEACGSAHHWARHAQTHGHRAVLVPPHVVRPYVLRNKTDRTDTKGLLEAFRNEDVRPVPVKSETQQALAALHRLRSMWLAARTARINTVRGLLREFGLIMPIGAHHVVPHVATLLEDADSAVPGLLRPALADAATDIREIEARLRAIERQLESAASENVVVGQLRTIPGIGLLTATALVATVGDVARFPSGRHFASYLGLTPREASTALRRRLGAISKRGDTYLRMLLIHGARSVLCHAKTKTAPPPDRLRAWALQLERLRGHNKAAVALANKLARIVWAVWRHGQDYRMPVV

SEQ ID NO: 378594 - protein, 412 aa, unidentified
MRIVGLDVSRSVAEIAYLEGGVLHAGGRAGLKRDELERFATKLRSTDHVVLEATGNTAAIVNVLRPHVARVAIANPLLVLLIAEARVKTDKIDAAVLAQLYASNFLPEVWMLDENTLALRRQVSRRSQLVRQRTRLKNEVHAVLAAHLIERCPATDLFGKKGRVWLSAQPLPMDERLGVEQRLRELDRLGEDLHDVDKALALASIGDERLRKLLTITGVNTTVAIGLLSAIGTVERFPNPEKLVSYFSLNPSVYQSGPTPARHGHITKRGRSYARALLLEAARGAAQAPGPLRAFFLRLRDRRGQQVAIVATARKLAVIVWYVLTRNEPFAWDRPALTAHKLRALELQSGMPAQHGPRKGMAAAYSLKSMRDQERAVAEHAERAYQRLFSRWKQIRPRGHEAPVLWPPTPSS

SEQ ID NO: 378595 - protein, 338 aa, unidentified
MKLYCGIDLHSNNSYVVLLDEEDKIVYQKRLPNDLLGILETLSSYKNIIEGIVVESTYNWYWLVDGLQAAGYKVHLANTTAIKQYAGLKYTDDKSDAIWLARLLRLGLLETGHIYPKEKRGIRELLRRRMFLVRQQTMSILGIQGIITRYENIPLSGDKIKREDDEKILRYVQNPQVRLAVQSQLKILRCIMDQVNHLEKNILQEIKNDVLFKLVKTLPGVGPILAMTILLETGEIKRFENAGNYSSYCRCVESKRISNAKKKGENNRKNGNAYLGWAYIEAANFAIRYHEPIKRYYQRKLSKTKRVVALKTIANKLSKACYFILRDGVEFEMKKAFG

SEQ ID NO: 378596 - protein, 344 aa, unidentified
MGVNIGVDTHKATLAFAAADDVGKLIETKQFSNDPVGHRKAADWIARFRPPRTIGIEGSGLFGAAFTWFLFERGEDVKEVPPGLTFRERNRKRSDGKSDPVDALAIARVVAREQHLPIPKRAGLMVDLKLLNTYREHLIRQRTRLANYAHRDLVILRPGYQRTVPSLRSMKNINQALALVQRDTSIRAELITERLQQILVLDTQVRQIEKRIAGMLESTQTSLTQLKGIGVFVAATILGEVGDVGRIRSRSAFASFSGTAPLKASSGKTSRHRMNRGGNRQLHRAIHTMAKTQSRVVPEAREFVARKMQEGKTYKEALRSLQRHLSNVVFRTLVEDAKRVQTMT

SEQ ID NO: 378597 - protein, 368 aa, unidentified
MNYIFIGCDSHDKTLVNKIALNREASQTKRFAAGRAGRRKMMECLKAQSQAAGNAKVVVAYEASGNGFILCDELREAGFECHVLAPTKIERSAKQKRNKNDDRDAERLLDIVRGHYLAGTKLPSVWIPDRQTRDDREPVRGRQDLSQKQSAVKTQLQMLVKRHGIEKPEGIGASWNKRYRQWLQALSEDAAQAWGMKQALGSLLRQLEFLEKEIEQLNEAMEQLADTRRWKPVVQALRKEKGVGLMTAMKYATDIGDFSRFRRGRQVGAFYGLTPSSNESGENNDRKGHITREGAPSGRQVLCQSTWSRVRHDEHERAVYQRLVLKNPKKKKIALVACMRRLAVRLWHVGFQAQLQMKAAQVENGTQV

SEQ ID NO: 378598 - protein, 313 aa, unidentified
MHEEVFVGIDISKDQLDAHVLPKGMHTTVKNDTQGIDSLIEILHAETPMVIVMEATGGYEITVAAQLGLAGLPIAVVNPGQVRDFAKGIGKLAKTDAIDAYVLARFAQTVRPIPKPLPTEDEKQIKELVTRRKQLVDLRASEKNRLHRARSNRVQRSIQTVIAALDKEIEDIDKDVDDLIRKSPLWRETEELLRTFKGVGPITARVLMAKLPELGHVSRHEISRLVGLAPLNKDSGKKKGKREISGGRADVRSTLYMAAVAAITSNVVIKPFYQRLIEAGKPFKVAITACMRKMIVILNAMLKKKQPFQVVFP

SEQ ID NO: 378599 - protein, 330 aa, unidentified
MKQYDHVFGVDVSKKTVDITHVINQQFAHRQFTNDDAGMEQLMEWFKELTPEFDKTLFCMEATGLYCFTLTHFLAGHSIDTWIEHAAQIKKATALARGKNDKVDSQRIALYATKNIDRLRLWKPVNATLEKIRHLASLRERLVDTKKRLATPIKEFEDVGNLAMAKLLTKTIKSSLTAIDKDLKNIEIKIIDVINEDDNLKLLYKLITSVVGIGFVTAINLIVHTNGFTMLKDTRKLACYCGVAPFEYSSGSSIRGRTKVHYMANKKLKCNLHMASLTAVKLDADLKAYYERKVEEGKNKMSVLNAVKNKLLARVVAVVKKQQEYVKKSA

SEQ ID NO: 378600 - protein, 346 aa, unidentified
MEDMYYIGLDVHKKTISYCVKDAAGHVHREGKIGSTRRDLDAWIKTLPQPRMIAMEATIFTGWIYDHLLPHAEKVKVAHPLMLRAIAAAKKKNDRIDAGKIADCLRCDFLPECHMASTEIRDRRRTLRYRNLVLRQTVQMKNRVSGLLMESGVTYDKQRLHKMGYFNELFSTNEEISDSIRPLLRLGREHILRGQRLDRALTSSLERDPLLSERLRRLQTIPGVGPITALSWALEIGDYKRFQSVKEAISYCGLCSAEKSSADKVMRTPISKQRNKHIQHVLVEAAKMAPRYSHELALVHEKEILRGNRNRATLAVARKMVAYMLAVDRRQQDFVPAEEMAGRAVA

SEQ ID NO: 378601 - protein, 439 aa, unidentified
MRQVYKRCAGLDVHKKTVVACRVRIDEQGEWHQEVRTFGTMTCELLELVDWLLAGGVTHVALESTGEYWKPVYNLLEGCVEVLLVNAQHVKHVPGRKTDVKDAEWLAELLVHGLLKASFIPAKPQRDLRDLTRYRVTLVEERARVINRVQKVLENANIKLASVATDVLGVSGRRMLEALVEGTADAVTMAELAKGRLRNKIPLLQQALRGVVDEHHRFLLAQHLAHIDFLDEQIETVNEQIKKQMQEMPELSPLPPSASDDDGEATETSLAAPLTWQAAADILDTTPGVDQKAASQVLAEIGVDMRQFPTANHLSAWGGLAPGNRQSGGKRFHARLSDGNRQLRKIMVQCAWAAVRTKDSYFSSLYHRLAARRGKKRAIVAVAHSMLVSFYHMLSKRQPYHDLGADYFDQRSKGVKTDWLLKQLNKLGYTAKLEPLTAV

SEQ ID NO: 378602 - protein, 325 aa, unidentified
MDHTYYIGIDISCKTFDAALYSDNTHYNHSSFDNTAQGFEALLSWLDKAPSDLHLLMEATNVYWEPLAYYLNAKGATVSVINPKCIKGYANSLNIRSKTDIVDAKLIARYCAKEQPQAWLPPKETDRGLLLKLRQLEHLKGQHQSEQVRKTMLRDFDAIASCQRTLDFLATEILLIQAAIDDLITSDETLKHNAKLLASIPAVGKLTVPWLLAYLGDGSKFKKSKQATSFAGLTPMVHQSGTSVEKRARISKIGHSEIRKVLYMPAMGFSFGKYKEGAYQSFVSRLVNHGKPKMVVIVALMRKILAIAQAVLKSQRPFDASLHVN

SEQ ID NO: 378603 - protein, 318 aa, unidentified
MTEAQSYVGIDVSKGQVDVAARPTGQQWRVSNTEEGLSQLVERLQGLSPALVVLEATGGYEVPLAAVLGTAGIPVAVVNPRQVRDFARATGKLAKTDRLDAQVLALFAERVRPAPHPLPDPQTQELNALLARRRQLVAMLVTEQNRLGMALPNVRPGIQEHIAWLEKRLEGLNDGMAKLLQQSPLWREREELLQGVPGIGPTVAATLLAELPELGTLDRRQAAALVGVAPLNRNSGALRGRRTIWGGRATVRAALSMATLVATRFNSVIRPFYQRLLAAGKPKKVALTACMRKLLTILNAMLKHRAPWQPLAFQAVRP

SEQ ID NO: 378604 - protein, 377 aa, unidentified
MQTRSFIGMDVHKATISISIAEDGRNGPVRLLGVIPNAPEEIAKMAKRLSRHGELDFCYEAGGCGYGIYRQLTALGHRCMVVATSMIPRKPGERIKTDRRDSQKLAILHRSGDLTPVWVPDATHEALRDLVRARVDATMHLMRARQQLLAFLLRHGRSYTTGKNWTQRHRSWLAGQSFELPVHRIVFQDDVEAVWAAQERRDTLIDRIEEMVASWSLGPLVEALRGLRGIDMISAATFIATTGDLSRFDSPRLLMGYLGLVPSEHSSGGNVRRGGITKTGNREARRMLIEAAWSYRYPARVAKEKAEILVRLPKIIRDIAWKAQTRLCARYRALIAKGKKPTVVVAALARELAGFVWAIGQEMRVCVEPIEGHRMRA

SEQ ID NO: 378605 - protein, 387 aa, unidentified
MVQINDLSRSLAAFDPISTLVVVVEMSKASWLVSGVVPGVERQPLKKLEPDATALLRLIERWRNEAVRAGRPIRRIALAYEAGRDGFWLARWLIARGIEAHVIHSASVAVSRERKRAKTDRLDAAMLMRVFLGWLRGERGHCGMVAIPTMEEEDARRPNRERESLVNERSRIVNRMKSALARLGIRGFKPHLRKAPERLAGLRTAEGTGLPANIIEEFRRDMARLALVREQISSIEKTRAERLERAPDTGPHAMVRLLARVIGIGIETADMLVREILSRKLRDRRALARYAGLTGSPDESGLKSREKGLAKAGNARVRRGLIQLAWRFLMFQKDSALAQWYRTRTEGPSGARKTTMIVALARKLLIALWRLVTTGEVPDGVELRPAA

SEQ ID NO: 378606 - protein, 354 aa, unidentified
MDESSKTLYVGLDVHKDSIAVAYAPEDRGAEVVSLGSIGTRQCDVDKLIRKLQSKGATLVFVYEAGPCGYWLYRYLTRKGLSCHVVAPSLIPRKAGDRVKTDRRDAVMLARLMRSGDLTSIYVPGIEDEAIRDLSRGREDAMRDLKATKYRMKAFLLRQDIRYEGRATWNAAHLRWLSEVVCPTRAQQIVFQEYVRAVTEQHERLQRLENELHEEVKGWRLYPVVEAIQALRGVELTGAVILIAELGDLTRFDTPRQLMSYLGLTPSEYSSGERRRQGGITKAGNTHARRALVEGLEKLPAEVQAIGWKAQVRLCKRYRQLIARGKHANQVVVAIAREMAAFAWAIARTVPLAP

SEQ ID NO: 378607 - protein, 470 aa, unidentified
MKKSTRTTPLVSKGISKTEPIPKHLEQINQWAAGIDIGATSHFVAVPEGCTTTAVREFKSFTPDLYSLAEWLKECGIQTIAMESTGVYWIPVYELLEEKGFEVKLVDARRVKNVSGRKTDVLDCQWIQQLHTYGLLNGAFRPDNEICALRSYVRQRSMLIRSASRYIQQMQKALTQMNLQLHHVITDITGDTGMRIIRAIINGEREPALLANHRDPRCKSSKEDIEASLTGNYREEHLFTLRQSLELYDYFQEKIQACDSEIEKSLSGFSTNTLGKDFSVERLKFNKKKVSKNAPAFNLRKELYRLTGVDLLAVPGINNISALQLLSEIGFDMTRWKNSKQFSSWLGLCPGNKVSGGKHLSGKTKPSNNKAAATLRMAASTLYRSQTSLGAYLRRLKSRIGPMKAITATAHKLAIIIYNMLRHGVDYIESGQAYYDEKYRERMIKNLKRKATEFGMSLIENQINFAPNIN

SEQ ID NO: 378608 - protein, 414 aa, unidentified
MVEETIAWFAGVDWGSAKHQACLLGAQGAIVGEREFPHSGKGLSELADWILSMTGIASAVAVAVEVPHGPVVDVLLDRGFIVHAINPKQLDRLRDRFSIAGAKDDRRDAYVSADGLRTDRHLFRRLQIADPRLIELRAWSRLAEELQEERVRLSNRLHQQLWRYYPQMLKLTDDLTTTWLLELWLRAPTPAKAARLRVSAVERLLKQHRIRRANAEGVLRTLRQPAIKVSDGVAEAAGIHIHSLIVRLQVVNRELNGAERKLDELCTAIGETGAASEERAADRDVAILRSLPGIGRINLATLLSEASGPLSRRDYQALRTLSGVAPVTKRSGKSHVVVMRYASHVRLRNTVYHWARVAIQHDHESRTRYAALRRRGHSHGRAIRGVADRLLAVACVLLQRQTLFDRYFRQATTS

SEQ ID NO: 378609 - protein, 415 aa, unidentified
MTESTFLFFVGVDLGSERHQVQAIDAQGKELAGRSVEHGGAGVRDLLEWLAQVTQGAHAERVAIAMEVPRGAIIDALLERGYSVFSINPKQLDRFRDRFSMAGAKDDRRDARVLAHSVRTDGPHFRRLHSDDPRIVRIRELSRGEEALGQDLRRHANQLWSFLQRYFPAVLRLCPGADEPWAWALLRRCRALPSRAARLHPDTVRDVLRQHRIRRLSAEQVCETMRQPLPLAPGVEAAIAEQVLLLLPQLELLHRQGLQFQHRLEALLEELTVDQNFAEHGSLAILRSLPGFGRVCTATVLAEAFPLLAEKNYRALRALCGVAPVTKESGKTRVVSMRRACHNRLRNAVFHAAQVHSHHDPRAQQLYARLRHRRCTHARAVRGVADRMLALLCTLLEKQTRYNAACRGLAEAQCA

SEQ ID NO: 378610 - protein, 377 aa, unidentified
MWSASSEAQDGGVRVTVGVDTHTDQHVGVALDQFGRRLGARSVPTTPAGFAELVAWARDFGAIEQIGIEGTGSYGAGLTRWLRARGLAVIEVERPHRHDRQARRRRGKSDPLDAEAAARAVQAGTGSGQPKAGDGQVEMIRTLRLTRRSAMKARTQAANQLHALVVTAPDDLRARLRPLPLAGLITLVAAFRPVRAGPVLSTPVAAAKLALKGLAIRYRQLSAEIDALDVHLGQLVATAAPELLAVKGVGTDIAGALLVAAGDNPDRLRSEAAFASLCGVAPIPASSGKTNRHRLSRGGDRDANRALYLLTVGRMGWDPATRTYVTRRTAAGLSKPEIIRCLKRYIARELYRILTASAASPPHSTDGDVAPSSAIAS

SEQ ID NO: 378611 - protein, 392 aa, unidentified
MQVVADRAEAPTAIQTELRAIFVSLERSRSTWLITSLSPGGGEKMSKHSVQAGDIAGLLRRFAQLKEKARARTGRDFPIIVIQEAGLDGFWIHRVLRSEGIESHVVDAASILTSRRRRRAKTDRIDGETLVRTLMAFKRGEPRVCSMARAPTPQEEDRRRVCRERRTLVGERVTHVNRIKGLLFAQGVFGYEPLRKGRRERLEDLRTGDGRPLPVHLKAQIIRELDRLEVLLEQLKTVEAERDALLKPATDEAASPAVMLARLKGIGPETAAVLWTEGLFRPFDNRRHVAAYAGLAPTPWKSGSIDHEQGVSKAGNPRLRTTMVELAWLWLKNQPTSALSLWFHERVRRLGGRMRKTTIVALARKLLIALWRYTTAGVVIEGAVMKAAPATI

SEQ ID NO: 378612 - protein, 334 aa, unidentified
MHYVGIDLHKRDLVTAVEDERGPVGQPRRFPCRDESAILAHLSGLRPFRAVIEASASYRWLYDRLSPLGEVILAHPLRLRASIARPAKTDKLDAALLARLLRMDQIPESYVPPKAYQELRELTRARGRLSRSATEAKNQLHHLLTARNIEAPYRKPFGVRGRRWMRALDLGVVGNLQRDELLGRLEHYAAEQAHLDEALAEMAKGFPQIEALSDIRGIGLYTALLVVAEIGEPERFSQPGQVSSYAGLAARVYQSGEQDYHGHITRQGSPWLRWALVQAAMKAIGKDRKLANFYERVRKRSSRHIARVAVTRKLAEICWIRLRRWQRAQAAAEL

SEQ ID NO: 378613 - protein, 461 aa, unidentified
MPAMVPSAVGVKEGAGHGGGDDRRGPHKGSHTAVAVSGDEQPLGQVRVRASAIQAQRLLEWAAAWPERTWAVEGAGGLGHLLSQQLLAAGEQVLDVQPKLAARVRLLGAGAVNKNDPNDARSVAIAALRSRTQHEVRPDDHATVLKVWAKRYRDLGRSRTQTACRLHSALCELVPGGIGKEITAAHAARVLEQVSPLDAVQQARWELAADLLDDLRRFDARLGEAKKKLAAAVQATGTTLTEIFGVGPVIAATVIGEVRDVCRFASRDRFAAYNGIAPIEVSSGKRKVHRLSRRGNRRLNHAIHMAAVTQVRYPHSDGRPCYDKKLAEGKTAKEALRVLKRQVSDAFYKHLKADAARAAGTGSPGGQPGSDSVASAADSHPERQLFGQATPGPALTLRSAPCDDHARTPAGPGAARAGGAGPGLPALPAPRGRRGSGVKAGRQAVAAGDAQQPNGHMAGHR

SEQ ID NO: 378614 - protein, 348 aa, unidentified
MTLVGCDLHARDQQVAVLDTATGEIQERRLTHDGSSVEQFYAALPGPVTVGIESTGYSLWFHALLHRLGHGVIVGDAAKIRAMVVRKTKTDRRDAAHLLDLLRHDRFPTVWLPDPAVRDQRTLLAHRMRLVRMRTMVKNGVHAIALNYRLALGPSLFTRAGVTQLQALSLPPHTSCRRSESLELLSWLNTHIKGLDDQIETAAHAHPEAQRLMTHPGVGPLSALATVLVLGAVTRFPTSKHVVGYVGLAPAIESSAGKHRLGRITKQGNALLRYVLGQAGQAAIKRDPDLKRLYYAVLHRRGRSRAKIAVARKLLVRLYVMLRDQIDYQTFLQRAPAAARRKEMTPTS

SEQ ID NO: 378615 - protein, 543 aa, unidentified
MLRIRPHARTTVLRLKLHPPLADTVSKVIHPPARISSRISPQPAVNNFAAPKMKSSEKVLRSRHPCRGRIALGGSRSFVAYPTRIQQSLPARSAAPVPTSERTKACEAPGIRSTHDGATVHHRKANRMKNWKDLTHYAGFDWAKDHHSVVVVNAEGCIVADFEFAHSLEGWQSFAQKTSAWTTLAVAIETSQGAAVDQLLQREYTIYPVNPVAAQSYRERKAPSGTKTDHLDAWGLADALRVDGHGWKPLQPMDAITQQLRLLCRDEVSLIEQRTALVNQLQQALAEYYPAALEAFADWTDAFTWEFVLAFPTPQALVSAGKRRWEKFLHTHKLWRPETTEKRLKLFAQADQFRASEPIVRAKSQLAVSLCKLLCTLAQQLKLYRKQIEALFREHPDHDLFGSLPGARKVLAPRLLGAVGNDPDRYGSQEVLQCIAGTAPVSYQSGKINKVRIRWSCDKSMRHTVHLWADCFRKASGWGQAYYQKKRDQGMSHACALRCLGQRLLKILFRMLKNKTPYDAELHARNQHKHGSWVLKLLDSPAA

SEQ ID NO: 378616 - protein, 299 aa, unidentified
MGVDVSKQSVDVCVLSGDDILTETQISNTISCIESFLQSFLKKHSFSTSDVLLCAEYTGKYTYPLCLSCQKVGVDLWLENPYVIKHSGGLERGKNDRQDARKITRYARRYEDKVRLFVLPEKAMGSLRELVSEQELYIVDRNKYQAQLTDEKGFMNPQDYREKSERLNILLKDLKAAIEQIQKKIQKIIEGDETLSRQLKLLCSIDGVGERTAVKVIVETNAFRDFIDARKFCCHAGLAPFSYTSGSSIRSRNRISHRADKSIKSLLHMGALTAATRSKGELHEYYLKKVTCPKKTLQI

SEQ ID NO: 378617 - protein, 356 aa, unidentified
MKSNTQNAKIEAITEKTLVLGIDVGSETHYARAFDYRGIEYSKKPFKFSNTEAGFVTFKEWILDLKDRHKKDKVVPGMEPTGHYWFNLGKFLQDNEMKPVLVNPHHVKKSKELDDNNPTKNDRKDPKVIAGLVREGRYMIPYLPDGVYADLRTASNIRFQLQAELTRIQNRISRWFNIYFPEYKTVYGKPDAKSGMLILKAAPLPEDILMLGIDGVNQIWRDAKLRAVGKARAKTLIEAAEHSVGSKEGAVSARMEIRMLLEDYESRNTRLQEVMVLIEELVKGIPMAEKLLEIKGVGIRTVSGFLAEVGDISRFNNPKELQKLAGLALVENSSGKHKGETTISRRGRKRLSEVLY

SEQ ID NO: 378618 - protein, 400 aa, unidentified
MAGFMSDFESFVGIDVSKDKFDAYGIKGDEAKLFQFSTTMNRKGFDKLKGHLAAVSISSVLIGMESTASYHVNLFSYLVSEGYNVILINPLLVSNYVKMQLRKTKTDKKDAFVIAQFLRTNGGTLIQRVSLSLFSDLRDLSRQRESLVDDMTALKMEIKRLLNITFPELEHMTGIFTKAILKLLLSYPSAYSLRGVDLDHLTQTLIADSQGHKREAFAEALLKAAQSSIGTDSLAKDMILKQNIMLLLYLEDALQEITGMLIEMSRNLMEEDINILTSIKGIGNKAAATFLIEMGGSINQFERSGKIIAMAGLDPAVYQSGKHEGKGKITKRGNRHLRKIIWLMTTKVIQYTDIFNVYYLKRRKEGLPYKMAVLATAHKLIRVVYAMLTQRTTFCLQANS

SEQ ID NO: 378619 - protein, 323 aa, unidentified
MNKDITYFGIDISKDVFDVMDSYGHFFQFTNDYKGFKSFIKLLNKKSHCVMEATGYYHYKLAYHLIENNIKVSVENPLSVKRFIQMRLSKIKTDKSDAKMICLYAQSVDLKLWKGQTKNQIECLQISRLLSLYFKQTTALKNKIHGEDVLGNPSLLVVRSLKRSLKYKQKEIKNLEEKLTEIVKQNHQDLLTRLQSIPGLGRKTSIMLIVLTDGFDRFTSASELCSYSGLTPIIRQSGTSVKGRSRISKMGNKKLRNLLFMCSFTACKNNKACKALYDRIVAKGKSKKLALIAVCNKLLKQAFAIAKSGLIYDETFRSTLVRN

SEQ ID NO: 378620 - protein, 369 aa, unidentified
MTVYIGVDLHKTQFTVHVRVGDRIESLSEIKQYPTTAAGYTKFLERIAGYKAVDFAVKIGVESTGNTRFFKNQVEKAGAEVTVINTLKFKVINESTKKTDKHDASTISWFLSKDMLPESHICSKETENLRRLLKSRERLVRSIVGQKNEVHALLVSMGLDDELRSLQSKKGRQKVLDTLLSHSDLVLEAQSVKLIFQIIEQMIESVKIIEKHLSELTEDDAMVNRLMTIRGCGKITAWIIRAYTEDIGRFANAKKYAAFCGLVPWVQDSNESVRHGKITKRGPQELRTAYVQLVLGIRRCKDTWGWRIMQRLDYMKKNKGSGKSIVAAARKMAEIVWALLTEGQDFDSKKMMGTYKPLTLTVQALAAMN

SEQ ID NO: 378621 - protein, 352 aa, unidentified
MIVLGADTHKRSHSIAAVAAATGELLGEQTIQVGRRGFDALLGWARGVDDERVWALEDCRHVSGGLERFLIGRGERVLRIPTHLSATARRSSRQRGKSDPIDALAVARVVLQEGLGSFPAAHLDGPELDLRLLVDHRERLVRQRVALNSTLQWHLHDLWPELELPGSSLFYGRWAPRVARRLARAEQTMRVRIARDELRRIRELSQAIKTLEREIAALVTEIAPQLLAEPGFGPLTAAKLVGEIAGAQRFATPAKLARAAGVAPIPASSGNTQRQRLDQGGNRQINAALHRVIVTRARCHPETRDYIARRQAEGKTTREAIRCLKRYLARHVWRLLQPPHPGQGTPPSPSIS

SEQ ID NO: 378622 - protein, 350 aa, unidentified
MLIIGCDYHPAFQQIAFVDSETGELQERRLQHREEAEKFYRDLAAQGRKVRVGMEASGHARWFERLLAELNFELWIGDAAEIRTKRVRKQKTDRQDAQLILKLMLQDDFPQIWVASWENRDLRQLLWHRHRMVQAGTRIMNQLQAVALNEGLRCKKRLWREAGREQLEAFQLAPWASRRRQDLLELLDRLNPTITDLTQTIEQEVEKCPEAQRLRTHPGVGSLTALAFVLIIGRADRFQCGKQIASYLGLVPLEESSGNRRRLGHITKQGNSLLRFLLVEAAQVTVRSIPEWRSKYFHLAMRRGRKIAKVAMARRLAVRLYWMWRQGWNYEQLKKFGPHAGKPEHRDGVQ

SEQ ID NO: 378623 - protein, 419 aa, unidentified
MDVVVERCAGLDVHKDTVVACVGVPAPGGGRRSETRTFGAFTVDLLALRDWLLAHGVTLVGMESTGVYWRPVFYVLEDVVECWLLNAAHMRNVPGRKTDVADAAWITQLIEHGLVRPSFVPPPPIRELRALTRYRKTQIEERTRETQRLDKVLQDAGVKLSSVASDILGKSGRDMLDALVTGTRDPDVLAELARGRLRAKIPMLGQALTGRFGPTHALVVGEILAHIDYLEEAIGRVSARIEEVIAPFTAERDLLTTIPGVDQRLAEALIAEIGVDMTRFGSASRLASWAGMCPGQHESAGKSRSGRARHGDSWLQRHLAVAAMAAGRTKDTYLAAQYARLVGRRGKARARKAVGHSILVAAFHMLAGGVPYEDLGGDYYLKRNSPERRARKSLSDLKAIGWTVTENPDSVTCRPPRAA

SEQ ID NO: 378624 - protein, 452 aa, unidentified
MAKKREKRECKAVVLEPDAAGIDIGAEEIYVAVPPDRDEESVRMFSSFTCDLHALADWLQQCRIRTVAIESTGVYWIPLFQILEARGFEVYLVNAHYLKSVPGRKSDVSDCQWIQYLHSVGLLRASFRPCQDICAVRSLWRHRGSLLQMASEHIMHMQKSLSQMNLQIHHVLSDITGASGQAILDAILAGERDPVQMAQLCNCRVKSPREKVVKALEGNYRPEHLFTLKQSLDGYRYYQKLIAELDREIQRLMQTLPSAVETGQEIPQRTKHSAFQRQGNDPGFDLRGQLYRIAGVDLTDIPGVSAVTAQVILTEVGTDLRRFRNASAFASWLGLCPENRVSGGKILSSKTRKIKSRAALALRLGANSLCRAKGYFGEFFRRMRAKLGTAQAITATAHKIARVLYHVLLTKEPYTETVFHKCDEHARRRAEMRLRKHAALLGFQIVPVNPAA

SEQ ID NO: 378625 - protein, 310 aa, unidentified
MDCYIGIDVSKATLDIAARPDGESWTVTNDEHGLAELLPRLVALTPALVVMEATGGFEMLTAITLAKAGLPVAVVNPRQVRDFAKAMGQLAKTDALDAGMLADFAQRVRPTPRPLPDDAAQLLDSLLTRRRQIVEMLTAEKNRLGFARGPVKRDISHHIRWLEKRLTDVDGDLQDAVASSPLYQAKADLLRSVPGVGPVTALTLLATLPELGHLSRHQIAALVGVAPMNRDSGTMRGKRMVWGGRAPVRAVLYMAALVGLKHNPVLRVFYERLRAAGKPFKVAATACMRKLLTILNAMLHQNRRWDPQHA

SEQ ID NO: 378626 - protein, 342 aa, unidentified
MQVTTIGLDIAKNVFQVHGIDAAEKVVVRKQLRRRQVLEFFKALPPCLVGMEACATAHYWARELTKLGHQVRLMPAKDVKAYVKRNKNDAADAEAICEAVRRPTMRFVQIKSTEQQGRLMLHRARDLLMRQRTQVINAMRAHLAELGIVAAQGRDGIKELLKIIASEEDARLPVDAHTSLVVLAAELQAMQTLIGSIEKRIMVQHRSNEASKRLESIPGIGVIGATAIAATVPDPKVFGSGRDFAAWIGLVPREDSTGGKQKLGPISKRGDRYLRRILVVGACAVLRYARHKPEKYPWLTKLLARKPFKVVAVALANKMARIAWALLAKGDTYRVPALAAAA

SEQ ID NO: 378627 - protein, 339 aa, unidentified
MEVKRIGIDLAKSVFQVHGVNGSEKTVLRKKLSRGKLLAYFAQLSPCLIGMESCGGAHYWARELQKLGHEVRLMAPQFVAPYRKNDKNDSNDAEAICEAVGRPNMRFVPIKNEQQQAVLALHRARELLVGERTALINQARGLLAEYGIVVAQGPARLRAALPEVLEDAENGLPALAREVFADLYDRLQNLEKRLGDYDRRVERLARKDASARALMQVEGIGPLTATAISASVGDARMFKNGRQFAAWLGLVPRQFSSGGKSRQGRITKRGDVYLRTLLVHGARAVMRYMVQREDAKSRWVAALKERRGFNKAVVALAAKNARVLWAILAKGTAYQPRFV

SEQ ID NO: 378628 - protein, 319 aa, unidentified
MNCIGVDVGKQELVTYDGVEHRTFPNDRSLDEFSRYAQRRKDLLVVYEPTSTYSRRLEAFCRTDRIVCCPLNPRVIPHLRQVSCRRSKTDETDAELLYRYGIERGEKEAGLLFHDEVVQSVSAHLAYYRVIQKARVACQGLMEALKEDPAASDELIAELEGEIAVMKEKEARHLEEAQELIAADEAGTCQLEALLTIPGIGPITAVTLIVMFRKYVNASRRQMVALAGLDPVLFQSGTSVHKKSRISKRGNREVRKRLYEATLSAARYNPSIKGIYQRLKEQGKPDKVARIAAARKLLLIAYAVYKSGNRFRLLNECQS

SEQ ID NO: 378629 - protein, 371 aa, unidentified
MKIYNLKAAPVANVKLLKDEKRPKAKQILLGADTHLRGYQVGRKVDHGAIGAVENFRSEEAFLLFVLKQLERAERVVVVYEAGPLGYSLYRKLKELAVECYVCAPDSSEQQKKRRKNNKIDARNLTSKLFNYVNGDQNALQMVRVPSEAQEQLRMASRQHDQLVEERKRLGAKGNAMLLSQGFGSWSNWWRPKAWARLSSLVPAWLLERLQVWVEVLKMLDEKICQAKVGLARGCSGPRPKGMGALSQMQLQSEVLDWHSYSNRRKIACLAGMVPSEWSTGQKERRGSITKVGVPAIRRIIVEMVWRMVLFQPQYKPVQKWQEVLRGSNPALKKKAVVAIGRQLIVDLWRLETGRVTAQELNLVMIETSGV

SEQ ID NO: 378630 - protein, 329 aa, unidentified
MVLLGIDVSKGRLDCALLADEGGSPLGRRAFPNDAGGTERAASWASRVSGAAAADTHVILEATAAYHEPAAHQLAALGMRVSVVNPAQVRSFAKGLGILGKTDRIDARLLARYGQLVRPKAWQPPAKAVADLQALVARLDDVEADLRREESRLEQARTRGCPGVVEQSLLESIAALKSRRRSLRRAIVAHTAAHDGLQADLERLLTIPAVGPKTATRMLALLRARGFESARQAAAYLGLVPVERQSGKSVRGRPRLSRAGNPRLRAALYMAAVVGIRRNPDLKAQYERLLKAGKCKMAALGAAMRKLVHLCFGVLKSGGDYRAGVATPA

SEQ ID NO: 378631 - protein, 353 aa, unidentified
MANHTGGVVGGVDAHADKHHVAVVDLQGRLLGATTFPTTAAGYAQLISWLRGHGEIERVGVESTGAYAAVLVRALRAGGISVVEVNQPHRHARQRLGKSDPIDAELAARAALSRTATAVPKQTSGIVEAIRQLQIVRTSALKARHAALQQLNDLIVTAPEQLRSNLREGRTMRAKAALCRRLRADIARVHEPEQAAKLALSSLARRIGELDREINHLDGQLEQLVRIAAPRTTQLFGVGTQGASQLLIAAGQNIERFRSEAAFAKICGAAPIQASSGRTTRHRLDPGGDRQANRALHMIAVCRLRYCPRTQAYAAKRTGDGLNKREILRCLKRYIARETFHTLQADLGALTST

SEQ ID NO: 378632 - protein, 388 aa, unidentified
MEAQTVNTLPPVAADHDPVRCLLAIELSKKSWIVAITTALSDKISRYTLDGCDWKGLLELMERVRARVAREVGRPVEMISCYEAGYDGFWLHRLLERQGVRSLVIDPASVQVDRRARQAKTDHIDAKRLLRSLMAYLRGEPKVWSVLRVPSVAEEDDRRLHRERDRLIAERGQHVNRIKGLCAIHGIYDYEPMRRDRMLRLEQLHTGDGRELPPRLKAEIARELQRLELILGMLKEIEAERDAIALAESVSAHTNAKKIRDLVKLKAIGPEIATVLTGEVFYRPFNNRHQVASYVGLTPSPFQSGPKCRDQGISKAGNPKARSTMIELAWLWLRHQPDSPLSIWFQERVGTRKGRIRRITIVAVARKLLIALWRYLETGVVPTGAVLN

SEQ ID NO: 378633 - protein, 348 aa, unidentified
MNATANVIGLDIAKNVFVAVGQDAHGKVVWKRTLSRHEVLPTFAAMAATTIGIEACAGSHYWARQLQALGHDTRLIAAQHTRAYVTGNKNDTNDAAAIAEARSRAATKYVPVNTEAQQDLQMLHRARQALMQERVALLNRMRSCAMEYGVVFPEGVARFLKGFAGWLNDEDNGLSGSAMLTFRDFKAQLDEKDARLALYDARLTQAAREDERAVKLMEVPGIGKLTATAILAAVADARHFCSGRDFAANLGLVPREHSSGGKQRLYGITKRGDTYLRTLLIHGARSALQRAGDKPDRLLCWAQKLAERRGVKVALVALANKMARVVWALLAHGRSYVPVWSNGTTRPA

SEQ ID NO: 378634 - protein, 353 aa, unidentified
MRMVVALDVHRKQITYKTLERETGEVKRGRIAPAARGDVREWLARFVGCEAEFALEGTTGWRFVVEEIERTGHRAHLADPAETAAKRGRKRRAKTDRADCDLMLKLLLAGELPQSWIPPAHILELRTRVRMRKTLIDQRTAWQQRLQAQLFHQGAPAGLRLRTRAGREALARVELSAAGRELVSLALRMIDTIDSELEPIDGWLGSFARRQPGCRALIEQLYGIGPVSATAILAELGDCRRFSRSNDAVRHSGLDVTVYQSDSKRSAGHISHEGPEVLRWALFEAAQQASRRSSPDHAYYRQVADRIDHNRACLSVARKLCRRAHHILRELGDEALAPVHSDAQPDQVIAAAA

SEQ ID NO: 378635 - protein, 385 aa, unidentified
MLKIVYPICCGMDVHKSFLVACVASTNECGVTTYKSRRFSTFTKDLRLCADWLSANNCKDVCMESTGIYWIPIYNILEASCKIVLAHPKYVKAIRGKKTDKKDAKWIADIFKHDLVSGSFIPPADIRQLRDLVRYRWKLNNFIVGEKNRAQNCLTVSNYKLYDVFSDVFGKAATQITSYLLEHLNEPLSDVSNFRTKGMKATDAEIRDAADGNICAEQAEKYTSQLSLVMSVPGIQTFSAISVIAEIGVHMSVFPSSKHLCSWAGLTPQNNESAGKKKTTRISRAGAYIKPLLVQCALCAIRAKRNPEIRNRYLSIKKRRGHKKAIIAIARMLLTAIYNILKKNEPYNAELSHKVDVPPAHRSVTIEEAVFILQRQGYLITPCTS

SEQ ID NO: 378636 - protein, 363 aa, unidentified
MHSITNTELSSHEGTRCQFNGGNCTIKLGIDVHQDFYVVVCQVGGTNPKPPQRFHKEAFLHWAAKLTQSRGEVHAVYEACGFGFTLQRQLSALGIVCHVVCPQKLDEHNKRVKTDGLDAKALCLKLDRFVQGNRDALALVRVPSEEEERSRAIHRQREQLVGARKRLEAQGRSLMVNHGIEPVQNWWKPRTFTALPVPQWMRELLLNSQPILLALQEKISAMTLQLQSAAAPNQPRGLGKMTSVLIDREIGDWYRFNNRRQIASYTGLCPGEYSSGNTRLQSCVTKHGNPRLRAALVELAWRLVRFQPNYKPVGKWRQILAKGALATGAARKKAIVAVARQLAVDLWRIKTGRLTAEQLGLTT

SEQ ID NO: 378637 - protein, 330 aa, unidentified
MKYSAIDLHSNNNVLVVSDETDRVLVEKRLPNQISRILELLAPHREEISGVVVESTYNWYWLVDGLTAAGYKVYLANTGAIKTYDGLKHSGDEADARHLAHLLRLGILPTGYISPPAQRALRDLARRRLHLVRTRTAQILSVENQVTRQTGRHIRSNEVKRLDAASVAAMGLPEDVARGMAANVAVIQTLNEEIEKLEARLLDEVQNTAGWVLLNSVPGIGKALAIVILLEIGTIERFADVGNFASYARCVDSVRVSNGKKKGEGNSKNGNKYLSWAFVEAAHFAARFCPQAKRFYAKKFAKTNGAVATKALASQARTGLLSHLEDRAAV

SEQ ID NO: 378638 - protein, 459 aa, unidentified
MKNKRFSSRKKRSDSGHVVKVARKDSELARINEHAAGIDIGSESHFVAVPPSSCPDPVRQFSVFTKDLYAIADWLAECGVNSVAMESTGVYWVPLYEVLEERGFEVKLVDAREVKNVSGRKSDVLDCQWLQQLESYGLLSGAFRPPDEVVVLRGYMRQREMLVRSASTHIQHMQKALQQMNLRLDNVVSDITGRTGMRILKAVLAGERDVKKLGQMRDPHCKATAEVIAASLVGNYRVEHLFSLKQAVELFEFYQQKIKECEEEIEAYLKKLPHKRDSEPPPFEGRPKKSRVSFNVRDEAYKLVGVDLFRIKGLNAETVLRLLSGVGVDLGRFQTEKHFSSWLSLSPERKVSGGKVLSSRTKASSNRAAAAFRQAAVSAQASDGEMGAYFRRMKARLGGPKAVTATAHKLARVYYGLVKHGEEYVEEGARAYEEKHRQRVVSNLQKRARGLGYELVAVA

SEQ ID NO: 378639 - protein, 350 aa, unidentified
MNVNHYIGFDVHKKSVSYCVKTADGTIVDEGKLRATHDVLRQWAGERTEPWRGAMEATLFSGWIYDTLQPFAAELQMGHPALMKAIAASKKKNDKLDARKIADMVRCDLLPACYVAPVEIRELRRMLRYRNLVVGQATRLKNKMSGLLMEVGAEYNKERLHGKQYFTELLDTVAEVPDSVKDLLRLSRGAMEMFETTQQQLLLRLRKDPLLSKRVMVLESIRSVGEVTALTWALEVGDPQRFSSVAHAVSYCGLTSALVSSADKQQRGPLSKQRNAHLQTVLIEAAKLAPRWNPQLATVHTRELTRGNRNRATLAVARKLVAYLLAVDKSGQPFEIRSTPAVETEAQEVA

SEQ ID NO: 378640 - protein, 421 aa, unidentified
MLVLYQRCAAVDIGKDVIAVAVRLPGDGPEHRQTIKRTFKTFYGVLKHAARWLTEQQVTHVAMEATGIYSMPVYHALVEHGHFEKVLVCNAGHVRNVPGRKTDLSDAEWLVHLLECGLLRGSFIPPAQIKAARDVIRYRTKLTESRTSELQRLGNVLQDAGIKVDSVASKITTQSVRAMVEALIDGERRPLLLAELAKGKMRAKIPDLQRALEGRFDDHHALMCRLHLDHLDHLEEMIARLDTQIEDMMQPFRAQRELLTTIPGIGPFAAAAVISEAGADIAETFPSAQQFASWIGVCPGNHESAGKRHSGKPRKGNRHLQHVLVECAWAASRTPGYLQSLYRWHVRKFGGSRNPTAKNKAIVAVAHKLAIIIWHVLAADKPYTDLGADYLDRRVDPAKETRRLIAKLQALGHTVTIEPAA

SEQ ID NO: 378641 - protein, 390 aa, unidentified
MIYVGIDVAKTTHYAAVMNSDGVVLVEPFAFDNDAPGFSKLISKIASFPQEQIIIGLESTGIYSENLICFLFDSGYKLAVINPIQTASLRKTNIRKTKTDKVDTLLIIKSLMVNSYHLYTEQDAQSLKLKSLCRFRQSLKKSKARLKIQLSGYVNILFPELLTFFKSGIHISTCYTLLKRCSSPAEIAALRLDSLSKLLSNASRGHFSRSTAEALKSLAKSSVGVKNPYISIQIAQTIQQIELLEQQIDEIEKVIKSTMSELDSVIMSIPGIGEIDGAMILGEIGNIDRFASPCKLLAYAGLDPTVCQSGKFKARSTKMSKRGSKILRFALINSAWQLTLNNDTFYDYYQLKLSQGLSHYGALGHVAHKLVRVIFKLLKHNVLFDASRLV

SEQ ID NO: 378642 - protein, 372 aa, unidentified
MRQYSTDTVWVGLDVHQSRVTAAVLHGDSEKAHVVNLPGEVNAVRKFFRRLSKDGSPRSCYEASGAGFVLKRMLDRDGFHCEVIAPSLIPRKPGDRRKTDRLDAVRLAELYRGGYLTSVRVPDEEQEAVRQLVRTRLSIQRHITRVKHRVVRTLACQGHRFTGTKSNWTGKHRAWLERMRHDLDGPQRVVLSAHLDHLEYLESEQRSLDAEIERYSRMEPWRESVEALLCFRGIKTLTAMTIATEIGDIRRFRSPRGLMAYTGLVPSERSSGDVERRGPITKSGNAHLRRVLVESAWHYRHRSRTDQRLVRRRQGQPAEVVAVAIKAQHRLTKRFWRLSERKHMNKAVTAVARELCGFIWAAMNAVARSEEA

SEQ ID NO: 378643 - protein, 398 aa, unidentified
MRRQPILKQESSFIGIDYHKRYSVFCVLDAQGVILERGRIDHLCPEQFVALVRRWPGCRVVFEACMNWHWLLEILEEAMPREDIVLANPFKTRIIAEAQIKTDKVDARILADLLRGNLIARVHICGKATREIKEVLRQRCFFVRQRTMLRNRIHRLLGAQHGLKLPQCSDLFGAKGLSFLDKLELPAPAGLLLTQQLALLRELALRIREDEQDLAAMLELSPALHHVRSLPGMGPILAAVIVSEIDIIERFPSAQKLCGYAGLCPATSSSGGKTFQGKLLPRCNKWLRWAFVEAAWVAVGCSPYFGDFYRRKRSLGKKANSAILATARLMARITWQLLTQRRDYANFPVDQELRCRPVCGSFSPAGPAKERQHFHKAKKPISSPQTFPSRSPTRLVGR

SEQ ID NO: 378644 - protein, 400 aa, unidentified
MGQPLWAGVDAGKSDHYCVVIDADGKRLLSRRVANDEAALLELINAITALAGGGELTWAIDLNAGGAALLIALLIGAEQRLLYISGRTVHHASGGYRGEGKTDAKDAAVIADQARMRRDLQPLRAGDDIAVELRILTSRRTDLVADRTRAINRLRAQLLEYFPALERAFDYSASKAALILLTGYQTPDGLRRAGAARLAAWLRKRKARNADAVAAAAIEAAKSQHTVVPGQQLAAAMVARLAEEVMTLDTEIGDTDAMIEERFRRHRHAEIILSMPGFGVILGAEFLAATGGDIAAFGNTDRLAAVAGLAPVPRDSGRISGNLKRPRRYNRRLLRACYLASHIAIRTDTASRIYYDRKRAQGKRHTQAVLALARRRLNVMWAMLRDHKPYQPTAPNATAA

SEQ ID NO: 378645 - protein, 342 aa, unidentified
MYYIGLDVHKKTISYCVKDGSGIVHAEGAIPATRWDLDRWMKMLPQPWTAAMEATIFTGWIYDHLKPHAAALKVAHPLMLRAIAAAKKKNDRIDANKIADCLRCDFLPECYMASTEIRERRRTLRYRNLLVHQAVQLKNKISGLLMEAGVSYNKQKLHKVGYFKELLATNPDINEGLRPLLRLCRETLVRLQKTESALVRSLQRDSLLAERVQRLMTIPAVGPITALTWALEVGDVKRFSSIKRAISYCGLCGAEKSSADTVKRTPISKQRNKHLQSVLVEAAKMAPRLSPELALIYDREKQKGNANRASLAVARKLVAYLVAIDRSQRDFLVVEKENCAAA

SEQ ID NO: 378646 - protein, 364 aa, unidentified
MLIIGCDYHPSGQQVFGIDTESGEVIADRWIAHTGTELEEFYGGLPAGTVVGVECSGNMLWFERRLAQYGHRLRLGDAAKIRSKETRKQKHDRRDAELIARLLREDQFPDLPWVPTLAERDQRQLLMHRHKLVRMRTQGKNQLQHIALNQGQQKKRQLWTKAGRELLESLPLEPWTVRRRDDLLRWLDLLNRDCETLEREVERAAEARSEARLLMTHPGIGPVISLAFVLTIGSIERFQRSRELVSYLGLNPTEDSSGERRRLGGISKQGSSFMRLLLIQGAQTAVRGDEDLRRQYRRLASKKHRAVAKVMVARKLAVRMFWMLKTQRTHAELVRMRGRSSHPGVSKTEALSERPASPRIQPRG

SEQ ID NO: 378647 - protein, 394 aa, unidentified
MDKVYDKCCGIDVHKKLIVACFRKGSKQELRNFGATTRELLELANWLQNGGCEMVAMESTASYWKPLYNILESSELKAMVVNASHMKAVPGRKTDTKDAEWIAELLQHGLLKASYIPDKQQRELRELVRYRKSLVSERTRELNRLQKMLEGANIKLSGTVSDINCMSARNILEYLLTGEFFDEAKYDEMYKQKIIAHNLKASKEQIIDDLNGVMTPLHINNLEDEIDNFMKPEEKQATQAIQDVTGIGKNSSQAIISVIGTDMSRFPTAGHLAAWAGLCPGNNESAQKRKTGKMRKGNALLRSTLVVCAHSATRNKNSYFYAQFMRISSHRGKKRAYVAVAHSMLIAIYHILKDGVVFKDLGADYYNQFNMERKINAYLKKLKALGWEVPVVAA

SEQ ID NO: 378648 - protein, 350 aa, unidentified
MQYVGIDWAYRRAAWCAKQADGTIFGEGFVPADEDGLARLVIELGPEVRACLEMMSGAVWVRDQLAGAGWQVEVADARKVKNVAPLACKTDKVDARVLAELCRRELVPALWIPSLEERALRERLKRRLHLVRLRTSAKNRVFGLLTQWGLRIPADRLRRPDAMELLETRGVPEVWRRSVAEALAVIELLDERIAPLDRELGPLARADRRVCLLSTIPGIGPLLGLTIAAEIGDVARFPSPRKLIGYSGLAPRVKQSGERSRTGELSKAGSRTLRFAAVEAAQGAWRETNPWHRLYSDVKARTGKANPAKSAVARKVLIACWHVLSLDEPFKPPHPPTDLVPASSLCFLAA

SEQ ID NO: 378649 - protein, 402 aa, unidentified
MNAVGIDVSKGKSMVAIMRPFGEIVSTPFEIKHTASDIHSLIELINSVEGESRIVMEHTGRYYEVLAHQLSEANLFVSAINPKLIKDFDNDSLRKVKSDKADAVKIARYALDKWQNLKQYSVMDELRNQLTTMNRQFGFYMKHKTAMKNNLIGILDQTYPGVNTYFDSPARSDGSQKWVDFASTYWHVDCVRKMSLNAFIDHYQNWCKRKKYNFSQSKAEEIYGKAKELVPVLPKDAITKLIIKQAVDQLNSASTTVESLRTLMNETASKLPEYPVVMAMKGVGTSLGPQLMAEIGNVSRFTHKSAITAFAGVDPGVNESGSYEQKSVPTSKRGSSDLRKTLFQVMDVLIKTHPQDDPVYQFLDKKRAQGKPYYVYMTAGANKFLRIYYGRVKEYLSSLPES

SEQ ID NO: 378650 - protein, 343 aa, unidentified
MPIVGGLDIHRKQLTFDYLDTATGEVKRGQIAPADRAHLRSWLVRFAGRDDVAFALEGCTGWRYVAEELAGAGVAAHVAEPADTAFARGRKRHAKTDRTDSRHLRELLAEGRLPECWIPPSHILECRALLETYHDLRAEHTAWVQRIHAVFFHQGAPALGALRTEHDIGVVQAAAACHLSPAGQLQVDTALGMLAFLEGRLEVLRHRLLAAARSLTGARVLAARLYGVGPVTALALTCWLGGAGRFSSSRKAVRFAGLDITVYSSDSRRSPGRLSRQGPAVLRWAVFEAGKTHARASAPDHRYYAQVKDRKDGKRAALSEARKILRQACHILAELGDDALTAA

SEQ ID NO: 378651 - protein, 427 aa, unidentified
MKKIKIDYLSTLFVGIDIGSRTNVISALNFDQDFLIRMVPVANAQGGAEQMEGMVAQVLSQHHEFRAVIIGLESTGFYGVHIANYLSTSEKLAPFSTKVYCLNPNEVKQYKKSFNSLDKNDGIDSFVIADFARVGRIHTEPWRGAQYLALQRLTRHRLHITECIAREKTYMLNNIFLKFSEFAMLGKDEHPFSDKYGATAEAVLTDYLSTEDIVDASVDDLVAFISSKSRGRISDPEQTTYLLQKAAQDSYRLDKCLYEPLTVSIGCSFNCISAFEKELKAINGAIHRAVKGLNPTEYQILTSVPGIGPVYASGILAELGTIKCFKSNDALAKYCGIVWKENQSGEFQAEDTPMNKAGNRYLRYYMIEAAGSVMQHCPEYKAFYDKKFAEVRTHQHKRALALTSRKLIRMLFGLLANGKLYSVEKSR

SEQ ID NO: 378652 - protein, 376 aa, unidentified
MAKHSTKLPTRKTENRSFARRGLVAERAATPCAIGVDVGDRFSRVCILGSDGVPCREERVRTSEPGFRQYFERLAPSQIALEAGTHSGWVSRLLQACGHTAIVANARELRKIHQSDRKNDRADAEILARMLRFDPQLLCPIRHRSAQMQADLAVIRARDTLVGARTKCVNAARGLVKSVGARLPKCSTHSFAAAALDHVPVELHAALSPLIETIANPSDQIRRYDRSIETLAKEYPATDVLRQVSGVGALTALTFVLTVADPQRFRKSRDIGPYLGLVPRQDDSGNRVSQLPITKAGDAHLRRLLVGSAQYILGPFGPKCSLRSYGERLTQRGGKNAKKRAVVAVARKLAVLLHRLWSTGEVYEALRNEPAQRSAA

SEQ ID NO: 378653 - protein, 482 aa, unidentified
MKAKTQEKTSKDSCGPEPGHWHEMNRKQRRETMRKIQSDDLSLEVVHPDAAGIDIGNESHYVAVPPTRDSQPVRRFGCTTAELKAMAQWLKQCGIRTVAMQSTGVYWIAVYDILEAAGFEVYLVNARETKNLPGRKSDVQESQWLMKLHTYGLLRNSFRPSQEIRTMRTYWRQRNDLVQAAGRHIQRIQKALTQMNIQLANVLSDVSGMTGQAIIHSILAGERDPDKLAEFRDPRVKASKHEIARSLEGNWEEDLLFVLRQEQDGYEFCQKQMVECDRQVEQYLQQREDRSKGTPLPEEKRKGRLKKKKGNAPQFDLRGELFRMTGTDLTQIDSIDVMTATTILSEVGWDMGKWETEDHFVSWLRLCPDNRISGDKIVGKGRLPTKNRVSIALKMAASTLRRSNTYLGAQFRRFRTKLGSPIAIKAMAAKLARLVYRMLRYGMKYVDQGAKFYETQHRILQVKQLKWKAAKLGFQVVQAPAA

SEQ ID NO: 378654 - protein, 343 aa, unidentified
MQTITTIGLDIAKSVFQVHGVDAGGEVVVRRQLKRRYVLAFFQKLPPCLVGIEACASAHHWSRELQALGHTAKLIPPAYVKPYVKRHKNDAVDAEAICEAVTRANMRFVATKTPEQQSCLTLHRTRHLLMRQQTSVINAIRSHLAEFGIVAPVGRNGVEQLLGVVADTKDKRLPEVARACVAALGAQLRVLKAQILEFDRMIRAWHRSSEASKRLDQIPGVGPVLATALVASVADPKVFRSGRDFSAWIGLVPKQNSSGGKERLGNISKRGDRYLRSLFTTGALAVIRYAKIHGTRHRPWLTSLLARRPTKVAAIALANKLARMAWAMMAKGERYNEPAALAA

SEQ ID NO: 378655 - protein, 339 aa, unidentified
MEVYAAIDLHASNSFLAVVDREGKRVLQRRLVNDTAILLSVLEPYKECMQGIAVESTFNWYWLVDALMDAGYGVHLANPTAIQKYRGMKHSDDNSDAVWLAEMLRLGILPEGYIYPREERPVRDLLRKRMHLVRLRTSLINSLQNIIARNTGASIGADKISRLTNDLVAPLLEEDENLVLTGQVSKQTIDFLTRQIKKIEKKLQEKIEWKKEYACLTTMPGVGVILSLTIVLETGPISRFEAAGNYASYCRKVPTRWTSNGKSKGSGNKKNGNKYLAWAFSEAAELSRRFDPRIRAWYNRKASRTNRMIAHSALAHKLSRAAYCILRDRVSFDTERFIA

SEQ ID NO: 378656 - protein, 314 aa, unidentified
MEKPAVWVGVDVSKDQLEVALRPSGAQFSLPNDERGLRTLVKRLLPLNCTRIVVEATGGYEAPAVAALKAAALPIALINPRWVRSFAKGLGQLAKTDRIDARVLALYAERAELKVRQLPDAQTLELRALCARREDLVDMIVAEENRLEHASKLLAREIRSHINYLRKRIKHLNRELDAAVRGSELWRAKAELLDSVPGVGPVLRASLLAWLPELGTLNRGEAAALLGVAPFNHDSGAMRGRRAIGGGRAPLRRALYCTTSAAIMWNPPLRSYYERLIANGKVHKVAMVATMRRLLLILNAIIKTRTPWRSPCPA

SEQ ID NO: 378657 - protein, 341 aa, unidentified
MDGKHGFIEGVEAVFHLGIDVSKAKLDCSLLLDKDSLRSRSKSVPNTKEGFAALLEWVQRQTQVGPAELLAAMEPTGVYHQALALALYEAGVTVVVVNPAQLREFASGLAVRGKTDAKDSMVLARYATQPQRTPWEPPPLEVRQLQALMSRLEAVQAELQRELNRQDSAQLAGDPEAVQASIADSIAFWRAEQDKLQRAIDEHIDRHPGLKQEREYLLSIPAVGEKTANRMLCMLHSRRFVRASQAAAFVGLTPIEHQSGSSVRGRPRPSKAGNPRLRAALYMAAVVAIRHNPDVRALYERLLKRGKTKMSALCAAMRKLVHICFGVLKNRQHYTPQVEIA

SEQ ID NO: 378658 - protein, 412 aa, unidentified
MEVMYPRCAGLDVHKETVVACVRIVEGGNVSRSVRTFATTTASLIELGEWLEVNGCTHVAMEATGVYWKPVWQVLADSSFELVLANAAQVKNVPGRKSDVNDATWVSELLAHGLVRASFVPEPAIQQLRGLLRTRKQLVREKASHVQRLQKTLEEANIKIESVLSDVMGRSGRAMIQALIDGETDPAKLAALAHWKVRASAATLREALHGRIKRHHRFLLRLHLQQVDALDAAIAEIDREADAGLACFRDAVKQLSTIPGVSELSAQVILSEIGTDMGRFASAAHLRSWAGLCPRNDESAGKRRSTRLRRGAPWLKAMLVQCAWAAARTKATYLHAQFVRLRGRRGPKKAICAVAASILTAAYHMLKDGTFYEDLGAVHFDRRRPETQARRLVKRLAELGFSVELKPVAAVA

SEQ ID NO: 378659 - protein, 345 aa, unidentified
MTEAYDGRQVVGMDLHRRRSVLVRMTEDGRKLETARIENSPRALRAVMARAGVRPRVVVEATYGWYWAADVLAEAGAEVHLAHPLGVKAFRYRRVKNDERDCADLADLLRAGLLPEAWIAPPEVRGLREVTRYRHKLVGQRTSCKDQVHAVLAKCGVAVRHSDIFGRGGSAWLDGLVLPAPYAGKVASLRALIGVLDGEIARLEQQAAGMLAGHAGYAALRQLPGIGPVLGAVIAAEIGDVTRFARPGQLCSWAGLTPRHRESDTRVTRGHVSKQGSRMLRWALTEAIQRQPAGSRPRQVQDGLVARRGAEARNIAKTAAARVMLTQVFYALRDGHIRRAASQAA

SEQ ID NO: 378660 - protein, 407 aa, unidentified
MQMTCGVDWAEAHHDVALVDEDGALVARSRIDTGATGFSTLLTLIAEHGGSVGDTPIAIETDKNLLVVALAEAGFAVYPINPRAVARYRERHGQAGGKSDPGDAAVLAHILRTDLPMHRRLPDVSEQGRAVKALARQHQEAIWALHQTVSRLRSVLLEFYPQALQAFPNLKHRAALTVLAAVLTPAAATKLTRGRVVTLLKRSGRGNHPALVDQILADLRAPALRQPPRVEAAYGHTVRGLIEAVVAMQHAVEDLAAELALEFDAHPQATILRSVPGLGPILAARVLGEIGDDPTRFTDPNNLRAYAGTAPVTIASGRSHYVKARKVRNKRLGDACHWWAFAMITKSAGAREHYDKRRAAGDHHNAALRNLANKLLGRLWWCLANNQLWDDNAAWPHRIEQEKSAAA

SEQ ID NO: 378661 - protein, 389 aa, unidentified
MGEAIRATVAYLGIDVGKRSHSACGLGEDGEVAFRSDLENRPADIDRLLERAGAGALVVVDQKRNIGALVLARAFAHGNPCAHLPGYAERQARGMFPGVAKTDAIDAEVIARTARGMPGALRPLAEEPEGAASLRILSSQREFAAAARTRAKNRLRATLLEADPALERAVDPSRGLHVAPLAEFGSAAGCSAAGWRRFSAAARRAGAPAAGARAPWESMLASAGSGRALPAGEDVAVRMLAREIAALDADVAELEGLVADSLAGDEVYECLLTVPGIGPKTAAALVTSVDVSMFRGHDELASYCGVAPADSRSGTSVRSTSPQRGGNKQLKNLLTFSCNSLIGTQNRFGRYYDECRARGMRHNKALKAVARKRLKVIYAVMRDAVPYAA

SEQ ID NO: 378662 - protein, 338 aa, unidentified
MAIVTLGIDLAKNVFALHGVDATGRAVLVRPSVPRAKLLEVVAALPRCLIGMEACSGAHHWARLFASHGHTVKLMAPKFVVPYRLSGKQGKNDAADAAAICEAVTRPNMRFVPVKSVQQQGELMVHRARQGFVAQRTATLNRIRGLLSELGIVLPLKAATVRREALAQLEDLPGWANTVVGDLLSEVSRLDERIAMYDRHLRTIAKADDSVQQLMQLPGVAETTATALVATIGRGNEFRNGRQLAAWLGLVPGQYSSGGKQRLGRITKAGDPYLRMLLILGARSVLQGAKNRSDAISRWALQLAARVGYWKAIVAIAAKNARMCWAVLAKGESFQLPA

SEQ ID NO: 378663 - protein, 377 aa, unidentified
MKNVRFIGMDVHAETIAVAVAESGGEVRSLGTIPNRSESIARLVKKLGKTEQLRACYEAGPTGYVLYWQLTQLGVKCEVVAPTLIPVKAGDRVKTDRRDAEKLARCYRGGDLTAVWVPDAAHEALRDLVRARLAAKRDQLRARNRLSKFLLRHGRRVPEGTKAWSTKHLMWIKSQRFEQTAQQVTLDEYRHEVEHAAERIARLERSIDSAIETLPVKMRAVVESLQSLRGVAQISAVSIVAELGEVSRFARARQLMGYSGAVPWEDSSGERVHRGSISKAGNAHLRRIVVEAAWSYRHRPGVGHSLKVRQRHLSARVCEIAWKAQHRLHQRYARLTARGKSKQHAVTAVARELLGFIWAIGIEVEGNHEIKELRCAA

SEQ ID NO: 378664 - protein, 409 aa, unidentified
MMKQNIIFGIDVSSESSTVCVVIDRVKQGKTFKITNDSFGYQDLLDHLNQYLITPLVVFEATGVYSLSLQAFLEDYHIKYLKLNPLKAKKLMDNNLRHNKTDKVDAYRLALIQFNALQKLRQPQSREYHELQNASRYYEELTRALVINKNQLHRNLQSTFPQLESLLSVPSGRIYWTVVSLFPHAQYVLNHNENQVFQSLLAISGIGRQRAQYLTTRLYALARQAYPYDTENSSIVRAIQRNIANLLSLSAERDNVINYMEKLAMQVNARSLTIYESIPGIAKITAVRLVAELGDLRRFDTLAQIDAFVGIDPGRYQSGEKDSHLGITKHGNHLARKILYRTITQMETVKATQPCHITDYYDKKKRSSNSRGYKKIAIASVHKLIRTMFALIKHDQLYDYNVATHNQRL

SEQ ID NO: 378665 - protein, 343 aa, unidentified
MDTAYGGRQIVGLDLHRRRSVFVRMGEDGQRLGMARVVNDPYAFADQIAKMGESPQVVLEATYGWYWAVDVLQAAGAQVHLAHPLGVKGFTYRRVKNDERDAADLADLLRMNRLPEAWIAPPPVRELRELVRHRAKLVALRSGLKCGVHAVLGKCGVTVPMSDLFGVAGVDLLSGLDVAPAYRARIASLRTLISLYDFEIDTFTKMISARLVTHPGWRAIQAVDGVGPILAAVFVAEIGDVTRFRRPEQLCSWAGLTPLHRESDTKVHRGRITKQGNRLVRWAAVEAVQRVGADTLLGKTRARIEAQRGVTGIGKVAAARKLLTLVFYGLRDGHIRCLATEPA

SEQ ID NO: 378666 - protein, 404 aa, unidentified
MNAVGIDVSKRKSMIAIMRPFGEVVATPFEVGHTAAELNELAKFILKISGETRVVMEYTGVYFEPIARALYDAGLCVCVVHAQLIHNYGNNTIRKVKTDKADAIKIANYALDNWNKLKPYTPIDEVRRQLKAYSRQYRKFNKLKTMLKNNFISLTDSTFPGVNELFSSPPRKSDGHEKWLDFAMKFWHAECVCSLSQKAFTERYRKWCHKAGYYFLESNAEDIYATACGHIGLLPKDENTKQLVQQTIIQLTSICSSLSVIENKMTELAGLLPEYPIVMEFRGVGRILGPQIMAEVGDVLRFEKKESLVCFAGLEAPPYESGKFESHNRTISKKGSPHLRAALFQVMDCLIKTQPVNDPVFQFLDRKRSEGKHYYSYMCAGSAKFLRIYYARVKEYLTTLEQNI

SEQ ID NO: 378667 - protein, 329 aa, unidentified
MSRRETAITTIAQLEPPRVTIGVDTHGDLHVACALDQLGRHLATTRVATTPRGYRALLAWAQSLGEVVAWGVEGTGCYGAALARFLNGQGQLVWEVNRPDRQARRHQGKSDPIDAQAAARAVQAGQATAIPKAADSIVEMVRCLRVARTSAAKARTQAANALRALVVTAPAELREPLRGRSATQLASTAARLRPGPIATTTAATKLALRLLAERYQALDAELARLDAELDRLTTKAAPRLRQLCGIGPEIAGALLVAAGDNPQRLHSEAAFSMLCGASPIPASSGKTVRHRLNEAGTARPTPPCTGSWLCGWVGTNRPAPTWPHGPDKG

SEQ ID NO: 378668 - protein, 338 aa, unidentified
MNKFSGIDLHSNNSVVVVSDEADRIVYQRRLPNDPVQIRAALAPHREDLVGVVIEATFNWYWLVDELMKDGYCVHLANPAAIRQYDGLKYSGDFADAAYLAQLLRLGLLPEGYIYPAQGRPVRDLSRKRMQLVQCRTAQILAIENLFARQTGGQMSGERVKRLDEAQVNEFGFAPDVLLAMQANLAVMQTLQEEIGIIEKRLMERVKLHPDYALLNSVPGIGPILATTIMLETGTISRFAKVGNFSSYCRCVDSRRESNSRKKGEGNTKNGNKYLAWAFVEAANFAIRSCPEAKRFYERKKRARNGIVAIKALAHKLARACYYMLREHKPFEVARCFG

SEQ ID NO: 378669 - protein, 349 aa, unidentified
MTIIANQYDWVVGVDTHAQTHTFTLLNCRTGEATDTRQFPTTIAGMKRALNWIHRSTSGHTVFAAIEGTSSYGSRLTQLFIESGIAVGEVRPPSKASRTMTGKSDPIDAEAAARSITGRDAAHIPTPRAAGIRHALQILLAARSLIDQQRTANKNALTALLRVIDLDIDARKPLTDKQLATIGAWRISATADQAIGIARTEAKRLADSVIGSTQQLENNRIQLQNLSEQIASEFQKIPGVGPVTAAIIICAYSHPGRVRSEAAFAALGGVAPRPASSGNTTRHRLNRAGDRQLNRAFDIIARTRMSYDPTTREYVTTRRAAGKTNREIRRCLKRYICRQIFHQINTIMS

SEQ ID NO: 378670 - protein, 347 aa, unidentified
MPITLIGLDTAKSVFQIHGVDASGKAVLKCKLRRSEVLAFFEQQEKCVVALEACGAAHHWSRLIAACGHETRLIASEAVRPFVKKGKKNDAADAAAICEAALRPDAKFVPTKNVEQQGILSLHSVRSLLIKQRTMLVNAMRGLATEFGMVVPKGISKVKELLELVSANEDLPRSAAQAIRELSDQCTSVSEAIETFEAEIVHHARSNEVARRLATIPGVGPVTASLLAATVSDMTVFASAGHFAAWLGLVPRQNSTGGRSRLGRITKAGHSEIRRMLVLGATSMVFRAEKWNSALGAWTRSALQRRPVRLVTVALANKIARIAWALMTRNDVYRPAGRVAVTAQAAG

SEQ ID NO: 378671 - protein, 339 aa, unidentified
MKLYGAIDLHSTNSVVSLIDEQDRVVYQKRLDNNLTVILHQLSPYRSSLEGIAVESTYNWYWLVDGLMQADYRVHLVNTAAVQQYDGLKYTDDHSDARWLAHLLRLGILPQGYIYPKQERAVRDLLRKRSQLVRHRTANLLSVQNLVTRNTGSSISSNRIKQLPLEGVSSILADKDHVLAVQANLSVMQCLEEQIGRLERVVKERVKLRPAFRYLKTVDGIGEILALTIMLETGEIGRFSAVGHFASYCRCVGSQKISNGKCKGSGNKKNGNKYMAWAFVEAANFAVRFNPQIRRFYQRKKAKTNGIVAIKAVAHKLARACYYIIQDEVPFDVAKAFAD

SEQ ID NO: 378672 - protein, 351 aa, unidentified
MKKVAYLAIDVHAGHCVLGHIDIDGTFLGNRRFPTSEQHIIEALKGVKAKEKYLALEESNLAYWAAQVARPYVTEVICSDPKENALIYRSSNKRDKVDTHKLCRLLRLGELKRVYHAENDERAIFKAAVQHYIDLRDQQVVLKNKIKAMYRHWGVIDVAGEAVYGIKRRHDYLQRVKHLHVRNQLHRLYCLMDETESMQKRALKAMKQLGRKYPEIKQFKKMPGIGEIHSHTFDAFIQTPHRFANKRKLWRYCRLGITDRSSDGKPLGFKRLDRSGVSELKSLSYQAWLCAMRSDNEVSRFYSESFRRTSNRVHARLNTQRKILAVMYGMWKTGEAYRSELFLDSPQMSVV

SEQ ID NO: 378673 - protein, 416 aa, unidentified
MNAVGIDVSSRKSTVAVLRPLGEVVCLPFDVSHDADGLASLAEKLKALDGETRVVMEHTGRYYEAVAKALHEAGFFVCAVNPLLIKEYGANSLRRVKTDKADAVKIARYALDNWADLRDFTPMDAIRYDLKTLNRQFQLASKQRTASANNLIALLEQSFPGIRKCFDSPVRSDGTQKWVDFAHSFWHVDCVRKQPFPAFCERYRKWCKRHAYLFKLSNAEEVYALAKRAVVLTPKAKVVKVLVQEAANQLISISRSVEVYRAEMDRLAAMLPEYPVVMAMYGVGKSYGPQLMAEIGDVRRFERKQALVAFAGIDPMPNQSGDKNVRSNKSSKRGSPYLRKTLFNVIRTYLQCAPQDEPVFQFLNRKRAEGKPFYVYMLAAANKFLRRYYAKLRDFFASLDTLQPVAPIPATLKASL

SEQ ID NO: 378674 - protein, 454 aa, unidentified
MCLEDRPVLEPNAAGLDIGAREIFVAIPPDRDEHPVRVCTTFTEDLQQLADWLVGCGVTTVAMESTGVFWIPLYDILEARGLKPCLVNARHMKNVPGRRTDWHECQWLQFLHSVGLLRGAFRPEADVAAVRTVMRHRNELVQMSSQHVLHMHKALTQMNLQIHHVISDITGLTGLAIVDAILAGKREPTELAKLRDPRVKADDETIRKSLVGNWRPEHLFTLQQSRDFYRTYQQQIVKCDQEIEKLLSGFEPRVDPAEKPLPPDRKRNRSGKKRRKKNGHSKTGFDLRTEAYKLFGVDVTQIPGLETMALPLFGEVGRDLSPWPTAGQFVSWLGLCPDNDISGGRVLWKATRKVNNRAGQLFRLAAHGLHRNLTPLGNYLRRMKAKLGPAAATTATAHKIAIIFYTIVKNQLEYDETIWATRDAKREQRFQAKLNRQAKQLGYKLVPIEEKPAA

SEQ ID NO: 378675 - protein, 367 aa, unidentified
MREQQNNRHERTTIGLDLGDRWHRFCVLGASGQVVEEGSVANNRVALSELSSRYPGALIVMEAGCHSPWVSRHLEQAGCEVIVSNPRKTRAIYQHERKSDRRDALMLARIARMEPALLYPVRHGSEESQQDLLRIKLRDGLVRARVGLINSLRFTLKSLGYTLANPSTERFHKVIQSALPESVVQMIAPSVQAIEELSLQIKLLDREIIALARSKYADTAWLEQIPGVGPLTALYFVLKIQDPARFDRVRDVGAFIGLCPRRNQSGENDPQLRISKRGDAYLRRLLVSAAQYILGPFGPPSALRQYGLALAAGGTPRAKKRAVVAVARKLAVLLLTLWKNKSAYQAFPGHNGEKLRTSDLERLRCIA

SEQ ID NO: 378676 - protein, 402 aa, unidentified
MNCVGIDVSKGKSMIAVMRPFGEVVLTPFEVQHTASELSELVKALKSLVGETRVVMEATGNYHAPIALALQNAGFYISIVNAILVHDYGNNSLRRAKTDKKDAIKLANYGLDHWLTLPRYVPDEDTRMMLKTCYRQYQQYSKVQTTIKNNLISLLDTTFPGINRLFSSPIRADGREKWLDFVETFWHCECVSKVSENMFSVKYQKWCQRNGYNFSQTKAHELHSFARSCITSLPKSETTKLLVKQSIVQLQATSSALAALKQEMNVLAEQLPEYPVVMGMFGVGPALGPQLIAEIGDVRRFHSKKALVAFAGIDAPPYQSGQMDVRSRSISKRGSSALRRTLFLVMCVYLQQSPDQEPIYKFMDKKRAEGKPYRVYMMASANKFLRVYYATVKAHLDALNKT

SEQ ID NO: 378677 - protein, 475 aa, unidentified
MQEYFAGFDVGRTFHVLVVVDESGKTVLKRRVENTFEAVTEAAERVQSGTSEGEVYWAVEMVDRNARMLVETLVRMGKKVYQSTPYRLKRFKEAAARPRKSDLIDAAALANLLRLRRHELTAINIPSKEVLMLRNLSRSANRLSDERTRQINHLEDVITSYCPDLIVKWPGYSFACKTMLRLLKEYPDIASMAALGDAVLLSKVKRFSNGKFGQEHVAVIKRAAETLVRRGVCTEPHAGDILDAIDLIELIDAKLAAKERVLEQALCECEVAERLMKLSGISVRIAGTIIGEVGDIKRFASEAKFATYCGLAPLCRQSGKSKGTNRLARQTNKRLLRVMYLSALSSIKCYGLSKAYYQRKLAGTDAGHVDKIRAIIALARHRCRIIFKILSREGYVYEPKQTEQPFVEGRRDGQHTMRVPARGAVKTGQRKKDMTGEAIQRPAAVEVRDAAEDLEIALLLQQGTTTPLPEHAMTE

SEQ ID NO: 378678 - protein, 345 aa, unidentified
MKKNLFFIGLDISEANFVASIYKTPGQPIVTKEAIPNDRKGFEMLLLWLKDHHIDKKNCRICMEATGVYSQAIAYYLLFQGFLVSVEPPLKVKRAFDPVGHKTDPVDSKQIAEYAYRFQDELTSWKPRDEILEKIRQLLSVREQFTKQKVALDNSIQAYSKQRVQVALIRKAQKETLDQLKKQIARIDKELEKLIKQDPEIFQRTNNLDSIPGCGMLLAAHLLVITENFTKIQNSKRLAAFIGIVPYQHQSGSSVSKRAKIRYFGPGPSRKLLRLAAQSVATHNATFRSYYLRKLDQGKAKPLVLNNIANKLLKIACTIIRNNTRYIKDYRSINPMYLKNAVKNA

SEQ ID NO: 378679 - protein, 317 aa, unidentified
MATREPLWIGIDTGKDELVIDDGRRTITVSNTSAAIRQWLKQLPGPARIGVEATGTYHLQVLELASEKGHQPYVIDGFRLNRYRDVVGDRAKTDLTDARLVRRYLRNEFDELRPWQAPPVAYTRLKSLLRRRAKIVQARTALRQSLAGVPELRAVSRGLLERINGALAQIDRLLKRWVEKAGLQDAVRRLDQIEGIGPLVAAAFATSYLRGEFRSSDAFVAFLGLDVRVRDSGKRVGQRRLSKKGDGEMRRLAYIAAMAASRSGRWKEQHLANQARGLSRIQSLVIIARKLVRLAFALLKSGEEYRPQLPQGAISTT

SEQ ID NO: 378680 - protein, 466 aa, unidentified
MKNNYILYVGMDVSKGKADAAILKVSDRRSVKPKFLRKKLSFKFVKSEVASFLETVRSYSDVNCTSICFALEVTGIYSTNVYDYIKANLYENESIKFLNTDFVNQWRIAHNIAKSDPLDAQTISTIIGTDLDVQYVNDNVFENKNGYQDLKALVHRHYQIKKIYSQEINRLIAQCDCLFPELQYVFEPKSAAFIAVLSSYPTTHDIINASRVEVFDVVYEATKHRCSMDKVDKLFELCQDTLVPDDISSYGKSIILDLVENIKNIKGQLKSIERYIKDIASLNPAYKLLLTITGCGPITAATVIAETGNIRRFKNADCFVSYSGTSPRNKRSGTSVETMGKISKKGSRYLRHAIYMIAEFARRHNPVLKHQFERIKNGNKKRHKLANIAIANKIARYIYSIMKNKSSFVILHDHIMRLPEETRDTFFNSISLDFPKNTRKQIYQYSDINGELHRFVYIKTDEMIPA

SEQ ID NO: 378681 - protein, 353 aa, unidentified
MEHFIGCDAHKKFSIFASIDEKGEYGPTFRVRHDLEVFRKFLKELPAGSKIALETSGCYYWMVDEMERAEHIPLLAHALTAKRRMEGRHKTNERDARGLAMLLRNGTLPVVWIPPAELRDQREMLRWRMCLSRMRTRVKNRIHGVLQRYNVDIAVSDLFGDAGRVELLARLHELPPYSRHSLLDQLQMVDTVETQISECEQVLQEMLYPSAERDLLDSLPCVGKILSAVLALEIGDVRRFGGPDRLVSYAGLVPVARESADWKRKDRCPRDCNMYLKWAYVEAANLISIHRGHWPERHVAQLYERVKQSTKMHGKATMAVARHLAEASYWMLRKQEVYQEPNSKRKVLSSTHG

SEQ ID NO: 378682 - protein, 357 aa, unidentified
MKIVGCDLHARQQSIAMMDSETGEFVEKTLLHKGSAVRDFYAALEGLVVVGIEATGSMQWFLELLEELGIECRVGHPAKIRAAETRKQKHDRRDARLVLDLLLRDRFPEIWMPSTEQRDLRTLLRDRHQWVKMRSRLQHTLQAIALNHGLRQGSRLWSQAGQTALQALPLPAYSSQRRAELLSLYIQLQKRIQKLDQEVEAQVQQRAQARRLLTHPGVGPVTALASEVFLGDPTRFANGNKVGSYIGMIPCEHTSGKRQRLGKMTKQGNALLRYLWTEAAMHAVGKDPELKRFYRRKLIQKGMGKARIAAARKLGIRLWIMMRDQIDYQEFCRRGKLRQSGEAHAGMPDFNRGPALQ

SEQ ID NO: 378683 - protein, 427 aa, unidentified
MNNTQNEKIAQVTNDTMVIGIDIGSQKHWARAFDNRGMELSKKAFGFNNTAAGFAGFEVWYEGQRRAAGLKRVMVGLEPTGHYWFNLNQFLAGNGIKVVLVAPQHVKHSKELDDNTQRKDDLKDPRVIAKLVTEGRYFLPYRPTGVYADLRDGFNRRCGIVESMTQAKNRLHRWFCINFPEYLEAYGSVAAKTGLMVLKKAPLPKDIVALGVDGIVKIWRDAKVRGAGKKRATTLVAMAEQSIGEKTANEAASLELWQLLEDYEHYAHQYEVIEEMLERRVHEVPNADKLLQIPGIGYFTVIGFFAEVGSIERFDDPKQIQKLAGLSVVENSSGKRKGLPGISKRGRDRLRWVLFQAAMSAVKHNQEFREIHQYFTTRKDNPLKKMQSLMAVAGKIIRVFYGMARTGSDYDPDRLLRDIRRPEKAAA

SEQ ID NO: 378684 - protein, 426 aa, unidentified
MADITDATTACHWVAIDVARYWNAVLVETAAGQRHRFKMANTAQDFDRLIGFIRQLGGRACAALEPTGDYHRAIAHRLAMAGIEVVGISSVAQCRYREAIFNSWDKNDPKDPAVILEMLKQGHVQRYIDPMIAGHHDLQELSKTYYQVSRARTKVQHSIINHHVPLYFPEMMKFWACTRSQWWTRFMIEFPTPAHVRLLTQDEFVAAAWDVVGRKVNKQAKLQEIWDMAASTAALPHAPDSLAVETFRMTLRHFQHLTELRAEIERRAQEVLCDNPDYEHLKSLPGIGPIIALTILAEAGDLRRFAHHRQFLKYCGFDLAKSQSGVRRGREQLSKRGNARLRLAFWMAGQVAVRQRENSFRAKYDRYVSSNPIDADLRRKALTAVAAKMARVAYSVVKKNQPYRQFFEQSLPSGSIPLSMAVGAPA

SEQ ID NO: 378685 - protein, 393 aa, unidentified
MKRQPVQPAGVPTFIGIDYHKAYSVYCVLDAQGSNLERGRIDHACPEDFRTLVRRWPGSHLVFEASMNWHWLFEILEREVPSERIVLANPFKTRIIAEAQIKTDKVDARILADLLRGRLVSSVHIPARETRQIKEVLRQRCFFVRQRTMLRNRIHRLLGGQHEVKLPQCSDLFGRKGAGFLERLELPAPARLLLTQQLTLLKELAVRIREDEKALEGLLEQSPALQHVRSLPGMGPILAAVVVTEIDGIERFPSAQKLCGYAGLCPSTSSSGGKTFQGKLLPHCNKWLRWAFVEAAWVAIGCSAYFGDFYKRKRALGKKPNIAILATARLMARITWQLLTQRRAYTSVAETQYLRSQPAERIACAVGLAKEVQKPLEDPSDFPRRRLSPVAPK

SEQ ID NO: 378686 - protein, 360 aa, unidentified
MIQLINENDEVVYRKKQGCDLTSMLSGLKPYQASIEGLAVESTFNWYWLVDGLMEAGYPVHLVNTAAVKQYDGLKHTDDDSDAFWLAHLMRLGILPTGYIYPKATRGVRDLLRKRGQLVQHRTTHILSIENLYARNTGSRLSANATKQLKEEDVRLRFDDPNSVLAIESNRLMMGALGRQIKVIEQAVLKQAKLDPRYRFLLSIDGIGQILALTIMLETGAIDRFQHVGQFASYCRCVGSEKLSNGKKKGQGNTKNGNKYLSWAFVEAANFAIRYNAKAKRFYQRKSAKVNRVVAIKAVAHKLARASYYVMRDQVAFDEEKLFGSLKVKIERLNRARGGFKTTRPDWQATQSTFKPFGFD

SEQ ID NO: 378687 - protein, 483 aa, unidentified
MKPKRVEKNKKASCRQTPNNWHKMNRKQRREMTRKIQSEDLSLEVVHPDAAGIDIGNESHYVAVPPTRDSQPVRRFGCTTSELKEMAVWLKQCAIRTIALQSTGVYWIAVYDILEEAGFEVYLVNARETKNLPGRKSDVQESQWLMKLHTYGLLRNSFRPSQQIRTMRTYWRQRNDLVRTAGRHIQRMQKALTQMNIQLANVLSDVSGMTGQAIIKAILAGERDPYQLAALRNWRVKASEEEIARSLEGNWQEDLLFVLEQEQDGYEFCQKQMAECDQQLQQYLQQLEDRSQGAGLPEEKRKERLRKKKKGNAPQFDLRTELFRMTGTDLTQIDGIDVTTTMTILSEAGWDMSKWKTEHHFVSWLRLCPDNRISGDKIIGKGRLPTNNRVTNALRMAASTLRLSNTYLGAQFRRLRTKLGAPVAIKAMAAKLARLVYRMLRYGMPFIDRGAEFYDAQHRNLQINYLKRKAANLGFQIIEAPAA

SEQ ID NO: 378688 - protein, 416 aa, unidentified
MTDPEKSSTFERYLAIDAHKHYVVVGGLNAQLEIVLPAHRMDLERYPQWTKENLTSRDCLVIEASTNTWDLYDITAAVAGKVVVAHPLAVKLIANARVKTDKQDVFRLARLLAGGLIPEVWVPPVPVRELRSLIAHRRRLIQMRTMTRNRLHSLAHRHNLILPEGGAFTDKNQGWWKGLSLSLVEKLHLQQNLALLEFLEPEVKAVDAELARLSTCDPWKEAFPYLMQLPGFGLIVTMTVLSAIGDIQRFPTSQQLVGYSGLGASLHQSGETNYSGHITKQGRRDLRFALVEAAWTAITSSPYWREQYQKLSHRMATNKAIVAIARRLLVAVWHVLTERTIDRRADPDMLASKLMIWSWKLNDVQRGGLTSRQFVRYGLMRFKIGQEITRIRRLNNRPIASVEEVLERLPDPNLNI

SEQ ID NO: 378689 - protein, 386 aa, unidentified
MEPVYPISQAQPLISEDATLFVSLELSRARWLVTSLSPGGSKISRHFVTGGASKDLLQLLADLRMKAERRVDASVKIVTIQEIGFDGFWIHRILASNSIESHVVEAASIAVPRRRRRAKTDAIDGELLLRTLMAFKRGEPRVCAMVVVPSPEEEDQRRLSRERKTMIKERIEHINRIKGLMACQGIAGFEPMRANPRERLEELRTGDGRAIPERMKAEIRRELDRLELLRRQIADVEAERDALLHAEEAPTGSPGARLLKLRGIGPEFATVLWHEGLYRSFANRRQLAAYAGLAPSPWRSGDMKREQGISKSGNARLRTTMIEAAWLWLRHQPGSALSQWFQERVRTDRGRLRRVTIVALARKLLVALWRFTTHGEIPEGASLKAA

SEQ ID NO: 378690 - protein, 358 aa, unidentified
MKNTDNKKHTNIIGIDLGDKSHETCTLNAEGEIIERSSVLNNHAQLIRFSNANQGATLIMEVGCHSPWISRLFVERGHKVIVANPRKLRVIYETDNKNDQRDAEMLARIGRFDRKLLYGIEHKSEVDQRVLKIIDVRDVLVATRVKLVNCVRGSLKSLGIFLGSGWSTEAFARKATEQLEPNDYELVAPLLEMIAELTARIKAKDRQIDDLIAKDYPAAKRLMSIPGVGPITALAFVLIIGSPDRFAKAREVGPFLGLVPRGDQSGDTDKPMRITKAGNQMLRRLLIGCAQYTLGKFGPASALREAGERKAGTGAKVAKKKAVVMTARKLAVLMLALWKDPSAHYEPFPNKPKQALAA

SEQ ID NO: 378691 - protein, 363 aa, unidentified
MSVESSNELVNGEVAITLGVDTHKDAHVAVALDGLGRHLGVISVPTTENGYRKLLRWAEDLGNIERVGVEGTGSFGAGLTRFLIAKGIEVREVIRPKRRDQYRSGKSDPIDAEAAARAVLAGTATSLPKGADGQVEMIRALRATRRSALKARTQAANHMKALLVSAPDELRAELCELSTSKLVKRAARFRLGGCPDDVTAATKFALRSVARRYLRLSEEVSELGEQLDRLVGEAAPELIAVEGVGTDTAASLLIAAGDNPQRLRSEAAFAHLCGVAPIPASSGKVARHRLNRRGNRDANRALYAIAFGRMRRDRRTRDYVARRTVEGKSKKEIIRCLKRYIARELYRVLVVPSPRERPPVSAP

SEQ ID NO: 378692 - protein, 313 aa, unidentified
MTQIALHVGIDVAKDRLDVAILETGELFSVDNNEVGHAALVERLSGCLIDVIGLEASGGYERAVLKALWQAGLPVRRINPHRLRQFARAAGINAKNDRIDARLIARFLATLPVHSIDLDPRLELVTELVTARRQLHAELSRVNNQAEHVRDPALKRLAKRRATRLHADILLLDKRLAQAIAADPALAQRDRLLRSTPSVGPVLSATLIALLPELGRLSNRQIAALVGLAPYDHDSGKLKGKRCIWGGREPVRNVLYMAALSAGVHNPVFATFRQRLRENGKLAKVAIVAIMRKLITTLNAMIRDNQPWSPASV

SEQ ID NO: 378693 - protein, 320 aa, unidentified
MLSFCGIDVSKDRLDVMVLPDEYSSSVPNDPAGWAILVEQLRGFSITAIGIEASGGYERGAVRSLQAAGMPVRQVNPFKLRQFAKASGVLAKNDPLDARMIASFVGIMPTRPALRTTPAAEQLVEMLAVRRQLSAEKTAAENASRLLEDLMLQRLSRRRIARLAADIELLDKRLVEIVATDATLAHRYRLLTSMPGVGPVLACTLIALLPELGGMSRKQVAALVGVAPYAFESGTLKGRRCIWGGRANVRQVLYMAAMSASNWNPMLKLFHDRLKGAGKLPKVVIVAVMRKMITTLNAMVRDDIAWADRLSGRHSVTTAR

SEQ ID NO: 378694 - protein, 323 aa, unidentified
MTCVIGIDIAKHTFDIAKPLERYKYRTKAKLANSPEGFKQFDQWLEKHAEPHCWVLMEATSVYHEALATHLHQQGYQVCVINPARIAKYAQSELRRVKTDKTDAKLIARYAQRHLEELRPWEPEPESIRQLRGLVRRLADLKELAQMERNRLDVSAESAQASIRIHLEHLDGQIALINTAINDRIDNDPDLREQKRLMKSIDGVSDGTTATLLAELGSPLRFDSARQLAAFCGLNPRLQESGIYRGKSTISRTGSGRLRAALYMPALSAMAYNPVIKAMKVRLAERGKTGRLAVCAAMRKLLHIIYGVLKSGQPFDPIRALAR

SEQ ID NO: 378695 - protein, 377 aa, unidentified
MKNVRFIGLDVHAETIAVAVAEPGGEVRSLGTIPNRAESVGRLIRKLGKPEQLRVCYEAGPTGYVLYWQLSELGVKCEVVAPTLVPVKAGDRLKTDRRDAEKLARCYRAGDLTAVWVPDAAHEALRDLVRARLAAKRDQLRARNRLSKFLLRHGRYAPEGATAWSTKYMAWVKQQHFEQAAQQLTLEDYLHEVEHAAERIVRLERSIDAAIETLQVKMRAVIEALQSLRGIAQISAVSIMAELGELSRFEHPRQLMGYSGAVSSEHTSGERVRRGAITKTGNAHLRRIVVEAAWAYRHRPAVGKTLAARQRRCSAQVTELGWKVQHRLHQRYARLIARGKCKQLAVTAVARELLGFIWAIGVEVERTHKPQELQRAA

SEQ ID NO: 378696 - protein, 382 aa, unidentified
MTGTEPHAWGTGLMDDITFVGLDVHKATVCIAVAEGGRGGEVRQLGIFENRLEILSKVASRLSKGGRRLSFCYEAGPCGYGLHRLLTGYGHECVVVAPSLIPMKAGDRVKTDRRDALMLAKLHRAGELTAIWIPDAAHEAMRDLVRARSTAVRALTKARQHLQGFLLRHERIYHGARAWTLAYRRWLTTVRFEHPAQQIVLQDYIHAVQEAETRRDRLTQQIEELLPNWSMAPVVAALQSMRGVALVVAVTVVAEVGDFRRFAKPRQLMAYLGLVPSEHSSGSSIRRGGITKAGNALARRVLIEGAWTYRMSARVSGKLHDRLEGLPAAVRDIAWKAQLRLCSRYRRLAATGRPKVVVTTAIAREMVGFIWAIARLAQPAPV

SEQ ID NO: 378697 - protein, 340 aa, unidentified
MDVRTLGIDLAKNLFRVHGADAKGKTTLRRQLRRRQLLPFMAQLPNCLVGMEACGGAHYWAREITKLGHEVKLMSPRFVRPYVKSSKNDARDAEAICEAVTRPSMRFVAVKSQVQQDVLALHRVRSLLIRERTGLMNQMRGLLAEYGVVVPVGAAHLRRALAEILGDRDERVSDILREALLEMSGRLHSFEERLERYDRQLGELARNDPRAGRLMTVPGVGPLIATALIAAVGDARQFKSGRELSAWLGLVPREHSSGERTILLGISKRGDRYLRTLLIHGARSALRYAPRKRDRRSLWIGAVRDRRGPNIAAVALANKNARVLWALLTRAEEYRVPAAA

SEQ ID NO: 378698 - protein, 409 aa, unidentified
MQVVHKCCCGLDIHKKVIVACMRMIQSDGTLLQQVRTFGATTKALIELSDWLVSMDCTHVAMESTGVYWKPVYNVLEGSFELLLVNAQHIKAVPGRKTDVKDSEWIAELLQYGLLKGSFVPEASQRELRDLTRLRTSLIREHARAVNRLQKVLEDANIKLSSVASDVMGTSARLMLNAIVGGETDPAVLSDMAKRRLREKIPQLQEALTGRIKPHHRFMIQELLVHIDDLDGSVERLNKELEERFRPFEVELGLLDTIPGINVHKAQEIIAEIGVDMTRFGHHTRLASWAAICPGNNESAGKRKTGKTRDGNKWLKHSLIGAAHGASHSKNTYLNAQYHRLRGRRGTNKAIVAVAHSLLVIVYHVLAKLEPYKELGANYFDQREEQAIQRRLVRRLERLGYEVSIKKVA

SEQ ID NO: 378699 - protein, 370 aa, unidentified
MSQSSPLYVGLDVHKDSIAVAYIAKDHEAHVISYGTIGTRHADIDQLTRKLPSKAKRLVFVSEAGPCGYWLYRYLTKKGYDCWVVAPSLIPKQAGDRVKTDRRDALQLARLMRSGDLTPVYVPKVEDEAIRDLCRAREDALRDLKAAKFRLKAFLLRHDIRYTGQATWHPAHLRWLSAVVCPTPAQQIVFQEYVRAVNEHTERLQRLEQELHEHVQTWRLHPVVEALQALRGVQCTVAVTTVAELGDLTRFDNPRQLMAYLGLTPSESSSGPRRRQGAITKTGNSHARRALVEGAWAYRYPAKVSRHLQLRLEKQPKVIQDISWKAQVRLCKRYRQLLARGKNANQIVVAIARELVGFMWAMASAVPVTP

SEQ ID NO: 378700 - protein, 394 aa, unidentified
MPRKRSKPVSLPVVEPDAAGIDIGATQIFVAVPGDKDSEPVRCFQTFTVDLRRLADWLQQCGIRTVAMESTGVYWIPLFQILEERKIDVRLVNAHHVKNVPGRKTDVADCQWIQHLHACGLLRGSFRPDDEICAIRSLWRHRDNLIELATIHLQHMQKALDQMNVQLHHVISDLAGTTGLAIVDAILAGERDPGRLAELRDWRIRASKETIMKSLVGDYREEHIFTLRQSLKCYRHYQGMIEEVDRQVKGMMQQLPSKIDDGKKPPKEKNPRKTPWRNEPPQLRDDLYRAFGVDLTQVPGINTLTAQMLLTEVGPDLSRFPTAAAFCSWLRLCPDPKISGGQVLSSTTRPTKNRAARALRMGAQGLHHSQSFLGDYFRRMKARMGAPKAVLRKN

SEQ ID NO: 378701 - protein, 343 aa, unidentified
MERYVGMDVSLKETSICVVDGDGEIVSEGTVISEPSAIAEHLETTAAGAKRIGLETGPTTTWLWHELRALGLPVICIDARHAKAALSMQINKSDRNDAVGLARIMQCGWYKEVQVKSVTCHEIRAVLNSRAQLVKIKLDLENQIRGLLKNLGLVIGKARGNVFCRRVEELLGEQGLLSEAVRPLLEVREKVSLEIAALYRKLMGLARNDQNSRRSMTVPGIGPITALAFHSAIDDPIRFRRSRSVGAYFGLTPRRHASGEVDWSGRISKCGDRMVRSYLFEAAGVLLTRVPQWCKLKAWGHRLWKRIGFKKAKIAVARKLAVVLHAMWRDGIDFIWSSKEAPA

SEQ ID NO: 378702 - protein, 430 aa, unidentified
MGLIMPSVMHPERVEQPLPYEWFVGIDWGSQQHQVCVLDRDRRLVGERAVDHDGASLAQLAACLWTLSAGQPQRVSVAIEVPRGAIVEGLVERGFHVFAMNPKQLDRFRDRHSVAGAKDDRRDAFVLADSVRTDRPSFRRLQLDAPQLLLLRELSRAEETLLEDFRRSANRFREQLHRFYPQMLQLCSAADEPWLWDLIDLAPTPAHAALLREEHVQRVLKAHRIRRITATEVLACLQAPALPVAPGAAEAAQAHCEFLLPCLRVLAEQLQACSQQVSALLRTLADEPGESAGPSDVAIVLSLPGVGRKMTAWLFAEAAQPLAERDYQVLRTHGGVAPVTKQSGKRRLVVMRQGCNPRLRHALYHMARVAMQRDAHFNSVYAALRAKGQRHGQALRNIGDRLLRILMAMLRHRTCYDASRMRREPVAQMG

SEQ ID NO: 378703 - protein, 339 aa, unidentified
MSSQIKHQAQNTKKFFAGIDVGAEELVLVIRRDGVSDKARKFANNSADHARLVKKLLSLGEVIVCLEATGVYSFDLSVAIHDAGIKLMVINPKASHNFAKALMKNSKSDAIDADTLAIYAERMDFVAWIRPSKEKVATRSLSRRINTLTRQKAASKNHLHALKASGENSEAVLADARLAISQLEQRIDNLTKSALGMIDKHPEIKQIFNLLLTCTGIAETSGIALIGEILLLPPGLTPKQWVKSAGLDPRIFESGKSVHKQARLAKAGNGRLRAALYMPALSAKRHDRHIKAYAQHLTDKGKKPLQVICAIMRKMLHAIHGMLKSSQPFDGSRFYALPA

SEQ ID NO: 378704 - protein, 329 aa, unidentified
MSEVVVGLDIHLKNTQVTIMKMNGEIVKKERIATTKADLQRSLQLVPKGSKVALESVGFCWPWIDFLNRLDYETLLANPVKVKLRAEDVKNDKVDSKTLADLTRMNWLPTCYVPPQELRWLRSLLRHRSYRTKLSTGVKNRTKSEFRKRDIALDVNLRTKKGRLAATSVEVFEVNQNIELLELMDKQSREIEFMLKEKYGQVEPVQLLMTIPGIGFLSALTLYGEICDIKRFGTSEKLAHYAGLVPSVRQSGEHSFTGRETKGDAWLKWILIEAAWSHIRFCPEGHLAQVFKEVSKRKGNSRDAIKVVARKLVNVVWAVWTYEKEFMVK

SEQ ID NO: 378705 - protein, 332 aa, unidentified
MKRKVYVGMDVHKETISIAYLTSNSKELVKEQQIKHNEVQIKKFVTKLKSEWNEIHCCYEAGVTGYPLYRYLNSLGVNCTLIAPGKIPRQSSDKIKTDKRDAIKLARLLRSGDLESIHIPSEEEEAVRDYLRSRDSLRLDLGRNRQRLMKFLLRKGNVYSATKYWTVSHYKWLNNLHFENEILQETFNDYYSRVKVQEENLKAMDQKIRGVAESEPFRERVGILRCFRGVDYLTAMFLLCEVCDFKRFKTAGSFMSFLGLVPGEYSSGSKRKQTGITKTGSPRLRRILTEAAWQHRFPGTGSKIVTDKEGRTTCVSRCFSRKSFLKITQEVS

SEQ ID NO: 378706 - protein, 327 aa, unidentified
MYICILNQDGDIMLHRNMNASPEPLLKAIAPYRDDLVIAVECIFTWYWLADLCAEEGIPFVLGHALSMKAIHGGKAKHDTIDAHKIAALLRGGMLPQTDVYPAAMRATRDLLRRRTHLMRQRAELLAHVQQPNSQYNLPEIGKKIADKANRDGVAERFADPAVQKNIEVDLALVTYYDQRLTDLELSIVKAAQHHDAHTLYLLQTVPGIGKILSLVLLYEIHDIKRFPRVQEFVSYCRLVKWAKESAGKRLGTAGKKIGNAHLKWAFSEAAALFLRNNPAGQKSLARVENKHDKGKALTILAHKLARAVYDMLKRQTAFDMEKFLQG

SEQ ID NO: 378707 - protein, 322 aa, unidentified
MNKDIKYYGIDISKDVFDVCDNEGKCFQYDNNPKGFKQFVKQLDSTSYCVMEATGYYHYQLAYYLLESSIKVSVENPLSVKRFIQMKLSKVKTDKSDAKMICEYGQKVEMRLWEGQSKNQIECLQISRLLDLYFKQSTAVKNKIHGEKVLGKPSSIVMKSLQQSKRNIEKLIKELELRLTELIKSEHQELLTLLESIPGMGRKTSMMLIVLTDGFNRFENAKQLCCYSGLTPTIRQSGSSVRGRSRISKVGNKKLRNLLFMCSFTACKHNKACKQMYDRIVAKGKSKKLALIAICNKLLKQAFAIAKSGLPFDQSYRSSLTI

SEQ ID NO: 378708 - protein, 342 aa, unidentified
MSGMIIGLDLAKSVFQVHAVDAEGKVVITRKVRRSQMLEFFTRLEPCLVGMEACPSAHHWARELSALGHEVRLMVASYVKPYVKRQKNDMVDAEAICEAVTRPTMRFVPIKSESQQAILMVHKTRALLVRQRTMLVNALRGHLTEMGVVAPKGIRRHADLVERVLAHGADEIDLPPLVRDIVFSSARQIGSLNAEIKELERKILEWHRTSEASQRLATIPGVGVITASAMAATVVDPAAFRSGRDLAAWLGLTPRSNSSGGKERLGRITKAGNRYLRTLLVIGATAVVGFSRRTTEGPLMNWVRKLLQAKSARLTTVALANKMARICWAVMAHKTVFGAAAA

SEQ ID NO: 378709 - protein, 350 aa, unidentified
MPMVAEVVDIVVGGDTHKDTHALEMLSPVGATLARLSIGNDEAGFAAALAWIAEHAAADRVLVGLEGTRCYGIGLVRALARAGLTVVEVERPKREQRRGRGKSDPIDAHLAGLAVLRMDADRLPFPRADGDREALRILLVGRRELVDTQTRQTNQLKALLLTGDDLERQLATGAYTQARLHAIIRRRGSGSETREQAVRRAEARRLAQAIRDGERELRANTKQLREIVEAIAPGLLTKYGVGPVTAAQAIVSWSHPGRCRNDAAFAALAGASPIPASSGRITRHRLNRGGDRQLNSALHTIAMTRWRSCPRTNAYIQRRRTDGKTDGEIRRALKRYIARELYRALNAAAA

SEQ ID NO: 378710 - protein, 411 aa, unidentified
MQRVIGMDIHRTFAEVVFWEAGRLRPAGRIDMTRSGLEGFGRSLSKQDEVVVEATGNAMAVVRVLSPYVARVIIANPLQVKAIAHAHVKTDKIDAGVLASLRAAGFLPEVWLPDADTELRRRLVARRNQVVRHRTRIKNEVHSILQAHLIPPCPHADLFGRLGRSWLGRQELPVDERAAIERHLRELDRLGEDLELLDREIAERVIEDPSVKRLLTVTGVNIIVAAGLVAAIGDIRRFSSPQKLVSYVGLNPRVRQSGLGLAQHGRISKRGRSHARAMLVEAAWAASKAPGPLRSFFLRIRARRGHQVAAVAVARKLAVLCWHLLTKDTEYQWARPALVANKIRAMQLQAGQPARKGNKRGAAYAYNIKELRDREIDVARHAEQAYEQFVSRWQRRGPGKRRTGAANEERR

SEQ ID NO: 378711 - protein, 393 aa, unidentified
MICVGVDVAKDKHDCFILSSEGEVLADVFTIQNNAEGFDTLLQTIRRCVCPGDKIKVGLEATGHYSYNILGFLLDKGLDTYVINPLHTNLYRKSLSLRKTKTDRVDARTIAAMLMSDVDLKSYTDTAYHNEELKSLTRYRFDKVRERAKLKQSVSRLVTILFPELEKLVPSLHMASVYALLSEFPGAKQVAGAHLTHLKAVLYDASKGRYGRDMATTLREAARCSVGSVMPTKSLELQHTIRLIRELDAEIEDIEAAIQSMMDEMQSPIMTIPGIGVRMGAMILAEIGDFSRFDSPDKILAYAGMSPSTYQSGQLSLSGAYSHMEKRGSRYLRYALYNATKYVCLWDPVFAAYLAKKRTEGKHYNVALSHAAKKLVRLIYAMEKSRQSYRNAA

SEQ ID NO: 378712 - protein, 360 aa, unidentified
MVVQRTNVGLDVHARSVVACGLDRQTGEVFEQRLTPSHEEIAAWIRSLPGPAAAVYEAGPTGFGLARSLRAVGIDCEVAAPSKLMRPSGDRVKTDTRDARHLARLLMLGNVTAVAIPSREQEAARDLVRAREDCRGDLMSTRHRLSKLLLRQGIVYRGGKAWTGKHELWLRCQRFDDPALQLAYDTSFEAMLATIARRDRLDRAIEQMAADSEFTAVVSRLCCVRGVATLTAFGLAVEIGHWHRLTGRSIGAYLGLVPTEYSSGASRVQGGVTRTGNGHARRLLIEAAWHHRARYRPGATLRRRWDAASAPARARGQLANQRLHARWQTFDARKKRAVVANTAIARELAGWCWSLAVLDG

SEQ ID NO: 378713 - protein, 375 aa, unidentified
MQYINDTELSSHEETRSQFNGGRCVIKFAEGRIRPVCGLGIDVHQDFYVVVEQMGGSNPKPPQRFQKEAFLHWAARLKQKSGAQVYAVYEACGFGFSLQRKLSALSIQCYVVCPQKLDDQNRRVKTDGLDAKALCLKLDRFVQGNRDALAIVRVPSEEEEQARAIHRQREQLVKARKQLEAQGRSLMVNHGLEPVQNWWKPRTFAALPMPQWMKELLANSQPILVALQQKIAALTVQLQSAASPEQPRGLGKMTSVIIDREIGDSNRFNNRRQIASYTGLCPGEYSSGNTRLQSCVTKHGNPRLRAALVELAWRLVRFQPNYKPIVKWRATLAKGALATGAARKKAIVAVARQLAVDLWRIKTGRLRAEELGLIT

SEQ ID NO: 378714 - protein, 398 aa, unidentified
MINGHDEIAVFLGLDVGKSGHHAVAQDRSGKKLLDRALPNDEAKLRELYGRMKAHGPVLLVVDQPATIGALPVAVALDEGVTVAYLPGLAMRRIADLHPGSAKTDARDARVIADAARTMPHTLRALKVDDETIAELTVLSGFDDDLAGQITATSNRIRGLLTQIHPALERVLGPHMDHPAVLDLIETWPTPTALTTAGKTRVRTRLLKKAPRLGGRLTEEIFAALAAQTVVVTGTNAAGIVLPRLATQLAALRQQRAEVAEQVEELVAAHPLSKVLTTMPGVGVRTCARVLTEVVGKDFPTAGHLASYAGLAPVTRRSGTSIRGEHPPRGGNKILKRALFLSAFAALSDPVSRAYYDRKRTQQKKHNAALIALARRRTDVLYAMLRDNKPYAQPAAAA

SEQ ID NO: 378715 - protein, 312 aa, unidentified
MDAMVVGIDVSKDRLDVAVRPTGESFVFKRTGLGIEDLVAQLEALSPKMVAIEATGGFEAVVAAGLTGAGLPVVVVNPAQVRAFAQALGKRAKTDLIDAAVIAHFAEATKPELRQMPDEMTRLLAGLVARRRQIVEMIAAEGQRARRMSDKRLIKSIARLRKALEKELSELDVLIGDQIRGSAVWAEKEDLLASVPGIGKTIARTLIAELPELGSLGRRQIAALVGLAPWTRQSGQWRGKSFIGGGRKSVRNSLFVGAMVAARYNPQLKSFRDKLVAAGKPKLIALVAVARKLITILNAILRDRRSWQQIPA

SEQ ID NO: 378716 - protein, 378 aa, unidentified
MNRIIKIGMDVHTTNYTLCIFEPSFEHDGTVHCITQVKPEVKNIIRVIETFKKKHENGELNIVCGYEAGCLGYSLYHELKEKGIECVILAPTTMKTEKGGRKLKNDYRDAKMIAECLAYGGYSAVHVPTELDNSVKEFIRMRDDIKENLKSIKQQIIAFLTRNGKQFDGKSFWTRKHIDWINTVSFSEPLLQDTLKEYMIEYNHLCDRVETLDKQIEEISLKEEYVEKVQQLQCLIGIKTHTALSLIVETSDFNRFKKGNMYSAYLGLIPGDDSSGGQENKLGITKAGNSHLRKLLVEAAQGYTRGKVGFKSKVLKSRQEKCSSEVVAYADRANERLRRKYYRMILRGKRYNVAKTAIARELACFVWGIMTDHIDLCS

SEQ ID NO: 378717 - protein, 355 aa, unidentified
MSSEKYIGMDVHQATISVAVMDSTGKVIMESILETKASTILEFLGGLRGTLSVTFEEGTSAAWLYDLLKPHVAHVLVCNPRKNAALKQGNKSDKIDARELANRLRLNDLKPVYHGETGVRMLRELARSYLTIVKDLSRVMNRVKALYRSWAIPCAGRDVYYTRHRSQWLEKIPEAGPRRRAERLYQQLDMLQYLRQQARRELLAESRKHSITAKLRQIPSLGPIRSALAVALIQTPHRFRSKRQLWKYSGLALETRISGEYVYVHGERRRSKKQISIRGLNKDHNHDLKGLFKAAATRASVIPGPFREFYQRSLAKGIKPTMVRLTLARKIAAITLTLWKKGENFDLEKLKSQAA

SEQ ID NO: 378718 - protein, 408 aa, unidentified
MLFVGNDWAEDHHDVEVVDEGGRRLGRCRFPEGIAGLTAFHGLIADHLPEDADPGDVIIGIETDRGPWVQALIAAGYTVYAVNPLQVARYRERHGTSGAKSDPGDAHVLAELVRLDRAHHRPIAGDSDTAEQVKVLARAHQSMIWSRQRQANMLRSLLREFYPAALIAFGDDLTGRDALALLATVPDPDRGRRLTVPRVTALLRRAGRQRNLPATAERIVAALRTEQLSARSGVVAAYAASVQALVAVLTTLSGQVDALAEQVSEGFGRHPDAEIYLSQPGLGSILGARVLAEFGDDHQRYADARARKNYSGMAPVTKTSGKCRVVLARHQRNRRLGDALYQQAFCALTQSAGARAHYDAHRARGNTHHQALRALANRLVGILDGCLRHHQQYDETIAWQQPTTAAAA

SEQ ID NO: 378719 - protein, 391 aa, unidentified
MIYVGIDVAKDKHDCFIISSEDEVMQDVFTIPNNLVGFNDLLQRICTASADLGKVKVGLEATGHYSYNLLGFLLSKGLATFVINPLHTNLYRKSLSLRKTKTDKVDARTIASMLMSDVNLKSYTDTAYHNEELKSLTRYRFDKVQERAKLKVSISRLVTILFPELESLVPTLHLVSVYALLSEYPGAKSLATTNLTHLKALLSSNSKGRYGREKAIELRDAARCSIGSEMPAKSLELRHTIQLIHELDAEIDEIEAAIKIIMDEIASPILTIPGISYRMGAMIIAEIGDFSMFDSPDKVLAYAGLSPSTYQSGTLDSSYSHMEKRGSRYLRYALFNATKFVCHWDPTFSAYLSKKRAEGKHYNVAISHAAKKLVRLIYALEKSRAAYQSAA

SEQ ID NO: 378720 - protein, 375 aa, unidentified
MSEHSEAFVGFDTSKLRNAVAIAEGGRDGEVRFFGEIDNTAEATAKLVRKLAGKYDQLTFCYEAGPTGYGLYRQIRSLGHGCSVVAPSLIPKKPGDRVKTNRRDAVTLAKLLRAGELTAVWVPDPSHEAMRDLVRARETAVIDLRAKRQQVSALLLRLGRHYPQKRQTWSKAHMNWLASQKFDYPQQRFVFEEMMLAVRQAQERLARVAEAIRGAVPEWSLAAVVTALMAMRGIDVIAAATLLAEIGDLSRFRTPHELMGYLGLVPSEDSTGDTVRRGSITKAGNGRARRMLVECSWSYQHPPRVGPHKQHKVDAAPPAVREIAWKAQCRLHKRSRALIRRGKLKTVAITAVARELAGFIWAINREITTAGGVAR

SEQ ID NO: 378721 - protein, 373 aa, unidentified
MAKYSTAFGMDVHLRSTTVCALDADTGEAVTRRFPGNPWGEIAGWMDGFPGPSLAAYESGYLGFAPQRELARLGVECVVAAVSKIPRSAADSASKNDRNDAARMAKAILAHDISPVWVPSPEVEGIRDLAGAYDGATARLATAKQRLLAFLAKRGFVYGGTTPAGNPRKYWAYDFLRWLDKVRPEDDGGVRALAALRNEVEAAAEARADLLSEYRAAVDASPIAAEAAALQSIKGCAFALAAAFSAEVGDFTRFRSGRQVTAYFGLAPSQRSSGDSVRLGGISGAGNALVRKLAVEGSWCYAAARHQPKLMPRDTGVPLEIRMHGRKGSERLLRRREEMLARGVPAAKANAATAAELVRWLWALGMMCREGAE

SEQ ID NO: 378722 - protein, 411 aa, unidentified
MADIAVDISDIGLFLGLDLGKEFHHAHGLTEQGKTVHDKRLPNTEARLRELFDKLRAKFGTVLVIVDQVANIGALPLTVARATGCRVAYLPGLSMRRAADLYPGEAKTDARDAFIIADTARSMPHTLRAVDRDDEKLAELTMLTGYDNDLAGEVNRTTNRLRGLLSQIHPTLERVVGPRLAYPYILALLERHGSPARLKKLGRARCEALLKAHGSRKAHHLTGEIFDALAEQTVVVPGTEASALIVPGLAAQLAAAHTQRRQAEQEIAALLEALPLFHLLTSLPGLGVRTTAAVIVAIGDGTTFPTAGHLASYAGLAPATKSSGTSIRGEHAPHRGNRLLKRALFQAAFAAIGCKADPSSRIYYDRQRARGKTHTQAILRLARQRVNVIHAMIRTGALYEARTPGDVGLAA

SEQ ID NO: 378723 - protein, 401 aa, unidentified
MDAGHERLWVGIDVGKGHHWAVAINDTGEPVFSRKLPNDEAETLQLIAAACDTAEHVRWAVDLRGKTATLLLVLLAAHGQEVTYVPGRSVNRAAEGYRGDGKTDAKDALIIADMARVRRDFSTITIPAEEVCTLRLLTANRRDLIADRVRLANRMRDLLCGISPALERAFGYARSKGAVVLLTHYQTPSALRRTGVKRLTTGLGRRKVRSPRKLAERAVEAADEQHTALPGEARAAALLSGLACQLLALDERIAANDREIRETFRVDERAEIIESLPGMGPILGAEFVAIAGDLLSYRDAGRLASHAGLAPVLRDSGRRTGNLHRPKRYDRRLRWVFYLSAQSAMQYPGPSRDFYLRKRAEGLRHVQAVLALARRRVDVLWAMLRDHRLYAITPQTAPAHS

SEQ ID NO: 378724 - protein, 341 aa, unidentified
MTEVSTIGLDLAKNVFHAHGADAAGAPVFRTKLRRDQVLAFLAAQPPCRVAMEACPGAHHWGRAIAKLGHEVKLIAPAYVKPFVKRQKNDAADAEAICEAAQRPTMRFVTVKSEAKQAAAVIFRARDVLVGQRTQLINAIRGHLSEYGMIAPQGRFHVERLIAQIEDPASDLPEPARACLTVLVSTLRHLQEQTAALDAEIAARAKADDVARRLMTVPGIGPLIATALEALAPPAETFRSGRDFAAWVGLTPVQRSTGGKERLGRTSRMGERTLRRLLIIAASGVVRWAKRKGVSAGSWLGRMLARKPPMLVIVALANKNARIAWALLTQGGVYRAPAVPA

SEQ ID NO: 378725 - protein, 355 aa, unidentified
MSQEKYIGMDVHQATISVAVLDSRGKLIMESILETKAATILEFLQGLHGSLSVTFEEGTSAAWLHDLVKPHVTRLVVCDPRKNALLKDGSKSDRIDARKLAELLRGNQLTSVYHGEHGMRTLKELGRSYLTITKDLTRVMSRIKALYRSWAIACSGTSVYAPRHRAEWLGKIPEPGVRLRAERLYQQLDLLQPVRQQARRDLLTESRKHHAVKLLRQIPSIGPIRAALLVAQLQTPHRFRTKRQLWAYSGFALETHDSGEYRYVRGKLQRNRERMTVRGLSNNHNPEVKNLFKGAAISASTHPGPLYDFYLALLEKGMRPTMARLTLARKIASITLTIWKKGADFDATQLHRQEA

SEQ ID NO: 378726 - protein, 342 aa, unidentified
MLDSRGGELGHAHFPNTRQGHDAGLAWAAGFGPADRWGVEGASGLGRHLAEFLVAAGCDVRDVPPHKTAVRQRGRHEGKTDRLDSHRVAAETQTNPRLARAFKHAVSAAPDSVRDRIALWHNARTSLTKVRVQLLGELDALVHDLPEDLRTQLRPAKTVSARVNSLRRLDTSGVTDLTVALRLRLIEHRVAMLRDVLEQDKAATTELTALVEETKSTLTELVGIAPRAAAEIIVETGDIRRFTEAGFARFNGTAPIPASSGEGENAPVRHRLSRGGNRRLNAAIYRIAMIQLRYEPRARQIHDQARAHGHTRREAMRVLKRHLSDAIYRTMLRDARRPADLT

SEQ ID NO: 378727 - protein, 356 aa, unidentified
MSNITRVGVDLAKNVIQVHAVDAAGKVVMNRALKREKFLIWCAELPAGCLVAMEACTGAHHWCRKLIERGFDARMIPAQFVAPYRIQGKTGKNDANDAAAVCEAASRSHMNFVPPKTLAQQGMLCVHRLREGLKEERTACMNRIRGLLAEFGVVLPQKPAVLRQHLNDVLEDASNDIAGMARLVLQRAQEHWRELEAHIKWCDERIAAHKKDDEQVQRAAELKGVGIITASAVVATVGDFTQFKNGAQFGAWLGLTPKQNSSGGKTSLGGITKRGSNYLRNLLIQGAKAALFKGVNNVDPISQWVHRLRERCGWQKAAVALANKNARILWAVMTGNKRYDAHHVSVPPAGAMPAAA

SEQ ID NO: 378728 - protein, 320 aa, unidentified
MSQNNHILYVGIDIAKATFQLHLEGRTENLPNTKAGRAACGRRLADAAAATPGRTVHVILEATGGYEAALCAALHAAGRRLSIIQPARVRHFARARANHAKTDPIDAAVLTAFGEAMRPAPTPPPSPAQSRLAALVGRRAQLVEMRTAETLRTEHAGDPLVRRQIRAHLALLDRQIAQCDREIAAQIAADEPMKARAARVRQVCGVGPVIAAILQADMPELGTLAVGEAASLAGLAPYNRDSGTHQGVRFIRGGRASVRCALYLAAMSAIRHDRILRAFYQRLRAAGKLKMVALTAVMRKLIELLNRMLKNPAFELRGAR

SEQ ID NO: 378729 - protein, 345 aa, unidentified
MELFTLGIDLGKTTFHIVGMNQRGEVVVRKCFSRAQLLHFTANLKVELIGMEACGGSHFLGRALREQGHDVRLIPAQYVKPYVKTNKSDYIDAEAIAEAVGRPRMRFVPIKSDDQLDLQSLHRVRERWVMRRTAVVNQIRGLLLERGITLRKGRRYVDAALPGILVNGTAKLSGAVLVLLTALKLELEQLAEKIDGSDTSIAQIARENEACQRLVAMPGVGPVTATAIIATIGNGAAFRKGRDFAAWLGVIPEEHSTGGKQTLWKIPQRGNQYLRRLFVQGARAVMQHRTKQSSGLSAWLAQLTARTHQNIAIVALANKLARMAWAVLAKNEAYRPPLVAGAATM

SEQ ID NO: 378730 - protein, 344 aa, unidentified
MSNLDTCGIEVSAKELVVRLRRQEDLEPLRNFTNTPEGHLILLRYLRRAGRVVRVCMESTGLYGLDLALALSGQGGIEVMVANPRAVRHFAYALMKRSKNDPMDAGVLEEFAARMPFQPWQRPSVAALALHALARRLRELVEMQTAEKNRQHAAGLSRAIPAVVRRDWARSLRAQERAIERLTRQARKLIAQDPQLAERIELLDSVPGIGETSAVQLLGELGVLAPDLEARQWVAYAGLDPRQYTSGTSVHKKPRISKAGNKHLRHALYMPALVAVQHDPHLRAFYQHLLAKGKFKMQALVAVMRKLLHALHAMFKAHQPYDGSKLFRLNSAPAQEVPRALVAS

SEQ ID NO: 378731 - protein, 426 aa, unidentified
MYSNTQNSKIAAITDKSLVLGIDIGSEMHYARAFDWRGIELTKKPFMFNNNDEGFKAFKTWIEELKKIHDKDKVIPGMEPTGHYWFNLGAFLQDNGMRPVHVNPHHVKKSKELDDNNPSKNDRKDPKVIARLVIEGRYSYPYIPTGVYADVRNLSNLRLQAQGELTRIKNRIARWFAIYFPNYKDVYGKLDAVTGLAVLNKAPLPEDIVKLGVNGVNKIWRDAKMRGTGLKRAQTLVTAAEHSVGCTEASDAARYEIKILLSDYDLYAKREAELMGMINDKVKEIPYIDKLLEIRGVGLKTAIGFVAEVGDISRFDDPKQIQKLAGYAIVENESGKHKGEHHISYRGRKRLRYVMYEAAISVVAHNAEFKEIHQHYITRDKNPLKKMQSLIAVACKLLRVFYMLATTDSHYDGNKMLGDIKRPALA

SEQ ID NO: 378732 - protein, 412 aa, unidentified
MSNPLLVGVDVHRKTNTVCLMDSQGREVAPRFTVDNNRPGTETFIKRIAQQVVAGNFDAIEIAAEATGWYWWHFFQTLDQDPFLNRWPLALYPFNPRLTANFKKTYVDLDHSDPIDAFVAADRLRLGRDLPAPFHYEERYFPLRLLTRYRFHLIHNLAREKAYCLAILYLKASEYTRLKPFSNVFGAASRAVLQEFASIEEIAAIPFDELVEFIDRKGKRRFPDPTENARKLQRVARDSYSLPEALQQPVNLVLGMSLKYITFLERQVKRLDTAIAHQLENIPHTLDTIPGMGPVFCAGIIAEIGDPARFNYDQAKVAKYAGFKWRKRQSADFQAEETRLTRTGNRYLRYYLCEAANRVRMCDSEYAAYYERKFHEVRKHQHKRAIVLTARKLVRLVVRLLTTNQPYQPRRT

SEQ ID NO: 378733 - protein, 391 aa, unidentified
MIYIGIDVAKDKHDCFITNSDSEVLFKAFTIFNNLDGFNDLYQKIESVMDDVTKVKVGLEATGHYSYNLLGYLIDKGLPTYVINPLHTNLYRKSLSLRQTKTDKVDARTIASMLMSDVNLKSNSDTSYHNEELKSLTRYRFDKVKERAKLKTSVSRLVCILFPELEKLVPTLHMASVYALLSEFPSAKHVATAHLTRLTNLLSESSKGRYGKDTAITFRDSARASIGSNMPAKSLELKHTIKLIQELDSEIDEIENEIKIIMDEINSPILSIPGINYRMGAMIIAEIGDFNRFDSPDKILAYAGFSPSTYQSGQLDGAYAHMEKRGSRYLRYALYNATKYVCHWDPTFAAYLAKKRAEGKHYNVAISHAVKKLVRVIYHLEKTKQQYIKAA

SEQ ID NO: 378734 - protein, 388 aa, unidentified
MFHVGIDISKFKHDCFIATNAGDKIGSFTFNNDHDGFQTLKVELESLGDANQIKIGFESTGHYGINLKSFLSKLGYTYLEFNPQLTSKFSKATSLRKAKTDKIDAKLIASMLGHFDYKSLHTSFYHENDLKELVRLRDKYLESRSKELIKLTNALDKVFPEFKPFFNNRFGETPMYILKRYKTKEKISNLTNSHYETLRKMSRGKFTYARFSNLRHLALTSVGITSEIYELVIPMIIENYYHFTKLIDQLDDQITTLYNKSGSLIHTIPGIGIITAASIYAEIGNINRFNNASQLTAYAGLDVTVSQSGNKEYRGSIVRRGSPLFRKKLFNYSFQSLKFIPQFHDYYHKKKQIGKHHKVVLIHLCRKLLRIIFHIESNKTSFDINKIK

SEQ ID NO: 378735 - protein, 332 aa, unidentified
MNLVSTLGIDLAKNTFSVHGVNSHGAVVLRRSLSRTKLSELVAQLQPCLIGMEACSGAHEWARRFSAFGHTVKLMAAKFVKPYRKSGKNDSNDAEAICEAVARPNMRFVPVKSLEQQSDLTLHRVRQGFVEERTATLNRLRGLLAEFGHVLPLRAVEVRRQVPQLLGKLPSRVAACARDLLQHAAQLEVKALEYEHEIRAHVRSNALARRAQTRMGIGPITASALVATVGNGHDFKNGRQFAAWLGLVPSQYSTGGKTRLGHITRHGDAYLRTLLVMGARAVLQRAGSLTDPLSRWAIAVRERRGYHRACIAIAAKNARVAWALLAKEPTVA

SEQ ID NO: 378736 - protein, 269 aa, unidentified
MSSLVCGLDVHKDSVYATVMNYGGEVVDKRKLTNDEVVNYLSQYPIDKVAMESSTSIVPIYRALRGKGYEILVSHPKKTRLIAESRIKTDRVDSWALTELARLDALPLSYMPPDDIAALREKVRRRAFLVRMHSKLKVKIKAQLVISGFTPPSEYGLFTSKGLEWLRSLQLDAVDSYLPVISTLDIQVGKLSRELRGVASGDEDVRLLMTIPGIGYYSALLVKSEIGTVDRFPDGEKLCSYAGLAPGMRSSAGRTVRGHITKEGNKYLR

SEQ ID NO: 378737 - protein, 427 aa, unidentified
MKYNQNQKISQITEKTLVVGVDIAKKVHYARAFDWRGIEYGAVIHFKANGSGFEEFLKWMENIREKYGMIKVIIGLEPTGHYWYTFTQAVLEKRILVVQVNPYHVKKSKELDDNNPSKSDRKDPKTIAMLVKDGRYQIPYIPKGIYAELRNINNLREEFLKKIWSVKNKIIRWIDMYFPNFFKVFGNWEGKTALKTLEKFGLPENIVKASAEEVLSIWREDVKRGVGIKRAEKLLEEAKASVGVREGLISAKYHMTLLLQEYRELRRVLDEIEEKMETLVLEIPGAMNIIEMKGIGIKTVAGFFAEVGDITRFNHPKQIIKLAGLNLRENSSGSHKGETTITKRGRSRLRALLFRAILPLAGKNKEFNALHHYYISRKGNPLKKMQSLIALCHKLIRIMYTLVSKGVKYDPIVMMNDIRRPEIKQAA

SEQ ID NO: 378738 - protein, 385 aa, unidentified
MRPFGEVVVSPFEVLHTDSELSKLARLLKSLDGETRVVMESTGNYHAPVAWLLHDAGLYVSVVNAMLVHDYGNNSLRRAKTDKKDAVKLANYGLDHWLTLPRYVPEEDTRLMLKSCYRQYQQYSKVRTMLKNNLISLLDTAFPDANRLFTSPPRADGSEKWVDFVAAFWHCECVCGLSEKAFTAKYQKWCKKHGYNFSEDKALDIYASACGHFGVMPKTDTAKLLVEQAISQLRATSAALAALKQEMQSLAASLPEYPVVMEMFGVGPALGPQLMAEIGDVRRFHSKKSLVAFAGIDAPPYQSGQMDIRSRSISKRGSASLRRTLFLVMGVLLQCAPMDEPIYQFMNKKRSEGKPYRVYMMASANKFLRIYYASVKAYLDSLEHN

SEQ ID NO: 378739 - protein, 354 aa, unidentified
MSSILAGKVEFVVGVDTHRDSHTAAIVSAATGGVVDQLTVATDASGYRELQDFADRHAPGRRVWAIEGTGSYGSGLTTALLEHGQWVVEIDRPTRPARRDRAKSDDLDAVRAAREALGRDHLALPRARGDREALRVLTTARAGAVVAGTKAINQLKALIVNAPQPLREQLRHATSDEQLRRCARLRTQPTHSIEHRATIRAIRGTARRALALAAEAAEYETELKQLVVAICPALLERPGIGTITAAQFLISWSHPGRIRNEAAFAALAGAAPIPASSGTITRHRLNRAGDRQLNRALHTVAMTRLRIHEPTQAYTARRTAEGKTPREIRRCVKRAIAREVFRIMTHHAKDPVAA

SEQ ID NO: 378740 - protein, 333 aa, unidentified
MTLSTAVCVGIDVSKGQLEVAIGQSLVGSFDNTSAGITRLRSRLPREVSLVVIEATGCYSALAARELTAAGYRVAVVQPGRVRQYARSQGLLAKTDGIDARMIAQYGEHSPGLRTYQEPPAVRQRLRALVDRRDQVVEDRVREENRLEACTDDLVRKSLRASVARLRRQAATLERQIKQVIAADHDLTTQADILTSQRGVGSLTAAHLMAHLPELGHVNRQEIAALAGVAPYNRDSGQYRGSRFRRQATRPHRHAHGRHHRHALRSRHDQRLPTPHRTRQTRQSRHRCHHPQNADEIKHTRRRAPTTTPQAHRHLTPTNQPTTARRGPTAHGE

SEQ ID NO: 378741 - protein, 425 aa, unidentified
MNYKQNEKINQVKESTLVVGIDIGSTTQYARAFDWRGIELGKVFPFSNSREGFESFKAWMQHLQDKYKKLDAIVGIEPTGHYWFDLGAYLEDEGILLVMVNPYAVKQTKELDDNSQSKNDRKDPKVIAKLVTEGRYSAPYTPDGVYADLRIMVANRKRLIREMTQIKNRFARWFAIYFPEYTDVFGDYEAQSSMLLLKKVCTPEAIVKLGAEKINQIWRDAKLRAVGMKRATTLCETAKRSIGLKKGSSAARYEMKLLLEDYEYKKAQLDAVMEEIEKLCRKIPESEQMLAIKGIGVITVAGFLAEVGDVRRFESPRQIQKLAGLSLRENSSGKHKGQTTISKRGRSKLRAVLFNAAIPLIAKNPEFKSLHEYYTTRANNPLKKKQSVIAISCKLIRVFYAILANGVTYDAQKMLSDIHRQPQAA

SEQ ID NO: 378742 - protein, 413 aa, unidentified
MNFIGVDLHKKSITVCVMDQNRKVLARKTIDCKETNEIVDFFRKFRPFQVVVEATASYPWFVKLVEPLADRVVLGNPKKLRVIAESTKKTDRLDAQILAEFLALGMIPESYQPTPRQREHRTLIRHRQFLQSRITSVRSKIHHILSNYNADRKDLFSANRGPAYFKEVPLSDADRFVIKQLWAEWLDHVAQRLALTKQIKAFVAKAPQREKEARAILKTAPGVGFVTAEVILSELGDISRFRNAKAVSAYAGLAPVVRQSGGKKSKDLKITKEGSGLLRWALVEAAWRLVGSSPKWSAMFARLKQRKGSKRAIVAVARKLLCVLYAMLRTSTPYKITTTQTKAPRTTRKRLVLVRTSPAEQTTTTETTTPRTTRKRPAKAPAVEQTTTAEAAVPRATRKRSAQTSNREQTTTA

SEQ ID NO: 378743 - protein, 382 aa, unidentified
MQRATNIATVSANTLECALEMSKKTWLLAIQFPDREQPSVYTIKGGDAAALLAKLIAARDRWAKVSDSPPTIVLCYEVGYDAFWLARFLIAHGIECLVIDPGSLEVKRRPRRVKTDRVDLKKLLRTLSAWRRGERHVWSVVRIPTIEEEDLRHSHRERRRLIGERTAHINRIKGLLFAQGIRVDNIKTLALEKLVTGDGHRLLPRLAAEIAREMKRLAMVQEQIDDIERERDTAPTPCKETEKKRHLLLQLKSIGPTNAAVLSREVYYRHFDNQRQIGSFLGLTPSPYDSGEEERCQGISRAGSGRVRAVMIEAAWLWVQHQSKSALTRWFIQRTAGQSKRIRKIMIVALARKLAIALWRFVELGLVPEGAILSARVTAKAR

SEQ ID NO: 378744 - protein, 340 aa, unidentified
MQITTIGLDIAKNVFQVHGIGVGERVVVRKRLRRNQVMAFFEALSPCLIGMEACASAHYWARELTKLGHEVRLMPAKDVKAYVKRNKNDAADAEAICEAVGRPTMRFVRIKSAEQQGQLMQHRMRDLLLRQRTQTINALRAHLAELGITAAQGREGLKDLLAIVADERDERLPINARVSLVVLAAQLQALQRLIGTLEKRIMAQHRASQESRRLATIPGIGVVGATAIAATITDPKAFRSGRDLAAWIGLVPREDSTGGKRKLGPISKQGDRYLRRILVVGAHSVLRRAKQNPERYPWLTRLLARRPFKVVAIALANKMARVAWALLAKGDTYRPRLAAA

SEQ ID NO: 378745 - protein, 428 aa, unidentified
MSAREAVEQEPEFVAFVGIDWADQKHVWCLQAAGSRQRETGELEHKPEVVEAWVSELCRRFGQGAIAVAVEQVKGALVFMLRKYECLHLYPVPSTMSSSMREALYPSGAKDDPRDADLLLDLLLQHRDKLRRLTPDNEATRRVQNLVEERRKLVEEKTAQLNRLSGYLKVYFPQVLEWFAKLDTKLACEFLEHWPSLEELQSSSPAEVRKFFRRRRGRHGELTEWRMQGIGQAMPAIRDRAVIEAKRLVVQVIARLLRTLLEGIATLDSKIAEAAEAHPDFFIFQSFPGAGAALAPRLLAALGSQRDRYASAEEVQKYSGIAPVTERSGKKKWVHFRWACPKFLRQSFHEWAGHSIAQSVWARAYYQQQRQRGKDHHAAVRALAFKWIRIVFRCWQERAAYDENRYLAALAKRGSPLTSVFAAAAMSV

SEQ ID NO: 378746 - protein, 409 aa, unidentified
MNKVDIAPFEVFCGIDVGKSLNHIVALDRYDDKPLINRKVPQEEAEIRAALEEAGDFGLALVIVDQFGAFGRLVVGVAKSMDIPVAHMPPRRFRQVAETYGEDKFDEKDAFILADASRTTPRNIEFVGNRAESMAEIKVLSSRRDDIVEERTRCYNRLHDFIHQVSPPLEELFSKRKLHNDLEIRLIARYGGPIGFRQAGRARASTWAAELKYHCVDGPKKVEQVFDVLDRQTVMLPGAAVIEEQIRSIASRIIELLAEEKRLNLMIEQRAKMIPEVDLLQSIPGVGPVYAALIAVEIGDIGRFRDSNHLASYAGVAPRKEESGTSVHKRRKRKGGNRRLKNALMQSSQRSVQCDPLARAYYERKRAEGKKHLQALRALARHRVTVIFAMLNEGTFYEPPVEVDENGSG

SEQ ID NO: 378747 - protein, 423 aa, unidentified
MQNDPVDEYAAFIAIDWADQTHVYSLKVAGESKKEIGTLEQKPEVIGPWVAKLRERFRGRPVAVAVEQSRGALIHALLWYDFITIYPLHPTTVAKFREAFKFSGAKSDPLDTNQILEILTKHLELLNPLRPDTEETRLLGRLVEDRRKTVDLRTSQIQAALAVLKEYFPQAIELCSSNLSSRLAYDLLKKWPTFEAFQQAKPATIKRFFYGHNIRSPQIIDKAVEGATHGTALTTDAAIVESSSRICLMHLQVIQTLNPIIEDYEERIQKVFNGHPDAFLFEKLPGAGQALAPRLLAFFGTDRTRYAAAANVQTFSGIAPVTKSSGKSKVVYFRCACPKFDRQSFHEFARLSIRSSQWARNYYDYYKAKGKKSHAIVRALAFKWIRILFRCWQNRTAYKEDTYMESLKKRGSIFATLHLEKNS

SEQ ID NO: 378748 - protein, 344 aa, unidentified
MKHIAIDLGGMESQVCVRDPDGAVQLEGKRKTRDLDLFLSGREKSRVIVETSAEAFKVADAALAAGHEVRVVPATLVKSLGVGSRKTKTDVRDAQILSQVSCRIDLPSVHIPSQVARERRSLCTLRESLVSARTQLVNSVRGYLRTQLVRISPGRTESFPRRIRLLLERRREGYPAMVDRLLTCIDVLNDQIALADQELETIAEADPTCRLLMTTPGVGPVTAVRFVAAVDRIDRFQSAHKLEAYLGLTPGENSSSNRERRTGITKAGPPQLRWTLTQAAWCLWRTRPQDRIVLWAHEIKKKRGPNVAIVALTRKLAGILFAMWRDGSNYDPNHRASSEVAVKP

SEQ ID NO: 378749 - protein, 322 aa, unidentified
MRESERRCVGIDVAKATLDVQVRPSDERWSVANDEAGIRTLVEQLRNLAPAQVVLEATGGYQLAVVSALAAAALPVVVVNPRQVRDFAKATGRLAKTDRLDAAVLARFAEQVRPEARPLATADQQELDALLTRRRQLIEMLTAEKNRLGQVFVRGGKQVRKSLKTHIAFLERELHMTDTDLGELVRQSPVWRERDDLLQSAPGVGPVLSRTILAALPELGQLDRKAIAALVGVAPLNRDSGTMRGKRMIFGGRAPVRTALYMGTLTATRCNPVIRAFYLRLVAAGKPKKVALTACMRKLLIILNAMVRQGTRWSPVLAEVTA

SEQ ID NO: 378750 - protein, 403 aa, unidentified
MIFVGDDWAEDHHDVYLMDEGGKRLAARRLPEGLAGISQLHELIAERAEDPGQVVIGIETDRGLWVGALVGAGYQVLAINPLAVARYRDRHHVSGAKSDASDAKLLADLVRTDRHNHRPIAGDSADAEAIKVLARAHQSLIWSRTRHTNALRSALREYYPTALVAFEDLAHGDALGVLDRAPTPAEGARLSLPVIQSALKRGGRQRNIAARARDIRAALRAEQLAAPAPVAAAFAATTRAAVGIITELNRQISELETSLAAHFEKHPDADIYRSLPGLGVILGARVLGEFGDDPNRYTDAKSRKNYAGTSPLTIASGKKRAVLARHVRNRRLYDALDQWAFCALTTSPGARAFYDQHRAANQTHHQALRALGNRLVGILHGCLRHYTRYDEHIAWAHRTPAAA

SEQ ID NO: 378751 - protein, 339 aa, unidentified
MTQVYAGLDVSDKLTHVCVADGEGSIAWRGVCATDPEALAKTLARHGAELARVVLETGALSAFLYHGLVERGVPAVCICARHAKGVLRARSSKSDVHDAEGLAHLARTGWFKAVHIKDGATHLDRARLKVREQLIKSHHAMLGQLRGLLKLFGLRMGKATTPGKRAERLDALFARKPELRPVLAPLIAGLGALEHEIGASSRSLKMRADADPVCARLMSVPGIGPITALTFKSSIEDPARFARSRDAGAYAGLVPRRFQSGERDTHGRISKAGDPMLRSALYEAANNLLCRVKRPSPLQAWGKALAQTKGAKRARVAVARKLAILLHQLWRSGDSFRWA

SEQ ID NO: 378752 - protein, 401 aa, unidentified
MSELEKGLVFAGVDTHTLCLLDHTGRAIGTFRFAADAKGYDALAGKIGGPATCVGVGIEGTCSYGAGLTRRLLELGYCVYEVMVPGRARRKPGRPKSDPADAEVAARQVLARVNLSKPKDQSGWTEELRQLMIARDRLVQATSAMINAAKSLIVTAPEDLRRSLEGLSRKNLRSALSTLDPAAGGIILALGSLGKAWDLQDREADAIEERMKRVLEANAPALLTIYGCGTVSAAALAVAGGGNPERLKSEAEFASLCGVAPLLASSGKTERHRLNRGGDRRANRALYQIAVTRMSYDQRTKDYVGKRKRDGKSKKEAIRCLKRYIAREVFRALRNPLETKGPSWKDLRPARQALGITLVEAGKALNVGFQRVSYAETGRLMNVRFLEEYDAWLKSQAKRES

SEQ ID NO: 378753 - protein, 482 aa, unidentified
MSARIVSATTQPRPLPERFGMDGRTETTRVGPTSHTQMSSEWWPHSGLHYRACAGPTPSAQLHDERRRSDLNSIVAYIGLDWADERHSVHLQTADGTTEHLELEQKPAVLHEWIAQLQQRFAGGKIAVALEQRKGAVIHALLMYDCFVLYPINPKALARYREAFRTSGAKDDPLDSALLLDLVVRHRDKLRAWVPDTVESRKLQALCEQRRKLVNQRVALSNRLTSLLKQYFPQALEWVGDLASVQACDFLTQWPTLAAVHRARAKTLRQFYRAHNCRKAEVIEARLAAMASARPLTTDAAVIEPLSLSVQTYATQLRALIAAIQTFDERIAEVFAAHADHDVFTSFPGAGDVCAPRLAAAFGTDRSRWDSAAELQAHSGIAPVTERSGKTVWVHHRLACPKFVKQTFHEFADQSIRFSKWARAYYDQQRARGNDHHAALRALAYKWIRILFRCWKERRPYDEDTYVEALRRRGSPLAKNFA

SEQ ID NO: 378754 - protein, 371 aa, unidentified
MDSSCDLIGIDVPKSLPVTAKGGVQLNDTLVGVDLAKAIFQLAISRRPGRFEDHPRLTRDQFLPFFAQLPVAIVIMEACGTCHYWARKVRELGHAVVLLPPGQVRPFVRRNKTDRADAKALVDAYRNGEIRPVPVKTPEQQVLTSLHRLREGWMAQRTARLNALRGLLREQGVFIRVGANEVVPAVWALIEDADSELAMPLRTLFAEACQEIREIERRLDLVERELGALARQLPEVERLMQIPGIGLIIATALVGFVGDLRRFPSARHFASYLGLTPREYSSGLRQRLGRISKRGDSYLRMLMIHGARSVLSRARSVSNPDRLRTWALALEKRAHHNKATVALANKIARIAWAVSVGDTDYRSVPAPDKVA

SEQ ID NO: 378755 - protein, 416 aa, unidentified
MDAIVERCAGLDVHLDTVVACVLYGKLDIKPKKEVKTFSTTTKGLLELLDFINQKECTHVAMESTGIYWKPVWNILESGAFELIVANAKKIKNVPGRKTDVKDAEWIASLLRCGLIEKSFVPPERIRDLRDLTRLRKELLGEVNRNKNRIHKVLQDANIKISSVLSDVFGETGKSILNQIIDNQCITEEFIYSLYEGRGKSKLKSTPMEMYEALNGKIRGHHVILLGMHNSNIVFLEKQINELEKEIDILLQKERDSLELLETIPGISKISASSIIAEIGTSMDVFKTEKHISSWAGLCPKNNESAGKKKRSGIKSGNNWLRSMLCECAWSATKKKDSRFKNKYWSMVPRMGRKKALIAIANMMLRLIYHLLKTKSTYKELEIQYFIDKDKRREDRIIKELKSKGYLVEKDSLQMA

SEQ ID NO: 378756 - protein, 414 aa, unidentified
MEGLQAVRRRVAGIDVHRMLHVVTAVVEQDDGSIEETSREFGGFKRDCRALASWLAGLAVELVVMESTGIYWKSLHAHLERAGIEVWVVNAHHIKYVPGRKTDMNDSQWLAVLARFGLVRGSFIPPQDLRELRLLSRYRRKVSSMRASEVNRLHKILDDGGIKLGAVVSDINGVSAREMVAGLIRGTGIDVLLDVARGKLKLKRDDLREALDGDLSARHLIILKHIHEHINSLERKLAEIDAYLLAAMEPYALAHRLLQTIPGIDQIASALILIETGTHMGQFGSAQHLASWACLSPGNNESAGKRKSGRTGRNNGVIRYILCECANAARNTKSSLAAKYRSLKVRKNHKKAIVALAHKMIRVIYVMLTRQEAYHDPQTDYAAISAKKNAPRWIKQLREIGKWPDLKHPAATSA

SEQ ID NO: 378757 - protein, 351 aa, unidentified
MTDYKLGFDVHKRYSQIAVLNAEGQVCERTRLVHSPESVRAYLMQFPAGTPVAFETVGNWYWIAEAIEAAGCEALLTHAAKAKVMMGNVNKTDKLDAEGLATLLHLGKLPTVWIPTATLRDERELLRTRMFLSKIRTGLKNRIHATLSKYALVIEAGDLFVGQGYEHLKKKLLELPTHTYACVAQELEVLDQVQQQIDRLEKHIQRCVQDTPATSLLKTLPGFGKVFSALVTKEMGPAARFPDAEHFASYAGCVPKVSSSGGKTYYGHLRKEANHYLKWAFIEAANVIVAHRNKPAWRTKHVVRLYERTRQRKGHAVAVGAVARHLAEAAYWMLRKNQPYREPVSDLPKPA

SEQ ID NO: 378758 - protein, 417 aa, unidentified
MSEYAALVAIDWADQQHAVCLLDPSTGEREQTIVKHTPAALQEWALGLRQRFAGQPLAVCLEQSRGPLIYALLQYDFFVLYPINPATLAKYRQAFSTAHGKDDPTDADYLLDLLEHHRDRLRRWHPDDQKTRTLRLLVEQRRRLINDRTRICNRLTALLKGYFPQVLDWFEDIRTRLVCDFLERWPELAALQRTRPATLNNFFRSHHSTSKATNQRRLTEIKTAIPLTNDLAVMTSSVLNVKVLVAQMKTVIAAIAEYDRHLEALCLTHQDYELFASLPGAGPVHAARLTAALGSDRSRWQSADELVTFSGIAPIIERSGKQFRIRWRYFCPKFFRQTFHEFAAQSIQDSFWARAYYYQQRAKGKEHHAAVRALAFKWIRVIWKCWQSRTPYNEVIYLETLRKKGSSLLKFAADYRP

SEQ ID NO: 378759 - protein, 340 aa, unidentified
MSEITTIGLDLAKHVFQVHGIDAQGTTVLRKRLRRGQVLAFFSRIPRCVVGLEACATAHYWARELGALGHEVRLMPAQYVKAYIKRNKHDAADAEAICEAVERPTMRFVPVKTAEQQATALLHRGREQLVRQRTMLVNALRAHLAEFGIVAAQGLRNVGELIAIVRDDGDTRLPDAARQVLQVLANQIEQIETAVAALERQLLAWHKTNPISQRLASIPGIGPIIATAIATTVADPKVFRSGREFAAWLGLVPRQNSTGGKTRLGGITKRGNRYLRRLLINGASANLLRSKATKADPWVIGLRRRRPPLVVAVALANKTARIAWAVMLREKEYQPRAVAA

SEQ ID NO: 378760 - protein, 367 aa, unidentified
MKKHTTMNKPVSATDVSVCTTVAVDLAKKVFQVAGEDAQGQLAYEQRIKSREAFQVFLQKLPEGVTVLMETGPGAQAWARLLQAQGNPVRILPAQRVAEHRSGAKNDRNDAHAILRAGRDSSIASVPVKSVAALAMQAWHRVRRGYVRRRTAMGNQIRGLLLEQGIVLAQGDVGLKQGVTRVLEDASQPLPALLRELIDEMLNEWQRLGERIAALTGRLEACAAADPTAKRLMTVRGIGPITATALLAKQVEPERFANARQFAAYFGIVPDQHSSGQKVRLGKMTKRGDAYVRSLMVVGSHAVLKQLRPDSEHPDDRRLQRWLQRLGRKGAAVRLANRNLRIAWVLLCSEQTYQRKPNACREMEMSH

SEQ ID NO: 378761 - protein, 426 aa, unidentified
MPYRIAGIDVPKKMLAVVVADVEVEGEYEFERCRFSTSPEHLRLLAEWLIEKQVEEVVMESTAQYWKPVWGALERYWTPSCKEREGTGPMSGALHRAQALSNRGRRGRKNDFRDAERLVKRLVAQELTLSFVPDTEQRLWRTVMRGKCQLTRNHVRLQNRLEALLEEAHIKLSSVVSDLLGVSARRMLKALAEGETNPTALAILADKQLRATPAQLCDALGACTELNPVYRRLLKMALEELQLIEPQIGKLDQEMASLLSQHQDAVRRLAEIPGLGPDSAQQIIAEVGASAATFPTAKNLSSWVGVCSGDEESAGVNPNHRSPKGSRHMRRILNQAANAAVMHKGSIFEMVYRRLVPRLGHNQTIGAIAHRLCRLIWLILHQGVGYEERGPAVSQRSKQRRTAKMIRELRSLGYRIEPISVQASNA

SEQ ID NO: 378762 - protein, 326 aa, unidentified
MQGKEASEQETKIKSNVGIDVSKDWLDVHVLPNEQRLRVPNAGEGIRQLKRWLIRLEVALVVIEATGKWHRQVQRSLAASAIPAAVVDPFRVRMFAKAQGVLAKTDRLDARVLALFASVMTPTVRPPTPQALAELAELVTARLTAVEAQTSLKNQRAAATVKFLQHQLSRRIERAERDIEALDAAILKRIKADESLARRYAILTSIPSFGFVSAAILIACLAELGSISAKQAGMLAGLAPIADQSGRREAARVVFGGRPRVRRILYLAALTATRLNPGMRAFYQRLRANGKPPKAALIAVARKLVVLANTLISQDRTWQHHPPQHA

SEQ ID NO: 378763 - protein, 421 aa, unidentified
MKQQASEAFAAFVGLDWADAKHDVCLQAAGTAQREFLRLEHSPEEINAWVQTLRTRFSGQPVAVCLELTKGPIVSALRNYDFLVLFPVNPLTVAKYREAFTPSRAKDDPTDAELQVEILLKHRDKLTPLSPQSPTMRALAQLVEHRRRLVGDKVRLTNRLTSALKNYFPHVLQWFQEKDTAIFCDFLSHWPTLKAAQLARRTTLERFFRTHHVRSADVITTRIEAIKSAVALTTDDGVITPHALLVQALVAQLRVTLQAIADFDKAIAQRAQDHPDFPLFDALPGAGAVFAPRLLVAFGEQRERFASAEELQKYAGIAPVTERSGKKSWVHWRLQCPTFLRQTFVEWAAESTRHSFWAQVYYQQQRDKGKAHQAAVRALAFKWIRILYRCWQERTPYDESIYLQALKRRNAPLLHNLAHLS

SEQ ID NO: 378764 - protein, 467 aa, unidentified
MVASSRKQSRRQSTKPARFTQRYAKVEDMPIVHRHAAGIDLAGSASHFVAIEVDNEIEVCEFGGTTDEVKKLVAYLCDHDVTTVAMESTGVYWMVVYDLLEFAGMEVFLVNPTHINSVPGRRKDDKLDCRWLQKLHKFGLLSASFRPNPDDRPLQSLYRQRTRLVRLQSDEMRRMQKSLDVMNLRIHKLVSDLGGVTGMRIIRAILAGQQDPVELAKMRDHRCHCSEEELISALTGHYLPTQLLALKQTLERYDMLQSQIEEIDAALEQALREIIPLDDAEIDAHVAVNPTPIPTGKHAPTFPVMSYLQLLTGKNATTIPGIGPQLALGLQALLGRDYTKWATAKHFTSHLTLAPVQKISGGKMLQSSTRPGAHAGAVIFKQAAAAVTRTDTALGAYYRRLAVRVGKGKALTALARKIAVQYYNLMRYGQVFVDIGEQHYEKRYRQQQINSLTKRAAKLGLTLSVAA

SEQ ID NO: 378765 - protein, 386 aa, unidentified
MRVNDMSRAVVPFEQSTTLVLVVEMGAKSWLAAGNVPGVERQPMKKLEPDAAALLGLIERWRGEAIKAGRTIGRVVLAYEAGRDGFWLARWLIARGIEVHVIHSASVAVSRERKRAKTDRLDAAMLIRVFLGWLRGERGHCGMVAVPTLEEEDARRPSRERESLVNEKSRITNRMKSALARLGIRGFKAHLRKAAQRLEGLRTSEGTGLPPNITEEFRRDMARLALVREQIAAIEKARLERLQRAPNTGPNLMVRLLARVIGIAIETADMLVREILSRNWRDRRAVARYAGLTGSPDESGTKRREKGLTKAGNARVRRGLIQLAWRFLQFQKKSALAKWFWSRTEGPSGVRKTTMIVALARKLLIALWRLVTTGEVPEGVVLRPAV

SEQ ID NO: 378766 - protein, 422 aa, unidentified
MFVGNDWAEDHHDVEIVNERGRRLARRRLPEGLDGISRLHALIAQFFPEEWADLEPAEAASRVKVGIETERGPWVQALIAAGYEVFAVNPMSVARYRERHSTSGAKSDAGDAHVLAEIVRVDRAHHRPVAGDSELGEAIKLVARSHQSLVWDRTRHVLRLRGVLREFFPAALEAFADLDAPDTLELLALAPDPDRATRVPKSKIVAVLRRANRRGVEERATTIMSVWRAPALRQPTQVQAAFAVIVTSQVRLITALNAEIAELGEVVAHHFGRHRDAEIYTSQPGLGVILGARVLAEFGDDRGRFADAKARKNYAGTSPITRASGTKKVVLARYARNERLGDAVQQMGLRLAERLTRCPRRLRRPQSTQDRPPGSTTPTRQPARRHPARLPEDRHPLPRGHRLGPPSRGSSLTSKNLGCLLH

SEQ ID NO: 378767 - protein, 366 aa, unidentified
MQKISTMQVFGNEIFKEQKLTIGVDLGDRSSAYCILNEAGKIVFEHKLATTPEAMKQVFGSLPRCRIAMETGTHSPWVSRLLTELGHEVIVAHAQKVRLITKSRRKDDRLDARTLARLMRIDPELLSPVKHRSAQAQLHLTEIRARAVLVSARTALVNAARGLVKSYGERLRKCGTEQFRRETTSGLSAGLREALEPLLQEVESLNERIQEYDRRIEHMSKKTYPETALLKQIKGVGNLIATTYVLTIEDPHRFRKSRDAGCFVGLQPGRRNSGESEPQMRISKEGDEYLRTLLVQGAHYILGPFGEDSDLRRWGRKLSARGGKTAKKRAVVAVARKLAVLLHRLWVCAEVYEPLRNSQKTMNAAA

SEQ ID NO: 378768 - protein, 378 aa, unidentified
MIVIGADTHKYTHALAAVDAGTGRERGARQVKAEEQGYLAAVRWGRGLDDERVWAIEDCRHVSRGFEQALIAAGERVVRVAPHRMGASRRGEREPGKSDQIDALAIARAVVKDGVERFPAAYLDRAAIEIRLLSDHRKDLVAERTRVQNRLRWHLLELCPELERSLGRGSLAHPRQLARVDRRLRRLPARARVRIAREQVAQLRDLTRRVDALERELLVLITAHRPQLLAETGCGALTAALLIGRTAGAERFPSDASFARQTGTAPIPCSSGQRHRHRLDRGGDRQLNHALHIIAITRARHDPATKAYLARKEAEGKGKKGALRCLKRHLARRFHYLLSLPAETPQRDPSNGAVHNAAPRPGDTRIVAAAPALMPCVR

SEQ ID NO: 378769 - protein, 324 aa, unidentified
MTTSPLGIDVSKLKFDACLVRDSGKLRHKGFPNTPAGFGQLSDWLARHRVGRAHACLEATGAYSEALATYLHEQGHLVSVINPAAIKAYAQSRLSRVKTDKADSTLIAQFCAERRPPPWQPPAAEVRELQALARRLDALREMRQMEANRLDVTAGAAAVRASLVGHLAFLDEEITRTEGLIRSHIDSHPGLREQRDLLLSIPGIGSTTAAKLLGEILDVKLYEGARQLAAFAGLTPRPHESGSSVRKRARLSKTGAPRLRKALYFPAIVAMHHNPHVRALSERLKERGKCPMQVIGAAMRKLIHIAYGVLKSGRPFDPELLKTS

SEQ ID NO: 378770 - protein, 327 aa, unidentified
MNTIGVDVDSKYLVCCIRRNGKDFPEATFANDPAGHRKFIRWATKYSKPARVCMEATGVYSLPFALALHYVPLIEVMVVNPKTVKHFATASLQRGKTDSLDAAVILEFLERMPFRLWHPPYEEVLEIQHISRRVVQLTSELTRERNRHKAAKRLGAWARVVANDTAVNMRHLERRIAHLEEAALELIECIPELADKLNLIISTTGIARKTGPRILAELTTLPDDMTGPQWVAHAGLDPRPCESGTSTHKPRRITKAGNRYLRDALFFPALVSSQKDPNVKAFYEHLLNKGKKPMQAIVAIMRKLLLAIWGMLKNNQPWNGNKFYRMT

SEQ ID NO: 378771 - protein, 406 aa, unidentified
MSAYRFYVGLDWATEAHRVVVQDAERQGVAERTVPHEGGALEAFAAWLSELAAGVPRDVAVALESPRGAVVDILLANGFHVFALNPKQLDRFRDRYTVAGAKDDRRDATVLATALATDQPAFRRLAPEHPLVIELRELSRLEDELQQELQRLTNRLREQLHRYFPQLLQLVPAANEPWLWALLERAPTPSAAQHLSRAALRTLLTRHRIRRVDADAVRTLLQHPALPVAPGTVQAAQRHLAVLLPRLRLAHQQRAECATLIEDILERLGEQQEHRDVPILRSLPGVGRVVAATMLAEASRLLAARDYHGLRTHTGVAPVTKQSGKHCVVIRRSACNRRLRDAAHYWGQSVVRHDPRSRAHYDRLRARGHSHGRALRGVVDRLLRVLIAMLTTQTLYDSNRRLPIAA

SEQ ID NO: 378772 - protein, 481 aa, unidentified
MKAQQQEKGKPATPARRCKWHEMNRKQRREMMRKLQSQDLSMEVIHPHAAGIDIGNESHYVAVPQKRDSQPVRRFGCTTAELRTMADWLKQCKIRTVAMQSTGVYWIAVFGILEEAGFEVYLVNARDTKNLPGRKSDVQESQWLMKLHTYGLLRNSFRPPQEIRTMRTYWRQRNDLVRSACRHIQRIQKTLTQMNIQLANVLSDLSGVTGQAIIKAIVGGECDPHQLAAYRDPRVKASEEEIAQSLEGHWQPDLLFVLKQEQEGYEFCQKQIAQCDRQLEQYLLQREDRSHGAPMPEEKRKTRLKNKNGNKPQFDLRAELFRMTGTDLTRIDGIDVTTAMTIFSEAGYDMSRWQTENHFVSWLRLCPDNRISGEKIIGQGRLPTNNRATIALKMAASGLRKSLTYLGAQFRRLRTKLGAPVAIKAMAAKLARLVYRILRYGMNYVDQGVEFYEAQHRKLQINSLKRKAAQLGFQIIEASAA

SEQ ID NO: 378773 - protein, 412 aa, unidentified
MKIVYPRCAGVDIHKDSMTVCIFADASNGSAPAYHKRKFPTHSEGIRDFELWLGEHQVTDVGLESTGVYWKPVWNALEGKRGLHLCNPQHVRAIPGQKTDLRDGTRIADLLAHGILPESFIPPQWQRELRDLTRLRARFVQEATRTGNRVEKVLEDAHIKLGSVASDVLGVSGRAMLEAIGKGKTEASELAELAQGKLKKKKAQLLKALDGKIRDHHRFQIRLLLDDLKECEEKIFQLDLRIGKYLEPYEEIIRRLDAVPGIDRIGAAVILAEIGPDVKHWEDARKLASWSCLCPGNCESAGKRLSGRTRKGNRWLRRAFCQMAWAAARKKGSYMKTQFGRLAGRRGKQRALLAVAHTLLTIIYHLLASPALQYRDLGDDYFDRRDVEYLKNRFIKRMEKLGFEVTVKTKAA

SEQ ID NO: 378774 - protein, 411 aa, unidentified
MDVVHERCAGIDISKADAKVCVRVQGRGRRRTEQSVRTWGATTGQILALRDELLERRVGLVVMEATGDYWKPFYYLLEDAGFEVVLANPRRVRAIPGRKSDVSDAAWLADLGAHGLVAGSLVPPPPIRELRDLTRTRTAIIRERSREYQRLEKVLEDAGLKLSTQTSSLTLVSVRRMLEALVAGERDPRVLAEMAQGQLRNKIPALAEALVGRFTEHHAFLVRLHLDLIDRHAEAIEELTGRIDAQMEPFRGFHTLICTIPGVSTLVADVVVAETGGDMTRFPTAQHLASWAGTSPGSNESAGKVKSSATRPGSPHLKGALGVAARAAARSKGTFLSARYKRIAARRGPMRALVATERSILVTIWTMGHTGELYADLGADYYRRRNPERSKQRALAQLRALGYQVTLSAAS

SEQ ID NO: 378775 - protein, 483 aa, unidentified
MKSKQPQKNKKAICHPTQNNWHQMNRKQRREMTRKIQSEDLSLEVVHPDAAGIDIGNESHYVAVPLRRDSQPVRRFGCTTSELKEMAVWLKQCAIRTIALQSTGVYWIAVYDILEEAGFEVYLVNAKETKNLPGRKSDVQESQWLMKLHTYGLLRNSFRPSQEIRTMRTYWRQRNDLVRAAGRHIQRMQKALTQMNIQLANVLSDVSGMTGQTIVKAILAGERDPYQLAALRNWRVKASEEEIARSLEGNWQEELLFVLQQEQDGYEFCQRQMAECDQRLQQYLQQLEDRSHGAGLPEEKRKERLRKKKKGNAPQFDLRAELFRMTGTDLTQIDGIDVTTTMTILSEAGWDMSKWKTEHHFVSWLRLCPDNRISGDKIIGKGRLPTNNRVTNALRMAASTLRLSNTYLGAQFRRLRTKLGAPVAIKAMAARLARLVYRMLRYGMAFIDRGAEFYDDQHRKLQINYLKRKAANLGFQIIEAPAA

SEQ ID NO: 378776 - protein, 315 aa, unidentified
MQAQAATVYVGIDISKSSVDVDSYPVAQPACFTNDEPGRAAAASFLRGLQPSLIVVEATGGLEAPLVGQLATAGLSVAVVNPRQARDFAKAIGVLAKTDRVDAQMLARFGQAVKPAVRPLKPEETLALEAVLTRRRQIIEMITAESNRLSSAAPRIAKQIRQHIAWLEKRLDEADQDLDGMLRQSPVWQHQAQLMTSVPGVGRVTAVTLLAELPELGTLPRREISALVGVCPYSRDSGKYRGRRSIWGGRAVVRAALYMAAIVASRHNPVIRAFYQKLVTAGKLKKVALVACMRKLLVILNAMLKHDTPWHHPAA

SEQ ID NO: 378777 - protein, 409 aa, unidentified
MEVVITRCGGLDVHKATVVATVRVPGESGRRRVVTETFGTMTPDLIALREWLQAFGVTHVALESTGVYWKPVYYVLEDAFELLLVHMRELKHVPGKKTDVKDSDWLAQLLECGLLRRSFVPPPPIRELRDITRYRVQQTRERSREVNRLQKVLEDAGVKLTSVLTDIMGASGRAMVEALVAGTTDPRVLAELARGQLRKKLPALQRALVGRFRPVHAFLLEQILAKIDYLDEVLERLTTEIDRRVAPFEPMLTALDTIPGIDRIGAISLVAETGGDMTRFPSAAHLCSWGGMCPGHDESAGKRRSGKTRKANRYLRSTLIQAGVAASHKKDSALRTLYARVKGRRGHKKAVVATGHQILEIAYFVMRDGITYRELGADYFQRCGREQTARRHVRQLEALGYVVTVQPTA

SEQ ID NO: 378778 - protein, 429 aa, unidentified
MNSTQNKKIEQVKETTMIVGIDVGSEKHYFRAFNWRGIELTRKPVAFSNSMEGFNSFYNSVVELMQKNELKEALVGIEPTGHYWFDLGQFMGEKNIKFVMVNPHHVHKTKELDDNSPSKNDRKDPRVIAGLVRDGRYFYSYMPTGVYAELRNASNRRFVLVEEQTRAKNRLQKWVAVYFPEYKGIYTHIDAKGGLLVLKQAPTLEEIVRLGVEGIIKIWKDAKLRGNGHKKAMLILNAAMKSIGLKAGLTEARMEIQDLIEDYELQTKRLERVNDLIKELCQQVRYADKLLEIKGIGITTVAGFIAEVGDITRFDSTKELQKLAGLELVADSSGKHDGKTKISKRGRKRLRYLLFEAAISVVGKNEEFKEIHRYYTTREKNPLKKMQSLIAVACKLIRVFHVILTKGISYDASKMLKDIRRSGEQLKAA

SEQ ID NO: 378779 - protein, 405 aa, unidentified
MNKTIVHPEGAAARAAASHHATTRPATVKLGVDIHSQFYVVAAQYDHAAIKPPRRLTPEQFVPWVETLLRAGHQVHVVYEACGFGFGLYRRLIAAGAHCYVIAPQKLDEARTGVKTDPRDAIMLCQRLSRYLDGNTRELAVIRVPSEAEERARHAPRQREQLVRARKKLQAQGRGLLVHHGLPAPAHWWQEQTWGRLQKLLPGWILSHLEIYRPILRALDAQIAALSAQLEAAAPADLPRGLGALTSVVLSREVCDWARFKNRRQIGSYTGLCPGEHSSGAKRVQGSVTKHGNGHLRAILVECAWRLVRFQPQYPPVKKRLHVLATGARATGAARKKAIVAVARRLAVDLWRLHTGRCSAGQLGLAGCESTRRLTPAAETDGLGSGGTTPAARPTAGQPGASSKH

SEQ ID NO: 378780 - protein, 350 aa, unidentified
MLIIGCDYHPAFQQIAFVDTDTGELQERRLQHREEAERFYRDLSAERIKVRVGMEASGHARWFERLLSELQFELWIGDAAEIRTKRVRKQKTDRQDAQLILKLMLEDRFPEIWVPSWENRDLRQLLWHRHRLVQARTRMMNQLQAVALNEGLRCKKKLFREAGREQLEGFRLAPWASRRRHDLLELLDRLTPTIAELTQAIEQEVEKCPAARRLRTHPGVGPLTALAFVLIIGKADRFQCGKQIASYLGLVPLEKSSGDQRRLGHITKQGSTLLRFLLVEAAQVTARSLPEWRSKYYHLTMRRGRKIAKVAMARKLAVRLYWMMRKEWDYGQLTKFGSYAGKPENRDGVK

SEQ ID NO: 378781 - protein, 385 aa, unidentified
MRTSNVRTPIAGHNGTIFVALELSQRSWLVTMHSPDKDRFSRHKLEGGDDFGLLSLIERIRDRATQALGAVPSVVSCYEAGYDGFWLHRRLVGAGITNFVFDPASIAVDQRARRAKTDRIDGELLLRTLMSHWRGEPRVVRIVQVPTPEQEDLRRTTRERERLIKEQTAHTNRIKALLRLVGVAAGNPRRRNWMTWLKEQRERNGDPLRPHLVAELGREHARLILVGEQLRELGQATDTAPVSDAAAEIARRSAMLQRLKSLGPVFTATLTNEVFYKDFHNRRQVAGYFGLAPSPWRSGGTNREQGISKAGNPRARHKAIELAWLWLEHQPNSALSRWFRERTTQGKGRIKRIAIVALARKLMVALWRFLTTGLVPEGAVLKAAA

SEQ ID NO: 378782 - protein, 404 aa, unidentified
MRHYAGLDVSLEETAICVIDEAGRIVKEARVLSEPEALVGFFQALGCMVERIGLEACSLAAWLHEGLAAAGLPAVCIETRQAKAAMGAMPNKTDRNDARAIAQIIRTGWFRAVHVKSPASRSWRALLTARRMVLNKLRDLENGVRALLREAGLKLGTPGRKQFADRVRELTAEEPVLAALAEPLLTIMATMAHELAQLTRRVLEVVRGEPVCRRLMSVPGVGPLTALAFRATIDQPGRFRHSRDVGAHLGLTPKRYQSGATDVQGGISRCGDELARTALYEAAHVLLVRSQKWSALRAWGMLDRAAIKGPASWHGPRPRRGRAEARGHLASHLDRRLGIPLGQGERAGRRVRHGLSRAALEFPPRNGRSGVVPVGTTGEVIPLRASSRGACPEGRETDWDALSS

SEQ ID NO: 378783 - protein, 413 aa, unidentified
MDVVHPRCAGIDCSKKDAKVCVRVQGQGGRATSATVSTWGATTGQILALREHLVAAKVSCVVIESTSDYWKPFYYLLDDGLDVVLVNAAAVRNLPGRKTDVSDAAWLADLGAHGLVKASFVPPAPIRALRDLTRTRTVITRERTREVQRLEKLLEDAGIKLSSVASHITGVSGRAMLEALIAGQRDPATLADLAQRRMRSKIPALTEALTGRFSEHHAFMARLFLDRIDAHSADIARLDERIEAAMEPFRSARDLLISIPGFSRIVAEVFIAETGGDMSVFPSAGHLASWAGLSPGSNESAGRVKSSKTRPGNRYLKGVLGIAALSAARSKNTYFSAKYKRIAARRGPMRAIVAVEHAMVIAAWNLLTNGDFYRDPGADYYTAHQPAAAKARAVHQLHTLGYRVTLEPLADSA

SEQ ID NO: 378784 - protein, 341 aa, unidentified
MEHTTIAVDLAKSIFQVAVSHRAGQVDVERRLTRGRFLTFFAQQPPATVLLEACGSSHHWARQLQQFGHTVRLLPAHDVHRYVRRNKTDRTDAKAMLEAHRNEEIHAVPVKSIDQQTMASLHRVRSTWLATRTARLNTIRGLLREFGVVIPTGAHHVVPAIRALVDDERVPVALQPIFSTAGDEVNTLEATIHDVERQLAGLARQRPEVELLQTIPGIGVITATALIATVGDIRRFPSGRHFASFLGLTAREDSSAGRRRLGAISKQGDTYLRMLLIHGGRSVLWSAKGKAAPDGLRAWALRMEQRRGHNIAAVAVANKLARITWAVWTHQRPYAAALNST

SEQ ID NO: 378785 - protein, 320 aa, unidentified
MMTQNDRVVVGIDVAKDKVDACIRSLSQRQMFPGGADGRRKLIAWLRKHKVDKAVMEASGGYERDWARVLRGAGFEVLIVDPKRVRNFARSAGRFAKNDTIDAEMIAWFAETFIEAPGQAHDAAREKLAQMVNARLRLLDLQTQMKNSSEHAAPDVVQQMQVRMLKTIAEEVAELEAAMVALIRATAHFAERAEIIESVPGLAEITSAGLIALMPELGYARNEAVAALLGAAPYDDDSNRRRGERHIQGGRRKLRNMFYMACMGAATRHNPVLKAFYQRLIARGKEPKVALVACMRKLIVILNIMLARGEKWDPSRYVVS

SEQ ID NO: 378786 - protein, 356 aa, unidentified
MKQFSKEPVATIGIDLAKNSVHVFGVDAQGEVVFSRKLARHALSAFIAQQPPCRVAMEACGSAHHWARTFQGFGHEVVLIAPQHVKPFVKTNKNDAADAEAICEAAQRPRQRFVPIKSVEQQDIQAIHRLRSQVIGQRTALVNQARGLLAEYGIVMPQGRAAAMRRLPEILEDAENGLSERFRAELQELLEELRHLDARVVHYDAQIKTTADTSESAQLLMSIPGIGPLVATALLATLGDQWGLFHNGRALAAWLGLVPRQHSTGGKARLLGISKRGDVYLRQLLIHGARAMMRWVENKEDALSHWARHLKQRRHANVASVAMANKLARIAWAVMTTGKPFDPARGALAKPTTVAA

SEQ ID NO: 378787 - protein, 378 aa, unidentified
MPSETTIHVAIELSVSSWLVATRPPGAEKSRLHHIEGGDTTALLALIAELRMRASTKLGKPAEVVCCFEAGRDGFWLHRALTMHGVAAYVLEPTSILVNRRARRAKTDRLDAEGMLRVLAAWLAGDRQVCSMVRVPTPEEEDAKRPHREREHLVQERLRIENRIEALLFTQGIRKRPSLRSWERDLAELRTGDGRALPSLLRVELDRLRRRLVLALELIREVEAERAEALAVTADDEMTQKIAALQRIRGIGTNFAAVLVREVLYRSFANRRQLASYVGIAPMPYQSGGMDRDRSISRAGNPRARTTLIQLAWLWLRYQPGSALAAWFRERVGTLQGRTRRIAIVAMARKLLIALWRYVETGVTPDGVEIRAQADVTA

SEQ ID NO: 378788 - protein, 335 aa, unidentified
MENIALIGIDLGKNSFHIHCQDHRGKAVYRKKFTRPKLIEFLATCPATTIAMEACGGSHFMARKLEELGHFPKLISPQFVRPFVKSNKNDFVDAEAICEAASRPSMRFVQPRTESQQAMRALHRVRESLVQDKVKTTNQMHAFLLEFGISVPRGAAVISRLSTLLEDSSLPLYLSQLLLKLQQHYHYLVEQIKDLESQLKRKLDEDEVGQRLLSIPCVGTLTASTISTEIGDGKQYASSRDFAAATGLVPRQYSTGGRTTLLGISKRGNKKDPNFVGSVCQGIHTKTGTPVWQVGRLGQGVVVSEKQLCRHLCSGKQAGQNSLWALTARQQTYEA

SEQ ID NO: 378789 - protein, 436 aa, unidentified
MRTQKELTLSSEVAGTETDWLETRSGGRELQRRENLLYVGIDLHKETHTAVMVNCWNEKLEVVVIENKPSEFKKLAEKVNRKSSILGLEPVYGLENAYGYGRSLAVWLIENGYNVKDINPALAYDQRKSAPMYRKNDEYDAYCVATVLINQLHTLPDAKPKDNEWTLAQLVNRRDLLVKDGIRFKNGLHEQISMAYPSYSKFFSEIDGKCAMYFWKTYPSPVHLQEKTAEDLTIEFKEISRIARRDKAELILDCVHNDGDTFREYQESRDFITTSLVRDLEHQKEELAGLDKEIEKILLSFDYKLTSMPGIGTSIASKLIAEIGDIRRFSNADKLARFSGVAPVKFSSAGKGKEQSSRQGNRQLHGLFYFLAVTMVSKPKNGIPNHPVFYDYYMRKIGEGKTKSQALVCIMRRLVNIVYGMMKNKTEYREPIPEKE

SEQ ID NO: 378790 - protein, 337 aa, unidentified
MKRFDKVVGIDVSKSKLSISFYDGMTHNYYETSNNIRSFTKEFLEKVEVEDWSKVLFMLESTGVYHLKLATYLSKDLGYVVSVANPMSIKRYSDMQLRKAKTDRTDSKLIAEFGLEHGHRWIFNHRDDFYYEIDSRLKAIEDFHEQINRLSSQIEGLQHLPYEQSEIIVCYREIIDVYKQKIKKLERELEFLLRERYKSSYELISSIPGVGLKLSSIVLGKLECFHNFKRAKEIVSYIGLCPDIKESGTSVRGSGRISRRGNVYIRRILYLCALSAIRYNKFCSDLYKRLLSSGKAKKLAIIAVANKLIRQIFGVLKSGRPYDPNYLENLTRVAKNV

SEQ ID NO: 378791 - protein, 413 aa, unidentified
MKTYILRDPKAVEPQNPRPPRRKDPARTVTVASAPPPPGPVLFLGLDVHNDTIAVSLAPSDSTEVRRYGIIDVLRLSKKLSAAHPGAALKFCYEAGPRGYPLCRFIRQHGAECLVVAPSKVPRQPGDRVKTDRRDADQLARLLRAGELTGIYVPDPQDEAVRDLIRARYQVQKQQHRARQQLKMFLLRQNIRYAGTKPWSPAHLRFLATVKLPFGEQQFVFQEMVNVISEAGQRLARYEKEIASVVENWRWQPVVAALMSLRGVALLTGATLVAELGDLERFASAPQLMSYLGLCPSEHTTGQDRRQGGITKLGNGIARKAIIEAAWNNSRAPRISRTILARQEDLPKAVTEAAWKAQTRLHQRYQHLTGVGRKKAQVAAAALGRELAGFVWAIGRMVKPRALPMEDRKPQAA

SEQ ID NO: 378792 - protein, 414 aa, unidentified
MVEVINKACGLDIHKLFFIATILSRSGEKQQQYFSRTPDEILAFKNWVISDKCDVVACESTSDFWVPIYDALIKHLPVIVGNARDMKAFTHKKTDKIDSEFIAQLALNNMIQPSRVFPKNHRTFRSCIRLRHNLVQKRTDIKNEAHAILAPEMFNLKNVLTDIFGKSGRAILSRICSGKSVDQIIASLSPNVRKKSDQIKENSGQRNLSRCCIQLQICLDIIKHLDTEIKILEKEIFNYAYKNHKQEMEILMSVPGIGELGAATLIAEIGDFKDFSSGDKLASWLGIVPNVYQSADKYHNGRITKRGSKEARWILTQIAQAAARTKNSRLKEFFNRKKKSIGHSKAIIALARKIATIIWHLITNEEMYEDETGYKKGEIQKRKIVETEIFSVDERIKIMSEIYVIARNEEREST

SEQ ID NO: 378793 - protein, 347 aa, unidentified
MNFYNNTHPHYCGIDLHARVLYVCIIDQEGNTCVHQEIPADPDKLRQLLEPYIGNIVVGVECMHCWYWVSDFCEDIGVDFILGHALYMKAIHGGKAKNDRIDSYKIASLMRGGNFPLAYVYPKEMRATRDLLRRRMKLVRHGANLKAHVANTTSQYNLPPNKVNLKNVCAREQLRSTFPDPVVQRNIDFDMSMLEHYAKELSKLEWFLEQQAKQHNPVHYHILRSISGIGRILALTIIYEVGDIRRFDSVQKFASYARLVKCKAESAGKSYGTQGNKIGNAHLKWAFSEAAVLYLRGNKKAQKYLQKLQKRMTKAKAISVLAHKIGRCVYFMMKNEKVFDENRFITG

SEQ ID NO: 378794 - protein, 317 aa, unidentified
MSYTNRFIGIDISKSSFDICVLPEISTASFSNDACGIAGFLAFVARLDNVTRLVLEPTGGYERPIVDALLAAHLPVARVNAKQIRQFARACGQLSKTDRIDAFVLADYAKRMETKVLAPSSPAQTALVDLVSRYKQLSHMIVQEKNRREKLRQREDTKAKAWIEETLKFLLQQRQSVIDAMEACLKSDKYLADKAQVLTSLKGIGMRTACVIIAGLPELGLLDKGQIAKLVGVAPINRDSGLMRGKRMITGGRKPVRDALYIAALPAIRFDPAMKAVFDRLKAKGKPGKVALVAVMRRMIIILNARMRDYRATVLDL

SEQ ID NO: 378795 - protein, 313 aa, unidentified
MSEKQVGVDVSKDRLDVASADGRWLQFANDDSGQEELCAMLVEEKPTLVVMEATGGMERALATRLSAAAISVRIVNARFVRHFAKASGLLAKTDRIDAQVLMRFAQAMRLEARELVNDELHLLQALVARRRQLIEMITMEKNRLRGAHQAIKPSISRTIRMLTKQLKDADEDMDKALKSCGVWREKVELLQSVPGIARVTSVNLVATLPELGHLNRRQIASLAGVAPFNRDSGRYRGKRSIFGGRAATRSALYMAALVGARFNPVLRAFYQRLRTRGKPAKVALVACMRKLLTILNVMVRTRQPWNAKLALSD

SEQ ID NO: 378796 - protein, 341 aa, unidentified
MKSTTIAVDVAKEVLEVAVSVRPGQVSEQHRLSRAAFMKFCTDQPSATILLEACGSAHYWGRRLQSIGHRVVLLPPHATRPYVFRNKTDRTDTRGLLEAFRNEDIHPVPVKSVSQQALTALHRLRSTWLATRTARINTVRGLLREFGCTIPIGAHHVLAKTWDLLADPESGLPDALRPGLAAACTEIRDVEGRIRVVEDQLQALADQTPAVARLRSIPGVGLITATALVAFVGDVQRFPSGRHFASYLGLTPRERSSGLLRRLGAISKRGDVYLRMLLIHGARAVLWAAKKRAAPDRLRLWALHLQNLRGHNKAAIALANKLARIVWAVWKHDVDFREVAA

SEQ ID NO: 378797 - protein, 392 aa, unidentified
MYIVGIDIGKNHHEASIVSPEGKQIGRSLRFATTHKGADSLMSFIFKNIGNSPCVFGMEATGHYWYPIYSFLKAKGYTICVINPIQSDSLRKMYIRQTKNDSIDSFFIAEVIRFGQFGTTSMADENILAMRQLCRYRDSVISSRTEIKLRIGTIMEQIFPEYEKQFSSLWVSTSMGILEKYLTPENIENAPIDELFEIIKDKSHNRLTKAKAISIKEAAADTFGIKIAQDAFSFQLKQLIDRMNFLDKQIEALDIEIMKYYEQFDCYLHTIPGIGMIATATILAEIGDIHRFKSSSALVAFAGIDPTVRQSGEFNSTHNHMSKRGSPYLRHAIFLAATTCSFHNSPLNAYYKKKRDQGKHHLTATGAVARKLTTIIYAVLRDSKPYEPKKFC

SEQ ID NO: 378798 - protein, 411 aa, unidentified
MRLFVGDDWAEDHHDVELMDERGRVLARGRLPEGVAGMARLHELIGEQLGEDADDAEVVIGTETDRGPWVSALVAAGYTVYGVNPLQASRYRERHGVSGAKSDRGDAHMLTDMVRTDSHQLRAVAGDSPDAAAVKVVARTHKTLIWERTRQVQRLRHQLREYFPAALEAFPDLDAPDALELLGKAPDPATAAKLTRAQISAALKRARRRDIPGKATVILAALRSAQLSQPPAVTNAYAVTVRSLAAVITVLNEQVKTLQRQVEADFGRHPDAEIYLSQPGLGPILGARVLGEFGDDPDRYASGKARKNYAGTSPITRASGKRKIVAARFIRNNRLTDALMAQAFNALGASPGARALYDAERARGTEHNPALRKLASRLVGILHGCLKTRTLYDEATAWPHREKTPQSDIAA

SEQ ID NO: 378799 - protein, 361 aa, unidentified
MKARLRLMELPMPATIGCDAHKQFSVFVTIDGKGKTAPAVRVEHQRQEYVAFLRSLPPGSEIALEATGHWYWMVEEMEKAGHHPHLANPTEAKKRMGKTNKTDALDAKGFAILLHNGTLPESWIPPGELRDRRELLRTRMVLRDLRSSLKHRIHAAIDRYGLQATGISDLFGVKGRVYIDAVLDRLPWDAAAMIQVQLTSLDQLEVQIEEIEDRIAVALKPSPEVRLLRTIPGVGEILAPLVWLEIGDIGRFPRAENLAGYAGLVPKIIASGGRIRHGGTCRNVNHYLKWGFVEAATCAVRLKAYRDSHVGLLYHRLAPGKGHRRAIVAVARHLAEASYWVLRKRQPYKSPAPRPIEIDAA

SEQ ID NO: 378800 - protein, 355 aa, unidentified
MSQEKYIGMDVHQATISVAVMDVGGKLIMEGLLETKAATIVEFVRGLHGPVSLTFEEGTSAAWLHDLLKPQVDRLVVCDPRKAALLKEGNKSDRIDARKLAELLRTNQLKPVYHGEHGVRTLKELGRSYLTLTKDVTRGMNRIKALYRSWAIPCSGTTVYAPRHRAEWLAKIVEPGVRLRAERLYQQLDLLQPVRQQARHDLLVESHQHPAVKLLRQIPAIGPIRAALLVALLQTPHRFRTKRQLWAYSGFAVETHDSGEYRYVRGKMQRNRERITVRGLSDNYNKDLKNLFKGAAISASTRPGPLHDFYVALIAKGMRPTMARLTLARKMITITLTIWKKGVSFDPQQLHRQAA

SEQ ID NO: 378801 - protein, 341 aa, unidentified
MQVTRIGLDIAKNVFQVHGVDGHGKTVIRKSLRRADLLPYFSNLPACLVGLEACAGAHDWARRLIRLGHDARLMAAQFVSPYRKGGATGKNDKTDAEAICEAVGRPNMRFVPLKSEEQQAVLAVHRVRELAVAERTALVNQMRGLLGEFGLVLPQGRERLQRALPDLLEAADNGLPALFRPVLAELLERLTEANTRIGHYDALIEAQAQLMPAARRLMRLAGIGPITATAMVATVGNATSFANARQFVGWLGLVPRQYSSGGKSRLGGISKRGDAYLRRMLVHGARSVLRVAKDRTDRLGRWAEAVRQRRGENIAAVALAAKHARIVWALLAKGEAYCPAL

SEQ ID NO: 378802 - protein, 361 aa, unidentified
MKEEQATSGYRNVVGGVDTHKDLHVAAVVDEHNRLLGSECFPTTRHGYKQMLLWMRSFGELARVGVECTGSYGAGLLRYLQQAHVTVLEVTTPDKSDRRKRGKDDALDACNAAHAAFAGVRTVTPKTRDGMIESLRVLKVCRKTAISARRVALQLIHNTIISAPDELRESLRKMTRMQLIRTLAAWRPDLSDYRNLISANRIALKSLGRRYLELHDEIADLDVMIAALVDELAPDLVSRNSIGYESASQLLLTAGDNSDRLQSEASFAALCGVSPVPASSGKVTRQRLNRGGDRAANSALHIIAIGRLRTDDRTKAYVAKRVSGGHSKLEAIRCLKRYIAREVFYVIRQRYRQIAQTQFTP

SEQ ID NO: 378803 - protein, 393 aa, unidentified
MLYYLGIDVGKFSHSLCLLTEAGKKTIFQINNNREGFEKLRIKLSELNCDKNILVGMEATGHYFLNLYDWLLQCGFDSEQIALLNPLQVKSFRNTNLRGAKSDNVDSERIAVLLKFGEFKRCNVATDEMMNLRELTRLRADLVANIGDLKRKIISVMDRVFPEFMTVFSNRFGKTVMSLLDNYTPEEMAELSLEKLTMVIKSLSGRGRGISQKKIQALHEASRNSIGITFGRQAFKIELDILSTRLKVFKEQVEKLENEIQLIAEKFDSKIFTIPGIGATTGAAILSEIGNIQNFSLAVKLIAFAGLDPKLKESGKYQGRTPISKRGSKYLRNAIWYSAMVACRVDDKFKKFYQDRRNKGKSHRYSVTAAANKLTKVIYHVLKNNCEYDSKLV

SEQ ID NO: 378804 - protein, 348 aa, unidentified
MLIIGCDYHPGFQQIALVDTETGELGERRLTHREEAEQFYGALKERRVRVGMEASGHARWFERLLNDLRFELWIGDAAEIRTKRVRKQKTDRQDAQLLLRLMVEDRFPRIWVADAENRDLRQLLWHRHRLVQMRTRVMNQLHVVALNEGLRRKKALWRPAGRSELQSLVLAPWASRRRQDLLDLLDQLSPKIQELTRALEDEVEKRPVTRRLMTHPGVGPLTALAFELVIGTPERFHCGKQIASYVGLVPSEESSGDRRRLGHISKQGNSLLRYLLVEAAQVTVRSQPQWRSKFFHIAMRRGRKIAKVAMARKLAVHLYWMWRRGWDYGEFEKLGSHAGTPGNRHGVQ

SEQ ID NO: 378805 - protein, 336 aa, unidentified
MFQLGIDVSKKTLDLCLLREGVKGSVKTRKLQNDINAVNAVIAWLSKQHCKPEDVHIIMEATGVYHESLAYGLHKAGGRISLANPHRAREFARGMGMLTKNDRVDAYMLACYGALKAPEPWLPPPEEVRHLSALLRRRDALVADSTREKNRLEKYLATDTPSVIAESVEAMIGQLNAEIKRLDRLIRSHLNQHPELKKDFDLLTSIKSVGYQLGLNMLVILRSHDFATAEQAAAFLGVVPVEKYSGTSVRGCPKLSKIGPPEIRAKLYLASLCGLRFNPLMKAMYERLCLRGKGKMCAIGALMRKLVHWCYGVLKTQKPFDVGYLSSYARSECKAA

SEQ ID NO: 378806 - protein, 479 aa, unidentified
MNAKANENKNQVNKAFSVINTLSAEERQSRIDDLLKTMQAKTWHDLEASGKFDKNAKLSFISEDMLIVGCDIGSETHYLRAIDIRGRELSKKPFSFTNNEEGFEAAKAWMVELAAVNGKKQIVLGLEPTGHYWFCIATWLISNGISVVQVNPYAVKQTKEVEDNSQLKDDRKDPKVIANLVMNGNYGMPYLPEGIYADLRSLSLLRSQLTENRIRCANRMHRLMKIHFPEYKDAFGRVDGSFALEVLKIAPFPKDIVALGEDGIREIWHNAKLRGRGYSRAAELFRYASTSVGRNEGAEYDREAVRWFVEEMLSLDEKLTTIEAAINTKCMEIPHAENILEISGLGQNIVAGIISSMGDIDRFDDVKEIQKLSGLNLVACSSGKHNGETKISHRGRKELRTWLFQGAKSVVAHAEEFQLIHEYYTTRPKNPLKKMQSLIVIACKLLRIIYAILKKGVTYDPQKMLDDIKRFENAEIVAA

SEQ ID NO: 378807 - protein, 362 aa, unidentified
MQKHIFVGIDLGDKNSVARIAVDREKSERFGFVNTRAGRARLMAEVKRRREQAGGAVIVMAYEASSCGFVLRDVAWAGGIDCKVLAPTKMEKSVQQKKNKNDDRDADDVLEKLRGHVLAGNRLPTVWVPDLETRDDREVLRTRLALSERQTQVKAQIQMLLKRHGLEKPSDLGSSRSKQYRHWLESLSECETVGWGTRQSLSSLLRQLKGIEGEMENLDKLVKHLGGQPRHKPIVEALMKETGVGLLTALVYRTEIGQASRFHRGRHVGKFVGLTPTSHESGQQSDRKGHISRQGPPRLRKVLCQASWVHVRYDPQSREVYQRLVAKNPKKKKIALVAAMRRLAVRLWHRMREAELQQQTQP

SEQ ID NO: 378808 - protein, 411 aa, unidentified
MKLFCGIDWAETHHDIAIVDGDGNLVAKKRITDDADGFAQLVELLAEAGDSAEHRIPVAIETPRGLLVASLRATGRSVYAINPLAVARYRERHSVARSKSDHADAMTLANILRVDAHVHRKMPADTELCQAIAVLARGQQDAIWRRTKASNELRSFLREFYPSFLAAFKGRFQIGIASLEARAVLAIAPTPAVANKLSASRLAAALRRAGRTRNIDQVATEIKTALRAPQLRQLPLVESAMGRQTLALLAALDAACVSVDELGQAAAELFHTHPDYAVITSFPGLADSTGARVLAEIGDDRTRFADAKALKAYTGTAPITRASGRSISITRRRIKNDRLAAAGWVWGFAAMANHPAAQDHYRRRRDQGDHHAAAIRHLVNKFLGQLHYCLQNQQMFDTVKAFPPPNEGLAA

SEQ ID NO: 378809 - protein, 347 aa, unidentified
MNLYNNMHPYYCGIDLHARLLYVCIIDSEGEVCVHKEIPAAPIKLQKLLEPYLGNIVVGVECMHCWYWVADFCDDLGVDFILGHALYMKAIHGGKAKNDRIDSFKIASLIRGGNFPLAYVYPKEMRATRDLLRRRMKIVRHGADLKAHVVNTTSQYNLPPNKVNLKNVVAREQLKNTFPEVSVQKNIDLDMVILDCYAEQLSKVEWYIETQARQHKPIHLHLLKSISGIGRILSLTIIYEIGNIDRFNSVQNFASYARLVKCKAESAGKSYGTQGNKIGNAHLKWAFSEAAVLYLRGNDKAKNYLLKLQKRMSKAKALSALAHKLGRCVYFMLKNETVFDEKRFLKG

SEQ ID NO: 378810 - protein, 412 aa, unidentified
MRRVIGMDIHRTFAEVVFWEGGRLRPHGRVDMTRSGLEGFGRGLTKDDEVVVEATGNAMAVVRVLSPYVARVVVANPLQVRAIAHARVKTDKIDAGVLAQLRAADFLPEGWVPDAETERSRRLVARRNQVVRHRTRVKNEIHAILAAHLVPPCPHAELFNGPGRAWLAGQVVPDDERAAIDRHLRELDRLGEDLAALDRDVGAAVVDNPDVKRLLTITGMNVTVAAGLVAAVGDVRRFSSPQKLVSYFGLNPRVRQSGLGLAQHGRISKTGRAHARALLVEAAWAAAKAPGPLHAFFVRIRARRGHQVAAVATARKMAVLVWHLLTKEADYLWARPALVAHKVRALELQAGKPTSKGNKRGPAYAYNVKALRDQEMAIAERAERAYEHLVAQWRQKPGRRRTGAATAAGSSG

SEQ ID NO: 378811 - protein, 353 aa, unidentified
MQKIYIGVDFHARQQTICYLTTDSGELVLHQLKHQDKAAVRAFYAQFSGDVIVGLEASGYSPWFERLLEELGCEVWLGHATEIRRRARWRHKNDRRDAELILELMLHDEFPRLYLPPLQSREVLRMLRYRQKLIKIRTIGKNSLQALALQAGLAKGPHLFSKAGLQQLRQASMSAAMQWQREQWLQLLEPLEARLLETRLWLKQQSHADQRISRVRTHPGIGLLTALCLVHSLEPVSRFANTRKVTAYAGLDPLERSSAERQRFLGISKGGSRVLRFLLVEAAHTAIRKDAELRRFYQRLAERHGRPKAKVAVSRKLLIRAYIMLRDEIDYAEFQRRAVAARLARQSSRPPCL

SEQ ID NO: 378812 - protein, 499 aa, unidentified
MITIPVITERCAGIDVGKRGLAAAVAVGPADKEAEIKTRWFATTMPALRQLHTWLREEGCTTVALESTGSWWISIKNELEDDLRMTLVCPRKHHPKKGDKTDFRDAIDLALHHRHGLLTGSFLPERGIVELRDLTRRRKKLLGNLSSEKNRIQKVLDTAGVKMGNVISDVFGVSGQEILQALLKNVPLQAEELAAMAKKRLRNRIPQLTEALQDHYMNDHHRWLIGQSVEHAQFLDVQVETLEKKIDAHLEPYRRQYELLQSIPGIKEHTAASILAEMGADMSQFATADKLCKWSRICPGNNRSAGKSRHSHMQRGNKFLLAALVEASWGAIRKEGSAFQRKYRRWLRKGEQKAIIAVCHCLLRVIWSVLKNDRPYVEPDATVVEGLERQRLIHHHTRKLREMGADEQTIGVLIEQLLVLPADSESKPARVETTKDTQAHRDPQPKRPLARGVLGFRIRTAPIKKDSDFKDRPDPPTGVDASETAASSKKRCRTQKAKT

SEQ ID NO: 378813 - protein, 317 aa, unidentified
MCKVIGIDISKASFDVSFEKSNGSFYHEKFSNDAKGFKSFRKLLLADDHCVMEASGPYYLKLAHYLFEEQIRISVVNPLQIKHFVRMRMIKAKTDKKDAQMISLYGKMEQPDLWVPGDKLINSLQHINTAIEGLHKQASILNNQLEAFNQIPQVDKELIKVLRGLLRSVKAKISKLEDCMAEITLTHYKDTFLALKSIPGIGEKTAMMLIAITNNFSKFNSSKKLSAYVGLTPRIFESGTSVKGKGHITKMGNRHLRKLLYMCAWSAKHHNQHCIQMYERLHQNGKPEKVIKIAIANKLLRQAYAVGTSLVHYQNNY

SEQ ID NO: 378814 - protein, 401 aa, unidentified
MNAVGIDVSKGKSTIAVMRPFGEIVASPYDVVHTISELKKLADFLLKLNGETRVVIEYTGKYHEPVALSLYEAGLFVSIVNPILIKNFGNNTIRRAKTDKKDAVKLANYALSHWLDLPQFVPEDEARRTLKTYNRQYSHYIKTKVAMKNNLISLLDQTFPGVNTLFSSPPRKNGHEKWIDFVEEFWHCGCVASLTQNLFSERYAEWCAKLKYHFSYSKAEDIYFASAGHFNTLPMCDSTKCLILQAVKQLNVINETLASLKHEMNNIASSLPEYTTVMAMHGVGETLGPQLIAEIGDIRRFQRKQSLVSFAGVEPPENQSGMYEARSRSISKQGPSALRKTLFQVMSCILKNGNVDDSVFQFLSRKRAEGKPYRVYMIAGANKFLRVYYGRVKELLNKLEA

SEQ ID NO: 378815 - protein, 355 aa, unidentified
MSSEKYIGLDVHQATISAAVMDGQGKVVMESILETKASTLVEFFAGLRGSLFVTFEEGTWAAWLYDLLKPHVSEVLVCNPRKIPLHKQGNKSDKIDARKLAERLRLHDLKPVYHGQTGIRMLRELARSYLTLVKDLSRVMNRLKALYRSWAIPCAGRDVYYRRHRSEWLNKIPEAGTRRRAEQLYQQLDMLQPLRQQARRELLTESRKPAITAKLRKIPSLGPIRSALAVALIQTPHRFRSRRQLWTYSGLGLETRDRGEYHFVKGQPQRRKKQATIRGLNKAYNHDLKGLFKGAATRASVKPGPFQEFYQRSLAKGITPTRARLTLARKIAAITLTRWKKGEDFDIEKPKSQAA

SEQ ID NO: 378816 - protein, 373 aa, unidentified
MKYSTVYVGMDVHKESFSLCCYTNEKEQAEYPQKVDAHYSKVINYIEAMRFHYGDDTLFICGYEAGCLGFTLYHQLMDHGVKCVILAPTTMLQQKGRKKVKTDKRDAALIARCLAHHDYSPVHIPTEQDEQTKEYIRMRDDHKLALKKVKQQILSFCLRHNYRFDGTANHWTQAHLKWLRSLKPEGLYAEILQEYLLTYDSLIDKLKRFDKRIGELAADEVYQENVRKLSCFIGVKTVTALAVLTEVGDFKRFASAQHFASYIGLTPGEDSSGDDQHRLGITKAGNRHVRSLLVEAAQSYSRGQIGFKSKALKARQDGNPPEVIAYADKANERLRRKYYHMVLKNNKKTNVAKTAVARELACFMWGMITGNVA

SEQ ID NO: 378817 - protein, 421 aa, unidentified
MEEITEEPAELAERVAALDIGKASLVCCVRVPHESRPGARRQEVRTCGTVTPALLELRDWLICQGVTRVVMEATSAYWKPPFYLLEDDIECWVVNARDVKNVPGRPKTDKLDAVWLCKLAERGMLRPSFIPGRAGRQLRDLTRYRRTLTQERTREKQRAEKLLEDAQVKLSSVISDIFGVSGRDMLAALIAGERDPHDLARLARGSMRAKTGVLRQALTGHFTAHHAFLLAMMLDRVDALTAQIDRLTARIEKAIAPFAAQVAQLDEIPGIGVTTAQEILAETGTDMSRFPTPSHLVSWAKFAPKARQSAGRSKAAATGKGNPWLGGTLGEAAIGAARTSTFLAARYKRVVKRRGKKRALVAVGNSILTICWHLLSDPDARFTDLGPDWHDRLAPQRRKRQLIAELERLSGKKVLLQEAAA

SEQ ID NO: 378818 - protein, 354 aa, unidentified
MIIIGCDYHPGFQQIAFVDTETGELQERRLEHREEAEKFYRDLGAQGASVRVGMEASGHARWFERLLSELRFELWIGDAAEIRTKRVRKQKTDRQDAQLILRLLLEDRFPQIWVPNWENRDLRQLLWHRHRMVQARTRIMNQLQAVALNEGLRCKKRLWRDAGREQLESFRLAPWASRRRRDLLELLDRLTPTIAELTQAIEQEVEKCPAAQRLQTHPGVGALTALAFVLILGRADRFQCGKQIASYLGLVPLEDSSGQRRRLGHITKQGNSLLRFLLVEAAQVTVRSDPEWRSKYFHLAMRRGRKIAKVAMARRLAVRLYWMWRKGWDYGQLTKFSSHAGQLGHRDGVQSNTE

SEQ ID NO: 378819 - protein, 418 aa, unidentified
MSEDGNTRGSRRYIALDIHKKYCVIGGVDREGKVVLQAVRVEHADLEDWLKKNLRSTDYVVLESTTNAWHMYDLLEPLVERVVVANPAKVKQIANARVKTDVRDTFILARLLAANLVPEVWVPPAHVRELRQLLSQRRQLVETHIQIVNRLHSVAHRHHLKHERGKRFNEKNTAWQKDKRLSKIEQFQLELEMENRAYIEKQISRIGKEVAKMSHQKPWAESMTYMMQLPGFGVITAMTVLAAIGQIQRFGSANHLASYSGLTGGLDQSGTKFVQKSITKEGRKELRWAMVEVAQRAVKSDPRWTRKFQEMEKRMHRNQAIVAVARQLLELVWYVLTRRQPYRHFSQERIAYKYLTWAWQMDEAARDGLTRQQFARYYLMRLGIGQDLTHIVLNPKYPRKLASEAELLALRPELNHLE

SEQ ID NO: 378820 - protein, 395 aa, unidentified
MNPEQQKKYFVGIDISKDSFDATLIDEYQKKLFYQKFEMNKNGFKSFLQKLEKFDKALLQITVESTGVYFVSLYNYLLNTGFSISVINPLLVHNFHKSMSLRKTKTDKKDSFIIALFTLKNLEILSKHSKQTSTMRRLCRERDKISEEIAKVKTEIKSDMNILFPELEKHIDIFTKSMLLFLEKHSSATSIRKLRTTQIDAVFNKTKGNKVRMKSAELKKLAKDSIGNGDKYLEKVLNSKIQRLKLYQELSKEFDLEISLFIDQNQSTDFDILTSIKGIGKITAQKFLIEVDDIRNFNNHKQLTAFMGTDPSLKQSGTSIMYQGKISKRGNKYLRKTLFQMAVSCIRNDSTFNTYYHKKRNEKKKYKQAVIATGNKLLRVIYSMLTKENYYCEEY

SEQ ID NO: 378821 - protein, 406 aa, unidentified
MPAYRVNVGVDWATAAHRVVVVDGERRVVGERTVPHEGAALAAFADWLGQLAEGQPEEVAVALETPRGAVVDGLLARGFHVFALNPKQLDRFRDRYTVAGAKDDRRDALTLAAALVTDLTAFRRLAPEDPLIVELRELSRLEEDVQAEARRLSNRLREQLHRYFPQVLHLVPAADEPWLWALLERAPTPSAAQHLPRATIQTILTRHRIRRVDADAVRALLRAPARPVAPGTVQAAQRHLAVLLPRLRLVQQQQAECATLIEGLLERLGESQGHRDVPILRSLPGVGRIVAATMLAEASPLLAARDYHALRTHTGVAPVTKQSAKYRQVQMRYACNRRLRNAVYYWGRSVIGHDPRSRAHYEQLRARGHSYSRALRGVVDRLLRVLVAMLTSQTLYDARRRLPSAA

SEQ ID NO: 378822 - protein, 355 aa, unidentified
MSHEKYIGLDVHQASISAAVMDPRGNVLMECLLETKAATILEFIQGLRGTLSLTFEEGTAAAWLHDLLKPHVSRRVVCDPRKAALLKAGNKNDRVDARKLAELLRTNQLKAVYHGEHGIRTLKELGRSYLTVSKEITRTMNRIKSLYRSWAIPCSGTTVYAPRHRGEWLAKIMEPGVRVRAQHLYQQLDNLQPLRLEARRELLLESHKHAAVTLLRQIPSMGPIRAALLVALLQTPHRFRSKRQLWAYSGFAVETHDSGEYRWVRGKLQRNREPITVRGLNDNHNHDLKNLFKGAALSASARPGPLQDFYLARVAQGMRPTMARLTLARKIATITLTMWKKGANFDPQQLHRQAV

SEQ ID NO: 378823 - protein, 388 aa, unidentified
MPKPVDLSKSLAALDQDSTLIVVIEMSQSSWLVAARAPGLARDPLKKLPPEPEQLFKLIDRWREESRRAGRVVRRVCVAFEAGLDGFWLARLLRHHDIEAYVIHPTSIPVKRDHRRAKTDRLDTELLMRAFLGWLRGEADYCSMAAIPTLAEEDAKRPTRERESRVNARSRLVNRLKGALARLGIRGFNPKLRKAAEKLEALRTGAGEPLPPNTLAELRRDMAQLRFVSDQIKQIEKAREARLEKAPREGAHPMVLMLASIKGVGLETAEMLVAEVLSRKLRDRRAVARYGGLTGSPDESGSRSREKGLARSGNARVRRGMIQLAWRFLMFQKKSALAKWFEARTANGPSGVRKTMIVALARKLLIDLWRFVEDGTVLVGVELFDSRA

SEQ ID NO: 378824 - protein, 388 aa, unidentified
MPQSNDLSRSLAAFDQDRTLIAVIEMSQSNWLVAGLVPGIERRPLKKLSPDEDALLKLVQRWRNEAAQAGREITRIVVAYEAGRDGFWLARWLRRRGIEAYVIHPSSVAVSREHRRAKTDRLDTELLMRAVLGWLRGEKRHCSMAAIPTIEDEDAKRPSREHEKLVGDRTRLVNRMKAMLARFGIRTFKPTLRKAADRLDDLRTAEGTPLPENTRAELRRDMMRLRMVREQIKEIEQERLRKLTAAPGEKGPPTMVRFIARIIGIGIETADLLVSEILSRGLRDSKAVARYAGLTGAPDESGRRRREKGLAKAGNARVRRGMIQLAWRFLIFQKDSVLAQWYRARTADAHGATRKRMIVALARKLLIALWRMATTGEIPSGISLRAAP

SEQ ID NO: 378825 - protein, 372 aa, unidentified
MTSMPEPTPIDRARDEREEVVLGVDTHKDLHVAAVLSGLGALLATRAFPTTAAGYRGLVAWARSFGALRRAGVECTGSYGAALTRHLQAEAIEVVEVNQPDKATRRKRGKTDAIDAEAAARAVLSWRATATAKTSNGPVEAMRVLRLARNSAVNASTKAINQLKAVLVGADPALRDSLAGLGPATLVRRCAELPDPTPGSGLSEVDRAVVFTLRTLAARIMALKAEAYQLHKQLRALIAAHAPELLERRGIGPDSAAALLIAAGDNPERLCSEGSYAALCGASPVEASSGKTQRLRLNRGGDRQANAALYRITVSRLRWDSRTQDYLRRRLTEGKTRREAIRCLKRYIAREIFTLITPKAATALANQTANAA

SEQ ID NO: 378826 - protein, 362 aa, unidentified
MEYFAGLDVSIEETAICVVGDDGKVVLETAVETDQAAIANALERYAGRLRRVGHEAGSLSPWLHPGLRELGVPAVCLETRHVRAALSAQRNKTDAADALGIAHIMRTGWFLETHIKSETCYRLRLLLVQRRNLKRKFLDLENAIRHSLKVFSIRLGKVSRGGMEKAVREAVADDAMTAGLMDCMLRARAALWAEYLTLHKLVTQIAMSDELCSRFMEIPGIGPIAALSFRSAIDDPTRFRRSRDVAAYFGLTSKRWQSGTSIDVKGRISKTGDADVRRALYEAASAMLTRFKGNDTIKAWGLRLAKTKCHAKARVAVARKLAVVMHAMWRDGTFYTGDPDASAQDVAAWNAAKVQRLSLANS

SEQ ID NO: 378827 - protein, 349 aa, unidentified
MTIVEDRPVITGGVDTHADLHVAAALDPLGGLLGVQEFPATATGYAQLLGWLGGFGGIALVGVEGTGSYGAGLARHLAAAGVRVVEVDRADRQDRHRQGKSDPLDAVSAARAAQSGRASGAPRGRDGAVEAIRALMVAKRSARAGRTQANGQARALIVTGPDELRARFAGHRPAQLVEAIAALRPRPGDVPGYATRVALRELGRRAQFLDAQLDRLDEVIGPLVTARAPGLLRLHGVGPDTAALLLIAAGDHPERLRSESSWAHLCGVAPIPASSGKVSRNRLNRGGDRQANHALWRIVITRLGSRPGHPATRAYVTRRTKEGLSKKEIIRCLKRYVAREVYHQLRAGA

SEQ ID NO: 378828 - protein, 392 aa, unidentified
MYIVGIDIGKNHHEASIVSPEGKQIGRSLRFATTHKGADSLMSFIFKNIGNSPCVFGMEATGHYWYPIYSFLKAKGYTICVINPIQSDSLRKMYIRQTKNDSIDSFLIAEVIRFGQFGTTSMADENILAMRQLCRYRDSVISSRTEIKLRIGTIMEQIFPEYEKQFSSLWLSTSMGILEKYLTPENIENAPIDELFEIIKDKSHNRLTKAKAISIKEAAADTFGIKIAQDAFSFQLKQLIDRMNFLDKQIEALDCQILEYYEKFDCYLHTIPGIGMIATATILAEIGDIHRFKSSSALVAFAGIDPTVRQSGEFNSTHNHMSKRGSPYLRHAIFLAATTCSFHNSPLNAYYKKKRDQGKHHLTATGAVARKLTTVIYAVLRDSKPYEPKKFC

SEQ ID NO: 378829 - protein, 346 aa, unidentified
MKVLIGVDPHKASVAVAVVDEAKGELIERASFPQNRTGLRALERWAKLFPVRRWPVENASGLGRHLAQRLAASGESVVDVPSKLSARVRVLSSGNARKNDGLDALATALAASRNERLAAVDPEVGSEMLRLLSERREDLVAERTRALNRLHGLLRDLLPGGVAGTLSAPRAARILRGIRPQGASARLRRRLASEILRDVRALDRKIADLSGRIEAEVEASGTTLTEIFGIGPILAARIIGTVGNVARFPTKAHFASYSGTAPVEASSGEVVRHRLSLAGNRKLNYALHMVATCQARSDARGGGYYRKKIAEGKSRKEALRCLKRRVSDAVFKSLVADSQAPSCGAA

SEQ ID NO: 378830 - protein, 343 aa, unidentified
MDHFAGLDVSVKQTSICIVDDTGRIVREVKVASEPQALLKVLGKAYRFKRIGLEAGPLSQWLYNALAEAGLPVICVETRHMRAVLKAQINKTDRNDARGIAQMMRVGLYRPVHVKTLRSQKLRMLLTHRKLLQSKAIAIDNDLRGTLRNFGLKVGMVGTVRFEARIRELVENFPDLAALIEPLLIVRRTLREQFCILHRRLLAIVRDDEVCRRLMTTPGVGPVVSLTYRATVDVPARFRKSKSVGAVFGLTCSKYQSGEVDWTGRISRCGDEMMRTMLYEAAQSMLHSKKWSWLKAWAMQIARRCGMKKAIVALARRLAVIMHRIWVDGTEFRWTREQAVAAA

SEQ ID NO: 378831 - protein, 427 aa, unidentified
MKKIKIDYLSTLFVGIDIGSRTNVVSALNFDQDFLIRMVPVANAQGGAEQMEEMVAQVLSQHHEFRAVIIGLESTGFYGVHIANYLSTSEKLAPFSTKVYCLNPNEVKQYKKSFNSLDKNDGIDSFVIADFARVGRIHTEPWRGAQYLALQRLTRHRLHITECIAREKTYMLNNIFLKFSEFAMLRKDEHPFSDKYGATAEAVLTDYLSTEDIVDASVDELVAFISSKSRGRIADPEQTTYLLQKAAQDSYRLDQCLYEPLTVSIGCSFNCISAFEKELKAINAAIQRAVKGLNPTEYQILTSVPGIGPVYASGILAELGTIKCFKSNDALAKYCGIVWRENQSGEFEAEDTPMNKAGNRYLRYYMIEAAGSVMQHCPEYKAFYDKKFAEVRTHQHKRALALTSRKLIRMLFGLLANGRLYSVEKSR

SEQ ID NO: 378832 - protein, 370 aa, unidentified
MQIVRSFVGMDVHKETISISVAEDGRNGPVRFIGVIPNQPDDIAKMAKRLSKHGDLDFCYEAGGCGYNIYRQLTALGHSCTVAATSLIPRKPGERIKTDRRDSQKLAILHRSGDLTKVWVPDATHEALRDLVRARVDASMHLMRARQQLLAFLLRHGRSYPTGKHWTQRHRSWLAGQTFQQEVHRIVFQDYVETVWTAQERRDALIERIGAMTASWSLGPLVEALRGLRGIDLLSAATFICTTGDLSRFESPRMLMGYLGLVPSEHSSGGSVRRGGITKTGNREARRMLIEAAWSYRYPARVAKEKAEILVHLPKNIRDIAWKAQTRLCARYRTMTARGKKPTVVVTALARELAGFIWAIGQEMRTPMTT

SEQ ID NO: 378833 - protein, 361 aa, unidentified
MCHDVIFTHIKLGVRPTMKQCNVKAKICVLGIDLAKQSFQLHGVDENEEPVLQQSFNRTRLINFIANLPPCLIGLEACGGAHHWVRVFTKMGHTVRLMAPQFVKPYVKSNKNDAVDAEAICEAVSRPTMRFVPAKSIEQQDLQSLHRIRSQTVAKRTAQANQLRGLLMEYGIVLPKGISHVRKHVPDILEDAENNLTPLFRELLQDIYNEIIHSDKRVKMLEDKLALFSQKNEDCKRLLTIPGIGSLTATALVSAIGDVTVFSNGRELAAWLGLVPRQHSTGGKPTLMGISKRGDPYLRMLLIHGGRAVVRVADKYHDKRNKWIQTLEQRRGKNITAVAVANKNARIAWALLSKQENYRAA

SEQ ID NO: 378834 - protein, 352 aa, unidentified
MSIIAFDSHKRYTFARVENENGEHPREFRIEHKRGNIAGFLYGQEPGSTVAIETIGNWYWIVNEIEQAKMFPQLVHARKAKMMFGCINKSDKLDAKGLNILQRAGTLPTVWIPPGDVRDKRELPRTRMVFAVERTKLKNRIHSVLDKYGLQDEFEDISDIFGTKGRRVIGRVLEQLPSHARYTTGLLLEQLDQTEQKIKAIEARMEKLFRQTEQHALLKTMPGVGFILSVVILQEIGDIGRFGSAERFASYSGVTPRVHASGGKVRYGRLRTDTNHYLKWAFSEAGNSVAVNRNRVPARHVSQLYNRIRGRKGHAKAVGAVARHLAESAYWILSKNEVYLERGLSKVSPTGA

SEQ ID NO: 378835 - protein, 427 aa, unidentified
MSEKKSLELRVSVDVGYWRHSVAIGLSSGEVLEEFEIEHRPEGFKDFFTRIEKHRKTTNSAVAVAMEGYNGHARPLDSLVRARGYRLYNLNNLKFARFKEIFPGSAKSDRIDAHKGLELFQLSDHLPLAKEVLQEVSGTPHENEVLKRLTRRRRRLVNERVRVVNNLQADLQAVCPGLLEITSEAGSQWFLNFLLSADTVPQLARLRHNTLLKITSVGVKYAGLIENWQKRAHFSDEVEWVSELIQEDAKRCLELDEKIKRLEVKIAGIAKDSKIAKILRSIPGYGATSSSELAGEIGTIERFASEGSFSLYLGMSTLDNSSGKYQGSKAPKHVNTRAKAAMMIALDRHRKYVPESQKYYEKKRGEGKKHNQAIRALGRHLSRIIYKMLKEEREYEIRTQKGNTKAKVSSRSSLKRQIRRSKFSANS

SEQ ID NO: 378836 - protein, 425 aa, unidentified
MNYKQNEKINQVKESTLVVGIDIGSTTQYARAFDWRGIELGKVFPFSNSREGFESFKAWMQHLQDKYRKSDVIVGIEPTGHYWFDLGAYLEDEGILLVMVNPYAVKQTKELDDNSQSKNDRKDPKVIAKLVTEGRYSAPYTPDGVYADLRIMVANRKRLIREMTQIKNRFARWFAIYFPEYTDVFGDYEAQSSMLLLKKVCTPEAIVELGAEKINQIWRDAKLRAVGMKRATTLCETAKRSIGLKKGSSAARYEMKLLLEDYEYKKAQLDAVMEEIEKLCRKIPESRQMLAIKGIGVITVAGFLAEVGDVRRFESPGQIQKLAGLSLRENSSGKHKGQTTISKRGRSKLRAVLFNAAIPLIAKNPEFKSLHEYYTTRANNPLKKKQSVIAISCKLIRVFYAILANGVTYDSQKLLSDIHRQPQAA

SEQ ID NO: 378837 - protein, 418 aa, unidentified
MSTVIGVDAHKRSHTLVAANPLGRKLAQLTVATTSEGHTEAVRWARVRFGCDVVWGLEDCRNLTARLERDLLAAGQKVMRVPPHLMSRSRASSRELGKSDPIDALAVARAVLREPDLPIACHDECSMELRLLVDRREDLVQHRVALISRMLERIHQLDPAWAEPRNWEARKPREELKTWLATQQGLLAEIAHDEFDEIASLIDAAQVLERRIAGRVRQAAPALLGIQGCGDLTAAKIVAEVAGIDRFKSEAAFARHVGVAPIPHWSGDTARPLRPIRHGNRQLNVALHRIAMVQITHPGPGREYFQRRVDEGDSRQRALRSLKRRLSRVVYTRMKADSRDQGSSRRLPRLPRVMMLPLASLTSGEQPALGRPRALDSYQVALAARMRSYGDKPASIAAQLGVSVSTVKRVIALAEIPH

SEQ ID NO: 378838 - protein, 355 aa, unidentified
MKEYIALDSHKRYSLLEREEARTGRTMQLRIEHVRGAVSACLRRCEAGSAVALEATGHWYWIVREIEAAGLCPLLVHPRKAKLMMGLINKTDKLDVHGLNRLQRNGTLPTVWIPPAELRDLRELTRTRLVLVRSRTRLKNRLNATLAKYGLLIEASDPFGKRARAQWRDNLKLLPEQTRFVSEQLLAQLDFIQGQIETQERRLLQLLKVTPAIQRLQSLPGVGLILAATLALEIGQVSRFASHEHLASYAGTTPRVHASGGKVRYGRLRPDVNHYLKWAYVEAANVIARHQQHWKERHVVRLYRRLKERKDHAKAIGAVARHLAEASFWVLSRGENYRDPALRAEKAGRPGSTLV

SEQ ID NO: 378839 - protein, 316 aa, unidentified
MTSKKVSNHPSHKVVKNNFKSIGRFLETLPSDAVLVAEHTGVYGDTLLKCCMDSNVKIAFVGGYVIHRYRATPDRAKTDVLDCALLREFGERYPDKLKYKTFPEEALYELRQLARHREMLVEQRKQLITADKSEDCRPIRSLAVKRSMDRIKEMLDTEIAETEKEMLKVINGHESIRHNYELVKSVNGVGLITAVELLVKTENFTKITTARQYSAYAGTAPYEKSSGKMDKGAHISKIGNRRSKTLLYICAESARLHNKEIKLYYERRTLIDKKPRHYVLNAIANKLLRIIFTLVEKGEYYDANFIRQDPRVVKYN

SEQ ID NO: 378840 - protein, 319 aa, unidentified
MLVGIDVAKAELVVATRPGSERWTVENDERGVRTLVERLRRDGAELIVLEATGGYELVCVAALAAASLPVVVVNPRQVRDFAKATGQLAKTDRIDADILALFAERVRPEVRALPDAEAQELEALLARRRQLLEMLQAERNRLGQVFGRGKAPVKKSLKAHIAFLERELRMADTDLGDQVRQSPAWRERDDLLRSVPGVGPVLSLTLLANLPELGRLSRRAIAKLVGVAPLSRDSGTLRGRRFVQGGRPSVRGVLYMGALVATKRNAVIRAFYARLLAAGKPKKLALVACMRKLLTILNTMVRTGQRWSDEPADRAVIHA

SEQ ID NO: 378841 - protein, 347 aa, unidentified
MNSIKYIGMDLHSATISAAVVNDAGKLNMEATLATEASAVVDFIAGVQGTLHVAFEEGIHAPWLYDLLLPHVAQVLVCNPRQLPRHRGENKNDKIDAQQLAQWLRLGVLKPVYHNPTGLRTLKELVRSYLSLVRDTARVMNRLKALYRARAIPAPGTRVYSPRFREAWLQQLREAGVHYRAQLLYRQLDLLLPLRQEAKRAMIAESRQHGAQKILLSIPTLGPVRVAVLMAVMQTPHRFRRNRKLWTYAGLGLVSRSSANYRIVEGQLTRAGKPALILGLNLNHNHVLKALFKDAAATAVSRPGPLREFYARQLAAGREAEIARVTVARKLATIVLTLWKERRTFQR

SEQ ID NO: 378842 - protein, 408 aa, unidentified
MNAVGIDVSKGKSMVAALRPMGEVALLPQEFLHTGVGLEQMAYAILALGEDTRVVMEATGRYHEPVAAALHEYGIYVCVLNPLYIKQSGGGSIRKVKTDKADAMKIAKYGLDNWVDLREYTPMDTVRQQLKLCSRQYNLYMKTVVSLQNNLISLTDKTFPGVNELFSSPERADGHQKWVDFVMTFWHCDCICRVSEKAFTERYQKWCKRKGYHFSEEKALDIYAGSCGHFTTLPKNDNTKLLITTAAQQLLAGKTTLAALRAEMTRLASQLPEYETVRAMYGVGETTAAQLMAEIGDVRRFPRRSSIVGFAGVDPAVDQSGKHETQSTSTTKRGSPHLRKTLYQIVCTYLRKAPADEPVYQFLDKKRAEGKPYFVYMTAAQNKFLRIYYARVKECPEAFDAQQGTSQG

SEQ ID NO: 378843 - protein, 407 aa, unidentified
MLQESHDEEQIIARVAALDIGKAELVCCVRVPAPDSARKRLQEVSTHSTMTGSLIELANRLVELRVERVVMEATSDYWKPVFYLLEAHGLAPWLVNARDVKHLPGRPKTDVLDAVWLCKVAERQMLRPSFVPPWPIRRLRDLTRYRIDLVGVRTAEKSRVEKLLEDACIKLMAALIAGQRDPTVLAQLARSRMRTKIGRLEEAFNGHFDAHHGFLLARMLHRIDDIDADIAAVDEQIEAYLAPLAAAAARLDEIPGIGPVAAAVILAEIGTDMSRFPTAGHLCSWAKFSPGINSSAGKTKGTGSTGHGNRYLARVLGEAAVIAGRTDTFLGERYRRIARRRGKKRAIVAVGRSLLVITWHLLADEDAHFTDLGADHFTKHTNPEVKKHNHIRQLEALGYTVTLTPAA

SEQ ID NO: 378844 - protein, 339 aa, unidentified
MFIQSKQIVPELKSLFAGIDVGAEELILVIRKGGTPFKPQKFANAPADRKRLVKKLVGMPGIIVCLEATGIYHFDLSIALHDAGVALMVVNPKSSHNFAKVLMKNSKTDAVDAETLAQYAERMDFVAWTRPSDEKIALRSFARRIDALTRQKAAAKNNCHALTVSQETPKAVLRDVKLAISQLEKRIEHLGKEALVLIGQHAELERAFQLLTSVKGIAKTSAIALMGELLLLPPGLSHREWVKFAGLDPRAFDSGKSVHKQARLSKAGNRHIRSALYMPALSAKQHDPHVKAYFQHLVDNGKKPLQALCAVMRKLLHAIHGMLKHDTPFDNTRFYAIPA

SEQ ID NO: 378845 - protein, 343 aa, unidentified
MQIHSVGIDLGKTTFHLVALGAAGKVLVRKKFTQRQLLTYTANMQTSLIGLEACSGAHFLGRALRKQGHDVRLIAAQFVKPFVKSNKNDFVDAEAIAEAVERKNMRFVPIKTDDQLDLQAIHRVRDRLISRRTAVINQLRAFLLERGLVFAKTPSKLREAMPDILENAEADLTPQMRNLIDLLWREWKMVEEQIEVLSFELERISATDAGCTRIRKIPGIGPIVATAIVAAIGNGAAFRKGRDFAAWLGLVPRQHSTGGKAKLLGISKRGNVYLRKVLIHGARAAVLRIKRDRAPIGAWLDALDARAPKNVVVVAMANKLARIAWAVLSTGEDYNPGALVTAA

SEQ ID NO: 378846 - protein, 352 aa, unidentified
MTTIAPESTPDQVQVAGGVDTHADTHTAAAIDTAGRLLGHRQFPATAAGYRQLLAWLRAFGALLVVGIEGTGVYGAGLARHLAAQGVPMLEVDRPDRKTRRFAGKSDPLDAEAAARTALARRRTGIPKQRSGEVEALRNLRVARRSAIDQRADCQRRIKALIVTAPEDLRAQLRGLTGVRLIATCAALRPDTARIGDPEQAAKTALRSLARRHSALTEEIDDLDALIGPLIEQINPDLMARNGVGADVAGQLLVTAGQNTDRLHSEPAFAMLCGAAPIPASSGKTNRHRLNRGGDRQANAALYRVVLCRMRWDPRTRAYVERRTKEGLSKKDIIRCLKRMIARELYYVLRPA

SEQ ID NO: 378847 - protein, 406 aa, unidentified
MNNCTEKAAKRTTPVSGSSEVVDKVQQATSTYGAYIGLDVHKDTIAVAVAECGRGQPDYFGEIANTPKKVGKLIERLSAKYGGEQLLFVYEAGPCGYGLYRQIVTTGHACEVVAPSLIPRKAGERVKTDRRDALGLARLSRAGELAAVWVPGPEQEAIRDLTRAREDIKAMETRARQRLGAFLLRHGRVYDGGKSRWTQAHFRWLEQVKFESPVQQIVLQEYIETVKEMQRRVAELENQMRQALADWSLRPVVEGLMALRGVSLITAMTVLAELGDISRFDSPRQLMAYLGLVPSEHSSGGTRRQGAITKSGNGHVRRVLVEAAWNYRFPARKTRTIERRAEQTSAEIQAIAWAGQKRLCGRYRRLVEAGKVNKQVTTAVARELAGFIWAIACEAQGKAHASRATA

SEQ ID NO: 378848 - protein, 458 aa, unidentified
MKKFYLGIDASKGYSDFIVLNENKQPMMQNIQLDDTFEGHCRLYEMVDSFLEGHPEGMLYAGVESTGGYENNWYRSLLEFQGSLNLQSTRLNPLGVYHNSKAALKRNVTDKISAVNIAEYMIAHPEKISYEQQDSLADLRKQWGFVNMLTKQSTQLLNQLESLIYAANPEILQYCKDSLSAWVLTLLSKYPTAANLARAKVVSLSRIPYISSARAQELVISARQSVASATDKITQQLIVATVKQIQHLKKTTKIQMDILIKECSSPEVDLLKTFSGISDYSAIGLLLEIQSVKRFPTVKKLAAFFGLHPELKISGDGAAAFRMSKKGRKEPRKILYMVALTAINRNPLIRDTYKARVEKGMKKMAAIGLCMHKILRIIYGMLKNNQPFDPDIDKKNREKACHQGEPITTDKNRRYQDYDPKAPISRRQHVKRMERKQSHSDNGTKSGIRVPVPALHNK

SEQ ID NO: 378849 - protein, 365 aa, unidentified
MNCVGIDVSKGKSMIAVMRPFGEVVVSPFEVCHTASELSELARLLKSLDGETRVVMESTGNYHAPVAWLLHGAGFYVSVVNAMLVHDYGNNSLRRGKTDKKDAVKLANYGLDHWLTLPRYVPEEDTRLMLKTCYRKYQQYSKVQTMLKNNLISLLDIAFPDANRLFTSPPRADGSEKWVDFVAAFWHCECVCNLSEKAFTAKYHKWCRKHRYKFCEDKTLDIYSSACGHFGVIPKTDTAKLLVEQAVFQIRATSTTLAALKQEMQSLAASLPEYPVVMGMFGIGPALGPPLMAEIGDVRRFHSKKALVAVAGIDAPPYQFGQMDVRSHSISKRGSASLRRTLFLVMSVILQHAPMNEPVYQFMNK

SEQ ID NO: 378850 - protein, 375 aa, unidentified
MSKDTLYVGLDTDKKSIEVALAEGLPGGEVRAWGKLANDARSVLRLVKRLQAGGRPLEMCYEAGPCGYGLDRLLNGQPGVRCIVVAPSLTPRRPGDHVKTNRRDAIMLARLLRAGELTAVWVPDPAHEAMRDLVRARGAATGDLVRCRQRIGGFLLRQGIGYVGKPWTRKHRAWLGQLVATLPLAAHRLMLGEALQALDEATARRDRLTDHIAELVPGWSLAWLVDALQALRGFALINAATLAVEIGDPRRFATPRQLMAYLGLVPSESSTGDKVRRGGLTKAGNGRTRKALIEAAWTYSRPARAPSDNRHAPAVVAIATKARHRLSQRYRRLTARGKRPVIAVAAIARELSAFAWAIAQVAGPTATTPQLPTKR

SEQ ID NO: 378851 - protein, 376 aa, unidentified
MEHDSTLYVGLDVHKESITAAYAFGMGEVELLGKVGTTKTDIDRLCKRLQSKASRICIVYEAGPCGYGLYRQLQQKGIDCMVCAPSLIPRKPGERVKTDRRDAIKLVRSLRAGDLSEVFVPTVEDEAFRDLARAWVSAKDDLKRARQRLKSFLLSHGVSYTGRADWRAAHRRWLSTFAFDSTWQQLAFEEHRRTIEDRLAQCDRLEAALREAVVAWRFYPAVLGLQTMRGMQFTTAVGMLAELGDLSRFTHPRQLMAWLGVTPSEHSSGEKRRQGSITKNGNSYARKLLVESAWSYRHPARVSPEIQRRHEGIPKPIVDRSWDAQVRLCRRYRTLVARGKQKNIAVVAVARELSGFIWDISQLAMSLALQPQKHAA

SEQ ID NO: 378852 - protein, 332 aa, unidentified
MVAGTHGSLNKAGSTKMTQISRTAGIDTSKAKLDVAVHGGVERWQVDNTPVGWRRLAAELTSAEVMRIGIEASGGYECGVVGHLRAKGFVVLVLQPIQVKAYARLHLRRAKNDTLDAVLIAACAATIDRPRIAPDERLAKLAQYLTFVEQIEEDIARFKVRLEHVGDARLRRMVVADIARLKARRSGQLLRIVAALRAHDDLARRLDLVLSVPGLGARTALALIIRMPELGRISREEAAALAGLAPFDDDSGKHKGERHIAGGRRRLRRSLFAAALPAAFRWNKALIALYGRLTARGKAHNEALIACARKLLIYANTVVQRGTPWTEKTLTT

SEQ ID NO: 378853 - protein, 421 aa, unidentified
MKNKAARKLKQVPAGYLAIGVDPHKKVHAAVAITEDLTVRTKFKFSNSRAGFEQALENARAEMIKTCCCGVIFAIETGGHYWRNFAYFLDERGIPFRLISQITLKRMRDGRDINRRKSDYRDAEMAADILRTGDFTETRLPQGVYADLRSTHSAYFRLVKERSRIVNLMKGLLDGLFPEFTQVFKDPCGRNAMAVLLTCPSPAVIASIGEDVFIAKIRDRRQGRLMLKKLRALHQAAKTSVGVKPGADSVATEISLLAGRYGLIEEQIDKLVKSLISLVGRTEEGKYLLSIPGISYLSAAALLAETGPLKQYQNAKQVIKMAGTNPIESESGGKRLGETPMSKKGRPRLRYSAWNAVIPLFRHNPDFRCWAKRLRERPAHAHPLNGKEVVGAALNRLLRLVFALVKKQEFYHSPEIALVVI

SEQ ID NO: 378854 - protein, 324 aa, unidentified
MNNDISYIGVDIAKSKFDVCLYNGNFSNCVYASFTNDLDGFYDFSTFLKSANDLENIRIGMEATSTYMINLQKYLDAFLCSYIIINPKKLHHYIKYKNYESKTDKLDSYYIADYITNIAIDSFNSSFQTLRYLYKPYNSYISFIIKSETHIKGLSDSVLSNDFISDTLKTEILSFNENLRKTKKKVMQELLEVIKISMPEYDHIKNDLMGVGDKTLLAVLPLIYDVSEVYSVKQLQSYLGLNIIYKDSGSSVHAKQKISKSGNKEARKMLYLASLSAVQSNDILKEKYQRLLENGKPKKVALVAISAHIFRAIVSKLNYYKHLK

SEQ ID NO: 378855 - protein, 356 aa, unidentified
MTSVKYIGLDVHQATIVVAVRDESGKLIMESVVETRASTILDFIDGLRGKLFVALEEGISADWLYNVLKPHVDHVMVCDPRKSSKMKAGSKNDHIDARDLSELLRGGQLQPVYHGGDTGVRTLKELARSYMTLTEDVTRVMNRIKSVYRSQAIRCSGPRVYSTRYRAEWLEQLRQPGQRLRAEHLHQQFDLLQPLRMQARQELLKESQRYPARATLQKIPWVGPIRAALLIALVQTPHRFRTKRQFWAYIGLGVETHSSADYQFKNGELQRSKKKSSTRGLNVNHNHDLKNLFKSMAVSASTRRGLMQDYYEGLLANGVRPAMARLTLARKFAAIVLVLWKKGESFDPKKLTSQAA

SEQ ID NO: 378856 - protein, 386 aa, unidentified
MRDQTFVPQDYDVFVGLDVDKRSIAATFSGAQGFIRSLQMPYSVDHLLNHVRKHFGDQKIAFVYEAGPTGYGLYDGLAAQGYRCLIAAPSMIPRAPGQRVKTNRLDSRALSESLRGGQLKSIHVPSQVYRELRHLTQLRDTVVREAAAHKQRIKALLLLEGIGFPPAPARSQWSFMVKEKLRKLACSGSVRFKLDQLLDSLEFCQKQVVSSTKEIRHFCKADAELKQSIEYLMSISGIGWIVGSQLLARIGDWRQIDNVRQLGSFLGLVPTENSTGDTVNRGSITRVGDGRLRSKMIQAAWSAIRQDAELREFYRSVCQRNPRGKGARIAIVAVARKLSMRIYAVLKNQRPYIVREQVHSAPLTQEETSPQGTTRRFAEPGETENS

SEQ ID NO: 378857 - protein, 334 aa, unidentified
MEKVTTVGIDLAKNVFSLHGVDGAGRVVLKKTVRRDQLLGVVAGLSPCVIGMEACSGAHEWARRFQGHGHTVRLMAPKFVTPYRKSGKNDGNDAEAICEAVSRPSMRFVPVKSAEQQALLSLHRVRQGFVVERTAAINRLRGLMAEFGVVLPLRSETVRRQAAQAAEALPDLARRMVAELLEQLRLLDERIDAYDRELAAQARLSEAAQRLMRIRGIGATTALAIVATVGNAREFRNGRQFAAWLGLVPGQYSTGGKTRLGRITKRGDAYLRNLLVQGARSVLHTAASHGDRVSRWALELQGRCGYYRTLVAIANKNARIAWALLAKNETLRAS

SEQ ID NO: 378858 - protein, 343 aa, unidentified
MERLYYIGLDIHKRIIAYCVKAIDGSLIDQGKITADRQSLEIWVKGLPGPWMGAMEATMFTGWVYDFLKPHAVALKVAHPAMLKAITAAKKKNDRADAEKIADLLRVNLLPECHMLSEEIRELRRILRYRNHIVRTAVKMQNKMSGLLMEVGVTYSKKRLHGKKYFRELLERVDEIPPSVKELLQLSRSSYEMFRSFQKRLIETLRTNQLIRDRVHRLMTIPGVGEITALTWTLEMGDPGRFSSIRKAVSYCGLCSAQKESAGKEQRGPISKKRNKHLQTMLIEAAKLAPHWNEQLAIVHERELKKGNRNRATLAVARKLVAYMLAVDKNQADFKLSSEIRAA

SEQ ID NO: 378859 - protein, 343 aa, unidentified
MDYYAGIDVSLKESSICVVDGTGKVVREVKAASEPEALVRYFAELELPVSRIGLEAGPLSQWLHAGLVAAGCDVVLLETRHVKAALSAMTVKTDRKDARGIAQLLRMGWYRPVHAKSVTCKDTRALLVGRKLLQGKLLDVELSIRGILRGYGLKVGEVSRGRFEMRIRELTAGHVTLETVIGAMLTARTALWNEFTRLHREMLKIARADKICRRLMSTPGVGALVALTYRSAVDDPTRFGKSSTVGAYFGLTPKKYQSGETDRDGGVSKVGDALVRTALFEAAHIMLTRATRFSSLKRWALEVARRRGMKRAKVALARKLGVVLHRMWVDETEFRWGKAATAA

SEQ ID NO: 378860 - protein, 320 aa, unidentified
MTAFTPVGIDIASKKFDAAIWIEGKKYKNKVFANTPTGFHAFLLWLAPYGPCHICMEATGAYSLPLATYLYDAGYPVSVENAARIHAFGQSELIRNKTDKGDAKMIARYCHLHKPPEWKPVPVNERKLQVLINRLNTLKEMKRMEENRALTSETIVQDSIQKVIAALDEEIKEIEQAIKKHIDNDPDLKKNQALLESIPGVGEILSTTLLGYVGDMSRFSSNKALVAYAGLNPMLKESGCWKGSTKLSKKGNALLRKALYMPAITALKYNPVVAALCNRLKEKGKRGKCLVCAAMKKLLQLAYGVLKSGKPFTAEIPLAR

SEQ ID NO: 378861 - protein, 460 aa, unidentified
MNDYFLGVDASKGYSDFVMLDSKKQIVIENFQLDDTFEGHSQLYELLRRFNQDYPQATIYAAVESTGGYENNWFQSLLNFQGSLPIKTAHLNPLGVSHNSKADLKRNVTDKISAQNVAEYMIAHPEKVSYQHQDSLASLRKQWGFITMLTKQCTQLLNQLESLVYNANPEILAYCKDRTPQWVLKLLTRYPTARRLSRAKVNSLARIPYVSTERAKELIATAKKSVGSANDKVTEQLIVSTVKQILHLKKLIDTQTEILANQCQIPEVELLKTFTGIGDYSAIGLMLQIQTVERFLTSKKLSSFFGIHPEYKKSGDGTYKYRMSKKGRKEGRRILFTVAMTAIQSNPLICEIYQQAVDRGMEKMAAMGLCMHKILRIIYGMLKHNKPFDPQIDLKNRQKKLPRQKKGGPDQNRRYQDFDSKAPVSRRQKMKRKERKQSQNAVDVKHGISEAPVPTDQLAN

SEQ ID NO: 378862 - protein, 395 aa, unidentified
MYAIGIDVSKGKSTIAINLNGILLEKPFEIKHTNEGFDMLLEKIKEFPKENIKFVMEATGIYHLPILLKLLELKYFVCVENAFLIKKYFDVNLRKVKTDKKDAVKLANYCSNKWNILKTYTIQDNTYEELKFLSRQYNQQISLKVKAKVQLGNLIDLTFPSFSNPFNIENQYLFMLDVYEKYYHPKLIVALEEKTFVEDIQEIAQKRGHRTGLRVGIELYKLAKETIPTRPSNKYTQLAVTTCVDSLRSIEKATNDIIAQMNELARELPEYDIVRKMKGVGNKICPRIIAEIGDVRKYKNANSLIASAGIDTPPYQSGNFTATNIHISKRGNKYLRKCGYEIMKSLKATKPTNDSSVYDYIVKKEIEGKPMDVCKIAGLNKFLRIYYARVKEVYN

SEQ ID NO: 378863 - protein, 310 aa, unidentified
MKAAWVGVDVAKDTLAVCVLPDKRQRSYANTLEGWAHLLNELSGYEVQRVLLEATGGYEAGVLRYLAAAGLPVVRINPRQARAFAEAMGSQAKTDPLDAALLARQAQVLEAPLYQPQTAQAQALQELVKRRTHLVAQRDDDRRRLAQATLPRVQANIRHCLAFLNQQITLLNHDITQACRELDDERTRRLSSVSGIGPVSVANLLAYLPELGHLDRRQIAALVGVAPYNADSGPKKGIRRIAGGRSAIRRVLYMAAWSVVRHQTDFKRRYQDLRQRGKPAKVALIACLRVLLIRLNAMLRDGTPWRSEPA

SEQ ID NO: 378864 - protein, 370 aa, unidentified
MLDTTTFIGLDVHARSIKAVSLDVMTGEVRAATFGYDAGAVAEWVRSVDPRARCVYESGVTGFDLQKRLSGLGVDCVVGAVSKMIKPSADRRRKNDRNDAEFLARMLSVGNVVEVWVPDDECEAARDLTRALEDARDDLSRSKQRLSKFLLRHGLVFDERTPTGRRKGNWTRAHWSWIESIRFAERADNDVLAYYVDAVRRAAEEKARLEGLVEAEARKPRWRKRVDSLRCLKGVDTASAADLVFEAGEFSRFRNARSFAAWVGLTPSEHSSGESDRRGAITKAGNKHLRKTLVEAAWHYLTCSGRPKDLAKGQAPDRGARRHAAKGVRRLVERREALLARGVHGNKANVATARELACWVWAVGLMAEEA

SEQ ID NO: 378865 - protein, 370 aa, unidentified
MGEYSGGFVGFDTSKTKHAVAIAEGGRGGEVRFLGEIASSPARVERLVGKLASRYDKLHFCYEAGPTGYGLYRQIRELGHDCAVAAPSLIPKRPGERIKTNRRDAVTLARLLRAGELTAVWVPDAVHEAVRDLVRARAAAAQDLRCKRQQLLSFLLRHGRIFSGRQHWTLAHRRWLAEQSFAHPAQQVVFQDAVEAIAEALARLQRLEQQLVAIVPSWSMAPVVEAYQAMRGASFLVAVTFAAEIGDVRRFDNPRQLMAFLGLVPGERSTGETIRRAGLTLAGNRHARRVLVEATWSYRHPARVSPTLRARLEGLPKPVRDTAWKAQVRLCARYRRLRAAGKKLPVVIAAIAREMAAFLWAIARHVAPAV

SEQ ID NO: 378866 - protein, 344 aa, unidentified
MTYYAALDVSLRSVNICVIDEQGEICAETKLASEVEDIVAYLNDLDLNIVSVGLEAGTLTQYLIYGLQAAGYEAVCMEARQVKAALSAMRNKTDKKDARGIAQILRSGWYSRVHVKSIASHQVRALLSSRKAVLNKCIDLEQEVRGLFKVFGIKLPPKLGHGAFDKTVRPTIEADPALAHALLPLLEARLALYRSFRELDNRTRKLAMKDMVCQRLMSAPGVGYVTALTFKAAVDDPTRFKRSRTVAAHFGLTPRRFQSGEMDNPGRISRAGDSNVRCTLYNAANSMMTRSSKWSSLKVWGMQLAKQRGHRRAVIAVARKLAVILHRMWLDDTQFRWGTEGARS

SEQ ID NO: 378867 - protein, 321 aa, unidentified
MSQQVKFNQVIQCGCGIDVHQQVIVATVRHNDSEEETREYDAYTSSLTSLREWCKSEGVTHIAMESTGIYWKPVFNILEEDFEIILVNARHVKNVPGHKTDKKDSRWISKLLLSGLLKGSFIPPQDIRELRDLVRYKRKLTNQAASEKNRLIKMLEDCNIKLSSVVSDVNDGVSATKIINDIIRGVTEVEKLMMHLHGRIKADREDIRKALEGRVTEHHRFMLKIIKESIEKTEKIISKVEKQIDKAVKQYQVEVDLLQTIPGVGKDSAISIISETGVNMDQFPNEQHLSSWTGMSPGSNESAGKKKVPEPPTEINISDQP

SEQ ID NO: 378868 - protein, 353 aa, unidentified
MTGTKYIGMDVHKESISIAVRNDTGKLVMECVIETKANVILEFIHGLRGELQVTFEEGTWATWLYDLLKPHVTKLVVCDPRKNSRQGNKNDRIDARELADRLYMNKLSSVYHGGAGVRTLKELARSYLTISKDLGRVMSRVKAIYRSWGIPCAGKQVYAPRHRAEWLAKITEVGVLRRAEFYYQQLDALRVLRQAVRRDLLTESKKHKAIKLLRQIPSIGAIRAALLIALIQTPHRFRTKRPFWKYSGFAIEMHSSADYRAVKGELQKSKKQISVRGLNRDCNHDLKNLFKSAATIASVKPGPFQEFYAALVAKGMRPEMARLTLARKIATIVLIVWKRGVSFDAKYLKPQTA

SEQ ID NO: 378869 - protein, 423 aa, unidentified
MEVLHECVAGLDVHKDNVVGCVRTVSGDKTTREHRTFDATTDGLLALLEWLTSCRCELVAMEATGVYWMPVWRILSDGAFKLIVVNAAHIKAVPGRKTDMKDSTWLADLAAFGLLKASFVPDEEQHELRALMRTRKQLVREQTRHVQRIQKTLTEANIKLDSVISDIMGRNGRRMIEAMITGVRDPRKLAALADQRLKATPKQLYDALHGRLTDHHRFLLQLHLGQWDTLDATIKGVDREVATRVFRMDTEVTAAKAKFSDLIDQLVTIPGVSRLSALTILSEIGTDMSRFATAGHLVAWAGMCPGQNESAGKRKRTRLRKGAPWLKTMLVQCAWAAKRKKDSYYKAQFFRLQSRRGPQKAICAVAASLLTAIYHMLKDGTIHQDLGSGYFDQRPPEIKVKRLVNQIAKLGFEVTLQPIAKAA

SEQ ID NO: 378870 - protein, 352 aa, unidentified
MMLIGVDPHKSTSTATAVEPESNREVASIRIEATLREYRRLLTWAGRWPQRRWAIENAEGLGRHLASWLLARGEQVVDVPTTATARVRQLSRGGGRKNDRIDAAAAACVAALQGDARPLEAEGTTDVLGLLDERRANLSQARVRAVNQLHALLRALLAGGAPRGLSAASAAALLRTVRPAGAAERVRKQIAGDLVVEIRSLDSRLKANEAAMAELVKSSGSTLTETVGIGPVTAARLIGRSGRPSRFPSSAAFAAYSGVAPVEVASAEHARHRLSRSGDRQLNSALHIVAVTQIRTAGSLGNIYYRTKMAEGKTEREARRCLKRRLADHVWRTMIADEKRQRAKPASASHAA

SEQ ID NO: 378871 - protein, 444 aa, unidentified
MKVEKVSAPRNKRGLHRVNGAEPQVVGLTPQPTMKRKTDTMKTYILRPEKTVEPQKISPSPRHQPAVPLASKGPVLFLGLDVHNDSIAVSLAPSDMTEVRRYGIIGGEHEDVLRLAKKLTAAHPGTTLKFCYEAGPRGFALCRWLQAHGWECILVCPSKIPRKPGERVKTDRRDADDLARLYRAGELTGIYVPEPADEAMRDLLRARFQVGRQQHRARQQLKMYLLRHNLRYTGATAWSPAHLRYLAKIKMPFPVQQIVFQEMLDVITAATARLERYDQEIERAVPGWRWAPAVRALMSLRGMALLHAATLVAELGDFNRFEHPGQLMGYLGLVPSEHTTGKDRQQGGITKMGNAPARRALVEAAWQYRIPARLSPHLKKRQEGLPKTITDIAWEAQRRLHHRYTHLTRVGKKKSQVAVTAVARELTGFVWAIARQVKPVATTP

SEQ ID NO: 378872 - protein, 341 aa, unidentified
MEHYVGLDVSLKLTSICVVNQTGSVVREGVVDSDPEAIAAFVRSNALVRIGLETGPTATWLWTELKRLDLPVICIDARHAKAVLKMQINKSDRNDAAGIARIMQTGWFKEVRVKDLDSHSVRALLASRALLVKIKRDLENQIRGLLKNLGLVIGRATGNVFAVRAEKLISDRPELIAAVVPLLNARQAIEQQIGDLDRKVHKLARHDTQVRRFMSVPGVGPITALCFKATIDDPTRFKRSRSVGAYVGLTTRRHASGEIDWSGRISKCGDAMLRMYLFEAAGVLLTRVPKWSALKAWGAKLVKRNGLRKAKVAVARKLAVILHRMWIDGTEFNWSKKEIAA

SEQ ID NO: 378873 - protein, 404 aa, unidentified
MKTYILRAPKPVEPQKCTRSLRPKPAAPATLKGPFLFIGLDVHNDSIAVSLAPSDTTEVRRYGILGGEHDDVLKLAKKLAAAHPGTTLKFCYEAGPRGFALCRCLQAHGLDCILVCPSKIPRKPGERVKTDRRDADDLARLYRAGELTGLYVPEPVDEAMRDLIRARFQVGRQQHRARQQLKMYLLRHNLRYGGQTSWSPAHRRYLAKIKMPFPVQQIVFQELLDAITETTARLERYDQEIERAVPGWRWAPAVRALMSLRGMALLHAATLVAELGDFNRFEHPGQLMGYLGLVPSEHTTGKDRQQGGITKMGNAPARRALVEAAWQYRIPARLSPHLKKRQEGLPKAITDMAWEAQRRLHHRYTHLTRVGRKKSQVAVTAVARELTGFVWAIARQVKPLAAQT

SEQ ID NO: 378874 - protein, 358 aa, unidentified
MPSKVTKPYTSAQPKLMSIGIDIGKDVFHIVGFDHNGKVVLRRKFRRLELDAVFEKLPRCIVGMEACLSAHFVSRRLRALGFEPRIIPAIYVKPFLKGQKNDYNDAEAIAEAALRPNLKLVKEKTQEQLDLQACHRVRSRLVSRRTATINQIRAFLIEHGIAIRTGANSLRRSLPEILLQRADELSPRMRVLIEELHGDWLRLDARIEALNEEIEEISRQEKSCQNLMTIPGVGPLISTATVAAIGNGEAFERGRDFGAWLGLVPRQYSTGGKPILGRISKRGSKYLRTLFIQAANVILMRPQNWPRYSFGAWLVTAATRLHRNKLATALANKLARIAWSVLRHGKTFDINRIEAATI

SEQ ID NO: 378875 - protein, 444 aa, unidentified
MACSGMILIREVADAPVIMGISKPAGLKSPCGEVKIVNPLFVGIDVSSKNNVAYLMKPDGSKHSSFSVQNNLGGAKLLSERIVSALGSMQLERVVIGLEATSIYGDSLVYALREDGRLGRFQRKIHVLNPKQVRKFKEAYSDLPKNDWVDAFVIADHLRFGRINREVYMDDYRYKALQTLTRARFDVIQNLTREKQRFANYLFLKCSGMAQDKDIQNTSATTIALMEHFETVDDLANADLEELTAFITETGRGKFADPDATAKAVRAAAKGSYRLPKTVNDTVNQAMAVSIASMRALKGQVKVLDKAIEQQFEIIPNTLTSIPGIGKVYSAGIIAEIGDIHRFDSQASVAKYAGLVWNRSQSGDFEAEHSRMIKSGNRYLRYYLLEAANSVRRCDSEFRRYYDLKFKEVNKYQHKRALALTARKLVRLVFRLLKDNRLYIPPEG

SEQ ID NO: 378876 - protein, 397 aa, unidentified
MNLNIGIDIAKNVHEACLVNDNGEQIGKFIRLKNSKKSIEKFTKHIESVSKELNANPRIGMEATGIYWYSLFSELSKKYKIHVYNPSQISGFASVNIRDSKTDKIDAKTIANILRFGESPKTNYSDTQRLELREYGRFYFKLTSIKINLKKRLRRNLHLIFPGYDEIFKNLFTATSKEIITNVTTPEKVLEMGEKKLLELMKEKSKNHIDPEKAKILIEKAEDTIPSEIIKESSLFEFQMMLEMIENYEKQIASIENKMISIWDKVREKHYIQTIGGVSELRAAMIWAEMGNVDDFKHPDQIVAFAGYDPKVRKSGNKEVIGGPNKRGSKILRWVLGWTVQEAKCSNPVIGQYFDKKIEQGKHYNNARCAAAKKLIRIIWSVEKNKKPFQIPCNLIS

SEQ ID NO: 378877 - protein, 343 aa, unidentified
MQTVTTIGLDIAKSVFQVHGVDAAGQVLIRRQLKRRYVLAFFQKLPACLVGIEACASSHYWSRELQALGHSVRLMPPAYVKPYVKRQKNDMADAEAICEAVTRANMRFVPTKSPEQQSGLMLHRTRHLLIRQQTSVINAIRAHLAEFGITAPVGRTGIEELLRVVADPSDKRVPELVRTCLAALGSQLLGLKKQILQFDRMILAWHRSNQTSKRLNCIPGVGPLLATALTASVADAKSFRSGRNFSAWIGLVPKQHSSGGRERLGSISKQGDRYLRRLFVAGALAVIRYAKLHGTNHRPWLTALLARRPTKVAAIALANKLARMAWALMARGGRYNYPIALRP

SEQ ID NO: 378878 - protein, 444 aa, unidentified
MGTQLERRCIGLDVHREFAQVAIWQGGLVIQAGRFATTPEEVREFAEGLGPADEVALEATGNTWAIATLLASRAGRVVVSNPAKTRAIAEAKVKTDKVDAEILAQLLAADYLPAVWRPSPATCALRRQVLRRAHIVRQRTRLKNQVHAILHRNLIPRCPAADLFGHKGRAWLAEQELPADELSAATALLRQLDFHAEELRLIDTELGQAALASPEVLRLMTVPGIDATVALSIVAAVGDFARFRSPEKLVAYLGLNPRVRQSGGQPASHGRITKAGPAHARGMLVEAAWSAAQATGPLRAFYQRVQARRGMQIAVVALARKIAVLCWHLIRKGEDYAYAQPSLVAHKRRKLELRAGLPAARGQKGKSAGYSLKAVRAAERDLAAQAEAAYRVTVATWQPRRPGTPSMARSAPGKAGATRPGVDVAATNGARLSRPSRGNAARQG

SEQ ID NO: 378879 - protein, 362 aa, unidentified
MENLTYRPSSPTSQAYVDASKLTPIAGPYPGRASSIMTTSTTESSSAEEVTVHVGVDVGSLHLDIAIQGKAGVRRLANTDAAISRWLKDVPTGSLVAMESTGRYHRRLAELAHVAGMVVFVLDPRAVHHYARGMGQRGKTDRLDAQLLARMIEREHARLRPWQPPSDLEVKLSELIRQRASITQAKSSLSQGLHPEAAAAVDFTPLFKQFNATLRALDKEIVAVARALPEGKAALASVMSVPGIGLLTGATLLPVFQRLSKRGSDAVVAFFGMDPRPSESGKHVGLRRLSKHGDAYARKLLYTAAMSAVRTSEVWRAYFEHQRTKGLPTTAALVIVGRKLLRIAFALFKSNSTYEQAKVAPH

SEQ ID NO: 378880 - protein, 314 aa, unidentified
MSSPSCYLGVDVSKDTLVVAGQNRRWQFANTKEGQRKFIVQIKKLSAAGHVVCESTGPYHLPMCLALQEAGIAFTIANAARIYYFGLSEGIIAKNDPIDAALIERFAQSKRPPADPPLCREQLALSESVTHRQQLVEMIKVLRTHRQQVLHAALVTEIDQSILVLEKRLAALDRQLRAKIDAHPLWKAKFERLTQTKGVGFVTALTLLAKMSELGTLNRGQCAALAGLAPYDNDSGKYAGKRTIRGGRQEVRRALYMAALSAATHNPILKTFYQRLRGQKKLFKVAITAVMRKLLLHLNTVLKTLTAPPQTAAS

SEQ ID NO: 378881 - protein, 404 aa, unidentified
MIIVGLDWSRYKHDFVIMDMQGKIVERGAIAHNANALEELAAGIDRHVSCAAQVHVGLELNDGALLAWLVVKGYTVFGIQPKSAQRARDIYRPSGSKDDRIDAFVLAEFVRINAGRLKPWRPPSEITLQLRELLRWREELVQQRTAAYQRLRALLAEWSPQLAELCDNLDCIWQLDLLSQFPTEMRLCQAHGNRVRSFIRKHRMHSKKSQQIEDTRRSVPMPVPAGRAVVVEKQTSFLVEQIRMLSTEIDHIEEDLQKLTAQHPDVNIFESLPVRGIVTIAGLLAIFGDDHEKALSPDILAAVCGVAPVTIASGKTKKVRQRRACDHTFRQALVHFAFNTAFRDGCWAVQFYQRKRSEGATHYTALRCLAKRWLKIIHRLWKDHITYDEQLHQANQRRNQSHAA

SEQ ID NO: 378882 - protein, 341 aa, unidentified
MGEYVGLDVSMEETSVCVMTSTGEIIWEGKVATEPTALASVVRRRAPTAEKVGLETGPLSTWLWHALRDVGVPVVCLDARHAQAALSMRINKTDRNDAAGLAQLVRMGWYREVKVKRLAAHADGALLASRALLVRQRCELENQIRGLLKNFGLRVRATKGRAFEQSVSDLSARQPVVRQVAMALLAVWSSLRLQIAALSRQVERQAMNDPVCRRLMTMGGVGRLTALAYRTAVDDPGRFRHSASVGAYLGLTPRRYASGEIDRMGRISRCGDALVRSYLYEAANVMLTRTHAASPLKSWGVKLARRAGFKKARVALARKMAVVLHRMWRDGTDFGAPNATA

SEQ ID NO: 378883 - protein, 355 aa, unidentified
MNSEKYIGLDVHQATIVVAVMDSSGKLVMESILETEAATILQFFAGLRGTLSVTFEEGTWSAWLYDLLQPRVNQLVVCNPRKNALLKDGNKSDRIDARKLAELLRGNQLKPVYHGETGVRMLRELSRSYLTIVKDLSRVMNRLKAVYRSWAIPCAGRDVYYRRHRGQWLAKIREAGVRRRAERLYEELDMLQHLRQQARRERLAESRKHAITAKLRQIPYLGPIRAALAVALIQTPHRFRTKRQLWAYSGLALETRTSAEYRFVEGQVRRSKKMLSIRGLNKDHNHDLKGLFKGAATMASVRPGPFQDFYTAALAKGIKPTMARLTLARKIAAITLTLWKKGENFDAEKLKSQAA

SEQ ID NO: 378884 - protein, 375 aa, unidentified
MSKIRFVGLDVHADSIAVAVAEPSGEVRSFGIITNRSEAIRKLMHKLGPAEQLRVCYEAGPTGYVLYWQLTALGVRCEVIAPTLVPVKAGDRVKTDRRDAIKLARSYRAGDLTPVWVPDAAHEALRDLVRAREAAKRDQLRARHRLGKFLLRSGWQRPEHLKTAWSKPHLEWIKTKVHFAQPAQEAALTDYVHEVEHVAMRLERLDGAIQEAARLAPPRMRAVIAALQALRGVAEIAAVSIVAELGKISRFRTPRELMAYSGLVPSEYSSGSARRQGSITKTGNAHLRRVIVEAAWAYQFRAWLGGYLLKRQVGLSPEVKEIAWKAQNRLHLRYRKFLARGKNKPQIVTAVGRELLGFVWAIGVKVETEQQRIAA

SEQ ID NO: 378885 - protein, 415 aa, unidentified
MTMTVAKVTQLPPSAQSAEVVAGVDTHADTHHVAVLARTGARLGDRQVPATVAGYEQLLTFVASYGTIALIGIEGTSSYGAGLARHLHAAGVPIREVIRPKRAQRRRGKSDPIDAYAAAAQALAEPEALPVAKTGDGAVEQVRILLAARRSAVKARTAALRQIGSLLITAPDTVRARWANLTGHALTDTLAATRPGSAVDSVAAAAGQALRTLARRCQYLSSEIDDIEDGLRVLVTRAAPTMLATKGYGVITAATLLITAGDNPTRLRSEASFAALCGAAPIPASSGKTNRHRLKRGGDRQANWALHQIALVRMSTDPRTKAYAAKLRATGKTSKDILRCLKRAIARETYHLLVHPRPVPVTDDLRQLRHERCLTLARAAADLHTVPARISELERGTRLDINLATAYREWLLNAA

SEQ ID NO: 378886 - protein, 356 aa, unidentified
MSHDVKYIGMDVHKEAVVIAVLNSSGKQVMESIVETKASSILQFIHGLRGELHVTWEEGTWAAWLYDLLKPQVQEVLVCDPRRNALLKEGNKSDKIDARKLADLLRTGMVRPVYHGEHGLRTLRELGRSYQTISQDLNRVMNRIKALYRGWSIPCAGTQVYAPRYREEWLQKIEHVGVRRRAELLYQQLDGLQALRRTLRPELLAESRKHKASKLLRQIPCIGPIRAARLIALMQTPHRFRSKRQLWTYSGLGIETRDSAQYCYVHGQLQRTKKPQQIRGLNRNHNHEMKEIFKGAATRASCGVGPLRDFYVALVAKGMKPEMARLTLARKIAAIALTLWKKEERFDTEQLKPQAA

SEQ ID NO: 378887 - protein, 424 aa, unidentified
MATITPVTATVKSEDLMQVCCDVSKEKIDVYSRVGHEGALFEMMDTIRNCGSVLQRQLKAWQELAQAHGHAGVLVVCEPTGGHERKLLALARQAGSRTAYVSGEAVGKARVIESNDTGKTDRKDARIIATLAGMGKTLKVRQLPDEYERLRELNTTYDLECTTVATIRNHVHDQVRQLFPDLDGEDGFVFSATGRAIRQLFGLNPARIRECSWREFVAKVKTFVKAARLERLEKVWAAAASSLLHQCPATVRAMREERLGELFEDLDRHLGRKLQLRTRILDAYGKTEESRKLADIPDASSFQLARVIAESGPLADFRHGSQLLRYFGMNIRERQSGKWTGKNRISKKGRALGRKVLYQLVFSSLIGEGKLFADPYRRKKADCACGMKAIVCLMRKALKMILGVFRSREEFSRDRVFASLPAAA

SEQ ID NO: 378888 - protein, 353 aa, unidentified
MKRRRRSARVVPGAAPSLLERINPNAAGIDCGAETHYVAVPPDRDASPVRAFPSFTHDLQRLADWLGACGVTTVAMESTGVYWIPLYEILEARGLEVILVNARHVKNVPGRKTDVLDCQWLQELHSVGLLRGSFRPSAAIAALRAYLRHRETLVQSAATHVQRMQKALVEMNLQLSVVLSDISGVTGLGIIRAIVAGQTDPHVLAQQRDYRCQASEADIIAALTGHYRPEHVFVLQQNLELFDAYQRQLAACDAAIEAHVQTLAGQAEPPAAPLPDPRTRRRPRDNEPRFDIRTPLHQVTGVDLTQIDAIGPYNALRLLAEIGTDMSRWPTEKHFTAWLTLAPRNKISGGRLP

SEQ ID NO: 378889 - protein, 322 aa, unidentified
MTRVICGVDVSSVSLAARIGRDGAEASFPNNPEGIVSLAGFCRAHQVELVAMEATGGYERQPFALLSEQGLAVAILNPRAVRRFAEAMGLEEKTDAIDAGMIAWFAQTKRSPARMLAPASQQRLRALVTRLRQLTLVRTAQRNQRRLVTEPAVLASIDQLLALVDRQMRDLENAIAQSIAEDPLWRELDQAFRLIKGVADRTVARLFAEMPEIGTLSNKTISKLAGVAPLASDSGKHQGKRRIRGGRAPVREILFVVASVAGRYEPDFVAFHKRLSAAGKPAKVVRIALAHKLLVRLNAKAREVRSRLAAPPVLCSSLAAVE

SEQ ID NO: 378890 - protein, 331 aa, unidentified
MQRATSTATVSANTLNCALELSKKTWLLAIQFPAREQPSVYTIKGGDGAALVAQLIAARDRWAEVSGSPPSILICYEVGYDAFWLARFLMAHGIECLVIDPGSLEVKRRSRRVKTDRVDLKKLLRTLSAWCRGERHVWSVVRIPTVEEEDLRRSHRERSRLISERTAHSNRIKGLLFAQGIGVDNIKTLALEKLVTGDGRRLLPRLADEIARQMKRLAVVQEQIDEIERERDTAPTPCKETEKKRHLLLQLKSIGPTNAAVLSREVYYRHFDNQRQLGSFLGLTPSPFKSGEEERCQGISRAGSGRVRAAMIEAAWLWVQHQPKSALTSGF

SEQ ID NO: 378891 - protein, 339 aa, unidentified
MFYVGLDVSVARTAVCIMDATGQVVREQSVASTPEAIAAAIRAFGKEVERVGLEAGINSAWIARGLIEAKLPVIVIDATHAAAALKTGFRNKTDKNDARGIADLMRVNKFRAVSVKSVAAQRDRALLTVREQLRQQSLDARNVIWSILQVEGLRPPKLTSPAFQALVMQSLDDEALAPLLRPLVAVVEHLDSQVAGLDKVIAARAKASTACKRLMTVPGVGPLVALTYAAGVDDPARFSDSRTVGAHFGLTPRRFQSGEMDWSGGISRAGDAGVRRALYQAANVLIHHSRGWCALKSWAVRIAKRRGLGKAKVALARKLAVVLHKMWTTGEDYRLKAAV

SEQ ID NO: 378892 - protein, 431 aa, unidentified
MRKKAAVCLPFILARGLLGFWPEQSRINGRDTRVPEALQSKQFELANTPMNSELYLGLDVDKEWIVIAVAEWGRNAPVHDLGAISNDVHALEKLLARLRKRYGPEVMMRACYEAGPCGFGIARRLGQLGVECAVVAPSLTPTRAGDRLKTDKRDARKLARLLRAGELSAIYIPEPTDEAIRDLCRARSDAVDDRRRSRHRLKAFLLRHGYHYQGRTAWSAAHERYLRELVLPHPAMKVILEEYLISVQLASERIARTEAAMSDLLGKWRLEPAVRALMAMKGFQTVAAMIVVSELGALDRFTHPRQLMAYLGLVPSEKSSSDRRRQGSITKCGNAHARWLLVECAQSRVGGTAPPKVSKELSRRQQNQSPQVRLISWKAQNRLHQRYRRLMARRLQRNKVIVAVARELCGFIWELLRTQECYHAPCPSGIN

SEQ ID NO: 378893 - protein, 325 aa, unidentified
MRQPQSQVKPLTQVGLDVSSQTLDAHIRVDGKAFSVPNTDAGFDQLCNLLSAYDVTLVLMEATGGYEDNVACYLQLQGYDVVVINPRYARRFAQSMGKLAKTDRIDAAILAHMAFMIDSGPDRERYIKPVTDEQRKQLSRMSSRRRQVVDLITIEKQRLTHADDYARESINDIISLLNAQLKRIESDISRYVKKNFSELADRLLSIPGVGVHAATALIADLSELGHVNRRRISALLGVAPFNHDSGKFKGQRRIRDGRQSVRNVLYMGIISATRFNPVIKAFYERLVGRGKPKKVALIACMHKLLNIINAMMRTGKPFDISLHGV

SEQ ID NO: 378894 - protein, 338 aa, unidentified
MKVTTVGVDLAKSVFSIHGVDERGNAVLKKSVRRAKLLELFAQLPPCVVGMESCSGAQHWARELLKLGHDPKIMAAEFVAPYRMSGKNDANDAEAICEAVGRPQMRFVPLKSIEQQAVLAVHRMRQGLVEERTALANRLRGLLTENGIVFAKGIDQLRRAMPVILEDSHNRLPELAREVLADANRHLAELDARIAEYDRRLAALARASEPAKRLMNIQGVGAVTATAIVATVGDAKAFKNGRQFAAWLGLTPLQRSTGGRQRLGQITKHGDVYLRTMLIHGSRSVMRLTPQRADAKSRWVESLRARRPDNIAAVALAAKHARIIWALLARPQDYRPAQ

SEQ ID NO: 378895 - protein, 344 aa, unidentified
MSKHSVRGGDFAGLMQRFAQLQEKARLRTGQSFRIIVVQEAGLDGFWIHRALQNEGIESHVVDAASIATSRRRRRAKTDKIDGETLVRALLAYKRGEPRVCAMVKVPTPGEEDRRHLCRERKALTAERVRHVNRIKGLLFSQGISGYQPLRRDRRQRLEELQTGDGRAFPQHLKALINRELDRLELLLKQIKTVEAARDALLAVEQTAKPAPAAMLLDIRGIGPEFAAILWSEGLFRHFENRRQIAAYAGLAPTPWQSGAVDREQGVSKAGNPRLRTTSIQLAWLWLRNQPRSALSVWFHERVSRNGGRLRKTTIVALARKLLVALWKYVTAGVVIEGVTMKAA

SEQ ID NO: 378896 - protein, 313 aa, unidentified
MTKTTKTNPIDYIAIDVSKATLQIQDDQLAFAVDNDSEGHSKLLKHIKTRKNPLVVFEATGGYERGLCEFLREETIPLTMVNPARVRDFARSEGVRAKTDPIDTKMILAFAKSKALCAMETPSETCTKLAALLDRRGHLVEQLAREKNRLQNSEKLILRSIQRMIKILEKEISALDKAIDELVSSEPGLQSRSKLIQSIQGVGKITAWTLLAYLTEIEHLNRNRLVALAGIAPFNRDSGKFSGKRSIIGGRAKVRRCLYMATQSAANCNPIISVYVKRLRERGKPYKCAIVAAMRKLLLHIQSLIKNPKLSTC

SEQ ID NO: 378897 - protein, 426 aa, unidentified
MAYKIAGIDVHKKMLAVVVCDVEVDGEYQFARRMFGGSPEQLRALAAWLLDQRVDEVVMESTAQYWRPVWAALEMYWKPICAQRDDHRPGSAKLHLALALSNRGRRGRKRDFADAERLVKRLVAGELTLSFVPDAEQRLWRTVTRRKYQLTRDRIRLQNQLEMLLEEAHIKLSSLVSDLLGASARRILHALAKGETDSAALAALADKRLRATAEQLSDSLGAAHDLKPTYRRLLKMALDQLELLDLQIGQLDQEMAGLINQHRDAVQRLTEIPGLGVDAAQQIVAEVGPTAATFPSAKSLSSWVGVCPGEEESGGVNHSHRSPKGNRQMRRLLNQTANAAVKAKGSIFEFVYRRCVARLGHKQAIGAISHRQCRLIWMILHQGVRYEERGPAVIEQSQRKRTARMIRQLRSLGYKIDAPQTTTAGA

SEQ ID NO: 378898 - protein, 479 aa, unidentified
MFHNKGYRWPDEIPVGISEDTPDDKQSATPLLLNSIKQVDTAIMAAVVSPTKMSLISADGRYLLDTFKEVFFIMISVGIDVSKEKSTVCAIKPYGEVLMTPIDFKHTKDDLDSLVKQLSRFKEEIHIIMEATGNYHLPIYRYLKSKDYMISIINPLEMKRYRCQGIRNPKTDKIDSMIIAQYGIDYWYRFKPNDDMEEERQELRLLGIQYTQFMKTRVIRCQALCEILDRTMPGVYGLLDDFNRNNGQDKLCDFAEKYWHSDNITKYSEKAFIERYNSWLKKKGYRQNEKEARQLYSVAKNAIPTLDSKLPSTKLLVQETVNVLREVDSSLYDILNQLKSLSKEMPEYETVLHMKGIGETLAPRFIAEIGDPRRFHSAKALIAYAGIDAPPYQSGQFTGTKRHISKRGSSNLRKLGYELMDSVNKHKSLYSGDPVCEYFMKKRNEGKPYRVAMIAAFNKFLRIYHSRVSEVLNDYDKTK

SEQ ID NO: 378899 - protein, 342 aa, unidentified
MEVAVLGIDLGKNSCSVVGLDGTGQVVMRRRMQRDSVIKLAAGMAPCVVAMEACCGAHHLGRIVRDHGHHVRLMSPEYVRPYVKAQKNDDRDAEAIAEAATRPTMRFVELKSVEQLDMQSLHRVRDRLVGERTALMNQLRAVLMERGITVPQGRRKLEQHLAVILDGEELRLSPRMISLVGDMRAEWGALDRRIEAFDDEFAAQAKTDDAARRLASIPGIGVLNATALAAAVGNAASFARGRDLAAWLGLVPRQMTTGGKPRLMGISKRGNKYLRKLLVHGARAALPSLSASTTPLGRWLWNLLQRAHKNTVIVALANKLALIVWAVLRYGGTYNAGALTAA

SEQ ID NO: 378900 - protein, 418 aa, unidentified
MTKRLLSRPLGRCIGLDVHLDFIEIAICEEGQVYSAGRVPSTAEGINALADSLFPTDRVALEVTGSSWEIVRLLEPHVQKIVVVSPGDTGISQARAKTDRLDARTLAKLLWTGELEAVWVPPEWIGRMRRRLHRREQLVRARSRAKNEIHAVLMRRLKGRPPVSDLFGVKGREWLRGLELPLEEHETVHACLRHIEFLDCEIEQVERLICQEALGSRQIKRLLTVPGVNVICAAVFLAAVGDVRRFKGSRPVIAYLGLDPRVYQSGSTPARSGRISKQGSPQARWALVKAAQSVAQQPGPLHAFYERIRARKGHNVAVVAVARKLAVLFWCMLTREEDYAHQQPSLTAQKLRRLEVRAGAPTQKGKHNGASATRERMREAEKQLAAQAEASYKRSIADWQAASPKNAKAGASVTAGRA

SEQ ID NO: 378901 - protein, 335 aa, unidentified
MDAGGKLIMECLLETKAATIVEFMEGLHGTLGLTFEEGTSAAWLHDLLKPHVSRLVVCDPRKNALLKDGNKSDRIDARKLAELLRTNQVKPVYHGEHGVRTLKELGRSYLTITKDVTRVMNRIKALYRSWAIPCAGTTVYAPRHRAEWLAKIAEPGVRVRAERLYQQLDLLQPVRLEARRELLVESHKHSAVKLLRQIPSIGPIRAALLVALLQTPHRFRTKRQLWAYIGFAVETHDSGEYRYVRGKLQRNRERITVRGLNDNHNNDLKNLFKGAAISASTRPGPLRDFYVARVEKGMRPTMARLTLARKIAAISLTIWKKGVEFDPQQLHRQAA

SEQ ID NO: 378902 - protein, 338 aa, unidentified
MKVYAGIDLHSSNNYVGIINEEDQRLYQKRLPNQLEHILEALEPFKESMEGVVVESTYNWYWLVDGLQERGYKMHLANPSAIKQYEGLKHTDDKWDSFWLAHMKRLNILPEGYIYPKEDRPVRDLLRRRLLFVRHRTSHILSLQSAITRNLGYKMSSRDIKQLDESDADTLFEDPFLILAARSSISAIQFLRTRIKEIEKAVKSHVRLKPEFEYLLTMPGIGNILGLTIMLEVGDISRFPTVGRYSSYCRCVKSERVSNNKKKGEGNRKNGNKYLAWAYVEAANFANRFYPEVQSFYNSKKAKKNGVVAIKALSNKLARASYYVMRDQVPYDPRKLFE

SEQ ID NO: 378903 - protein, 344 aa, unidentified
MKNCNVIGIDLAKNIIQVCIINKHGEVRSNKAMSPLKLKEFLTKSSPSIVAFEGASTCHYWGRFASNLSHDVRVIGPRKVKAFLQGQKTDANDALAIAVAATQPGMLFSQLKNEEQQVLQSLETSRRFLDKHRVSLENHIRAFLYEYGITVARGAKYLRESVLDILSDGSDELPHHLLAPLLSLWEQYRDTVKRVAAIEKELTQLVKKTDACQRLKALEGVGDVCALKLFTSLGNGEGFKNGRQASAYIGVTPKQYSSGGKVSMKGIDKVGGNKALRANLFMGARAVIKVLPEKPRTTKEQWLIALIKRVGEKRACIALANKTVRTAWALLASGEKYKSTALVA

SEQ ID NO: 378904 - protein, 368 aa, unidentified
MSDIIRIGMDTSKSVFQLHGVDGAEQPVLRKKLRRRDMLAFFGRLAPTKIGMEACGGTFYWARELTALGHEVKLMPPQHVKPYVRRGKNDRNDADAICEAMSRPRMSFVAIKTADQQAAQMLMTTRERLVGYRTQLLNTIRGHAAEFGLTAAKGPAHVEPLLLRVAEDARVPELAKALFAMHGQELSRLKIELREIEAKLKAWHRQNEMSRRLAEVDAVGPIGGCLLAIKAPDPQAFRCGRDFAAWMGLTPKDHSTAGKTRLGVITRAGDEALRRTLVVGATSVIKQVNKGKGNPSPWLRDLVGRKPPKLAAVALANKVARIAWKLMVSGERYDAARAGIVSPTASIAPRSRRQGRCAPPAAVASGQP

SEQ ID NO: 378905 - protein, 394 aa, unidentified
MIAVGIDIAKDKHDCFIMNSDGEILFDVFTIRNNRAGFDELFSKIKSASGNLSKVKVGLEATGHYSCNLLGFLKGKGLTTYVLNPLYTSQCRKSISLRKTKTDKIDARTIAGIVLSDVSLKPYSNTLYHKTELKSLSRYRFDRVNERTKLKQSVARLVTILFPELEELVSSLHGKAVYTLLTECPGASYIAECNLKHLTCLLSKASNGHFKAERASLIREAARNSIGTVSYAKSLELKHTIRRILDINIEIEEIEAQIKTLMLSINSPILGIPGIGIITGAMILSEVGDFSRFDNSDKLLAFAGCSPSTYQSGKIYSTHAKMEKRGSVYLRWAPLLAAQRVCRWEPTFAAYLKKKCAEGKHYNSAVSHAAKKLVRLIYHLETTGDTYRPQPVLS

SEQ ID NO: 378906 - protein, 390 aa, unidentified
MVVIGADTHKRSHTVAAVEAASGRMLAERTVPAQRRSFETLLTWARAHGSERVWAIEDCRHVSGALERFLLARGETVVRVAPTLTVRERSTARERGKSDAIDAVAIARAALREGLDTLPVAQLAGPELDVRLLVDHRERLVAHRTALSNDLRWHLHDLWPETVIPPRALIARGWQTRVAARLARAEQTARVRIARDELRRVRELTRTINDLHAELAALVAALAPRLIAERGCGVLTAAKLLGEIADVTRFATDAKLARTAGSAPIPASSGRTRRRTATAAAARTLARVRRRRPSFTAAAALAARLALLLLLLLLRPRGRHQQPRRHEEGQRAAGQTCKSGFHDHDKEPPGLLNSNRPAKETGPVSAQNDFFARTKAADVSSARAAGVPFS

SEQ ID NO: 378907 - protein, 405 aa, unidentified
MLIIGCDFHTRYQQIAMAREETSELLVERRLDHESGEAHAFYRSLQSSHEPVRVGIEATGPMHWFERLLTELGHELWIGNSAKIRASEVRKQKTDERDARLILDLLLAKRFPRIWVPTPAERDLRQLLWHRHKLVRLRTMLGNQLHFLAMSQGLCRKKKLFTKKGRAELGNLTLGPWASRRRAELLKLLGQLDPPIAELDRAVLEEAKRRDDAVLLMTHPGIGPVNALAFVLTIGPITRFPYSRKITSYLGLNPTEESSGGRRRLGGISKQGNTMVRWLLIEAVHHAVRQDPALRQDYRRLKFRRGHAVAKVAIARKLAVRMYWMLRSGADYAQLVRRQGSEERIMVPRTGSPNRWLVEPTFTARFTKRALVEMQEREKILLGEEKNEPSRLVNSWCLLTEPTPS

SEQ ID NO: 378908 - protein, 464 aa, unidentified
MAKKAQKMKKGKRSELLIVNPNAAGIDIASTEYQVCVPEDRDAEPNRRFEAYTCDLHSIAQWLKQCGIDTVAMEATGIFWVQLFMVLQEYGFDVVLCNAKHIKNIAEKKTDYVDASWIQMLHSYGLLKESFQPENQVRQLKELMRHRERIIQRMSQDILRIQKALDMMNIKVHKVLNDIKGVSGLRILDAIVGGERKPSVLAELVHHSVKASREEIIKSLEGNWNDAQLFILKQSLNAYRFALTQIEELDKSIEQLLIAYSQVAANSKNNKPILRALKRKQLQGNTFHFDAEKYSYDIFGVNITRVPGISSLTAIKLVSELGRDFPLKFPSYKHFCSWGNTAPNNKISGGKILSSKIPKRKNFVGQALRVAANTLSKNKGYLGDYFRRIQSRSGYNQAVIAVAHKLARIVYHMVKMGVEYDESIDRTKNVKMLESKRIFLQKRLLKIESELNLYACQPSSLVFS

SEQ ID NO: 378909 - protein, 342 aa, unidentified
MYYIGLDVHKKTISFCVKDASGQVHQEGKVGATRWELDDWMRMLPQPWTVAMEATIFTGWIYDHLLPHAQRVKVAHPLMLRAIAAAKKKNDRIDAGKIADCLRCDFLPECHMASTAIRDRRRTLRYRHLLVRQMVQMKNRISGLLMETGVSHNKQRLHKVGYFRELLASNEEVNESIRPLLRVSRDSIVRLQKTEYALVSSLQRDPLLAERIKRLRTVPGVGPITALTWALEMGEISRFASIRQAISYCGLCGDEKSSADKVTRTPLSKQRNKHIQRVLVEAAKLAPRQDHNLALVYEREKQKGNANRATLAVARKMVAYLLAVDRGQRDFVPFPDSQSAAA

SEQ ID NO: 378910 - protein, 493 aa, unidentified
MDQFGFGWRVSEVGHRGKRKLAPVDKSAPEVIPDAEHELVLERVAAVDVAKAAGKVCVRLPGNTGRRISRVWDVPARTGAIIELGEQLIELGVQKVTVESTSDYWRIWYYLLEAAGLDAQLVNARDVKNVPGRPKTDKLDAVWLAKLTEKGLLRPSFVPPAEIRRLRDYSRLREDLTHERTRYWQRLEKLLEDALIKVSAVASRLDTMSTRDMIEALIAGERDPRRLADLARGKMRAKRSELITALDGRFDDHHGELARMLLAQIDALSAQINTLTGRIADLIAELPEAAAIDHGSGDDTDTAAPSAGEGSDAGPQPTRRVDSATEAECARLSAIERLDEITGLGEHNAQVIIAEIGLDMTRFPTPAHLVAWAKLCPRTIQSGPVTRGGKTGKGNPYLKGALGQAAAAAARTDTFLGQRYRRIVKRRGKLKALVAVARSILVIVWHLLADPLARFHDLGPDYHTTQINIERRIRNHIAQLTALGFQVTLEPAA

SEQ ID NO: 378911 - protein, 444 aa, unidentified
MTNDSIQTNSAPVREPAVPIVCWVGLDWADQQHCLVVRTAPGAAAKTHLVEHKPEALDQWLLQLRKDHPQGRIAVAIEQSRGPVLYALMKYDFLALYPVNPRCLADYRRAFKVSGAKDDPLDADLLCELVCLHADRLRALAVDDVPTRQLRLLVEARRVFVGDRTGFSNRLGANLKCYYPLALDLIGEDLATPMALDFLRRWPNLAKLQAAKPGILRAFFYAHNSRSEDKIAQRLEAVKQATPLTEDPALVQPLQLQMERLAQQLRSLNQAIDQYDAHIKMVFAQHSEKWLFDPLPGCGAVLAPRLAAAFGTIRANFESADDLLCFSGVAPVKKESGTLKVVHFRYARPVFVHQSIVEFAKCSIGQCEWARLLYEHQLTKGKSRWAAIRMVAFKWLRILWRCWQDRQAYDETKYLRSLQRDGVELYRSIYGSLLPLKVTTVNNS

SEQ ID NO: 378912 - protein, 430 aa, unidentified
MKSNTQNAKIKAITETTLVLGIDVGSETHYARAFDYRGIEYSKKPFKFSNDEAGFVTFKAWILDIKEKHGKDKVVPGMEPTGHYWFNLGKFLQDNEMKLVLVNPHHVKKSKELDDNNPTKNDRKDPKVIAGLVREGRYMIPYLPEGVYADLRTASNMRFQLQAELTRIQNRISRWFNIYFPEYKTVYGQPDAKSGMLILKVAPLPEDIMTLGIDGVNQIWRDAKVRAIGKARAKTLIEAAEHSVGSKEGEISARMEIRMLLEDYESRNTRLQEVVALIEELVKKIPMAEKLLEIKGVGIKTVSGFLAEVGDISRFNNPKELQKLAGLALVENSSGKHKGETTISRRGRKRLRYLLFEVAMSLVSKNPEFRELHSYYTTRKLNPLKKMQSLMAVAAKLLRVFFAMLTKGVDYDPKKLVGDIKRPAVYLQVA

SEQ ID NO: 378913 - protein, 417 aa, unidentified
MDVHRDFCEIAIAEPDGQVRSAGRINSLLEEVELFAGSLAADDVVVLEATSGAGLIAEIVEPQVAAVLIANTRKLPQISKAKAKTDRLDARTLARLAGSGFLETVWAPDERTRALRRLCARREALVRARTRAKNEAHAVPARNLCGRPPVTDCFGKRGRAWLAALELPVDERLTLDGCLRQIDFLDSEIGALEAALATQALGSPEILRLMTVPGVNLHTAAAFMASVGDIRRFSSARQLVGYLGLDPRVRQSGTAEARHGRISKAGSSLARGMLGEAAWSVAQTPGPLRAFFERIRARKGPQVAATATARKLACLFWCLLTREEDYAYARPSMTRAKVRQLELAAGAPRRKGVRGIAGNKNAQTREAEREIARQAESAYRRTIADWNAGEPAKKGAGVTPGRASSRPSKGKAARQTP

SEQ ID NO: 378914 - protein, 391 aa, unidentified
MDHEICVVIGMDPHKRSVTIEVMTGDEQVLGGGRFATDVAGFASMLAYVAAWPNRVWAIEGCEGIGRHVAQRLLAEGETVVDVPAKLSARVRVFATGQGRKTDDTDAHSIALVGVRMSGLRSVVNDEQLELLRLLVDRRRRIGEEHTRMVCQLHQLLLELIPGGAKRDLSAAQARKLLAGVRPRDVVGKTRKRHAMELVVDLERVYQRKKAANKELVEIIKTTGTGLLDLHGIGPSGAARLLVEVGDITRFPDRGHFASWTGTAPIDASSGDRVRHRLSRGGNRQINMVLHMMAVVQLRNPTEGRSYYDRKIAAGKSPNEAMRCLKRRLSDIVYRTMLNDLVANKATSPGGHRGASLQSSAAGSHPHTGSSDKSLPGPAKTKTRTPLPTAP

SEQ ID NO: 378915 - protein, 344 aa, unidentified
MVYVGMDVSSKSFVVHAVNERKRVVWRGEVAATPSGLKRAMAALGEHTKLVVFEAGNQMKWIARELGRLKGVRLHIVHPNEVKWISQSSGKTDKVDARKLAELARGDLLPRKVHVVEGPVRELRELVGARHTLQSKRVALMNTLRGYLKQEGQRLPEKFFGRTDWQAALAKLEVGASTQQIVASFKGGIEALAHAEGELTRRIVAIKDRRIELLESIPSIGELSARVLLGALDEAKRFDNKKCVAKYGALSPRIYQSGDVVHLGRINRDGRQEVRHVLLQCAHTLTRMRSPGARPLRAFFERVLKRRGKKIAIVALARKLLTTAYGVLKAGAFYDPDKLLPVAA

SEQ ID NO: 378916 - protein, 358 aa, unidentified
MQAQNYKLNFAGQNIYVGLDTHLKSWKVTIMLEKLMLKTFVQNPEPEKLVEHLKQNYPGAKYYSAYEASYCGFWIHKKLLALGVNNIVVNPADIPTTDKEKKQKEDKRDSRKIARELQKGDLVGIYVPSDENLEDRALLRLRETMTGDLVRYKNRVKSTLHFYGIKIPEEFAKSSYWSKRFIKWLEDLKFKQESGNKKMEMLLNQVKSLRASLLTLTREIKKLSQTEKYKTNVELLLSVPGIGLIFAMVLLTELDIIKRFDDFDHLCGYVGLVPSTGSTGDKEIVRGITPRENHSLRTMIIESAWVAIRVDPVLSLAYAKYSKQRHENKAIIKIARKLLNRIYYVLRTKNKYVLGVVK

SEQ ID NO: 378917 - protein, 340 aa, unidentified
MRQLYVASDLHGNNNLLGIIDGEGKRIFKKKLPNDPLLINDILKPFKEEIVGIVVESTYNWYWLVDALMEEGYKVHLANPAAIQQYSGLKHTDDKHDAFWLAEMLRLGILPEGYIYPKEERPVRDLLRKRGHLVKLRTSLILSLENIISRNFGRKLPVNDVKGLRKDHVTPLFEGKEDLALAGRVSKETIDFLTHQILQIEAVVEKRIQLKEAYRYLLTIHGVGKILGLTIMLETGPIGRFETVGDYTSYCRKVPSQWISNGKRKGSGNRKNGNKYLSWAYAEASDFARRFHPESRAYYNRKMQQSNPAVAHSALSHKLARAAYYIMRDQVTFRPEKLFG

SEQ ID NO: 378918 - protein, 365 aa, unidentified
MNHRNRNNAQWREKPERTVGLDLGDRFSHYCVLQEQGEVIEEGRIPTTEKGLRQQFAHGPRLRIALECGTHSPWVSRLLEQLGHQVIVANAREVHSITRSVSKSDPHDAQQLARLAHSDPRLLKPIQHRSPARQQDLNLLRARHTLVRARTLIINSLRGLVKSAGGRLPKCSTESFPQRSADRFPDSIASLAAPMLEQVASLNTHIAALDQQIEALAQRDPAIGLLRTAPGVGPLVAAAYVLTLDRHDAVTHSRQVGARLGLRPKQHQSGDGHPQRGISKISNRYLRTLLVQSAHYVLGRFGPDSALRRWGLKLAGTGNQGAKKRAVVAVARKLAVILHVMWRRGQSYQPFPPSARVQAIPDVNP

SEQ ID NO: 378919 - protein, 428 aa, unidentified
MDELNRSRLEAFRQLRQEVRHSGEHLIVGIDIAKDRHHAFLGTATGKTLLRRLVFSNDHEGFRKLLEHAEVLGVRHGLKKVVYGMEPTANYHKPLGEYLITLGRMVVLVSGVTVKRNRESLDGRWDKHDVKDSANVADLISQGKCLYYEHPSAELRGLRGLLSLKRRLKRQEQSYRVRIRNHLIAQYFPEMDGHYGRSEREGMAIVRWCFPPSMITQLDIDPFIERVTSRRVRMEQRRRLEAIWEKAGASIGCEGVPGVEHEAKVMVEGLRQLREMIEETEDKIEELCQQFPQYQYLLTIPGFGPDISAKVLGAIGDPDRFQNGKQVLKMGGLDLSADRSGKNSDKATPEISKRGKSDLRYALYQAAFIASTKNRDFMLYYTRKLRGREKEKGIHTKRIVKLSAKMLLIAWTLMKKKEAFDPTYLNAE

SEQ ID NO: 378920 - protein, 351 aa, unidentified
MPRTSTVHAVTTIGMDMGKNTLHMIGLDKRGAIVLREKASRGRIALRLANLPCCLIGIEAGLATHYVARELAALGHNVKQVPPTYAKPFRQGHKNDFRDAYSVAEAVQRPTTRFVPAKTDEQLDLQALHRVRSRLISERTAVINQIRGFLLERGIIVRQGLRFLRQALPDILAKRTDVLSPRMVRIVADLASDWRQLDERIEPVTDEIETLAKSDDGCRRVMTVPGIGPIISSAMVAAIGNGAAFARGRDFSAWIGLVPKQMSTGDRTILGRITKRGNGYLRMLFVQAARVILLRPGSWPKHSFGVWLTRAAQRLHRNVLAAALANKLARIAWTVLAQERSYEARVTNAAT

SEQ ID NO: 378921 - protein, 421 aa, unidentified
MLGVGIDWAEEFHLVALGRPGEGVFDIARVEHTPADIDALVARIASIEPDPAEVRVVLETSHGMLVERLLDAGYVVVPINPDLVARRRGPARKKDDAEDARIACLIALDRFERLRVLVPHGEEAGELRAIARDDERAARDERRLLNRLRADLIATFPAAHVVAGDDMGAPTFLRLLERWPTADALAGATHDELVDFARVARHSWPERFAGQVATAIATSHFVPRAYLVRAKEGTIRLLATQLLALGAQRRAWERRMGELLLGAPRTGRNKQPKEEKRGPTVPGGEIYLSFPGLGDRLAARVAAEIGDIANFDTPNGLQCYAGKAPVTRRSGKHELVVANRLACNGYLRDAVQLWAFCSLSRSGWAREFYDGQRSRDKGHHAALRALGNRWLEVLWHCLSKDVAYDEATHVANRDRALARAA

SEQ ID NO: 378922 - protein, 340 aa, unidentified
MIATTKFFIGIDVSKPHFDVAVMAVLDHVKQEIRTARFDNTAPGIKLFEKWLKLQKTTFNADSLVVMENTGIYHRLIWSFCSRRNLPIHIGNAAHIKWSFGIARGKNDKIDSIRLCNYAFKEADELKATAALDPELMLLKDLVSARTKLLRQRAGISVSMKELGNVNGKAYQKVVEKALKSAINGIARSIRDVEDQIKKIIMGKRDFKRNYKLLISIPGMGHVTAVYLIGCTGNFSGRPSGKELACYAGVAPFEQTSGISIKGKPKVHRMANKELKRLLHMCELSLIQHNQEFKAYYNRKKDEGKHSMSIINAVRNKIALKVAAVIKNQTSYKNNYNIAA

SEQ ID NO: 378923 - protein, 316 aa, unidentified
MNNPDIKPNSAFAGVDIGKTSLDVSLAGQPPCRHPNDAAGIAALITALKKLPQPAQVICEPGGGYERDLLAALWGAGLAVSLVHAARVRAFARAQGRLAKTDPIDAVVLREFGELLRPGTLAAPSPERERLAALVQRREQLVNLLSMEDQRLAQTRDAVVQKMSGRLLKELQTQIDQMDKLIAAQIAADVTLKGQSERLQQVQGVGPVTATTLLADLPELGTLSRNESGALAGVAPYNQDSGAHRGRRTIRGGRVKVRRVLYMAALVASRFNPILKTFYDRLVAAGKPKKVALVAVMRKLIVLLNHLLKNPNFKLA

SEQ ID NO: 378924 - protein, 366 aa, unidentified
MDTIYIGVDFHARQQTICYLKTETGELVTCELKHQDKQVVQAFYAQFRGRVIVGLEASGYSPWFERMLEALGCEVWLGHATEIRRRARWRQKNDRRDAELILELMLHDEFPRLHRGAVQSREVLRMLRYRQKLIKIRTMSKNSLQAIALQAGLAKGSRLFTKAGQQELGTAEMTPVMQWQREHWLQLMAPLNQQLLETMVWFKAQSKDDVCITRLRTHPGIGLLTSLCIVHTLQPVSRFRNTRKVAAYAGFDPVERSSAERKCFLGISKAGSRLLRYLLVEAAQTAVRKDEDLKRFYKRLAERRGRPKAKVAAARKLLIRAYIMLRDEIDYAEFRHRAVAARLARRGQGPSNVPEVLIGQPASPEH

SEQ ID NO: 378925 - protein, 415 aa, unidentified
MDVVHPRCAGIDISKRDAKVCVRIAGEGRSKPLTQVRTFGAMTKDVLELRDWLLGQQITCVVMEATGDYWKQFYFLLEDAGFELLLTNARQVRTMPGRKSDVSDAQWLADLGAHGLVHGSFVPPPPIRQLRDLTRLRTHLRREQARDKQRLEKVLEDAGIKLAAVATDITGVSARAMLAGLGQGWSPQALAGLAQKQLRSKISQLTDALEGRFTAHHQFLVTMLLDRIDRTENDITTIDEHIDELMGPFQHAKQLLSTIPGVSSDTAEIIIAETGADMAIFPDAKHLVSWSGCAPGMHESAGKKKSSATRPGNTYLKGALGIAALAASRMSTTYLSALYRRVASRRGPMKAYVAVENSILTAVWFMLTTDKPYQDLGADYFMRRKPQQTIDHAIQRIKNLGYNVTLTPSPAAVAG

SEQ ID NO: 378926 - protein, 375 aa, unidentified
MDTIYIGVDFHARQQTICYLTTETGEFVTHELKHQDKDEVRTFYAQFGGRVIVGLEASGYSPWFEQLLEDLGHEVWLGDATEIRRRARWRQKNDRRDAELILDLLIHDEFPRLHRPSLESREILRMLRYRHKLVKMRTIIKNSLQALALQSGLSRRTKLFTKIGQQELRAAPMSPVMKQQQEQWLELLLVLNQRIVETTLWLKQQSLNDARIRLLRTHPGIGLLTSLGLVHTLDPISRFRNQRKVTAYAGLEPMERSSAERKRFLGISKAGSRLLRYLVIEAAHTAVKKDDDLKRFYRRLQERRGRPKAKVAVARKLLVRSFIMLRDEIDYAEFQRRAVAARLARQSSRPSVPDRLIGQPASSESQERVLSAAKK

SEQ ID NO: 378927 - protein, 340 aa, unidentified
MNATTYGLDVAKRVFQMYWVDAQTGEIVNRRFGRDELIRFLAQRPAGRVALEACGSGHWWARKIKAVGHEVVLLHAKFIRPFVQTNKTDAADARAIWTAVQQPEMRTVAAKTEDQQAMLSLHRMRALLVKFRTMQVNQLRGLLYEFGATFRAGRVAGLAEIRARMAELEDALPKAMIGSLQDQLKRIEALEQDIDRLEQQIGAWQKKEAACRAIAEVPGIGKLTATALVATMGDAKTFKSGREFASFLGLVPRQSGTGGKIRLGSISKRGDPYLRTLLIQGARSVLCHAKVPTKWQRGIQARRPANVAAVAMAHKMARTAWAILAHGQAYQKDYVSVKPA

SEQ ID NO: 378928 - protein, 408 aa, unidentified
MKTLLRRCAGLDVHKVEIVACLRLVEKGKVARRVRRFPTTTQGLLELVEWLEGAGCSHVAMEATGVYWKPVWHILDGHFALILANAMHVKAVPGRKSDVNDATWLADLLAHGLIRASFVPSTPIQELRDLTRTRKQLTREIVQHVQRIQAVLEEANVKLSSVISDIMGPSGRRILTAIIAGETDAEKLAALGSERLGCGRAALSEALKGRIREHHRFLFAQHLRTIEQLEESVAAFDARIAGALAPFRDVVERLNEVPGLGRIAIETIIAEIGTDMSRFPTAGHLVSWAGLAPRLDESAGKRRSTRIRNGAPWLKPALVQAGWAATRKKNTYLQAQFLRLRSRRGPKKALIAVAASILTIVYHMLRDGTFYRDLGPEYFARRSPAKLAANLANRIRNLGYHVEISATT

SEQ ID NO: 378929 - protein, 328 aa, unidentified
MCTLGIDVSKNKIDLCLLTAGPGGKKKHKVLTNEPAVARKVVDWLNAQKCVPESVTVVLEATGIYHENLAYGLHEAGVSVCMANPCRVREFAHGMDILNKNDAVDAFVLACYGELKSPAVWVPPSPEVRKLRALLRQRDAPREDVQRTVNRLEKANSTSTPQEVIRSLERTKSWLNEELARIEKLITDHTDNDPGLKADLDLLKSIKGVKEQVGREMLALLKDGTFKSASQVAAYLGLTPVEKTSGSSVRGRPHMSKTGPSGVRAKLYVAALTASRWNKQAKAIYERLVAKGKAKKAALGAVMSKLVHLCFGVLKTRLPWDENYVATA

SEQ ID NO: 378930 - protein, 412 aa, unidentified
MQVMYPTCAGIDVHKREVKVCLITRDAAEQRTKEVRTCRTMTRDLLALRDWLQDQGCPIVAIESTGVYWKPVFNLLEGEMEVVLINPSHIKHVPGRKTDVKDCEWLAELLEHGLLKGSFIPPQAIRDLRDLTRYRRRLVEMRTSEVNRLQKVLEDANIKLASVASDVMGVSGRAMLEALLAGERDAEKLAELAKGRLRQKKDDLVAALEGCFRPHHARLLAQILAHIDFLDESIAECEEQIEALCHPFAEDIERMDTEPGVDRRAAQDIIAEIGVDMSPFPSHKHLCSWAKICPGNNESAGKRKSGRIGKGNKWLRAILIECAHAAGRTKDTYLSAQYARFARRKGKKRAAVVVAHSLLGATYFILRDKVPYRELGSHHFDEINRAHVIHYHIRCLESLGLQVQVQELAVAA

SEQ ID NO: 378931 - protein, 340 aa, unidentified
MSEIKRIAIDTSKSVFTLHGVDDAGRAVLRRNLRRGELLKFFERLAPIEVALEACGGSHHWGRALSAAGHQVRLIPPQYVKPFVKRSKNDRNDAEAIAVAAAQPSIGSVAVKSAEQQAAAMLLSVRELLVRQRTQLVNATRGHAAELGVVAPLGEKGLRELQAEIAAADDAVAPAAAKQAIALLGREVERIEIRLRAIEARLMQQHKANPVSRRLAGIPGIGPIAALNLALRVDQTQFASARHFAAWLGLVPRECSTAGRQRLGGISRAGDERLRQLLVLGATAVIQHAKPGRPATSQWLLNLLSRKPRKLAAVALANKMARTVWAMMTRGEAYRPAPAA

SEQ ID NO: 378932 - protein, 336 aa, unidentified
MDRRYVGIDLHRRRSVIYAMDAEGERLFCERIDNDALRLLEVVSAAGDGAEVVIEATYGWYWAVDLLREAGFSVHLAHPSGNDWGKRRVKNDERDARDLADLLRLDRLAEAWIAPPAVREARELVRYRARLVQLRSGLKAQVHAVMAKEGVLPATSDMYGPKGRSLLDAMELADAYQVRVESLRDLIDGYDREVAMLERRIHELLRDDRGYQAIQTLDGVGRTLGAIFVTEIGDIGRFRSPKALCSWAGLTPRHRESDTKVVRGKITKQGSKLVRWAALEAIVRYHGGPPLRDGFRRIAERRGTNKARIATARRLMTLVYYGLRDGEIRCLQRAAA

SEQ ID NO: 378933 - protein, 349 aa, unidentified
MMIIGCDYHPAFQQIAFVDTDTGELRERRLQHREEAEKFYRDLAAQEMKVRVGMEASGQARWFERLLAELNFELWIGDAAVIHTKRVRKQKTDRQDAQLILQLMMEDRFPRIWVANWENRDLRQLLWHRHRMVQARTRIMNQLQAVALNEGLRCKKRLWRESGREQLESFPLAPWANRRRRDLLEVLDRLTPTISELSQAIEQEAEKCPEAQRLRTHPGVGSLTALAFVLIIGRAERFQCGKQIASYLGLVPSEDSSGDRRRLGHISKQGNALLRFLLVEAAQVTVRSIPEWRSKYFHLAMRRGRKIAKVAMARKLAIQLFWMMRKGWDYEQVNRFGPHAGQPENRRGV

SEQ ID NO: 378934 - protein, 317 aa, unidentified
MRASAAFFVGIDVSKQQLDIAVRPSGESWTVAHEEAGLSALVARLRGLAPTLIVLEATGGWEVPVTGALAAAALPVAVVNPRQVRDFARSTGLLAKTDRLDAQLLAQFAEVVRPAPRPLPDAQAQELTALLQRRRQLVEMLTAEKNRLPLAARRIRPQLQAHIAWLHQQIAQFDEDLRQLIRSSPLWREKDDLLRSTPGVGPVLATTLVAALPELGTLSRRQIAALVGVAPLNRDSGTLRGRRTVWGGRAQVRAVLYMSTVVAVRHNPVLIAFYQRLRAAGKAPKLALTACMRKLLTILNAMLKHHRRWAPVRAQHA

SEQ ID NO: 378935 - protein, 369 aa, unidentified
MPHVTSIGLDVHARSVAAAAFNPFTGEVVRRSFGTDAAEIAEWALGFDEPRACYESGATGFHMARELRALGLDCAVAAVSKMQRPAADARRKNDRRDAEFIARMLATHNIVEVPLPDAAVEAARDLDRALDDATRELRRSRQRLNMFLIRLGYVWDERNADGTRKRAWTRAHWRWVSEIRLEGPQRDALEYYVTAARCAESDRRQLERRVVALAGADRWRATVEALSCIKGIDTLTAFRLAAEAGSFSRFRSAPAFASWCGLTPSEHSSGESERRGGITKAGNALARTALIESAWHYSMCSPGPKAPAPGTDVPPAIRSRADDCTARLHRRREALADAGKPACRANAAVARELACWVWEIGCRSEGTIR

SEQ ID NO: 378936 - protein, 411 aa, unidentified
MWLPRRGERCGQPCRKGNTMAEKNATLTSKHAAYLGLDVGKFAHWAYAVDLDGEVLLSRRVANSEGELDALLAELPADTLVVVDQRRNIGALAIKRARAAGRPVAYLPGSAEHELAKSFPGIAKTDERDAQVIARAALGMPQTLRPVPAEDPALDGARIMSAQVAQVQKDRTACANALHSRLLESCPAFEAACEMTEPWCAGMLAELGGPWNMLDAGRKRFCAASRKHRATREQRDRLWNSICGERPSEQAVAAEMRYVKHFAGRIVADNEAESELEDAIAESLSDNADFKNLQTIPGIGPRTAMQLVVSIDISEFGSHDKLASYCGLAPSTQQSGTSTNYDRGHRGGNKPLKNLLIFSCNSLTRSKGYYGEYLRKCRARGMKYKCALKATARKRMKVIYAVMRDGVPYSA

SEQ ID NO: 378937 - protein, 350 aa, unidentified
MEYLGIDWSYRRAAWCALSEGGQLIGEGAVPADEDGLARLVIQHGCEVRGVVEMMSGAIWVRDTLAAAGWQMQIAHARKVRDVAPIACKTDKVDARVLAELCRRDLVPELWVPCLQDRELRERLRRRTHLVRLRASAMNRIFGLLTQWGMRMSLKRLREPGAMELLAERGVPQVWQRSISEALALIDLLDERISPLDQELRPLAAADARVVLLDSIPGVGELLGLTLASEIGDISRFASPRKLIGYAGLAPKINQSGDRSRTGALSKAGSRTLRWAAVEAAQHAWRQSNPWHQLYSDIAARAGKNPAKAAVARKILIASWHILSRHEPFKAPTSRRPDPASASSPRFLAA

SEQ ID NO: 378938 - protein, 354 aa, unidentified
MIIIGVDFHPEFQQIALLNTTTGEVEEKRLAHPDEAEKFYRAHASAGETVRLGMEASGHARWFERLIAELQFDLWIGDAAEIRAKRGRKQKTDRQDAQHILKLMLKDDFPKIWVPSWENRDLRQLLWHRHRMVQARTRVMNQLQAVALNEGLHCRKKLWRERGRQQLESFALAPWASRRRRDLLDLLDRLNPSIAELTQAIEREVENYPAAQRLRTHPGVGVLTSLAFVLILGDAERFRCGKQVASYLGLVPLEDSSGNRRRLGHITKQGSSIVRFLLVEAAQVTVRSLPEWRSKYFHLVLRRGRKIAKVAMARRLAVQLFWMMRKEWNYEQLKKFGSHAGQPGNRHGVQSNTE

SEQ ID NO: 378939 - protein, 342 aa, unidentified
MTAIGIDTHKATLATCAIDELGRAIGEATFANDPAGHDAFIAWARLTAPEATIGVEGSSSFGAPLARSVQLAGLAVREVPPHLSRAERRRTRRPGKSDPGDALAIARVTARETNLPPIRLSDRTSELHLLLEAREDLIGEATRARNRLHAHLLVLAPGYGGTVANLVAVRHRATVGRLLRGNHTVQAELARALLTRLPRLERETAALTRRIGALVEGHPLLGLPGAGPITVARLIAEVGDVRRFRSPDALAALAGVAPIPASSGQTQRMRLNRGGNRQLNRALYVIAVSQSRFHPPAKAYVTRRMETDGKTWREAIRALKRQLVRPVFKLLVEGAEVLRAAA

SEQ ID NO: 378940 - protein, 364 aa, unidentified
MNKCHLNTELSSLEGTRSEFNRSTGVIKLGIDVHQDYYVVVKQEGGTNPKPAQRFSKEAFLHWAAKLRRQGGEIHAVYEACGFGFSLQRQLSALGIQCRVVCPQKLDEQNKRVKTDGLDAKALCLKLDRFVQGNRAALALVRVPTEEEEQKRAIHRQREQLVKTRKVLEAQGRSLMVNYGMEPVSSWWKARTFAQLQVPEWMKELLQNSQPILLALQEKIRALTVQLQAAAISQQPRGLGLLSSVVIDREIGNWTRFKNRRQVGSYTGLCPGEYSSGNTRVQSCVTKHGNPRLRAALVETAWRLVRFQPDYRAVKKWRHLLAKGALATGAARKKAIVAVARQLAVDLWRIRTGRVATETLGLIN

SEQ ID NO: 378941 - protein, 345 aa, unidentified
MQTMYYIGLDVHKKKISYCVKDGSGHIHAEGAIPAARSDLDRWMKTLPAPWTAAMEATIFTGWIYDHLKPHAAALKVAHPLMLRAIAAAKKKNDRIDANKIADCLRCDFLPECYMASTEIRERRRTLRYRNQLVHQAVQLKNKISGLLMEAGVSYNKQKLHKVGYFKELLAINPDINEGLKPLLRLCRETLVRLQKTESALVRSLQRDSLLAERVQRLMTIPAVGPITALTWALEVGDVKRFSSIKKAISYCGLCGAEKSSADTIKRTPISKQRNKHLQSVLVEAAKMAPRLSSELALIYDREKQKGNANRATLAVARKLVAYLVAIDRSQRDFLVVEKENCAAA

SEQ ID NO: 378942 - protein, 483 aa, unidentified
MRKRRMSTFERLNSGRITRKQRRELARRVAAADPGLSIVNPHAAGIDVGNASHFAAVPPDRDPTPVREFGFWTADLHKMAAWLVACRIDTVAMQSTGVYWIPLYDILEQHGLRVVLVNAQHTKNVPGRKTDVQECQWLMKLHTYGLLRDSFRLAQHLEGVRTVWRVRGRHVEEAARSVQHMQKALTKMNVQLANVISDVSGLTGQAIVGAILQGQRDPYKLAELSDPHIRASKEEIARSLEGTWREDVLFELQQAVDSYHFAHRQIRQCDDKLKAYLASLESRVLEKPAVPAGTKPLQPKTRKARKQGANAPPMDLTGELVRICGADLTSIDGINIISAMTIVSEVGTDLRQFPDEDHFASWLGLTANENISGGKRVKGAKRKVKNRVADVLRMGATSLLNSASYLGARYRQLRRNAKIPAVAVKAMARHLAVLVYRLLTKGQAWVDRGAELYEQQRRERDLIVLQEKAKRHGLQLVPVAAAN

SEQ ID NO: 378943 - protein, 480 aa, unidentified
MELLYHRCAALDVHKASVVACRLRTLPSGGKEQEIQSFGTTTPELLRLLDWLQAWGVTHVAMESTGEYWKPVYNLLEGHVELLLVNARHVQQVPGRKTDVKDAEWLADLLRHGLLKASFVPGREQRDLRDLTRQRANLVAERTRVVNRIQKVLESANIKLATVATDLQGVSAQAMLAALVKGEASPEAMAELGRGRMQEKREELEAALTGNVREHQRFLLAAHLEQLAFLNRQIDQYSARIAAQINRMSAPPALAGTEAAERPAADPSPPAGTAPPAADPGPPAAPGPVAAATPAPPGSAPAPRLPWTPLPPPTYRAAIALMDPIPGVNSVGAENVLAELGNDMRQYPSAAHASSWTGIAPGNHQSGGKRQAVKTPPGNKALRRALVIAAHGAVRTKDSYFGVLYRRVKGRRGHKRAIVAVAHALLGVIYYVLLRQQPYEELGAHYLDERQPEKSAKRLVRRLRELGYEVTLEAREPVAA

SEQ ID NO: 378944 - protein, 337 aa, unidentified
MELYSGLDLHSRNTYIGILDPDFNRVFKKRVSNNLDLILKTLEPFKDQLKGLVVESTYNWYWLVDGLMDAGYGRVHLANPSAIRQYEGLKHSDDQHDAFFLAQLLILGILPQGYIYPKKDRAVRDLARKRMLLVKHKTAHILSLQSLIARCCAQRVSKHQIRQLKVADLRQLLKEEYLLLSAQASLNIIDFLIQQIKALEKAIKKKVKLDKAFEQLMTVPGIGFILAMTIMLEVGDISRFAKVGNFASYCRCVSSQRLSDGKAKGSGNRKNGNRYLSWAFVEAAQLGRRYSQRFGRYYDRKAAQTNTIVATKALSNKLARICYYIMRDQVPFREELF

SEQ ID NO: 378945 - protein, 340 aa, unidentified
MEKRYVGVDLHRNQFTVCVRLEKGRTYLRTWRLEALPQFVKQLRAGDELAVEVTGNTRLFHDAVAPHVGRVVVVDTNQFRVITQSVRKTDAHDAERLALYLAKGLLPEVRMKDKQHSQIASLTQTRDTLVKQRSGLKNKVNNLLSAHGINLAKEALSSEKKLEEVLGLSFDRLVQLELRVIIGQIRSLNQSIRELENTIGEEGSQLEGHRQLTSIKGIGKITGAILLSVIEDVNDFPDEHRLASYFGIVPRVSNSNATEHSGHIHKRGSKLGRTALVQSALVAAKYSPYLKNFYQRVKNRRGAGRAIIALARKFLGIIYRTLKHQWVFEDFPNFVLAEGA

SEQ ID NO: 378946 - protein, 387 aa, unidentified
MSVPFDPRKPATAFDHTITVVTVLELSGKSWELGASVPGVLRRPLRKIAVRDVCGVTRAIGQWKTEASKAGHTVSRVVLGYEAGRDGFWLARALREQGIEVYVMHPASIAVERRGRRAKTDRIDVDMLLGALLGWLRGEPRRCTMAPIPTEAEEDMREPGREREALVTARLKVENQIGSQLIRFGIEGFNPRLKKAAQRVEELRTFDGRPLPPKTMEKLRRLLAQHRLLSEQMKEIEAARQRVVTATDPDRIERMIQLLAHIVGLGIETATVLVHEVFSRRFRDRKALAAFVGLTGTPFDSGGSRREQGISKNGNPRVRRIITQLMWRWLKFQPDSALACWFAERTGGAKGRIRKIMAIALARKLLVALWRYVEDGVVPEGVRLAVA

SEQ ID NO: 378947 - protein, 427 aa, unidentified
MSDVLSAPIALFYVGIDWAAETHVVCVIDDAGRIQSTFPIRHTADGFAELIRRLGKLGDRADVSVGIERPDGRLVDALLEAGHPVVPVSPNAIKAWRDGEVVSGAKSDTGDALVIAEYLRLRQHKLRIAVPFSDQTKALRTAVRARGDLVEMRVAATNQLAALLDMHWPGAKAIFADVESPIALKFLTRYPNPASAARLGEKRIAAFCAANGYSGRRPASELLTRLRNTPAGTTSPVLTEALKHAVLAMVGVLTALNAAIKNLDRTVVTKLGEHPDGEIFTSLPRSGQINAAQMLAEWGDCREAYDGADAVAALAGLTPVTKESGKHRAVSFRWACNTRFRVAMTTFADNSRHANPWAAEVYNRARASGKDHPHATRILARSWTRVIYRCWRDNKPYDLTNHGAAVRLGTVRSTVDLDLGMVSYRSV

SEQ ID NO: 378948 - protein, 353 aa, unidentified
METTLRFIDQSLFVGIDVHKKQWSVSIYSAELHHKTFSQPPNPHALKSYLDQHFPGARVRCAYESSKFGFWICRTLTSFGYECLVVNPSDIPTTNKESSGKTDPTDSRKIAKGLRSGLLNSIHVPQLVTEGDRQLFRYRKKLWGDLVKVKNRIRDKILFAGIEIPVKMDNSNWTKSFLKWLRDVEISSPTTRVTLDLLLDQYDSLYAHFLKVSTQVRRLQKLPRYRSKAKLLRTIPGIGPLTTVQLLTEIEDIHRFPSFRKFNSFVGFKPTSHSSGEHDWRGHMTYRQHKGLRSSLVECAWTTISADPVMMKRYEELKKRITAKRAIIIIARKLLSRIYFVLKNEKPYELGVA

SEQ ID NO: 378949 - protein, 373 aa, unidentified
MIVIGTDTHKRTHTCGAVDAFTAAARGELTAAARTGSFGKLLRWARALDPERVWAIEDCRHVSGAFERFLIARGERIVRVAPKHMAGARRSSRERGKSDSIDAFSVARAALKEGIENLPGAQLDGAALDIRLLVDHREDLIAARTADQQRLRWHLHDLWPELEIPAGALDTNKWLGKISRRLARAQQATRVRVARELVRQITARTTRIRELQTELAALVESYAPQLLAERGCGPLTAAKLIGEIAGADRFATDAKLARTGGAAPIPASSGNTNRHRLDRGGNRQLNCALHRLAVNKANWDPDTAAFLARKQAQGQSRKEALRSLKRHLARRVWRLLRSAPAPNATLPPTDIPDSPKARETIPGTAPHPTTCIS

SEQ ID NO: 378950 - protein, 334 aa, unidentified
MTTWILGIDISKRKFDAALSMGEKFKTKAFPNTSSGHRALLEWLARYDADHVHACMEATGSYWEALATFLHDEGHRVSVVNPAQIHAFAKGLLTRTKTDRQDARLIARFCEAMKPGFWQPRPREERELFALIRRLDALKGMRDQERARLQEAHEAVADEIEGHIEGLERAIRELEERIRDHIERHPGLRDKRDLLASIPGVGETTVHQILSRLSVLSLLGSAKQWAAYAGLSPGERSSGQRQAASSGMVRLGDARLRKALYFPAMVAKQHNPVFRRFAQRLRSNGKRPKQIVVACMRKLLHIMYGVLKSGRCFDPSCYGMPAHTISEMRVARTS

SEQ ID NO: 378951 - protein, 347 aa, unidentified
MIIIGCDLHTRFEQIAMLDTETGEIEEKRLEHEKGEARKFYAGLKEPALVGIEATGYTRWFAEMLAELGHELVVGEAGKIRAKETGKQKHDRRDAEHLLNLLVRGDFPKIWLPSAEERDVRVLLEHRHQLVELRTRAQNGLQAIALSYGLRRRRRLWSERGQEELKKLPLREGMERRRADLLRLVRQLDTWVQELDRRIEQEAAQREEAQRLMTHPGVGPQTALATVLVLGPVERFPDDRHLTSYLGLIPQEDSSAGRQRFGHLTKQGNRLLRWLLVEAAQTASRYDPRLARAYRRLTFRKGRAIAKVAIARKLAIRLYIMLRDKIDYAEFCRRGSHAGMLEDVALV

SEQ ID NO: 378952 - protein, 417 aa, unidentified
MEVVVARVAGLDVHKNTVMAAVRIPADKGGGRTELVKEFSTFTGDLFALRDWLTGHGVTEVTMEATGVYWRPVWHVLEDEGSFELRLVNARHVKNLPGRKTDVSDARWIAQLAECGLLRGSFVPPRVIAELRDLTRYRKKLIEEHTREVQRLQKVLEDAGVKLDSVVTDVTGKAARNMIEALIAGERDPVVLAEMALTRMRPKIPELRRALVGRFNDHHAFLARMHLDRMDSLDTSIAKLDSEVDRVIAPFSDALDRLQTIPGVGRRTAEVVVAECGVDMSHFATARHLASWVGLCPGNDESAGKKRSGRARKGNAALRSALCEAAWAGVRTRDTYIGAQFRRFRRRFGAKSEGKALFAVAHTLVVIIWNILATEGATYIDLGPDWFERRDDTQAHIRRLLHQLQRLGVSVNVEPAA

SEQ ID NO: 378953 - protein, 342 aa, unidentified
MEKVSIIGLDLAKRSFQAHGARADGGVGFRKKLSREKVLGFFAEQPRCIVAMEACGSAHHWGRAIGDLGHEVRLIPPAYVKPFVKRQKNDATDAEAIAEAASRPTMRFVAVKTEGQQARAMLFRRRDLLVRQRTQLINALRGHLSEHGIVAAQGPANVKVLEEAIEDQTTSLPLLVVELARVFLDQIEGLSKTISKLEKVTAQEATCGETTRRLQTMPGVGPIAALAVETFAPPMDVFKRGRDFAAWLGLVPRQHSTGGKQVLGKISKMGQRDIRRLLIIGAMAVVRSAVRKGAPEGSWLQRMLARKPKMLVAIALANKMARSVWAMLAKGEDFRVPAVAAI

SEQ ID NO: 378954 - protein, 367 aa, unidentified
MSNYVTAIGLDVHARSISACAFDPMTGEVSRARFGYDPASVAERALGFESPKAVYESGPTGFHLCRALRALGVDCAVGAVSKMHRPAADRGRKNDRRDAEWLARLLACRNVVEVWVPDERTEAARDLSRAPEDARDDLQRARQRMSKFLLRHGLVFDETTPTGRRRSNWTEAYWRWARSIEFDEADDAAAYERYTDAVDRCGEAKRELERRVVEAASRPEWAPTVDALCLVKGVDVATAFLLAAEAGDFSRFPSAPSFAAWCGLAPSERSSGETESRGGITRAGNSHVRRALVEASWHVPMSTRHPKKPRPGHGVAPAASRHAAKCNRRLQDRRDAMSQAGKRPCVANCATAREMACWVWAIAPMVR

SEQ ID NO: 378955 - protein, 344 aa, unidentified
MSVVTIGLDLAKSVFQVHGVDAAAHTVLRRRLGRADLLPFFAKQPPCVIGMEACSSAHHWARELSRLGHLVRLIPPQYVKPYVKRNKTDAADAEAICEAVGRPNMRFVPIKTIEQQSILALHRVRALLVRQRTSAVNAMRGLLSEFGIVAAKGIRRVEELRQRMSRTEPALLPDEAREAIGVLFDHLDGLQERVDKIEARILAWHKASEASRRLASAPGVGPLTATAIVAAVGDGRQFKSARHFAAWLGLTPRIQASGGKEHVGRISKGGDRYLRTMLIHGARAVVGTAFRTDIRPKPWLMELLRRRPVNVAATAVAHKTARSLWAMLTRAELYRPRAAVVAAA

SEQ ID NO: 378956 - protein, 427 aa, unidentified
MKDECSRVEAFWQLKKEIRGSKDYLIVGIDVGKNRHSAFMGTATGKTLLKGLRVENSDSGFEHLLAHVQFYQGRDGFNRVVFGVEPTSVYHKPLAEFLIEHDFMVVYVTNEAITKNRALLDGRWDKNDDKDAANVADLISQAKCHYYDLPHINLRDVRGLLSLRRRLKRQEHGTRIRIRNNLVAQYFPELDKLWNQSQPESLAIVRWCLAPEKLCRLAFEDFFQMVTTRYRGNRQYQRLMKIWSMAPYSIGCKSGKALDVEARILVEGLKQVQEQIREVDKIIENICASFADYKLLLSIPGFGPYISAVVLAAIGNPRRFRNVSQVKRFAGLDLSASRSGNTSSTAVPVVSKKGKAELRYAVYQAALIASTANTRFMFYYQKLLKGREREKGIRTKMRVKLAAKLLVIAWTLMKKKEPFDPGYLKIE

SEQ ID NO: 378957 - protein, 460 aa, unidentified
MNRKQSKSKMDRTMPTVHPNAAAIDVGATMHMAAVKADGAREPVRSFGTFTADLHRLVDWFTECGVETVVMESTSVYWIPIYELLDARGFTVFLVNARDAKHVPGRKTDVSDAQWLQRLHSFGLLRASFRPKGQIAELRAYVRQRERLLQYAASHIQHMQKALTEMNLQLHHVVADITGATGLRIIRAILAGERDPEALASLRHYSCHSSAETIAKALTGSYRAEHLFALEQALALFDAYHEKASACDIRIEAVLKELSTHRGRGHGAVPPASRRRNRADQANALAFDVRAALFALLGKDITTIDGLGPYLSLKLIAECGDDLTSWPSAKHFTSWLGLAPSNKISGGKVLSSRTRRSGGRAAALLRLAAVTVGRTDTALGAFYRRLSSRIGKAKAVTATARKVAVLFYNAVRHGMEYVDPGASSYETRYRTRVINNLHRRAKTFGFVLQPLEPKAGAAVS

SEQ ID NO: 378958 - protein, 340 aa, unidentified
MHYIGLDIHKRFIYGCILDQEGKMIHEQKFATEPDELDRFLSHTALDDCCIALEACVCWQFTFDYLMDQGYDVVLADPMRIRVIATSRKKTDRHDARVLADLLRTNLLPKSYASPRDIREQRQITRHRASLTDLRTQVKNKIHAILLRSGINPQFSDAFGKAGLAYLATLDLPMSDRFELGQYVHLIQHFTSSINATTEQVEDFVRFNPHARLLMTVPGINYYGAVMIAAEIGDMRRFTSRKQLTSYAGLNPSVYQSGDTFRTGHISKQGNRYLRRILVQCTNVSIYHDKTLARFYQRLKRRKNHGIAITATARKLLGYVYVMLQHNIPYYALQVHKEAS

SEQ ID NO: 378959 - protein, 349 aa, unidentified
MERFCVGLDVSAKTFDIAFRVARGRVEWQTFENDGVGHRALVKYLKKRWKLIRVVMESTGIYGLDLALALNKAGIEVMVANPRAAANFAKATLQRSKTDRLDAEMLLLFAERMPFMAWRSPSSEQLELRAISRRVQALLETVRAEKNRMHAALHVEGTKVVRKSITATIKALAKQIAELRAAALKLIASDPLLARRNELLLTTKGIGQVSAISILAELSVLSPEMTDRQWVAHAGLDPREFESGTSVRSLPRISKRGNRYLRAVLYLPARVASRFEPNAAAFGARLKARGKKPLQIHVAVMRKLLHGIHAMFLTDQPFDGKRLFPAADAVGTSGIAPSAISEVSTAFPS

SEQ ID NO: 378960 - protein, 372 aa, unidentified
MKDTIKYVGLDVSKEKIAVAIADEGREEPRYWGMISNTPESVRKLVNKLGEKDDLRVCYEAGPTGYELYRLFLSLGIECEVIAPSLIPKKPGDRVKTDRRDALNLAKLFRAGELTPIYVPTEDDEALRDLVRAREDAKEDELRAKHQLTKFLLRHEIHPPTEVRKWTCKYREWLNTLKFERSASRIVFQEYLHHLQEIELRIKRLEEEIQLQATEGFHAPMIQALQTLRGVAVITATSLVAEIGSFKRFDSPKKLMSYTGLIPSENSSGETRRQGNITKTGNRHVRRLLVEAAWSYRYQPALKGELKRRQEGQLPSVQAISWKAQNRLHKKYFRLLSKGKVAGKAVTAVARELAGFIWAITQEIENNSNVNN

SEQ ID NO: 378961 - protein, 370 aa, unidentified
MLDTTTFVGLDVHARSIKAVSLDVMTGEVRAATFGYDAGAVAEWVRSVDPRARCVYESGVTGFDLQKRLSGLGVDCVVGAVSKMIKPSADRRRKNDRNDAEFLARMLSVGNVVEVWVPDDECEAARDLTRALEDARDDLSRSKQRLSKFLLRHGLVFDERTPTGRRKGNWTRAHWSWIESIRFAERADNDVLAYYVDAVRRAAEEKARLEGLVEAEARKPRWRKRVDSLRCLKGVDTASAADLVFEAGEFSRFRNARSFAAWVGLTPSEHSSGESDRRGAITKAGNKHLRKTLVEAAWHYLTCSGRPKGLAKGQAPDRGARRHAAKGVRRLVERREALLARGVHGNKANVATARELACWVWAVGLMAEEA

SEQ ID NO: 378962 - protein, 410 aa, unidentified
MRYYLGVDWADQTHAVWVVDESGAKITARAVAHTGEGLDAWGRELDEWRAQGIDLWAAIERPDGRVVDFLLDHGVVVYPVNPKALDRARDRFRQSGAKSDPFDARVLADFLRTDHGHLRALQPSSEAAQELKLLTEDCQRHIRQQTRLVNQLTATLKAYYPRALEVAEVTSALAREFLPAYPTPAALAALTERQWQRWARAHRLTETRTDELWAVLRQPQLPVPAHVVRAKARLMQALVDQLMPVVAAVAQYRKAIDDFFASMPAAQWARTLPIGRHGITAPTLWARLGDAPERWESFRHLQAHAGTVPVTKRSGKQQQVVQFRFACDKALGPWSIRWRSSRCCRVRGRGRTTTSSAPGDTLIARRSARWVRNWLKIIFAMWQRQVPYDEQYHLATMTRQQLGQRQKQIA

SEQ ID NO: 378963 - protein, 343 aa, unidentified
MGEVSTIGLDIAKSVFQVHGVDSCGEVVVCKRVRRSKLLEFFAALPPCLIGIEACPSAHYWGRELQALGHKVRLIPPSYVKAYVKRNKNDANDAAAICEAVTRPSMRFVPTKSEQQQSGLMLHRSRQLLVRQRTMLSNAIRGHLAELGVVSAKGRNGMAELLGIIAHEGSNCIPAIARLSLEALARQYAAIASEIGSIEKHIHAWHRSCEASRRLEEIPGIGPIIATALVAEVGDWKAFSSGRNLAAWIGLVPKQHSTGGKDRLGGISKQGNRYLRWLLVAGAMAVIRYARRHGTKRSWLVRLMERRPPKVAAVALANKIARMAWALMVRGERFTEAKLLPAT

SEQ ID NO: 378964 - protein, 350 aa, unidentified
MPAYADPTPKPISADTIFLAFELSGTSWLVALHAPDADKVERHRLPAGVAAEVLGLIARTKARVTRRLGTTPRVACCYEAGRDGFWLHRVLEAEGIASHVMDPTSLQVDRRARRAKTDRLDAQALLRALMAWSRGERQVCSMVRPPSPEHEDERRLSRERGTLLKERLRLSNRIKGLCAAQGIYDYEPLGADRRERLARLVTGDGRALPGRLAAEIGSKLAALLRLKGIGPEVATVLELEVFHRHFANRRDVRAYAGLAPSPYASGGMSREQGISKAGNRRARKALIELAWLWLRHQPESALARWYRDRVGTATGRVKRIAIVALARKLLVAIWRYVETGLVPAEAAVRT

SEQ ID NO: 378965 - protein, 312 aa, unidentified
MTEHYYCGIDVAKDRLDVMVLPDRKSFSVDNNAAGYSELVKRLRGLSIAAIGIEPSGGYERAVIRALLAADLSVRRINPNKLRQFGRARGVLAKNDRLDARLIAEYVAIMPTRVVQRDPAAEQLAEVVTMRRQLCDEHVAVENQTAHLEDAMLRRLNKRRLARLAADILLLDRRMAQIVASNANLTRRYELLTSMQGVGPTLAFTLVALLPELGQMSRKQIAALVGLAPYDFDSGRLKGHRCIYGGRLPVRNVLYMAALSACRYNPALKVFHHRLAATNKKPKVIIVAVMRKMITTLNAMLRDNVAWQPKSV

SEQ ID NO: 378966 - protein, 367 aa, unidentified
MKKVSTRAAAQSRNISQQKLTIGLDLGDRNSWYCVVDEAGQIQREQRVHTSGKALQEVLGAMPRSRIALEIGTHSPWISRLLSELGHEVIVANARKVRLIGESRKKDDRLDAQTLARLARIDPELLYPVKHRSAKAQADLTLIRARAGLVRARTGLVNTARGLAKSYGERLRSCNVRNLNPEKAESLSPELQAALEPLLNAIESLSERIVEYNERLENLAQQSYPQVALLKQIKGVGTLIALTFLLTLEDPHRFGKSRDVGCYLGLQPGRRNSGQSEPQMHISKEGDPYLRTLLVQGAQHILGPFGVDCDLRRWGLKLAERGGRNGKKRAIVATARKLAVLLHHLWVSGEAYEPLHNSSRTTVAAAA

SEQ ID NO: 378967 - protein, 319 aa, unidentified
MVDRGRFRTTPSGVEKWFTDLPKARIAMEAGTHSIWVSEQLQEMGHEVIVANVREPRAISHSDRKSDTVDAEKIARYARLDPKILRPIAHRTVAQQEALTLIRARNLIVRLRTAAVNAVRGLAKPCGYRLPASSTLCFAKRSLAVLPRGLVQALGPVLEQIAEMTKKIKHYDRLIRRLTETEYPETQALIQVYGVGQLTALTYVLTLGSKERFERSRDVGCYLGLRPRRSQSGDHDPQLGITKAGNIYLRSLLVECANHVLGPHGRDSTLRQWGLHLASRGGKQSRNRAIVAVARKLAVLLHRIWVTQEPYIPFYAVAA

SEQ ID NO: 378968 - protein, 341 aa, unidentified
MEKVSIVGLDIAKNSFHAHGAAGDGSKVFSKALPRGRVLEFFSQIGPCTVALEACAGAHYWSREISKLGCDVRLIAPQYVKPYVKRQKNDANDAEAIAEAASRPTMRFVSTKSAGQQGQAMVLKTRDLLTGQRTQTINALRGHLAEHGIIAPKGPQHLPRLEKAVAGNAEHLPTEVTGLCQMFFDLIAELSKRIDELTRQLRQIAGQNDVAKRLMTMPGIGPVTAVSIAVLAAPPEMFSKGRDFAAWVGLAPRQHSTGGRTRLGKISKMGQRDLRRLLIIGAMSVIQAAQRRGAAPEGSWLARMLARKPKMLVAVALANKMARIAWAILAHGGVYEPPANA

SEQ ID NO: 378969 - protein, 350 aa, unidentified
MTTIAEARPAVTGGVDTHSDAHVAAVVTAVGGVLGTEQFPTTAAGYRRLLAWMRTFGELDRVGVEGTGTYGVALARHLLAEQVSVVEVMRPNRQVRRRHGKTDVVDAIAAARAVLSGEANATPKTHDGPVEALRTLKVLQRSATKARTQALNQLRALLVTSTDELRARLRDLSQRELLATCAAFRVIADDDSLAAVTRFALRELAQRALYLAERLEQVKLKLKRITEQIAPALTALKGVGPDVASTLLLAAGDNPERLVNERSFASLCGVSPVQASSGKVHRHRLNRGGDRQANAALWRIALVRLNCDQRTKDYLAKRVSDGKSKTEAIRCLKRYIAREVFAALPVPAAA

SEQ ID NO: 378970 - protein, 355 aa, unidentified
MAVTIVEEARPVTCRTAITGGVDTHADTHVAAALDPVGGLLGVREFPATAAGYAGLLSWLGGFGTVALAGIEGTGSYGAGLARHVTAAGIRVVEVDRPDRQDRRRQGKSDPLDAVSAARAAQSGRARGAPKGRDGAVEAIRALMVARRSAAGERTRTINQARALILTGPDDLRARFTRHTPAALVTGLASLRPRPGDVAGYAVRVALRELGRRAQFPAGQLERLDELIVPLVTTRAPGLLTVYGLGPRTAALLLIAAGDHPGRLRSEAAWAHLCGVAPIPASSGKVTRHRLNPGGDRQADHALWRIVFTRLGSDPATRAYAGRRTAEGKSKAEIIRCLKRHVAREVYRHLRPAAG

SEQ ID NO: 378971 - protein, 341 aa, unidentified
MKLFVGLDVSLAKTAVCVLTEHGEIIEEVEVASEPEPLISLLQGLEGTVEAVGLEAGPLSQWLHRAMKEIGLPAVLMETRQVKGALKAMPIKTDRRDAEGIARLLHLGWFRPVHCKSVSAQEVRAVLAARKAIQGNMIALEMSLRGLLRNFGLKVGAISRGRFEARIWELVEGNTMLEAAAEPMLRVRAALRQELAGLEKLVRQIAFEDPVCLRLMTMPGVGAVVALTFRSAVDDPSRFRSSKNVGPWVGLTPSRSQSGERDVSGGITKAGDVNLRRALCQAATVMLNRGRGNALRTWASHVAKRRGRKRAMVALARRIAVVLHRMWVDGSTFRMEIAPTN

SEQ ID NO: 378972 - protein, 407 aa, unidentified
MTVTIGIDPHKGSHTAVALDEHEVTLGQLRVRTGPDQLTRLCEWAKAWPARTWAVENAFGLGYLLSQQLVAAGEHVVDVPPKLAARARLLDNGETNKNDPNDARSVAVAALRAKRLSEVAKEDHRAVMKLWAHRRKELSSCRTRVANRLHAVIMELVPGGYKGEIYASKVEHLLEGFEPVDAVSAAREELVEQLLADLRRLDGQLKELKERLAAVVAASRTTTTKVFGVGPVVAAITVGLTGDVGRFADKDHFAAYNGSAPIEVSSGEKKIYRLSMRGSRQLNHALHMAAVTQVRHRHSEGRAYYDKKVAQGRTGKEALRALKRRISDALYAAMVADARRERAAGQASGGPGGQTGNGSVACAAGSHPDKPALRPSHSRASTKARPSRPAVRTLGIQDSQKKIRKAS

SEQ ID NO: 378973 - protein, 388 aa, unidentified
MHVYVGVDIAKELHYAAIMDSDGVVSKPFSFENNDKGFNLLLSHLAPYNKESILIGYESTAHYQENLAYFLKSLGYRTAEINPLQTTALRKANIRNTKTDSVDARLICLALMNHHIQGDQRDSVRLDDLYQLCKMRMDTMKKRTTCKIQFVAIMDRIFPELASFFDNNLHTNTIYRLIESYPLPSQIKKTRIDILTKLLHKASKGHFKKEKAQKLKNLADISVGIPSDIFAFQAQQLVHQIEFYTDQIQTIEERINTNPDVMSSPLMTIPGIGTFCVACILSAIKNINDFDAPCKILAYAGLDPIIRQSGKFNASHTRMSKRGNSLLRYALVWSAGNVVKNNHTFAEYYRHKTEDQGKSHYQALGHCAKKLVKSIYHMLKCNESFNLD

SEQ ID NO: 378974 - protein, 346 aa, unidentified
MNNSLVAFDPCGIEVSHLTLVVALRTHDHDEALREFANTRQGHQAVLRFLERSARPVRVALESTGLYGLDLALALHQAGVAVMVANPRAVRHFATALMQRSKNDQLDAAVLREFAARMPFKAWRPPSASALQLVAVARRLEALTDMMAAEKNRRHAASLCEALPLIIRRDLQRSIQTQQRAIQRLTRAVQEFIAEDPELARRYELLLSIPGVAATSALHILAELTLLPADMDVRQWVAYAGLDPRQYTSGTSVHKKVRISKAGNKHLRRALYMPALVAVQHQPQVRAYYEHLVERGKTKLQALVATMRKLLHAIFGMFKHHQIFDGRKVYAALDASVPALQEVLCP

SEQ ID NO: 378975 - protein, 312 aa, unidentified
MANQVFAGIDVGKEKLFVNIYLDNQVRDYPNTHSGLERLSRYLNKRAVDLVVMEASGGCERRPASEMRASGLSVAVVNPTYVRRFAQGMGTLAKTDTIDARMIAQFAFVKQPRPQLPRTAEEEELAALVERREQLVSLLSIEKNRLSKASDYSKSSIQNSIQFLAGQIETIETEIKELVAKSPERQAKMRCMCSFIGVGDVTAVTLLTEMPELGNESREHIAALAGVAPVNRDSGKMKGKRRTYGGRARVRRTLYLAALSASKHNPVIKTFYERLLASGKEKKVALVACVHKMLTILNAMLKKGELFNPIHP

SEQ ID NO: 378976 - protein, 319 aa, unidentified
MSTHTPTLYVGIDVSKATLDVAILPLGRHFVVSNDEVGIDELLSGLEDLRPILVVLEASGGYERPVAAAIAASGIAVAVVNPRQTRDFARATGKLAKTDALDAKALARFAEALRPEPRALLEEEAREFQSILARRRQVIQMMSAEKNRLGAATSKAVGKRIEAHVHWLEKELSRTDRDLDEAIEGSPAFKENEALLRSVPGVGPVLCRTLMAELPELGSLPPRELSALVGVAPLNRDSGTLRGKRAVWGGRARVREALYMGALVASRYNPHIKEFYERLVAAGKPKKVALVACMRKLLVILNALLRDRTPWRHPHALNP

SEQ ID NO: 378977 - protein, 334 aa, unidentified
MKYQHVVGMDIAKDSVQASCFDGTTFFDFSFPNQEKSFLKKIQKSIPKSDPSHILFVMEATGVYHLKLATALDKEGYSVAVVNPFIIKKYAEMLLKRAKTDRNDARLIAQFGFYQEVTLFTPKESLAEEITQVLKGLDQLKKERTTLKNYQEALTHHNEINSVVRDIYQKQLKEVEKAIKTLEAEAKRLVCQYAPKEYQLLLSIKGIGKCSATALLGFLQKMDRFSRGKEVASFLGLAPQISQSGKDKGKAWLSKKGNGYLRRLLYLAALSASRSNVQCRELYQRLLAKGKPKKVALIAVANKLLRQAFAVLKSGCPYDPHYLKLKSNLEVVLT

SEQ ID NO: 378978 - protein, 455 aa, unidentified
MEQKELALQIINPRAAGIDIGSRSHMVAIDQNKNNVREFGVYTKDHQHIIEHLHTHGITTIAMESTGTYWQTLFDALQTEGFEVLLVGGNQTKNVKGRKTDVIDCMWIQKLHSLGLLSGSFLLSNTLQELRTYYYHRQHLIEQAALYVHKMQKSLRLMNIRLDIAIRDVAGKSGLNIIEAILAGNRDAEYLASLVDIRVKKSKEEIADSLRGWWRDELLYELKAALAFYKLYEKALVDCDKTIEQALIKYLPQPKVGSEEEKELKATKKKNRKHAPAFNVSEIAFQYFGTDLFAINGISHTTVLCLLTNMGHDIHKFSSAKSFAAWLRLVPNNKVSGGKIIGNGTAKGRNYIAVALRQAANSIGNQKDHDLTPFFKRIAFRKGRVAAVTATARKLAIIIWNMITKIQPYKKNEIIMNNEKHKANHLKQIERRIGTLQLNQNELIKLFERTSLLIN

SEQ ID NO: 378979 - protein, 370 aa, unidentified
MKKYSEAFIGIDTAKKKHAVAVAEDGRNGAIRYFGEIDSAPTTVEKVVGKLAARYAKLHVCYEAGPTGYGLYRQVKALGHECAVVAPSLIPRKPGDRIKTNRRDAVTLARSLRAGDLTPVWVPDAIHEAVRDLSRAREAAGEDVRKKRQQLLSFLLRHGRIFSGRKHWSLAHRRWLAEQKFEHPAQQIVFQDAIDAIEDGAARLRRLEEQLLAITPSWSMAPVVAAYQAMRGVSFIVAVTFVAEIGDVRRFDSPRQLMAFLGLIPSERSTGETVRRGGLTLAGNRRARRVLIEGAWTYRYPARVSETLRPRLEGLPKAVRDIAWKAQIRLCARYRRLTAAGKKTPVVIAAIAREMAAFLWAIAHQIEPLT

SEQ ID NO: 378980 - protein, 424 aa, unidentified
MKFKMQNKQNQLIERISVKHLIVGVDIAQQLHVARAVNFRGIVIGDPLIFKNNEEGFASLLKWMKNLQRLNNLDEAIVGMEPTGHYWINLSKWLSKQNIEVVTVNPHLVKRNKENRDNTQSKSDKKDALVIADMVKNGYYSEVRYASESFEKLRVLMSNRDVVVKRLVSSINQLNRWVDIVFPELRQVFKDIKGKGAIATLRLFPSPVELEKLQPHDVIVGWKSIMKRQPGLKKAILLLQVARKSVGTRQALDAYKFHLEQLLEEYDLAVTQLEKVEKQLVEVLNMIPFAKKLLTIKGISEISLAGILGEAGDLSNFSHGNSLLRHAGLHLAEASSGKWKGQIVISKRGRSRLRRFLFLATMSLVANNPEFKALHTHNVKVKKMKKMKSIMKLVGKLARIFVGISRRNESYCPDKLQPLLPIAA

SEQ ID NO: 378981 - protein, 345 aa, unidentified
MQNYTVLAIDLAKHVFQVVKTTGYGKAVFNKKMNRAELKELLRREPKAMVVMEACGGSHYWCRLAESFGHQVKALPARQVKPFRQGQKTDANDAVAIAIAARQPHLKPARVLSEEEQGLQCIEKMRELQIAHKTALSNQLRGLLFEFGIVMSKSDAALKKALPEILEDAENGLPGGFRTVLAQMWALYLTISSELEKLSQFQHQLTLQDEQSRALSALEGVGPVGALGLKLAIGNGVHFKNGRQAAACIGVTPVQHSSGGKENIGAISKLSGHKKLRSVLIQGAMAVLRHLAKREARNTKEQWLKALVQRRGTRIAAVALANKTVRTAWAMLSRQQEYQAPGLLA

SEQ ID NO: 378982 - protein, 407 aa, unidentified
MELATLYKRVIGLDIHQAQITACALIEMPDGSTRSEQRQFGGFKRDRRELANWAASLAPEEVVMESTGIYWKSPYAALEEVGIRAKVVNARHVKNVPGRKTDIGDAQWLAMLARAGLLRGSFVPPAQLRELRLIARQRNKLINQLIGEKNRLHKILADGGVRLGIVVSDLHGQSARVMVKAIIRGCSPQEVLDCASRRLRASREELFEAVQGELTDSHRFVLAETMQHIEEIEARIGRFDARLLDGLKSEHSALAVLQTVPGIDLIGAAMLLVEIGSDMTAFGTADRLASWIGICPGNNESAGKRKPAKARKGNPFVRRLLCEFAHAACRTKCVFKPKFESLMPRRGYKRSIVAIAHSIMRTIFFMLKRGEHYKDRMVDYEAMAVERNAPRWIKALTKFGYINPANA

SEQ ID NO: 378983 - protein, 413 aa, unidentified
MNKRWDKACGADVHKRFIDATILTLDGTKKHKRFLTDIDSLLAFRDWLIEEDCQVVALESTGVFWIPINTVLEGIVKVVVANAYKIKHIPGRKTDIKDSEWIAELCINGMIEPSRIFPKGDRELRDLTRAREAIVNSRSQVKNRIHAILDTANIKLSSVFTDLFGKSGIELVKGITSGQSIEAIIIGTNNPWIKKRADEIRQAVKGTLGAAQTFVIKECLEVIKTIDEGVENITAEIRSRMKAKEEDLNIAMSIPGIGFIAGSTVIAEIGDFRDFETPDKLAAWTGIVSSVYQSANKLSLGRITKQGSKHLRWILVEVANAVIKVKGRNKLKSFFLRIKSRQGFNKAIVALARKILCILHHLLTNRELYIEDGKTWVKKSKIPKEKVSGNMTADEMIKILSDAGYVVLKPVLG

SEQ ID NO: 378984 - protein, 355 aa, unidentified
MNSEKYIGLDVHQATISVAVMDSRGKVVMESILETKASTILEFFAGLRGTLSVTFEEGTWAAWLYDLLKPHVAKVVVCNPRKNALLKDGNKSDRIDARKLAELLRLDNLKSVYHGETGVRMLRELARSYLTIVKDLTRVMNRLKALYRSWAIPCAGRDVYYTRHRTEWLGKIREAGVRRRAEQLYQQLDMLQHLRQQARRELLAESRKHPIIAKLRKIPSLGPIRSALAVALIQTPHRFRTKRQLWAYSGLALETRTSGEHRYVRGQLRRSKKQVSIRGLNKDHNHDLKGLFKAAATRASVQPGPFQDFYQRSLAKGIKPTMVRLTLARKIAAITLTLWKKGENFDAEKLKSQAA

SEQ ID NO: 378985 - protein, 360 aa, unidentified
MTSLPADPPGVIVGVDTHQDVHVAVALDALGRRLGELQIAATTSGYGQLVSWVRELGPAARFGVEGTGSYGAGLHRYLRRHGLAVVEVNRPDRSTRHRRGKSDPIDAEAAARAVLAGTATGIPKAGDDQVEMVRLLKLTRDSAVKSRTQAINQIKGVLVTAPAELREALTGLSGTAQLDRCAALRPGPVTTPTAAAKQALRSLAHRAIALAAEAAALGTQLDELTTAVAPALRALTGIGPDGAAALLTAAGDNPDRIHSEAGFAALCGTNPIPASSGKTTRYRLNRGGNRQANAALHRAVITRLRHHEPTKAYMQRRLAESKSTKEILRCLKRYLAREVYHQLNPTTPSRNRPNDLPASA

SEQ ID NO: 378986 - protein, 310 aa, unidentified
MDAIYVGIDVSQARLDVHVLPSGEAFAVARDGKGLEELIERLRAFSPQLIAVEATGGFETIVAAALAGAGLPLVVVNPAQIRHFAHALGKRAKTDPIDAAVIAHFVEAVKPELRALPDEAQRLLAELVGRRRQIIEMMVAERQREKRAANVRVRKSILRHIRVLEKELPEIDEDIGTLVRGSPVWRKKEDLLVSFPGIGNTLARTLLAEVPELGELTRREIASLVGVAPFTRQSGHWKGKSKIGGGRGSARRALYMAALVASRHNPGLRTFYRRLLAAGKPKMVALIAVARKILTTLNAMLRDKRKWQSA

SEQ ID NO: 378987 - protein, 412 aa, unidentified
MVKKECFIYVGIDLHKETHTAVILNCWNEKLGEITFDNKPSEFSKLTRKVNKYCNDGMEVVYGLENAYGYGRALAVWLIEKGYQVKDVNPALSYAQRKSVAMYQKSDSYAAGAVALALIVHLNKLPDAVLDDAYWTLKQLVNRRDNIKTHQTRLKNQLHEQLCVSYPSYKKFFRDISRQTALHFWETYPSADYLKGKTPEDLAKELRAISHNNCSINKAKIILDSVRADGSIKRDYQEARDALTRSIVGDLKHYNNQLEDVEKAIENLYPVFGCTLMTMPGIDITTATNILAEIGDINRFSNADKLAKFAGVAPVKFSSAGKGEDRASKQGNRRLQSIFYFLAIQMIQVTKNGTPRNAVFREYFIRRTQNGKNKQQVLICIARRLVNIIYGMLKNKTEYREPVFNESFLKNQ

SEQ ID NO: 378988 - protein, 351 aa, unidentified
MKEFIAFDCHKRYTLMEREQIQSGKTIHLRIEHAPGAIRQCLRNREPGTPVAVEATGNWYWIVDEIELAGLEPKLVHPRKAKLMMGMINKTDKLDAHGLNRLQRNGTLPTVWIPPRELRDQREITRGRMVMTSQRTRLKNRIQSTLSKYGWAGTEASDPYGKKARAQLNQAIQQLPPETSQITAALLEQLDFIQGQIEATEKRIRELVCDTPEMDWLRTLPGIGWILSAVIGLEIGVIGRFASAERYASYCGTTPRVHASGDKIRFGRLRPDVNRYLKWAYVEAAHSVCLQRGKFPLRHSSRLYERIRKRKGHPKAIGAVARHLAEATFHVLTRGQPYCDPGLKAGQSREV

SEQ ID NO: 378989 - protein, 341 aa, unidentified
MDNITTIGIDLAKNVFQCHGVDKNGHQLFSKRLTRTKLVTFIAKISPCTIAMEACGGSNYWGRKFRSYGHDVKLIAPQFVKPFVKSNKNDARDAEAICEAATRPSMRFVPIKEIEHQDMKMLHRMRSQIVKQRTALSNQIRGFLAEYGVILPKGLTYVRKRLANIIEDNHNELSSKARALFNELLADFHQLDSRVKSYDDKVTQEVSQNEVCKRLMKVEGIGPLTATAFWATITQPELFKNGRGVSAMLGLVPKQRSSGNRTLLLGISKRGDRYLRTLLIHGGRTVVKSSASSHSPTARQRWVNDKANHCGVNKTAVAIGNKNARILWALLHNKEDYRANV

SEQ ID NO: 378990 - protein, 483 aa, unidentified
MGGVLYKKRARVWLSVPALVALRGSPPVLASHARRLIRTSPKWLIEARRHAAWSLYRREGRRVSENQRVVGFDCGEDEHSAVLLDAAGEFEERFSVANERGKIQEHLAELLLAVRPGERLVVVVESKRSHGRVVSDVAVELGCDLRQVNTVALNHFRDLEGQPRKNDEWDAYLAARMVFLRMGGCRKATEVTEEERALSRLTRTHRRLVDERRKHLARLRAVLLELAPEMLHSSWEGPQPGRKAMLYLLERWPGFEGLERAQLRSIEKILLRCRYGSRATRVAKLIREMARGISIADEERQAFTLELDLLVRQIRFCDESKDRLRTEIVQRVEHHPIGQKLLGMDGNGPVITGVLVSELLPVARVSSEPKSATYAGVTPLSRKSGKSLDSDKLTQGVNQRVLNALYTSSVVAIKHSAIDRAYYQKKLRGYIGHPKPHVAAFIALSRQRHKLVYKLMTTDAQYDKEVLMAAHLARLEQKQMAAA

SEQ ID NO: 378991 - protein, 349 aa, unidentified
MAVTIVEEARPITGGVDTHADTHVAAALDSVGGLLGVREFPATAAGYSGLLGWLGGFGTVCLAGIEGTGSYGAGLARHVTAAGIRVVEAARSDRQDRRRQGKSDPLDAVSAARAAQSGRARGAPKGRDGAVEAIRALMVARRSAAGERTRTINQARALILTGPDELRARFTRHTPAALAAALASLRPRPGDVPGYAVRVALRELGRRAQFPDGQPGRLDDLIVPLVTARAPGLPALYGIGPRTAALLLIAAGDHPGRLRSEAAWAHLCGAAPIPASSGKVTRHRLNPGGDRQANHALWRIVFTRLGSDPATRAYAERRTAEGKSKAEIIRCLKRYVARQVYPHLRPAGG

SEQ ID NO: 378992 - protein, 407 aa, unidentified
MEVLHPRCAGIDVHKDVVVAAIRCVSEPVHREVRSFGTTTSELMSLAEWLEHHHCTHVVMEATGVYWKPVWHLLEETFELVLVNAQHVKAVPGRKTDVGDAQWLAELLAHGLVRSSFVPPARIQELRDLTRTRKQLVRELSQHTLRIQKVLEDANLKLGSVLSSVVGKSGRAILKAIVAGETNPEMLAELAQGAARKKRAELVEALRGRVTEHHRRLIKLHLGLIDTLEVAMKEVDDSVGKTLEPIQARAQLLTTMPGISDIAASVIVAEIGVDMTRFPSPGHLVSWAGMCPRNDESAGKRRSTRLRKGGTWLKTTLVTCAWTAVRKKDSYLKAQFMRLKARRGAKKAIMAIAASMLTACYFMLRDEQAYKDLGPQHFDRHDTSKTIGRLVKRLEALGCEVDIKRAA

SEQ ID NO: 378993 - protein, 450 aa, unidentified
MNASLILGIDPGKSFFAATLMHSTGERIWKAQQFDMSRDGFDGLRSSLPDGDLTVGIEASGRIDDNLLAWFGRWKSCCRDRKIKVIRVNPGQSARFGGPKPRRDQTDGSDSDHVGEFTRVYANRLEAFEHDPQAQAMTRLINERQHLVEELVATKNRIHEQLLICFPEFTQMFVDPFAKLARAILRQVPTARHVAKRRPLSLARVKTGRKERSLGVEQAQKLIQLAKRSIGSAGEDNDAAAMIFLLDQLDLLEKRLADIEETLAAYAAQAKHEAGPAGEHGVSAARQIELLDSIPGIATIAASTLVLGTRGLARFDSGSALSAQWASCPERSQTGTSLDKTRLTARGDHKRRAMLYLATQIACVYDPAFAFHKWRMIQRGHCPQQAVCAAMNRMARVAWTLVSKNQAYDVNLMIAQIQIHHAELWKTFVCLHQNNGTLWKKVELKYKKIA

SEQ ID NO: 378994 - protein, 379 aa, unidentified
MDHANTGTPAETILHGALELSKNSWLLALHFPDRAQPSLYPIRGGDTVGLMEKLTAARDRWAKVSGKAPSIVLCYEAGYDAFWLARFLKARGIECLVVDAASMQVNRRARRAKTDRIDVGMLLRALIAWGQGDRHVWSVVRVPNVDEEDLRRSHRERDRLVRERTAHINRIKGLLFGQGIRGIKVKSEYRTLQIDKLITGDGRPLPPRFASEITREIARLALIQEQIATLERERDQAPTPCKATEKKRVQLMCLTGIGPAIAAVMTREVYYRQFDNRRQVAAFLGLATSPHDSGDVERSQGISRAGRGQVRGTMIQAAWLWLKHQPKSAITRWFVQRTAGQSGRIRRIMIVAVARKLAIALWRFLEQGLVPQGAMLANR

SEQ ID NO: 378995 - protein, 351 aa, unidentified
MLIIGVDYHPSFQQISFMDQETGECGERRLNHSDGEAERFYRDLKQRGIGVRVGMEATGHSRWFERLLAELGIELWIGDAAEIQRQRGRKQKTDRLDAELLLKLLLENRFPRIWVPNPENRDLRQLLWHRHRLVQMRTRIMNQLQAVAMNEGYRWKKKLFSAPGRALLEKLSLAPWASRRRKELLELLDQLDPKIAELSAAVEQEAAKWPAVVRLMTHPGVGPITGLVYILVIGTPERFPSGKKIGSYTGLIPSEDSSAGQQRLGHISKQGSSLLRFLLGEAAQAAARCNPDWRRRYVHLTMRRGKRIAKVAMARKLAVRLYWMWRNHWQYSQLVEFGSHAGKLGTGHGVK

SEQ ID NO: 378996 - protein, 367 aa, unidentified
MAQQFIGVDLHTNRFTCCYRGEGNEKKETATFELTDYGLAAFYKTLTKETYVLVEATITAFAFVRLIQPLVKEVIIANTYELKQISLARKNTDKIDADILCRVLKMQILSGEQAVSPVTVPPENIQDLRGLFTTYRLYKKQTTQIKNRIHSLLKEKLYGFTKEEIFTQKSRKIIQNLEKSTTMSFQLDELFDLLNFIENKIVSLEDKIKESAEVYMREIEILTSMKGIGVFTAIAIIADIIHVDRFKNSKSFTSYLRSAPKVSNSNTSVSIKGTNKKGRKLSATLITQSLIHVLAASPKLNRWYIEKTRQKKPGLVRTGLRRRVFAEIYQMLKKQEYHYAREPGIHENKIIEYKKFLQKTKKTLNSA

SEQ ID NO: 378997 - protein, 400 aa, unidentified
MKASCIAVDVSKGNSYIQGYIDSDTSFSKVQKINHDRSGFNEILALKSKLDKQTGKTSVVVFEATGVYHRGLESFLKENEIAYVIVSPLQSAKFRKQELRTKKTDKRDCKNIAKVYFANDFRQVAPEDELYYTLRQLNREYENLLNHLRKAKVNFNEALEIVYPGYEKVFPELYTESSLEILKKFPHPKQLGRKSGNSLATFLMKHSEHRELWCEKKAVELLRYTQECVSGCREEDVNVDILLSQIKQVEYYIELCDATLQKMIELAKQLPEFRLIQSIPGIGENLAARILAEIGDIRRFRGPKQLVAYAGIDPIIYQSGKNDGLHLHISKKGNKRLRCLLYLAVMCGLRIKTQKSSIREFYQKKTQQSNPMRPKAASIACANKLLRIIYGLCKTGCAYK

SEQ ID NO: 378998 - protein, 354 aa, unidentified
MAEALKNSITFVGIDIGKNSFHVVGLDECGAIVLRQKWSRGQVEARFANMPPCLIGMEACVGAHHLSRGLQKLGHDARLMPARYVRPYSKGQKNDFRDAEAIAEAVQRPTMKFVATKTADQLDLQAMHRVRERLVSQRTGIINQIRAFLLERGVAVRQGLRFLRSELPGILARPSDILSPRMVRIIEDLAGDWHRLDERIEGLSSEIEAIARRDSSCERLMSVPGIGPIISSAMIAAIGAGDVFSKGRDFAAWLGLVPKQISTGDRTVLGKISKRGNRYLRVLFVQAAWVVLIRPKSWERHGLKSWIEAAKKRLHRNVLAIALANKLARIAWSVLAHGRSFEASKLAEVAAKSG

SEQ ID NO: 378999 - protein, 377 aa, unidentified
MSKLRFVGLDVHAETIVVAVAEAAGEVRSLGVIPNRLESIRKLVHKLGPVQHLRACYEAGPTGYVLYWQLTQLGVECAVIAPSLVPTKASDRVKTDRRDAEKLARCHRAGELTAVWVPDAAHEALRDLVRAREAAKKDQLRARHRLGKFLLRHGQQRPEGVKVWTKKHREWIKSHVRFEQPALEATLADYLEEVDHVGKRITKLETAIDEAIQQAPPVIRAVVEALQALRGVAQTVAVSIVAEVGSLSRFPSPRALMGYSGLVPSEHSSGNRVQRGGITKTGNGHLRRVIGEAAWAYQHRPNVIGSLAQRQKRLAIGEESKKIAWKAQQRLHKRYRALSARGKNKNQIITAVGRELLGFIWAIGVSVEKQHQVTAAA

SEQ ID NO: 379000 - protein, 326 aa, unidentified
MKEQQFVGIDIGVRDLAMNSWPSQQRLQVANDDCGRARMSEWLTAILPQFVVLEASGGLEATLAAEIHAAGLRVAVVNPRQAREFARSLGRLAKTDRVDAQVLAQFGQSAAQSVRLRETRVADAAETELKELLARRRQLIAELVAETNRKPRAGKLVRKSIVQNIKWLKRLVEQVNNQLQDAVKASSLWQTRVNLLMTVPGVGPQVAMVLTAELPELGQLNRRQIAALAGVAPHAHDSGQFRGQRRIWGGRASVRCALYMAALVGSRRNQILRACYQRLLSKGKARKQALVACMRKLLVILNAMVKHDRAWQLPQQQFSPCPPNHA

SEQ ID NO: 379001 - protein, 343 aa, unidentified
MQSVTTIGLDIAKSVFQVHGIDAEGNVILRRQLKRRYVLAFFQKLPPCLVGIEACASAHHWSRELQALGHTVRLMPPAYVKPYVKRHKNDAIDAEAICEAVTRPNMRFVATKTREQQSCLTLHRTRHLLIRQQTSVINAIRAHLAEFGIVAPVGRNGVDQLLGIVADASDKRLPELARACVAALGAQLGTLKAQILQFDRLIMAWHRSSEASRRLDDIPGVGPALATALVATVADARAFRSGRNFSAWIGLVPKQHSSGGKDRLGSISKRGDRYLRFLFVAGALAVIRYAKIHGTKHRPWLTALLARRPTKVAAIALANKIARMAWAIMAKGEPYKEPVALAA

SEQ ID NO: 379002 - protein, 370 aa, unidentified
MSIKRILVNTIDTDLEYEVIGIDLAKNCVSAILLTTDGEIFGIDRLDYQELEKSAQELSPTIFAMEPCTEMNYMVQKLEDWGHHCIVISGKNVKDYVESHFSNQKTDLNDAQALAFLTKDTQLRTVKAKDPEQLKYASLTTLREQYVKQYRQTMVSLNGICQVWGLSISKGISGKARLKDMIENHAAFPAELRTALVGMVAHAQAVQKDLKSVTKILEELAKKDKACQLIQTVPGLGTICSCRLRATVGDIQRFKHPKDFPAYYGLVPRSMATGHNEKKGKITHRGDKTMRSLMVQGAGIVINQATKGNLHSKQLTKWILKKQKEKMPWGKLVCAVAAKLLRIVRAILISGKPYNPKIAGVAKCSLPKAS

SEQ ID NO: 379003 - protein, 404 aa, unidentified
MYYLGIDIAKKKHHTVLLDSEGEKVGKSFSFDNSQEGTNSLLQYIKERGITKNEVLIGMEATGNFWENLYSFLTDREFKVIVLNPHQTNKFREAIRKKAKTDDIDALVIAGLLRSNEYSASYIPKESIENIRELVKLRYGFKKDHRNYKREAMSLLNLVFPEYSKTAIKNPFTIAATAILTKYPTAKHLAAAKPKKIEKIVRSIKGNNFNIKEIETLIATAKASIYSGRSAEVRAMKLRMLLSHIESLNKSIETINKHIEDILSPSSDKGSFPGQNLFTIPGIGPKTIATMLSLVGDTGATFENGTKLVGHIGFFPQIFESGETKYANKISKKGPKYARWGLYMGAVACVRHNKEMQYLYYNKLSQGKTEKQALVCVAKKITHMMLSMLKSGENYRPGRVFMIC

SEQ ID NO: 379004 - protein, 467 aa, unidentified
MTLTLGIDVAVRAAHQATLSRDGKTVWRGRKFMTRTEELERVWADAGVEDPAELTVVLEPTRNAWIVIAEWFRRRGAKVVMVPTTQSADLRKYYSKHAKNDRIDSELLARLPLLHPDGLREYSGQGPANPLRRLVKQRSTMVKPRTAVYARLDALIELLGPTWYAVLGSNYGNAALELLARYADPHAVIRLGQARLARFLATRSRGNWRDEHAAGLIAAARETLALWNVEGTDGMDFAELSADIAHEAEQALFLTRQIKAIDERIANLYTDADPQGIVASAPGVGPTISAVIAGRIGDPHRSTSLAAIRAYTGLIPKVSQSGVVKTESSITKAGDPLLREMLYTAADQARKVDPQFAAKYQRLMAGDRHHDSAICHLATMLVTRIATCMRAGQRYQLRDIDGTAITESQGRVIIKQRYQLDPRQRDHARHKLMHKRRNKAGQASQESPSAPTSQPAKPKPTTSPQVA

SEQ ID NO: 379005 - protein, 412 aa, unidentified
MLRLAPENCFYIGEYIMENTKIKTSEKEVVGVDLHADQFTAALLTGDAAAEAERQWTHHAVDNSQWEQWLKHSVPRNAVLVMEAGSNSFEFASAAEKAGYKAVVLESERIGQLSKSYCKTDKVDAVKLARIYLSGLAPEVWQPDALTRQRRELCSAYNRAVTDATRSTNRLKNYLTAHGIRLSKKKLNSENTRAWISSAYNWSPLQQEVLEGMFSDFDHAHHRRAELHKTINREALNCPEARTLMSLCGIRARTAFEMVAVIGDIRRFSNAKKLVAYIGLNPTVNESGKTAKGGRVRKRGCKPLRAKLIQAAKSFMNAKNNGDNPVKKWGLKMKMSKGANKAVAAVARKLVVAAWYLLNGAMPKNLTTEEQIRRKLKKLTEEMTAKGVKAMGYRNASELIEEHLQCFSLLTT

SEQ ID NO: 379006 - protein, 368 aa, unidentified
MEWTAPHGIGVPEWWSSDYQTWEPSMDQITTVGIDLAKSVFQVHGVGATGAVLLQRRLRRAHVIAFFAKLPPCLVGLEACATGHYWARQLRDLGHDVRLIPPRHVKAYVRRNKNDRADAEAICEAVTRPRTRNVPIKSEAQQAALMMHRARDLLVRQRTMLVNALRGHLAEFGIVTPQGLGHVATLAAVVADKNDMRLPGSARATLAVVVAQISAVDAAVADLEAKILTWHQGTDTSQRLATIPGVGPLIASAIVATVPDPSVFRSSREFAAWLGLVPRQNSTGGKERLGSISKQGDRYLRRLLINGAFSALRSKHGRADPWFVALRDRKPPLVAAVAVANKLARIAWAVMSRGEAFHRPHRAEAAAA

SEQ ID NO: 379007 - protein, 341 aa, unidentified
MKNLFIGVDFSKEKVDVAIFFADGLTETAARVFNEFKTTVSGYKLLVKWVEQNSYGIDSSLWLFCGENTGDYSKGLCNFLYGKGYDMWLENAKSIKDASGLRRLKSDRADASMIAEYAMRNYDKAIMYEPLSESLAQLRELFLYRQMVVRHRCSFQVRRGEKRLTMEKSPVKTMISQSGRHIVSELNKEIEKIDKRIAELIKSDEELTEVYTIVTSVPGIGTQNAVCMMVYTDNFRRFNYDSRKIACYYGIAPFGKDSGTSVHSDPRVHYMANRQIKAMLTQAALAAVNFNPVIARYYMRLVERGKKKQVALNNVKNKLIHLITAMVRNRQLFSPEYKISA

SEQ ID NO: 379008 - protein, 467 aa, unidentified
MKHNQQRARSGKKSRGSISLLERIQPDAAGIDCGQNSHFVAVPPDRDPQPVREFRTFTAELHRLADWLAQCEVKTVALESTGVYWIPLYEILEQRGFEVLLVNARDVHNVRGRKSDVKDCEWLRELHSVGLLRASFRPAATIVPLRSLMRQRQTLVEEAATRIQRMQKALTEMNLKLHTVLSDLTGQTGLKIVRSILNGQRDPEQLAAHRDHHCHASHQEIVAALTGNYRAEHLFALRQNFAAYEFHLQQIAECDTAIEKLLAKLAEQQPPPSGPLSAPRRKRGSKHAPTFDIRTLLHRLTGGADLSQIHSIGPHAALQIVAEIGTDMRRWPTEKHFTSWLTLAPNNKVSGGRLLTSRTPPSANRAAVILRRCAMSLGRTSTALGAFYRRLAARTGKAKAITATARKLAVLVYRVLSGDFIYNDPGAAAYHQLNRARELKSLRKRAKLLGYQLVNHSTGEVLSIPVS

SEQ ID NO: 379009 - protein, 349 aa, unidentified
MRTKPQPNAATYGVDIGKKIFHVVALDADGHPVQRAKFSRETLLRFFEAANTALIGMKACAGSQWLARKLTALGHNAKIIPAKFVKPYVKSNKSDTIDAEAIAEAVTCPTMRFVQVRSEAQVDLQALHRIRDRLIRNRTGLMNQARAFCIEYGLAMRTGAGGFHADIRRHLANDQNDLTSAMRNLLTDLLDDLAHIEKRVAKLTKEIEAIAHSDETVRRLLTIPRIGALGATALVAAVGDGRQFRKARDMAAWLGLVPAEHSSGGKQTLLGISKRGNGYVRRLIIHGARSCFLHLHRETHALGRWLSALEERTHRNKAVVALANKLTRIAWAILTRPGDNYLRTKGAAA

SEQ ID NO: 379010 - protein, 428 aa, unidentified
MNQSIAEASCQGVAAYIGIDWADQKHDVVLRSASQAHKVEHHIIEHKPGALMEWVGQLQQRFGGQGRILVCLEQSRGALIYHLMGYELFELYPVNPLQLARFRETFSPGGAKDDRPDAALLCELLYCHRDRLRAWKPDTVLTRKLAFFNEGRREAVDQRTGLSNAIKSQLKVYFPLALELLNQDTSTTLAAELLLRWPSLEALQKQPPHQLRKFFYAHHCRGEATMLRRLQLVQQGQPLTQDSAVIEPAAFRVQMLARQLKSLLSDIAHYDRKIAQLFAAHPDRFLFENLPGAGPALAPRLLSALGSDPKRWESAQEIATLNGIAPVRRASGKKSGKKASVHFRQACPKFLRQSFHEFAGCSIRYCGWARAYYEAQRAQGKGHHVALRALAFKWIRILFACWKQRIPYDPQRYPQALQQRGSIYGNAC

SEQ ID NO: 379011 - protein, 386 aa, unidentified
MPKPNDLSRSFTAFEQDSTLIAIIEMSLTSWLVAGILPGIERHPLKKLDIDEEALLQLLHRWRGEAINAGRKITRIVLAFEAGRDGFWLARWLRARNIEAYVIHPNSVAVSREHRRAKTDRLDTELLKRVFLGWLRGESDHCSMAAIPTLGEEDARRPNRERENLMGERTRIVNRIRACLVRFGVRNFKPTLRKAPKRLEALRTPEGGPLPPNSCAELRRDMMRLRFVMGQIKEIEETRLQKLENAPNEGPHAMVRLLARVIGVGIETADMLVHEILSRNLRDQRAVARYAGLTGSPDESGKRRRERGLARAGNARVRRGMIQLAWRFLMFQKESALTQWYRSVTNEARGAIRKTMIVALARKLLIALWRMVRTGEIPQGVALRTA

SEQ ID NO: 379012 - protein, 523 aa, unidentified
MRQDRALLTACCTDMSAGAFSVQVQAFHAINPVGFLVVNRPSLPAQLNMNTRATVAYPGFRYFPDTQGYRPIVTPALPVVNGSALHQQPASPPDADTISLQQKMSPPGASEPASELLLQYLLQHLLVQTQLSDQLLQPLILILQLPQTPQLRHAQPGKFFLPVNGMDYLLPLRLTVRNVLTRRITMNIVFLGIDLAKNVFQLCGLNQAGKPVYTKRTDRKELLQTLANIPACLIGIEASTGAFYWQREFEKLGHKVKVISPQYVKPFVRGQKNDGNDAQAIAVALMQPTMQLVPPKSPEQQDIQALHRARQRIVNHRTATVCQIRGLLLDRGIPIGSAVSRARRAIPLILEDAENGLSSRMRRTIAELYDLFNDLERRIHFFDKEIETVFRQSEACQRIAKVKGIGPKTATAVVAAIGKGTEFKNGRHFAAWLGLVPRQHSSGDRQVLMNMTKKGDKHLRTLFIHGARAVVRVATNNNDGHMNQWVNQLKERRGFNKTTVAVANKNARIIWSMLRNETEYQVV

SEQ ID NO: 379013 - protein, 382 aa, unidentified
MRNESTPGARGPVFCGVDTHADSHWLCVLDWRGRRVLSRRFPADAAGYEALAGAIAAAGEPACVAMEGTSSYGAGLTRHLASLGMPVREALSPARTQRRRPGQGKCDEADAERAARAAMSGSRLGTPKSQDGWVDGVRCMLAARSGAVKARTSAINTARSLLTTAPEGLRSRFRGMGGPRLMEELPSVRAEGALGAALGALADLWAAARDAALDMERAIEASLEENCPALLAMYGCGPVSAAKLAVAAGDNPGRLRSEASFAAICGACPIPASSGKTVRHRLNRGGDRQANSALHEIARQRVMRDPETAEYAERARGRGKSDREVMRCLKRYVAREAYRALMRPHEIRRAYEAWVEAGLPLNWDRQAFEAERKMDSKKHLAK

SEQ ID NO: 379014 - protein, 403 aa, unidentified
MVFVGIDWAEEHHDVCVIDATGQVLWRHRIGHHPAGVRTLREAIAGLEPDPAQVAVGIETGRGLLVGALVDAGYVVFPINPKAAERFRDRRAVSGRKDDRLDAEILAQAVRSDQASLRALLPDSPEAVEIATLARDHANLTRQQTRLRNQLRSALLEYFPAALGAFALNTQSALAFLERYAEPDAAARLSVAQVARFLRAKRANRDADAKAQTIVEQLRAPALRARPEIARAKARLVRTLCTQLLALYPAMQAYERELADLLKRHPEGELFLSFPGLGVVLASRVLAGTGDNAERFVSGYGPYAGTAPIVVQSGKRRVVKARFAAPKYFRDAAQQWADQARRWSPWAAAYYARHRARGHPHNESTRALADQLLRLLFDLRRLGVHYDEAVHVANVERAATRAA

SEQ ID NO: 379015 - protein, 361 aa, unidentified
MAQVRSWAGLDVHARSVVAVTLDGASGETRSRRLPGTTSEVVAFCASLPGPTRAAYEAGPTGYGLARALHAAGIGCIVAAPGKIERPAQDKVKTDQRDAERVLRLLMIDALHAVRVPTVEEEALRDLVRAREDLRGDLMRARQRLGKLLLRHDIVYDETASTWTAHHRAWLGRIELGGGAQLTLLDYLGAVDALVIRRGVLEASIDEIVPTSPWAQTVARLRCLRGIDTLSAVGLCCEVGDFERFERPGRLMSYLGLVPCEDSSGPRRRQGAITKTGSRHARRLLVEAAWQYRKRPARGKTLERRQDGQPAAVIAISWQAQQRLHCVWRRLEGERGKRRTIVAVAVARELAGFCWAIAKAD

SEQ ID NO: 379016 - protein, 320 aa, unidentified
MAMTVSQSIIGVDVAKAEVVIYQTETDELKIVPNTKTKLKAWLDTLPAGSAIAIEATNIYHLQTVTLAHSMGHKVYVVDGFRLNHYRKGTGGRAKTDASDARLLARYLKNEQADLRVWSPPPKIYTRLQSLLRRRAALVKTRIALNQSWAGEPLLKASSKSVSACLERHEALIEKRILDAVTEAGLLHQVKRCQAVEGIGFLTAVALTMAFQRGEFESADAYIAFLGLDLRVTDSGQMNGRRALSKKGDGEIRRLLHNAASAGIRSKAWKPLYEGYLARGLKTTQALVIIARKLARIAFSLMKNQSEYQSKAVLEASPQP

SEQ ID NO: 379017 - protein, 411 aa, unidentified
MIKQVRNCIQTTVYKTTYGGDTMYLIGIDISKYKHDCFIATEAGEIIKDTFSFTNNQQGFTEFLEVLQSLDPNQTKRIGLEATGHYGRNLKMFCDKHGYTYMEFNPFLVKKFSSSLTLRKTKTDKVDSRLLSLILLSVEYKVYPVKSYHIEEIKSLTRYYKVLTKKRSKEIVNLTNILDYTFPEFKPFFRNKFSKTALFILENYQTPEKISNMNSKSHEKLHNVSRGKFSYARFVRLKILAKETIGSSSLVLNSQLQSSIRVYQVLEQEINITSDQLLDLSKDIDSPVFSIRGIGPISALSIISEYRNFTSFNSPAAMLSFAGLEPSVIQSGTIEKKGKMVKRGSGYLRETIMNVAPFFYMYNPKVYDYYHKKRNEGKSHRVALTHVAKKLIRIIFHLVKNNESFDDDKLK

SEQ ID NO: 379018 - protein, 432 aa, unidentified
MNLTTSTKTPTTQPSTQGAAPPPAAWIGLDWGDKSHAFALQDRSGKAESGTLEHSAENLHQWLAGLANRYGSGPVALAIETSRGAVVPALLEYPWLILYPINPVTSARYRSAFTPSGASDDLPDAQVLLELVRDHAAKLRPLETQDPITRELAGLVEARRKMVDQQTALLNELGSLLKTYYPQALGLLEDLNTHLAVDFLSRWPDLISLKRAKPATVKRFYYAHQVRSPELVQERLAFIAQARALTTDEARVSVAILQLRQLLDQLRVFHKHIPELNARIKAVFATHPHASLFRDLPGAGPQLAPRLCAAFGTIQGLYPDPASLQKYAGVAPVREKSGDRVWIHWRWRAPTFLRQTFVEWAGQTVRYSAWAKVYYQRMVQKGKHHAAIIRALAFKWIRILWKCWHDHTPYDEARYLKQLLHRKSPNAVHPQP

SEQ ID NO: 379019 - protein, 349 aa, unidentified
MNNLNTIGVDLAKNVIQVSVVSVRGKELRNSALTRRKFAEFLVRQKASLVAFEACATAHYWARVAQRHGHEVRIIPARAVFPFRQGHKTDQNDALAVAEAAVRPNVKVAPLKTVDQQGLQAIQRSRELLVQNRTALSNHIRGLLMEFGVVIPQGFAALHRQLPEILEDGENELPDLYRPTLHLMYGRLCELRDDVKQLNTEIETLVKQNPSCQRLTALEGVGPIGSVLLYATLGTGEAFIKGRQFSAYLGLTPKQFSSGGKANMVGISRRVANKRLRAVLIQGARAYVHRIKEPKTAKDRWLLALIERAGHGKAAVALANKNARTAWALLTEGTEYDRTRGVESQSASA

SEQ ID NO: 379020 - protein, 424 aa, unidentified
MNNTQNQKIAQVTDKTLIVGVDIGSENHYARAILARGFEVSKKPFPFTNTEEGFESFVNWTHNLATAHKLTKIMVAMEPTGHYWFAFVAFLKKYDVQVVLVAPQHVKHSKEMDDNTQEKDDRKDPIVIARLVPEGRYLIPYIPEDAFAELRVAFNRRCELVEEQVRIANRMIRWFDIYFPEYRKIYGRIDAKTGIMILKRAPLPADILDIGVDGICQIWKDAKLRGYGSKKAKQIYSAAEHSVGMKGGASVRWKLWQLLEEYELIERQLHDILQLIEGLLYQIPGADKLLKIPGAGLVTVAGFLSEVGNIKRFSDPKQIQKLAGLAVVENSSGKRKGLPGISKRGRSRLRWVLFQLARSMVMFNPEMKAYHQYYTTRKENPLKKLQSLVAISARIARIFYGILKNGTEYDPTMVMKDFNKTVAA

SEQ ID NO: 379021 - protein, 362 aa, unidentified
MIIIGCDYHPSGQQVFGIDTESGEVVADRWIAHVGKELDEFYSALPAGTVVGAESSGNMQWFERRLQQYGHRLRLGDAAKIRAQETRKQKHDRRDAELMARLLVEGRFPDLRWVPTLAERDQRQLLLHRHKLVRMRAQVKNQLQHIALNQGEQKKRQLWTKAGRELLEKLALDPWTARRRDDLLRWLDQLNCDSEGLERAVEQAAKARADARLLMTHPGIGPVISLGFVLSIGPIERFERSRQLVSYLGLNPSEDSSGARRRLGGISKQGNSFMRMLLIQGAQTAVRGDEMLNRQYRRLASKKHRAVAKVMVARKLAVRMFWMLKTNKTHAELVRMRGSSSHSGVSTTDYLSERPASSRIQP

SEQ ID NO: 379022 - protein, 346 aa, unidentified
MYYIGVDYHKRYSTATVMNAREEILLQQDMPNTLAAFRALLAPFQPAIAAVEATRNWSVAVNILEQLFDDVRLAHPADTKIMVKRLSTDKIDSRGLARLLVHNLLPEAYLRDKPNRDNQAILRARSFFVQQRTRVKNRIHDLIDRQAEPIREQTRSYSDLFGSQGSTWLKSLELPVPYNKLVNQLLASLENLNAQVSTSDKLVKELLAVDAEAQLVYTVPGFGPFFSVLVRTEIDDIHRFPDADRLSSYAGVVPWTESSGGKVWHGSLIKQSNRWLRWAFIEAAIPAIVADEGLRRLYERYRKVKGTKIAKVVVARRLVRIVYQVLTQKRAYYPSPVASGRKPQEQ

SEQ ID NO: 379023 - protein, 470 aa, unidentified
MSRSRSPDPFAQGEIRSTEGLPVVNPHAAGADIGAESIYVCIPGPGQTQIVRSFGTYTADLHAIADWLVENGIQTIAMESTGVYWIPLFEVLEERGIHCCLISGNLARRLPARHKTDVLDCQWIQTLHSLGLLTESFRPDADLIALRSLLRHRAQLIEHRSPHVLHMQKALIHMNIRLDQAVSDVTGQTGLAIIRAIVAGERDPHKLAALRNPRCKKTEDEIAQALTGTWREEHLFVLKQSLEFYDFYTRQIEACDLEIERTYSAIRPDWPDPAPDDREPLPPNKRGSHSKNLPKETPIRVRQHLRRLTGVDITAVDGLSLDLAQKIVSEIGTDMSQFPTVKHFTSWLRLCPNNQVTGGKTIRSSTGKSHNRARQAFLQAAASVACSDCAFGAFYRRLKARVGPAQAQVATAHKIARVVYHMLKFKVEYLPTSAQEYEQQFREREIRHLQRKAARLGFTLSPQPASGAVS

SEQ ID NO: 379024 - protein, 312 aa, unidentified
MEKLSYGGIDVSKDRLDVVVLPEERFFSVSNDAAGWAELVARIRPLAVSAIGIEPSGGYERGIIRALLAAGLSVRRINPNKLRQFARARGVLAKNDRLDARLIAEYVAIMPTRVVQRDEAVEKLAEVVTMRRQLRDEHVTVENQAAPIEDAMLRRLNKRRLARLEADTRLLDKRLAEMVATNAALAQRYELLTSMPGVGPVLAFTLIALLPELGQMSRKQIAALVGLAPYDFDSGKLRGHRSIYGGRMPVRNVLYMAALSGCRYNPALKAFHKRLAAADKKSKVVIVAVMRKMITTLNAMLRDNVEWQPKSA

SEQ ID NO: 379025 - protein, 637 aa, unidentified
MLPAKSLTIRTCCRVADFPDLHINLVFLGLLIVILILILISKLETLHVLRLFAANLTIDHYPLSIVSCVNLPFPLQMANFIQLLRHRMTKTSNMLPICSSCYRLSRWLSTPKAFGVTVLPIFWTDTISKVIQPAARRAYGSSPQPTVNNFGAKKNLPPVIKSAGCNATSRSRSFWTHAVSVKIGTPVGSCQLAQRSERTLPHEGHRIGLTKRSQAVRQRNTPMKTFAELTHFVGLDWAKDHHDIVIVDRQGQIVAELTFLHTAAGWQQWQQCIQAFPALGVALETSSGPAVERLLESGVTVFPLHPKSAKAYRERKAPSGTKTDRLDAWSFADGLRTDGHAWRALAPLDPLVQELRLLCRDEVELITQRTALVNQLQQALNEYYAAALDAFDDWTAPYAWAFVEAFPTPEALARAGQRRWVNFLHAHKLYRPQTAPQRLAQFAKAREFCASPAITRAKSRLAVSLAKTLLTLEKQLEQYRAAIEQLFAEHPDHDLFGSLPGAGNKLAPRLLSEVGQDRHFFDGLPGLQCVAGTAPVSFHSGQVRRTRIRWHCNKHLRYAVHLWADCSRKYCLWAQTYYKAHRDKGHTHASALRRLGNRWLKILWTMWQEGKTYDSERHARHQQQHGSWLLQLAPAKS

SEQ ID NO: 379026 - protein, 345 aa, unidentified
MQGKESSEQKAKVKSSAGIDVCKSWLDAHVLPEGCSLRVVNDARGHRRLIAWLSQYAVSLIAIEATGKWHRQVHRMLHARGFQVAVVNPRRARLFAEAIGLLAKTDRLDARMLALLAVDLSPPARAPAPEAIEALQELVAGRDSAVAEQTALENQLAAATTTFFTRQLKARIVRIAKDIASLQTEIERRIGCDEALARRYAILISIPGVGPVTAATLIANMAELGTCSTKQIAMLAGLAPVADQSGSREGRRAIRAGRAAVRRVLYLCALAAKRCNPAMTALYTRLMAAGRPHKVALVAVARKLIVLANTLIVQNRLWQSNHQSRLDNEHRCFPIATLPRCDRRE

SEQ ID NO: 379027 - protein, 345 aa, unidentified
MDKVVAGMDLHSNNVMIGVMDMNGKRLASRKVPCELGEVVKFLAPYKKRLERVAVESTYNWYWLVDGLQFLKYPVVLANPAGMAQYSGIKHADDTNDAFFLAELLRLKILPSGYIYDANLRPVRDLFRRRLMLVHQRTALMLSFKSLYTRTTGQEMSLSELKALEIKEAQGLYDHPANQLIAGMQIKHIEQLNESVDKIEKAVLASARELPCYAKLTTLPGVGKILGMTITMETGEISRFVSAGNFASYCRTVQAQRISNSKKKGENNSKCGNKYLAWAFVEAAHFARRYDEPCRKWYDRKAAKTGTIIATKALACKLAKAAWFVMAEGTDYDPKRMFGQSATQK

SEQ ID NO: 379028 - protein, 350 aa, unidentified
MLIIGCDYHPGFQQIAFMDTETGEFGERRLEHGEGEAEKFYRGLQQAGIRVRVGMEATGHARWFERLLEELHFELWIGDPLEIRATRVRKQKTDRHDAQLLLKLLLEDRFPRIWVASWENRDLRQLLWHRHRLVQMRTRIMNQLQAVALNEGVRQKKRLWGQAGRAQLESFVLAPWASRRRKELLELLDRLNPSIRELNAAVEQEATRRPEVQRLMTHPGVGSLTALAFVLIVGTPQRFACGKQIASYVGLVPTEESSGGRRRLGHISKQGNSLLRFLLMEAAQATVRSDPDWRRKFLHLAMRRERAIAKVAMARKLAVRLYWMWRKEWDYEQVKRFGSHAGQPGNPLGV

SEQ ID NO: 379029 - protein, 344 aa, unidentified
MNTIKVVGIDIAKSVFQVCVWMADGSVAWNRKISRQKLLHTLRQFPPQTLIAMEACSTSHFWGRALISMGYDVKLIPTQHVKAFARHQKNDANDALAICETACRPGIHFVSVKTTEQQDIKALRSARQLIVEQRTALANQLRALLAEYGVIIPAGLQRLQRQLPEVLEDGDNTITFTLRRLLSLLREDMQMLTERIDVLDKELAELSSQQVAYHHLLTIPGVGPLIAAAVVSEIDATQFSSGRELSAWCGLVPRQHSSGGKQRLSSMTKNGNRNLRTLIIHGARAVMRCVQKRDDSLGRWVKAIELRRGFLKATVALANKLTRIIWRVLTDSVDFRMSRAFAGS

SEQ ID NO: 379030 - protein, 346 aa, unidentified
MDEITTVGLDLAKRVVSLCGENGSGRVVVQRTLRREAVLGWFRQRPTCLVGMEACASAHWFARELAALGHTARIMAPEFVRPFRLSGKNDAHDAEAICAAVRQPQLRFVTVKSAEQQARLVVHRLRQGWQEERTAGLNRLRGLLAEFGRVYPNSATAALAGAQAVLADETLPPALRRGVARQLEHLRELDTHLAHCDREIAQEARDDPRAQRVARLSGVGVLTASAVAAMVADPGQFRCGRQFAAWLGLTPRQYSTGGKSRLGRITRRGDTYLRGLLVQGARSALQAALRAKPERRTRLAAWIVAVYQRIGYHKTLVAIANKHARLIWVLLTRDEPLRVHAAVNCN

SEQ ID NO: 379031 - protein, 367 aa, unidentified
MLYVAIDQHAKQITVAIRNDQGEDVLKRQVSTRPEKIKGFFDRVVEMDEFMAILESCGFNDWLIEELRKRDCREIVLIHPERPSKKKTDRRDAQKLCDLLWLNRERLAEKKPVHGLRRIYIATKQEQEDRQVTTLRQGLGRRRTRVLNKIQRILHRYNLMWQYPTKSFQTQAGKAWLQKRSLPEMDRFELDLLLEEWASIEEQIKQVDAKIVERASRSEPGKVFAPTQVLMTAPGVSYYSGLGLASRIGPIERFPRPRSLANYFGLTPSSRNSGEAKDRLGSITKEGSKFARFLLGQLVLHFLKKDPKMREWYRRIKMRRGSKIARVAVMRRIATIFWHMLKYQEAYVIGGPPPRLRQQVAAGTPAA

SEQ ID NO: 379032 - protein, 392 aa, unidentified
MSQHFRFDASRSLTALKQDSTIVAVIEMSQTKWLVAALVPGVERQPLKKFDAQEEMLLKLLHRWRCEAGKTGRNIKRIVVAFEAGRDGFWLARWLRARDVEAYVIHPTSIAVSREHRRAKTDRLDAELLMRVFLGWLRGETRHCSMVAIPTIEEEDARRPNRERQNLVTEQTRIINQIKAIFARFGLRTLRPTMRKLAEGLEDLRTAEGTSLPQNTLSELRRHLARLRFVRDQIRAVEQERLRKLAVAPAAETKSPDAMVRLIARVFGAGIETADMLVNEIFSRHWRDRKAVARYAGLTGSPDESGSRRRERGLARAGNVRVRCGMIQLAWRFVRFQKNSALAQWFAARTADGRASTRKTMIVALARKLLIALWRLVTRGEVPQGIVLRPAS

SEQ ID NO: 379033 - protein, 338 aa, unidentified
MKLYGAIDLHSNNNVTVLIDEQDHVVYQKRLPNDLPLITQQLSGYQDRLQGIVVESTFNWYWLVDGLMEQGHRVHLANTAAIQQYEGLKYTDDHSDARWLAHILRLGVLPEGYIYPKEERAVRDLLRKRGQMVRQRTTNLLSIQNLITRNTGNSINSNRIKTLEAQQVDDLLPNPDLALAVKANLAMLKCADEQIDILERLVTERIKLRAEFCFLKTTPGIGQILALTIMLETGVIQRFPTVGDYASYCRCVGSQKLSNGKKKGKGNTKNGNKYLAWAFVEAANFAIRFNAKIKSFYQKKKSKTNGIVALKAVAHKLCRACYYIVKEQVPFDITKAFA

SEQ ID NO: 379034 - protein, 369 aa, unidentified
MEKDTINVALDDSKRKLAVAILRPGATEPEEREIAKDPPQIQRLFRRLEREGPVQACYEAGVSGYDLYRQITACGVTCQVIAPALTPRRPGQRIKTDRRDARKLVRLLRAGELTPIHVPDEAEEAARDLVRCREAVRRDVVRWRHRLLKLLDRHGRLWVTEKNWTQRHWTWLRAQHFELPALQRAFEATVFALEQALARQAALDQEIAALADTAPYRDPVGWLRCFRGIGTLSAMVLLAEIVDFQRFRRPRELMAYLGLVPSEYSSGETHRRGALTKAGNTHARRVLVEAAWHYRHRPTVGRALASRSQAQPDEVVGQAWRAQQRLHRRYRHLVGHGKRPPVAVAAIARELVGFLWAAMTRRETRRQVA

SEQ ID NO: 379035 - protein, 348 aa, unidentified
MSKHSVPASDVPGLLRRFAELRRKAAARTGRDFPIIVIQEAGLDGFWIHRVLQSEGIESHVVDAASILTSRRRRRVKTDRIDGETLVRTLMAFKRGEPRVCSMARAPTPQEEDRRRVCRERRTLMGERVKHVNRIKGLLFAQGVFGYEPLRKGRRERLEDLRTGDGRPLPMHLKAQLIRELDRLEVLLEQLKTVEAERDALLKPATAEAVSPAAMLARLKGIGPETAAVLWSEGLFRQFDNRRQVAAYAGLAPTPWQSGSIDHEQGVSKAGNPRLRTTMVELAWLWLQNQPTSALSLWFHERVRRLGGRMRKTTIVALARKLLIALWRYTTAGVVIEGAVMKAAPATI

SEQ ID NO: 379036 - protein, 429 aa, unidentified
MQNESAPGARGPVFCGVDTHADSHWLCVLDWRGRKVLSRQFPADAAGYEALAGAIAAAGEPACVAMEGTSSYGAGLTRHLASLGMPVREALSPARMQRRRPGQGKCDEADAERAARAAMSGSKLGTPKSQDGWVDGVRCMLAARSGAVKARTSAINTARSLLTTAPEGLRSRFRGMGGPRLMEELPSVRAEGALGAALGALADLWAAARDAALDMERAIEASLEENCPALLAMYGCGPVSAAKLAVAAGDNPGRLRSEASFAAICGACPIPASSGKTVRHRLNRGGDRQANSALHEIARQRVMRDPETAEYAERARGRGKSDREVMRCLKRYVAREAYRALMRPHEIRRPEDASGLVAARRAAKVSQVRAASILGTSEKYISMLERGQRELKPIRRAYEAWVEAGLPLDWDRRAFEAERKMDSKKHLAK

SEQ ID NO: 379037 - protein, 341 aa, unidentified
MGHYVGIDLHRRRSVIVVLDEDGEELWTRKIDNTPENLAAAIRDAGPDPEVVIEATWGWYWAADVITEAGGHVHLAHPLGIAAFENRRVKTDKIDARLLADLLRMGMLPEAWIAPAPIREQRELVRYRRKLSQLRAGLKTQVHAVIGKEGLIPPVKHLWGPGGKDWLDDTQMAEAFEDRLRSLRRLIKTYDNEITRLDARIAGVFKGHPGYETIQQIHGVGPVFAAIFVAEIGDVTRFDNARQISSWAGMTPRHRESDVKAHRGAITKQGPRLVRWAAVEAVSRNHRIEPIHDVYVRVGQRRGVNKGRVAAARKLLTLVFYGLRDLEVRCLDIAHPTTEAA

SEQ ID NO: 379038 - protein, 376 aa, unidentified
MPTNVPRASHSGHLEDTIMIGNTDIIIANVGVDIGKNAFHICAMNAKGTIVLRERLTRTALPKRLANILPCLIGMEACAGAHHIGRKLASLGHDVRLMPAKYVKPFLKGHKNDYRDAEAIAEAVQRPTMRFVPFKSDEQLDLQALHRVRSRLVGQRTAVINQIRAFLLEHGVPVRQGPGALRQALPSILAQRTDTLSSRIIRLIEGLIDDWRRFDQRIADVTSEVEQLAKQSENCKGLMSVPGIGPITASAMVAAIGDGSAFSKGRDFAAWLGLVPKQISTGDRTILGGISRRGNSYLRTLFIQGARSVLQRFEGWEKKSFGRWLIAASKRLHKNVLAVALANKLARIAWSVLYNARGYDATYAKSGMTTVAASQK

SEQ ID NO: 379039 - protein, 411 aa, unidentified
MITCGVDWAEDHHDVALVDESGKLLAKRRIGDDVNGYRQLVQLLADVGDRAEEPVPVAVETARGLLIACLRTTGRKVYSINPMAVARYRERRTVARAKSDHADAMTLANILRTDAAAHRPLPADTELVQAIAVLARAQQDAVWNRARLSNQLRSHLKQYYPAELAAFQVKGVGLDSREARAVLAAAPEPAAAARLSAPRLRSVLRKAGRQRYIDSWVERLRPIFAAEQLHQLPAVEQAMGRQTLALVSQLDAACRAADDLAEAAAAAFAAHPDAEILISFPGIGPVTGARVLAEIGDDRARFRDARGLKAYAGSAPVTIASGKSLVVRNRKVKNQRLAAAGYLWIFGALPSPVIKEHYDRRRAAGDRHAAAMRNLFNRLLGCLHHCLQTGQPFDLDKAFPTPALQPEVVAA

SEQ ID NO: 379040 - protein, 343 aa, unidentified
MGEVSTIGLDIAKSVFQIHGVDAGGAVVIRKRITRAKLLEFFAALPSCLVGVEACPTAHYWSRQLGALGHTVRLLPPSYVKAYLKRSKNDANDAAAICEAVTRPSMRFVATKSEQQQSGLMLHRSRQLLVCQRTMLSNAIRGHMAELGIISAKGRNGTAELLKIIADEQDDRIPAAARFSLAILARQYAVVRAQIVAIEKRIHAWHRSSEESRRLEEIPGVGPIIATALVAEVGDWKVFSSGRSLAAWIGLVPRQHSTGGKERLGRISKQGNRHLRWLLVAGAMAVIRYARQHGTKRPWLARLMDRRPIKVAAVALANKIARMAWAMMVRGERFKEPKLLPAA

SEQ ID NO: 379041 - protein, 367 aa, unidentified
MKKVSTVTAKPSKKISRQKLTVGLDLGDRNSWYCVLDESGQIQLEQRVRTNAKALREVFSKMPRSRIALEIGTHSPWISRLLSELGHEVIVANARKVRLIGESRKKDDRLDAQTLARLARIDPQLLYPVKHRSAQAQADLMTIRARAGLVRARTALVNTARGLAKSYGERLRGCNVRNMNPEKAESLSPELQAALEPLLNAIESLSERIVESNERIEQLAQQSYPKVALLKQIKGVGTLIALTYMLTLEDPHRFGKSRDVGCYLGLQPGRRNSGQSEPQLHISKEGDPYLRTLLVQGAQHILGPFGIDCDLRRWGLKLAERGGRNGKKRAIVATARKLAVLLHHLWVSGDVYEPLHNSSRTTVAAAA

SEQ ID NO: 379042 - protein, 377 aa, unidentified
MKKNIRFIGLDVHAETIAVAVAEANGEARSLGLIPNRAEAVRRLVKKLGPAESLQVCYEAGPCGYVLYWQLSELGVHCDVVAPTLVPVKSGDRIKTDRRDALKLAHNHRSGDLTPVWVPDAEHEALRDLVRAREAAKKDQLRARHRLQKLLLRRGLRSPEGIRAWTVRYLTWVKTLQLEPAALAATLLDYIAEVDHAHERIERLERAIDQAIEAAPDPIRAVIEGLESLRGVARISAATIVAELGQLSRFARAKQLMGYAGVVSSEHSSGERIRRGAITKTGNAHLRRILVEAAWAYRHRPYLGGELRRRQKNASERVKEISWKAQHRLHSRYARLMGRGKTKQLAMTAVARELAGFVWAVGVEVERQLALRPARAA

SEQ ID NO: 379043 - protein, 326 aa, unidentified
MSNILGIDVSKDKLDLVLLNEEGKLHKVISNDLSGFKTLDKWLISRHIDQVHVCLEATGQYGAEVSEYLYGQGHDVSVVNPARIKRYGESKLHRNKTDKADADLIAEFCLKEKPALWEPLSPDLKHLRALVRRLHDLQANYQQEENRLSSGEKDAWVIQDLSVHAEYLKARMEATEEEIQNFTNQTPGLKAKQELLVSIPGVGKKTSARLLAELGEISRFENAPQLAAYAGLNPKGFSSGSSVHKKTRISKQGRSELRSCLYMPAIVAMTHNPVVRALKERLQKKQLPTMAIVVACMRKLLHIVYGVLKSQMPFDPDYDRQFNYSA

SEQ ID NO: 379044 - protein, 389 aa, unidentified
METRTVNNPPPATSHDETVRCVLAIELSKKSWIVAVNTPLSDKISRHTVEACDWKELLELIARIRTRVIQALNRPVEVVSCYEAGYDGFWLHRLLEAHGVRNYVIDPASVQVDRRARRVKTDNVDVAKLLRSLMAYLRGEPKVWSVVRVPSVIEEDDRRLHRERDRLINERVQHVNRIKGLCAVHGIYDYQPLRPKRLARLEQLRAADGRELPPRVKAEIIRELQCLELVLNMIKTIEAERDAIASAGKSSAHANAKKIQDLIRLKSIGPEIGTKLVGEVFYRQFNNRQQVGSYVGLTPSHFQSSPMSRDQGISKAGNPKARTVMIELAWLWLRHQPNSPLSIWFRERVGTAKGRIRRIAIVAMARKLLIALWRYLETGVVPTATVLKG

SEQ ID NO: 379045 - protein, 339 aa, unidentified
MKYTPVGVDIAKHLIQVHFIDENTGEVVDKQLRGRDFLEYFSNREPCLIGMEACGGSQHWARELTKLGHNVRLLQARFVKAFVMGNKNDVMDARAIWMAVQQPGKEIAVKTEEQQSVLVLHRTRMQLVKFRTAQINALHGTLLEFGETIHKGRAAMEREFPEALERMKERLPPYLITVLENQYKRLNELDSLIEDIEKQLASVAKQNETCKRLLDIPGVGPLIATAAVATMGEASAFKSGREFAAYVGLVPKQTGSGGKIRLLGISKRGDTYLRTLFIHGARAAALLTKEPGPWITELKKRRPASVAIVAMANKLARTVWAIAAHDRKYDRNHVSIRPY

SEQ ID NO: 379046 - protein, 371 aa, unidentified
MEHIRFVGLDIHKQRISVAVAESGRSGSVEYLGEIANDPAAISKLCDRLGRSGKPLAFCYEAGPCGYGVHRQLTSLGHRCDVVAPSLIPRKPGDRVKTNRRDATMLARLNRAGELTPVWVPDADHEAMRDLIRLRSVVRQVVTRARQHLQGFLLRHGRKHERGTAWRLAYRRWLSTLAFEHPAQQIAFQDYVDAVMDAERRLRQVEEQILSLLPEWNQRPVVDSLQAMRGIALINAVVLVAEVGDFTRFSNPRQLMAYFGLVPGEQSSGETVWRGGITKTGNAHARRALVEGAWAYRMRPRIGRHKVDRIEALPKVVRDIGWKAQVRLCTRYRRLSARGKNVNVVIAAIAREMVGFIWSIACTVQSAPKAA

SEQ ID NO: 379047 - protein, 370 aa, unidentified
MSVRRILAKTIDTDLEYEAIGIDLAKNCVSAALLTTDGEVVCIDRLDYSELEKSAQVLTPTTFAMEPCTEMNYLVQKLEAWGHRCLVIDGKNVQNYVENHYSGQKTDLNDAQALAFLAQDTQLRTIKAKDIEQQKYASLTTLREQYIKQYRQTIVSLKGICQAWGLNISKGISRKAQLRDLIESHAAFPEELRESLVDMVTHAQTTQKVLNKITKTLEVLAKNDKACQLIQTIPGLGPICSCRLRATIGDIRRFKNPKDFPAYYGLVPRSIATGHNEKKGKITHRGDRTMRSLMVQGAGCVIRLATSGKLKSKQLTKWILKKQKEKMPWGKLVCAVAAKLLRIVRAILISSKPYNPKIAGVAKCSLSKGS

SEQ ID NO: 379048 - protein, 338 aa, unidentified
MKTHVGVDLHQRFCYLTAVDASGKMRQQGQVVNEGEALRAWLRQLPGPRQVVVEASGFWPAFARAVAPEQERLVMVHPQRVKAIASAKLKNDRVDSETLAHLSRCDLLPEAWMADEATQQLRLRVRLRITLGRQRARAKNQLQAVLHQEGFKKPVTDVFGKRGRAWLAELELSAAGRLVVDTWLREVDHLDVELAAQTRELERLARADARACCLRTVPGIGAYAAMVILAELGDVERFGSKRALASYAGLTPVVRESAGKRKRGGITHQGSNTLRWMMLQVAQVAARCSPGARSYYAGLRARKPAQVARIALARKMLTVVWALLRHGVCFDEDLFMRG

SEQ ID NO: 379049 - protein, 346 aa, unidentified
MTILEDTRVITGGVDTHADMHVAAALDPLGGLLGVREFPATAAGYADLLSWLTGFGNLALVGVEGTGSYGAGLARHLAAARVRVVEVDRADRQDRHRQGKSDPLDAVSAARAAQSGRAGGAPKGRDGAVEAIRALMVAKRSARAERTQAINQARALLVTGPDDLRARFAGLTAAALAEAIAALRPRPGDAAQYAVRIALRELGRRVEFLDGQLDRLDDLIIPLVTARAPGLLSLYGVGPDTAALLLVAAGDHPERLRSEAAWAHLCGVAPIPASSGKVRRHRLNRGGNREANHALWRIVITRMSAHPATRAYIERRTKEGLSKKEIIRCLKRYVAREVYHHLRAGG

SEQ ID NO: 379050 - protein, 352 aa, unidentified
MEQITQSICEKAMLFVGIDMHQAKWQITIRDEANVLWRGSIPGKWEELKRRLDRYSGYRIRAVYEAGCFGYWLHDNLQEYGVECVVTPPSLVPMEYGNKVKTDRRDSDKLAQLLAKDLLKSVYVPSKEEVLHRQTFRQRNQLVKDRVQTQNRIKAALRFFGLRIPDIRAPFSATYISNLRHVNFGNHSYQKSFNFLLNEYEFLTELIRQQNKLIADMAKLPQYREKVEMLTRTKGVGVLSAMEIILELQDVSRFPNGDHIAAYVGVTPSQHSTGPHVRMGRITGIGKPHLRGTLIELSWSLIRYYPEEREFYLKLKARAGSKRAIVAVARRFIIKVWYMLVTNTPYHVRAAV

SEQ ID NO: 379051 - protein, 391 aa, unidentified
MSERDSVPADTESRCQKIFVAIELSKAKWIVVIRAPHVDKSSLFEVVGGDVDRLLVLIERARKAAVAQGFKVTEVCTCYEAGYDGFWLHRFLESQGMRNSVLDSASIQVSRRRRRLKTDRTDAGSLIRVFMAWHRGEHQACSVVHVPTPEEEDMKRLHRSRANLLRDRVRHVNRIRGLLFLQGVAHIHPNRAGWMIALRDLRTRDGRAFPVQLMHEIEREAKLLDIVKKLLHEVDLEVAALVHTQGAKRRSSTSKATHPIASRLARMRGIGPTLAGVLATELFYRRFENRKQVACYTGLTPTPYSSGSMSREQGISKTGNNRVRHNAIELAWLWLRHQPESRLAIWYRERVTNTQGRFRRIAIVAVARKLIVALWRFVETGLIPEGAVLKA

SEQ ID NO: 379052 - protein, 340 aa, unidentified
MNNISIVGIDLAKHVFQLHAVDDSGHKVFSKKIKRDQLSTMMANLPSCIVAMEACGSAHYWAREIRQLGHDAQLLPPQAVKPFIQGHKNDARDAAGIAEAAARPATRRVTVKTPEQQSLQALHRVRSRLVRARTAVGNELRGLLNEFGIIVVQGHRVIRQGDIRRLLDECHEQLGAALCDVMHDLLGEWQALDTRIAEYDKRLVAYVQATPCMKQLMSVPGIGPVNATLLVSHMGDPTRFPNGRQFSASIGLVPRQYSSGGKNVLKSITKRGNSEVRRQLVHGARAALRQFQRQEHPDRLAQWIIRLAARVGQRKAIVALANKMARICWSILAYQRPYQA

SEQ ID NO: 379053 - protein, 383 aa, unidentified
MRKIQETLQAQSTTTQDIMYIAFELSNSTWRLAFSDSNKKRHVTIKARDLKQLEIEIIKAKRRFGLKDNVQIKSCYEAGRDGFWLHRYLLSKGIDNLVVDSSSIEVNRRKRRVKSDRLDAGNLLRLLMRYHGNERQVWKVVTAPTVKEEDARHLHREIETLLRERTRYRNRIKALLVQHGLDVKNPSRKNFLKVLNALRTWDGQVLPESMKARVVREHERLRMIEDHIKLLKKEREQRVKSKETASFQQVAQLRELCGIGVNSSWVFVMEFFGWRKFRNRREVAALAGLTPTPYDSGGSQREQGISKAGNKRIRTMAVEIAWCWLRFQPHSKFSRWFNERFASGGSRMRRIGIVALARKLLISLWRYLEHGVIPEGAIIKSAS

SEQ ID NO: 379054 - protein, 368 aa, unidentified
MNYIFVGCDSHDKTLVNKVALNREEAEKKSCAANRSGRQKLIEFLKKRSQGAGGATVVVVYEASGNGFVLYDELKQAGMECHVLAPTKIERSTKQKRNKNDDRDADRLLDIVRGHYLAGTKLPSVWVPDRQTRDDREPVRGRQDLSQKQTAVKTQLQMLLKRHGIEKPEGIGKSWNKAYRQWLKALSEDAHQAWGMKSVLASLLRQLEFLEKEIEQLNNAMEQLADTPRWKPIIEAIRKEKGVGLMTALKYSTDIADFSRFRRGRQVGAFYGLTPSSHESGENNDRKGHITREGSPTGRQVLCQAAWSRVRHDEHEREVYRRLVLKNPKKTKIALVACMRRLAVRLWHIGFQAQLQMKTSRVENGTSL

SEQ ID NO: 379055 - protein, 337 aa, unidentified
MVYVGVDLHRKRSHVVALDPAGQMVLSRRIGNAPVEFLRIFGELEPERVEVVFEATYGWSWFADLLADAGIAAHMAHPLATKAISAARVKNDAVDAKTLAHLLRTNLLAEAWIAPPEAREARRQVRTRAGLVRMRSRVQSQLHALLADLGIIPELTTLFGPAGRRWLAELQLPAGARGRLDAGLRLIDAITVEVGRADADLRASFAGDDRIRRLLPIPGVGLVTAATVVAEVWDIQRFGSPERLCSWAGLTPGERTSDTHTRRGHITKQGSRWLRWMLVEAATTAARDPQLGRFTAQIAQRRGPKIARVALARRLLTLCYYALRDDGGCRAYPVKAR

SEQ ID NO: 379056 - protein, 343 aa, unidentified
MIYVGVDLHLRFCYMTVLDANGKRLWQGRVENVESDLQQFFANLKSSHQEKGGIAVAVEACGFWCAFVDCVEPLVDRVVLVHPAKVKAIADAKLKNDRVDSDTLAQLLRANLLPEAWKADRATRDLREVLRMRVALGRDRTRYKNQIHAVLHLHGQRAPVSDLFGRQGRAWLKTLAVRPAARQAIDTSLRMVDQLDSELHALDRQLQKSAQQDPDARCLLSIPGIGAFSAMVLKAEIGDIRRFPDKKSLYNYAGLVPVIRQSADHLRRGGITRSGSPLLRWVMSEAAVTATRYSPAARAWFTRLAQHKHPHVARTALARKLLGAVWALWTQGLCFDERIFAAM

SEQ ID NO: 379057 - protein, 374 aa, unidentified
MKNSLRFVGLDVHAETVAVAVAEQGGEVRDLGIIANRPEAVRKLAAKLGPVEQIRACYEAGPTGYGVYWQLVKLGIACEVIAPTLIPTRPGERIKTDRRDAAKLARCHRAGELTSVWVPDKDHEALRDLVRQREAAIKDRHRARQRLGKFLLRHGCNKPEKMTRWTQKYMAWIKTLGFEQFGLIATLEDHMQEIDHVDRRVERLEQKIDEAIALAPTETQEVIAALQALRGVAKLTAATVVTELGRLSRFESPNQLMAYCGLVPSEHSSGSKIRRGAITKTGNAHVRRVIVESSWCYQHRPWLGGYLAKRQKGMDPALIEIGWKAQHRLYKRYQHLTLRGKNKPQTVVAVGRELLGFMWSIATKVEMQQPARAA

SEQ ID NO: 379058 - protein, 410 aa, unidentified
MAERFVGIDVALREHRIAVLDRDGEAVGPSFTIAASKDGVATLLRTLDARGATAAQTLIGLEASGHLWENLEAALIGAGYRVIVLNPLQTRRYRDVVRRKAKTDDIDAHVIAGLLRSGAAQASYVPDEPIQSLRELARLRARLMADRQDYLRQLVAQLDVVLPEHRTVLGDLLTARARGILAQFPTAPHLANANPRAIRRAAEEAGARAFSLDDATGVRDRARRSLYSGKAAAARAHVVRTLVSQLERLTSAIDEVDRAATALLPPSAPGTGPSDAELLQTIPGIGPQTAATLLGELGALTRFTDARALVAYVGFYPVINESGDRAAPPRLSPVGSRIARHSLYLAAVNAVRRSGEWRTIYLRKKAQGKTAKQALVVVAVKLLHALYAMLKHRQPYNPSRLLVAPATIGS

SEQ ID NO: 379059 - protein, 337 aa, unidentified
MIVMAFDQHREQITFDALDTASGEVSRGRIRPADRLGFRDWLERWEGQELEVAVEATTGWRFLVEELQRVGARVHLAEPAETSARRGPKKRAKTDREDARRLRELLQAGRVPESWIPPAWMLELRSKVRLRHTLIEERGEWQQRIQAQLYHHGVPRRRQLLTAERRGWLEQLELPDAARRQLEVALAMIDAVDGQLRPLDRELRAFARRQSGCRALMGHYGIGEITSVAIVAELGDCRRFSSSRRAVRYAGLDITVSASDRRRSPGHLSRQGPPTLRWALYAAAQVARRAGSPDRSYYEQAADRLGGNRACLAIARKLLKRSFHTLRELGEEALQPA

SEQ ID NO: 379060 - protein, 328 aa, unidentified
MDNTTPATPVIHALGIDIAKHKFDVALMRHGKCKNKVFSNDPAGFTALNHWLNAHQVTALHACMEATGVYWEALATYLADSGHIVSVVNPAQIAAYAKSTLQRGKTDVQDAYLIARFCERERPPVWQPAPVNQRVLLQLVRQLQHLSESYRTEQNRLGTSTGDVHASIADTMAFLGEQIKQLSLKIDQHIDQDPDLKHNKALLDSIPGVGDKTAPWLLAYLGEGNRFGRGKQAAAFAGLTPRPWQSGSSIHGKSRISKTGHSDLRKILFMPALATYGRRKAFLPFIERMKANGKTPKEIVVALMRKLITIAQAVLRTQTPFNAALHAN

SEQ ID NO: 379061 - protein, 381 aa, unidentified
MQSNHTVPTILVAIELSTATWLVAVRVPGSEKPHLHRVDGGDTAALLALIASVRARAAHQLNAEIGIVCCFEAGRDGFWLHRLLTTRGITNYVLEPTSVLVNRRARRAKTDRLDAEGMLRVLAAYLRGDHQVCSMVRVPTPDEEDAKRMHRARENLVQERLRIENRIEALLFTQGIRKRPSLRSWERDLAILRTGDGREIPRHLLAELDRLRRRLVMTLELIREVEAERDQASKTKPQDQACRKIAALCRIRGISDNFAAVLTREVFYRSFDNRRQIASYVGITPMPYQSGGIDRDRRISRAGNPRARTTMIQLAWLWLRYQPGSELARWFRERVGTLAGRTRRIAIVAMARKLLIALWRYTESGVIPAGAEIRAETPVAA

SEQ ID NO: 379062 - protein, 354 aa, unidentified
MRFYQPPADQPAHRFYCGVDLHARCMYLCILDATGQTVLHRDYPANAAAFLDAIAPYRDGLAVAVECMFAWYWLADLCHEHGIAFVLGHALYMKAIHQGKSKNDRLDAAKIAGLLRGGLLPQAYVYPKAMRATRDLLRRRSFLVRRRADLLAHLVNTNSQYNLPASNKKLVYPGNRGELDLPARFSEPSARKMVECDLALIDALDGQIHELERHLIRTAKVHDAQAYARLQSVPGIGKVLGLVLLYEIHDVGRFPEAGHFLSYARLVRPRQESAGKASGFGNKKIGNAHLRWALGEAACLYLRSSERAKRWQARQAKKHGPAKTLGILAAKLGRTVYHLLRTKQVFDEARFFAS

SEQ ID NO: 379063 - protein, 412 aa, unidentified
MEILYAICCGLDVHKDSITACLRRLGGRGPVTQELRPFGTTTGELLTLLDWLVAAGCTHVAMESTGVYWKPVFNILEGHFQQVLVVNAQHIKALPGRKKDTLDAEWIAQLLQHGLLRGSFIPPAPIRDLREATRYRKQLIRLRADETNRLQKLLEGGNLKLGSVASDILGVSGRAMLAALVHGETDAAALAGLAKGRLRKKQPQLVAALTGRLTPVQRALLGQQLAHVEYLDKAIATLDALIATLMAPYQAEAERLRSIPGIDTRGTENLIAELGVDMTVFPSDGHCASWAGMCPGHNESAGKRKSGKTRKGSKWLRTVLTEAAWAASHTRSYLGAQYHRFARRRGKKKAVVAVGHSILVIAYHILKDGTTYRDLGQDYFDRRDTARIQERLLGRLRALGLHVTVEAMAPAA

SEQ ID NO: 379064 - protein, 314 aa, unidentified
MNENTEIFVGIDISKDTLDIGFRPSGQSVSLAHDEGGITEVMHRLSEAKPQLIVLEATGGLEVGLATRLMAAGLPVVVVNPRQVRDYAKATGQLAKTDRIDALVLADFGRAIRPEVRPIKDAATRELDDLVTRRRQLVEMRVQESLRLARASKAQQKSLRRHIAWLNKRIAELDTELTKRLRTSPAWHAKDDLLRSIPGVGPTTSATLLAHLPELGTLDRKAIAALAGVAPLANDSGQHRGKRRIWGGRAEVRCVLYMSTVTAIRWNAAIKAFSERLKAAGKPAKIVIVACMRKLLTIMNAMLKTSSPWTAKIA

SEQ ID NO: 379065 - protein, 458 aa, unidentified
MPKKSSKKAKSQRSRERALLNKVHLNAAGIDVGADTHWVAVPEDRDQRPVRSFGVFTADLIALCGWLKECQIQTVAMESTGVYWIPLFQLLEREGFEVQLVNARHVKNVPGRKSDVQDCQWLQQLHTFGMLRGSFRPQAQMCVVRSYLRLRDTLSKDCNSLVQRMQKALTEMNLQIHRVISDITGVTGMSILRAIVAGERDCVKLAQLKHPQIRSSVQQIAKALEGAYCPEHLFALQTALQLYDSYQLKILQCDKHVEEVLGAFEAKVEVAAPDLSRLRSAQKRLDALQRHHLEQVAGADLTKLPGLDVLAVQRILSEVGLDMSRWPSEKHFCAWLNVAPNNRISGGKILSSKPRKNANRAAAALRLAAQSAMQSKTAIGAFIRRIKLRLGAPTAINAGAHKLARLLYRMLKYGKAYVETGQQTYETLFKERTIRNLQRKARELGFHLTPAVPSAVVS

SEQ ID NO: 379066 - protein, 352 aa, unidentified
MSDKISRHTLKPSDGKELLDLCERIRTRVAKETKKRVEMVSCYEAGYDGFWLHRLLQAHDIRNHVIDPASLQVDRRARRAKTDRVDAERLLRSLMAYLRGEPKVWSVVRVPSVAEEDDRRLHRERGRLINERIQHVNRIKGLLAIHGIYDYQPLRRDRIQRLQQLHTADGRTLPPRLEAEILRELQRLEIVIGMIKTIEAERDAIASANTETERGSVKKIQHLAKIKSIGPEFATTLVGEVFYRSFDNRKQLASYVGLTPAHFQSGAMSRDQGISKAGNAKARTVMIELAWLWLRHQPDSDLSVWFRDRVGKLKGRIRRITIVAVARKLLIALWRYLETGLVPKGAALKVCD

SEQ ID NO: 379067 - protein, 378 aa, unidentified
MPGRVRVRACAAQAERLLAWPQRTWAVEGAGGLGHLLAQQLVAAGERVLDVQPKLAARVRLLAAGDVNKNDPNDARSVAVAALRPAACLPVRADDHAAVLKVWAKRYRDLSRARTQVVCRMHAVLCQLIPGGVSTRITAGQAARILDQAEPRGAAGMARWVLAAQLLTGLRRIDVQRRDVQRKLAVAVRASGTTVTGIFGVGPAVAAAVIGDAGDISRFASRDHFAAYNGTAPVEVSSGGRVIYRLSLRGNRRMNHAIHMAAVTQIRYRHSKGRAYYDKKIAEGKTSKEALRALKRQVSDAVYQRMKADGRRAAAGPGGHPGNGSEASVAGLHPADRLFGQATPGPTPTLRPRPGRSKAAPAGRSRRTRPTVPAHTSA

SEQ ID NO: 379068 - protein, 414 aa, unidentified
MSHYKQTHIYVGMDLHKAQHTAVIINCWNERLGEIQIENKPSAFDELMKFVKKHTPKGLTPVYGLEDTGGNGRSIAVHLVENKQIVKEVNSALSYSERMSNATTQKSDSWDAFCIAKVLLARLDELPDANPQDIYWTIGQVVARRNSIVKHAAMLKNQLHQQLSYHYPSYKKFFCDIDGKAALAFWEKYPAPHHLSSVGADELAEYLRKASHNTCSTRKAEEILEVVRQDGPTERKLQEHRDFLVVSMVHDMRRSRELIKQVECELRKVLAKTDYKLESMDGINIVTAAELVSEIGDTNRFSNADKLARFAGIAPVRFSSGGKGKDQASGQGNRALNSIFHNLAVQQIQVAKGSNKKQRNPLMYEFYQRKLAEGKTKKQALICVMRRLVNIIYSMIKNKTEYRAASPLTELKAS

SEQ ID NO: 379069 - protein, 347 aa, unidentified
MYQDNLFALDLSKKSIQGALFDKSHQVRFNRELSPKKLVDWLSRQQPLTVAMEACSTAHHWVRVVARLGHQGLLVPTRTANRYREGHKTNATDALAVGVAARQPTTRFVAPKTIEQQEMQSVERIREHLSKHLTATSNMMRSLFGEFGMAIPKGKKAFKRQVVELLEDAENDLPMCLRTELIGQWQYYLDLEQRLEQVTLSQKRLVNQHETCRQLLRLESVGPVNALGLYLALGDLGSSFKNGREAAACIGATPKQYSTGDTVTMGGISKICANKRLRSNLIQGSRSVIKVVKKRDPRNRKEAWLKQLIERRGEGRAAVALANKTIRVAWAMLHYGDEFKLHPNMAE

SEQ ID NO: 379070 - protein, 343 aa, unidentified
MGVFAALDVSQEETAICLVGAEGEILAEAKVPTCPDAIADWLAKRAADVERVGMETGPLAVWLWNALTKRRVPIICLDARHANAVLKMMPNKTDRHDARGLAQIVRTGWFKAARIKSHEAYVNRAMLTARDTLVGMRVKLENEIRGLLKTFGVMFGKRVGGFKRRATEIITGELAVAPELIPIFEALMHARSEILARIAALDGKIRAVAKQHGTVRLLMTAPGVGPITAMAVTAAFDDAERFNRSSSAGAYLGLTPRRYESGEISRNGRISKSGDRFARKCLYEAANAILSRKLGVPRLREWAQAIAGRTGPRKAKVALARKLAVTLHAMWRTNTTFREAAMA

SEQ ID NO: 379071 - protein, 343 aa, unidentified
MEHYAGIDVSLERSGVCVVDATGKIVREAKVASEPEALVVLLRQLGLPLARVGLEAGPLSQWLHAGLAEAGFEAVLLETRHVKAALSAMVVKTDRKDARGIAQLLRMGWYRPVHRKSLSAQEVRALLVGRKLLQAKLRDVELSIRGILRGFGLKVGEVSRGRFAARVEELAAGHEMLGTVIGAMLQARDGLRAEFVRLHRRMLAIVREDAVCRRLMTAPGVGALVAVTFKTAVDDPGRFRTAEAVGAHFGLTPKRYQSGETDVTGGISKVGDAMVRTALYEAANVMLTRTSRVSALKRWAMEVAKRRGAKRAKVALARKLAGVLHRMWANAADFRWGKEEAAA

SEQ ID NO: 379072 - protein, 344 aa, unidentified
MNNFNLISLDLAKNVIQVCKITKHGELISNKPLTPQKLKELLVNTSPSIIAMEGCGSCHFWGRLAKSHGHEVRIIAPKRVKAFLQGQKTDANDALAIAAAATQIGARFCPIKNIEQQSLQTLETSRKFLSRDQTALNNHIRAYLYEYGITIKKGKKSLREAVINILDDNNTQLPPSLNHTLLLLWERYQLTDDQLNQVDIDKASLVKQIEPCKRLMDLEGVGEVCASMLYASLGDGSEFKNGRQASVYIGLTPKQHSSGGKVYMIGIDKKGGNKELRAALYQGALSVISRLPAEAKTTKQFWLIALIGRVGLKRACIALANKTVRTAWAMLNTGKLYQPVLISR

SEQ ID NO: 379073 - protein, 369 aa, unidentified
MDDITYVGLDVHKATVCVAVAESGRGGEVRQIGVFENLPEILCKLAARLGKGGRRLSFCYEAGPCGYGLHRLLTGRGHSCSVVAPSLIPMKSGDRVKTDRRDAVMLAKLYRAGELTAIWIPDAAHEAMRDLVRARATAGRVLSKARQHLQGFLLRHDRIYRGPRAWTLAYRRWLTTVRFDHPAQQIVLQDYIHAVEDAEARRDRLTRQIEELLPSWSMAPVVKALQAMRGVALVVAVTVVAEVGDFRRFANARQLMAYLGLVPSEHSSGSTIRRGGITKAGNALARRVLIEGAWTYRMNARVSRKLHDRLEPLSAAVRDIAWKAQVRLCARYRRLAASGKPKVVVTTAIAREMVGFIWAIARIAQPALD

SEQ ID NO: 379074 - protein, 431 aa, unidentified
MSERKSLEIRVSVDVGSRSHQVAIGLSSGEVLEEFEIAHRVEGFEDLFSRIERHRKGNSYRVAVAMEGGNGWARPLDSMVRGRGYRLYNINNLKLARFKEIFPGAAKSDRIDARKGLELFQLRDHLPLAKEVLQEVVGTPHENEVLKRLSRRRRRLVDERVRVVNNLQADLQAVCPGLLEITKEAGNQWFLNFLISADTLPQLARLRRTTLLKIPSVGVKYARLIQDWQERAHFSEEVEWVSAMIQEDARRILELDETIKALEVKTAEVAETSTIAKLLRSIPGYGAICTSELAGEIGTIECFNKEGSLALYLGMATLDNSSGKYQGTKRPKHINTRAKAAMMTALDRHRKYVPQSQKYYEKKRAQGKSHNQAIRALGRHLCRIIYKMLKEKREYEVRPLKRDTQAKVTSRSSRIGQIGKKKSRRKDKITI

SEQ ID NO: 379075 - protein, 352 aa, unidentified
MTTMPDSTRPRKGVVGGIDTHADVHVAAVLDELGVLLATSSFTADPAGYARLHDWLIDHGTVVGVGIEGTGSYGAGIARFLGARDIVVHEVTRPERSTRRRIGKSDTIDAEAAARAVLTGRALAAPKSRDGAVEAVRVLGVARRSAVRARTQAGNQIVALIGASPDSLRSELRALPARARIHACSEFTPTDTIDPVDATRHSLRVLAQRWQHLDDEIERLDTHLAVVVPHAAGTLLDVYGVGINTAATLLVTAGDNPDRMHSEAAFAALCGVNPIPASSGKTTRHRLNRGGDRHANSALWRIAMVRLSHHQPTRDFAHQRTQNGKTKPEIIRILKRHIAREIYPHLRASLDR

SEQ ID NO: 379076 - protein, 447 aa, unidentified
MRRCIGLDVHREFAQVAIWEAGVVRQAGRIQTTPEALREFAGSLCASDEVAIEATGNTHAIARLLERHVGRVVISNPQKTRAIAEAKVKTDKVDAAVLAGLLAADFLPAVWLPDDATFALRRQVARRAHIVRQRTRLKNQVQSILHRNLVPRCPAADLFGNKGRAWLAAQHLPQDEQQAVGALLRQLDFHGQELRIVDAELGRVGLELTEVRRLLTIPGVDATVALAIVAAVGDFGRFPSPQRLVSYLGLNPRVRQSGGQPAQHGRITKQGRAHARGMLVEAAWAAAKTPGPLRAFYERVRARRGMQVAVVATARKLVTLCWHLVVKGQDYAFQRPSLTDKKLRALELRAGLPPRRGQKGSAAAYSLKEVRRRERALAEQAELAYRQLLGNWQPKPPPTQPTRKGVGVAAATGARRSSPQGGKAARQGSQPHDPALRSGVDHAQHRA

SEQ ID NO: 379077 - protein, 312 aa, unidentified
MDECIFVGIDVAKDQIDVCLQPADIYRTFPNEKKGFDELQKLLAHQRITLAVMESTGGLEIPVAVSLGCAGIPIAIVNPRQVRDFAKASGRLAKTDRLDASTLAQFGAAIRPAAQPLRGDEHRALAAIMTRRVQIIDMIFSEKTRLSSVPNSEMAKDIKSHIGWLEKRLRKIDQDLGNRVKRTPLWRERDALFQSVPGVGSVVSHTLLAHLPELGTLDRRKIAALVGVAPLNWDSGRMRGRRVIWGGRAAVRKALYMAAVASMKWNPIIAAFYKRLRAAGKKPKVAIVACMRKLLTILNSIARSGEAWRSCA

SEQ ID NO: 379078 - protein, 418 aa, unidentified
MKESMNSLTQKNVIVGIDWADQTHAWHIQNGESQTAGLLEQDASAIQQWIGKLRKQHTGCQFAVAIETTKGALISALLQHDDITIYPINPAALAAYRKAFAHGGGKNDPGDAMLLCQYLTYYIDQLRPLRRDQPLTRKLAAMAEDRRRLVDQRTAHCNELKAVLKSYFPEVLKLEAARIYADFILVFLLKCPNLAAAQKAGAIKLRKLFYGIGTRSKAEKRVQLLVEAVGLSNDPTFNQTCSMRVTALAALIQTYNAQIRVYDARIAEEVVDHEDYAIFKSLPGASDLTHSRMIAAMGDDRLRYADASSLQAATGIAPLTTQSGKQRFVSARWACTKFLRQTFHEYAGLSIAKSKWAAAYYKLQREKGKSPQMAKRALAYKWQRIIFRCWQDKVPYNEAKYIQRLKLTGSPIYKLIDA

SEQ ID NO: 379079 - protein, 361 aa, unidentified
MAHPSAYLEPAQPGGQAPVTIGIDPHKGSHTAAALDAQHRVLAQVRVAPTRDGYRQLRAWAARWPRRRWAVENAAGLGRSLAQRLLGDGEPVLDVPPKLSARVRVLSTGHGRKTDEADAASTALAACGPAELQPAALEGHAATLRLLSDRRDDLVAGRTQTLNRLHALLAELAPGQVPPGLSADRAAAVLRRLRPPAGPQRTRRLLAGDLVREVRRLDAAVAALERRIAAAVKDSGSTLAELFGIGAILAAKILGRVGDIRRFASAARFASYCGVAPIEASSGDVVRHRLSRAGDRQLNFALHVMATCQARQRSPGRAYYLRKRAEGHSDKEALRCLKRRLADVVYRQLIRDARAAPGLGA

SEQ ID NO: 379080 - protein, 360 aa, unidentified
MIVQGTSVGLDVHALSVVAHAVDEETGKIARARLCPDHGEVLGWLHQLRAPVRVAYEAGPTGFGLARAITEAGMECVVAAPSKLQRPARDRIKTDARDAAHLAKLLRLGEITPVVVPDREIEAVRDLVRAREDARADLMRVRHRLSKMLLRQGIVYSGGTPWTGIHELWLRRQRFDDVHQAAAFDHYFDAVLSATAARDRLDEQITAVAASPRFADPVDRLGCLRGISALTGLALTVEIGDWSRFTGSSIGAYVGLVPSEYSSGTSRAQGSITKAGNTHVRRLLIETAWHHRKSYSTSGPTMRARWARVDPALKARGHAGNRRLNQRWQRFTERGKNPLVANVAIARELAGWCWSLATLQ

SEQ ID NO: 379081 - protein, 367 aa, unidentified
MMGWMAPLPHLSAKLLSDRISSEWEPSMGEVTTIGLDLAKHVFQVHGVDAEGGTVLRKQLRRAQVLAFFSRLPPCLVGLEACATAHYWAQELRALGHEVRLMPAQYVKAYIKRNKHDAADAEAICEAVQRPTMRFVPVKTADQQAAVLLHRGRERLVRQRTGLVNALRGHLAEFGVIAPQGLRNVGKLIAIVRDEGDARLPDLARQVLQVLAAQIEQLEAAVAAIEKQLMAWHKSNPVSQRLASVPGIGPIIATALAATVVEPSGFRSGREFAAWLGLVPRQNSTGGKHRLGGISKRGNPYLRRLLINGASANLLRSKATNADPWVIGLRQRRPSLVVAVALANKTARIAWAVMHRHENYQRVAAAA

SEQ ID NO: 379082 - protein, 335 aa, unidentified
MERQITTVGIDLAKNVFSLHGVDDAGRVVLRRTVRRDQLAATVAVLPPCLIGMEACSGAHEWGRRFQALGHTVRLMAPKFVAPYRKSGKNDGNDAEAICEAVTRPNMRFVPVKSVEQQALLALHRVRQGFVVERTALINRLRGLMTEFGVVLPLRSVTVRRQAAGAAEPLPELARRAIGDLLEQLRVLDERIGGYDREIEAQARLSEAAQRLMKIRGIGATTALAIVATVGNAREFKNGRQFAAWIGLTPSQYSTGGKPRLGHISKRGDAYLRNLLVQGARSVLQSAAAHQDRMSRWIVELLPRRGYYRTLVAIANKNARIAWALLAKDDTLRTA

SEQ ID NO: 379083 - protein, 352 aa, unidentified
MTLTIVETRAEIRAITGGVDTHADVHVAAALDPIGGLLGVREFPATATGYGRLMSWLGGFGTVALVGIEGTGSYGAGLARHITTVGVRVVEVDRSDRQDRRRQGKSDPLDAVSAARAAQSGRARGASKGRDGAVEAIRALMVAKRSAAADRTQTINQARALVLTGPDDLRARFTGHTAAALVAELASLRPRPGSTVGYATRIALRELGRRAEFLDGQLERLDELIGPLVAARAPGLLALYGIGPHTAALLLIAAGDHPGRLRSEAAWAHLCGAAPIPASSGKTVRRRLNPGGDRQANHALWRIVFTRLGSDPATRAYAERRTAEGKSKKEIIRCLKRYVAREVYPHLRTTAG

SEQ ID NO: 379084 - protein, 339 aa, unidentified
MKISMIGLDIAKNVFQVHGVDEAGEVTLRKKLRRRDVLSFFAAQEPCVVAMEACGTAHHWARELAALGHEVRLVPPSYVKAYVKRSKNDAVDAAAICEAASRPSMRFVPVKTLERQAALVPHRVRDMLVRQRTMLINALRSQMAEFGVVVPKGRHRLGELIAMLREDQGIPASARTMLMELVGAIEALTPRVDRIEKAIVAAVRMDPLARRLTTVPGVGPITASALAAMVGDPARFRNGRHFAAWLGLVPRQSSTGGKQRLGRISKMGDKYLRKLLVLGATASLRRAPSTDRLALWTRGLLDRRPARLVTVALANKMARIAWAVMARGQAYRPETAAAA

SEQ ID NO: 379085 - protein, 381 aa, unidentified
MTTAVTHHEPENTTEATLFVAFELSEKTWKLGFTTGHGQKPRERTVTARQQERVLDEIVQAKRRLGLPETATVVSCYEAGREGFWLHRFLQGHGITNHVVDSSSIEVNRRRRRAKSDGLDVRKLLSMLMRYHHGERQVWQVVKIPSVEAEDQRHLHRDLETLKQERASTMTRIEGLLSSQGLRVTSLTKLPEQLDALRLWDGSPLPPGLRRRVLRVYAQYTFLSEQIAAVEAERRALLQTSPEASIDKVRQLMQLKGIGINGAWLLVMEFFGWRAFKNRREVGGLAGFTPTPYQSGESAREQGITKSGNRHVRWMTMELAWSWVRFQPDSALSCWFRERFGGGGKRLRRIGIVAVARKLLIALWRFLETGVLPEGAGLKEG

SEQ ID NO: 379086 - protein, 355 aa, unidentified
MKTIGVDLHKCSMTLVVLDEQGAVIERTTLPTKCREKIREWFASRGPLCQVAVESVGFYQWFWDLVQPAVSKMVLADPAGLKPFRPHKKAKTDRNDAELLARLLFENRLPVAFVPPRTLRPLRELVRHRHSVSRALAQQRRSLRWITLKLNLPGPKSLTSDATQKWLLSQEAKFNPAQQLITRQRFDQINALERQLTDTERAIEESIAADPWLARRVELLASIPGVGRLVAITIIVETGEITRFHNIDQLSAYAGLAPRVSQSADTVHHGHISKMGPPILRWVLQQAAWVAVRVDAHARRIWLRISRKAGSKRAIVAIARKILSYAWSVCRRGQPFHWPDQPVPEELTGAWSYSI

SEQ ID NO: 379087 - protein, 340 aa, unidentified
MTPIRIGLDIAKNIFQAHGVDGQGTVVIRKRLRRPDILQFFASVPPCLIGIEACSASHYWARELIRLGHDVRLMPARYVKPYVQRGKSDALDAAAICEAVSRPTMRFATIKTAEQQAVLTLHRARELLVKQQTMLANLIRGCLGEFGIVAPVGIRRVCELIAVINDDADTRILPEARIAMRAVADQLCDLQKRITKLEQAIRAWHRSNDASRRLATIPGVGSITASAIVATVADASEFKSARHFAAFLGLTPKQCSTGGRQRLGRISKQGDVYIRRLLVLGGTSLVRYARGAGGSVWAKQLLARRPTRIVTVALANKAARVIWALLTRGEVYRAPQPQAA

SEQ ID NO: 379088 - protein, 344 aa, unidentified
MSTFAALDVSQEATAVCVVDETGRILAERKIPTCPVALSSFLARHAPGLERAGIETGPLAVWLWNELHDRGLPIICIDARHANAALKLRPNKTDRNDAAGLAQILRTGWFKQVRIKSRISYELRSLLTAREVLVRSRVKIENEIRGLLRTFGVLFGKASKGFASRVDQIVASELDASTMMRTIIGSLAKARAALLDNIKELDRKVLHAARGDATARLFMSVPGIGPITALSVASVFDDPSRFKRSSSAGAYLGLTPRRYESGEMSLSGRISKQGNKMTRKHLYEAATTMLTRTTTFCSLKAWGLRLAKRVGFKKARVGLARKLAVVLHAMWKTNAPFRWGAVAA

SEQ ID NO: 379089 - protein, 321 aa, unidentified
MGSGVCYLIPQISPKVGVDCSDARLDVHIYPLDTAFSVANDPEGWSELDHRLAAVQAEIVAVESSGGCERDVARFLMARAYAVRMVDPRVRQFAKALGKLAKNDRIDAAIIAQFVATVATRPLERHKHLERLAKLVNARTQLRDQVTANDNQARRREDKLLKRLDTRRAKRLLADIAAIDMQVAELIAADPELKAKNDILRSMKGVGPILAHTLIALLPELGLLTRKQIAALVGVAPIEDQSGKRQGLRYIQGGRPAIRGPLYMAAMVAGLYNPALKIFKERLRAAGKKPKVAIVAVMRKMIAILNTLIKNNGKWENRAIA

SEQ ID NO: 379090 - protein, 426 aa, unidentified
MKSNTQNAKITAITEKTLIVGIDVGSETHYARAFSWRGFEFSRKPLEFSNSEEGFETLKAWIEDLKKKRGLDKVIPGMEPTGHYWFNLGKFLQDNGMRPVHVNPHHVKKSKEMDDNDPSKNDRKDPKVIAGLVNEGRYFYPYIPDGIYAEIRVLSGLRVLTQSEITRLKNRIARWFSIYFPNYKDVYGDVGAISGLMILRAAPLPEDIVKLGVGGVNQIWRDAKLRGVGIKRARTLVEAAEHSVGSRDAQEAARIELQILLSDYDRQTKREAELMALINEKIREVPYIDKLLEIRGVGLKTVIGFVAEVGDIKRFDDPKQIQKLSGYAIVKNQSGKHKGESHISYRGRKRLRYVMYEAAVSVVSHSPEFRSIHQYYTTRDKNPLKKMQSMIAVACKLIRIFYVILKNGTKYDAAKMMGDIRRPEAA

SEQ ID NO: 379091 - protein, 370 aa, unidentified
MKMSIGVDLHKTQFTVCCLSEDRGIQESGIYPTTDHGYLTFTMKVSRWKEDGYEVATAVESTGNTRYFRNRLLKAGIAVKVVNTLKFKVVNESVKKTDKHDSRTLAEFLEKDMLPESILCSQESEDIRRILKSRSVLVKALVSLKNQVHGLLLGYGIESRRGQLQSKKERQRILTGLADHRSYGNAAQAAKPLLSSIGQIASEVKALERVLSDLVSEDGDVALLQTIPGVGLITAATIRAYTDDINRYESPKKYAAHAGLVPWVKNSNKTIRHGHITKRGPVELRTAFVQMVMGMLRLQDKTAGYRLMSKYRTMKENKGTGKSIIATARKMSTIVYVILKEKQSFDPSKMSPDPKYVEMSKVARRYDLAV

SEQ ID NO: 379092 - protein, 400 aa, unidentified
MLSIGIDVSKGKSTVCGMKPGGEIVYTPFEVQHTREGMSELVSLLRSSGEEVRAVLESTGSYHCPVVAALLENGIFVSVVNSLRMKRFCSQSIRKVKTDRIDAMQIALYGLAYWQELQPARLPEDTYRELQLLARQYYQMTSMLIKAKVDFNAICDQVLPGMQELMSDHAGRHKLSDFVLRYRHTTHILEMGETRFRKDYCKWAEKKGYRNCERMAALIFATAQNGIPVLPNAPSTQIVITEAIRVLHTVEASRDAILTQMQALAKTLPEYSLVREMPCIGDTLAPRLIAEIGDVRRFHSKRALIAYAGIDAPPYQSGKFCANNRHISKRGNRYLRKTGYEVMQSYVMHKPANDPIFTFIEKKRGEGKSGKLAMVAGLNKFLRVYYGKVTELYRSLPAIE

SEQ ID NO: 379093 - protein, 370 aa, unidentified
MSYYVGLDLHSNNTYVGVIDSKERRVLKGKFPNQLEVILALLEPYKKRTVGVVVESTFNWYWLVDGLMDNGYKVHLAHPAAFKQYKGLKYTDDEHDAFFLAKMLQLGILPEGYIMPREERHLRDLLRKRLKLVRQRTTHILSFKSLVSRNQAISMDSNKIKTLTEESIDGMFENEHLVISAKANIATMNFLKEKIVAIEKQIRNVTQIKPEHDFLITVPGIGKSLVLTVMLETGDINRFKAVGNYASYCRCVESKRLSNNKSKGENNRKNGNKYLAWAYVEIANCAKRYCPQARAFYLKKSIKTNKALAIKALAHKLARACYYIMKDNVAFDVTKIFGKPILKNGCGREPNWGLGHQPSAPIGQPAAADC

SEQ ID NO: 379094 - protein, 423 aa, unidentified
MYSSTLCVGADVHLDKIVLRAVDKASGHEVIERFHVTNNLPGAQSATATIVQAATHLDYTRIEIGYEATGMLWIPFHRFLDTSPLLQPFDLAQVCFNPKLVADFKDALVLRGPKNDDRDAFDVAARVQIGHWPVSYVPGDFWQGLRRLTRYRFRLSRNLSREKMRFQSYAFLKCSDWKRVKPFSDVFGATSAALLTEFTAAELREMTHSQLADLITHRGRGRFYDPDATARAVQQALRSSYPIERQMDEMITVTLATGWEHIRYIKRLMKQMDQQISRYIEPVPNPLITIKGLGPVITAGLLAEIVDISRFPEHKHLAQYFGISWTKHSSGGSVSQNTRMTKVGNPYGRYYFVLGADHLRRFNLEYKSYYWRKYNEVSKYQHKRALVLTARKLVRLVHALLTKNVPYVRPRMPVDFQEDPLLQ

SEQ ID NO: 379095 - protein, 411 aa, unidentified
MTNLFCGIDWGESRHDVAIIDHAGAIVSRHKITADAAGFTDLLAVLAAAGDSPDSQIPVALETDRGLLVSALRATGRAVYPLNPLAASRYRARHQVSGAKSDAADAVLLANILRTDKDAHRPLPDDTELAQALRVLARAQQDTVWGRQKLGNQIRSLLKDFYPAALDAFASLNNGGLARPEPRTILAAAPTPAKAAKLTRAKLRTLLMRAGRQRRIDAEVDRIYAIFQAEYLHQPTIVEDAMGIQLGALLAQYDAACRASDELEAAARDHFERHPDAAVISSFPGMGTLIGARVLAEIGDDRTRFADARGLKAFAGSAPVTRASGKKTVITYRRIKNNRMASAGSIWALAALSTSPGAKRHFQARRERGDWNRQAQRHLFNKFLGQLHHCLKTGTSYNETHAFPPPIGLAA

SEQ ID NO: 379096 - protein, 438 aa, unidentified
MSDLDQAAVKREFAAHIGIDWADQKHFWTMRTADGRTQRGELDNTPEAVQVWAAELEQRFGGRPVAVALEQARGAVIAMLCKYAHLVLFPIHPNTLTNYRKAFNPSGAKSDPRDADLALELLVAHADKLRRLEPDMVETRKLQFLTEERRRLVNQQSSETQRLIGWLKQVFPQILQWFEDPACAMVGELLLRWPTLQALKKTTPKTLRTFFHRQNCRSAERIEERIAQIRQAVAATHDAALLETGILCIQNSVHLLEQMREGIAEFDHQIAETYRQHPDRAIMESFPGAGPALEPRLIAAVGSRRERFESAQSIASFVGIAPVKEASGQQIWVHWRWACPKFIRQTFHEWAGCSIRTCQWARQHYDQQRDKGKGHHAAIRSVAFKWIRIFYRCWRDRVPYSEETYLKAKSARAPKPQPAPSMQWESCGGLAKLSELPS

SEQ ID NO: 379097 - protein, 340 aa, unidentified
MRMFAGLDVGFKRTSVCIIDEAGKIVWRGVVDTHPEMIAAALHRWRGGLAKVGLESGSMSPWLARALGALGFAVVCMDARRAADAIKGRRVKSDKADAYALAEMLRTGWYSAVHVKSEESHRLKALLGSRDQLVRAKRALGNQVRGVLRPFGIRLPSRQGTKKFSTAAHHSVRHDTMLNASVTALLEALAAIEAQITRLDQQLKELARRSPVCWRLMSVPGVGPIVALAFMATIEDVGRFRRMRDIGAYLGLTPKRYQSGETDVVLGISRQGDAMARHYLYEAANVLLTTVRSPSALKSWGLKVLKRRGPKRARVAVARKLAALLGRIWKDETHFDAVTA

SEQ ID NO: 379098 - protein, 394 aa, unidentified
MIYVGIDVAKDKHDCIIVNSNGEVLFDVFTIQNNMDGFEDLLFKIKTVSKALSKVKVGLEATGHYSCNILGFLKNKGFHTIVINPLYTSLSRKSISLRKTKTDKVDARTIASMIMSDVSLKPYSNTLYHNEDLKSLTRYRFDKVAQRAKLKQSVSRLVNILFPELEKLVSTLHGKAVYELLSEFPSAQHIASANLKHLTNLLHTASKGRFQRASADEIREAARKSIGSYLPAKSLELKHTIKLIRELDCEITEIEAEIKKIMDVIDSPIISIPGIGQNLGAIIVAEVGDFSRFENPDKILAFAGCSPSTYQSGQLYSSHAKMEKRGSRYLRWALLNAAAYVCKWEPTFAAYLAKKRAEGKHYYVALSHAAKKLVRVLYHLETTGETYQPQSILS

SEQ ID NO: 379099 - protein, 422 aa, unidentified
MNTNWTEHAHFAALDWAGDHHDVCVVDRTGMITAEFRFAHTAAGWAEFTDKMKPFVGCPLTLETSSGPAVDQLLQRGWALYPVAPPAAAHYRERKVPSGTKTDRHDTWALADALRTDGHAWRPLRPQDEATATLRALCRDEIALIEERTALVNQLRAALREYYPAALEAFEDWTAAYTWVFLLAFPTPAQLQAAGKRKWEKFLHTHKLWRPQTVDQRLAIFAAATALPASAPVTAAKSLLAVSLAKVLLTLQAQLDEYRQRISQAFRTHPDHDLFGGLPGAKDVLGPRLLAELGSVREEYPDSESLMCQAGVSPVSYQSGQIEKCRLRRACDKVLRFTVHLWVNASRKKCAWAQAYYQRKREEGHSHASALRCLGKRWLKILWRLWVDRKPYDEKVYLTSLQRRGSQLWGQLNGATVPMPPL

SEQ ID NO: 379100 - protein, 337 aa, unidentified
MTSVAAFLGLDYHDEAIEVNVMDHRGEILVSRRCPNSVAAVAATVPPGCRVAGAAIEACCGAADFAEELMKATGWTVDLAHPGFVARMKQNPDKHDFGDARMLADLERVGYLPRVWLAPESIRQLRRLVRYRQQLANEHRQVKLRMRAVLREERVPKPEARPWTKAWMLWLTEKAELGAQSRWVLERHLRRLEELDRELRVVERRLVLVTRDDPVVRKLQTFKGVGLITAVTLRAEIGRFDRFRTGKQLARFTGITPRNASSGKRQADAGLIKAGNPQLRAVLVETAHRLMRLEPRWIALGAAIRKRSRSGSLAAAAVANRWVRWLYHQMCTMDQAV

SEQ ID NO: 379101 - protein, 400 aa, unidentified
MNPVIGLDVSKGESHAQAFSDRGTPYGKTFRFKHDLDGLASFLRYLQDLESFTRQRPAVVLEATGHYHSPVIQFLDEHPYLYIIINPFLSHQAKKSQLRKVKTDVADAYQLGEMFYKEELEPYKKRGQYLMNLRYLTRQYESLTGMYVQAKLQFQAVLDQVFPEYHGVFGDLYSKVSLRFLALYPTSQSVLAMSENDVTVRIQHLVGHVNSNRWSLERAQKLIAAAERNPFRETAFPSHLIALELLINLLLQYQEHLAKLDQSIEALAEELQEYDLVQSIPGIGTKIAATILAEIGEIDRFDHAKKLVAFAGIDPSVFSSGKFTATRNKITKRGSRRLRTALYQAVRCGLKGSRNKRIRAYYDKKRAEGKLFKVAVIACANKLLHWIFAILTKKEAFILD

SEQ ID NO: 379102 - protein, 431 aa, unidentified
MLKINPLSTLYVGIDVSSKSNYVCALDFYKNKYINSSFANNQPGAEELALKILECLKEHPDITTIVAALESTSVYSIHIANYLSSCEELMRFKPYVFVLNPKCTANYKKSYIGLGKSDPIDAFVIADYARAGNIASEPWRGSQFLALKRLTRHRLHLVECMTREKTYLVSNLYLKFSELQMLEGDDQPFCDIYGATSSSVLMEYFSPEEILDSSEEDLIAFLAKKSRNRIKDISKTADLLKKAARDSYRLDKALYEPLNVSIASSFNCIETFKREIKVIDNAIEKEIKGLNPNAFIILQSIDGIGPVFAGGIIAEIGDITAFHSSDALAKYAGLTWKSNQSGDFDGEDTPMIKAGNRYLRYYLGEAANSMRKHNVEYGTYYRKKYNEVPKHQHKRALALTSRKFVRLVYGLLARNQLYSGVSLDTSIKDSN

SEQ ID NO: 379103 - protein, 355 aa, unidentified
MQTVVDRPEATTAIRTDLGAIFVSLELSRSTWLITSLSPDGGEKMSKHVVRGGEVAGLLERFAQLREKTRARTGKVFPFVVIQEAGLDGFWIDRALQNEGIESHVVDPASIATSRRRRRAKTDRIDGEALVRALLAYKRCEPRVCAMVKAPTPEQEDRRRLCRERKVLIAERVRHVNRVKGLLFSQGISGYEPLRRDRRERLVTLQTGDGRLLPDHLKAQVRRELDRLELLLEQIKAVEAERDVLLAAQQAPAAMLLDIKGIGPEFAAILWSEGLFRHFDNRRQIASYAGLAPTPWQSGSVDREQGVSKAGNPRLRTTLIQLAWLWLRHQPQSALALWFEERVRRNGGRLKWRPS

SEQ ID NO: 379104 - protein, 347 aa, unidentified
MTHMTWHAGPYPFPLFPHMPAALPLSIGIDVSKKELVCAVRYRHHVQHITKTNTKAGIRALDNRFKRCACPIIMESTGRYHFLPALLLSEQGYDIRIVNPIMTKRYMRGSVRNIKSDPTDAAALAHMALLDLKLPAPFNDTMSDIALRQKIGFLSKLEKKLQSLHMMQREYEAVCVLCSTELSAAEIDMKEQISYLSRTQERLAEEIEALVCSDDAMKRRVELLITIPGMSRGLATILCACLSTECTHPKQWIAFVGLDVTVRQSGNWKGRGRLSKRGHPYLRKRLYSAAWGAQMNDEVFATEYRKLREAGRTYREAIVILARKILRIAFAVCKKEQPYERKTSSAC

SEQ ID NO: 379105 - protein, 336 aa, unidentified
MFFVGIDLHKKTISLCVVNQERQVLQRRLLHCCQPDKIREFFAELGPFQAVVEATASYEWLWQLLEPLAERLLLAHPKKLRIIAESTRKSDRLDAQVLAEFLALDMIPQAYRPTPRQRQHRVLVRQRCYLRQQITGVKNKLRRILSNYNADRKDLFSGEGLAYLAEVKVVAADRFVLDQLHGLWEYLENQLTALDKELRRFARQAPAREQEARAVLESIPMVGDVTVDVVLSEVGDVRRFRSAKRVTAYAGLAPAQRESAGRKKVLGISKEGSRLLRWALVETAWRLVRHSRRWQNAYEQLLKRCGKKRAIVAIARRLLGVMVALLRSGQAYRLTG

SEQ ID NO: 379106 - protein, 411 aa, unidentified
MQVIYERCCGLDVHKRTITACRLKWLGSEWQKEIRQFGTMTKDLLALLDWLVSEGCTHVAMESTGVYWKPVYNILEGQFELLVVNAQHLKAVPGRKTDVRDAEWIAELLAHGLLRGSFVPPPGVRELRELTRYRTSLVRDRARTVNRLQKVLEAANIKLASVVSDIDGVSARLMLEGLVAGQRDTEELARLAKGRLKEKHAQLVEALSCRLQPHQSFLIAEHLAQIDYLEGAIERLSGQIEEKLRPFEQQIGWLDTIPGINRRTAEVLWAETGGDMSRFASARHLASWAGMCPGNNESAGKRRSGRTRKGSPWLRHCLVEAAHGAAHTKNKYLRSQYHRIAARRGKKKALLAVGHSILVIAYHLLTRKQAYADLGANYFDERDRQAVTKRCVNRLQKLGYQISLEKLQMAA

SEQ ID NO: 379107 - protein, 345 aa, unidentified
MTIIGCDLHTRYQVVAWVDEGTGEVRTRRLEHEKGEAQAFYASLPRGSVVGVEATIPALWFERMLAESGHELWVGHAAQIRAQAVRRQKYDTRDAEHILDLLRTNRFPRIWTPSVEERDLRQLLVHRMKLVRARTTVKNQLHALAMSQGVCRKQKLWTAKGRAELEGLTLLPWASQRRKELLSMLDQLDAAIAPLDQAVDKEAKGRAETVRLMTHPGVGPVVSLAFVLTLGPVGRFANSRKVVSYLGLNPRESSSGGRQHLGSISKQGNSMMRWLLVEGAHRAVVYDPEMRRAYQRLKFRRVSGVAKVAMARRLAVRLYWMLRAQVNYAQMVRMSGSPSSAVVSK

SEQ ID NO: 379108 - protein, 398 aa, unidentified
MYKQFIGIDISKDSFDLKLLQSSGEIKLEVKLTMDREGFDTLLKYLASYPKEEILIAMEATGIYHLPLLSFLLENSFKCVVINPILIKSFIGSTTLRKTKNDKKDAASIALFSLKSHQSLHLATSDIIENIKPLIRERENLSKDIARLKTEIKANLVQLFPELLKNTNIFTKSILNLLLKAPSRKAIRNLKEKTIQRILDDTSGNKVKITAKDILTLAKSSIAISDKYLEKVLTSKIRRLIAIQDELSILDTELENSLEDTDINDDIDILQSIPGVGSVTSKNFMVEISSVDKFSSVKQLCAFIGIDPSVRQSGTSINYRGKISKRGNANLRRTIWQMAIGTIRSCEKFNTYFSKKREEGKKFKQAVIAVANKLLKTIFVMLKNKSKFDEKLALGVSK

SEQ ID NO: 379109 - protein, 345 aa, unidentified
MNIIRVGVDIAKSVFHVHGVDRHSQTRWQGKYARSKWLDTLSKKVPVGAEIGMEACASSHYWARELQKRGYCVRLIAAQFVKPYVKSNKNDQVDAEAICEAMSRPNMRYVAPKTVAQQDVQAAHRIREELVGQRTAKANQIRGLVGEYGVVAPVGIQQLRRALPEWLEDAENGLSASFRVLLHGLADDLRYLDDRITALDERITESVKQDPVARRLMTLRGVGPLTASALSGALGDGKAFRKGRDFAASLGLTPRQHSTGGRDRLLGISKRGDSYLRKLLVHGARAVLRHIGGKDDGLSHWLQALVSRKHVNVATVALANKTARIAWALVHNETAYDDKLAAVGT

SEQ ID NO: 379110 - protein, 341 aa, unidentified
MSEYVGLDVSLEETSVCILNAAGSITFEGKVASDPVSIAALLEKRAPQAVRVGLETGPTSTWLWHELKAANVPVICIDARHAQAVLSVRINKTDRNDARGIAEMMRANWFREVKVKELNAHRDGALIASRALIVRQRCELENQIRGLMKNFGLRCKVTRRGGFEPAVLLLVRHHPALAEIIVPLLAARAALRAQEAVLSTKIKQRTQASPICQRLMTMPGVGAVTALAFSATIDDPTRFRKSASVGAYVGLTPRRYASGEQDRMGRISRCGDALARSYLYEAANALLLRSRTTHPLKGWAQKLAKRVGLKKARVALARKMAVVLHRMWVSETDFGANTAAA

SEQ ID NO: 379111 - protein, 320 aa, unidentified
MDKAEVFVGIDVSKKRLDVATHPALETWACANDGPGIARLVERLEALQPAGVVLEATGGLQLPVVAALEVARLPVTVVHPRQVRDFARATGKLAKTDRLDAGVLARFAAAVRPPLRPLPDAQTQALGSLVARRRQVVEMLTAEKNRLRTAGAPVRPRIQRHLGVLEQELSEIDDDLGQMLGESPLWREREKLLRSVPGVGPTLTSTLMAELPELGALNRRQLAALVGVAPLNRDSGTRRGKRTVWGGRAPVRATLYMAALVATRFNPVIRAFYQRLLGAGKPKKLALTACMRKLLTILNAMLQHQTPWRPLSYPIIGPCS

SEQ ID NO: 379112 - protein, 351 aa, unidentified
MFVGVDVHKDTHTAVGVSPFGETLFEMTVGNYEKDFKSLAKKVEQMKGGLSPYFGLEDCHGYGERLAQYLVLQYPVIHVPSILVDRERQNAPHPEKSDSLDAYGVAKVMLTASDTLLPHTVSEESKRAKQIKELSMDREYLVEERTRLKNHLHTILHQIWNTEYRTKFKDPFTLKALAYWIKAKPSCDPFLLRMMKRKAKRLVDLFHEINELEKEMRALLEKGKYTIQTASGCGVAVASTLVGEIGDISRFHSPASLAKYAGCAPRECSSGKTKRFKKTRSGNRRLNCAFHRMALSQISRSGSDKAKTYFKRKVSEGKSKSQALVCLRRQMVNIIWCMMKHKTVYDIHRND

SEQ ID NO: 379113 - protein, 340 aa, unidentified
MSLYGGIDLHANNSVVVLINEQDEVLYQKRLPNALSTVLEQVAPYQTALKGLVVESTYNWYWLVDGLMEAGYRVHLANPAAIQQYDGLKYTDDHSDARWLAHLLRLGVLPEGYIYPKAERAVRDLLRKRTHLVRQHTANVLSVQNILVRNTGARRSIKQIRELPKRELERLLPEADQILAVTSSLAVLDCLRRQIKALEQTVQTRLKHTPAYEQLLTVQGIGTILAQTITLETGAISRFPTVGNYASYCRCVDSTKLSNGKRKGQGNVKNGNPYLSWAYMEAAQHAMRFQPAAQRFYQRKLAKSNKNIILARKAVAHKLARACYYIMRDLVPFDVTKAFG

SEQ ID NO: 379114 - protein, 338 aa, unidentified
MTQHKIIGIDLAKNIFFLVEINHKGKNLGRKKLQRSKLLNYVANQTPSIIAMEACSGAHYWAREFEKFGHDVLLYPPQHVKNQRRKQKNDYNDAEAIAELALYQRAYPVPHKSIEQQDIQSLIRMRRLCVTERTRLINQVRGLVAEYGIIIPKGKASFRQTIPEILEDFENQLSPILRELLSRQFERYLYIDEQIQWFEEKLNQTVKQFDNAKRLMSIPGFGPLTSQAVAVWLGSGQQFKTGRDAAAAMGLVPKQDTTGGKVILLGITKRGNTYISSLLVHGARAALRRAKFKSDKLSKWMLELQERRGPNRAAVALANKFMRIAWAVTTKNEEYQPA

SEQ ID NO: 379115 - protein, 403 aa, unidentified
MNSVGIDISKGRSTVAVMRPFGEVVISPFEVRHTDSELSELARQLKSLNGETRVVMEATGNYHAPVAKLLHDAGLYVSVINAKLVHGYGNNELRRVKTDRKDAVKLANYGLDRWLTLPRYIPEEDTRLLLKNCYRQYRQYSKVQTILKNNLISLLDTVFPNVNRLFSSPARADGSEKWVDFVAEFWHCGCICERSEKAFVSKYQKWCKKHGYNFGEEKACAIYAEASGHIGVTPKSETTKLLVEQAVAQLRATSTALAALKHEMQSLASMLPEYPVVMDMFGVGPTLGPQLIAEIGDVRRFYSKKALVAYAGLDAPPNDSGDVTGRHKSMSKVGASSLRRTLFLVMSVYLQNAPLDEPVYQFMDKKRAEGKPYRVYMMASANKFLRIYYATVKAYLESLELTA

SEQ ID NO: 379116 - protein, 356 aa, unidentified
MRIHKVQNFVVKGKEVFVGLEDSKKTWKVAVRCNKMLIHRASMPAEHQMLIQYLRNKFPECTIHLIYEAGFRGFNLFDRLTEEGIDCIVIPPHLVTEPKVNRVKTDKRDANRLAVMLENGDFKEPCFVPDRERREDRQISRTLWGMQKDIIRTRNRIRKFLDFNGIEVPFPERWGKAEFEALKDLPLGDSLKTSLLALITLLAQLWAHKESLQEALRALCSKERYKKAFHIAISLPGIGWFTAIRLVLELGEDLSRFTTGKKIASFVGLTCSEYSTGETERKGRITGMGSGFIRSALIENSWMAIRKDPVLLAKFTRIWKGKGSKKKAIVAVARMLIVRLRACLISGTPYAIGTVR

SEQ ID NO: 379117 - protein, 341 aa, unidentified
MTKFIRNGVDLAKNFFQVHGIEREDSAPLTRKLTRAKFREFFSRLEPCRVGMEACGSAHYWGRELRAMGHEVVLIAPSYVKPYVKRGKNDAVDAAAICEAMSRPDMRFVPIKSADQQAVLMLHKTRDLLVKQRTMSVNALRGHLAEFGLIAAKGIHKVKELVALALADAALPEEAREAASLLASHAQALDAKIDALEKRIVRAAANNPVSRALDAIPGFGPIIASAIAASVADPGAFRSGRDFSASLGLTPGQHSTGGKQKLGPITKKGDRYLRKMLVVGCTSVLRAAHKYKGALAEWIAGLRARKPERFVAVALANKLARIAWAIMSTGECFRADIFARA

SEQ ID NO: 379118 - protein, 479 aa, unidentified
MGKGSGTTRGDRRRNARRERLRAMLPRGGAVVGIDLAEDKQALAVVDHDVRVLARKTVRVKAFRLGEALDWAVAQARGKGFAVVTVACEPTGPRWLQVQRLCAERGLPLVCIQPLVSHIAREQQDYTRHKSDESDCVMIARLAIELHCYIPEELDEAWAQLRQLGRRRAQLITAATAPAQRIRDFLSVAWPVVTGTCAYPLESTTWLAALQVVTDRCGGDPGRLAAMGDEAFTALVRGAQRGWGGQKAWGTICRRVFAALTDTEGVVVSCRRGLLRRCAGELGDLQRTRGQLREVEADMVAVLAELGLSRLGDIPGLTAVGAAAILAETGDPRRYDGSSSLVKHAGLSPSENASGAFAGQAHISRRGRPGLRLAVWRAVWPMLQYNPVMAAKYAAMTRAAGAAADAAQAAGAQSGAGSRQVSAAAAAARARRAKARVACAASLLRWIYSMVVHDTSWDAAVASGAPAGRYAPACQPEAA

SEQ ID NO: 379119 - protein, 310 aa, unidentified
MDAAVVGIDVSMDRLDVHVLPSGEAFFVANDAIGVETLADRLAGLGATVVALEATGGFEMLAASALSAVGLPVAVVNPAQVRSFADALGKRAKTDTIDAAVIARFAVASGVKAKPLADEQTRLFAELITRRRQILAMIVAEEARLKRAANRQLKKSISRLLVALRRELETLDEDLDSQVRASPLWRIKENLLSSVPGIGKGIARTLIAELPELGSLSARQIASLAGLAPFTRQSGKWRGKSFISGGRASVRAALFMGALVASRHNPVLKAFRDKLVAKGKPKIVAIIATARKLLTILNAIIRDQKPWQNA

SEQ ID NO: 379120 - protein, 355 aa, unidentified
MSQEKYIGMDVHQATISVAVMDAQGKLIMECLLETKAATIVEFIQGRQGTLSLTFEEGTSAAWLHDLLKPHVSRLVVCDPRKAALLKDGNKSDRIDARKLAELLRTNQLKPVYHGEHGVGTLKELGRSYLTLTQDVTRVMNRIKALYRSWAIPCSGTTVYAPRHRAEWLAKIGEPGVRVRAERLYQQLDGLQSVRQAARYDLLSESRKHAAVKLLREIPSIGPIRAALLVALLQTPHRFRTKRQLWAYSGFAVETHDSGEYRYVRGKLQRNRERITVRGLSDNYNKDLKNLFKGAAISARTRPGPLHDFYVALVAQGMRPTMARLTLARKIVTITLTLWKKGVSFDPQQLHRQAA

SEQ ID NO: 379121 - protein, 369 aa, unidentified
MPRFILVGCDVHDRRMVLRIAVDREESVRRDVDNDAESRRRLVEHLRSWAARLGAARVVLAYEASGQGFGWHDEVRAAGLECHVLAPSRIPRSDHQRKRKNDDKDAGVILELLRSHYLAGNALPAVVVPTPQERDDREITRTRAEVADGVGRTKTQIHCLLKRNGIRKPTKDLGCWTRGYRAWLAALSEHEGPLPTGARVALASLLRRLALWEEETKRLDHELIALAETPRHKPAVEALTHLPGVGLLVALVFLTEIGKPTRFRNRRQVASYLGLAPASYESGDSTDRKGHITRQGPPQVRRVLCQAVWSRVRSDLSENVVYQRLVARNPKRKKIAIVACMRRLAIRMWHVALPASSPRAETAPLAQAV

SEQ ID NO: 379122 - protein, 426 aa, unidentified
MSQQNISTPSTPPVYAAFVGLDWGDEKHAVSLCVAGATVIERTTLPQTPEALADWANALRSRFPNGKIALCLEQARGALLAGLMQYEHIVPYPVNPKSLARFREALYPSRSKDDPLDADLLLALLLKHREHLRPWQPDTVATRQLALLNEQRRHFVDDRTALTNQLLSHLKAIFPQALELVGEDLASRLATDFLKKWPTLQAVQKVKPAALRQFYYGHNSRSQDLITQRLERVKNAVALTSDPALLAVHTLAIQTLAGQLQALRPFLDQHEQQIADLFAAHPDAALFDSLPGAGPALAPRLLAALGSDRSRFPDALSIHCYSGIAPVTEKSGKTQYWVHVRWSCPIFMRQSWHEFANCSLKFSTWARACYDELRKRMDHHEAIRKLAYKWQRIVWRMWQEREPYDETRYLRSLQKRGLKIYAGLTP

SEQ ID NO: 379123 - protein, 411 aa, unidentified
MQVIYQRCCGLDVHKRSITACRLKWLGSGWEREIRQFGTMTKDLLGLGDWLAQEGCTHVAMESTGVYWKPVYNILEGQFELLVVNAQHLKAVPGRKTDVRDAEWIAELLAHGLLRGSFVPPVEVRELRELTRYRSSVVRDRARTINRLQKVLEAANIKLANVVSDIDGVSARQMLEALVAGERDTEQLARLAKGRLKEKREQLVEALSGRLKPHQSFLIAEHLAQIDYLEGAIERLSQQIEERLRPFEQEIGWLDTIPGVSRRTAEVLWAETGGDMSRFASARHLASWAGMCPGNNESAGKRRSGRTRKGSPWLRHCLVEAAHGAAHTKNKYLSSQYHRIGARRGKKKAQVAVGHSILVIAYHLLTRKQPYSDLGANYFDERDRQAVTKRCVVRLQRLGFQVSLEKLPVAA

SEQ ID NO: 379124 - protein, 427 aa, unidentified
MEYNQNRKIEQVLESTLIIGIDIAKTNHVGRAQDFRGIELGKALTFKNSQKGFTKVLDWTHKLMAKHGKTQAIFGMEPTGQYWLPLAQFLCQNGIKVVLVNPMHVKKSKELDDNSPTKNDIKDARVIAQLVKDGRYSEPNIPTGIYAELRVGMNLRDRLTEDLRRVQGRIDNWLDRFFPEFLNVFNEWTGKAALLVLEYAPLSQEIVDKGADGIMECWRQGMKRSAGKKKALQLVEAATESIGLNQGSIMGRQEILTLLNQYKFIQQEIEQLLQQLENLLGEIPGAKEMMTVPGVGMVTIAGFIAEVGNLDHYSHPRQIQKLAGLNLKENSSGKHKGQTKISKRGRARLRALLYKCIMPLVAKNEEFKALHHYYTTRAQNPLKKKQSLIALCCKLIRILFAIGKKKTPYDGSELIKNSTVLSLQDAA

SEQ ID NO: 379125 - protein, 341 aa, unidentified
MEEVSTIGLDLAEHVFQVHGASAAGAVLLRKRLRREKVLSFFAGQPRCRVAMEACASAHYWARAIGELGHEVRLIPPAYVKPFVKRQKNDMADAEAICEAAQRPTMRFVAVKSEAKQAAAVVFRARDLLIAQRTQIINALRGHVGEYGLIAPQGPSHIERLIAQIEDVTSSIPNAARSCLLRLVGALRQLQGEIAELDKEIAARAREDEVARRLMTVPGIGPLIATAIEALAPPVETFRSGRDFAAWIGLTPIQRSTGGKERLGRTSRMGERTLRRLLIFAASAVVRWAKRKGVPPGSWLGRMLARKPPMVVIVALANKNARIAWALLAKGGIYRAPAVVA

SEQ ID NO: 379126 - protein, 342 aa, unidentified
MSMTIGIDPHKATHTAVAIDGDERPVAQLTVTADTAQTQRLLAWAEPFGTDRTWAIESATGLGRLLAQQLVAAGESVVDVPPTLSARVRLLGATKASKNDPNDALATAIAGLRHCGLRAVTTDHHVAVIRLLVDRHQALTSSRTQAACRLHVLLRELIPGGAPVRLSADRATIILRGVRTGDDIVAVERKRLARDVLVDIRRLDRDLADAKQRITDAILASGTTLTDLHGVGPITAALILGHVGDPTRFRTRDQFASYNGTAPIEASSGPRVRHRLNPRGNRTLNHAIHMIAVTQIRNDTPGRAYYLRRQAEGKTRKEAIRALKRRVSDAVWRQLQVDLQQR

SEQ ID NO: 379127 - protein, 350 aa, unidentified
MLIVGCDYHPGFQQIAFVDTETGEFEERRLQHRGEAEKFYRDLAARGVKVRVGMEASGHARWFERLLAELQLELWIGDAAEIRAKRVRKQKTDRQDAQHILTLLVQDRFPRIWVADWENRDLRQLLWHRHRMVQTRTRIMNQLQAVALNEGLRCKKRLWGKKGRQQLEGLRLAPWATRRRRDLLELLDRLNPVIAELTHEIEQEVEKCPAAQRLMTHPGVGALTALAFVLVIGTAERFQCGKQIASYLGLVPAEDSSGERRRLGHISKQGSAILRFFLVEAAQVTVRSVPEWRSKFFHLAMRRGRKIAKVAMARRLAVHLFWMWRKQWDYQQLNEFGPYAGKPGTGVGVH

SEQ ID NO: 379128 - protein, 338 aa, unidentified
MTTKINMLAIDLAKSSFQVCAVGLDGTVLYNRALSRTWLATLLTEQPTCIVAMEACATSHHWGRVAQRHGHEVRLVPAAYVKPFVKRQKNDRADAEAIAEAALRPTMRFVAVKSAETQGRAVAFRTHQCLVRQRTQLINALRGHLAEFGVVAPKGPASLKLLENTLVDEFTDLPEPVREMGAIYVEQIAGLTEVIERLASELETATKTDACLRRLCTIPGIGPVTAGAVAAFAPDLETFDSGRNFAAWLGREPLQRSTGGKAKLGAVSKMGQTDIRRLLFVGAMSVIRWVVRKGGSENRWLEALVARKLKMVAAVALANKMARMIWAVTTKQEDYRMA

SEQ ID NO: 379129 - protein, 408 aa, unidentified
METIHPICCGLDVHQASVSACLRRVNAQGTVSVESRTFGTTVKDLVALADWLVAEGCPIAAMESTGVYWKPVWNILSPLLDIWVLNARDVKQRRGRKSDRADAKWIAELVAHDLVQPSFVPPPRIGVLRDLVRMRTVLVQGRTQVKNRVLAVLEDTNVKLASVVSDPFGASGRKMLEALVNGERDCKVLSEMAMGVLRRKIPQLEVALQGSFTEHHAFLIRLGLESLDQGNRQIAELDAQIERLMEFLQEEASRLTSIPGVGHNAARVVVSEIGTDMSRFGSADRLASWAGLCPGNHESAGKRYSGKTRKGNRYLRRVMAECAWAASKTDTFLGRTFRRLQIRIGGKKAAVAVGHKILVIIFHLLNEGQLYDDGRYDRINQREQIRQKNRALTTLQRLGYQVALTPAS

SEQ ID NO: 379130 - protein, 339 aa, unidentified
MPLTPVGIDIAKAVFQVHYVDPETGEIVNKQIKRAKFLEYFANRAPCLIGMGACGGAQHWARALIRMGHQVRLIPAEFAKAFNIRNKNDAADARAIWLAVQQPGRPVAVKTEAQQAVLALHRMRQQVVKFRTMQINSLRGLLTEYGEVMGKSRAALDKAIPDVLARVAERLPVILIDTLREQWNGLTKLDEQIAEIERRLRQWTKEDKAVKTIMDIPGVGALTATAAVATMGEASAFKSGREFAAWIGLVPKQTGSGGKVNLLGISKRGDTYLRTLLIHGARSVLSHAKEPGPWFEQISKRRPPNVVIVALANKMARMIWAILAHERQYQKGYVSVKPV

SEQ ID NO: 379131 - protein, 388 aa, unidentified
MKEATIERRVIGLDIHPDTFTAAALVGLDAAKAQIQWVTQSLPMTQLETWANSNTRAEDTLVVEASGNSFETVERLEKRGRHAVVLESLRAGQIKKAYCSTDKISAIKIARVYLSGLAVLVWTPDETTRARRDLFHRYRRAVTDSTRHRNRLKSFLSDHGVRLPKGTRLIQPSGQATILSARTWTALQQNLLQMMRADLIQAEGQRKELSRLMAREVVRDPTLLRLVRLFGVRHIVAFALGAFIGDIRRFRSPKQLVAYIGLNPRVALSGQGGYVGSIAHQGRWELRALLAEAAHSILQHTNPLHAWGWKLAYRKGKNCAIIAVARKLTVACWYLLQGLFTPLQEVTATLRLKIRKIVTVLGRATVREMGYKTSIEFEKCLHLQIMKA

SEQ ID NO: 379132 - protein, 446 aa, unidentified
MMKLKYSICCGLDVHKNVIVATIVTTNKDGISEYLQKSFSTINSDIQRFHNWLIENNCYHVCMESTGKYWIPIFNYLENDIDVCLTHPKYVKAIKGKKTDKKDSKWIADLYKFDLVRCSFIPPKDFRQLRELSRYRFKLVCMKSSEKNRIQNCMTISNVGIASVLSDPFGKTATEIISYLLEHTADSMDEKAVRKLIKKGAKSKSDEIIEAIKGYTIETDQAKKLELARGHLEYLDDMITQTEVELYVRIKPYYEFVEFVSTMPGMTELSSTIVLAETGVDMDIFDDAKHLCSWCGLSPANNESAGKKKSVRIAKAGDYLKPMMVQCALAAIKSKKQPYFAIKYGRIKKRRGHKKAIIAIARMMMVCIYHMVSEKKPFTPTDYEELMDPQNHVESVVLNENNVFAYLESLGYDSSKLVGEGEQEAQFHCPWYWHTDHGIFVRHPDL

SEQ ID NO: 379133 - protein, 364 aa, unidentified
MKSLHYAGIDVHKETMDLVVYRDDERHAFVECRIPNREKPVKKLFGKLLEEGSVTACYEAGCMGFGLQRFLSGMGVTSIVVAPGKVPKRSGDRVKTDRRDARSLAQQLRAGTLEGIHIPNDEDEAVRDYLRTRGDVRLELKKTKQRLHRFLLRHGYIYDSKRYWTHRHERWLRSLAFDRTMLKESFDEYYFMIKGLEEQLRLMDKRIEEIAGKEPYVERVQKLRCLKGIDYLTALSFVCEIGDFSRFGHAEAFMAYLGVIPREYSSGEKRRQGSITKSGNAHLRNLLIESSWHYRYKSAPSKRLNERREGQPAAIIAYADKAMMRLQRKFYHLLLKGKTKQTAVTAVARELAGFVWGMMVGQTA

SEQ ID NO: 379134 - protein, 391 aa, unidentified
MFYIGIDIAKKNHEASIIDSSGKSLSKSISFPNSTKGIEKFNNFIAEFGITTNNCIIGMEATGHYWISLFSYIVDLGFTCYVINPIQSDAFRKMYVRQTKNDSVDSFIIAQIMRFGEFSISNFSDENTFALRNLTRYRFALVDECSDWKRKLVAILDQVFPEYSSLFSNIYGVASKELLSKYPLPEDMLSIPAEKLGNLLYECSKGRLGINKAEEIQSRARESFGIKFAKRSFSFQIKQIISQISFLEEQLKEIEIEISCLLEDICPVITTITGIGSVLDASIVSEIGNISRFERANQLVAYAGLDTRIKQSGDFSATNTKLSKRGSPYLRRSIWLAATVAAFKDPALSIYYQGLRARGKAHGTAIGAVARKLTNIIFAVLRDQKPYTPNI

SEQ ID NO: 379135 - protein, 391 aa, unidentified
MIYVGIDVAKDKHDCFITNSNGEVLFKSFTISNNQDGFNVLYQRIESVMEDVTKVKVGLEATGHYNYNLLGYLIDKGLTTYVINPLHTNLYRKSLSLRLTKTDKVDARTIAYMLMSDVNLKSYSNTSYHNEELKSLTRYRFDKVKERAKLKTSVSRLVCILFPELEKLVPTLHMTSVYALLSEFPGAKQVAGAHLTRLTNLLSDASKGRYGKDTAITFREAARASIGSNMPAKSLELKHTIKLILELGSEIDEIENEIKFIMDEINSPILSIPGINYRMGAMIIAEIGDFSRFDSPDKILAYSGFSPSTYQSGQLNSAYSHMEKRGSKYLRYALYNAAKYVCHWDATFAEYLAKKRAEGKHYNVAISHAVKKLVRVIYHLVKSNQQYMKVA

SEQ ID NO: 379136 - protein, 347 aa, unidentified
MEKASPAEVQVFAGIDVSARELTVAAQCGIEEGIAVTTFRNKAAGHKALLAYLLRANARVRVCLEASGNYSLDLALTLQAHPQVEISVVNPRRARRFAESLGERSKTDPVDARVLCEYALRMRWVPWVPPSLAALRLRSITRAIEDLVAMQTQEKNRQHSLLASDALPALLIRELEQHLRYLKLRITRLRRAALRLIARNPKLNRRFHLMLTTPGLGETSSLQILGELAVLPDTLDARQWVAFSGLDPGQFSSGTSVEKKPRISRAGNRHLRRALYMPALVAMRHEPFMRGFYQRLLRRGKAPLQAVVAVMRKLLHALFAMFHLDEAYDGSKLCPAEFACDTAVVCA

SEQ ID NO: 379137 - protein, 358 aa, unidentified
MQRNKKTFKGQNIYIGIDVHKKNWQVAVITESGYTERLSTAADAKALFKFLKSHYPEGNYRAVYESGFSGFATHYALSELGVSCVVAHAADIPSSQYELTMKSDRIDAEKLARALRAGLVRGIYVRPKDNLDDRGVLRIRKTIQIQVGGYKTRIKHLLHSNGVELPERFSRSGTHWSRAFIAWLREDVRLLSDTRRSLDLLLLQVETLRANLLEATRRVRALSMTDRYREDCALLMEIPGIGLTVAMTILTEVCDIGRFGNERLFASYLGLVPTSHSSGERVSHGEMTFRGNKHIGPLLVEASWVLIVRDRELGRMYTEFRWRMAGQKAIIKIARKLSNIIFAVLKTRKAYEPYRRDA

SEQ ID NO: 379138 - protein, 335 aa, unidentified
MKHYAGLDLSMESTQVCIVDENGRKLVSEKVESTPEAIATFLERYGSIERAVIETGRMSPAICLGLRALDVTVVCIDARQAHQSLKAMKANKTDPHDAAGLAQLARTGFYKEVHVKSPAAHGVRSVITARGHLVEARVRLDNMIRGLCATFGYRPGAGQGKAFLQRIMQAAHIPGLGDAIASLLSVRAELVEQIKAMDRQLRIIASQSQACEILMTIPGVGVQTSAAFAAAVDEASRFRQSRNAGAYFGLVPRRHQSGELDWTGRITKQGDGTVRKLLYEAANSILTRSRETFALKAWAMKIAKRRGLKKARVALARRLAVIMHAMLRDGTLFQA

SEQ ID NO: 379139 - protein, 410 aa, unidentified
MKQLYERCAGMDVHKKTVTVCAVTPEKTETITFLTMTGHLEKMAEWLEELGIRHVAMESTGVYWKPLYNLLESRECGFEIVLVNAHHVKHVPGRKTDVKDAEWLAQLMQHGLLTASYVPSREQRELRELVRYRRSLIEEQTREVNRIQKVLEGANIKLGDVATDVLGKSGRAMLTAMVNGEDDSAVLADMARGRLRNKLEQLTEALHGVMGEHQRMILKIQLERIASLESHIEALDQEVAERMRPFDKLIARLDDIPGVGRRTCEEILAEIGIDMSRFPTSRNLASWAGMCPGNNASAGKRKSGKRAPGNPHLRRALIQAAHAAARTRNTYLSALFRRISSRRGAKRAAVAVGHSILVTIYHMINDGSVYDEMGAAYLDSLNEKNTVRKAVKRLESLGYTVSLKHSTEMA

SEQ ID NO: 379140 - protein, 424 aa, unidentified
MNNTQNQKIAQVTDKTLIVGVDIGGEKHFARAILARGFEVSKKPFPFMSTEDGFDSFVSWAYNLANSHKLTKIMIAMEPTGHYWFTFAAFLKRYDVHVVLVAPQHVKHSKEMDDNTQEKDDRKDPIVIARLVPEGRYLIPYIPEDVYAELRAAFNRRCELVEEQVRIANRMIRWFDIYFPEYRKVYGRMDAKTGIMILKRAPLPADILSIGVDGICQIWKDAKVRGYGPKKAKQLFAAAEHSVGMEGCASVRWNLWQLLEEYELVERQLNDILHLIEGCLYQIPGADKLLKVPGAGLITVAGFLSEVGDIKRFSDPKQIQKLAGLAVVENSSGKRKGLPGISKRGRSRLRWVLFQLARSMVMFNPEMKAYHQYYTTRKDNPLKKLQSLIAIAARIARIFYGMLKNGTEYDPTMVMKDFNKAVAA

SEQ ID NO: 379141 - protein, 355 aa, unidentified
MTSTKYIGMDVHKESISIAVMNAVGKIVMECVIETKANMILQCIDGLRGDLYVTFEEGTSAAWLYDLLKPHVTKLIVCDPRKNASMREDNQNDKIDARRLAELLRIDHLHPVYHGEHGLRTLKELVRSYLTVTKDLARVKTRVKAIYRSWAIPCDGKQVYAACHRAEWLEKINEPGVRRRAEFYYQQLDALRTVRQQVRRELLAEGKKHQAWKRLCQIPSMGPIRAAVLLGILQTPHRFRTKRQLWTYSGFGIETQSSADHRSVNGQLERAKKQISIRGLNRNCNHDLKNLFKGAAIVASSKPGPFQEFYTTLLTKGIRPEMARLTLARKIATIVLIVWKRGACFDAQHLKPQTA

SEQ ID NO: 379142 - protein, 338 aa, unidentified
MAIIAIGIDLAKNVFAVHGVDTTGKAVLVRPAVRRDALLELIAKLPPCLIGMEACSGAHHWARQFQQFGHEVRIIAAKFVAPYRLSGKRGKNDAADAQAICEAVQRPQMRFVPIKSEDAQGRLSIHRVRQGFIEQRTATINRIRGLLSEYGHVLPQRAEVVRREAGLCLEDLPGWANTAIGDLLSELHRLDERIAEYDRHISVMAKADERCLKLMAMPGIGDKTATALMASIGSAHDFKCGKQLAAWLGLVPSQYSSGGKQRLGRITKAGDRYLRMLLILGARAVVAAAKKKEDRLSRWVTELAERRGYWKAVVAVAAKNARMAWAILSKGEAFKPMT

SEQ ID NO: 379143 - protein, 344 aa, unidentified
MSNLDTCGIEVSAKELVVRLRRQEDLEPLRNFTNTPEGHLIILRYLRRAGRVVRVCMESTGLYGLDLALALSGQEGIEVMVANPRAVRHFAHALMKRSKNDQIDAGVLEQFALHMPFKPWQRPSVAMLALHALARRLRELVEMQTAEKNRQHAAGLSKAIPAVVRRDLARSLRAQERAIERLTRQARKLIAQDPQLAERFELLDSVPGIGETSAVQLLGELGVLAPGLEARQWVAYAGLDPRQYTSGTSVHKKPRISKAGNKHLRHALFMPALVAVQHDPHLGAFYQHLLAKGKFKMQALVAVMRKLLHALHAMFKTHQPYDGSQLFRLNPAPAQEVTHVLVAC

SEQ ID NO: 379144 - protein, 315 aa, unidentified
MIDVTTSATRRFIGCDVGKSNIAVFDSAENRGFALPNEREALEAFAASLDATCFVVCEATGGHEAALLDALAHAARAVHRADARKVKAFIRSLGTLGKSDAIDARALARYAEERHDRLALWQPREAVRDALHVMVTTRRDLVAERVACANRLAAPGSAPVAARLKRLHAAIEAEIAGLETDMAALIAANAPLQRAAKTLQSIAGIGATTAIALLALMPELGTLDRRKAAALAGLAPHPRQSGKTDAYRRTRGGRPDVKRLLFMAALSARRHNKTLKPFYERLIANGKKPLVALTALMRKLVVSANARLQNSAQPI

SEQ ID NO: 379145 - protein, 338 aa, unidentified
MELYAGIDLHSNNSVLSVLDGRDRTVFAKRLPNHLPTIVEALRSCAGTLYGVAVESTFNWYWLVDGLQDEGFPVRLVHTTAVKQYDGLKRGDDFGDARHLAQLMRLGVLPTGYICPPEQRAVRDLARKRAQLVRQRTTQILSVQNLMARNLAVSVTGNEIKSWDDEVIDGLPLLEQQGLAVKANLAVLNCLDEQIKRLEQAILQQVRPREDYRGLRTVPGIGEILALTIALETGDIGRFEHAGNFASYARMVDSRRESNGKKKGEGNVKSGNRYLAWAFIEAANFAVRYDATIKRWYQRKRSRALPIVALKAVGHKLARACFYVMRDCKEFDVTKSFE

SEQ ID NO: 379146 - protein, 323 aa, unidentified
MTKDIKYFGLDISHLVFDVTDSDGNYYQFKNNAFGFKKFTKLFNNESHCVMEATGYYHYQLAYHLLESGIKVSVENPLAVKRFIHMKLSKVKTDKSDSKLICDYATQVELKLWQGNSKDEIECLQITRALSVYTKQSTMLKNKLHGESVLGNPSKVVVSSLKRSLRRLQREMKTLEDKLLVLVKEVHQDLLTRLKTIPGIGPKTAIMLVVLTGGFDRFTSAAELCSYAGLTPVIRQSGSSVKGRPRISKIGNQKLRNLLFMCSFNACKYNKACRDLYERIVAKGKSKKLALIAVCNKLLKQAFAIAKSGLIYDDTYRSTLVKN

SEQ ID NO: 379147 - protein, 340 aa, unidentified
MHITRIGIDLAKNTFSICGVDVNDKIVLERTLKRKELLAFFAKTTTCVVAMEAGSGAHHWARELMKLGHDARIIDPKFVIPYRTHAKKSKNDRNDARAICEAAGRPHMRFVPIKSDEQQATLIIHRRRRALVTEHTRTANQIRGFLAEFGVIAPKGVNSLKREWHRLRTDYALHVPAMAWEEIDPLYRHLLDVHQQILAYDRRINALNREDARAQRLLDINGVGPVTASAIVATVGDATLFKNGRQFAAWLGLTPREYSTGGKSRLGRITKRGEVYLRTLLVHGARSELRLTHKRTDNKSQWAEHLRESKSWNKTAVALANKHARVIWAILAKGETFKPV

SEQ ID NO: 379148 - protein, 338 aa, unidentified
MNVKVIGLDTAKHVFQVHGADKTGRAVLKKRLKRSQVPDFFGSIAPCVVGIEATRGAHYWARVIGAFGHQVRLIAPQFVKPFLRSQKNDPGDAAAICEAVSRPEMRFVAQKSIEQQDLQALHRIRSRLIGCRTQLGNQIRGLLAEYGVILPLHLSQVRRNLPALFSEEHPLLSGFTRELLADLYQELCALDRRIQALEEKIQASFEANALCQRIAEVEGVGPMTATAVVAAIADGRAFRNGRQLAAWMGLVPRQHSSGDKQRLLGITKRGDPYLRMLLIHGARSVVYRAAGKTDSRNRWIAEKQRKLRTTKACVAVANKNARIIWALLAKDEPYRMVA

SEQ ID NO: 379149 - protein, 339 aa, unidentified
MTIVGCDFHPGWQQVAVFDSETGEIRELKLENGNGEAASFYRGLSSPVRVGFEACGNTQWFEDLLDRLGHEVWIGDAAEIRASYVRKQKTDRRDAAHILKLLMEDRFPRLWRPSAAERDLRQLLIHRHKLVGIRARVKNGLQHLMLNRGVQLKQKLWSEAGQKMLRALPLEGWAAQRRQDLLNLLSGLNPQIRQLDEAIERAAQKNPRAQLLMTQPGVGPITALAYVLTMGDVNRFPRGKQVASYLGLIPSERSSSNRRRLGSISKQGNSFMRMLLVESAQTVNRLDEGFRKQYHHRCHRMAKGVAKVAAARRLAVRLYWMLRTNTAYPEIAHIESSPR

SEQ ID NO: 379150 - protein, 386 aa, unidentified
MQASNVCTPTVGDIGTIFVAIELSQKSWLMTIHSPDRDRISRHKLTGGDHAGLLSLLEGIRTRASRKLGSAPAIVSCYEAGYDGFWLHRLLTAAGIGSHVFDPASIAVEQRGRRAKTDRIDGELLLRTLMAYCRGEPRVVRIVRPPSPEQEDARRETRERDRLVKEQGGHTNRIKALLRLHGMAVGNPRRRDWLKWLSAQRDWQGQTVPRQIKTEIEREHARLMLVREQLAALEQQSAQAQPAPAAAEMARRRNILFQLKSLGPAFSGTLTNEVFYKNFDNRRQVGAYVGLAPSPWKSGGIDREQGISKAGNPRARLAAVELAWLWVRHQPNSALTHWFLARTVKASKRIKRIAIVALARKLMVALWRYLTTGLVPVGAVLKPVEA

SEQ ID NO: 379151 - protein, 337 aa, unidentified
MKRYLGVDLHRTQLTVCTRLESGEESVREWSIKDLPKFVEQLGAEDEIAVEASGTTARFYDAVAGRVARVVVVNPHKFKIISESVSKTDGKDCRELALFLSKDLLPEVRMKPKKQRELAHMTETRDLLVKQRSALKGKINNLLAMQGINLKREALSSKVALERVMALEVSAMVKLELRVLVEQIRALSASIGELEELIAEEGEQLPGHRNLTSIKGIGSLSATVLLTRIGSVRDFADENKLAAYLGLVPRVQNSNETERNGAITKMGNKLARTALVQCGLVAKRYSPYLNRFYERIKHRRGGGKAKIALARKMVKIVYDTLKNEWVFDDFPSFTLAA

SEQ ID NO: 379152 - protein, 355 aa, unidentified
MNDVKYIGLDIHQATISVAVMDSQGKIIMESILETKASTLLEFLAGLRGSLFVTFEEGTWAAWLYDLLKPHVTEVLVCNPRKIPLHKQGNKSDKIDARKLAERLRLHDLKPVYHGETGVRMLRELARSYLTVVKDLSRVMNRLKALYRSWAIPCAGRDVYYRRHRSQWLEKIPEAGTRRRAEQLYEQLDMLQHLRQQARRELLAESRKHAITAKLRQIPSLGPIRSALAVALIQTPHRFRGKRQLWTYSGLGLETRDSGEYHYVSGQVRRRKKQATIRGLNKDYNHDLKSVFKGAATRASVKPGPLQDVYQRSLAKGIKPTMVRLTLARKIAAITLTLWKKGEDFDVNKLNSQAA

SEQ ID NO: 379153 - protein, 392 aa, unidentified
MVVSVGIDVSKDKHDCFIFSSEGEVLSDVFTIPNTMDGFHSLLQQIWKCSNSQDKIKVGLEATGHYSYNLLGFLLDNGLATYVLNPLRANLYRKSLSLRKTKTDRVDARTIASMLLSDAGLKPYTDTAYHNEELKSLTRYRFDKVKERAKLKSSIARLVCILFPELEKLVPSLHIASVYALLEEFPGAKQVAAAHLTRLKALLETASKGRYKRDMALEIREVARNSIASPLPAKSLELQHTIRLIRELDNEIAEIEEQIQSIMDELHSPITTIPGLGFRMAAMILAEVGDFTRFDSPDKLLAYAGMSPSTYQSGQLKNCYPHMEKRGSRYLRYALYNATKYVCHWDPTFADYLAKKRAEGKHYNIAISHAAKKLVRLIFALEKSRQPYCSAA

SEQ ID NO: 379154 - protein, 369 aa, unidentified
MSHAKLTVTALARPPRELREQARGRARSGAAIVESLSKPERLEGSESRIERKEGSNNMEQQFVGIDVSKAWLDTEAIPQSQSMRYGNDAAGIVALVEAMQAATPALIVVEATGGYETAVASALSAAGLPVVVVNPKQVRDFAKAMGILAKNDRIDARVLALFGQRIRPQLRPLPGVEQRELAELLDRRSQLVVMRAQERARLATALPVAKASLVEHIHWLDERLRQLDIELTARLRTSAAWKVKVDLLKGVPGIGKVTIFTLLARLPELGQLNRGTIAALAGVAPFDDDSGKRRGQRFIRGGRAEVRNVLYMATLSASQHNAVIKAFFARLTAAGKPFKVAITACMRKLLTILNAMLKNNESWHCPVTT

SEQ ID NO: 379155 - protein, 339 aa, unidentified
MTEVTTIGVDLAKNVFQIHGVDASSQPVIRRQLKRSQVLSFFKKQPPCLVGMEACASGHHWAREVSKLGHEVRLMPARYVKRNKNDAADAEAICEAVTRPTMRFVPIKTREQQSGLMQHRTRKLFVRQRTALINAMRAHLAEFGIVAGVGRNGVEKLVRLIDKGDDERVPSVARECLLALRDQLEAVKFRIHELDLRILAWHRSSELSLRLGEIPGVGPLIATALIASIPDPHAFRSGRDVSAWIGLVPKQNSTGGKERLGHISKAGDRYLRSLLMIGAFSLIKRAKQAGSTPRPWLAALLARRPTKVAAIALANKIARIAWAMMVRGTRYSEPAAQAA

SEQ ID NO: 379156 - protein, 369 aa, unidentified
MNFIGIDLHTNRFTCCYRDEHSPADKPAQGRVIKTFELDTEGLAAFYRTLTGDTYVLVEATITTFSFVRLFKERVKEVVIANTYELKQVSLARCNTDKIDADKLCRIIKMQVLSGETSVSPVTIPPQEIQVLRGLFTTYRLFQKQNVQLKNRIHSLLKEQLYGFTQEEIFDQRSRKKIRAIAPDSALCFQVNMLLDRLERDEADVETLKNRILLEAAPFMAQIEILTSMKGISVFIATAIIADIIDVSRFKNSKAFTSYLRSAPSVANSNTSVSIRGTNKKGRKLSATLLTQSLNHVLDSSLKLRRWYDRLCEYKKPGLVRTGLRRRVLAEIFQMLKKGEYHYGRDEKNHFAKMVQYRRFLEKQKNNAI

SEQ ID NO: 379157 - protein, 355 aa, unidentified
MDGKKYIGMDVHQASISIAVRDATGKVVVESIIETKAASILGFIRGIQGSLWIIFEEGTSAAWLYDLLKPHVTKVIVCDPRKNALLNAGNKNDRVDARKLSDLLRAGLVTPVYHGESGVRTLRELGRSYLTINKDLTRVMNRLKALYRSWAIPCAGEKVYSPRHRNAWLEKLSEPGVRRRAEQYYQQLDGLVQIRREARRELLTESQKHPATQLLRQVPRLGPIRVALLIALIQTPHRFRTKRQLWAYCGLALQTRASGEYRFSGGELQHSKKLPALRGLNVNHNHDLKNLFKSAATHVSTSTEPLGDFYRSLLAKGMKPTMARLTLARKMAAIVLTIWKKGARFDPGELKRQAA

SEQ ID NO: 379158 - protein, 406 aa, unidentified
MELVPLHKRVIGLDVHQAQITACAILEEADGETRIEQRQFGAFKKDRRALAAWAAALDPDEVVMESTGIYWKSPYAALEAVGIRATVVNARHVKQVPGRKTDVGDAQWLATLARAGLLRGSFVPPAKLRELRVISRQRQKLVSLLTAEKNRMHKVLTDAGIRLSVVVSDIHGQSARAMIKGILDGQAPHEVLNLASRRLKASREELHDALQGELTASHGFVLDELLRHIEELEARIARFDARLLGELASEKNALALLQTLPGVDVIGAAMLLVEIGSDMSVFGTPDRLASWVGICPGNNESAGKRKSGHIRKGNPYVRRLLCEFAQAARRTKSAFQSKFQSLIVRRGYKRAIVALAHKMLRTIFFMLKRGEYYRDSATHYEQLSAQRNASRWIKALTRFGFIPAAA

SEQ ID NO: 379159 - protein, 351 aa, unidentified
MENIALIGIDLGKNSFHIHCQDHRGKAVYRKKFTRPKLIEFLATCPATTIAMEACGGSHFMARKLEELGHFPKLISPQFVRPFVKSNKYDFVDAEAICEAASRPSMRFVQPRTESQQAMRALHRVRESLVQDKVKTTNQMHAFLLEFGISVPRGAAVISRLSTLLEDSSLPLYLSQLLLKLQQHYHYLVEQIKDLESQLKRKLDEDEVGQRLLSIPCVGTLTASTISTEIGDGKQYASSRDFAAATGLVPRQYSTGGRTTLLGISKRGNKKIRTLLVQCAGYSYKTGTPVWQVGRLGQGVVVSEKQLCRHLCSGKQAGQNSLGTDGATANLRSIKAEIHQFKQSFIWFCEY

SEQ ID NO: 379160 - protein, 371 aa, unidentified
MKDTIKYVGLDVSKEKIAVAIADEGRDEPRYWGMIPNTPESIRKLVKKLGEKDNLRVCYEAGPTGYGLYRLFLSLGIECEVIAPSLIPKKPGERIKTDRRDSIKLAKLFRAGELTPVYVPTEDDEALRDLVRAREDAKEDELRAKHRLSKFLLRNDIHPPFKGKKWTRRYREWLNTLKFERSTSKVVFQEYLHHLQEIEQRVKRLEEEIKLQSTEGYHAPMIQALQSLRGIATITATSLVAEIGSFKRFDSPKKLMSYVGLIPSESSSGEIRRQGKITKTGNRHVRRLLVEAAWSYRFPPAIKGDLKKRLEGQLPNVQMISWKAQNRLHKKYFRLLSRGKAFGKALTAIARELAGFIWAVTQEVENSTITK

SEQ ID NO: 379161 - protein, 331 aa, unidentified
MKIREIIGIDMSKLDFHACIHTTQVFASFENSTKGFKALLKWVAKNSPHKPSQTLFVLEHTGRYSHNISYHFSANEIEFALVPGLEIKRSLGITRGKDDKIDAAKIALYGYRLRDEIKPTKLPGKQLDKLKRLLTLRDRMVRQRAGYKASLKEDRHVFCEEEAREIIEHQEDIIKVLSANISRIEKQMGEIIKANKKLNKLFKLLTSIKGVGEVTARYTIVYTAAFTKFATWRKFASYCGVAPFPHRSGTSVKGRNKVSNLANKKIKSLLTMCVGSAIQSNPEMKAYYERRLKEGKSEMSTQNIIRNKLLARMFAVVKRGTPYVNTMKYAA

SEQ ID NO: 379162 - protein, 458 aa, unidentified
MEEPQEVPADGEHERVWERVAAIDIAKASGVVCTRVPDEDRPGRRKTHLWTVQATSKAVIELGDYLRARQIQVVTLESTSDYWRIWFVILEAAGLKVQLVSARAVKNAPGRAKTGKKDAVWLAKLTGKGLLQPSFIPPYEIRRLRELTRLRAALVHDKSRYRARLEKLLERARIKISAVLSTLDTDTARAMIEALIAGQRNPRVLADLAIGKARARRAELTLALEGRREDHHSIQARILLDDIDALNRQAGQLTGTIGELISQIPAAWGTDADGTTGPHAGTSPQAPVLPAIAQLDAITGCGIIAAQAIIAGIGLDMTVFGTPGRLVSRAKRCPATRQSGKKTSGGKAGKGNPWLNGILGEITASAARTDTFPGERYRRLARRRGKRKAMVAVARSILVIIFALLSDRSVRFRDLGPDFYDTQINRDRKIRNHIRQLQAPGVDPDDLAALLTKNPPAA

SEQ ID NO: 379163 - protein, 353 aa, unidentified
MPIVAEEYQFVIGVDTHAASHSFAVIAPATTAVGQEAQFPATAAGLSRAVAWAGRHAGSPEVALVVVEGIGSYGAGVARAFMAAGYRVVEGGAQSAGDRRGQGKSDALDAVRIARSVTGTDTAQLREPRADGIRNALRILIISREMMTRERTAAVNALTALVRTTDLGLDARKALTIGQLRVIAAWRARTGDAIDVAVARAEATRLARHALDLGTQAAANARQLDGLVRQVAPDLLDRRGVGPVTAAVLVVSWSHHGRVRSEAAFAALAGTCPIPASSGNTTRHRLNRGGDRRLNWAIHTIALGRMAHDPDTKAYIARRVAEGKTKREAMRCLKRYLTRSLHRTLENSPAMAA

SEQ ID NO: 379164 - protein, 347 aa, unidentified
MRKIAYLSMDVHARNCVLGDMDANGKFRGNRSFITSENNIINALKAVKAKKKYLVMEAGPMSNWAAQVANDHVAQAIICDPRENALIYKGSNKRDKVDTKKLCRLLRLGEFKAVYRPENDQRAIFKAAVQHYLDLRDQLTALKQKIKATYRQWGVIDVFTDSVYSVSGRAKFLNQLDHHPIKLQLKRLYDLCDHTAAIKQDAQKSMQALGRCYPEIKEFKKMPGMGPIGAHTFDAYIQTPHRFAKKSRLWRYCRLAVTDRSSDGKPLGFKRLDKAGVGELKALSYRAFLSAIKSDNEVKGFYLNSLRRTHDRKHARLNTQRKILSVMLSIWKKGQPYRAELFLDPSI

SEQ ID NO: 379165 - protein, 373 aa, unidentified
MPKYSTAFGMDVHLRSTTVCALDADTGEAVTRRFPGNPWGEIAGWMDGFPGPSLAAYESGYLGFAPQRELAGLGVECVVAAVSKIPRSAADSASKNDRNDAARMAKAILAHDISPVWVPSPEVEGIRDLAGAYDGATARLATAKQRLLAFLARRGFVYGGTTPAGNPRKYWTYDFLRWLDKVRPEDDGGVRALAALRNEVEAAAEARADLLSEYGAAVDASPIAAEVAALQSIKGCAFALAAAFSAEVGDFTRFRSGRQVTAYFGLAPSQRSSGDSVRLGGISGAGNALVRKLAVEGSWRYAAARHQPKLMPRDTGVPLEIRMHGRKGSERLLRRREEMLARGMPAAKANAATAAELVRWLWALGMMCREGAE

SEQ ID NO: 379166 - protein, 341 aa, unidentified
MDIAVLGIDLGKNSCSVVALDSSGKVTLRRRMLRKTIVALTSKLTPCIIAMEACCGAHHLGRVLSAQGHTVRLMSPEYVRPSVKAQKNDARDAEAIAEAATRPTMRFVALKSEEQLDMQTLHRARDRAVGERTSLMNQLRAVLLERGVIVPQGRAKLRLRVTELLQQSPEQISSRIRLLIEDMLMRWQALDEWIAGFDGEFAAELKRDEAARRLTSIPGIGALNATALVAAVGDAQTFARGRDLAAWLGLVPRQATTGGKPRLLGITKRGSKYLRKMLIQGARAALPTLSRSNTRLGQWLRGLLARAHSNTVVVALAAKMARTVWALLRYGTTFEPRAIAI

SEQ ID NO: 379167 - protein, 525 aa, unidentified
MARPVFLSSFIIHPSTLPHSGLPLAYVRGVEASVSLRSELRGRLWSNHFGWQSLFDVGHAPSWEHWTKSRPADQSLTGHPMSFDRLKRPQSRKRLPGHKLKPSRATLLVQNSKPHLSMKQTYILAIDVAKHKVRAALSGADERLLFEKDLPVSAGGLRELLVRLREHVAEPEGLLVLIEATGMLHLNWSVALIRAGYAVVVINPLIARRLYTLGNSIRDNKSDPIDARQLCGIGRLHGEKLLSLYRFALKPEQLCLQRLQSVRKAVRKSLSNLKKSYGSLLDVSFPELGRLLEIDGVGIRQLLSQAPTPCAIARMRRSSLEKNWMLRPKAAQLKKLAAESMADPELAQASRPALLAMLQSIEAMETRLRELDRQIEALTSQSVDPQTKALVESIPGFGALNAAKLLAFLPGEILHAGSNRQAAARLQAYMGNDPRVRQSGQWQGQTKMSKRGVEMLRTALFQCAFSASQHDPELRSFYQRKRAQGKHHEVALSHLMRILTRRLVAVLRSGQPYQPNDNSELKNAA

SEQ ID NO: 379168 - protein, 351 aa, unidentified
MKVLKQVLGVDVAQDELVCSLGKLNEDLSTENFAFQVFNNSIKGFKSLLKWVALKKSADTEVVFVMEATGVYHEKFAYFLHEKNEKVAIVLPNKISNFMRTLDIKTITDKSCSIAISQFGLGRKLDYWQPSNAVYKTLQQLSREKNQVVAERVMCMNQLHAENTEAHPNKATIKRLNQRIKLLKSQEKEIVNDMQLEVKNSKEASENIAYMTSIPGVGEATAISVLAETNGFELIKNKRQLTSYAGLDVREKQSGTSVKGKPKISKKGNRNLRKALHFPSMTAVKRNDEHRELFHRIVSRTGIKMKALVAVQRKLLELMYILYKTKSFYEASYEENRAKNKEIFHPIQADF

SEQ ID NO: 379169 - protein, 343 aa, unidentified
MQTVSTIGLDIAKSVFQVHGVDASGLVVIRRQLKRRYVLSFFEKLPPCLVGIEACASSHHWSRELQALGHTVRLMPPAYVKPYVKRQKNDMADAEAICEAVTRANMRFVPTKTPEQQSGLVLHRTRHLLIRQQTSVINAIRAHLAEFGVIAPGGRKGVEELLRVIADPSDKRVSDVVRACLAALGSQLLGLKRQILDFDRMILAWHRSNPTSKRLNCIPGVGPLLATALVANVADPKAFRSGRNFSAWIGLVPKQHSSGGRARLGSISKRGDRYLRGLFVAGAFAVIRYAKLHGTKYRPWVAALLARRPTKVAAIALANKLARMAWAMMATGERYNYPVALRV

SEQ ID NO: 379170 - protein, 403 aa, unidentified
MKSVGIDISKGRSTIAVMRPFGEVVISPFEVRHTGSELSKLAKQLKSLDGETRVVMEATGNYHASVAKLLHNAGLYVSVINAKLVHGYGNNELRRVKTDRKDAVKLANYGLDRWLTLPRYIPEEDTRLLLKNCYRQYRQYSKVQTVLKNNLISLLDTVFPNANRLFSSPIRGDGSEKWVDFVAEFWHCRCASEKSERAFTSKYLRWCRKHGYNFREAKAHTIYAEASGHIGVMPKSETTKLLVKQAVSQLRATSTALAALKQEMQSLASVLPEYPVVMDLFDVGPTLGPQLIAEIGDVRRFYSKKALVAYAGLDAPPNDSGDVTGRHKSMSKIGASSLRRTLFLVMSVYLQTAPLDEPVCQFMDRKRAEGKLYRVYMMASANKFLRIYYATVKAYLESLEHTA

SEQ ID NO: 379171 - protein, 367 aa, unidentified
MVKSIKYIGLDVHKNSIAIAIADTGRENEPRYWGQIENDLNQLNKVLQKIVCDGSELSCVYEAGPCGYIIYRYLTGNGIDCSVTAPSKIPRKSGDRIKNDRRDALTLARLHRSGELTSVYVPTTEDEALRDLVRAREDAQHALRKNKQQLGAFLLRHNLVFSGKTMWSLAFFNWLADICMQHLAQQFVLQEYADAVESCSQRVERYTSQIKELSKQTRLYPLIVGLQTMRGVSLIVAATMAAELGDLRRFETPSQMMAYLGLVPSESSSGPKIKRGSITKTGNGHVRKVLIEAAQTYRFQARISRAIRKRQEGIPEKIRAIAWKAQVRLCARYKQLSAKGKSSNLVKTAIAREIVGFSWAIAQEINI

SEQ ID NO: 379172 - protein, 296 aa, unidentified
MKNRREHVLGSEKIFVGLEDSKKTWSLCVRSEGVIVHETSMPAQYEVLRNYFHNKFPECQVQVIYEAGFGGFDLHDQLEADGWECVVTPPHTVTEEKCQRKKNDRTDCRRLAKNLENGDYHNCFVPDKLLREDRQVSRTCGQVQADITRVCNRIRRMLEFHGLDNGLSPGRWSGVAYAQLRQHLSNIELSDSLRFSFEIMFRELDQLRQLKKELLLQLRKLARSDRYKGSVGLLMSAPGIGILTAIRLALEWGDVNRFKRKEEFAGFLGLVPSDYSSGDQEHRGHITKQGNRSVRR

SEQ ID NO: 379173 - protein, 373 aa, unidentified
MKQSTTKLFVGLDVHKDSIAVADAPQRRGAEIISLGSFGTRQCDIDKLLKKLLLHSGNLVFAYEAGPCGYWLYRYLTKKGHICLVVAPSLIPKRPGDRVKTDRRDAIMLARTLRAGDLTTVYVPNVEDEAIRDLARAREDAKRDLRSAKLRLKSFLLRQDIRFEGSANWGPKYLRWLGNVACETPAQQIVFQEYVRAITERHERVERLEAELRDQVDGWRLKPVVVAIQALRGIQFITAATLIAELGDVTRFANPKQLMGYLGLTPSEYSSGRKRKLGNITKAGNSHARRVLVEGAWSYRFPARVSRHLQYRLERVPQEIQDISWKAQVRLCKRFARLTASGKHRNTVVVAIAREMAAFVWSIAMQTPIADVN

SEQ ID NO: 379174 - protein, 365 aa, unidentified
MNNNDTESSELSSHEETRCQFSGSRAVIKLGIDVHQDYYVVVKQEGGTNPKPAQRFRKEAFVHWAAKLKNQGGEIYAVYEACGFGFGLQRQLAALGIQCHVVCPQKLDERNKRVKTDGLDAKALCLKLDRFVHGNRDALALVRIPSEEEEQKRAIHRQREQLVKARKCLEAQGRSLLVNHGFELTTSWWKPRTFAQLQVPGWMKELLGNSQPILLALEEKIRALTQQLQAAAGPSQPRGLGALSSVVIDREIGNWDRFNNRRQVGSYTGLCPGEYSSGNTRVQSCVTKHGNPRLRAALVETAWRLVRFQPDYRAVKKWRHLLAKGALATGGARKKAIVAVARQLAVDLWRIRTGRVAIETLGLIN

SEQ ID NO: 379175 - protein, 412 aa, unidentified
MRVIRKRCLGLDLHKQQNTAYLRVHQGSDQEPIGIREQFGTMPEDLERLRDWVVEHQVTDVVMESTSVYWMHLYELLEGVTHPAVVNASHVKKVPGRKTDVTDAEWLAELHAHGLLRLSFVPPKEIRRLRALTRYRSKLVALRTGARNRTIKLVEMAGVKLSSVATDSFGKTGRLILDGLCREEADPAELAGQAKGKLRRKIPALERALRHPLASHQRELLALHLEAHDMIDAQVAHVEHQLSELANPYQAAIAKLDAIPGINPLAAITLLAETGVDMSVYRNDRHLTALAGLAPGNAISSDKRRRIGVRKGNRHLKRICVQIAWAASRKKDSFLRARFLRLQARIGRSKAIVALARQILVVVFHVLSDDRPYTDLGPNFYASRHKEQAAENYVKRLTKLGFNVTLTTKTDH

SEQ ID NO: 379176 - protein, 411 aa, unidentified
MNAVGIDVSKGRSTVAILRPMGEVVQTPIDVMHNAASLERLAYQILTLGEDTRVVMEATGRYHEPIARELHAHGIFVSVINPIAIHGYCTSGTVRKVKNDQKDALKIARFALDRWTELREYTPMDALRQQLKIFSRQYNLYMKSCVALQSNLISLTDKVFPGVNELFKSPQRADGHEKWVDFVTTFWHCECISTVSENAFTERYQKWCRRMRYNFSLTKAADIYTESLGHIVTLPKNNNTKLLIQTAAKELTAMNELIAVVRGEMTRLARELPEYETVRAMYGVGDTTSAQLIAEIGDIRNFPRRSSLVGFAGVDPAINDSGKSVGNRMAATKRGSPHLRKTLFQIMTTYLRLAPQNEPVYQFLDKKRSEGKPYYVYMTAGANKFLRIYYARVKECMANLDASAEDSETAE

SEQ ID NO: 379177 - protein, 404 aa, unidentified
MNMNAVGIDVSKGKSMVAILRSYGEIISKPFEVKHTVSGIRSLIEQIQSIDGESRIVMEHTGRYYEPLVRELSKADLFVSAINPKLIKDFGDNSLRKVKSDKADAVKIARYTLDSWTELRQYSLMDEIRNQLKTMNRQFDFYMKHKTAMKNNLISILDQTYPGANTYFDSPAREDGSQKWVDFSATYWHVDCVRKLSLNAFIDHYQKWCKRRKYNFSRSKAVEIYEASKELVSILPKDDLTKLIIKQAVEQLNTASQTVEQLRTMMNEAASKLPEYPVVMAMKGVGKSLGPQLMAEIGDVSRFTHKGAITAFAGVDPGVNESGSYEQKSVPASKRGSSTLRKTLFQVMDVLIKTKPQDDPVYLFMDKKRAQGKPYYVYMTAGANKFLRIYYGRVKEYLASLPES

SEQ ID NO: 379178 - protein, 400 aa, unidentified
MMTPDDIDVWVGLDVGKSAHHAHALDHDGNTLYDKPLKQDEKAIRTMLGKLSKHGRVLLVVDQPNTIGSLPLTVARNMGIAVAYLPGTAMRRTAQLLPGDAKTDRRDAHVIAWAALKLPETLRDAGPDDETLAALKLLAGHDEDLAHESTRHVNRLRSLLLQTHPAFERALKGERITRDATLALLERYGGPMGVKRAGIEDVKDWAKSNGLRAGRIIDDMFKAIGEQTVTVPGTLMAEIIIPSIAHDIKTIRDRRREVGRQVEKLLEDHPLLTVLTSMPGIGVRTASNILLGIGGDIANFKSSAHLAAYAGISPVTGQSGTSIKGERPSRRGNKRLKNALWQTAFVASTKHPPSVAYYKRKREQGKHHNAAIICLARRRCDVIYSMLKNGTLYQEPALVA

SEQ ID NO: 379179 - protein, 349 aa, unidentified
MNFYINTHPYYCGIDLHTRLLYVCIIDNENNVLVHEKINDSPEKLFTLLQPYLGAVVIGVECMHCWYWLSDFCQEHGIDFILGHALYMKAIHAGKTKNDRIDALKIAKLIRGGNFPLAHAYPKEHRSIRDALRRRTHIMRMSAQLKAHVSSTVSQYNLPAPETRLNLQNSPARERMHHFFPDEAVQKSMDLNLNIIDTMVHEIYKIEHYVKLKAQYHKGSDFHILKSFPGIGKILALTILYEVGDIQRFGRVQQFAFYARLVKCKAESAGKTYGTQGNKIGNAHLKWAFSEAAVLYLKGNDKATRYLETLQKRMSKAKALSALAHKIGRCVYFMLKNQQVFNEDKFLNG

SEQ ID NO: 379180 - protein, 284 aa, unidentified
MDMIRVGIDLAKNVFQMHGVDRSEKAIWRRKLTRLEWLDVVQRTVPLHAVIGMEACGSAHHWARRLQAIGYTVKLIAPQFVKPYVKSHKNDANDAEAICEAMSRPGMRFVAVKTVEQQDVQAVHRVRAGLMEQRNAKANQIRGLTSEYGIVAPREILQLRRAVPVWLEDVNSGLSDRFRRLLTGLWEDLRSLDDRIRELDREIAAIAASDPVARRLQQLRGVGPMVATALIATVGNARQFSNGRQMAASLGLTPRQNSSGGKERLLGISKRGACNYPLLFSASS

SEQ ID NO: 379181 - protein, 349 aa, unidentified
MAIRRYWVGLDTGVTETAVCLIDEFGEVLFEGKRDTHAGQIKDVLRPFGVEAVQRITIEAGVGTHMVRELQSQGFPVYVAEVRRASKFLAIRRQKTDSNDARGLAELGRVGRTIGAEVFVKPLDCQNLRSLLNVRKNLIQQRMKLDALIQSIVRLHGGKLKTSTGVGRLASGVEDQLEVLRADGLDVDADVRPLISIAEDLRSHIAAMDKRLRAAALAHPVCSNLMTVPGVGPITALSFYSAIGDPSRFQRTRDVGPYFGLTPSIHQSGVLARVGRISRFGSKLTRTHLVSAATVLLCSTKAESGLQTWGLALRKKVGLSKARVAVARKLAVVMLHMWKSGSSFDPART

SEQ ID NO: 379182 - protein, 345 aa, unidentified
MTTMNYIGLDVHKKTISYCVKDVSGRIQQEGKIGSTRRELDCWMKTLPQPWTVAMEATIFSGWIYDHLLPHATQTKVAHPLMLRAIAAAKKKNDQIDASKLADCLRCDFLPECHMMPRAIRDRRRTLRYRHLLVRQMVQMKNRVSGLLMETGVEYNKQRLHKVSYFRELLSANGEVPPSIRPLLKLSRETIERCQKTEYALVSSLQRDPVLADRIKRLRTVPGVGPITALTWALEIGDVSRFGSIKQAISYCGLCGDERSSADRAIRMPLSKQRNKHIQRALVEAAKLAPRQNHEMAVIYDQERQKGNSNRATLAVARKMVAYLLAVDRQQRDFVPAEERRTAAA

SEQ ID NO: 379183 - protein, 342 aa, unidentified
MYYIGLDVHKKTISYCVKEANGHIHAEGKVGATRWELDDWMKTLPRPWTVAMEATIFTGWIYDHLLPHAAQVKVAHPVMLRAIAAAKKKNDRIDAGKIADCLRCDFLPECHMVSTEIRDRRRTLRYRHLLVHQIVQMKNRISGLLLETGVSHNKQKLHKVGYFRELLSNKDEVHESIRPLLRLSRETIVGLQKTEYALVSSLQRDPLLAERIKRLRTVPGVGPITALTWALEIGDVARFRSIKQAISYCGLSSEEKSSADKVMRTPLSKQRNKHIQRALVEAAKLAPRQDHQLALVYEKEKEKGHANRATLAVARKMVAYLVAVDRAKRDFVAKEDLNQAIA

SEQ ID NO: 379184 - protein, 409 aa, unidentified
MLKIVYPNCCGIDVHKTFVVAVIAITNNQGITEYHRKHFSTFTNGLTQLRDWLEYYSCFDVCMESTGKYWIPVFNILEEQTNVCLAHPKYVKAIRGKKTDKKDAQWIADLFKHDLVASSFIPPLKIRQLRDLFRYRMKLTQLQVGEKNRYQNCLTWSNLQIASVVSDVFGKSAQAIIKSILDNPQDKPNIEQLVHKRMKNKVQDLEIAMEGALTPEQAEKIRVIKAHYDALAICKEDLEQMIRELGQDYQHQVKLIQTVPGFKEDLSALRIISEIGCDMTVFDSAAKLCSWAGLVPANNESAGKKFSTRISKGGKYLKPFLVQVANAVVKSDKHPELRNKYLKLKKRRGHRKAISAICRRLLVSVYQVLRKQEDYNPVLQGLTEIRNPDKTMSVQDAVRFAQQHGFNVA

SEQ ID NO: 379185 - protein, 247 aa, unidentified
MKEKLYIGIDVSQDTLDMAAYPTGQIWQYKNIKNGIAKIVVKLKSLKPEIIVMEATGGLEIPLKDALDEAGLAVFVANPKRIRDHARSMGVLAKTDKIDAKVMADFAAKTELTPQPPSDKSERELDSLLTRRNQINDMLTAERNRLNQHLAPDVQADINEHILWLEGRIKSLDKEIKSKIEHNPAFKAKSDLYRSMKGVGKVFSSTLIAKLPELGRLNQREIALLVGLAPINKDSGKLRGKRMIQGG

SEQ ID NO: 379186 - protein, 316 aa, unidentified
MKNNAQVVVGIDVSKAVLDVAALPSGEVLQFTNDTVGIDELGKKLKSEPADLVVMEATGGYETAVATALVAMGLRVAVVNPRQIRDFAKATGRLAKSDRIDAQVIAAFGQAIEPEIVRLPDEDAREMEALLVRRRQLVAMRVQEINRLGLMQGAMRKNIKAHIDWLEKQIDRLDIDLTAGLRNSPAWRAKDDLLRSFKGVGPTTSSTLLVSLPELGQLDRRAIAALVGLAPFNRDSGLMRGRRSIYGGRSHVRTMLYMAATTAIRCNPVIRPFYEQLRSRGKPHKVAMVACMRKMLTILNAMVRQSTPWTPERNPV

SEQ ID NO: 379187 - protein, 462 aa, unidentified
MKRKAKSQATHSGLAVVNPNAAAIDIGATMHVAAVGADRASDPVRSFGTFTADLHRLADWFAECGVKTVVMESTSVYWIPIFELLDERGFEVILVNARDAKHVPGRKTDVSDAQWLQRLHSYGLLRASFRPKGEIVELRAYLRQRERLLDTAASHIQHMQKAMTEMNLQLHHVVSDITGATGMRIIRAIIAGERDPAVLASMRDTRCHSSAEVIEKALTGHYRGEHLFVLEQALALYDVYQQKVAACDIRIESVLKELSSIRGRKEDARADGSGSPRRRSRQSNGPDFDVGKALHSLLGKDLTRIHGMGPYLALKLVSECGDDLSAWPSAKHFTSWLCLAPSNKISGGKVLSSRTRRSGSRAASLLRLAAVTIGRSDTALGAFYRRLSARAGKSKAVTATARKIAVLFYNALRHGMDYVDPGASYYETRYRERVVKNLHRRAKAFGFILQAAEMPAAEQAVS

SEQ ID NO: 379188 - protein, 355 aa, unidentified
MLNTKYIGMDIHKETISIAVLSAGGKSVMECVIETKASTILQFIHGLRGDLHVTFEEGTWAAWLYDLLKPHVTEVLVCDPRKNALLKEGSKSDKIDARKLAELLRLNHLKPVYHGEHGVRTLKELARSYLTITQDLTRVRNRLKALYRSWAIPCSGRQVYAPRHRSEWLGKISEAGVRRRAEHYYQQLDALRPLRQEVRRDLLIESQKHKAWKLLRQIPGIGAIRAALLIALMQTPHRFRTKRQLWTYSGLGLETHDSAQYCVVEGQLRRSKKPLMLRGLNQNHNHDLKAIFKGAALEASSGVGPFHDFYEALLAKGRKPTMARLTLARKIAAITLIVWKKEVSFDAKHLKQQAA

SEQ ID NO: 379189 - protein, 416 aa, unidentified
MNAVGIDVSSRKSTVAVLRPLGEVVCLPFDVTHDIAGLASLAEKLKALDGETRVVMEHTGRYYEAVAKALHEAGLFVCAVNPLLIKEYGANSLRRVKTDKADAVKIARYALDNWADLRDFTPMDAIRYDLKTLNRQFQLASKQRTASANNLIALLEQSFPGIRKCFDSPVRSDGTQKWVDFAHSFWHVDCVRKQPFAAFCERYRKWCKRHAYLFKQSNAEEVYALAKRAVVLTPKSKVVKVLVQEAANQLISISRSVEVYRAEMDRLAAMLPEYPVVMAMYGVGKSYGPQLMAEIGDVRRFERKQALVAFAGIDPMPNQSGDKNVRSNKSSKRGSPYLRKTLFNVIRTYLQCAPQDEPMFQFLNRKRAEGKPFYVYMLAAANKFLRRYYAKLRDYFASLDTLQPVAPIPTILKATL

SEQ ID NO: 379190 - protein, 349 aa, unidentified
MLATTGQMIRVVGIDIGKNSFHVIGLDDRGAIVLRQKWSRGQVHARLANLPPCLIGMEACVGAHHLARRLQGLGHDARLMPAKYVRPYSKGQKNDFRDAEAIAEAVQRPTMKFVAVKTADQLDLQALHRVRERLVSQRTGIINQIRAFLLERGIAVRQGQRFLRTELPRILATPGDILSPRMTHIIEGLSDDWRRLDGRIEELSADIQAVADADSACERLMSVPGIGPIISSAMVAAIGTGEAFTKGRDFAAWLGLVPRQMSTGDRTILGRISKRGNRYLRVLFVQAAWVVLIKPTSWQRHGLKAWIEAAKKRLHHNVLAIALANKLARIAWSVLARGRAFEVSKLQTA

SEQ ID NO: 379191 - protein, 404 aa, unidentified
MEILHERCCGLDVHKKIVMACAITPEGKEIRTFGTMTEDILALAEWVKSKGCTHVAMESTGVYWKPIYNILELAGIEILVVNAQHIKAVPGRKTDVKDAEWIADLLRHGLLRGSYIPNREQRELRELVRYRKSLIEERAREVNRIQKVLEGAGIKLASVATDITGVSGKAIIEAIIDGVEDPKALAKLARGRLKEKEGELEEALRGLVGEHQRMLLATQLQHIEFLDQQIATLDERIGERMRPFERELKLLDTIPGIGRRNAEAILACTGVDMSRFPSAAHLSSWAGVAPGNNESAGKRKSGKTRQGSPLLRTTLIQAARAAARTKGTYLYAQYHRIAARRGANRACVAVAHTIIVIVYNMIKNLRPYYELGDSYFEKRRQQAIARKAIKQLEDLGYKVTLEVA

SEQ ID NO: 379192 - protein, 357 aa, unidentified
MIAMKYYTSTTQFNCGIDLHARQMYVCVMDRDGKKLVHTNIKNNDFEFFLKLVAPYRHDLTVCAECMFGWYWLADACQTAGLHFVLAHALYLKAIHGGKNKNDRIDSEKLAHLLRTNLIPPAYVYPAEKRPLRALLRQRLRYIWNRTELLARIQSHQLAYNRPISRQRPYNREAWKEQLLTSEPDPVRQLALQNDLALIGHFDAQLAVLEKDLLKLTKRTASRDFALLRTTPGIGDYIGLTLLHEIGDITRFPTVKDFLSYCRLVKGTVASAGKIKGLRGAKLGNPYLRWAFGEAAVVAKRDALLGSLAQRLEARMNGNKFKANAVLAIKLARAVYFMLKNKTAFDPDRLVAALSPN

SEQ ID NO: 379193 - protein, 319 aa, unidentified
MQVNAILGVDISKKKFDVCLLMDNKKRHKVFQNNQDGFAKLVVWCNGHGANLIHLCLEATSWYGEDLATFMHDLGHNVSIVNPAQIKAFGKSELLRNKTDKSDAAMIARFCIANKPALWKPIAPEMRHLRDLYRCMQSLKNDKLQQMNRLENENMHSSCKEAISKVILAIEEQIIVLETEINEHINHYPHLKNMVENLKTIKGIGHLTAVAVIAEMPAADNFDNAKQFTAFAGLNPGHYESGSSVSKRSCICKIGSERVRKALYMPAIVVKNHNNHFQKFCQRLASKGKCPKVIVLALMRKLMHVFLVFLKTINHLIVI

SEQ ID NO: 379194 - protein, 343 aa, unidentified
MEQYVGLDVSLQKIAICVLKASGRIVIEAEVASEPGAVIAFIRSKAPHAVRIGLESGPTSPWLWHSLKSAGLPVVCMDARHAHAALSVRPTKTDRNDARGLAEMVRMGWYKEVQVKSLAAHERMALLGVRRRLVDMRVEIDGQIRGILKMFGLVAGRGNTKAFAQRARMLAQDHPVLLALIGKLIEVREVAVAKVATLDKEIRCFVRADPTLRRFMTVPGVGPVTALAFRSTIDEPDRFKRARDVGPYLGLTPRRYQSGETDRQGKISKCGDRFTRTCLYEAAGALLSKVQRWSPLKAWGTRLVRRIGSKKARVAVARKIAVILRCIWTDGTEFWWTKEPVKV

SEQ ID NO: 379195 - protein, 354 aa, unidentified
MSSHRGHEAPAIASIGIDIGKDVFHVVGFNPKGTVVLRRKIRRLALEREFEKLPPSLVGMEACLSAHFVSRTLRRLGHTPRIIPAIYVKPFAKGQKNDYNDAEAVAEAVLRPNLRVVQEKTQDQLDLQALHRVRGRLVSRRTATINQIRAFLIEQGIAVRSGAHALRQSLFTILDQRGDEISPRMHDLIGGLYEDWLWLDERIETVTRDIELISESEANCARLKTIPGVGPLISTAMVAAIGTGEAFERGRDFGAWLGLIPRQHSTGGRPILGRLSKRGSKYLRTLFIQAANVILMRPHNWEKYSFGPWLKRAEPRMHRNKLATALANKLARIAWSVLRHDRAFDARRNEPAAI

SEQ ID NO: 379196 - protein, 360 aa, unidentified
MMVVGCDPHKRSITCGAVAASSGAARGERTAPAHADGFDVLLRWARALDGERVWAIEDCRHVSGRLERFLLARGERVVRVAPKLMAGARTGARTRGKSDAIDALAVARAAVREGIQTLPTARLDGGALELRLLVDHREDLVAARTRDQARLRWHLHDLDPTFTVPPRALDRPLWWRRVQTRLQQQPAGVRVRIAVELLEQIRACTLRIRALERELERLAHAHAPRLLAERGCGALTAAKLIGEIAGADRFATDAKLARNAATAPIPASSGNTTRHRLDRGGNRQLNCALHRLAVNKALWDPASAAYLARKQAEGKTRKEALRCLKRVLTRRVWQLLRTPTPTQPTVQIHCNTPATTPALT

SEQ ID NO: 379197 - protein, 389 aa, unidentified
MRFYTKQHPFYCGIDLHARTMYLCILNQAGEIMLHQNMKTSPETFLKAIAPYRAGLVVAVACIFTWYWLADLCAQESMPFVLGHALYMKAIHGGKAKNDKIDAHKIAVLLRGGMLPQAYVYPAAMRAPRDLLRRRMYLTRKRAELLAHVQNTNSQYNLPAIGKKIAYKANRDGIAERFSDPAVQKSIAVDLALIRYDDRLLNDVELTIVNTAKQHDAHTLYRLQSVPGIGKILRLVMLYEIHDLARFPRVQDFVSSCRLVKCAKESAGKRYGPSGTKIGNAYLKWAFSEAAVLFLRDNPAGQKYLARLEKKHGQGKAFTVLAQKLARAVYYMLTRDTVFDMTTFLHGEGSGVGEPVASLGHDGLSREPVLCNPALTASRNAHEHIGAWP

SEQ ID NO: 379198 - protein, 355 aa, unidentified
MCAKKTGSIEDLAVVGIDIGKDTFHLVGFDCSGQLVLRKQIKRLALEATFEKLPQCVVGMEACLSAHFVSRTLRRMGFEPRIIPAIYVKPFNKGQKNDYNDAEGIAEAALRPNLRTVTEKSQDQLDLQALHRVRARLVSRRTATINQIRAFLIERGITVRSGLRALKNSFETILEQRRDEFSPRMRGILIGLYGDWLWLDKRIEDVSDEIEGISRTEENCANIMTIPGIGPMISTAMVAAVGKGEAFDRGRDFAAWVGLVPRQFSTGGRTILGRITKRGSRYLRMLFVQAAKVIMMRPHRWSDFSFGPWLTEAVARMPRNKAAIALANKLARTAWSLLRHGTRFDASQDAAMEAI

SEQ ID NO: 379199 - protein, 402 aa, unidentified
MDVHKDSVWACARVDGGKPSGKPFVEKFGTTSRELLRLGDWLAGHGVTVVAMESTGVFWKPVWNLLEDRFALMLVNARHVKQVPGRKTDVTDCDWICQLLEHGLLKASFVPDRPRRELRDLTRQRTQLLGDRARVVNRVQKTLEDANVKLASVATDITGKSGRAILDALAEGKLPPEQMAELVHKRMEAKKPALREALAGKVTDHHRFMLKQLLEQVDHLDRMVGSFDARIEEVMSPLGREAVRRLDQVPGFDVRTGQNVLAEIGTDMSRFPSPHHLASWAGICPGNDKSAGKRRSGRTRKANRWLKAALTQAAWGASRTRRSYYSAQHRRIAARRGAKRATVAVAHALLVTAYCLLSDPRPYADLGAGYFDQPQSPQRQAERMVRKLQRLGYSVELKRPAA

SEQ ID NO: 379200 - protein, 453 aa, unidentified
MYFDSNTQPAAGGRVQVGIDAAVVAHHHVCVRAFTADGHVNVSRFHVSPTLSGLATLTKRLAPYPGVLAVAEPTSMTWLGLAVALQDAGSDLALVGSRHSARLRGAISGKNKSDVIDADVLAKAGDVFELHPLVLPSPPQLALRRACTRRGGAVIDGNRYLRRLISLARWAFPDLWSAFSGSLPTAVAVLGRWPHLDSLAGARRSSLTAVVAEHTRGVGDVPARVEEIRSAAAAWAHFWAGHLDLDALAWDVSEHLADMAVANARIDRATTQAQRYWEQLYGDDPLLGSVPGVGPVIAPTIRGFLIDGSGFANAKRACSYVGMTPSNWSSGTVDHTGRAITKEGPAVLRLAFYQAANVARGLDPQLAEFYYRLMVGRGHCHTQATVAVARKLIERTWTVLTRQQPYQLRDLDQTPVTARAAKAIIASKYVVPEDVRKRSRAHSAATHRAKLAR

SEQ ID NO: 379201 - protein, 433 aa, unidentified
MGLIVPTTIHPEREDQPLPYEWFVGIDWGSQQHQVCILDRDRRLVGERTVDHDGASLAQRAAWLWTVSAGHPQRVAVALEVPRGAIVEGLVERGFHVFAINPKQLDRFRDRHSVAGAKDDRRDAFVLADSVRTDRPSFRRLQLDAPHLLLLRELSRVEETLLEEFRRSANRLREQLHRFYPQMLQLCSAADEPWLWDLLHLAPTPAHAMLLSEEQVQRVLKAHRLRRLKAPAVLACLQAPALPVAPGTAEAAEAHCGFLLPCLRVLAEQLQTCSQQVSALLSTLAEEPGEGESPSDVAMVLSLPGVGRKITAWLFAEAAQPLAERDYQVLRTHGGVAPVTKQSGKRRQVVMRHGCNPRLRHALYHMARVAMQRDAHFSSVYAALRAKGQRHGQALRNIGDRLLRILMAMLRHRTCYDASRIRCAPVAQMGQKM

SEQ ID NO: 379202 - protein, 375 aa, unidentified
MDEITRAPIARVGVDLAKQVIQVHAVDASGRRVVARAFKRDQFLAWCTRLPAGCVVAMEACSSAHYWARKLRALGLDARLIAAHFVTPYRMEGKNGKNDATDAAAICEAASRPSMRFVPVKTCEQQGVMSLHRVREGLKEERTACINQIRGVLTEFGLVFGKSPKVLRAVLADVIEDASNELSTMARLVMQRAFEHWRELDEHLRWCDREVGQHVRANPQAKRAAKVIGIGELGASALTAGVGDFRQFKSGHQFGAWLGMVPRQDSSGGKIRLGRITKRGDDYLRTLLIQGAKAAVMSADKRDDPTSRWLVQLIARVGWQKACVAMANKNARILWAVMTREEGFDPNHVSVKPQAKQSARQPVAAPPSAPTAYAA

SEQ ID NO: 379203 - protein, 415 aa, unidentified
MALKIVYKICCGIDVHKTFVVACIASTNDKGVTSYESHRFSTYTSGLKTLLQWLLNRNCKDVCMESTGKYRIPVYNILENDCSIVLAHPKYVKAIRGKKTDKKDAKWIADLFKHDLVVGSFMPPADIRQLRDLMRYRFKLTCFQSSEKNRLQNCLTVSNIQLGNVVSDTFGKSAQAILGKLLENPTDTSFDLEPLIYKSLKKKLPELRDAIDGYITPEQVGKLKVIKAHYESLESRKAELEELILALAAPYQQELAILQTAPGIRSDFTAIGIISEIGTNMEAFPSAKHLCSWAGLTPTNNESAGKKKSVRVSKAGCYIKPLLVQCANAVVTSKKRPEIRNRYLRLKKRRGHKKAIIAIARMLLTALYHMLKNGENYNAELYRKFDLPPADWEITVEQAIIIARNQGYKIKSATA

SEQ ID NO: 379204 - protein, 346 aa, unidentified
MTTNTSQATISTIGIDIGKNSFHVIGFDERGAIVLRQKLSRSQVAVRFVNFPRCLIGMEACVGSHHLSRRLQSLGHDVRIMPALYVKPFLKGQKNDFRDAEAIAEAVQRPTMRFVQTKTLEQLDLQALHRLRTRLVRQRTAVINQIRAFLLERGFAVRQGLNPLRQALPEILAKPSDELSPRMIHMIEGLSEDWHYFDGRIEDLTGEIEALVKADDNCQRLMTIPGVGPLTASAMVSAVGDGSAFRRGRDFGAWLGLVPRQMSTGDRTILGGISKRGNKHLRTLFIQGAWVVLMRSKNWHKYSFGKWLEAASKRLHRCVLVVALANKLARIAWSVLNRGRAYDANL

SEQ ID NO: 379205 - protein, 411 aa, unidentified
MRIVYERCCGLDVHKKSIMACLLTPDESASTRQEVRRFGTMTRDLLELSDWLTGNGVTHVAMESTGVYWKPVWNILEGVCTILLVNAQHVKAVPGRKTDAKDCQWIADLLQHGLLRGSFVPPTPIRELRDLTRTRASLRQDHTAVANRMQKVLEDANIKIASVATDWLGVSGREILNQMLEGGQDCIQLADLCRGRLREKIPQMRLALEGRMTAHHRWMLRLQREQLEFLERQIAELDVRIQEHIRSYQQAVDLCLTIPGIEKVAAANLIAEIGVNMDQFPSAQHLASWSGLCPGNNESAGKRLSGKARNGNVWLRRNLCQAAWAASHTKNTYLSAQFRRLAARKGKKRAIVAVAHTILVIVFHMLKRQQAYHDLGADYFDRRNSDQLKRSLLRRLEGLGFKVTICPANPA

SEQ ID NO: 379206 - protein, 428 aa, unidentified
MSVKDYSRQIARRQRISKKTLIVGVDVGNVFNALGFMDKDGNVLGSCAKLYNSREGFEQFREMIEGLKVKHHLKDVLIGMEPTGHYWRKLAYFAKDYGYEVRFVRTTALKHHRELDESSSAKSDRRDALTIANITREGKYIDTVIEDGPLRQLRTLSKARERLLRYSVSAKNSLHAALDDYFPELHDMFWSMGSRSLWTILEKCPFPQDVMLMDVTTLQDLIARSSRKKAGSAQKASDLYEAAQKSIGVKQIGSADRYRVEVCLEEVKRTVLTLKNIDIQLKLMLKDIPSASYLMSIPGVGPLSAAVFLGELGDPAHFHNARQIVKYAGYDPQESDSGSWIGRRFISKKGRWLLRKYLFFMSMRVVVLSKYFQEYYRRKLETKNRFGQQPRRKEMLCAVAIKLIKVIFALLRDKRGFEDLAPATVAVA

SEQ ID NO: 379207 - protein, 467 aa, unidentified
MYLPNSQTLDIAPLSRIFSNTSAAYKFFWFLCLLEVFQKGQTEIAYSDIVARMIAKAWYPRLMTWNPLSSQVGKYGCNQITTEDSMSIERILVNKLDANQSWDVIGLDLAKHDLSCVGIATNGEISRIDRISYESFLEWASTIEPTVFAMEPCCEANYLCNQLESFGHSCRVISGKAVQQYIDVYFSGQKNDINDAEAIAFLGKNSRLKNIRTKTPDEMRLQTLMTTREHFVDEYRKTLTTLKGLAQFWGLKLAKSLSSEPKLIELIENASLPPDITILFKQLVKTYKELQKVANALTRQLMTLAKSDELCQKLMDIPGIGPICSTRLKVTIGPIDRFDSPRKLPAYFGLVPRNKTTGHSQKMGQITKRGDKMTRSYLVQAACSLMMLDAKGKFRDCQLRRWMHKKRGKLPYGKLVVALAAKLLRIVWAVLAKGERFDYRKAGVAKCSLPKPETKISQKAITGHSDT

SEQ ID NO: 379208 - protein, 413 aa, unidentified
MRLFAGDDWAEGHHDVELMDAAGRRLAKARLPEGVAGIARLHAMIGEQLGEDADEDDAGQVAIGIETDRGPWVAALIAAGYTVFAINPLQASRYRERHGVSGAKSDAADAHVLADMVRTDSHQLRPVAGDTALAAAVKVVTRTHKTLIWERTRCTQRLRHALRDYFPAALEAFEDLDAADTLELLARAPEPASAAKLTTAQISAALKRARRRGVAAKAERIQAVLRAAHLGQPDVVAAAYAASVRALIAVLITLNEQVKTLQGQVEAYFGRHPDAEIIASQPGLGGVLGARVLAESGDDPARYASAKARKNYAGTSPITRASGKKKAVLARYVHNDRLIDALMSQAFTALRVSPGARAYYDRQRARGAGHNPALRQLANRLTGILHGCLKTRTLYDEATAWPQHAAATEKTAA

SEQ ID NO: 379209 - protein, 452 aa, unidentified
MEQGNKGLSRGDRNRNARLAALRAMVPRDHAILGIDLAQSRQAAVLADHDSRVIARWRPRCSPWKLGELLERALRKALAAGFAGITVACEPTGHRWMVIAQLAAERGIPMVCVQPLVVARAREAEDYTRGKSDDRDAVLIARLASQLHCYLPEQAGQEWARLRHLGVRRSRLIESATACRQQLRDLLEVAWPAVLAAAADPMESATWLACLQAALARCDGDLAAVRALGQDAFTAQARAELGAFGARRVCRRIAAGVYAALGDGAGVAAQRPGALERAFRVLGDWSVTRAELGDVSARMLQSLDAMGLLEVAGSIPGVSALQVAAILAEAGDPSRFATSRAMVKHAGLAPCENSSGNHAGETGISRRGRPALRLAAWRAVWGALRHNRVYAARHAELTGRAKDPLTDQQARAAIAAALIRQIHAIITRRVPWDADIAAGRRRPGQEVTAQAA

SEQ ID NO: 379210 - protein, 356 aa, unidentified
MSKGNKKSAKSKGVLATGSDRVVVGLDVHKLEIHAAVRVNGQEVGTHVLPARPAAVERFLAPYRAGLRHVVYEAGPTGYGLARHLRSAGVAVDVIAPSKTPQAPGDAAKSDRLDCRDLARLDEAHLLRPVTVPTEEEEADRQVIRLRDQAVADRRRVRQRIKSFLLMHGLAEPAGLEHWSAAGVARLESMAIPRERLRFSLDVLLEELANADETIAKIEYEMKEMAQEPGHAAAVKALTDHVGVGRTTALQFKTEMYRPERFSNERQVSAMLGLAPRVRQSGDRRHEGPLIKAGRGRLRSLLVEAAWVWIQHDAEARKVYQRLVHNTGSTQKAIVGMARRLGLDLWRRLVKARAAA

SEQ ID NO: 379211 - protein, 460 aa, unidentified
MPRKQKNNQKKTSAPMLHSLNPNAAGVDIGATEIYIAVPADRDPRPVRRFSTFTEDLHAAAAWLKTCRIETVAMESTGVYWIPFFQILEAQGFQVLLVNARHVKHLPGRKSDVSDCQWLQYLHSVGLLNGSFRPAQAVCTVRSILRHRNDLVQMAASHVQHMQKALNQMNLQLHHVISDLTGLTGLTIIEAILAGERNPQLLAKLRDRRIKANEQTIAKSLIGDYRREHLFTLRQSLESFRHYQNLISACDTEIEQYLETFESKESKLNPPAGSTPVSPEKQKPQGSEPRFDLKSHLHRIFGVDLTTIPGISVLTAQTIFTEIGPDFSKFDCGGAFTSWLGVCPDNRVSGGKVLSAKTRQVNNRATTALHLAAQSLHHSQSYLGDFYRRMRAKLGAPKAITATAHKLARIIYYLVRTGKAYDETVCATDEAHNRRRLEAKLRRQARELGFELIDPKPAAL

SEQ ID NO: 379212 - protein, 393 aa, unidentified
MKLVGIDIEKKHFFCIMDKDSGEVLLQPSSFSNTKDGFDSLIQKLSSYSKDSILIVMEDTGHYHFALLKYLLEKNFTVALINPKTTDYTRKIQNGITKNDKLDTLTICDVLDTPVRKKQYRITKVNSFDLYEQKQLTRHHHNLKEELNVYTNRLQKCIDIVFPEFNSLFSSKYGIIYMNVLKTFGSAENIASTDIRTIRKCFEIKGRGNRISLTAQQLKDSAKSSIGISSAAEVIKIKHLISQIELINEQLAETDKKIEEFSIQNNSPILSIPGISHFFGTSILAELGEISNYSKPSKIIKAAGVAPYHYESSQYNAQHTAITKKGSPYLRKTLYQIILPVINNNPVFKQYYDLKISQGKGHRCACGHCVRKLLRIIYHLSSTNQQFDDALLR

SEQ ID NO: 379213 - protein, 314 aa, unidentified
MKKTQVFAGVDVSKESLDIALRPDGKSMSVDNNDDGIKKLCKRFKKVSPELIVLEATGGLEVLVASILVSKGFSVAVVNPRQIRDFAKATGRLAKTDALDAESIARFAEAIKPETRPLKDENEQELSELIARRTQVIQMLVAEKNRFGRTGRKRIRNELKEHIVWLERRLKKIDKDIESAIKESPVWMVKDDLLRSVPGVGKVLSMSLLAKMPELGRLDRKQVAALVGVAPLNRDSGKFRGSRRIWGGRADVRTALYMATLSTIRCNPVIKAFYNQLRERGKKPKVALTACMRKLIVMLNAMLKNNEPWHYENA

SEQ ID NO: 379214 - protein, 395 aa, unidentified
MADGIRWVGLDVHAHESTIAIFDQGTGELSTARMVGRPHQLLERLMEVPVPARMVYEAGPTGYGLARRARAWGIEVSVCAPGRTERRPGDRIKTDKRDAVRLARLLAAGELAIVTVPSLERERLRDLVRCREDIRADLMRARHRLGKFLLRREVYWEGPGRAWSRAHRAWLAGLRFVDHASQVTMADYLHAHDVLVARRDRVEAELEKLVIESPCAQAVGRLRCLRGIDTLSALGLCAEIGEWERFDHPDRLSAYLGIVPSEHTTSSQRRQGSITKAGSTHARRLLIEASYHYRRQPGVGELLERRQRDQPPEVINIAWSAQRRLHARWRQLKDARKKPNGVVAVAIARELACFCWEIATWSGSHPDPVPPASLPAGDPLTQTRSIPPKQEPAIA

SEQ ID NO: 379215 - protein, 350 aa, unidentified
MIIIGCDYHPGFQQIAFVDTETGDYGEQRLEHSEGAEKFYRDLAAQGKKVRVGMEASGHARWFERLLAKLTFELWIGDASEIRARRVRKQKTDRQDAQHILQLLMENRFPKIWVPSGENRDLRQLRWHRHRMVQARTRIMNHLQAVALNEGLRCKKRLWRDAGREQLESFRLSPWASRRRRDLLELLDRLTPTIAELTAAIEQEVEKCPEAQRLQTHPGVGALTALAFVLIIGRADRFQCGKQIASYLGLVPLEDSSGQRRRLGHITKQGSSLLRFLLVEAAQVTVRSDQEWRRKYFHLALRRGRKIAKVAMARRLAVRLYWMWRKGWNYGQLKKFGSHAGEPGHRDGVR

SEQ ID NO: 379216 - protein, 317 aa, unidentified
MGTYETIVAGIDVSKESLDVRLLPCGASQSFSNNESGCAELVKLLTEKTPSRVIFESTGGFETLAVGILSAASLPVVVVNPRQIRDFAKACGLLAKTDKIDARAIAMFGQRIEPEIRPLKDEAAQELSALISRRRQLVDMQTAEKNRLTTAPKAVRGGIVQHIEWLEQQVASIDDDISRFIQSSPVWKAKEQILTSIKGVGPVTASTLLAALPELGSTSRHKISALAGLCPYNRDSGKHKGKRSIWGGRAAVRSVLYMATLAAVRFNPVIKAFYERLRKAGKLHKVAVTAAMRKLLVILNAMLRDNRKWDNSFYTFT

SEQ ID NO: 379217 - protein, 400 aa, unidentified
MSGLKGSFDGFVGIDVSKDKFDTCGITGDEAKLFQFSATMDRKGFEKLKGHLAAVSISSVLIGMESTASYHVNLFSYLVSEGYKVLLINPLLISNYVKMQLRKTKTDKKDAVVIAQFLLTNGATLVQRATPSLISDLRDLSRQRESLVDEMTSLKIEIKQLLNITFPELEHVAGIFTKSILKLLQQYPSAFALRDADLGQLSQTLIADSYGHKRETFAAGLIKAAHSSIGSKSPAKDMILKQKIALLRHLEDALQEITGMLIEMSRKLMEEDINIMTSLKGIGEKAAANFLIEMGGDINQFERSGKIIAMAGLDPAVYQSGKHEGKGRITKRGNRHLRRIIWLMTTKVIQYTDIFNVYYLKRRKEGLPYKMAVLATAHKLIRVIYAMLTQRTTFCPQVNS

SEQ ID NO: 379218 - protein, 465 aa, unidentified
MEHTPRRHRRAPRVSPSVLERININAAGIDCGSAEHFVAVPPDRDPTPVRSFKTFTTDLQRLADWLTACRVKSVAMEATGVYWIPLYEILEARGFDVVLVNAKHVKNVPGRKSDVLDCEWLRELHSVGLLRGSFRPVDTIAALRAYLRHRETLIQSAGAYIQRMQKALVQMNLQLPLVVSDIAGVTGLRILRDIVAGQRDPHTLAQHRDPRCQATHAEIVAALTGNYRPEHLFVLSQNLELFDACQQQLAACDTAIEAHVQALTAPLDVPAVPLPGARVTRKPRHNEPRFEIRTPLHQLTGVDLTQIDGIAPYTALKLVSEIGTDMHRWPSEKHFTSWLTLAPKNKVSGGRLLSSQTQPSANRAAAMLRMAAMSLGRTQTALGAFYRRLAFRVGKAKAITATARKLAVLVYRTLKGEVVYCDVGADAYDAHQRTRVLRRLRQRATTLGFDLVNRETGEVLAAAVS

SEQ ID NO: 379219 - protein, 361 aa, unidentified
MSSMPEPTSSDPTEVVLGIDTHKDIHVAAVLTGLGVLLATSTFPATAAGYRRLLAWARGFGPLHRAGVECTGSYGAALTRYLSAETITVIEVNRGDRAERRRRGKTDTLDAETAARAVLSGRATAIAKSGDGQVEMLRMFKQAKASAIKSRSQAINQLKAILVRTEPALRESMTGLSNPALFRRCTQLTASDPHDPAGAAALTLRLLAHRVLTLTDEIDELNSHITAAIQTRAPRLLQRYGVGPDTAAALLLVAGDNPDRLTSQASFAALCGVSPVESSSGKTHRRRLNRGGDRQANSALYTITIARLRWDKRTQHYIRRRVAEGKTRREAIRCLKRYICREIYRDIIAPPDPSLRASSAA

SEQ ID NO: 379220 - protein, 483 aa, unidentified
MDLTDLTSTDTKPASPAPPPGLVAGVDTHQDTHTLAVLTAQGAVIATSSFPADQQGYDDLTAHLDRLGPLMAVGVEGTSSYGAGLTRTLRQAGYDTVEVLRPSRRVRRHHGKSDPIDAIAAARTVLSGDGVSQAKDTTGPAEQLRLLLAARTRLISAATAITNSIHSLLTTAPEPLRERYRRLDTPALITRLARTRPTRTITTPQQAATSALHHMARTHQDLHHRAERLNQQMHHILTTHYPGLLAVYGAGTTVAAQLAVTAGGNPGRIHNEAAFAHLCATAPIPASSGKTTRHRLNPGGDRRANAALHRIALVRLRHDPTTKNYANRRTQEGKTTKEIIRCLKRAIAREVYRALTQPPPTDTTSTLAAHRKRHHLTQTDVAHALNTYPARISDIENHRRPLPQLTHRYHQYLTTLDTQQEHQVHRSLASSRAARLAAESMPASATMMRSSMPWAAWKASAMGMIVVVSALLPSQQPTWRGKP

SEQ ID NO: 379221 - protein, 411 aa, unidentified
MIKENYIYVGIDLHKETHTAVMIDCYNQKLGEITFPNRPADFPKLVAKVKKCNTDGKTIVFGLENAYGYGRALAVWLIDKGYLVKDVNTAISHRQAKHRGAMYRKSDSDDAEAIALATLNMLDKLPDAYPNDAYWSLGQLVHRRDNIMKQRTRLVNQLHEQLCIAYPSYKQFFNDISRPTALYFWEHYPSRKYLKGKSVEDLRAELVPVSHNKCSTKTCEKILDAVASDKVKNNAYQDARDMVTLSIVSDLQHYDKQLAEVDKMLEQMYKMLGCTLTTIPGVNVITAVKILAEIGDIKRFSNANKLAQFAGIAPLHLSSSGKGKDVATKQGNRRLQATIYFLAIQMVQVSSKGTPRNSVVRAYYEKRKAEGKTSQQALICISRRLISIIYGMLKNGTEYRMPVVENAGETV

SEQ ID NO: 379222 - protein, 311 aa, unidentified
MQSSVYVGIDVSQEYLDVAVCGQKRVLRVTNDEAGLQSLMRQLQEKEPELIVMEASGGYERRAASMLLAAGLPVAVVNPRQARDFARSLGQLAKTDAIDARVLARFAEVLKPAPSRLSEEAAEQLRELELRRRQVVEMIVAERNRLRTAPRTADRIQEHLRWLEDEVKRTEKQIEGVIQSDPGLEAKAAILQSVPGVGPAVAATLLGSLPELGLLNGKEIASLVGVAPLNWDSGKLRGKRAIWGGRAHVRSILYMAALVASRRNPVIRALYERLRAAGKPKKLALVAAMRKLLIILNSMLRTRTLWNASTL

SEQ ID NO: 379223 - protein, 366 aa, unidentified
MIKLYIGIDSHKASNSVAFAFAGTKPPEFFGKLSADIRRFQGSLYKIQRKYNLSKEEVKLCYEAGPTGFVLARRLIGLGYDCIVAAPSLIPVKSGDKLKTDKRDAKKLAKLLRSNDLTPVHIPDPDDEIIRDVCRARTDAVDERKRAQKQLMAFLLRNGYHYTASTHWTDKHVTYLRDLVLPSPAQKLIREEYLQRIDFMNQQIEHIENSMSELLSTWKHREFVEALMGFRGFRQLASMIFISEIGDFSRFDHPKRLMAYLGLVPSEESSGNKRRIGPITKCGNSHARWILVECAGSYSMPAKIGRELSARQVGLSREVKALSWKAQNRLCRRWYRLSMRGVIYNKVRVSIARELSSYIWDLSKIV

SEQ ID NO: 379224 - protein, 356 aa, unidentified
MISRGVLHIPRIIVGVDTHKDEHVAVVIDKLGARIGQRNLPTTNTGYVGLEHWASGLGEIEVFGVEGTGSYGAGLARFLRGQGHSVIEVNRPDRSTRRRLGKSDPTDAEMAARAVLAGVARDQPKSGVDEVEMIRMLKSTKDSAMKGRTQAINQMKALIVTAPVELRAVLSGLTASQLVARCTGWRNGQLETPTTAAKYALRSLARRYSQLAKEIEGLNKELARLIVAFAPMLMEELGVGPDTAAALLVTAGSNPERLKSEAAFAALCGVSPIPASSGKTNRHRLNRGGDRQANAALYRVVLVRLRYDVRTRTYLQRRTEEGKTKTEVIRCLKRYVAREVFGILHDIGMRHTVQNA

SEQ ID NO: 379225 - protein, 386 aa, unidentified
MSKLDRTDAPVTGEYATVHIAFELSKSKWKLGVLLPGASKLSRYTIDGGDLAELTKLLALARTKAERSSGKPVRILSCYEAGYDGHWLQRWLTDQGVSNYEIDPSSIEVARRARNAKTDRIDLDKLMRAFQAYLRGERRACSMVHVPSVVDEDRKRRNRERDRLKKECTAHTNRIRGLLHAQGVRDGQPMRRGFIASLDRMRTGDGRPLPPKLKEEIVREHERLSLVDKQLTELEARCMAEVKAALPGSAEAMIKQLLDLKSLGLVSSLGTVNEVFYRSFTNRRQVGAYLGLTGTPFDSGDSKRDQGISKAGNSRARALAVELGWLWLQHQPDSELSRWFRARVGDNKGRIRRIMIVALARKLMVALWRYVTTGLVPTGAVLKPVH

SEQ ID NO: 379226 - protein, 342 aa, unidentified
MAPSLPAYDLFVGVDIAAATAAVAWQRPDAPLSRPLTIAQTPAGSAALMAHLQATAVAPARTLVVMEATGSYWITLATTLHHAGYAVSVINPSQAHAFAKALLKRAKTDAIDAQTLTQLAALLQPAPWTPPPAVYHELKQRLTQRDTLLDLRQQVRNQRHALLQHPFVVAAVQERMDSLIATLTVQITAVEAELLPALQQDAAWAAAAARLQTLKGVGLLTASWLLVSTLCFTTCPTPEAATAYAGLAPNERSSGTSVYHRPRIGHTGNARLRTALYMATLSAAARNPVIKPFYDRLRAAGKPMKVARCAAARKLLHLAWALVTKEQDFDPCYGQRPQVSTP

SEQ ID NO: 379227 - protein, 404 aa, unidentified
MPSGEVLEEFEIEHRLEGFQDFFSRIEKHNPEQSYSVAVAMEGYNGYARPLDSMVRQLGYRLYNINNLKLARFKEIFPGSAKSDRIDARKGLELFQLRDHLPLAKEVLQEVSGTPQHNEVLKRLTRRRRRLVNERVRVVNNLQADLQSVCPGLLEITSEASNQWFLNFLLSADTLPQLARLRKVTLLKIPAVGRKYASLIEAWQKRAHFGAEVEWVSEMIQEDAQRSLDLEDKIKALETKIKQVAKDSKIAKILLSIPGFGPVCTSELAGEIGTIERFSKEGSLALYLGMSTLDNSSGKYQGSKAPKHVNTRAKAAMMIALDRHRKYVPQSQRYYEKKRSEGKKHNQAVRALGGHLCRIIYKMLKEEREYEIRPEKGNTKTKVGSRSSLKTQIRRPKISRKETK

SEQ ID NO: 379228 - protein, 387 aa, unidentified
MAKQNDLSRCLVTLEQDATVIAVIEMGQSSWLVAGIAPGLERNPLKKLSPDPDALLQLLHRWQKEAVQAGRAIKRIVVAYEAGRDGFWLARWLRAREIEAYVIHPSSVPVSREHRRAKTDRLDTELLKRAFLGWLRGEPKHCSMAAIPTVADEDTKRPGRERQSLVGERTRIINRVKANLARLGIRGFRANLAQASSRLEALRTPEGIAVPANTRAELQRDMDRLRFVKQQIKEIETTRAKRLAGAPNEQRHAMVRLLAQVVGVGIETADMLVQEVFSRNVRDRRALARYAGLTGAPDESGKKRRERGLAKAGNARVRRGMIELAWGHLLHQKASALTEWYRKRTSDTRGGTRKTMIVALARKLLIALWRLVTTGETPAGLLLRPAV

SEQ ID NO: 379229 - protein, 339 aa, unidentified
MNITTVGLDLAKNVFHVVCFNRHNKEVKKRMLRRNQVSQFFAQLPPCRVAMEACATSHYWGRKLTLIGHEVKLIPPQHVKPLVQGNKNDYNDARAIAEAVDRPRVTFVAVKTEEEHDIQAIHRIRSQCLRDRTALSNSTRGLLAEYGISFSKGISVLRRRIPELLEDADNGLSFRFRNILARRYEQLVALEEHIAFYTKELGLLSQQNEACQRLQTIPGFGPIIASAFRGTIGDGQSYACGRHAAASLGLVPKQWSSGGKNVLLGISKRGDRYLRTLLVQGARAVVLHAANRDDSLSRWIIRLLERRGWHKTVVAVANKLARIGWAVLRHNTRYEPNLA

SEQ ID NO: 379230 - protein, 355 aa, unidentified
MTIVAHSRPFVIGVDTHAKTHTYAVIDATGQSLGCEQFPTTAKGIARAIAWVGRRSRGQAEALWVIEGVATYGARLAHAAAEAGYEVAEAPRMSAKIRHGVGKSDAMDAQAIATAALPLDEARLRRPRADEGVRQALRVLVASRDQMTQEKTMNVNALTALLRVHDLGIDAPKPLTAAQIGEASRWRGRDESLAQAVARDEAVRLARRVLTLEEALTANHARMAELITDSPAAPLLEEKGIGAYTAAVVITAWSHPGRIRDEAAFASLAGVNPIPASSGNTIRHRLNRGGDRRLNKALHIITVTRMTHDPNTKAYVEKRLAEGRTRREIRRCLKRYIARYLYRTLNALHDTPATT

SEQ ID NO: 379231 - protein, 354 aa, unidentified
MNIKYIGMDVHKEAISIAVMNDDGKLVMESIIETKASTILQCIQGVRGDLHVTFEEGTWAAWLYDLLKPHVTELVVCDPRKNALLKEGNKSDKIDARKLADLLRGGYLRSVYHGENGLRTLKELARSYLTISKDLTRVMNRVKALYRSWGIFCGGQQVYAPRHRAEWLNKIGEAGVRRRAEFFYQQLDALRALRQAVRRDLLAESRKHGATKLLRQIPYIGPIRAALLIALIQTPHRFRSKRQLWTYSGLAIETRDSAQYRYVAGELQRSKKPQQVRGLNQNHNHDMKAIFKNAATMASSREGPFHDFYEALLTKGMKPAMARLTLARKIAAITLILWKKGAHFDATQLKPQAA

SEQ ID NO: 379232 - protein, 366 aa, unidentified
MKKSSTVAIEGIQVFKQNQLTIGLDLGDRTSHYCILNEAGEVILEQELPTTLKGIEQVFSKIPRSRIALETGTHSPWISRQLTELGHEVIVAHARNVRLISESSRKDDRLDARTLARLARIDPGLLNPVRHRSVKAQIHLTVIRARAALVSARTALVNAARGLTKSYGARLPKCGTEQMNREITKNLKPELREALNPLLAGIESLNARIAEYDRRIEQMATEVYPEVARLKQVKGVGPLIALTYVLTLDNPYRFRRSRDAGCFVGLRPGRRNSGMSEPQLHISKEGDRYLRTLLVQGAHYILGPFGQDSDLRRWGLKLSERGGRNAKKRAVVAVARKLAVLLHKLWVSKEVYEPLRNNRKQMTQVA

SEQ ID NO: 379233 - protein, 338 aa, unidentified
MAPHYHLYVGVDIAAKTFMATWARDPATTPKAVSFQQTEDGFTAFREQLGAAGVAPNATLVVMEATGSYWVALAIALHQAHYVVSVINPSQVALFARSLPRRGKTDALDAQLLLRFAAERQPAAWSPPEQVYHELRQHLVVRDGLLHMRTHAKNQRHALEQWPVQIASALLALDTVIAEFDAQLASLERDIAEVLRDGAWASSARVLLTAPGIGLVTTAWLLVGTLNFTIAQSPEQLTAYVGLAPLERQSGTSLRGRAQIGHGGNGRLRTALYRATLAAARYNPSLRAFYQRLRAAGKPMKVARCATARKLLHLAWAMVKQQEPYRAPAPEPEEQLAA

SEQ ID NO: 379234 - protein, 356 aa, unidentified
MAWVSDKSAETVHYHGTIPTNLRSFDKLIKNQTAKTSKLCVIYEAGPCGFWLYRHLLRRGIECWVVAPALIPKAPGDRVKTDKRDAMTLARLARSGDLHSIYVPDERDEAIRDLIRCREDAMLDLRQARQRLKSFLLRHGHPCTGRQNWTEAYRRHLADISFPQSATKITFQHYIHIVTERYERLQRLELELQSLAESWRWYPLVQRLTVLRGVRFLSAMTLLAELGDLRRFASPRSLMNFVGLTPSEHSSGQRERRGGITKCGNSHARRILIESAWAYRFPARVSRELESRQQEHSIKLQTRSWEIQQRLCRRFHALKARGKEYNKVVTAVARELTGYIWDLAQGFDTDMPQQAY

SEQ ID NO: 379235 - protein, 351 aa, unidentified
MNYVGIDIHKRYSVCAAQDEQGRELGITRIEGDCGSGLAQFLGRLGGRSTVAIEACWNWGKVFDALEGLPEVAEVVVANPLKTRLIGEAQIKTDKIDARALATLLRGHFIARVHVPPKAARQRKDQLRQRLYWARLRTRIRNRIHALLDRQPPLALPQCSDLFGVKGRAHLRRLELPGPDGTLLREDLALLELLNAQIKAQEQRIAASNVADAATQHVQSIPGFGPILACLLATEIDDITRFADAEHLCAYAGLVPMTRASGGHTRHGPLLRAANHWLRWAFIEGAWVAIGCSAYFGALYTRHRARSKTANTAITIVARRMCRIVFHLLTEQRDYTAEPPPKLSPAAPHKD

SEQ ID NO: 379236 - protein, 353 aa, unidentified
MKTYYVGMDVHRASIVIVVLNGAGKIVMQSVIETGAERVRGYLKQLRGKVYVTFEEGTQANWLHEVVRPLVTEVVVCDPRHNKLMQSGNKSDRVDAQKLAELLRLGSLKAVYHGDNGVRALKELVRSYDCLVSDTTRVMNRLKAIYRGRAIGCAGHDIYRQDRRQQWLEKLRERGAKQRANFLYQQLAALKPLRHEAKRLMVKEARRQPAYPWLMSVPQFGAVSVAQLLAIVSTPHRFRSKRQFWTYIGLAVVTRTTADHEVVNGVLRRSKRPVSTRGLNRNHNHLLKRVFKNAANGACHSGPFKAAYELRVTRGMVPSLARLTVARQLAAITLAVWKRGEQFNPERMKQQAA

SEQ ID NO: 379237 - protein, 357 aa, unidentified
MLIRKVTQRTTRGKPAAPARTTLAGGLMAGKSVVEYDHYVAIDWSLKIMAIAHLSGRDQIPRVFERPTDLKELKTYLGSLKGRTIITFEESGFAHWLYLELLDCADRILICDPFQNRLLFHGPKTDKIDARKLCELLRSGLLKEVYHSDSALYELRLLVSAYDDVVRSGIRVLNQKAALKLGHRDTGKSAAFVGEILKENIDLYRQSKQQYERRFHELARRNKLVRFHREIDGIGTIGAVKVVACVVDARRFPHSGKYLSYCGLVKHEKLSGGRSYGRRKPRYSRVLKSVYKTAALAALKGNNPIREYYDHLLAQGVAEHNARHAVARYIARISYGMLKSGTRYEPYRWRNAQRTSI

SEQ ID NO: 379238 - protein, 358 aa, unidentified
MEKLIRVGMDTSKSVFVLHGVDAAEKVVLRKKLRRQQVIEFFGKLKPTKIGLEACGAAHYWARELEALAHEVVLLPPQYVKPYVKRGKNDAADAEAICEAMSRPTMRFVPVKTAEQQAALMLAGTRDRLIRMRTQLTNAIRGYAAEFGLTAAKGLDKIEPLLARLAAAVDLPKLAKELFAAHAKEYAQLKLEIQKIEAKLMAWHKHNELSRRLVEVPAIGPIGAALVVMKVPDPHAFRSGRDFSAWIGLTPKDHSTAGKTRLGVITRAGDETLRSTLILGATAVIQQVRRGRGHPSPWLIDLLKRKPPKLAAVALANKTARIVWKLMISGERYNPMRLRDTRSPSARCGSEPTAITQA

SEQ ID NO: 379239 - protein, 373 aa, unidentified
MTRKTNTNLNIRVVGVDLHSDNFYATYDTIDGSVKTEIFPYTKESINRFLAVMKANHVKKAFIESTGSYYYPFASILEANGIETYVFNAFKTKNPDIDKRDDSDSAWLYALGKTGQVKASRLVSPNILPLREATRLRFHIADMIAASKKRIEGMLWRFGFLARNVSRRLEGKKFRGALKKALLGRVDRRFREDSLIVSIAERARSGLAGLDIILNELETLEYLMRRRDVVDEKIRKLAEPFMDKIEILMSMPGIRFTLAVAIFSEMGSIDRFPSGRHLASYAGLRPTLKQSGRKRRYGRTSKKSNSRLRLYMFLVAKSAMRSHDPIARRFVDRLRRRGKHFNVIAVALARKMLCIAWILLVRGVSWRNIRRIR

SEQ ID NO: 379240 - protein, 400 aa, unidentified
MLSIGIDVSKGKSTVCGMKPGGEIGYTPFEVQHTRKGMSELVSLLRSSGEEVRAVLESTGSYHCPVVAALLENGIFVSVVNSLRMKRFCSQSIRKVKTDRIDAMQIALYGLAYWQELQPTKLPEDTYRELQLLARQYYQMTSILIKAKVDFNALCDQALPGMQELMSDHAGRHKLSDFVLRYRHTTHILEMGETRFRKDYCKWAEKKGYRNCERMAALIFATAQNGIPVLPNAPSTKIVITEAIRVLHTVEASRDAILTQMQALAKTLPEYSLVREMPCIGDTLAPRLIAEIGDVRRFHSKRALIAYAGIDAPPYQSGKFCANNRHISKRGNRYLRKTGYEVMQSYVMHKPANDPIFTFIEKKRSEGKCGKLAMVAGLNKFLRIYYGKVTELYRSLSAIE

SEQ ID NO: 379241 - protein, 317 aa, unidentified
MRASAAFFVGIDVSKQQLDIAVRPSGESWTVAHEEAGLSALVARLRGLAPTLIVLEATGGWEVPVTGALAAAALPVAVVNPRQVRDFARSTGLLAKTDRLDAQLLAQFAEVLRPAPRPLPDAQAQELTALLQRRRQLVEMLTAEKNRWPLAARRIRPQLQAHIAWLHQQIAQFDEDLRQLIRSSPLWREKDDLLRSTPGVGPVLATTLVAALPELGTLSRRQIAALVGVAPLNRDSGTLRGRRTVWGGRAQVRAVLYMSTVVAVRHNPVLIAFYQRLRAAGKAPKLALTACMRKLLTILNAMLKHHRRWAPVRAQHA

SEQ ID NO: 379242 - protein, 334 aa, unidentified
MAKSVFHVHGVDRKEKPVWRRRLSRGQWLVSKVEPGCEIGMEACAGAHHWARDLQARGYRVKLIAPQFVKPYVKSNKNDRNDAEAICEAMSRPTMRFVSVKSVEQQDIQAMHRIREELVSARTSKSNQIRGLVAEYGLVAPQSLAKLRAAIPEWLEDADNGLTDRFRGLLAGVRDDLVELDRRVGELDKEIDVLARSHSEAQRLQQLRGVGPIIATALLATLGSGEQFAKGRDFSVSLGLTPRQHSTGGKERLLGISKRGDPYLRKQLIHGARSVIYAAKGKDDPLSQWVNRLVSRRHINVAAVALANKTARMAWSMMRNDTDYQPERAAGLLG

SEQ ID NO: 379243 - protein, 408 aa, unidentified
MSRVVIGMDPHKRSATIEIMAGDESILGGGRFATDTAGYAAMLARVRPWPERVWAVEGCQGIGRHLASRLLADGEQVIDVPAKLSARMRVFATGQGRKTEATDAHSVALAAARMTGLRPVADDQQLAVLRILADRRRALGEDHTRMVCQLHQLLLELIPGGAKKDLSAAQAKVLLAKVRPRDPAGKARRRVAAELTSDLERLYQRKKAANKELNELLAATASTLTGLHGIGPSGAARLLVEVTGIDRFPSKAHFASWNGTAPIDASSGDQVRHRLSRAGNRQVNRVLHIMAVVQLRNPTEGRAYYDRKVAAGKTPMEAMRALKRRLSDIVYRQMITDARAAVTGPGGHLGAATGSSAAGLHPSTGTSEKSLPGPAAHDPTPAKPAHSPGRSRRPPSPPDRSRRQALSA

SEQ ID NO: 379244 - protein, 413 aa, unidentified
MEVLYRHCAGLDVHKETVVCCVRLVSQDKAVTEVRTFETTTAGLLSLSEWLSASNCTHVVMEATGIYWKPVWTILSDGEFELTLANPAHVKNVPGRKTDVNDATWLAELHAHGLIRASFVPEPATQALRTLLRTRKQLVREKVSHTQRLQKTLEDANIKLDVVISNVIGLSGRKMIEAMIAGESDPAKLAALADRRIKASQETLREALRGRVRKHHRFLLRLHLQQIDALDTAIAAIDQEVGASMSACFRTAVKLLTSIPGVSTLSAEIILSEIGTDMTRFPTAGHLIAWAGLCPRNDESAGKRRSNRLRKGAPWLKTILVQCGWAASRVKLGYLQAQFHRLRARRGAKKAVCAVAASILTAIYHMLTSGTFYHDLGSDHFDRRSKQKHTKNLVKRLEQLGFSVQLTSLPAAT

SEQ ID NO: 379245 - protein, 416 aa, unidentified
MDKIYDSCCGLDVHQKLIVACFRHGGKKEIREFGTNNLQLNLLADWLIEGGCEMCAIESTGSYWKPVFNVFEERKLPIMVVNPYHMHNIPGHKTDVKDADWIGDLLMNGLLKPSFIPSKRQRELREMCMLRKSCTQERTRLINRLQKIMEGANIKLSGTITNVVGMSGRTFLGLLLQGIKIDESLYDKLLKEKKISKQLKASKKQIIEDLQGGFTSVQKAEVRIILQLIDAQTAAIDELTEEIKRTMTPEEHEVSKLLQTVYGIAEVAAQIIIAVIGIDMDKFQSPEKLAAWLGLCPADNTSAKKRKKNGSRQGNTLAKTTIITCAHSAILKKNSYFYARFVRIKGRRGSKKAYVAVAHSMIIAIYYIIKNRVPFQDLGANYLNTFDREKRIKSLLKGLIKLGWAGEIPSTMAIAN

SEQ ID NO: 379246 - protein, 414 aa, unidentified
MDVLYSYCAGLDVHKKTVVVCRLGLDAKGHTVKWVATFGTTTAELLRLSDWLTAGQCTHVAMESTGEFWKPIWNLLEGNFELLLVNAQHVKRVPGRKTDVQDAEWLADLLQHGLLKASFIPPVAQRDRRDLTRQRTQLVRDRASVLNRIQKVLEGANIKLSSVVSQIDGVSSRAILAEMVADHLNPAQLEGLVHGRLRDKLPELEQALTGRVRAHHRFLLAQHLAHLDFLDEQIAAYSREVERLTAPFDELVALLDTIPGVARPTAELILAEVGPDLSRFPTADHLASWAGLVPGNNESAGKRLSGKMRQGSQWLRVGLTQAAHAAARQKNTYLAAHYHRLAGRRGKKRATMAVAHSILVIAYHIIQRREPYQDLGSNYFDERQKVSTANRLTRRLEKLGYRVVITPPAPPVAV

SEQ ID NO: 379247 - protein, 486 aa, unidentified
MARDTAQAHSGAHPASAVVRPMLAHESLYVGVDVGKQQHMAGFVSLTLLQRHERFEGCPVLRFANTREGFRQLVDRLHDYVPLEQCFVLLEKTGHYQNALVDYLLDLDISVYLMHVHRRPRGLLKTDKRDALNLANHLYNQLEKGIQVADKTQWARSAVPPTSAATRLKSLTGHRYELVHESTQRKNQLTALCDQLVPEFTQVFRDPNSPAALAVRAQFPTAEAIATADLAQLCTAKGPRRPSRQEMEHLQQLAIQSIGVKDPGRLQGLVFEQRQLIRELHLLQEHLAQIDAEVACILEHAREGRILLSMPWLGLSSAAAILAAIGNIDNFASAAALKAYFGWAPKVIQSGVSTDSATISRAGERTMKEVLYLVAIRSVSGSGAWAPLYHRLVERTCAYDERTRSYRGKKKVVGRVAGQITAMIYAFLKADADMLAKTPQGSEPPPPMLYDAGIHQAHRAGAYRTMKPAVERGRLIRLAKREPPTG

SEQ ID NO: 379248 - protein, 389 aa, unidentified
MYYVGIDVSKYKHNCFIVTGDGVIIHDAFSFTNDRDGFQTLLSALTPLGDHSEIRIGFEATAHYTLNLKLFLENAHYSFMEFNPVLISKFTKSQTLRRTKTDAIDCASIARWLMTVEYKPYPSGFYHIYSLKSLTRLRDSLVRQRSFYIVKITNVLDHTFPEFKPFFSNKFSKTALYLLENYGNAEKMSHMNSQSYENIRRISRGKFTPRKFLELKSLAANTVGESNEMFDSQLSSLLALYKATVKEIESLENDITDLILETNPRSLSIPGVGPLSAAVIYAEFGDISRFSSPQKMLSFAGLEPSFYQSGTSAHGGHMVKRGSPYLRYTLMNLCIPLMKYNIVFAEYYAKKRSEGKHHRVACTHLAKKFIRILYKLEKDKTDFDPVKLR

SEQ ID NO: 379249 - protein, 387 aa, unidentified
MKKHSMQKPQRNSDLFVGLDVHKATIDVATADEGRAAEVRHYGKIAGDLDSLNKVIRKLQSLGRTLHVVYEAGPCGYAIYRHLSAKQIDCTVIAPSMTPKKSGDRVKTDRRDAISLARLHRAGELTAVYVPREDDEAVRDLSRAREDAKRAETRARQQLQALLLRHDIRYTGKSAWSAPHLRWLADIKLPHPAQQIAFQEYVTAIDEAAARVARLTKQIEELLPSWRMSPVVTALQAMRGVALITAVCMVAEVGDLTRFTNPRQLMAYLGLVPSEHSSGERRHQGAITKAGNSHVRRMLVESAWAYRLPARVTPIIQKRQEKLTKPVREIAWKAQLRLCARYRRLAGKGKTKQLVVTAITRELAAFMWAIAREVTPLEGAVGEQRAA

SEQ ID NO: 379250 - protein, 430 aa, unidentified
MEEIDEQELHVERIAALDLGKAVLEACVRVPHETKPGRRMQEVRTYLTTTAALLQMADWFRCWGVTRVVMESTSDYWKGAYYLLEAEGFECWLINARDVKNVPGRAKTDKLDVVWQAKVAERGMCRPSLVQPKPIRQLRNLTRYRRSLIRDRSREMQRVEKLLEDAQIKLSAVVSKLFGVTGRLILDALAGGQRDPNVLAQLAKGRLRPKTAQLREALRGFFTDHHGAILAMMLANIDRLSAQITTLDTMVEQAIAPFANQAQQLAQITGSGPLSAQELIAEVGVDMSRFPSAAHLVSWAKFCPQTHESAGKHKNKRRVKGDPWLAATLGNMAASVARTGAGFLGAPHRRIARRRGPQKAIVATGNAILVIVYHLLSDPAAQFHDLGGDYFTTRIDTNRRARSLAAALQAVTGQKITIRDGQAVIEAQAA

SEQ ID NO: 379251 - protein, 400 aa, unidentified
MKYVLVLDVAKGKSMFMLSSDVGEVLLEPTEYTHNKTNFELINSNITKLNIKDNLTVVMEATSIYHKAPERFFKENNYHVIVFNPLIGKEITNTIRKTKTDKQDCIKLTNLFWKGSIPDRNYTEDEIYTRLNELSRQYYHLDEGLNRHKNRYKELLHLCFPEFELCFKNGKIYDLTALNFIKEFPHAYIIKGKRIDALAYNMANTNNRHLNYYRRKANTIKEYAKNSYPGINENSKGVDNLKQLVNIIINITKQKDKVKNQMIELAKQTKHFKNIVSIFGIANLSAALIIAELKDITRFNNVKQINASCGLDSTIVQSGKSINYHGPISKRGNKYARKILFNCSRNIVTVSAKCDKENPIYVYYQKKKQEGKHYYACLTACSTKLIRIIYALCMNNSSQN

SEQ ID NO: 379252 - protein, 385 aa, unidentified
MFKVGGKSRVRVRGQGRLLKLILAPRRPVSKQIVSNRKAAVSADMLTDPQQANVFCGIDVSAETLAVAVLEQDQPLRQREFANSASGHKALLAWLSKMQSRVRVSLEATGIYSTDLALALDAAEGIEVAVLNPKRIHDFAHSMCRSKTDAADAAVLAEFSMRMEFKAWQRPSRGALALRAIGRHIEALGLEHTRTNNRLHAALGSIGTPRCVVEDLKRSLAGLERRMLKLRREARTQIDGEDRLREQFRLLTGAPGIGEISALQILSELALLAPDLKARQWVARSGLDPVHRDSGTSVHKPARISRHLRRALYMPALAAVRWDPHLRAFYETLLGRHKSKLQALMAVARKLLHAIHGMFKSRTPYDGSKLFPALNIAGAVESTSE

SEQ ID NO: 379253 - protein, 338 aa, unidentified
MNQPQTAGSDVGSKELVVCLRLTTGATEIERFANDAAGHRALIKRLTKKGRRARTVLESTGVYSFEISLALHHAPRVEVMVVNPKAAKDFAGAFLKRTKTDPEDALVLLEFVERMPFVPWQPPSDAALGLRAHARRLHTLTRAINDERNRLHASRYLGEASDVIQNDIEVNVRHLERRSELLTEQAVALVKADPELHRRFRLLVTVKGIATTSAIQILGELAVLPPDMSARQWAAHAGLDPRHCDSGTSVAKPTRISKVGNERLRSSLYMPALVAIRFDPHVKRFYDALLARGKKPLQAIVAVMRKLLHAIHAIITLDVHYDSSKFAFIPPGSLPLKA

SEQ ID NO: 379254 - protein, 408 aa, unidentified
MTVVGIDVSKGKSMVAAMKPGGELVAAPYEVRHSDIELSHLALDVLCMEPDTRVVMEATGRYHEPVAALLHSEGIFVSILNPLLIKQSGAGSLRKVKSDPKDALKIAKYGLDNWSTLREYTPMEAIRQQLKLCARQCDLYNKNIVMLTNNLISLSDKTFPGVNELFSSPEKADGHLKWVDFYRSFWHCDCINRMSPDAFEERYKKWCKSKGYHFSTDAADALYAASCGPYTTLPRDNNAKLLVTVAADQLIALRENQSKLEAEMLNLCKQLPEYETVMAMYGVGKSTGPHLMAELGDVRRFPHRSSIVAFAGVDPGVVGSGKMQLSSVTTSKRGSPQLRKALFQVVSTYVKCKPENEAVYQFYAKKRDEGKPFFVCTTAAANKFLRIYYARVKECLNAVESATQVEEG

SEQ ID NO: 379255 - protein, 318 aa, unidentified
MNNQTTTTTTQHTQTLIAIDVAKDSLEVRTDKSAFSLENSPKGFKALLRKVPQKTGLLVMFEATGGYERALAEFLHERKIALSIINPRLLRSFARSEGIKAKTDPIDAEMIYRFARSKALRITPAPTAGQRELSDLLDRRSQLSEFLAREQNRIQKALSKALLASLRRNMKALEKEMALIEKHIRALVDSTPDLKKHSLIITSVKGVGDITAWTLLAQLPEITTLSRNQLVALAGVAPFNNDSGKFSGKRSIYGGRAKIRRVLFMAARAAAQFNPVIRAYVGGLLARGKPYKCALTAAMRKILIHVQSLLKKCEMSPC

SEQ ID NO: 379256 - protein, 352 aa, unidentified
MAMTIVENHLLSVTGGIDTHRDFHVTAAIDPNGGVLGVESFETTTGGYRRLVAWLAAFGDIDLVGVEGTGSYGAGIARHLTGKGIRVVEVDRPNRQARHRAGKTDAIDAIAAARAALSGTATGVPKTRTGPIEAIRVLTVARRSAASEWVVILNQMRHLCFTAPEEFRRRFSELSPIMLVRTCAALKPRRSDDDIVRFTTLSTLRELGRRGLFLREQTRRLDAEMKPLINQIAPELLGVYGVGYHVAATLLIAAGDNPHRIRSEAAWAHLCGTAPISASSGKIQRHRLNRGGNRQANSALHKIMLTRMASDARTRAYVSKRSADGKTMGETTRMLKRYIAREVYHHLPTTMT

SEQ ID NO: 379257 - protein, 359 aa, unidentified
MRTQSNKLNFEGENIYVGIDVHLKSWNVTIYTEYLHHKTFNQPPVPSILRDYLNTNFPGGTYYSAYEAGFCGFNIHFELEKLNINNIVVNPADIPTSQKEQVLKNDSRDSMKIARSLRANELIGIHVPFIETLENRTLIRTRDTMVKDMTRFKQRIKALLYFYGISYPPEFEKSTSHWSQRFLKWLKEEVSLNTANGNDALSLLIREVEQQRVLILEINRKIHSLAVSEKYVKEIELIRSIPGIGLVTGLTFLSEIEDIERFPNTDKLAGFVGLIPTCHSSGEVENYGEMTFRKKTTLRRWLIESAWVAVRIDPALTRCFSQLCKRMEPNKAIIRIARKLLNRMYYVLKKRQKYECGVV

SEQ ID NO: 379258 - protein, 430 aa, unidentified
MMEEVDDAELVVERIAALDLGKAGLEACVRVPSPHRPGRRMQELRGYGTTTAQLLEMVAWLRHWGVPRAVMESTSTYWKGVYYLLEAEGFECWLVNAREVKNVPGRAKTDRADAIWLAKVAERGMCRPSLVHPAEIRRLRDLTRYRRALVQDRTREQQRIEKLLEDAQIKISSVLSELHGVTARAMMDALIAGQRDPRALAQLAKGRARKKTAQLEEALRGFFTDHHAAILRMMLDNTDRISAQIAALDARIEKEIGPFSHQAARLAEIPGVDAVAAAELIAEIGVDMTRFPSDAHLVSWAKFCPQTHESAGKSKSKGRGRGNPWLAGTLGRIAFANSRADTFLGARYRRLARRRGKQKAIVATGNSVLTVVYYLLSDPMATFCDLGPGYYESRINVHRRARDLVTQLQALTGQHIVIRDGKAVITDAAA

SEQ ID NO: 379259 - protein, 328 aa, unidentified
MPMYQLGIDVSKNTLDLCLLREGIKGRIKTRKLKNTADAAKVVAEWLKKQSCELGEVHIIMEATGVYHEPLAYGLHFAGARISLANPHRTREFARGMNILTKNDKVDAWMLACYGSLKEPEAWTPPPESVRYLRALLRRRDALVADSTREKNRLEKSVFTDSPDAVRASIEHMLQELNNEIEHLDVLIQEHIETHPELNQDFRLLTSIKSVGYLLGLNMLAILKSHSFESAEQAAAFLGVVPVERRSGTSVKGKPKLSKIGPPEIRTKLYLAALCGLRFNPVMKQMYTKLCQRGKSKMCAIGALMRKLVHWCYGVLKTQLPFDAEYNQ

SEQ ID NO: 379260 - protein, 461 aa, unidentified
MAKQAGKRKKDGAKADATVGLPPLNLHAAGIDVGSAEHYVAVPPDRDAEPVRKFGSFTADLHRMARWLKDCRIKTVVMQSTGVYWMALYDILERHGFEVNVANARQTKTLPGRKTDVQECQWLQKLHTFGLLNNSFRPAEEIRVLRGYLRQRENLVAAAATCIQHMQKALTEMNIQLANVISDINGTTGLAILYDIVRGERDPYKLAMHKHSRIRASRQEIARSLEGTWRQELLFVLEQSLDLYQTYQQKIQTCDERIDGQLRSMEPKIDPLSEPIPEPRRGKDARGHQSGFDLRGQLYRITGVDLTRIDGIEVQNAQTIVSEVGVDMSRWKTEKHFASWLGLCPDNRISGGKVLKRGTRHVVNRASTALRLAASGLLRSQSALGAKFRRLRSKLGAPKAITAMAHMLARLVYRMLKFGHDYVDRGIAFYEARYQQQQLQRITKQAAALHMQLIPLTRVVS

SEQ ID NO: 379261 - protein, 339 aa, unidentified
MLYVGIDVAKNKHDVTALNVRGKTVLKPLTFSNNKAGFELLDLSLRQLNQDCLIALENTGHYAFNLLNFLHEQGYKVYTYTPLLIKEFAKSLSLRKTKTDKKDAHGIALKLLSDPNREQFQHDNRQVELKILARHIHRLKKKQSDWKVQYTRCLDIIFPELDKIVEKHSEYTYQLLTRYPNPQKRLEAGFDKLIEIKRLTASKIQDILSVAPRSIGTTSPAREFEIIKHYKRLIDKAETCVNDLMAEFNSVITTVTGIGGRLGAVILAEIRNIHAFDNPAQLQAFAGLDSSIYQSGQIDLAGRMIKRGSPHLRWALIQAAKACPRFSPAFKAYLKTKLE

SEQ ID NO: 379262 - protein, 461 aa, unidentified
MSKKRPVGKQKSSAQTKVDWKALEIVHPNAAGIDVGGSEHWVAISPDRDRVPVRRFGCFTADLREMARWLVEKGVRSVAMQSTGVYWMPVFEVLEQHGLEVYLVNAQHTKNVPGRKSDVQECQWLLKLHAFGLLNNSFQPTDQIRVARTLWRQRGNLVAQASRAIQRMQKVLIEMNVQLSSVLSDISGISGMSMIAAILDGERDPWTLAALVQPEVKATRKDIAKSLEGNWREELLFILRQDVELYGIYHKKIDDCDLQLRKHLESFGSVVDLKTQPLGPRPKGKKGSKNAPKFDLRTELYRVTGIDWAQVNGIDVLTAQTVIAECGAGLSAFASEKKFASWLGLVPTNEQSGGKILNRRTRKVVNRATVALRNAATTLLRSRSYLGAQYRRLRTRLGAPKAITAMARKLACLFYRLIKHGQQYVDKGNEYYEAKYREQQIRSLTKRAQKLGFQLVIPKTA

SEQ ID NO: 379263 - protein, 338 aa, unidentified
MKLYGGIDLHSTNSVVAVTDEQDTVVYRRRVPNDLDTILSALAPYQEYLEGLVVESTYNWYWLVDGLMEAGYRLHLANVAAVKQYEGLKYSDDNTDACWLAKLLRLGLLREGYIYPKEDRPLRDLLRKRSQLVHQHTANLLSAQNLVARNRGQSISANEIKRLQYEQAERMFESEPLFLALASTVAVMRAQQEMIELIEKVARRKLKLSEPLKRLLTVNGIGEVLGLTILLETGDIKRFERVGNYVSYCRCVDSKRITNGRKKGKGNRKNGNKYLAWAFVEAANFAVRYEPRIKRYYQRKCARSNGIIAIKTVAHKLARACYFILRDGVTFDVERAFV

SEQ ID NO: 379264 - protein, 313 aa, unidentified
MHEEVFVGIDISKDRLDVHLLPKGVHTAVKNDAEGIASLMTQLQQEKPAIIVMEASGGYEITVAAEVGAACLPVAIVNPRQVRDFARAIGKLAKTDSIDAYVLARFAQTIRPAAQALPTEDEKQIKELVTRRKQLVDLRASEKNRSHRARSAGVRQSIQRVIAMLDQEIRDIDKNIDDIIKRSPLWREKDDLLKTFKGLGSATSRTLVAKLPELGEVGRQPITCLVGLAPLNKDSGKMRGKRMISGGRADVRRALYMVAISAIRFNPVIRLFYQRLIEAGKPFKVAIVACMRKILIILNAMVRTNRPFQDVFA

SEQ ID NO: 379265 - protein, 416 aa, unidentified
MSAKQLFVGIDVANVKVDVTFLDGEARTVRPQATYANDPEGWPALRTAVVAAASLLGARTKVVCGMEATGNMHKRLEQALRAEKRRKLEVHVLNPRAVKSFAKALLTSAKTDRGDSHLIALFLMRMKPAPAAPVPELFEEFREATRTRRRLVEERTDAKNRLHKLLRYHFPGYRKTLAKHLSKGLLVALNALPSPHLVLGAAPGEIAAISYGTRHRVGAPLEEKLRTLAAQAPRADLPKLTQMLLRTTARRILDLDELIVEMDDGLADMLEQLFPGQVLTSIPGLGAVSAAAILAEICDIARFQSKTDFIGYCGLYPVVWESGEAKRRYRMTTKGNRMIKMTLLIASAAARQYNPAIAAYYERLRARGKSTKAAGGAIARKLAEIVFTLLVRNEPWSPEKATAGLAKSLAMTEAKV

SEQ ID NO: 379266 - protein, 326 aa, unidentified
MEHELHYIGIDTAKEKLDVDVLRPDGRHRTKKFANTTKGHDELVSWLKGHKIYHAHICIEATGTYMEPVAECLYDAGYIVSVINPALGKAFAQSEGLRNKTDTVDARMLAEFCRQKRPAAREAPHPLERALRAPVVRHRALTDMHTQELNRTETAREVQRPSIDAHLLWLEAELKRLEKQIKDLTDDDPDMKHRRKLLESIPGIGEKTSAVLLAYIGLKDRFAHARQFAAFAGLTPRRYESGSSVRGASRMSKAGHVSLRRALYMPAMVATSKTEWGRAFRDRLAANGKKGKVILGAMMRKLAQVAYGVLKSGVPFDASRHNPVAA

SEQ ID NO: 379267 - protein, 315 aa, unidentified
MVEQVVVGIDVSKAKLDVALLPGGEQFTVSNDRHGIGELLRRVSPLAPSRVVLEATGKLEQLAVSELAAAGLPVVVINPAQVRHYAKARGKWAKTDPIDARLIAEFARDLEPELRPLPDAETQALAALCQRRNQLLEMEQMEKSRLQRAPRANQKSIKAMLRFVRRQVEQVEKQIEHSIRHSPLWQAKRELLESMPAIGKVNSSTLLARLPELGQFTRQKICALVGVAPYNDDSGQWHGRRHIAGGRAGVRQVLYMATLSAVRCNPALRDYYQRLLGRGVEPKAALIAVLRKMLTILNAMVRDNTPWRPPCPTPA

SEQ ID NO: 379268 - protein, 354 aa, unidentified
MDIKYIGMDVHKEAIAIAVMNGDGKLVMESILETKAITILEFIQGVRGDLHVTFEEGTWAAWLYDLLKPHVRELVVCDPRKNALMKEGNKSDKIDARKLADLLRGGYLSSVYHGENGLRTLKELARSYLTISKDLTRVMNRVKALYRSWGILCGGQQVYAPRHRAEWLNKIGEAGVRRRAEFFYQQLDALRELRQAVRKDLLAESRKQNATKLLRQVPSIGPIRTALLIALMQTPHRFRTKRQLWTYSGLAIETRDSAQYRYVAGQLQRSKKPQQLRGLNQNHNHDMKAIFKSAATMASSREGAFHDFYQGLLTKGMKPAMARLTLARKIAAITLTVWKKGAHFDAKQLKLQAA

SEQ ID NO: 379269 - protein, 457 aa, unidentified
MGKRNGLSRGDARRNARLIRIRGIVRGDRAILAIDLADTKQVLTLCDHDSRVLARRSVRGRAWQLGEAIGWARATAIEHGFAGIVVGCEPTGHRWRIVAELCDRLGIDLVCVQPLLVGRAREQEDLTRDKSDPKDAVLIGRLVGQLRCYLPERTDQVWARLRQLGARRHALTATASASRQQLRDLLECAWPAVLEAAAEPLDSATWRAAVQVALDRTGATGELATLARVGYARFARQVTSALARWGAKRRCLRIVRAVWTAATSPQALQLGVRTQRPGALERARLTLDDWHHTLGQLADVEQRMTGVLDQLDLTSLVTTIPGLSAVGAAAILAETGDPARFDSARALVKHAGLCPRANQSGAYAGTTRISGRGRPALRLAAWRATWGALTHNPVLAARHAHLTTRTHNQLTTAQARTALAAALLRWLWVVVTKRIGWQAAIAAGTLDPRREVTAPAA

SEQ ID NO: 379270 - protein, 440 aa, unidentified
MAVRKREDEVFPNAAGIDVGASSHWVAVPRHLAEESVREFGAMTDDLNAMADWMLACGVDTVALESTGVYWIPVYEVLEQRGLKVWLVDARQMKYVPGRKSDVQDCQWIQKLMSLGFLRAAWRPDSEVCVVRAVARQREVLLIEQASWVQRMQKSLVQMNIQLTEVLADVMGMTGQAIIRAIVAGERDPKVLAKHRDRRVKATVEVIIKALTGNWRDEHLFVLRQALAMYDDIARHLRECDAELQTQLRALGQRNVDLGKAPRADSKQRQEFDARQTLANWAGVDLTRINGLGLAAVMKILTEIGPDLSRFANVKHFCSWLGLCPGTKISGGKVLSAKTKRSANRARQALKMAAMSLSRSSSALGAFYRRLCSRMDKPSANTATAHKLARMVYFMLTRGEDFVDKGQEHYEEQQHQRSVAALKRRAAALGFEIKLTSVPA

SEQ ID NO: 379271 - protein, 344 aa, unidentified
MTIHIGVDLHQRFCYMTAVNASGRKLRQGQVANDGAAMRAWLRGLEGLDGAALQRQVVVEASGFWPAFARAVGPEAERLVMVHPQRVKAIAAARLKNDRVDSETLAHLSRCDLLPEAWMADERTQQLRMLTRLRITLGQQRARAKNQLQAVLHQEGYIKPVTDVFGKRGRGWLQKIELSPAGRSVVDTWLGEVDHLDQLIAGQTRELERMAATDARARWLQSVPGIGAYSAMVILAEVGEIGRFGNKRSLASYAGLTPIVRESAGKRKRGGIGHNGSQTLRWIMLQVAQVAARHCPAAKEYYARLRQRKPAQVAKIALAHKLLTAVWVLLRHGVCFDESVFARS

SEQ ID NO: 379272 - protein, 308 aa, unidentified
MSAFVGIDVAKASLAVAVVPGNQRLEVSNDPKGHAQLARWLAKQPVVRILLEATGGYESALVAALAARWPVVRVPPHRARAFAVAMGKSAKTDPIDALMLARMAAVTEGPVVTPPSEAEVRLQALVRRRSQVVGQRDDERRRLLQASDVFVRQSLQRQIKLLQAEIARLDREIEACVPACGDQRAERLRSVPGIGAVTVATLLAFMPELGQLENRQISALAGLAPYNCDSGSHQGARRIRGGRGAVRRVLYMAAWSAVRHQADFKARYDALRAKGKCAKVALVACMRVLIIRLNAMLRDGSEWRTVPV

SEQ ID NO: 379273 - protein, 435 aa, unidentified
MFSPAHPYDLVIGLDRSDKKADLCLIDTHTGEHTPQTIDTSPEALQDWLVQLRQHYPQARVALVLEEPALNLLAFLEPVDWITLYAINPITLQKYREAFVTSRAKDDTKDAYYLAELLLTHYAKLKVWVPEDPQTRLLQQLVSHRRAVVDERTGLTNRLQALLKQYYPQALTLCGDELWRPLATDFLLKWPTLQKVQKTKPETLKQFYYLHGSRSQKRVERRLALVARAVPLTREPALVETFALRIKLVCKELRMVVASIKDYDRQIAQTFAAHPDHRLFHSLPGAGPVLAPRLLASVGSRRERFPASHHLQHYSGIAPVTKQSGGKRHVHRRYLCSKFRRQSSHEYAKESILWCRWAAAFYWQQREKGCPHHTAVRALAYKWHRIIWRCWQDRTPYDDQRYEATLRKRNSPLVKRFDQIEVGKSPWKSAQNNLK

SEQ ID NO: 379274 - protein, 397 aa, unidentified
MIAVGIDVSKSKSTVAILNGDGSIRAKPFDVHHVADELQALVDYIKRTSEPPTILMEPTSHYHYPLLKAFQEAELPVCLINPYQMKKYGDTELRKAKTDKRDSLRIAQYALEKSYSLIPYTPQDQKYEDLRFLSRQYSQRISTLTVAKVQLLSLLDETMPGITTILPLKSRDPDNCVLLRFIKRFKSFDVIRKMGKTRFLDSYQVLVKKTKDRFAGSKGLAIYELVLSSVTTRGENPLSAMTQDQCVDLVSTSQKAADEINLQMRIIAETMPEYKVLRSMAGVGDRLGPIILGEIGDIRRFHSGKALNAYVGNDAPPYQSGQFESRNRHISKRGNPALRKACFEVMQALKLTKPQDDPVYLFLLKKEQEGKPYNVAKMAAVNKFLRIYYARAMELYK

SEQ ID NO: 379275 - protein, 433 aa, unidentified
MEEAGEDPLFCERAAGIDIGRQSVMVTVRVPSETRRGGRAQETREFGATRRQLLALADWLRCHGVERAGMEATSDYWKPVFFLLEGEGFECLLFQASQVKALPGRPKTDKLDSVWLAEVTGRGSLAGSFVPPEEIRRLRTRTRYRRRLVQAQTAEKQRCEKLLEDAHLKLSSVVSDIHGVSGRDMLAAIIAGERSPAVLAQMARGRMRRKIAQLEEALDCSFFSPEHAFILQMMLENIDHHAARIAVPDEKIAVLCEPYERQIAQLDAVPGFGVTSAQELIAEIGVGMTAFPAAGHLCSRARVAPRARESGKRKGSTATGRGNPYIGGTLGETAATAGRTQTFLGAKLRRLRKRMPKKKARGAIMRSQLVIAHALLSDPAAEYRDLGPGYYEQRADIRRQAHNHVRGLERLGYKVTIEKTDPETDELITRTAS

SEQ ID NO: 379276 - protein, 453 aa, unidentified
MCLEDRPVLEPNAAGIDVGAREMFVAVPPGRDEKPVRVFATFTEDLERLTDWLEQCGVTTVALESTGVYWIPLFEILEQRGIRPCLVNARHMKNVPGRRTDWHECQWLQFLHSVGLLRAAFRPGQDVCAVRTILRHRNELVAAASQHVQHMHKALTQMNLQIHHVISDITGSTGRAIVDAILAGQRDGAELAKLRDPRIKADTETIRKSLEGNWRPEHLFTLGQSRDLYRIYQQQIVNCDLEIEKMLQGFAPRIDPVARPLPPDRKRNRAGSQRRRKNGHPHPDFDLRTEAYKLFGVDVSQIPGLEENALPLFSEVGRDMSRWPSAANFVSWLALCPDNDISGGKLLWRGARRVKNRAGHLFHMAAYALHRSPTPLGNYLRRMKAKLGPQAATMATAHKIAVIFYTMIKNQVEYDETIWDARDAEREKRLEAKLKRQAKQLGYELVPIEPKAA

SEQ ID NO: 379277 - protein, 316 aa, unidentified
MEAAVFVGVDVSMERLDVGLWPSGETFSDSNDPEGIARLGERMAELKPRLVVLESTGRLEVPMALELQERGVPYRIVNPRQVRDFARAMGRLAKTDRIDAVMLARFAESSKLEPKALPDPARRELRALVMRRAQLIEALTAEENRLRGETVPKVCKSLNASIAWLGKQIAALDKELDRTIRKNPEFTALSDRVQSVPGVGPNTARMIAASLPELGRLSRHKIAALVGVAPLNRDSGKSHGRRFCWGGRSEVRSAIYMATLVASRHNPVIRAHYARLRAKGKAAKVALVACMRKLLTILNAMVRDQTCWRQTAPAAL

SEQ ID NO: 379278 - protein, 337 aa, unidentified
MPSLFVYVGLDYHEDSIRVSVIDQHGQILLDRDVANDVELVQNWIGKCGLPQGIAIEACCGAAEFAEQLQQRTGWPVRLAHPGYVKRLKQGPDKSDHHDAWLLADLVRVGYLPQVWLADALTRQFRRLVRYRQGLVAERKNIKLRIRALLREERVGCRHAKPWTIAWSEWLKVAPLGEQSRWVLGQELMRLARINEDIQAAEQRLETVLASDGITQQLLAQPGIGLVTAATLRAEIGRFDRFHSGKQLARFCGVTPCNASSGRREADAGLVKAGNSALRAVIIQTAQRLPRHEPRWKELKDRLRRTKPANVATAAVANRWLRWLYHQLTSTAETAAV

SEQ ID NO: 379279 - protein, 340 aa, unidentified
MTITTIGIDLAKNVFAVHGVDQNGKTVLVKSRVTRAALPGLIAGLPPCVIGMEACSGAHYWARLFRQYGHEPRLMAAKFVSPYRMAGKSGKNDAADAQAICEAVRRPHMRFVPVKDESQQAMQCLHRIRQGFIEEKTATYNRLRGLISEFGVIAPQSTDALRHMVSAQKNSLPLQVQQCVDDLLEHVDRIEANITEYDQILSRIAKTDHRSQRLMKLKGVGPTTACALVACIGNAHDFKNGRQLAAWLGLTPSQYSSGGKSKLGRITKAGDSYLRTLLVQGARSVLIGAEKRTDSFSRWVCSLVERRGYWRAVVAIAAKNARLCWASLHYGDDFRLYSAS

SEQ ID NO: 379280 - protein, 319 aa, unidentified
MAQNGLVVAGIDVAKDKVDVCIRSLSLKRTFANTVEDRRALNGWLRRNKVGKAVMEASGGYEREWAKALRHAGIEVRIVDPKRVRSFARSAGRLAKNDTIDAEMIAWFAETFDQARGQVYDAAREQLHQMVHARHALKDMQSRLTSQGEHALPAAVQRVHVRISKTIAVELVKIEAEITALIQATPHFAELAEIIESVPGLARITSAALIADMPELGQINDKIAAALLGVAPYDDDSGRRRGERRIKGGRRRTRNIFYMATLGAATRHNPVLKAFYDRLVAKGKLKKVALTACMRKLIVILNTMIARGEKWDANRYAVS

SEQ ID NO: 379281 - protein, 321 aa, unidentified
MNLKEKHYVGVDCHKDTIACYINGNFKEFKTNFKGFTKALEWVKKIEPNCAWAIEGAYSYGLTLSKFLLSSGCEVYEFNALVTAKARKALSISGEKNDLGDAKVISIFAKQVKMQEVSLKTIELKRLITTRRLLVKQRTEIILSIKNHCMKEGIILPFNSLTTKKAISWLINQDDFNLNIMANNLKIQYELIKKLEEQIQKATPEKVKKLRKITGIETLTASIFYTETKGKKMSKAEFASYCGVAPVECSSGLSTRFRNNKRGNRTLNSLLYSISIFQSRFDEEGSKYYMKKLAEGKSKRLARKCLARQVSNQIWKILFAA

SEQ ID NO: 379282 - protein, 323 aa, unidentified
MTRIICGVDVASKSLEVRVGQQGAAGSFANNPEGIAALGAFCQVHQVDLVAMEATGGYEQQAFAQLSEQGLPVAILNPRAVRQFAQSMGSLEKTDAIDAGMIAWYAEVKKSQPACLAPENQQHLRALVTRLRQLTEMRVVQLNQQRLVTDRAVQASFKKLLGMLARQIRELEQRIAGLLEKDPLWRQLNASFRTIKGVADRTVARLMAEMPEIGTLSNKTISKLAGVAPLANDSGKHQGKRVVRGGRATVREILFIVASVVGRYEPDFIVFQQRLRAAGKAPKVVRIALAHKLLVRLNAKAREVRQQLATLRPDGTALIAESR

SEQ ID NO: 379283 - protein, 359 aa, unidentified
MDNNEDGTRHVVGGVDTHKDLHVAAVVDGQDRVLGTACFATTRQGYRQMLVWMRSFGDLRRIGIESTGSYGAGLLRFMQQAGIDVLEVTAPDKHDRRRRGKNDDLDAQNAAHAAWAGRRTVTPRSRDGMVESLRVLTVCRKTAVAARRVAIQIIQTTIVSAPDGLRDTLRSMTRMQLVRTLAAWRPDLTAYREVEAAYRISLKSLARRYLELHDEIADLDAMISAIVDDLAPELIARNSIGYTSAAQLLLTAGDNPERLRSEASFAALCGVSPVPASSGKTIRHRLNRGGDRAANSALHIIAIGRIRTDSATKAYVARRTSGGHSKLDAIRALKRYIAREVFHIITRRRREINQTRIAA

SEQ ID NO: 379284 - protein, 406 aa, unidentified
MSRNNGLGGAFVFYVGIDIAKYNHEVSLIDSSGKSLADSVSFTNSKEGCEKLLNLLERFEVDKSSVVIGMEATGHYWLSVHAFFFELGYDVKVINPIQSEAFRKMYIRQTKNDSKDSFIIAQIMRFGQFSATTLSEEGIVALRQLSRYRLALVDSCGDCKRRVITLLDQVFPEYGKFFSDTFGVTSKEVLLNYPTPEDMLTVSTAELTAVLKKASRGRFKEDKAEKLQALADNTFGVNFARDAFAFQIRQLIEQLVFLENQIGELEKEIALLLEQTGSFITTIPGIGDTLGAIIISEIGDIHRFDAPGKLVAFAGLDVKVNQSGEFSSTRNKMSKRGSPYLRRAIWLAAGRAAFCDPILSEYYQSLRARNKHHLTAVGAVARKMCNIIFAILKENRLYESQPPKKI

SEQ ID NO: 379285 - protein, 347 aa, unidentified
MSIVGGLDVHRQQITFDYLDTDTGEVSVGQIPAADRRVLAAWLARRFADRDDRGEIEFSVEGCTGWRYVAEELAAAGMIAHLAEPAETANLRGRKKRAKTDRADARHQRDLLLQGRLPECWIPPTEILEARALLGCYHDLRRDHTAWLQRIHAVLFHQGATACPRLQTTAGRAQLAQVTREQLSPAGRTQVAAAVLMLEATEAQMDILHRHLLATARHMRGPRVLAERLYGVGPITGLALTCWLGGAGRFTSARKAVRFAGLDITVYSSAGKRSPGRLSRQGPAVLRWCLYEAGKTHARPSAPDHAYYAAAKQRIDAKRAALSQARRLIRQAVHILTELGDDAFTYV

SEQ ID NO: 379286 - protein, 339 aa, unidentified
MVSHSRSRSIPTAAPGRPAAAGCGGLPIAEPLCIGADVSKEWIDFCDTQGRSKRVDNRADAIEAAFVGPWAEAAFVVCEATGGYERVLMGAAARLRLRLRRVHPNRARAFARATGRLAKTDPLDAVILARFARFLFDEPAPPAPSAQSQELAAMVNRLNQLTDLRQSETCRAKLALGAAIKATIAAVLKAIGEQIAAMQRAIDAFIAADATLAENAKLLRSCKCVGPKSVQAILALLPEIGTLDRRKIAALVGVAPITSKSGSSINHASISGGRQALRDCLFMAALTASKHNPTFKAFRDRLTARGKPHKVVIVAVLRKLITTLNAMIKSRQPFKMALT

SEQ ID NO: 379287 - protein, 405 aa, unidentified
MDIIVERGAGLDVHKHRVVACIMGVGMKKEIRAFLTVTNDLLRLKVWLREHSVTHVAMESTGVYWKPVFNILEDTFDVILVNARHVKNVPGRKTDVLDSEWLCKLLRSGLVRGSFIPPKPVRELRDLTRYKRKLIQTITAEKQRVEKILEDANIKLSSIASDTFGASGKKIIEELLKGKLRPGEMAELSKGRLRKRKEELKEALVGNVEEHHKRMIRTSLEHINAMEEILVTVEQKIQEKIDFHFKEEFELLKTIPPVKDSASVIIAEMGVNRGLFPTEAHLSSWAGMSPGNNESAGKKKSGTTTHGNLYLKTLLTEFAWIASKMKGTYLWSKYQSLIGRKGKKKTLVAVGHKILISAYQILKYRVPYKELGANYLDQRKKARIAKSYVRRLASLGYTVTVTEAA

SEQ ID NO: 379288 - protein, 356 aa, unidentified
MAVYVGIDVHKKYCQAALMNDNGHIVKELRFDNTSQGASSLITLARAVDPQVEAVIEPSANFWIRIYDKLEQEGVDVKLTNPMRTKAIAEARIKTDRIDAKTLAYLLKGDLVAESYVPTRKNRERRALIRHRASLIRMRVEIKNRIHALLDKHELSYTYTDLFGKQGLEWLRSLQLPTTDQQILRTSLQVADTLTEQIREMDIQIAKDATSEEKAKLLMTMPGVDYYAAMVLLSEIGDVHRFSSDEKLVSWVGLAPQVHQSGETNWTGHITRKGSRRARWILGQCAQSARQHDPRMREFYERIERKHGSQKAVVAVARKMLAIMYVMMIRNEPYHGENHSLTERKHKRLDTLVNGA

SEQ ID NO: 379289 - protein, 342 aa, unidentified
MGVDLGDRKCHICIVDAKGEIVKEEAITTSPTAFQDYFKRLPKRSVVAIEVGPHSRWVSQVIGECGHDAIVANASKVKFIFANNGKNDRVDARSLARLARVDRHLLFPIHHRSNSAQFALSVLRARDALVRARTRLINCVRGLTKPTGVRLAAVSADCFPLRAAKQIPAELQLSTALTLEQIQSLSDSIAVYDQYIEHLVETQYPKAKLLQQIPGVGALTSLAFILTLDDPARFPKSRQVGCYIGLRPRQDQSGDSNPELGITKGGDEFLRRLLVNAAHYVLGHFGPDSDPRRWGLAIAARGGKRAKKRAVAAVARKLAVLLHHLWVTGDVYEPFHNSGKAA

SEQ ID NO: 379290 - protein, 375 aa, unidentified
MNDHSEAFVGLDTSKLRNAVAIAEGVRGGEVRFLGEFENSAAATAKLVKKLAAKYQRLTFCYEAGPTGYGLYRQIRNLGAECIVVAPSLIPKKPGDRVKTNRRDALNLAKLLRAGELTAVWVPDRGHEAMRDLTRARETAMMDLRSKRQQVSAFLLRQGLHYSERKKTWTKAHMNWLASQKLEYAEQRLVFEEMMLAMRQAQDRLERLEQAIRVAVPDWSLAEVVTALMAMRGIDLISAATFLAEIGDLSRFQHPSELMGYLGLVPSENSTGDKIKRGPISKAGNRRARRMLVECAWSYQHPPRVGQEKQAKVAAAPRAVREIAWKAQCRLHGRYRALVRRGKLKTVAVTAVARELAGFIWAVSRAITAARVVAK

SEQ ID NO: 379291 - protein, 341 aa, unidentified
MKKVSTIGLDLAKNVFQAHGADASGAVIFRKKLRRAQVLEFFATQPACTVAMEACGGSHFWGREIGNYGHRVRLIPPAYVKPFVKRQKNDAADAEAICEAAQRPTMRFVAIKSEAAQGAAVVFRTRDMLVRQRAQIINALRGHLAEFGLIVAQGPAHVAKLIMAAQDPKQPLPEAARPILCVLVDMLGLLDQRIKLLDIAIARRAKEDEVARRLMSIPGVGPVIATAVAALAPPAETFKRGRDFAAWLGLTPLQHSTGGKQRLDATSKMGERTLRRLLIIGASSVVRWAARKGAPAGSWLASMIARKPAMLVRVALANKMARVMWAPMAKGGTYRAPVVAA

SEQ ID NO: 379292 - protein, 310 aa, unidentified
MDALYVGIDVSKDKLDVSLQPSGEAFAVARNGEGLAALAERLRPLAPAIVAVEATGGFETVVAAGLAGAGLPVVVVNPAQVRHFAHALGKRAKTDPIDAAVIARFAQATKPAFRPLPDVATRLLADLVARRRQIVEMMAAEGQRERHATDRRLKKSIARLRKALEKELAAIDGTIDDQVKGSPVWAEKQDLLASVPGVGPVIARTLIAEMPELGTLDRRQVAALAGLAPWTRQSGQWKGKSLIGGGRKTVRSAVFLAALVASRHNPVLKAFRDKLVAAGKPKLVALIATARKLLTILNAILRDKIPWQPA

SEQ ID NO: 379293 - protein, 337 aa, unidentified
MQTIAVVGLDLAKTVFQVHGVAADGTVVVRRQLRRNHVLAFFQSIGPCLVGIEACASAHHWARELMAIGHDARLMPPAYVKAYVKRGKTDAADAEAIAEAVTRPTMRFVAVKSKAQQAVLMLHKTRDLLVRQRTMLINALRGHLGEYGVVAPQGHAGVQMALKSLRDDDQDLPDMARAALCGLADQLEQLGAEIGRLERRILDWHRQDATSRRLATIPGIGPITASALAASAPDPKLFRSGRQFAAWLGLTPRANSSGGKERQGGISKMGDSYLRRLLVVGATAVLRMARQRGREGWVGNLLDRKKPKVAAVALANKTARIAWTLMARQEDYRPMTA

SEQ ID NO: 379294 - protein, 393 aa, unidentified
MRKSKKQQKPLNDLSRSLTPFDPNHTLIIVVELSKKTWLVAGIIPGIERQPLKKLTADENELLKLLERWRAEAEKAGHKIHRVAVAFEAGRDGFWLARWLKAREIEAHVIHAASVPVSREHRRAKTDRLDTKALKRVFLGWLRGERDHCKMCAIPTFAEEDAKRPHRERETLVGEQTTIINRIKGTLARLGIRNFNPKLKKAPERLENLRTPEGEPIPPNTLAELHRDMERKRLVAEQIRQIEKARLEQLKQAPKTGPNLMVLLLARVIGIGIETADMLVKEILSRNMRDRRAVARYAGLTGSPDESGNKRREKGLARSGNARVRRGMIQLAWRFLEFQKESALAKWFEARTENARGSRKKMIVALARKLLIALWHFVRDGVVPEGIVLRPAH

SEQ ID NO: 379295 - protein, 346 aa, unidentified
MLYVGLDLSRKRVDVCLLDEHGTRLETTAAPPDADGLRGLAARLASRGQPIRAAIESMNGARFVRDELEQLGWDVSLADAQKVKGLAPLAAKTDRIDAFVLAELARRDLVPAIWLPTPGVRAERERARFRLHLVRHRAALKARIHASLIAHGLSCPVSDLFGLHGRELLDHLALPEPWAATTAASLRVIEHLDDEIAACEAELRRLGAAHPYVPLLMSAPGIGWVLAYTIASEIGEIERFASPKKFAGYTGLCPRVYQSGASDRRGPLAKNGPEHLRWALVEAAVHAARHPCYAAHYQQTKKRLGRQRGAKVARVEVARKLSEAIWYMLTRSQPFAPAGPALPLVA

SEQ ID NO: 379296 - protein, 321 aa, unidentified
MEKDLLYCAIDVSKDKLDLDAAALALPEQLGNDQAGYRRLIKAAKKYPGPVQFVFEATGPYHLGLALALWEAQIPLSVLNPARVRFYAKAQGKAKTDPLDRQVIGDFARCFRPQLTPAPDPVRRELTELLQRRDGLVDSRAAEQNRLGQCRHPMLKSQIRRMMIQLAQQIDQIDRLMKKLVGTSLELQAKVKTLCQIKGVGHLTAVTLLITLPELGTLGRTRIVRLVGLAPLNDDSGKQSNKRFIQGGRKRPRCALYMPALTASRHNPVLKEFYQRLLKAGKLKKVALTAVMRKLLICLNALLRNLADQHRSAQGLCLAKP

SEQ ID NO: 379297 - protein, 451 aa, unidentified
MSKKQMSLEVVNPNAAGIDIGSKSHWVAIGQDAEDVREFGVYSDDNMELCQWLHDNKIQNIAMESTSTYWQNLFSCLVSQGFDVILVNGRQTKNIKGKKTDIKDCQWIQKLHSLGLLSSSFLPDSTTDVIRTYSRHRQNLIKQSARTVLKVQKYLRLMNMRLDVVVKDIVGLTGTKIITEFISGETSGKKLAQNRHYNCRKPEEEIAKALQYNGRDDYLFALKQEWETYLHIQKQIESVDKEIKKLLEDIIDKDDNKKQHVADTKQHKRKNKNTIKGADINKLSYQYFEGIDLMTIEGVNDATIMAIISEIGLEGIKKFNSAKQFTAWLRLAPNNKISGGKILNHHIPKGSSRLKIAFRNAANAIGNLKEGHLADFFRRINYKKGRVTAINATARKLAVIIWNMLAKGVPYNPPTQYLFLDEKRKLGLVKRMKKQITKFEIEPEQLGFPTA

SEQ ID NO: 379298 - protein, 343 aa, unidentified
MSEISTIGLDLAKNVFQVHGVDRSGAVVLRRQLRRGAVEKFFAQLPPCTVGVEACGTAHHWARVIGRYGHHVRLMPPAYVKPYLKRNKNDGRDAEAICEAVSRPTMRFVAVKSIEQQATLAVHTTRALLVRQRTMIANSLRAALGELGIVAPPGFEGLRQLMTRLEAPNEEVPEIMRAALLLLAKHWQALDADERVIERQITKAARADGAARRLMEVPCVGPIIASTVLAKVPDARVFRSGRNFAAWVGLTGRDHGSGGKHRPGRISKQGDRMLRALLITGASAYLRQQRMRGVSDPWLRDLLARRPYKVVMVALAAKTARIIWAMLAKGEPYRARASALAAA

SEQ ID NO: 379299 - protein, 398 aa, unidentified
MESQLRVGIDVGCHAHRVGIADPTGSILEEFDISHSEAGFQEFFRRVEERRAKLGFPVAVAMEGYNGYARPLDRLVQEKGYRLFNVNNLKLARFKEVFPGAAKTDPIDARKILELFHLREQLPMAKDVLQEVLPAPEVNEKLKRLSRRRRQLVTEKLRVLNRMQGDLQAVSPELLAATHDADNLWFLRFLSFRDDLRQLAKLRRATIREIPSVGAKYAKVIEDWQAKATFSDEVEYVGPMIVEDAKRILELHQQIHALDEALAKLAAESEIARRLSTIPGYGKTSIAELAGEIGTVSRFSGEASLALYMGMSPLTRQSGQISRAKAPRQVNTRCRAAMMTTVARHIGCVPQSRAYYDRKRGQGKTHNQAIRALGRHMVRVIWAMLRDGRDYEPRGDTA

SEQ ID NO: 379300 - protein, 312 aa, unidentified
MAMLSFCGIDVSKDRLDVVVLPEGWFFSVSNDTAGWAELVVRLRPLAVSAIGLEPSGGYERGIIRALLAAGLSVRRINPNKLRQFARARGVLAKNDRLDARLIAEYVAIMPTRVVQRDAVVERLAEIVNMRRQLCDEHVAAENQAAHLEDAMLRRLSKRRQMRLEADIRLLDKRLAEMVAANGALAQRYELLTSMPGVGPVLAFTLIALLPELGKMSRKQIAALVGLAPYDFYSGKLKGHRSIYGGRMPVRNVLYMAALSAGRYSPALKAFHKRLAAADKKSKVIIVAVMRKMITTLNAMLRDSAAWQPRSA

SEQ ID NO: 379301 - protein, 345 aa, unidentified
MKHYAGLDVSVKETSLCILDETGKVCRELKVTSHPDDLVQVLRDPAWRLERVGLEAGPLSQWLYSGLAAAGLPVICIETRHTKAFLKAQVNKTDRNDARGIAQMMRVNLFRPVHVKTLASQNRRALLTARKLLQEKALAIENDIRGLLRNFGLKVGVIGKVRFEDRIRELVAGLPELAEIMACLLEARQSLRERLAALHRKVLATVRDDDVCRRLMTIPGVGPVVSLAFSATIDIPARFKNSKAVGPALGLTPVLNQSGESHRIGRISLCGDAMMRALLYEAAQVLLTRVQKWSWLKAWAVNVARRRGLQKAIVALARRLAVIMHRLWSDGTEFRWARESAVATA

SEQ ID NO: 379302 - protein, 340 aa, unidentified
MGNVTTIGLDIAKNVFQVHGVDADGAAVVRQRLTRGRMLKFFAKLPRCLIGIEACATSHFWARELVALGHDVKLMPAQYVKPYVKRGKNDAADAEAICEAVTRPTMRFVGIKSPEQQSAMMLHRVRLILNRQRTQLSNAMRAHLAEFGIAAPIGRNGIEQLLDVIADPTDERVPADARFCLEMLAAQLRIVKEQILENDRRILASARETELGRRLMEIPGVGPLLASAIVATVPDPAIFGSGRNLAAWIGLVPRQNSSGGKERLGGITKAGHQYLRQMLIVGAMAVVRYAERNGAKRPWLVQLLARRKPKVAAVALANKNARMIWAMMASGERYREPQVA

SEQ ID NO: 379303 - protein, 400 aa, unidentified
MPAFWAGIDSGKRAHHCVVIDQAGTVLFSKRVENDETALLELVATVAEIAAGDEVCWATDLNAGGAALLIELLAAHAQQLLYIPGRIVHHAAATYRGDGKTDAKDARIIADQARMRTDLQPVRSCDQISVDLRLLTARRTDLVCDRVRAINRLRATLLEYFPALERAFDYSKKAPLILLGGYQTPEGIRRIGLTRLAAWLRKRGCRNSAKMAEKAVEAANAQHTVLPTQTTGSALVIRLAEQINAIDAEITDVDAQITDLFRQHDSADILLSMPGFGPVLAATFLANIGGNLDGFDSVDRLASVAGLAPVPRDSGRISGNLHRPRRFNRRLLRTCYLAALSSLKNSHASRTYYDRKRSEGKSHKQALIALARRRINVLWAMLRDHTVYREPATVSGIQAA

SEQ ID NO: 379304 - protein, 411 aa, unidentified
MFVGDDWAEEHHDIEVQDETGKVLAKKRLPEGLVGMVALHELLGRHVPASWADLDPAEAASRVVVGIETDRGPWVAALVAAGYRVFAINPTSAARYRQRHSMSGAKADSTDAHLLAEIVRVDRSHHREVAGDSPEAQAVKVVARMHQTLIWDRTRHLLRLRSALREYFPAAIRAFGELDAPDTLELLALAPDPDAAAKLTKTRIVAALKRAHRRNTDERATAILQVLRAPELRLPAPVQDAYAAGIVSQVAVLGVLNEQIDQLSVVVGEHFGRHRDAEIYTSLPGLGVVLAARVLGEFGDDPHRYADSKARKSYAGTAPITQASGKKKVVLARYARNDRLADALQQWAFGSMRGSPGAKAYYKTLRGRKISHQGALRQLGNRWVGILHGCLKTAQLYDEDTAWSHHIQAVA

SEQ ID NO: 379305 - protein, 344 aa, unidentified
MDHFAGLDVSVKETSICIVDDTGKIVRELKIASEPEALLAVLKNPAYNFKRIGLEAGPLSQWLFGALAEAELPVVCVETRHMQAVLKAQINKTDRNDARGIAQMMRVGLFRPVHVKTIRSQKLRMLLTHRQLLQSKAIAIENDLRATLRNFGLKVGMVGKVRFEARIKELVENLPDLAALVEPLLIVRRVLREQMVILHRRLLAVVRDDEVCRRLMTVPGVGPVVSLTYRATVDAPARFRKSKAVGAVFGLTCSKYQSGEIDRSGRISRCGDEMMRVMLYEAAQSMLRSKKWSWLKAWAMQIARRRGMKKAIVALARRLAVIMHRIWVDGTEFRWTREQVPAAA

SEQ ID NO: 379306 - protein, 347 aa, unidentified
MLHAGLDLSRKKLDVCLLSHRGEHIDQLAVPPDVDSLKTLARRIDEVHREPVGAVVESMTGARLVHDTLEAEGWDVEIADAQKVKGLAPLACKTDKIDSLVLAVLSHRDLVPAIWLPDPRVREERELARFRMHLVKHKSALKCRIHSTLINFGRPCPVTDLFGVEGRQLLARLDVPEPWRGNVTASIELIDDLERQIDQINRRLREGQADHPYVPLLLTVPGIGRVLAFTIAAEIGEIERFPSPQKFAGYTGLCPRVNQSGDKDRRGPLTKHGPTYLRWALLEATMHALRHPAYRERYRRTKKRLGKQRGAKVAQVDVARRLAHAIWHMLTRNQEFAPRGAAFRLAA

SEQ ID NO: 379307 - protein, 345 aa, unidentified
MQTMYYIGLDVHKRTISYCVKDGSGVIHAEGTIPATRLNLDLWMKKLPQPWTAAMEATVFTGWIYDHLQPHAAALKVAHPLMLRAIAAAKKKNDRIDAKKICDCLRCDFLPECYMASTAIRERRRTLRYRSLLVRQMVQMKNKIGMLLMEAGVSYNKQRLHKAGYFRELLATNPDIPEGLRSLLRLCREMVVRLQKTESALVCSLEQDSLLMDRVERLMTIPAVGPITALTWALEVGDAKRFSSIKKAISYCGLCGAEKSSGNTMQRTPLSKQRNKHLQTTLIEAAKMAPRNSPALAMLYDREKQKGNANRATLAVARKLVAYLMAVDRGQRNFQVVERSNSIAA

SEQ ID NO: 379308 - protein, 355 aa, unidentified
MERYLGLDVHSASSTLAVVSASGKRLQTQVVETNGRALVEAVRQIPGRKHLVFEEGTQSAWLYEILKPHVDAVVVAGVTRSRGQKDDRRDAYGLAEKLRTGTLDKQIFKAPRQFAMLRELARTHQAIGGDLVRVQLRLKTLYRSRGIRTPGRTVYGKTQREQWQQQLPATARTPAARLYEQIDFLVALKEHAEGDLIRESRKHSIARVLETMPGLGPIRVARLLPIVVTPHRFRTRQQFWSYCGLAIVMRSSSDWVRTRDGRWLRAPVQQTRGLTRQHNHALKDLFKGAATTIITQALDDPLYHDYERVTEAGTKPNLAKLTLARKIAATVLALWKKEEPYRPQHRTASEADRGA

SEQ ID NO: 379309 - protein, 413 aa, unidentified
MQLLYRRCCGLDIHKAAISVCVLIQREGREPEYRKRSFESFTDDLARLRRWLAQCKVTHLAMESTGVYWKPVWNVLEEGPWEMLLINPQHFHGIPGEKTDPKDSRWIAELLAHGLLRPSFVPPQSIRQLRDLTRYRVHLKQDRNRIHNRIHKQLEDANIKLDCVASDILGMSGRAMINALIEGRNGPVYIADHAARGHLRKKVPELARALKGRITAHHRLMLAELVRDLDATDEAIRRIEATLVERTLPYQDIVERLATIPGVDLITAWTIIAEIGTDMSRFGDADHLVSWAGLCPGLNESGGKRRSGRTRKGDRYLKRALCQTAWVISHTKDNYLTALFYRLAGRIGIKKATLAVAHQVLRIVFHIIRDGAVYRELGGNYFDRLHPERTTKRLVRRLEQLGHQVSLQPRNAG

SEQ ID NO: 379310 - protein, 468 aa, unidentified
MSRRTGRSHKRKSKRRKNSLPPGLEKVNLNAAGIDVASGMHAVAVPAGSSPDGEDVKEFEAFTRDLYAIASWMKECGVTTVAMESTGVYWIPLYEILESLDFDVNLVDPRQLKRAPGRKTDILDCQWIQQLHTFGLLSGAFRPDEQICTLRGYVRQRAMLVEYASHHVQHMHKALEQMNIKLKRVITEVTGTTGMRIIRSILAGERDPQKLAAMRHGRCKNDQATIAKSLEGTWRQEHLFALRQAVDLYDSFQEMIKQCDKAIEEYFAILECTDPRHEPGKRTGTTRRRNEPHFDAQRVLHQFAGVDLTRIEAIDGNTALKIISEIGADVSAWPSVKHFSSWLCLCPGNNKSGGRQRSGRTTPSANRVASALRLAARSQWNSNSAMGAFLRRLAARKGMPKAITATAHKIARMVYFMLKYGTEYVVKSQEEYERQHKERQIKNLKRRAKLLGFEVSELTQWQPLTDNT

SEQ ID NO: 379311 - protein, 347 aa, unidentified
MRFYTNQHRYYCGIDLHARSMYVCILDPQGQILLHRNMPCAPESFLKAIAPYREDIAVAVECIFTWYWLADLCSKQNIPFVLGHALYMKAIHGGKAKNDKIDAHKIAVLLRGGMLPMAYVYPPEMRATRDLLRRRMYLMRKRAELLAHVQNTNSQYNLPEIGKKIAYKANREGVAERFSDPSVQRSIEVDLKLMDHYDQLLTDLELYIVRTAKEHDANAFYRLRSVPGIGKILALVILYEIHDINRFPTVQDFVSYSRLVKCAKESAGKRHGTSGKKIGNVHLKWAFSEASVLFLRANPKGQRFVEKLSSKHGKAKALSILAHKLGRAVYYMLKRKQAFDMNKFFNS

SEQ ID NO: 379312 - protein, 348 aa, unidentified
MTTGIDLGDRYSYFYTLDAAGENTESGRVQTTRKALEKRFRGGEAMRVVIEAGTHSPWVSRLLAECGHEVLVANPRKLALITKNERKDDPVDAELLARLGRVEPQLLSPIAHRGAEAQAALAVIRARDAVVAARTQLVNHVRGAVKSWGERMASCSSRSFAQKGAAQLPKPLRAALQPLLEVIEVMTEQIKGYDRQIEEACRENYPETELLRAVGGVGAVTSLAFVLTLEDPHRFGRSRSVGGFLGLHPGRDKSGAQDPELRITKAGDQLLRRLLVGSGQYILGPFGPDCDLRRWGLKLASRGRKNAKKRAVVAVARKLAVLLHRLWVGGEVYEPLRLAAPIALSTPA

SEQ ID NO: 379313 - protein, 405 aa, unidentified
MEMEKCAGIDWASEEHALCVVDESGRSLAGEMHSHDEVGVRELIARMRALGVVRVAIERPDGLLVDRLLEAGFTVLPIHPNKLKATRPRYEAAGGKSDGFDAFVLAELARTDSHRHRALAPNSDETKALRSLTRAREDLVGARVRLANELRAQLDAFWPGAARVFADVDSPIGLAFLERYPAPEDARGLGGKRLEGFLARNGYCGRRPAAELLERLRCAPAGRAGAMEAEARRGAVLGLVAALKPIVTQIRELTSQIAGAVRSHPDGQIFLPLFKDPKSVITAARLVAEIGDDRGRYPTQEALAADAGMAPVARESGKRKVAGFRWACDKRLRDAVACLANSTRHTHPWARSVYLDARSRGLEHPHAIRVLGRAWLRVLWRCWQDEVAYDPAKHGNLRRLQPQGG

SEQ ID NO: 379314 - protein, 347 aa, unidentified
MRKHNKRKTEMQMETVGIDLGDKVSHYCILDPDGDVVEEGVFRNQLSSIEKHFAGPRRRLALEAGAQSAWISRELKRLGHEVIVANARELKWITSSDSKNDPVDAHKLARLARADVKLLAPIEHRSAEQQTELALIRARDATLRARTLLINTARSIAKGFGARLPKSITARFGARALAALPQFLKTVLVGLLEQIDALSRQVADYDQRILAVAERHPEMERLTSIPGVGTLTALTFVLTLGRAERFAHSRDVAGFLGLRPKQRQSGARDPQLGISKSGDPYLRKLLVQCSHYILGHWGPDSALRRWGLAKAEGGKKASLRAIVAVARKLAVLLHRLWTTGDFYKPFP

SEQ ID NO: 379315 - protein, 325 aa, unidentified
MTTETGELVTCELEHHDKEAVRAFYAAFNGQVIVGLEASGYSPWFERLLEELGYEVWLGHATEIRRRARWRQKNDRRDADLLLDLLVKGEFPALYRYPKESREVLRQLRYRHKLVKLRTIVANTLHALALNAGLSLRAKLLTKGGRRQLNALSLSASSQQQRDELLSLADELTRRIQTVEQWLEAQAKADERVQRLQTHPGVGLLTSLCVVHTLGDLSRFAATRKVAAYVGFDPMEDSSADRKAYGGISKAGSRLLRYLLIEAGQTAARDDEQLKQFYRRLLPRRGKARAKVAVGRKLLIRCFIMGRAEIDYAEFLRRGKQEETE

SEQ ID NO: 379316 - protein, 347 aa, unidentified
MDHYVGIDVSLECSSVCVVDASGKIVREGKVASEPEALIEWLGSLGLSLARIGLEAGPLSQWLFAATKAAGLAVELLETRHVRDAFKAMPVKSDRNDARGIAQLMRLGWFRPVHCKSLAAQEVRALLTARKLVQSKLCDVEMSLRGILRGFGLKVGHTTPKRFAGRIRELVAGHATLEVIAASLLAVHEVLLREFAGFEKRVRTMARSDLRVRLLMSAPGVGAIVALTYVSAIDDPKRFKSSKTVGAHFGLTPKKRQSGESDVDGRISKIGDQGVRTALYEAAHVILTRPVKGSGLKSWAARLARRAGMKKAKVALARKLAVILHRMWVDGTRFALATPKVVADTAA

SEQ ID NO: 379317 - protein, 338 aa, unidentified
MYYTGIDLHKFTSYLTTVDSAGAIVKQENLKNIAHNFIQYFNSIPGEHQTTVESTMTWYWLNDLLSSMNIPLILAHAKYVKAIAYAKVKTDKVDSLTLAQLLRMNYIPVAHKISNDNRLLRDALRARIKIVQRHTSVTNSMQLLLAKYNFDSPTQLSGIPEFQYKQLAEVETLLDEQMLDLEKQLYPFLIPNDDIQRLLWIPGIGKMNAFTILLEVDDINRFPDVKNFFSYCRLVPSARNSGGKSKQRSSKDGNKYLKVAFSDAAVHAVHYYPVIRNYNNSLIRKKNKQIAKTIIAKEIAEIVYHVLKNKSDFNNKFKGIDLEHKKSLQWPRVVSPYA

SEQ ID NO: 379318 - protein, 412 aa, unidentified
MKDLLEISCGLDVHKEKIVACILTGPLGKPTRSEIREFSTLIPDMIALQHWIVSKNCHHVAMESTGIYWMPIYEILEDAFSGDITLLVVNARHMKNVPGKKTDMRDSEWISTLLRAGLLNGSFIPEKRIREFRDLNRYRKSVIRDITSQKNRIEKFLQSSGFRLSSFISDIFGASGRNIILHLIEHGQIDKTALDSCLKTKTRNRIDEILMSVNGTLSEHQKAFLRILMTHYDSLKKHLAEIETSLEEDMAPFALQVEQLNSIYGISTTASCAIIAEIGIDMKPFKTAEHICSWAGLCPGNNESAGKRKSTSVTKGNPYIKSMLCEIAWVIAGKRNTYLSAWYWRIKQKKGAKKAIVALARKLLVIIYTMLKQGTVFDESCFETRRKHCEQKQLSRYIRELEKHGYHVEAQS

SEQ ID NO: 379319 - protein, 364 aa, unidentified
MSQQLSTTIAVIGVDIGKNSFHIVGLDQRGAIVLRQKWSRGQVEPRFANMPPCLIGMEACVGAHHLSRKLKGLGHDARLMPAKYVRPYSKGQKNDFRDAEAIAEAVQRPTMKFVATKTADQLDLQALHRVRERLVSQRTGIINQIRAFLLERGIAVRQGQRFLRAELPRILAAPPDVLSPRMVHVIEDLAGDWRRLDERIEGLSGEIEAIARRDAGCERLMSVPGIGPIISSAMVAAIGNGDAFPKGRDFAAWLGLVPKQISTGDRTILGKISKRGNRYLRVLFVQAAWVVLIKPKSWERHGLKPWLEAAKKRLHHNVLAIALANKLARIAWSVLARGWSFRGEDDQRGQCPACLIAESEMRTR

SEQ ID NO: 379320 - protein, 391 aa, unidentified
MSMYFVGIDISKYKHDCCIISAADQQIISKFTITNDKHGFEHLLTTLHSLSSPKDIKIGFESTAHYALNLELFLENAHHSFMEINPFLIREYKKSTTLRRTKTDSVDCESIARWLMTVEYKPHSKGFYHAYSLKSLTRLRDRLVRQRSFYLVKITNVLDHTFPEFKPFFNERLSKTAIYLLENYGSAEKMARMNSASYDKLRCVSRGKFSIQQFLRLKELAASTVGVNNSIFDIELNSLLTLYSSLCKEIKTLETEITRLIDEVHPHYMSIPGIGPISAASIYAEYGDISNFSNPGQMLAFAGIEPGINDSGTESHGGRMVKHGSSQLRYVLLNACLPLIRSDITFASYYAKKRAEGKKHRVAITHVAKKLIRVIYALEKQDIDFNTQKLR

SEQ ID NO: 379321 - protein, 333 aa, unidentified
MNYVGIDLHSNNNYMVIANQEGRRLLEKRLPNDVSVILGWLRRYDPIQSVALESTYNYYWLADGLVDGGHQVKLANPLAMKPYAGLKRQDDRSDAGFMAELLRLGILPTGHLYARQQRGLRDLLRQRSRWVRHKRQIVQSVQSRFARCLGVNLSGCQLLRRHLPQIGDEDQELAVYSQLEMIRHLSEQIQLLEERVENRLQQTPAFEALTAIPGIGRVLGSTICLESGNLNRFTRVSHYASYARVVQADRITNNKRKGKGNRRCGNAYLGWAYHEAAHCMNRCHRAMQQYRKRSLSRNKHPRVVWSTMAHKVCRGLYFVMRDGVEFSPARLFG

SEQ ID NO: 379322 - protein, 453 aa, unidentified
MEKSSTDDQLMNLEVLHPNAAGIDIGNAAHYVAVPPDRDTEPVRRFACFTQDVRALADWLKQCGIVTVAMQSTGVYWLPVYEVLVERGFEVFLVNARHTKNLPGRKSDVQECQWLMKLHTYGLLNNSFRPTEEICVLRTYWRQRDEHVKAASAVIQRMQKVLTEMNVQIANVISDISGVTGMAILDAILKGERDRYQLADLANPRIQASKEEIARSLEGNWRPELLFVLRQQRDLYHEYQKRIGECDEVIQLHLRTLEDKAQPENKPENPKRGKRAGGNAPRFDLRGELYRITGVDLTRMDGVHVMIAQTILSEVGLDMSRWPTEAHFASWLGLCPDNKITGGKIYHRGSRHVENRAATALRMAATSLWRSKSYLGAKFKRLRTKLGAPKAITAMAHHLARLVYRMLKYGQEYIDKGMEYYQQRYQNQQIKWLEKKAEDLGLTITLAPVSVAR

SEQ ID NO: 379323 - protein, 298 aa, unidentified
MSQSNQYVGLDVSLKETSICVIDDADKIVWRGRADSTPEAITSAVKQHAPHAVRIGLESGQLSNWLFHELRQAGVPVICVDARHAKAALSLKVNKTDANDAFGLAQIMRVGWYREVTVKGLDCQAVRALLVARAQIVSQITTLKNCVRGILKTFGRVLPKGLRSQFAERVRAAIDGHPVLGAIIEPTLRVLEAMRVQLRVYDRAVIYRARSDDTARQLMSTPGVGTVVALAYITGVEDPARFKRSSSVAAYFGMTPRRYQSGEVDHAGRISKCGDGMVRGLLFEQPKCCSVGRRGRAH

SEQ ID NO: 379324 - protein, 347 aa, unidentified
MRTPSYEGKQVYMGLDVHREFFVASCICDGVVVKRCRMPGTAEAVISLASKEFNGASVRAAYEAGYSGFWLYRRLVAAGIDCIVVHAASIEVSARDTVKTDKRDSLKIAQQLAAGRLRGVRVPTQEQEQRRLLTRTRDQLMNKKRRVMVQIRMRLHYFGRFPESIQRRIKLQDVEDILTGLEGELQRTIGMLRDEWIELAKRIKEIDRLLVEQAKDDPLDAVYRSVPGVGSLISRILSAELGDMSQFRNERALFSFTGLTPSEYSSGGHICRGHISRQGNTRLRHMLVEAAWKAVRKDPVIKEYYIKLSERIGKRKAIVAVARKLVGRIRAALRKNEHYTLDYRAAA

SEQ ID NO: 379325 - protein, 461 aa, unidentified
MSKKRPAGKQKGSAQGKVDWKALDIVHPDAAGIDVGGSEHWVAISPDRDPEPVRRFGCFTADLREMARWLVDKGVRSVAMQSTGVYWMPVFEVLEQHGLEVYLVNAQHTKNVPGRKSDVQECQWLLKLHAFGLLNNSFQPVDEIRIARTLWRQRGNLVADASSAIQRMQKALIEMNVQLSSVLSDISGVSGMSMIAAILDGERDPWTLAALVQSGVKATTEDIAKSLEGNWREELLFVLRQDVELYGIYQGKIDDCDLELRKHLESFGSVVDLKTQPIGPKPKGKRGSKNAPKFDLRTELYRITGIDWAQVNGIDVLTAQTVIAECGADLSAFASEKNFASWLGLVPTNEKSGGKILKRRTRKVVNRAATALRNAATTLLRSESYLGAQYRRLRTRLGAPKAITAMARKLACLFYRLIKHGQQYVDKGNEYYEAKYREQQIRSLTRRAQSLGLQLVIPKPE

SEQ ID NO: 379326 - protein, 342 aa, unidentified
MGQVVTIGLDIAKSVFQVHGVDAEGAVVIRQKLPRARLLSFFAKLEPCLVGIEACGASHHWARELISLGHEARLMPPSYVKAYLKRQKNDMADAEAICEAVTRPTMRFVPVKSLEQQGVMVLHRTRLVLTRQRTQFSNAIRGHMAEFGLAAAIGREGLGKLIAVILDNADDRVPGEARVCLSMLVDQLRLVNQQILETDRLIRTNARATEVGRRLMEIPGVGPLLASAMVAAVADPMAFKTGRNLAAWIGLVPRQNSSGGKERLGGITKQGDRYLRQMLVVGALAVVRYAQRNGTRRPWLLQLLARRTPKVAAVALANKNARMIWAIMTSGEAYREPQPIAA

SEQ ID NO: 379327 - protein, 416 aa, unidentified
MKKGQNTRGYQRYMALDIHREYILVGAWNEEKEWVLTPRRVSIEKFPEWAKKNIRPGDIVVLETTTNVWAVYDIVAPLASRVLVANAAEVGEIAGARVKTDKEDIKRLLKLLVGGIVPEVWVPPMEVRELRAFVSYRSRLVKTSTMIRNRLQSLLHKHNLLLPEDGITNEAWWEAQASISSLEKMQIRQEVALLSEVEKHKTAVDEELGRQSMSKEWGAQAVRLMQIPGVGVIVAMTVLSAIGDILRFENAKQLVGYAGIGAGVHDSGKTHKEKKITKKGRRELRWAMVEAAWRAVRMSPFWKEEFEKHRKRMRKPNQAIVVIARKLLIAIWHVLSKEETDIHASEEDLAYKMLLLSWSLSEDVRLGLTYKQFAKYALMKLGVETDITRFVRKNVPRRLAPREEVLARMTELSLSA

SEQ ID NO: 379328 - protein, 342 aa, unidentified
MRFIGADLHKKSITFCVVEVVNGKTRVVERKRILCRETSRIEQFLASHGPCQIVVETTIGYEWFAQLCEPRTERLLLAHAGKMRIIAESTRKTDKIDAYVLAEFLAKEMIPEAWFPTPRVRQHRALVRRRQKIQSRITSVKNTIRAILTRYNSDRQDIFTRHGREVSNAFDLLPEDRWVMEDLWDELREHGVRLKKVNQRLREFASNAPTLEAEARAVLATMPGVGPVTIETVLAELGDWRRFDNAASVVSFAGLDPGVRSSDGKRHDLKLSKCGSPLLRWIMIQLAHRLKRTTVRWRRMFERISRRAGKKKATCAVARRILLVMYAMLRDGQAYQLPAMAA

SEQ ID NO: 379329 - protein, 353 aa, unidentified
MTSVTDLRDVVDVVIGVDTHVETHTAAVVDARTGAVLDEITVETTPAGYEELSAFADEHASLRAWAVEGTGGHGAGLARHLARAQEIVIELDRPERSRRRNGAKSDPLDAQRAAREALARTRLGTPRSGGDRQALSVLLAARRSAVEAATVAQRQLFSLVIAAPEPVRSRFRGKKIPAMVAAAATMRLHPSWDTETRTTVTVLRTLARRVKDLTQEAAEHEKTILTIVRAWRPDLLAQPGVGPIVAATVLCAWSHPGRVRSEAAFAMLAGVAPIPANSGQITTRYRLNRHGDRQLNRALHTIALSRQHYHQATRDYTARRTSEGKTPREIKRCLKRYIARDLYRILENPPSTP

SEQ ID NO: 379330 - protein, 357 aa, unidentified
MSKQRDYILRGEKVSVGLEDSKKTWKLCARSGGMVVHETSMPARYEVLRSYFNNKFPECEIKVMYEAGFRGFELHDQLETDGWECIVTPPHTVTEEKCQRKKNDRTDCRRLAKNLENRDYHICFVPDKELREDRQISRTYGQVQADIKRVRNRIRRMLEFHGLDNGLPAGRWGQAMYDRVRKQLAEREISDSLRFSFEVMFRELEQLRQLRKELLQQLTRLARRERYKESVELLKSAPGIGMLTAIRLVLEWGDVSRFKRKEEFASFLGLVPSDYSSGEQQRQGHITKQGSRGPRSWLVECSWVAIRFDPVLLEKFRRVLRSCGSKKKAIVAVARKLAMRLRRLLLGREPYVVGVVE

SEQ ID NO: 379331 - protein, 421 aa, unidentified
MKGLRAIRVKTVKEGTLIATVDIGLTTNTGYCTTLDGKGTKPFRFDNTKEGFEKFWCMTLASKNRFGCDEVLVGYESTGPYAEPLVHYLANKQVKIVQVNPMHTKKMKEVNDNSPLKTDDKDPRVIADIIRLGHALTIIVPEGEAAYLRRLNNARERHVGEQTALLNQLQQLVFLIFPEFKTVLKNMKCKTAQYILKKYTTPERIATVSKEVLGEEMRKRSMGKFGIQEAESLIGLARETVGIKEGLDGIFMDIRHILMQLEAEVRFISEIEAEMGATLERVPFSGRLLSIKGLGTVSVAGLIGEVGDFSKFSTQSEIMKLAGLDLYEISSGEKKGQRRISKRGRGLLRKILFYAAIQMIRKKGIMYDYYARLTGRGMERMRALIAVSRKLLRIIHAIVRDNSDYVGQNPAGERRMMEIAA

SEQ ID NO: 379332 - protein, 354 aa, unidentified
MINGDKKMDQYVGLDVSQDETHICVVDRDGNKIWEGNCPSTPEGIGEAVKRHAPEAVKIGLESGHLSTWHWHGLTDMGLPAICIDAYHAHGVLRLQMNKTDKNDAHGIAQIMRCNWYKEVTIKSFGNHESRALFRTRSNLVSMRTDVVNQIRGMLKTFGILIKGIAGVSFENRIQEIIDEGTAIAPPLQIQLDMLRMIKQKIDDLDELVLDHAYACQKCRILMSIPGVGPMTAANFVLAVYDADRFKQSKSVGAYFGLTPRRRQSGDMDYNGRISKRGDRVIRHQLYEAANSILTRVKKPSSLQAWGLRIAKRSGMKKARIAVARKLAVIMHQMLQTGELFCFNPATGERAVYA

SEQ ID NO: 379333 - protein, 422 aa, unidentified
MIAKSNDLQPMLFIGIDWADQEHALHLISSTSDKQSTQVLQQEPEAIAEWVEKTRQQFPDYRLMVILEQSRGALFAALAGHPELELYPINPKQLSRYRDSLYPSGGKNDLVDAKLLAKFLKEHKEALQQWRPDDITTRQITEFSQLRRKLVDERKRLVSQLQSTLKVYFPQALTLFKAEMYEVCNLDLLKSWPSLQTLKRVHPKTLRAFLKTHRMKDEKKQTELIEAVRTATPLTKDKAIVQANGLYVQSLVQQIRGIIQSIKKFDEQLKERVKIHPDAELFRSLPGAGEALVPRLIAAMGSDRHRYQSAKEIQCRVGIAPITIQSGKSLQVRKRIACPKFLRQTFHEFADHARRWSPWSKAFYKMKKEKGMKHNAILRELAFKWIRIIFRIWKTKTKYSETQYIQRLKITGSPIINFLENS

SEQ ID NO: 379334 - protein, 314 aa, unidentified
MEAAVVVGIDVSKRTLEVALSSGGGFSVANNEDGIGELLVRLRQSGAALVVLEASGGYESPAYLALWEAGVPTALINPRDAYHFAQANRQLAKTDQLDARGLCEFGLRMQPEPLPPPEAADEELKALAVRRRQVVKMLAAERTRVQQAPRSVRSSVKRIVRALERELGAVDHQIEQRLRDNPRLAHRCAQLEQVPGLGPVTGAILVSRLPELGLLGPKQIAALVGVAPYDHQSGEWRGRSSIFGGRAEVRSALYMATLSAIRCNPVLRSFYRRLRAAGKPAKVAIIAAMRKLLVILNAMLKTNSPWRPPCAITV

SEQ ID NO: 379335 - protein, 330 aa, unidentified
METDQYIGIDLHKAFFQACAMTRSGERMWEGKYPRTSEGIAAWRARCSRECAVAVEATTPTWSFVDQIISDVGSVCIVDTRKTKLKAGYAAKTDRLDARRLADALRRESVVSIYFPPPPIRELRELCRHRLMLTQLRTRVLQRVRALLLRQGLGDPPVRTLRSPAGQRWLDEVVLPPRAHEALRTLRLVERGISEPLAQVETDVRREADADPIVARLQTIRGVGPIVGLMLRAEIGDLARFPTPGHLASYAGLVPRVDRSASHSHYGRITKDGSPWLRWALGQIGLHALRRPDPVGRWGRKLALRKGRMVAQVALARLACADVMETWRQG

SEQ ID NO: 379336 - protein, 475 aa, unidentified
MNIKGSKKKNQVLSVNIFEQQEIIAKAEAIKAELKASTWHELEIKGKFDKNDKLSFVSDDMLILGCDIGSETHYVRAIDTRGRELSKSAFGFSNTAEGFESMLDWSTKLAAANDKKQIVLGLEPTGHYWFCLTTWLVAKGISVVQVNPYAVKQTKEVEDNSQLKDDKKDPKLIANLVKDGNFGMPYLPEKLYADIRRLSMFRDQLNEDRIRNLNRLHREMKIYFPEYKDAFGKIDGAFSLELLKAAPFPDELAALGTEGMKQIWHEAKLRGRGYANASSILEYARKSVGIKDGADAGRQAVKWFVSRIIELDEQLSDIENQLNQRCNEIPYAKNILAISGIGENILSGILAEMGDISRFDNVKEIQKLSGLGLVACSSGKHIGETKISHRGRKRLRYWLFQAAKSAVAHSEEFKELHVYYTTRKQNPLKKMQSLIVIACKILRVIFTILTKGTTYDPKKLLGDIVRPDQSIPQAA

SEQ ID NO: 379337 - protein, 354 aa, unidentified
MKRTTKYVALDVHQATTVASVREDSGRVIARSVLPTDGGAIMEFVRGMRGAVHVTFEEGTQAQWLHDLLAPVVDRVVVCDRRGAPRYGNKGDHVDADQLAELLRCGGLRAVYHGSAHRAGLKELTRTYQNLVEDSTRVMLRLKALFRARGIPTAGTAVYHRHQRARWLARLPDGGARFRAEALYAELDVLRQLRPKAKAAMVTEARQDPAWPVLRTIPFLGPVRVALLLATMQTPWRFRTKRNLWAYAGLAVVTRSSADYALVAGQPVRRRRAPMTRGLNRNHNRVLKDVFKGAATAATARPGPLQDVYHNVIARGTREELARLTLTRKLAALTLRLWKKGERYDPTKLTAPAR

SEQ ID NO: 379338 - protein, 354 aa, unidentified
MSEKLNTAVAVMGIDIGKNSFHVIGLDARGAIALRQKWSRGQVETRLANMPPCLIGMEACVGAHHLSRRLKTLGHDARLMPAKYVRPYNKGQKNDFRDGEAIAEAVQRPTMKFVATKTAEQLDLQALHRVRERLVSQRTGIINQIRAFLLERGVAVRQGLRFLRAGLPQILATRTDVLSPRMVHVIEALAGDWRRLDERIEGLSADIETLVQHDPACQRLMTVPGIGPIISSAMVAAIGRGEVFSKGRDFGAWLGLVPKQTSTGDRTILGRISKRGNRYLRVLFVQAAWVVLIRPKSWERYGLKPWIEAAKKRLHRNVLAIALANKLARIAWSVLAHGRNFEVRKIDEAAAQSV

SEQ ID NO: 379339 - protein, 350 aa, unidentified
MIVLGADTHKRSHTVGAVAAATGELLGEQTVPVGLRGFGALLRWARSLDGERAWALEDCRHVSGSLERFLIERGERVLRIPTHLTANARRSARQRGKSDPIDALNVARAALREGLESFPAAHLDGPELDLRLLVDHRERLVRQRVELNSTLLWHLHDLWPELQLPGGALFSKKWSTRISRRLARAEQTMRVRIARDELRRLRELTQAVTGLEREITELVGQLAPQLLSEPGFGPRSPPSSSARSPAPSAFATPARLARAAGVAPIPASSGNTQRQRLDRGGNRQINAALHRVIVTRARCHPPTRDYIQRRHSEGKSTREAIRCLKRYLARRVWRLLQPPTPPRTSTRSIS

SEQ ID NO: 379340 - protein, 350 aa, unidentified
MIIIGCDYHPGFQQIAFVDTDTGEFEERRVEHREEAGKFYRDLGAQGAKVRVGMEASGHARWFERLLSELQFELWIGDAAEIRTKRVRKQKTDRQDAQLILRLLLEDRFPRIWVPSWENRDLRQLLWHRHRMVQARTRIMNQLQAVALNEGLRCKKRLWRDAGREQLESFQLSPWASRRRRDLLELLDRLTPTIAELTQAIEQEVEKCREAQRLQTHPGVGALTALAFVLIIGRADRFQCGKQIASYLGLVPLEESSGQRRRLGHITKQGNSLLRFLLVEAAQVTVRSDQQWRNKYFHLAMRRGRKIAKVAMARRLAVRLYWMWRKGWDYEQLKKFGSHAGQPGHRDGVR

SEQ ID NO: 379341 - protein, 405 aa, unidentified
MKLLIGIDWSQDHHDVCIMNEAGAVIVHFEISHSPEGFTKLEKNIDKLDVPPANCLVALETAHNLLIDFLWSRGYTVFIVAPSVTRSSRGRYGSSGAHTDADDAFLLADLLRTDRSRFAPWKPDGLLVTQMKAKLGLVDSLTKSITRHSNQLHALLLRYYPQVLEAFNDLQTQICLQFIIAYPTPYGAQAISFGQFDAFCCVQHYTHPKLIPELYARLSRPSLKPDPTIVLALQDEAGFLARLLLNLVQQKARTIREVNELLEKHPDAPIFDSLPGAGDLLAPKLLVMFGDHRDRFPSPKAIQSLAGTCPVTDQSGKRRRVYFRKACNRDHRNTAQQFAKSSTLQAEWAMTYFSQCLARGMSKSHAYRCLANRWLGIIWKLWQTGQVYDEAYHLQQINEHRRRRR

SEQ ID NO: 379342 - protein, 422 aa, unidentified
MKLKYSICCGLDVHKNVIVATIVITNADGISEYKQKSFSTFNSDIRKFHSWLIENNCYHVCMESTGKYWIPIFNYLENDIEVCLTHPKYVKAIKGKKTDKKDSKWIADLYKFDLVRCSFIPPKDFRQLREIARYRFKLVCMKSSEKNRIQNCMTVSNVGIASVLSDPFGKTATEIMSYLLTHTSDSIDEKAVRRLIKKGAKAKSDEIIEAIRGYNIESDQAKKLELARSHLEYLDGMITQSEVELYVRMKPYYKFVELVSTMPGMTELSSTIVLAETGVDMSIFDDAKHLCSWCGLSPTNNESAGKKKSVRISKAGDYLKPMMVQCALAAIKSKKQPYFAIKYGRVKKRRGHKKAIIAIARMMIVCIYHIVSEEKPFNPIDYEELMSPKNQIERVILNENNVFAYLESLGYDSSKLVKRNDN

SEQ ID NO: 379343 - protein, 321 aa, unidentified
MFQITIGVDIAKIKFDVALLLEGKYKHKHFTNDEAGFEAFIHWIVAFNLPKPPLICMEATGSYSLPLADFLIVQSYSVSLVNPAKIHAFAKSELSRTKTDKADAKLIARYALAMRPPLWTPPPPEIRRLQALTRRLEHLLEIQQMERNRLETADDVVVESIQTLLTTIDDEIKTIRKAIATQISDHPDLDQRRQLLESIPGIGAATVAHLLIALSPHQGFTDAKQVVAFAGLAPALKQSGQWAGQTRIAKNGDPLLRKALYMPTLSAWAHNPVIRAFCLRLKANGKNGKAIACAAMRKMIHIAFGVIKSGKPFDPLYACSK

SEQ ID NO: 379344 - protein, 489 aa, unidentified
MNSIFRKRNPDVEALFEKAGKKSKVMCVAFDYAKKSHTCVVCDGDGRQLRGRFDIDNNRKGLKFLLGIVVGLCRKHCIKREHVFCGGEDCGSYAFNFIHALVSRGFLVIGINTKQAKMERENSIASTDLIDTIGVAGMMIKMRGRTIGEATENVHGLKRLRRQRGSILKAYTASSHRLYRIVDELFLGFLSYECSGITPFSRASLWLMSERFSVSEIHSRQKPSMVRKLREFNLKDPEGAADKLKSLSETALPPPEAMIPALQRSLHEELNVYCMLSSSKKNLDTDIAKQLASTPGAMLTTIPGISLRWAPGLYVELGDPLRRRNVHSMAALGGIVPRVKQTGGPSKSAVVGHRRKGCSSFLKHILMSGAVSLSQYGHPEIREAYQFDDESGRDARTRLAQKLLRLSLHIIEHQTFYLPPSLHTNGTRDKIREYYLKMWPKVLIKWRDNGAILEAVAEGTPLRKWRDMAQELYDIELSLKSPQHRRKKS

SEQ ID NO: 379345 - protein, 323 aa, unidentified
MTATLGIDVSKETLDADWAHGPRKQRRTFQNSPEGWQKMLAWLKDVSTSHVHVCMEATGRHSLGLALTLHDAGHVVSIVNPAQIRDFARTKLGRNKTDKVDAALIREYVELFKPTPWAPPSPAMRRLCELQTVRAGIVGGRTEWRNRIGSGLGDDTATKLAAATIDHFTRQLEAIDRAIAETVDQDAELRGRRDLLLSVPGVGESLAALLLAEMPEPGVLRRSSEVVAYAGLNPSHHRSGTSIDRPTRISKIGNAGLRSALYMPALAAMRFNPAIAALRARLQSAGRLKPKQIVVAAMRKLLVLCFGVLKTGTRFDPRIAMPA

SEQ ID NO: 379346 - protein, 363 aa, unidentified
MAKIICKPASRSIGVDLGKRSSHVCVLVDGEVEREFKVSSTAESWQQAFEPLERCRLIMEVGGPSPWVSRLLRKMGFDVWVVTPWTLKEIFKKQQRRKNDRNDARALALAGSQSPGMLKRIEHNGEQVQRDRITIVQRDTLVRARTRMIGCLRGVLGSLGIDVPICSSDAINRRIEEHVPQELRTSLAPMLVAVATISAQIKRLDDQIEELGERYAATKVVSQIKGVGTLTGLTFVLKVEDPRRFSSNRSVGAYFGLAQGQQQSGERDPQMPITKAGDDLMRRLLVQSAHYILGPFGEDSDLKRFGEAIAARGGPRAKRRAVVAVARRLAVLMLSLWKSGEVYEPLRITNARLAAANNSMSTN

SEQ ID NO: 379347 - protein, 427 aa, unidentified
MPYRIAGIDVHKAMLAVVVADLEVEGDWQFERRRFGATPSQLRLLTEWLGEQAVEEVVMESTAQYWRPVWDALERDWQPTQRRRVDAGPTTGTLHLAQAQSNHGRPGRKRDFPDAERLVKRLVAHELTLSFVPDVTQRLWRTVTRRKYQLTRNRVQLQNRLESLLEEAHIKVSTLVSDLLGASARRMLRAVATGETDPAAIAALGSPRLRATPEQLCDALGAAREVHPLYRRLLAMTLAELDLLESHMQQLDEELAALLRVHQDAVQRLAAVPGFGVDSAQQIIAEVGPMATTFPTAKRLASWVGACPGHDESAGINRSHRAPSGNRQMRRLLNQSAHAAVKTKGSIFELLYRRFVGRLGHAQAIGVIAHRLCRLVWKILHDGVTYEERGPVVSQARAQRRAAKMLRELRSLGYRVELTQAPSGHAL

SEQ ID NO: 379348 - protein, 418 aa, unidentified
MKADSETIPIERFLALDIHKHYILVGGMNCQRDWILRPRKVRMSRFPEWVQKNLKLTDAIVLESTSNAWEIYDLVSPLVAKALVANPLKVGQIAGAKVKTDKLDVERLLILLIADIVPEVWVPPDHVRDLRALISHRWRIHKQIAMTKNRLHSFIHRFNLIPPEGPLFSKKNLSWWQGQEFSSMVRLQIEQDLLILEHLTAHKEAVHQELSCLSNRDPWAEDMVFLMQIPGLGVVLSMTVLSAIGEISRFEDAKNLVGYAGLGAGIHSSGLKHQGKRITKAGRKELRWAMVEAAWGAVRSDSHWKVQYEQLKQRGKHSNAAIVAIARKLLVSIWHVLTKREAHCHSTEEDLAYKMLIWSQRMDENALRGMTRQQFAKYGLLRLGKGIHLTRIVRNGLPRRIAPAEEVLALLPEYHLLE

SEQ ID NO: 379349 - protein, 372 aa, unidentified
MPSMPEHAPPAQTDTEGEVILGVDTHADQHVAVVITVLGAVVAAETFAATAAGYRALLAWGRGHGLVRKAGVEGTGSYGVALARHLRSAGVEVIEVNRPDRAARRRRGKTDAVDAEAAARAVLGGLATVTPKSADGPVETLRLLKLAKDSAVKSRTQAINQLKAVLVGADPALRESLAGLGRATLVRRCAELPDRPAATEPGAGVAGTVVFTLRLLARRIQHLSAEVKDLTKRITDVIAAHAPQLLERRGVGPDSAATLLITAGDNPERLRNEASFAALCGASPIEASSGKTQRHRLNRGGDRQANSALYHIALTRLRCDPRTRDYVDRRTAEGKTQREALRCLKRYIAREIYNLIRPTPATTAPTSPPLAA

SEQ ID NO: 379350 - protein, 361 aa, unidentified
MTDISMSDPQRAVIGGIDCHTDFHAAVALDPLGRALGTEAFPATSAGYRLTHRWLTSFGPIAAVGVESTGSYGAALTRFLVEHGCRVIETCQPHAHLRARRGKNDAIDAEAAARKVLSGEATAAAKDTTGIVESIRQLSVARNSAVKARSAALCHLGDLLVTAPAALREQLDTRRSLEGKAGVCARLRPDPDRLADPAQAAKAALRSLGHRIAQLGAEADELGRRLDRLVATAAPATTSRLGCGTHHTAALLVAAGQNIDRLGSEASFAHLCGTAPIPAFSGRTSRHRLNYAGNRAANRALHMIVIVRLRYRERTRSYLERRLSEGKTKKTPSAATDASSPERSTAPSCVASDFATVKTRT

SEQ ID NO: 379351 - protein, 328 aa, unidentified
MNIIGIDVSKNKLDCALIDESNQTKFKFKVISNSEEGFIALIDWLSKHIKSAASEYHFVMEATGVYHERCADWLFNVGAKVSVVNPAHVKYYGKSLGVRSKNDKKDSVVIARYGLTQKPIAWKPEAPEIRILKALASRLDAIEKDILREKNRYEKSCINPCSDSVLESIKMILAVLNEEKINLERLIDMHINQYEYLQHNYALLQTIPGVGPVVSRYMLIVIGSRTFKSASQCAAYIGLVPIQNESGSSLRGRSRLSKAGNPVIRAKLYMAAISALQHNPDIKIQNQRLLKNGKSKMSALCAAMRKLVHICFGVIKHQRPYQVQANLI

SEQ ID NO: 379352 - protein, 429 aa, unidentified
MLQHNNNNRNVSFYNLKKNIRGSSTHLIVGIDVAKEKHDAFFGTANGKTLLKHFSFKNTFEGFTSFLLKTESIKSRHGLEEVVIALEPTANYHKPLGEFLIKNGHHLVLVSPGAAKKNRELLTGRWDKSDNNDPANIADLTSQGKFLFYDFPTEPIRDLKALLSLKRKLKKDEHSRRMRIRNHLLAQYFPELEAHFGRFDLENLAVVKWLLDPKEISDLDFASFYKQITIANRGARQKNHLESIWRVAENSIGCEVGEAARYEGRLLVDALRLTQESIKQTDAKIKSICIDMPEYACLLSIPGFGPVISGMTLGAIGDPHRFSSGKQLLKMVGLDLSASRSGKSSDNAITKISKKGTAELRYGLYQAAMVASTKNGLFVGYLDRLIKGREREKGIKKKMRVKLSAKMLIIAWTLMKNMELFDPSRISLS

SEQ ID NO: 379353 - protein, 355 aa, unidentified
MESTKFVGMDVHKDAITIAVMNSAGEVIMESIIETKAVTILQFIQGLRGDVLVTFEEGTWATWLYDLLKPHVTKVVVCNPRKSALLKDGSKGDKIDARKLAELLRGGYLKPVYHGDHGLRTLKELSRSYLTISKDLTRVMNRIKALYRGWAIPCGGTQVYALCHRSVWLSKIPEAGVRRRAEHFYEQLDALQGLRKQVRRDLLAESRKHNATKLLRQIPSIGPIRAAELVALIQTPHRFRTKRQLWNYSGLGLKTHDSAQYRYVDGQLQRSRKPQQLRGLNQDHNHDLKKIFKGAATMASISAGPFHGFYEALLAKGAKPTMARLTLARKIAAITLIVWKKGVNFDAKHLKQQAA

SEQ ID NO: 379354 - protein, 438 aa, unidentified
MVVMNPHAAGIDAGSRSHFVAVGQDPQKEVMEFGVYSQDHEMMVDYLRSHSITTVAMESTGSYWQSLFFALQSAGFEVLLVSGHQTKNVRAKTDVKDCVWIQKLHSLGLLRGCFLPDKESARLRTLQRHRSSLIEESSKMVNKIQKAMRMMNLRLDVVISDITGKTGRAIIESIIDGERNGTALSELTDPRVKKSPEEVAMALQGHWDEELLYEMTECYQIYTFLQGKVKSCEKRLESLLDEFTREIHIEEEVVLKKKQLKGKNQPKFNLPELSYKFYGVDLFAIESISSSTVLTLICEVGMGIYNFKTSKQFSSFLRLAPNNRISGGKVISSRTPKGSNRLALALRNAANTIDKTKDGALTRFFKRVAYKKGRGAAVTATARKLAVIIWNMIVKKEPYRALNLEIYQKQMKEKAIASIKRKINALGMSNEELHAALS

SEQ ID NO: 379355 - protein, 353 aa, unidentified
MLIIGCDFHPGFQQVAIFDNLTGEMQEKRLVHREEAEQFYRSLAGQEVRVGMEACGHYPWFERLLGELGIELWLGDAAEIRAKVVRKQKTDRRDAEHLLQLLMEDRFPRIWVASLEERDVRQLLVHRHKQVQWRTRVKNQLQAMALSQGVQKKRKLWTQVGRAELEKLELLPYAAERRKQLLQSLDRLEAEIEQLNRRVEEEVKQRPTAMKLQTHPGVGPVTALAMVLTLGPAKRFPGGKQVGSYLGLIPSEYSSGGRQQLGHISKQGNSFLRFLLVEAGQSAVRYDPELGRFYRRLAARKNRALAKVAVARKLAVRLYLMLREDWNYAQLCRAVVQVSPSHSVVARKNRPLE

SEQ ID NO: 379356 - protein, 344 aa, unidentified
MSVFVGLDVSLNSISICVIDADGELVWRGKTLSEPAALIAALQPHRQQVHLVGIEACPLSEWLYGAMIDSGFPAVCIETRHAQRFLSSRPNKTDRSDARGIAEMMRLGHFRPVHVKSRASQVLRTTLTARQLLVQQIIKIEQTIRGLLKIYGLKVRAAHRCTFAARIETLLADMPELRIAIAPLLEVRNGMRRQKVLLDRRLFQVARRDDVCRRLMTVSGVGPIFSLAFKATIDDPARFKNAKAVAAHLGLTPRIYQSGETDRSGNISKCGDKLLRHALYEAANSHLRISKKRSVLKAWGMKLAKRIGNKKALVAVARKLAIIMHRIWISGSTFQHGGPALAAA

SEQ ID NO: 379357 - protein, 343 aa, unidentified
MTIIRIGLDTSKHVFQIHGVDENEKPVLRRQLRRSEVEKFFAQLPPTQIGIEACGASHHWARLLRGLGHAVLLMPPQYIKGYVKRGKNDAIDAEAICEAMSRPTMRFVPVKTAEQQAALTMLGVRDLLIKQRTMLINALRGHAAEFGVTAAKGPNKIVELLQRLATGEGVPALAREMLGMLASQLEAVNGKLKAIEARLMAWHRQDQTSQCLATIPGVGPIAGVSFALKIPDARAFRSARHFAAWIGITPRENSTAGKHRPGKISHEGDESLRRLLVLGATAVIQRAKGVASRRGSWDCWRASQKARSGRAGQQNGPRHLGHDDQRRGIPASTGGLSPPATDT

SEQ ID NO: 379358 - protein, 345 aa, unidentified
MTNNPANTPTESLSRLFAGIDVGADELVLVIRKNGKSFDPQKYANTRSDRARLVKKLIKLPGIKVCLEATGIYHFDLAIALHDAGIPVMVVNPKASHNFAKVLMKNSKTDVVDADTLAEYVERMDFVAWTRPSNQVLALRGFARRIDALTGQKAAAKNHLHALSATQETPKALLRDAKLAISQLEKRIDALATEALALIDKHPELQRIFELLTGIKGIAQTSAIALMGELLLLPPNLSHREWVKFAGLDPKAFESGKSVHKKMRLSKAGNRHIRSALYMPALSAKQHDPHVRAYFQHLIDNGKKPLQAVCAVMRKLLHAIHGMLKHDQPFDNTRFYAIPTPTAAK

SEQ ID NO: 379359 - protein, 361 aa, unidentified
MRIIGCDLHARQQSLAMLETTTGEMVNLTLKHEGNEVREFYSQLPHPVLVGIEATGSMHWFLNLMDELGIECRVGHPATIRAAAPRKQKNDRLDAELLLKLVAENRFPAIWLPTKELLDLRGLVLHRHQWVRIRTRIQNALQAIALANGLRRGSGLWSYDGQAKIALLSLLPHTAYRRSALQAMYKNMEAEIEKLTLQVAEQAGQRSGARRLMTHPGVGPVTALATDVFLGDPKRFADGKALASYVGLIPREYSSGERQRLGGVTKQGSPLLRFLWCEAGAHAVRRDPELQRFYRRKLVQKGLGKARVAVARKLGIRLWIMLRDEIDYQEFCRRGQKQQSGAACAGMPGTAYGAKSHRAIG

SEQ ID NO: 379360 - protein, 422 aa, unidentified
MSYCPVAGIDVSKRFSDMCILSPDNKIFAQEKIYHDETSINRANALLQKAERLFFSKPVIVMESTSHYHLILFQFFSEHGYNVIVVNPLQSNSMKDFSIRKRKTDRVDAFKLAMMYRTKTLRPSQIPQTATRALRQLCRHRAELLNDVSSYKNRLTALLDQTFPGYDKVFSDVGGITSCAVLVRFPTPTILLVEEESELVEVIAAASKSGYSFAKKKAGLLISTAQKAQTLGIHSCADETLIVCTIQMLRTLSESVLQIETAIDNLLAQIKELRNNVSLLQSIPGIGSHSATLLLGEIGDISLFKKPKQLAAYFGLDPTERQSGSFRGTKNKLSKRGSPYARAALHMGVVNSICKRGKDSAANPVLLSYYEKKCKNKPAKVAQAASMHKLVFIIFAVLRDQKPFELKTPEQHAVEQGFAKAA

SEQ ID NO: 379361 - protein, 350 aa, unidentified
MLIIGCDYHPGFQQIAFVDSETGECGERRLTHREEAEQFYRELSERSLHVRVGMESSGHSRWFERLLRELGFELWIGDPAEIRTKRVRKQKTDRRDAQLLLQLLMENRFPRIWVPDAENRDLRQLLWHRHRLVQMRTRVMNQLHVVPLNEGLRRKKALWRPAGRKELESIALAPWASRRRQDLLDLLDQLTPKIQELTHALEEEVEKRAVTRRLMTHPGVGPLTALAYELVIGTPERFHCGKQLASYIGLVPEENSSGDRRRQGHISKQGNVLLRFLLVEAAQVTVRSQQEWRSKFFHLAMRRGRKIAKVAMARKLAVHLYWMWRQGCDYGQMHKLGSHAGEPGHLDGER

SEQ ID NO: 379362 - protein, 366 aa, unidentified
MQKISTVPRNGSRIFKGGQLTIGLDLGDRWSCYCVLNEVGDIVLERRVTTTPEALKQVFGKMPRSRIALETGAHSPWVSRLLTALGHEVIVAHARNVRLIGESRRKDDRLDARTLARLARVDPELLSPVQHRSAQAQIHLTQIRARAELVKARTALVNSARGLVKSYGERLSKCGTQQVGPDLAKSLSAELREALEPLLREVESLNTHIKEYDRRIEKMARESYPQVELLKQVKGVGDLIALTYVLTLDDPQRFRKSREAGCFVGLQPGRRNSGQSEPQMHISKEGDRYLRTLLVQGAHYILGPFGEDSDLRRWGLRLAERGGKNAKKRAVVAVARKLAVLLHRLWLGGEVYEPLRHSQRAASAVA

SEQ ID NO: 379363 - protein, 295 aa, unidentified
MEETGEYVEQELNHSDGEAERFYRKLKEKGVSVRVGMEATGHARWFERLLAELGFELWIGDPAEIKAKRVRKKKTDREDARLMLKLLLENRFPRIWVPSPENRDLRQLLWHRHRLVQMRTRIMNQLQAVAMNEGYRWKKKLFNAKGRGLLEKLPLAPWASRRRKELLELLDQLDPKIAELTAAVEQEAKKRPEVVQLMTHPGVGAITGLAYVLVIGTPGRFPCGKQIGSYTGLIAALFAGGSIASSRTVQPRLATSVCTPEDAPGKKNCQSGHGQKTRCTVVLDVAKQLAIFAVG

SEQ ID NO: 379364 - protein, 392 aa, unidentified
MYIVGIDIGKNHHEASIVSPKGKQIGRSLRFATTHKGADSLMSFIFKNIGNSPCVFGMEATGHYWYPIYSFLKAKGYTIYVINPIQSDSLRKMYIRQTKNDSIDSFLIAEVIRFGQFGTTSMADENILAMRQLCRYRDSVISSRTEIKLRIGTIMEQIFPEYEKQFSSLWLSTSMGILEKYLTPENIENAPIDELFEIIKDKSHNRLTKAKAISIKEAAADTFGIKIAQDAFSFQLKQLIDRMNFLDKQIEALDCQILEYYEKFDCYLHTIPGIGMIAAATILAEIGDINRFKNSSALVAFAGIDPTVRQSGEFSSTHNHMSKRGSPYLRHAIFLAATTCSFHNSPLNAYYKKKREQGKHHLTATGAVARKLTTVIYAVLRDGKPYEPKSFC

SEQ ID NO: 379365 - protein, 400 aa, unidentified
MDKDRIVAGLDVHKDTIYLCVMDNTEAVIFAKVYGTLTPDLELMCSEMVSHGVTEAAMESTSTYWVPVWNALCESMSLKLVNPYFIKQLPGRKSDVKDAQWIAECLLKNLIRGSFVPDKTVQDMRKYNRRIFDLNGDLTYNSNKQDAALQRCGFRLSNYVSRVNGKSYQKCVRAIITGITDPEELVKLIHGKTLRKYGRNIIKDAVTGDFHQADICLLKQYAELIGVIERQIEECRNALIAICQEHFPKQFKRLQSIPGVKERAASAIIAETGADMKPFEKATNLVGWCGLKPRNDISNNKVKSNRTTHGNRFLRQILIEISWVASRTRNCFFSNFSYVQCTQRHKNKMKIQVAIARKLLVAVWHMLTKDEDFIDVYLKRLEKEAEWQNDLQALESLLVG

SEQ ID NO: 379366 - protein, 342 aa, unidentified
MDHYAGIDVSLERSSVCVVDATGRIIREAKVASEPEALVRFFRELGLPLTRVGLEAGALSQWLHAGLTGAGLEAVLLETRHVKAALSAMIVKTDRKDARGIAQLLRMGWYRPVHRKSPDAQEARALLAGRKLLQAKLRDVELSIRGILRGFGLKVGEVSKGRFAARIGELIAGHEMLEAVIGAMLQAREGLRAEFVRLHRRMLAIVRGDAVCRRLMTVPGVGALVALTFKTAVDDPERFRRAKAVGAHFGLTPKRYQSGETDVSGGISKVGDASVRAALYEAANAMLTRVSGISALKRWAMGVAKRRGMKRAKVALARKLAGVLHRMWANGADFRWGEEAVA

SEQ ID NO: 379367 - protein, 411 aa, unidentified
MSAPCRHVGLSTDGVRRPVSWRSHREALHAWGVLNPILKQRRPTVKDSTTVSQPAVHSLVQTLGMDVGDRRSSYCLVAASGEMLDQSSVATTHDSLSTLFQATETCRIVLEACGHVHWIARLASEAGHEVVVANPREVRLISQSGRKNDRNDAQTLARLGRVDVELLRPVKLRGEDCRASRSVLHARDLLVRTRAKLVNFVRGQVKSFGGRIPSCSTSAFRNKATGHVPEPIQRAVTPMLETLKQIEEQIRDLDREVEHLCEERYPETGVLRQVKGVGPILALAYVATIEAPARFASSRTVGNYVGLAPAQYASGTKTPQLRISKRGDGFLRRLLVNAAAYMLGPFGEDSDLRRYGERIAHSGSQRDKARARIAVARKLACLLHHLWRTGSVWDPDYADSIVAPNGVSADG

SEQ ID NO: 379368 - protein, 446 aa, unidentified
MADRVRLKSLEVAHPNAAGIDIGSASHFVAVRPDADDKPVREYSGFTEDLEALARWLNECGVDVVAMESTGVYWIPLYELLESRGFTVHLVNARHVKNVSGRKSDVLDCQWLQQLMSYGLLSGAFRPQDEICVLRAVSRQRDMLVGYQAKHIQHMQKALMQMNVQLDNVISSIVGETGLKIVRAILSGERDPLTLAKLRHGRIRASEEDIVKSLQGNWREEHLFALKQAVNLYDSYQAAIAECDVQLTRVLGRLASHDDSPVPPRNTRRHSSSVEKDDLRKALCRTCGVDLTLIDGIDVGTAMKMISEVGPDLSRFKTVKHFCSWLGLCPGTKISGGKVLPGASKRIANRLALALRMSAVCAGKSHSALGAYYRRLSARVGKAKAVRATAHKLARLIYTLMTRGEAYVDQGQDYYEQQHQQRVLINLKRKAREMGFSLTPVEAAAA

SEQ ID NO: 379369 - protein, 337 aa, unidentified
MDYFAGLDISMDETHVCVLDREGQVIYESKSASTAQAIADELAKAPSCRRIVFETGRMAPILFHGLSRLGLPVVCVESRQAYRALKSLATHKTDRYDARGLAHLARTGFFKPVHVKSLSAHAVRSLIIARKKLVGQRVTLENQIRGLAVVFGVRLPRALTIAFIDQALKASEGVAGLSAAMRGLIAARTAVMTAVAAIDVDMRRMARASGACRRLMTIPGVGQLTALAFVAAIDDPSRIRRSRDVGAYLGLVPRRYQSGEVDYVGGISKCGDRRVQTLLYEAANVMLTRYNGQLKLKEWAFAIARRSTMRKARIALARRLAIIMHAMLRDGTEFEAA

SEQ ID NO: 379370 - protein, 330 aa, unidentified
MRTIGIDVSKATLDVALRDEQGVWMKEEQVKNSTAGLRSLLRKWGRQGLCDKTTLVCLEPTGHYSHGVVKTLLDLGHPTWMAHATDIRLSIGMQRGKSDKVDARRIAEYAHRFRDKARLLDSTCLDFTQLKTLLALRERLVKERGKDQAQMKDNVLYMTGGTKQLVKAELERQLKALQRSIANLERAIKAILTKDHGLARKNRLAQTVSGIGPMLASEFIAHTAGFTRFDSPRQLVCYVGAAPFEKTSGSSVRGKTSTSSFANKRLKSLLRLAALSAVRVDGDLRDYYRRKIAQGKKPIVVLNNVAGKIIHHLWAVIASGKPYKPHLHMS

SEQ ID NO: 379371 - protein, 402 aa, unidentified
MNAVGIDVSKGKSMVAIMRPFGEIVSTPFEIKHTTSDINSLVELINSVEGESRIVMEHTGRYYEVLAHQLSEANLFVSTINPKLIKDFDNDSLRKVKSDKADAVKIARYALDKWQNLKQYSVMDELRNQLKTMNRQFGFYMKHKTAMKNNLISILDQTYPGVNTYFDSPARNDGSQKWVDFASTYWHVDCVRKMSLNAFIDHYQNWCKRKKYNFSQSKAEEIYGKAKELVPVLPKDAITKLIIKQAVDQLNSASTTVESLRTLMNETASKLPEYPVVMAMKGVGTSLGPQLMAEIGDVSRFTHKSAITAFAGVDPGVNESGTYERKSVPTSKRGSADLRKALFQVMDVLIKTHPQDDPVYQFLDKKRTQGKPYYVYMTAGANKFLRIYYGRVKEYLSSLSES

SEQ ID NO: 379372 - protein, 410 aa, unidentified
MDAIVERVSGVDVGQAMVVATVLVGGAHQRPTKATRRFRTVTRDLLAMREWFQEHGVTHVALESTGVYWQPVYALLEDAFEMIVGNAHHIKNVPGRKTDVKDSEWLANLARHGLIAKSFVPPKPVRQLRDLVRYRRKLVESRTAERNRLLKLLETANIKLASTMSDVFGVSGMLMLRALLEGRAQPSEMARLAKGQLREKTEDLELALDGRLEDHHRFLLTLQLRRLDRVESDIAQLDARIDEALAPYQEPHERLQQIPGVGRVQAAVLVAELGTDRRVFRSAKHAAAWAGVCPGNNESAGKHGGTPVRKGNMHLRSALVEAAIAASRKKGSYLRDKFYRLRARRGVKRAAMAIAHKILIAAYHILSDGAAYRDLGDAYLDGLEKRRTTRNLVRRLERLGFEVTVGPKVA

SEQ ID NO: 379373 - protein, 412 aa, unidentified
MQAIIERCCGLDVHQETVVACLLVGAPGTRPKKEVRAFRTVTRDLEALRDWLLEAGVTHVGMESTGVYWRPVYAVLEGHFELIVGNARHMRNVPGRKTDVKDSEWIADLVRHGLIAKSFVPPRPLRELRELLRYRRKLVESQAAERNRLLRLLETANIKLASVASDVFGVSGRAMLRALIAGETSAEAMADLARGLLRRKRADLILALDGRLEEHHRFLLAMQLRRLEAIEADIAALDLRIGERLEPYSAPHALLMQIPGVDWVVAAVLIAEIGVDMSVFVSVYHLAAWAGVCPGNHESAGRQKSGRARKGNVHLRAILVGAAISASRTKGSYLKDKFHRLKARRGGLRAALAIAHKILVSAYHMLVNNVPYRDLGEAYLDQIRQTRTVANLKRRLERLGYKVTLEPNAQGT

SEQ ID NO: 379374 - protein, 457 aa, unidentified
MESYYMGIDVSKGYADFVILDAKKDVVEPNFQLDDTFGSHCKLFEILKRFFESHSEAVLFAAVESTGGYENNWLHSLGGFQGALDIRSARLNPLGVRANSKASLRRVITDKISARDVAEYLIAHPEKVTYQQEDSLAGLRRQWGFVRLLVKQKTQILNQFESLLYTANPELIAYCQSGVPVWLLKLLKKYPTAVKLSKARATSVARIPYVTAGRAKELIDQAKKSVASATDETTGSLITAIAEQIIRMEETIRIQSQQMAKRCAIPEVALLKTIPGISDASAIGLMLEIQSVKRFASVKKLAAHFGLHPAFKTSGDGTSGVRMSKQGRKEPRKILFMVAMVSLTANPHIRKIYEEHTDKGMKKMAAIGLCMHKILRIIYGMLKNNQAYDSQVDQKNRENRTVRKSVHNTKNANRRYEMFDQQAPISRRQSNIRKEWKQSQGDNITQCGIGVPIPSSA

SEQ ID NO: 379375 - protein, 414 aa, unidentified
MALVRWVGRAIGLDVHRDFCVVAICEDGKVRSAGRVPSTPEGLGLLAESLLPTDRVALEVTGSCWEVARILEPHVQRVIVVSPDDTGISSARAKTDKLDSRTLASLLWKGELDAVWMPDERCRILRRRLARREQLMRTRTRAKNEIQAVLQRRLQERPPFADLFGVKGRQWLAGLELPVEERESVDAGLRQIAFMDSEIAAVDRLVAQQALDWPEIRRLMTVSGVNLICAASFLAAIGEPSRFLTSRKMVAYLGLDPKVRQSGEAPARSGRISKRGSASARWALVEAAWSVVKQPGPLRAFYERLRARRGHGKAIVATASKLTVLFWCMLTRSEDYAHQRPALTNKKQRQLELTAGAPARTKAAAGIWSTNRAILHAERALAEQAEVSYKRMVTDQQAGRPSRKVGASATPERA

SEQ ID NO: 379376 - protein, 320 aa, unidentified
MIDGENKVLYKQRHRNEVPAILSALDPFKKDIQGVVVESTYNWYWLVDALMQAGFRVHLANVSAIKQYEGLKQVDDRRSSLWLANLLRLNILPTGYIYPKEERPTRDLLRKRLQLVRNRTSHVVSIKNILARNLGARMKSNDIKKLKASEVKTLFPDKEMRLAIMSSVSLIQHCQEEIDKIEELIAKKVKVRKEFSKLLTVPGVGEILGLTIMLEVGHIERFPTVGDYSSYCRCIRSIRTSNGKVTGYGNSRDGNKYLAWAYLEAANSARRWHEAIRNYYEKKKSKTNKIVAIKTVSHKLARASYYVMRDGVDYDQARFA

SEQ ID NO: 379377 - protein, 406 aa, unidentified
MEGPIITVDVSKGSCHYQPFIENGHPMRKPKQLSATIDGFQKLGQTIKDLEAKTEREDIPVIFEATGVYHRPLQKYLEDHKIRYYIISPLLSATYRKTDLHSNKTDALDCAHIAKAYYCEKELRQYQAQPQEYKRLYQLSRIYESELVHLRKRKVSLRSMLDIIYPRIDKTFKGNQNLYDPIPMEILKRYPHPSLLLSHREDTIVKTVGHRTGHLKGYTERIVHKIYEKAKECYSGCDIDDIEVVKLPSLIENVQEQKKKCDSLLKEMIEIARTCPYFASVVSIVGIGENLAARIIAELRDVSRFDNRAAIVAYAGLNPKIQQSGDIDGLHLKISKKGNKHLRCLLYLGAQCNYRLRKEDPLYEFTKKKRQQTQCPLSSKAAYTASAHKLLVIIYSLCKNGTLYHS

SEQ ID NO: 379378 - protein, 347 aa, unidentified
MAKCNVIAVDLAKSTFHVCVRNSDGEVIFKREFTRQKLKEWLTKQPPPVFAVEACGGAHYWAKVAEQAGHTPVLVKASYAASFRQGHKTDYNDAEAIAIAAVQSNRKPIQVKTDEQLALQACERIREHYQSHKVASSNLMRGVLLEFGIVFGKGDKHLRTNIPEILEDAENTLPHILRAEIYALFEYWQQLCEQLNTIKQKYTTLTQDNKHCQQLMALEGVGPVNALGLYLALGADGKGFKNGRDAAACIGVTPVQYSSGGKTVMLGISRKAGNKQLRSKLIQGAMAVASSVNKRSPKNTKEQWLKDLIERRGLRRAAVALVNKTIRTAWAMLHYGKDYQTPAAIAA

SEQ ID NO: 379379 - protein, 321 aa, unidentified
MTYVGIDVSKVTFVVAYSSVKTNKTRTFKNTVNGVHEFVQTISASEHNCVLEATGNYSALLVYLLSEAGITISLENPLKIKNFARVMLTVTKTDEIDARLIALYGEKMQPAPYKLRSDAILVLKQKRTVLRQLKKQLVATRNLKGSMEVLPFFDPKCKKTIEKTITFLEKQIKEMEEELASLAQGEYKKQMDLLTSIKGIGVTLAAALIVATGRFSYFDNAKQLTRYLGLSPTYQQSDTSVNVKGHINRNGDSSLRSQLYVAAFSSLRCNTECKACFDRLRSNGKPGKVVVIAVANKLVRQAFAVVTQGKPYVDGFKSEKP

SEQ ID NO: 379380 - protein, 377 aa, unidentified
MMVNSTATSNEQSICAALELSKNSWLLAIQVPGRDNPSLHPLLGGDAEGLMAKLDAARDRVAKATGQPPAVTLCYEAGYDGFWLARFLEQRGITCQVMEPASLRVNRRARRVKTDRIDVENILHTLIAWCRGERHVCSMLVIPSVEEEDLRRCHRERDRLIRERTAHTNRIKGLLFGQGIRGINVKSRYKTLKPSELVTGDGRPLPDRLGREITREIERLAQVQAQIVSVERERDHPVTSCAATEIKRHDLLRLKGLGPALSSTLTREVYYRRFTNRRQVASYIGIAPSAYDSGDGHRSQGISKAGNRLARVAMVEAAWLWLRHQPDSALSQWFHDRTQGQKGRIRRVMIVALARKLAIALWRYLETGLIPEGAVVK

SEQ ID NO: 379381 - protein, 344 aa, unidentified
MSEVTIIGLDIAKHVFHAHGADERGRAIFSKRISRGKLLDFFAAQPSCTVALEACGGAHHWARQLTQLGHEVRLIPPAYVKPFVKRQKNDAIDAEAICEAAQRPSMRFVAVKSEQQQAAGLVFRTRDLLVRQRTQLINAIRGHLTEFGWIAPKGPSHVAMLAGLIEEEEMASSLPEAARAMLRLMLDLLADLDGKIADLDKEIARRAREDEVSRRLMTVPGIGPISATAIAALAPPAETFAKGRDFAAWLGLTPLQRSTGGKHKLGSTSKMGERTLRRLLIIGSSAVVLQASKRGAPKGSWLEQMLARKPRMLVTVALANKTARIIWALLVKKENYRAPVVAKA

SEQ ID NO: 379382 - protein, 344 aa, unidentified
MEHFAGLDVSVNETSVCIVDETGRIAREVKVASEPEALLAVLKTGAYHFKRIGLEAGPLSQWLFSALAEVGLPVICVETRHMRAVLQAQINKTDRNDARGIARMMRAGLYKPVHVKTLRSQKLRTLLTHRKLLQSKAIAVENDLRGTLRNFGLKVGMVGTVKFEQRIRVLVADIPDLASLVEPLLVVRRVLREQIVVLHRRLLAIVKDDEVCRRLMTIPGVGPVVALTYRTTIDVPARFRNSRAVGAVLGLTPSKYQSGESEYTGGISKCGDEMMRVMLYEAAQILLMRATKWSWLKAWAMQIARRCGLKKAIVALARRLAVIMHRIWVDGTQFRWSRQEVAAA

SEQ ID NO: 379383 - protein, 342 aa, unidentified
MKFYCGIDLSARDCHVCVIDEQLKIVVQQKLRNELAKICELLEAYKANLKIVVESTFNWYWLIDGLQAEGFEVVLAHTLGLYLITGAKVKTDRRDAYALAKLLLVGAVPAAYIYPAETRPVRDLLRRRAHLVQVRAGEYGSLRRLLLRQGMLSSKQQEIKTVTETELEQWFEHPLVRLHASQELQRIELYSQQIAELEKTILGLAKTEHSYQLLLKLPGVGQTIALTIVYEVGELTRFASVKDFSSYCRVVPGIAQSGNVTRRGRASKQGNHYLKAAFSQAAVHAVRCYPKVRRYYERQLKRHQGRGRQMICYNIIAHKLAQAAFHVLKEQTEYREELLFGR

SEQ ID NO: 379384 - protein, 351 aa, unidentified
MDRYIGLDAHSSSCTAAVIGPSGRKIQHQILETNAKALISFIHTIPKNRRLILEEGTHSQWLHEVLAPHVQELVVVAVQQSRGPKDDERDAFGLAEDLRTRNVKVQVYKKRGRFIALNHLVRAYGTLVADTVCCQNRIKSLFRSRGVATVGKRVYAVNSRPQWLAQLPVQVQGQADLLYCQYDALLTLRQRAEKEMLVEARKHGIYRVLKTIPGLGPIRTGQLMPVVVTPYRFANKRQFWSYCGLGIVMRSSSDWVRLPDGQWVHAPTQHTRGLNRNFNRPLKRIFKGAATTIIGRANKDDPLYQHYQRLLDGGTKPNLAKLTISRQIASIVLSVWRSQEEYDPKKLSQTT

SEQ ID NO: 379385 - protein, 345 aa, unidentified
MQTMYYIGLDVHKKKISYCVKDGSGHLHAEGAIPAARSDLDRWMKTLPAPWTAAMEATIFTGWIYDHLKPHAAALKVAHPLMLRAIAAAKKKNDRIDAHKIADCLRCDFLPECYMASTEIRERRRTLRYRNLLVHQAVQLKNKISGLLMEAGVSYNKQKLHKVGYFKELLATNPDINEGLRPLLRLCRETLVRLQKTESALVRSLQRDSLLAERVQRLMTIPAVGPITALTWALEVGDVKRFSSIKKAISYCGLCGAEKSSADTIKRTPISKQRNKHLQSVLVEAAKMAPRLSSELALIYDREKQKGNANRATLAVARKLVAYLVAIDRSQRDFLVVEKENCAAA

SEQ ID NO: 379386 - protein, 366 aa, unidentified
MKKISTVQIFESEIFKEQRLTIGMDLGDRSSCYCVLDEGGRILLEQKVAMTPEAMKQTFSKIPRSLLALETGTHSPWVSRLLTELGHEVIVAHAQKVQLITKSNRKDDRHDARTLARLARIDPELLGPVRHRSAQAQIHLTVIRARAELVRARTAMVNAARGLVKSYGQRLPKCGTRQVSRELGAGLPAELGEVLEPLLKEIESLNERIQEYEVRVEKIAKESYPQVELLKQVKGVGTQIALTYVLTLDDPRRFLKSREVGCFLGLKPGRRDSGESQPQLRISKEGDRYLRTMLVQGAHYILGPFGEDSDLRRWGLKLAARGGKSAKKRAVVAVARKLAVLLHRLWVSGEVYEPLHNSDKAMRAVA

SEQ ID NO: 379387 - protein, 403 aa, unidentified
MKHVIAFDISMGKSYMVIYNAQKQCVFESEIKHSKPEFKKLQEKIHELTDKTGELPKIVFEATGIYSRQLERFMQDNQFTYCLLNPLEAKLQCDFLRIHKTDRSDAHRLALTHFTAIRRVFTGTDNLFYQLKSFSRLYSELDSELSIIRGRMHKVIQLTFPELERMFTSKSDLFLNFVQLFPHPDCILGLSKTIIKNRIRANANKKISNITAEKKAIQILEIAKTSYPAVSQNDVLCDQLKLYARRYQELLHQKECCINKMVYIAEQRAEYNIILSLPGIGPNTAVRLMAEIGDITRFNNNKHLNAFAGIDIRRFQSGKTFFKDKINKRGNKHLRKLLFLIIQNMIKQRRYGQNHIVEYYDKLKTQPYNKCHKVASIACVNKFLKLLFHLITHDIHYDYRLTA

SEQ ID NO: 379388 - protein, 418 aa, unidentified
MKPWTEITHYAGFDWARDHHDVVIVDRQGQIVADFRIEHSLAGWQAFRDQVKPYPVLGVAIETNQGTAVDHLLSLDGTIYPVNPLSAKSYRERKAPSGHKTDRLDAWSLAEALRQDGQQWKALQPLDPLTQQLQLLCRDEIGLIEQRTALINQLQQALVEYYPAALAAFEDWTQPFCWDFIIQFPTPEKLADAGRRRWEKFLHTQKLWRPETASKRMEIFQNARQFCGPAAVTSAKSLLALSLAKLLNALQLQLDQYRQQIEALFKQHPDHDLFGSLPGAAQTLAPRLLGEIGGDLQRFEDTEALQCVAGTAPVSFQSGQIHRVHVRYQCNKMLRHTVHLWAQCSLRVCPWADVYYRQKRAEGKSHACALRCLGQRWLKILWRMIQTRQPYDADLHARNQKQHGSWVLTLMKPAPQAG

SEQ ID NO: 379389 - protein, 367 aa, unidentified
MKKVSTVVTKQSRNISRQTLTIGLDLGDRNSWYCVLDEAGTIQLEQRVRTTAKALQEVFGAMPRSRIALEIGTHSPWISRLLSELGHEVIVANARKVRLIGESRKKDDRLDAQTLARLARIDPELLYPVKHRSAQAQADLMMIRARAGLVRARTGLVNTARGLAKSYGERLRGCNVRDMDPEKAENLSPELQRAVEPLLAAIEELSERIVEYNDRIEALAQASYPQVELLKQIKGVGTLIALTFLLTLEDPNRFGKSRDVGGYLGLQPGRRKSGESEPQLHISKAGDPYLRTLLVQGAQHILGPFGIDCDLRRWGLKLAERGARNAKKRAIVATARKLAVLLHHLWVTGEVYEPLHNSSRVTVAAAA

SEQ ID NO: 379390 - protein, 366 aa, unidentified
MLHKLNSAATLIQRTTTEAPRDHMYYIGLDVHKRTISYCVKDAAGHVHQEGKIGSTRCELDAWIKTVPQPRMIAMEATIFTGWIYDHLLPHAEKVKVAHPLMLRAIAAAKKKNDRIDAAKIADCLRCDFLPECHMASTEIRDRRRTLRYRNLLIKQMVQMKNRVSGLLLETGVSYNKQRLHKVGYFADLMSTNEEVNESIRPLLRLSREHIVRAQRLDYALVSSLERDPLLRERLERLRTVPGVGSITALTWALEIGDFTRFRSIKQAISYCGLCGDERSSADKVMRMPLSKQRNKHIQRVLIEAAKLAPRECHELAMVRDRELQKGNPNRATLAVARKMVGYMLAVERRKQSFVPAENFNCTTAA

SEQ ID NO: 379391 - protein, 342 aa, unidentified
MHISTIGLDLAKNVFQVHGIDANDKVVIRKQLRRSQVIAFFEALPPCLVGLEACATSHHWARELRKLGHEVRLMPAKDVKAYVKRNKNDAADAEAICEAVRRPTMRFVTVKTVEQQGRLMQHRVRDQLMRQRTQLINALRSHMAELGIAAAQGREGLKDLLAIVTGENDGTLPVDAKASLMVLAAQLQACQTLIGVLEKRIMAQHKSSDASRRLETIPGIGVVGATTIAAIVTDPKAFRSGRDFAAWIGLVPRQDSTGGKQRLGRISKQGDRYLRRILVVGAHAVLRRARLQPEKYPWLTVLLARRPFKVVAVALANKMARIAWALLAKGGTYRAPQLAAAV

SEQ ID NO: 379392 - protein, 424 aa, unidentified
MKVVYQTCCGVDVHKSFLVATIIKTTSGVQPSYQKKRFSTFNNSILEFKKWLLDNSCRDVCMESTGKYWVPVFNLLEDEINVTIANPKWVKAVKGNKDDTKDSKWIGDLFRLGLVPGSYIPCKPIRILREFTRYRYKLTSCKSSEKNRFQNALTVCNVALDSVVSDIFGKSATSVIDYLIERSDNSINHEEISSRLLRSLKKKSESVIESIEGYQMTDAQKYRMRLVRAHMDYITAEINDVDKMIENMISSNPDFENAVQFLCTIPGVKRDSAITIISEIGTDMSQFSGSKRLCCWAGLTPGSNESAGKKKSVRITRAGVYLKPALVQCAHAAVKSDKSPYYKKKYESLVKRRGKKRAIIAIARMILTAIYQMLSTGEEWNPSDLYKIDMPVALVEKQKAKAIKQAKKLLQREGILPPDEPLAS

SEQ ID NO: 379393 - protein, 388 aa, unidentified
MYLIGIDIAKYNHQCFIATEAGEVINEFSFDNNQAGFNELLKSLKSLDQSQQIKIGLEATGHYGNTLKQFISANGYTFAEFNPYLAKQFFKSTTIRKTKTDKVDARLLSSMLASVDYKALHTKYYHINELKALTRARDSLITDRSNYLIQITNALDIVFPEFKSFFNGRLGKVALFILSKYDSLEKISKITKTQYDRIRKLSMGKLTYNKFLQLKELAKNSVGINSVSYFSLIKHYTKLINSLNVELEVIENNIYDIMSNIDTKLTTIPGVSLMSAAIILGEIGDINNFSSASKLVAYSGFDIAIYQSGESHTYGRLVKRGSPLLRKTIWNLVFGCIRLIPQITEYYYKKRAEGKHHKVAYSAISRKLIRLIYFIESTNTTFDISKYR

SEQ ID NO: 379394 - protein, 327 aa, unidentified
MNYSHFVGLDVGKKTFDASLMSADEKELSHKSFDNTPEGIQSLLDWIAGYHLSLSKLLFCAENMGSYVTELSVSSVSMGFSLALVCPLTIKKSIGLQRGKNDRIDAKRIANYAVLHYRKLELYKLPDKDLVRLRGWIIIRDNLVKQKVSSIKLLETFSQMAKLADVTESISFLEEQLKSIKEKFLEVEEDMKQLIAGSTSLYTNYLLLRSIKGIGIINAIVLLCVTDNFQRFDNPRKFACYCGVAPFEHTSGISIRGKTQTSSLANKEVKVYLTRAAITTISWDPQMKAYYKRKTAEGKHKASVINAVRAKIIARSFAVIRRQTPFL

SEQ ID NO: 379395 - protein, 344 aa, unidentified
MSELTRIGVDTSKAVFTLHGIDAAERPILRMNLRRAQMIPFFRKIPPTIVAMEACGSSHYWARELAALGHTVHLVPPQYVKPYVKRGKNDRNDATAICEAAGRPGMHFVPAKSLEQQAAGMVLKARDTLVGQRTALINTMRGHAAEFGIVAAKGAAKVDGLLSAIEQQPDIPPVAREMFILLHQQITDINARIAELDAKLNASHKANPVSQRLATIPGVGPITALTLAIEIDPAQFESGRHLAAWAGLTPKEHSTGGKQRLGRISRAGNERLRRLLVAGATAVIQVACKPGSQQMTEWLRALLARKPRKLAATALANKMARIAWALMTSGQTYRRDATVSVVKA

SEQ ID NO: 379396 - protein, 419 aa, unidentified
MTQTSHTTFAAFVGIDWADAKHDICLQAAGTAKRECFQLEHTPEAIDAWVTTLRTRFHSQPVALCLELNKGPLVFALRKYDFLVLFPINPLTLARYREAFTPSRAKDDPTDAELQLELLLTHRDRLSPLNPQSPTMRALEQLVAHRRRVVGDKVRMTNRLTSTLKNYFPQVLHWFQDKDTLMFCDFLSRWPTLKAAQLARRTTLETFFRAHHVRSADVIAQRLHDIKAATPLTTDEGVIAPNALLVQTLVTQLRVTLQGIADFDTAIAQRAQSHPDFPLFQALPGAGLVFAPRLLVAFGEQRERYATAAELQKYAGIAPVTERSGKKAWVHWRLQCPKFLRQTFVEWAAESIRHSFWAQCYYQQQRDQGKAHQAAVRALAFKWMRILYRCWQDHTLYDESTYLQALTQRGASLMHNLAK

SEQ ID NO: 379397 - protein, 387 aa, unidentified
MSKKIVAPAYVAAMERAEADPAAARFWVGLDIGFKSTAVCVVDVDGAVIHQVSMKSHATEIGRYLRRNFKSHVTLIGMETGGLSPHLAGKLREQGFQVAVLDALQVHRVLSVKRNKTDTNDARGIAEITRSGRDYLTEVYVKSNLCFEVRASLIMRDRLVKQRRETEAMIRGLVRVYGGRIEPGSDSPATFRERAIDQLCLIADTEGVDLRPRIIPLLDLCERFYIEAGRIERELDLLAASNPVCKRFMEIPGIGTITALSFYSAIEDPTRFRHVDDVAAYLGLTPRVYQSGESLTHGGISKMGNQLTRTHLVGAATVMLANTKSFSTLKDWGMKLSKRVGFNKAKVALARKLAIVMFSLWRDGTHFMAKAADVGPHRDLMQARATA

SEQ ID NO: 379398 - protein, 412 aa, unidentified
MEVVHQRCAGLDVHKKSVVVCRIVPGKQGWKREVKRFGTMTQDVLALADWLQAEQVTHVALESTGIYWRPIYNVLEGNFTLVVVNAHHIKFVPGRKSDVNDAQWIAQLLQHGLLKASYVPEVEQRDLRALTRYRTQLIRDRVSEINRVQKVLEDANIKLGSVASNVLGVSGRAMLEQLIAGQEDPSVLADLAKGVLRQKILQLHQALTGKVRESHRLLLRLHLEHIDDLNAKIATLNSEIEQMMRPFDQHEALQRLDGIPGVNIHTAQIILAELGQDMTRFPSARHAAAWAGLAPGQNESAGKNLSAKIRPGNQHLKVALLQAAHAAAHSKDTYLAAQFRRLASRRGKKRAAIAVAHSIVVIAYSMLKNNTPYVDLGGNYFERLNQDYLQRSLVKRLERLGLKVTVEHAEAA

SEQ ID NO: 379399 - protein, 316 aa, unidentified
MDGTNLICVGIDVAKAALDLHLLPTGQSHSLANDTAGFKQLRKFLPQPEGCLIVLEATGGYERPLVADLLDAGYRIAVVNPKRVRDFARALGLAAKTDRLDARVLALFAQKVQPAPVEKMPEKQAEIQQLVTRRRQLIDLRTMESNRLEMTRAKAAKKSIQSVLKLLERQIDDIEKAIETLVQSEDDWRQKAELVQSVPGLGGVTATTLIADLPELGALNRQQISSLVGVAPFNHDSGQHQGKRAIAGGRKSVRSVLYMAALSARRCNPIIKAFADRLVQHGKPFKVVLTACMRKLLVILNALLKSGQSWNPKLVP

SEQ ID NO: 379400 - protein, 412 aa, unidentified
MQVVYSCCAGLDVHKANVVACVMITGSHGEVQSQTKTFGTFTGELLALSDWLRQQGVTHAAMESTGVYWKPVYNLLEGVFELLVVNAQHVKAVPGRKTDVKDAEWICDLLRHGLLRGSFIPAPAQRQLRELTRHRANLVQRRAQGVNELQKCLESTNIKLASVATDITGVSATEMLSALLAGQTDTESLAELARGRMKSKKPLLAKALEGKVQPHHRLILSQLLADIGWLEEQIQEVNVEISNRLKDHQQWLERLDEIPGVNLRIAEVIAAEVGTDVKPFPTAAHMASWAGLCPGNNQSGGKRHATHIRPGNRHLKSALIEAANAAGHKKHCYLRAKYRRLAGRKGKKRALVAVARTILQSTYYMISRGEGYKDLGENYYDMRDPLQLARRLSNRIEKLGFRVTMEPLAHAA

SEQ ID NO: 379401 - protein, 483 aa, unidentified
MKEPRMKNQRRAPTPHQAANTKRRALSPALVKRIQPDAAGIDCGATSHYVAVPDDRDPQPVREFGTFTADLHRLADWLVKCGIKTVAMESTGVYWIPLHEVLEERGLEVVLVNAHDVHNVRGRKSDVKDCRWLQELHSVGLLHASFRPTAEIVALRSYVRHRQTLIEAAATCIHRMQKALTQMNLQLHHVLSDLTGVTGLAIVRDILAGVRDPGTLAAHRDGRCKASQQEIAAALTGNYRAEHLFVLRQNFEAFEFHQRQIAQCDKAIEAQLTSLAETRQPTSSEPPAARARCKPSKNEPRVELRAPLHRITGGADLSQLDGIGPYGALQLIAEIGTDMSRWPTEKHFTSWLTLAPNNKISGGRLLSSKTQPSANRAAAVLRRAAMSLTRSATALGAYYRRIAYRLGQPKAITATARKLALLVYRVLRGDIVYRDPGATAYVQLHRARLINNLGRRAKEFGLSLINLETGELVDHAVLPPTVS

SEQ ID NO: 379402 - protein, 392 aa, unidentified
MIYVGIDVAKDKHDCFAMNSDGEILIENFSFQNNSDGFNLFFNSISQFNESSENIKVGLEATGHYSNNILNFLTSKGFNVFVINPLQTNLFRKGQSLRKTKTDKLDARFIATMLISNNLKPYSNLSYHISELKSLVRHRFRLIEERSKFKVSLSRLVTIIFPELEKIVWSISQNSVLYLLNELPSAKNISECNLKHLTNLLQKHSCGKYSRDKAIEIRDLAKISIGTHSPSISFELRQVIQTILFLQSQIDDIDKELKRLVVELDSPILSIPGISYVTAAFILAEIGDINNFDSPSKLQAFAGLDPSTYQSGKFNATHSVMVKRGSKYLRWALLTATRLVCMRDKNFNDYKKQKLAEGKHYFVALSHTTKKLIRVIYHLLKTNTTYQFQKVA

SEQ ID NO: 379403 - protein, 397 aa, unidentified
MYIVGIDIAKRKHEAAVIDGDGAVIIKPFSFTNNCSGYNRLLAMLAKAKLPLDEVSFAMEATGHYWLALFTRLQKEGFRVQVINPVQTNSIRSFYIRQAKTDPRDALLIAEVIRFGHFSESTLHPENIYELRELCRGRHAIVSMQADVKRKVVALLDQVFPEYETAFTNMFGDTSMAILQTCPTPKELSEMPLEELCHLIEVSSHKRFRMAKAQELQALARNSFGFAMAGDVFSTMIRLYAKHLDFLKQQVREMDRKIAEIMDTLDTPITTITGIGPTLGAYILSEIGDISRFSSAAKLAAYAGIDPTMRQSGEYNGVRNRMSKRGSPYLRHAIWLAASSAVLHDPALKLYFQKKRDEGKPYMASVGHACRKMVSIIYAVMRDNKAYTPCIPNEISA

SEQ ID NO: 379404 - protein, 346 aa, unidentified
MGMDIAVLGVDLGKNICSVVGLDGSGAVVMRRKVRRETLIALAEKLPTCIVGMEACCGAHHLGRVFAAHGHDVRLMSPEYVRPYIKAQKNDDRDAEGIAEAATRPTMRFVELKSQDQLDMQSLHRSRDRLVGERTALINQLRAILLERGMVAPQGKRKLEQFLAVLMDEQGGEGLSPRMTLLVADARAQWAELDRRITAFDAEFVRWVKDNQEARRLMTIPGIGAIVASALVAAVGRAESFDRGRDLAAWLGLVPRQFTTGGKPKLLGISKRGNKYLRRQLIHGARTALPYVAERDTPLGRWAKGLMSRAHRNVAIVAFANKLARIAWAVLQRGERFAATGMSMTA

SEQ ID NO: 379405 - protein, 314 aa, unidentified
MTPHDLFAGIDICKSRLDVAISPGNQTFNCPNTEAGIEKLVRRLQKLQPQIILLEATGGYEFLLVAALREAGLPACFINPKFVRNFAKGAGITAKTDRLDAQVLALFAERMRPQPRTLPTAQQQELKQLLTRRRQLVEMIQMEKNRLDPTPAPRVKQSLLQNIHSLEAQLAALHREIDDFFQQHPLWVELDKNLTSVLGIGHLSALLLIAYLPELGRLNRKEIAALAGLAPFNKDSGQFRGQRHIEGGRSQLRQALYMVTLAATRFNPAIRTYYQRLLEKGKAKKVALVACMRKLLTILNAMIKKQQPWCPQHH

SEQ ID NO: 379406 - protein, 346 aa, unidentified
MIPVASDVHKGRCWMAMIPPGEELKMLEPIACTREAWRQRLAELPPEAEIALEVSTSGYFVMSVLEEAGWRERAHWVHTAGIDSLRKQKSDRLDTRRLVKKLAVHAVEPLPEAWFPPAPIRALRLLARQRCGITRLRAQTKNRVHSLLEMHGLRPQGCVFTAKGRAWIGQQALSSAAQLCFERMFRLYDFLQEERQSSEAELLAAARAFPEVALLQTIPGLGHMLAAVVWSEVGDLRRFDSADALVNHTGLVPSLYNSGEVTITGPITHQGPAWLRWALITAANALTRSRSPLGKRYWGLRRRSKHPNVAKTAVACSVARCVYGVLKHGAPFQAERWGRRAGKLGQ

SEQ ID NO: 379407 - protein, 342 aa, unidentified
MNLPIRIGMDTSKSVFQLHGVDENEGVVVRRQFRRAEMIRYFERLPPVLVAIESCGSSHHWARLLQSFGHEVKLIPPQYVKAYVKRGKNDAADAEALCEAVTRPSMRFVPVKSKERQAACMLMTVRERLVSVKSQLSNAFRSYAAEFGIVGPAGRQNVTALIKRVLEDDSLPEMARDLFRLQAEEYAAVQARLAKIEAKLMKWHREDDVSRRIATIPGVGPIGSSMLSMKAPPPETFRSGRDFAAWLGLTPKDHSTGGRQRHGGITKAGDSALRSTLIVGATALLRHIRKGRHKPTPWLASLLERKPPKLVAVALANKFARIAWRLMISGGVYNRPVADMPI

SEQ ID NO: 379408 - protein, 314 aa, unidentified
MTSTDLVVGIDISKGKLDVGVVPTLERWTADNDCDGLTQLAKRVSDLSPTLVVMEATGGLERPVRAVLESAGLSCAVVNPRQVRDFAKAMGILAKTDSLDALVLAKYGQKVEPEARPAKDPETQELEAILTRRRQLIEILTAERNRLGSVASLRVRTSLEEHIAWLNKRLADLDKEMKTSIKSIPEWREKEKIIKSVKGVGPVTTLTLLAVLPELGTLSRKKISALSGLAPFNQDSGKFRGKRRIWGGRAAVRSVLYMAAMSAKKWNPVIKVFYDRLIGAGKKFKVAITACMHKMLIILNSMVRNGQQWHAASA

SEQ ID NO: 379409 - protein, 314 aa, unidentified
MICGVDVSSERLDAQLGRQGVCKSFPNDQAGISALADFCREHKVHLLAMEASGGYEQQAFGLLWSMGIEVAIVNARSVRRFAQSMHLFEKTDRIDAGVIAWYAETKKVVATPAGSVQQQQLKALVTRLRQLTEMRAMERNHRTLVTDSAVLASLHQVLVLLNRQIKDLEKHIADMISSDPVWGKLDSTFRSIKGVANRTVACLMAELPEIGTLSNKKISKLAGLAPLADDSGKHKGKRRIYGGRREVRAILYIIVTCVSHHNQDFSAFKQRLTAAGKPRKVIRIALAHKLLIRLNAKARDMRQTLAQPAGPSHC

SEQ ID NO: 379410 - protein, 346 aa, unidentified
MLHVGLDLSRRRVDVCVLSEAGELVDEFAAPSDRDGLYGLTRRLAVFDEPLRGVVESMTGARFVHDALSRWGWEVLVADAAKVKALAPLACKTDKIDARVLAELSWRDLVPAIWLPSEQLRAERELSRYRLHLVKHRTSLKNRIHATLFSFGCQREMSDLFGAAGRQLLERLELPDPWRSNVTASLALIDDLERRIDQIQREIKRCGADHQYIPLLLTVPGVGWVLGYTIASEIGDIDRFDRPQKLVGYTGLCPRVKQSGNTDLRGPLSKHGPRYLRWALIEAAQHAAAHPGYRERYQTIKRRLGKQRGAKVAQIDLARRLAEAIWHILTKQQPFAPAGARKRLAA

SEQ ID NO: 379411 - protein, 362 aa, unidentified
MRIIGCDLHTRQQSLAMLDTETGEIGKVTLTHEDKQVREFYSALPRPACVGIEATGSMQWFVNLMEELGIECQVGNPAKIRAAEPRKQKHDRRDADLILTLLTENRFPAIWLPSREVQDLRALLRHRHQWVRMRTRVQNALQAIALANGLRRGPSLWSCNGQNTIASLPLAPHTAHRRSELQAMYVKFESDIEKLNQRVEEQADQRCGARLLMTHPGVGPVTALATDVFLGDPKRFVDGKTLASYVGIIPKEYSSGGRQKFGGLSKQGSPLLRFLWGEAGVHAARRDPELQRFYRRKLVQKGLGKARMAVARKLGIRLWIMLRNEIDYNEFCRRGQKQQRSSVACAGMPETRNGATSHRPVD

SEQ ID NO: 379412 - protein, 401 aa, unidentified
MNAVGIDVSKGKSMVCVMRPFGEVVLEPFEVLHTAQNLNDLAGKLKALDGETRVVMEATGNYHKPVAFVLHDAGLFVSVVNPVLIHDYDNNSLRRVKTDRKDAVKIANYTLDKWTRLRQYLPEDDTRLALKNCYRQYQQAVAVRTMLKNNLISSLDLTFPDANKLFSSPAKSNGCEKWVDFIGDFWHSECVSSLSSDAFAKKYLKWCQKHGYNFTRSKSDTIYACAVNAASLPKSPTSKLLIQQQVAQLKAVSQSVAAFQQEMLRLSQQLPEFDTVMEMYGVGPSLGPQLMAEIGDVRRFSSKKLLIAFAGIEPQPNDSGKIVGNDSGISKVGSAVLRRTLFLIMTVILKTQPQDEPVFQLMNKKRSEGKPYKVYMMASANKFLRIYYARVKAVMDSKHSK

SEQ ID NO: 379413 - protein, 354 aa, unidentified
MMIIGCDYHPAFQQIAFVDTDTGELQERRLGHREEAERFYRDLAATGVKVRVGMEASGHARWFERLLAELNFELWIGDAAEIRTRRVRKQKTDRQDAQLILKLMLKDDFPRIWVPSWENRDLRQLLWHRHRMVQARTRIMNQLQAVALNEGLRCKKRLWREAGREQLESFRLAPWASRRRRDLLELLDRLSPTITELTQTIEQEAEKCPEARRLMTHPGVGSLTALAFVLIIGRAERFQCGKQIASYLGLVPLEESSGNRRRLGHITKQGNALLRFLLVEAAQVSARSIPEWRNKYFHLAMRRGRKIAKVAMARRLAVQMFWMWRKGWDYEQVKRFGPHAGQPGTGHGVHSNTE

SEQ ID NO: 379414 - protein, 368 aa, unidentified
MKQGTTYVGIDAHQKDLFVAMLIGTQTVPVTWTVPNEPKAVRRLVRKLERETPGAVRVFYEAGPCGYALQRQVTTSRVRCDVIAPALIPRKPGDRVKTNRRDARKLAELGRAGLLTAVQPPTPEDEAVRDLARARDDAREDLQRCRHRLTKLLLRRGLHFSGRNWTRAHRQWIDGLTWTQAAERAVVEDYRLAIDHTEARLLALDARLAEIAAHEPYCEPVGWLRCFRGIDTLTAMLILAELHDFRRFASAPALMAYLGLVPGEDSSGEKHRRGRITRAGNALVRRVLVETAWHYQHRPGIGVALRQRRNGQPARVIAIAEKAQQRLCRRFRKLAAEHKPAPKIAVAIARELAGFIWAALQPVATPMR

SEQ ID NO: 379415 - protein, 313 aa, unidentified
MKKTICGVDVSKAKLDVCIEPGHRFSSFDNDTAGIAELAAFCREHAITLVVMEASGGYERRAFVELWEKGISCALTNPRNVRRYAEARGILEKTDRIDSSVIARFADAKNLVPTPLPSQAQQRLKALVARLRQVTDDLTVQKQRRASLLDNPEMLASLDEVIALLKRQSRSLEGEIASMIDDDPLWAKLAETWREMKGVAGRTVARLHAEMPEIGTLSNKAIAKLAGLAPIANDSGKRKGKRSTRGGRAGVRSILFLVAAIAARYDKSLGEFRDRLLKAGKEKMVVRIALARKLLVRLNAKARDARAEYANAT

SEQ ID NO: 379416 - protein, 362 aa, unidentified
MLKSTTIIAFDQHAATTVAAVLFPGHRTPALHTLASESPSMLRFVERIRRQGPIRCCYEAGPCGFELQRALSARDIPCDVIAPALIPRRPGDRIKTDRRDAGQLAILYRADALTAIHIPTDQEEAARDLLRCREDIRADLLRCRHRLSKFLLRHGRRFTGTKKAWSKRHDIWLRAQTWPIAALDHTHRAYLRAVEETVARLRAVEDDLRALLDLEPLRPRVERLRCFRGIDDLTALTIAAELGDARRFATAPSLMAYVGLVPSEHSSGSRRAQGAITKTGNAHLRRVLVESAWHYRHHPFVSAALRTRQRGAPATVIARAWTAQHRLHRRYARFAARGKPKQHIVTAVARELTGFVWAALTQ

SEQ ID NO: 379417 - protein, 353 aa, unidentified
MTGTKYIGMDVHKESISIAVRNDAGKIVMECVIETKANVILDFIHGLRGELQVTFEEGTWATWLYDLLKPHVTKLVVCDPRKNSRQGNKNDRIDARELADRLYMNKLSSVYHGGAGVRTLKELARSYLTISKDLARVMSRVKAIYRSWGIPCAGKQVYAPRHRAEWLAKITEVGVLRRAEFYYQQLDALRSLRHDIRRDLLAESKKHKASKLLCQIPSIGPIRAALLIALIQTPHRFRTKRPLWKYSGFGIETHTSADYRSVKGELQKSRKQVSVRGLNRDCNHDLKNLFKSAATIASVKPGPFQEFYASLLAKGMRPEMARLTLARKIATIVLIVWKRGVNFDAKYLKPQTA

SEQ ID NO: 379418 - protein, 349 aa, unidentified
MLHVGLDLSRRRVDVCLVSSEGELVEHFRAPADRDGLYGLTRRVAVYGEPVRGVVESMNGARFVHDELVRYGWEVLVADAQRVKGLAPLACKTDKVDARVLAELSFRDLVPAIWLPTPELRQERERSRWRLHLVKHRSILKNRVHASLIAFGHQVPMADLFGAGGRRLLAELDFPEPWLGHVRASVELIDDLDRRIGEIERWLQRSGADHRYIPLLLTVPGIGWVTGFTIAAEIGDISRFSSPVKLTGYTGLCPRVNQSGEVDRRGPISKHGPRYLRWGLMEAAIHASSHPLYKERYQRTKRRLGRQRGAKVAQIELARKLTEAIWYMLTRNEPFKPFAPAGALIRLTA

SEQ ID NO: 379419 - protein, 365 aa, unidentified
MSQYIWIGLDVHVDSITAAILEGDQESPDVLRMSGDLMKVRRLFRRMAKKGAVRACYEATGAGFVLHRVLKRDGFHCEVIAPSLIPRKPGDRRKTDRIDAVMLAKLYRSGHLTPVHVPTEDQEAIRRLIRLRYAYQEQCKSTKRRISGILLSHGLVFRGTKSLWTKKHIAWLEKQRRELTGPLQTTLVTELEHLEYMQTQRNALDSNIERYAQSPPYRGRVEALSCLRGVKTLTAMTLLSEVGDIHRFRSPRALMAYLGLVPKEKSSGERERRGSITKAGNSHARRVLVEAAWNNRHNAGAELVLRRRRQGQPPEVVAIAMKAQHRASRKFYRLWRTKHPNVAVVAVARELCGFVWAIMKAAPQC

SEQ ID NO: 379420 - protein, 402 aa, unidentified
MNAVGIDVSKGKSMVAIMRPFGEIVSTPFEIKHTSSDINSLVKLIKSIEGESRIVMEHTGRYYEVLAHQLSEANLFVSAINPKLIKDFDNDSLRKVKTDKADSVKIARYALDKWQNLKQYSVMDELRNQLKTMNRQFGFYMKHKTAMKNNLIGILDQTYPGVNTYFDSPARSDGSQKWVDFASTYWHVDCVRKMSINAFIDHYENWCKRKKYNFSKSKAEEIYGKAKELVPVLPKDAITKLIIKQAIDQLISVSTTVESLRTLMNETASKLPEYPVVMAMKGVGTSLGPQLIAEIGDVSRFTHKSAITAFAGVDPGVNESGSYEQKSVPTSKRGSSVLRKTLFQVMDVLIKTHPQDDPVYQFLDKKRAQGKPYYVYMTAGANKFLRIYYGRVKEYLASLPES

SEQ ID NO: 379421 - protein, 341 aa, unidentified
MNITRMGIDLAKNVFQLHGVDANENVVIRKQLKRSQLLSFFANKSPMLIGMEACGGAHHWARELTRMGHTVKLMPPQHVKAYVKSQKNDQRDAEAICEAVSRPTMRFVEIKSIEQQDMQAVHRVRERLIKARTALSNEIRGLLAEYGVILGHAGIPATQRGMRAAIEDADNSISHSMRKLLCEMSDELTELTDKIQRNDVKIQRHAQEDERVKRLLAIEGVGPISASAIVTAIGNGTQFKNGRELAAWLGLVPNQHSSGGKERLGGISKRGDKRLRTLIIHGARAVIRFCETKTDTRSDWIKNLISRRNKNIATVGLANKNARIIWSLLARNETYRPAVEL

SEQ ID NO: 379422 - protein, 424 aa, unidentified
MVRAIGMDVHRDFCEVAIAQAGTVRSAGRIETRPAALELFAASLAATDVVALEVTGNAGEIARILEPHVARVVVVSPHDTGISRARAKTDRLDARALAKLLAAGELDAVWMPDEWTRAMRRRLARRDQLVRARTRAKNEIHAVLIRRLAGRPPVTDVFGVRGRRWLSGLELPADERETIAGCLRHVDFLDAEVAALDQAIASEALRHPDVLRLMTVPGVSVITASTFIAAIGDIRRFASARKLVGYLGLDPRVRQSGPGPARHGRITKQGSASVRHVLVEAAWTTVRAPGPMRAFYERVRARRGAQVAAVATARKLASLFWYLLTREQDYAFGQPSLTRRKVRKLELAAGAPSRKGQVRTGDGLRNKQIRDAERALAAQAEDAYRRTIADWKATRPEKAGASVTPGRASQRPSKGKAARQTTSP

SEQ ID NO: 379423 - protein, 393 aa, unidentified
MLDLSGTKDTRRFSTCMEDLLNLREWLIETKCQRVAIESTGIYWIPTYTLLEGKVETIVANPFQIKNIPGRKNDDIDSEWIAEVCLNGQIKPSNIPPKEIREIRELTRTHVKLTQARTSFKNRVHKILSRAGVRISGVLTDIFGKSGMIIINGILNGKTIDQTFAEIKDKRIKIKKTEIKESLKGELSQNDIFVIKECLDSIKFLDEKIKKFDSKINQNLNLKGMQKEIKILMSISGVGFTTAAAIMAEIGNIDVFSKPKKLVGWSGLAPSISESAGKSSNGHITKKGNKFLRTILVLAANSIAIGRLNKLRVFYQRIKAKKGHKKAIVALARKLASIIHHLLKFKEMYSEEEGKQKKVKLQKFIPVEDISIDEMIGILCEAGYSVDKPAANT

SEQ ID NO: 379424 - protein, 437 aa, unidentified
MVPHAGGAVEEEKTMDILHERVAGLDVHKNTVVACARIMTGKETTRECRTFATTTDGLLALRAWLSECPCTHVAMEATGVYWTPVWRILSEGDFELIVANAAHIKNVPGRKTDMNDAMWLADLLAFGLIKASFVPTEPMHELRSLTRTRKQLVREQTRHVQRIQKTLAEANIRLDSVISDIMGASGRRIIEAMIAGVRQPHKLADLAGKQIKATPKELYDALHGRLTDHHRFLLDLHLRQWDGLDTTIRTIDLEIDQRIDLMDEDRAAGESPFRTLIGNADTVPGVSAVSAPAILSEIGCDMSRFPSAGHLLAWAGMCPGQNESAGKRKPSHLRKGAPWLKTMLVQCAWAAIRKKGSYYQAQFLRLRHRRGPQKAICAVAASILTAIYHMLKDGTEHHDLGADYFDRRSTETKAKHLVARLTKLGFTVQLQPSAKAA

SEQ ID NO: 379425 - protein, 348 aa, unidentified
MSMLADSADAVIGVDTHTDTHTACLLDPLGRQVAVTTIPADPGGCRMLLAWAQRNAPGPRLAWAVEGTRSHGLGLTRYLQVQGQVVTEAGRPARASKRPGGKSDPTDAARAAREALAADKLAQPRADGVREALRILLAARAQATMARTAAVNTLKALILGAPDHLRQALRGLSTPRQAARCRTLRVHASQPVAEQVLRTELRRLATHIGAWDRELRANKAQLRQLVAQIMPVLLDQPGVGPMSAAQLLVSWSHPGRFRSEAAFAALAGTSPLAASSGKITRHRLNPFGDRQLNRALHVIVGWRMVHHAQTQAYLTRRAGHKTEREIRRCLKRYAARSLYRLMETAART

SEQ ID NO: 379426 - protein, 348 aa, unidentified
MNITTVGIDLAKLWFQVHGIDARGKVTLRKQLKRSQVVAFFAQLAPCLIGMEACGGAHFWARKLMELGHTVKLIAPQFVKPYVKSNKNDAADAEAICEAVGRPNMRFVPIKNTEQQALLGLHRARQGFVAARTAQANQIRGLLAEFGLVIPAGIRCIERKVPEFLENAENGLTGASRALFARLLEHFRELDRQAGELEREIKAWHREDTASQRLQAIPGIGPLTASALVASVGDAKVFHNGRQFAAWLGLVPRQNSSGGKTTLLGISKRGDTYLRTLLIHGARAVLLSLKRHPDRAAGWLARVADRRNPNIAAVALANKNARIVWALLAHGREYQPGFRSVSPSAVSA

SEQ ID NO: 379427 - protein, 389 aa, unidentified
MIFLGIDVSKFKHNCFLSNGDNFDLGQHFEIENSREGFDFLFDKLSPYDRDNIRIGLEYTGNYHLNLSRFLLNLNFNIHFFNPFQTSLFRRADSFRNTKTDKVDAFFIAKLLKTTYDSNPTLFEFYHNYDLKSLCRYKSVLKKDRSRLKNSIVSCLDIVFLELCNVCNDVFSKYVLAILYEFSSAYEISKANITRLSNLIKNASRGAYSKDKALVIRDAARNSIGYFSSSVSFQLKQSIDYLYFLDKKIDEINEMIKPLLDEINSPIMSIPGVGIELGPTIISEIGDISRFDSSSKLLAYVGLDPSINQSGTFHSSFSTMSKRGSSYLRDSLFKAAFIISQIEPVFKEYYLKKKAEGKHHYVALTHVARKLVRLIFHLLKEDEVYVSKV

SEQ ID NO: 379428 - protein, 426 aa, unidentified
MRSVGLDIHKRVVQAVILDDQGHLSSRDRFPCDRDAILSFARNRLDGDTRVAMEATTNTWAIVDLLEPFVAEVVVSNPMRTKAIASAKVKTDKVDATTLAQLLRCEFLPRVWQPGPALRQLRSLTSRRASLTHHQTAIKNRIHSVLHQRLMASPERLFDAKGLDWLRKVELDPPGRAAIDSDLRLLEAHEAELENLDKDLAKRGCQDQRVKLLMTLPGVGPAVAQTLLAALGDPSRFPDGDHAASYIGLVPSTRQSADKCYHGPITKHGCAHARWVMVEAAQHLDDHPGPLGGFFRRIAAKKGRNKAVVATGRKLVVIAWHMLMNNEPYRYAKPQTTKSKLVKLRTTGGGGRNRGGVPAGSLKSQPTGLGSTRLVPSLADVYASEGIPMPTMPPGEKRTIKQAGAEGFLEAIQTSRRVPRQKPKAS

SEQ ID NO: 379429 - protein, 377 aa, unidentified
MKRIKFVGLDVHAETIAVAVAEQDGDVRSLGVIPNREESIRKLVKKLGPVEQLRFCYEAGPTGYVVYWQLTALGAKCEVVAPTLVPVKSGERVKTDRRDALKLARTYRAGELTPVWVPDAAHEALRDLVRAREAAKKDQLRAKHRLGKFLLRHGRRPPTGVKPWTLNYLSWVKHEVHFEQMAQEATLLDYLNEVEHAELRIARLNLAIEEAVKLTPPKMRAVIQALQALRGIAQVAAVSIVAEVGEVSRFTRARQLMGYGGITASEHSSGEGSWRGGITKTGNAHLRRVVVEAAWAYRHRPSLGVALRKRQEVVSEEISEIAWKAQHRLHTRYRKLTARGKDKGKVVTAIGRELLGFIWAIGVKVEATQKLTDRQAA

SEQ ID NO: 379430 - protein, 346 aa, unidentified
MKITTIGIDLAKAVFQIHGVNEHGKVAVRKQLKRAEMSSYFANLEPCLIGMEACGSAHHWARKLEGYGHTVKLMAPQFVKPYVKTNKNDMADAEAICEAVSRPNMRFVAMKTVEQQAILSVHRARQGFVKARTAQGNQIRGLLSEFGIVIPQGIRSIMKQVPEILEDGENGLLGTMRNLLERLTENLKEMDRQAKELEVQIQVWHRENEASRKLAEIPGLGPITASAIVATVGDAREFKNGRQLAAWMGLVPRQHSSGGKQTLLGISKRGDSYLRTLMIHGARSVIRFAENKTQPDSWLRKVMARRNKNVAAVALANKNARIVWALLANDRTFRPDYTPAAVVAGM

SEQ ID NO: 379431 - protein, 415 aa, unidentified
MRTSCLGFEIRLINGIVVAPPSPGSLALATLVSEGMGSCETRIGVDLPERRRRRSGNRGPVTVDPLVASTAGELGSRPVSIVGPNSRLACKSAVFARTGAMDERAGRIVGIDISKDRLDVHVLPEGEHFTLGRDEAGLKALTKRLAKQALQVVAMEATGGLEAPVAAELHAAGLPVRVVNPRQVRDVARGLGILAKTDAIDAAMIARFAEAAKLTGAPVPDAQAQHLGALVARRRQLIGMRTAERTRLQQTTDKRIRRSIERLLRSIEAELEGVDRDTDGAIKGSPLWCALAELLDEQPGLGNTTARVLVAELPELGRVSGKKITSLVGLAPYPRDSGVLRGKRAIWGGRASVRTALYMATLSAVRCDAVLKEFHQRLIARGKLPKVALVACMRKLLVHLNALVAKYYAKIEQTA

SEQ ID NO: 379432 - protein, 395 aa, unidentified
MFIVGIDVAKRSHEVCMITSDGQTVQRPFSIRNNCTGYNLMLEKIRKHTNIKSQIVFAMESTAHYWLALFTRLRKDGYHVILLNPIQTSAMRDMFIRKIKTDAKDSFIIAELIRFGRYAESNVAQDRLLALKELCRNRFYLVDMAGDLKRKLIALIDRVFPEYEAQFDTIFCKSSVALVKKYPTPQKLSNAHLDKLTELLWNSSNGHFGEWKARELRELARNSFGVEDCDGAYSTLILLMLDQIQSLSGKADALEKEISRLFQSFDTTVTTIPGVGPIIGAVILSEVGDISRFSSADKLAAYIGVDPSVNQSGEFQAAHAHMSKRGSPYLRRCIWMASQVAVQRDPMFRAYYEKKTAEGLKYMTIIGHVTRKMTAVIFAILRDHKVYEPVLPTAA

SEQ ID NO: 379433 - protein, 334 aa, unidentified
MTAIVTETLLAFDVGARTHEFVHETAGKLEQGQLQNDISAVRSFLARLLKDGRRLRVIMEATGIYFLDLALVAHELGAEVVVINPKAGHHFAKGLGLRSKTDAIDARMLLEFLRRMPLTRWEPPARECLQLRQLGSYLGQLTDESTAAKNRLHALESTEETPRFLREDLRRSIRSLEGRLERIRAQAIELIGRSESLNAAFQALNSMVGMGDKSAVAVLGELCVLPRSLSGRACTSHAGLDVRHHQSGTSVNKPGRISKHGNKYLRRALYMPALSAGTHDPHAAAFKQRLQARGKKGLQINTAIMRKMLTAAWAIVRDPTPYDGARLYATIETP

SEQ ID NO: 379434 - protein, 454 aa, unidentified
MLDGSAQGLSRGDRRRNNKLGRLRSVVTRRTAVLAFDLAADKQVCALTDPDSRVLARRTVTVKAWQLEQAVSWGLAQAARAGFDSVVVACEPTGHRWRVLDRIAAGLGVHLVCVQPLLVGRARESEDFTRNKNDDSDAVIIARLVTELRCYLPERATPAWARLRHLGARRASLVTAGGAARQQVRDLLECAWPVALTAASEPLDSKNWLAAMTVALDRVGATGELSAVRRMGWARFAAAVRRELQAGGTRWYSAIVRAVFDAATDPAQVTLGVPEQRAGGLERVAFALTDLAHARSQTAQVEARMIAVLDELGLTQLVTSIPGLSAVGAATILAETGDPNRFDSARAVVKHAGLCPRDNASGNYQGRTGISGRGRPQLRLAAWRAVFAALRHNPVLAARHAHLTGRTERPLSEAQARVAVAGSLLRQLHAVVTTGTRWNPEIAAGQTRQEVAAA

SEQ ID NO: 379435 - protein, 262 aa, unidentified
MFPVGIDVSKNTLDLCMLYDGIKGRLKTRNIQNNRHSVENILRWLRLQHCGPEDVHVVMEATGVYHERLATELHDAGFRVSLANPHRSREFARGMGIMTKTDKVDAYMLACYAFLKKPHRWEPPAPEIRYLGALLRRRDVLLGDALREENWLEKYLSTDTPADIISSCRRMAQLLREEVSNIERQIKAHIKACPALRRDYTLLTSIKSVGPQLGMHMLVVLRSHNFASAEQAAAFLGVVPIEKRSGTSVRSRPRMSKIGPLS

SEQ ID NO: 379436 - protein, 335 aa, unidentified
MVKENFIYVGIDLHKETHTAVMIDCYNQKLGEITFPNRPADFPKLVTKVKKCNTDAKEVVYGLENAYGYGRPLAVWLIDKGYFVKDVNTAISHRQAKHRGAMYRKSDSDDAEAIALATLNMLDKLPDACPNDAYWSLGQLVHRRDNIMKQRTRLVNQLHEQLCIAYPSYKQFFNDISRPTALYFWEHYPSRKYLKGKSVEDLRTELVPVSHNRCSTKNCEKILDAVASDKVKNNAYQDARDMVTLSIVSDLQHYDSQLAEVDKMLEQMYKMLGCTLTTIPDVNVITAVKILAEIGDIKRFANANKLAQFAGIAPLHLSSSGKGKDVATKQGNRRL

SEQ ID NO: 379437 - protein, 407 aa, unidentified
MLFIGDDWAEDHHDVEVQDEQGRVLRRARLPEGMAGITEFGELVGRFLSEDGQAADVLVCTETDRGPWVNALIAAGYRLFSVDPKQAHRHREILSSSGAKSDKGDAHGLADMVRTRRHQLREAGGDSEIAEAVKVVARAHQTMIWERTRHMLRLRAALREYFPAILAVCDMVDLSLTSRPVLVLLGKAPTPELAAKLTARQILPMLKGYRNKDAKAAQIQQILRGEHLGQPPVVTRAYAASVRSSVAVLKVIVEEITHLETEVKAHFGQHPDAEIILSQPGLGPILGARVLAEFGDAPGRYRSSKDRKNYAGTSPITRQSGKMRIVAARYIHNNRLVDALQGQASCAILHDPDVRGYYDQLRARGTKHNAALRQVANRLVGVLHGCLNTRTRYDRNTAWAHRHTAAA

SEQ ID NO: 379438 - protein, 328 aa, unidentified
MNIIGIDVSKSKLDCALIDNSTHRKLKFKVVFNSDEGFVTLIDWLAKHTKSSISAYHFIMEATGVYHEKCAYWLFDSGARVSVVNPARVKYYGQSLGVRSKNDKKDSVVLAHYGLTQTPMVWQPEALEIRILKALASRLDAIEKDILREKNRHEKSSINPSSQTILNSIETILFTLNKEKLHLEKLIHNHINQYEYLKNNNALLQTIPGVGPVLSRYMLIVLGGRTFQSASQCAAYLGLVPIQNESGSSLRGRSRISKAGSPVIRAKLYMATISALQHNPDIKIQNQRLLKNGKSKMSALCAAMRKLVQICFGVIKHQQPYHVQAKFL

SEQ ID NO: 379439 - protein, 392 aa, unidentified
MVVSVGIDVSKDKHDCFIVSSDGEVLADVFTIPNTLDGFTCLLQRIRECTTPQDKIKVGLEATGHYSYNLLGFLLDNGLATYVLNPLRTNLYRKSLSLRKTKTDRVDARTIAFMLLSDAGLKPYTDTAYHNEELKSLTRYRFDKVKERAKLKSSISRLVCILFPELEKLVPTLHIASAYALLEEFPGAKQIASAHLTRLKALLESASKGHYKRDMALEIRDAARNSIGSRMPAKSLELQHTIRLIRELDVEIAEIEEQIQSIMDELHSPITTIPGLGFRMAAMILAEVGDFTRFDSPDKLLAYAGMSPSTYQSGQLKNCYPHMEKRGSRYLRYALYNATKYVCHWDPTFAAYLAKKRNEGKHYNIALSHAAKKLVRLIFAMEKSRQPYCSAT

SEQ ID NO: 379440 - protein, 356 aa, unidentified
MNYVGIDYHKKYSYVTAIDEEGRVIRSKRLENKAEAFQDFFKRLEGPIETVLEASRTWGVMYDLLEELEEVESVELAHSQKVRAIAEAKIKTDKIDSHVLAQLLRADLIPAAYIPGKQTRSYKEMIRQRVFLVRMRTRLKNRIHVLLDRLHVPLPSVTDLFGKRGVDYLRKLNLLGVDGEILRENLQLLEVFNTLIKEAEREIELLLRENPLVKLLRTVPGLGPILAAVVVLEIDRIERFLSPSKLASYAGLVPSTYASGGRIFHGRLLPMSNKWLKWALVEAAWGSIRTSPYCRSYFENHKRHKGPHTAAIALARRLCEIIWHVLKENRVYEERPLQRQRRTSSMATSPAALTAT

SEQ ID NO: 379441 - protein, 344 aa, unidentified
MYYIGLDVHKKTISYCVKHGGGEVHQQGVIHATRDALDDWSRRLLQPWTGAMEATMFTGWIYDHLLPHAASLKVAHPLMLRAIAAAKRKNDRVDAAKIADLLRVNLLPECYMAPTAIRERRRTWRYRHLLVRQSVQMKNRMAGLLMETGVAYNKQKLHQKRYFAELVRESAELPPALKPLLNIGRETVDRAATTEKALLRALQQDPSLKARVERLTSIPGIGPVTALSWSLEIGEVSRFPSLKHAVSYCGLCSGENSSAGIQKRSPISKQRNPHLQTVLIEAAKLAPRWNPDLALLHDKEVARGNRNRATLAVARKLVAYLLAVDRREKPFQKGGRTQAPEIAA

SEQ ID NO: 379442 - protein, 356 aa, unidentified
MNSLKHQMEKRSMEHFAGLDVSVKETSICIVDDTGKIVREVKVASEPDALLQVLKTSAYRFKRIGLEAGPLSQWLYSAFAEANLPVICVETRHMRAVLKAQINKTDRNDARGIAQMMRAGLYRPVHVKTLRSQKLRMLLTHRKLLQSKAIAIENDLRGTLRNFGLKVGIVGKLKFETRIRELVENLPDLAVLVEPLLVVCRVLREQIAVLHRRLLVIVRDDDVCRRLMTVPGVGPVVALTFRATLDVPARFRNSRAVGAALGLTPGKYQSGESDHTGGISRCGDEMMRVMLYEAAQVMLVRSTRWSWLKAWAMQVARRRGMKKAIVALARRLAVIMHRIWVDGTEFSWSRQEAAEA

SEQ ID NO: 379443 - protein, 337 aa, unidentified
MSYLGVDLHTNSFTVCRRTKQGKSSIRTFQISRIADFRKTLRKRDLLAVEATGNTAWFVSQVRDRVKKATVVNPFQFEVIRRSVKKTDKNDSKTLALFLSKDMLPEARMKTKENAQLHSLAITRDKLVKQRTALINKIHNVLNSYGIKFKKESLGSEKGLRSVWAYEWDVIVRIELEILIEQIRSLNKSIKTLDKEMTDHGQKLKGHKSLTSIKGIAGRSATVLLTVIGDVNDFADENKLSAYFGIVPRVSDSNETVRHGRITKHGSKLGRTTLVQCTLVAKRYSPYLNRYYERIKSRRGSGKAIIATARKFLGIIYNTLKNEWVFEDFPSFVLASS

SEQ ID NO: 379444 - protein, 321 aa, unidentified
MSDAQAEVFVGIDVAKAKLDVGVHPSGESWTIEHDEVGITTVVERLVAAGPTLVILEATGGLELSLAAALIAAAVPVQVVNPRQARDFAKATGQLAKTDRLDALVLARFGAALRPEPRPLPDAALPEVRALVARRRQLQAMVIAEKNRRSGASKRLHAQLDEHLAWLRRAVADLDRDLATTIKGTSAWQTAVTRWRSVPGIGPVVSATLLADLPELGTLTRQQIAALVGVAPLNHDSGAHRGIRSCWGGRAHVRTALYMGALVASRCNPTINAFYHRLLTAGKPKKLALTAGMHKLLTILNAITRDGASWLDDVTAPAVAA

SEQ ID NO: 379445 - protein, 349 aa, unidentified
MIIIGVDFHPGFQQIAFVDSESGEFQEKRLAHREEAESFYRGLASAGEKIRVGMKSSGYARWFERLLSELQIELWIGDATEIERKRARKQKTDREDAQHILQLILKDDFPKIWVASWENRDLRQQLWHRHRLVQMRTRIMNQLQAVALNEGLSYKKRLWRGSGRQQLEGFQLGLWATRRRRDLLELPDRLNPTIAELSQAAEQEAEKCPEANRLMTHPGVGALTALAFVLILGNAERFECGKQVASYLGLVPLEKSSGKRRRLGHITKQGNSILRFLLVEAAQATVRKNPEWRSKYFHLALRRGRSIAKVAMARRLAIRLYWMWREKKEYQQTRSFVSHAGQPGNLYRA

SEQ ID NO: 379446 - protein, 344 aa, unidentified
MDKSSTVMMSGNEILKQRKLTIGMDPGDRATRYCVLDEAGEVILERSVPTTKKGVDQVFAAMPRSRVGLETGVHSPWVSRQLTQLGHEVIVAHARNVRLIGESSRKDDRLDARTLALLARIDPQLLSPVRHRSAEAQVHLAVIRARAALVGARTALVNAARGLAKSYGERLRKCGTQQVRRDLAAGLSVELRAALEPLLGEIESLSQRIAAYNRQIEQIAKEVYPRLHLLKQVKGVGTLIALTYVMTLDDPQRFRRSRDAGYFVGLRPGRRNSGSSEPQLHISKEGDSYLRTLMVQGAHYFWGRSEKTVICGDGDCGWPSAEERMPRNERSLRWHESWPCCFTS

SEQ ID NO: 379447 - protein, 419 aa, unidentified
MSQSTLTKKLASVKPGTLFVGIDLALDRNVAVVMDERAKRLDRFQFDNDLEGYDYFHRRLRKVKEKHQAPAVLVGMEPTNYFWKLLATDLETRQVSYRLVNPYTVKKHREGDQLDRSKDDPRDAFVIADLLRTGKYTETRLLQGQYAELRQYVTLRERLLRDIRRQKTLTNNIAGQLFPELCREFKDLTGQTALAMLSSHAAATEIQQLPLEVFINDVRSVFQGKRLMVAKLRRAYALANASVGLNDGVQAMQLALGQHIETLQHLQRQLEQTEEALTDLFLALPEAEYMLSMPGLGIVTAAIVLSEIGDPSHYSRANQLIKLAGTQPVPNASGRKSRSKTPMSHKGRPRLRTALFFATMRLVQDDETFARRYQHLQTRDKNPLCKMQALGALMNKLLRILWALMSKRTFYVRGFQHAV

SEQ ID NO: 379448 - protein, 353 aa, unidentified
MRIIGCDLHARQQSLAMLHVETGEIEERTLEHEGEAVREFYAGLPGPVRVGIEATGSMQWFLELMDELGVECVVGHPAKIRACEPRKQKHDRRDALLLMKLLAEDRFPAIWMPSVEQRDVRTLLLHRHQWVRIRVRLQNALQSIALSHAIRRGAGLWSHGGQQTLAELVLPPHAGARRSELLRLYQQLQREIEMLDKEVARTAEERPQARLLMTHPGVGPITGLATEVFLGDPARFTDGKAVASYVGMIPSEFSSGGKQRCGGLTKQGNPLLRMLWCEAVGHAVRKDAELNRFYRRKLAQKGLGKAKVAAARKLGIRLWIMLREQIDYEEFCRRGRQRGEAHAEMPGREHGPA

SEQ ID NO: 379449 - protein, 321 aa, unidentified
MSDTTGPGGATHVGIDVSKERLDVCFIPEGEHFVVANNEAGIQSLLDRLLEACPTLVVLEASGRYERPAAAAIASVEIAVAVVNPRQARDFAKATGRLAKTDKIDAEVLARLAAAVGPRPSVLPDEEAQALQAILTRRRQLLEMLVSENNRLKMAPKAVARRIRAHIKWLEKELQRTDKDLDEAVEENAAWKENEALLRSVPGVGPVLARTLLAELPELGTLDHRRLSALVGVAPFNRDSGTFKGKREVWGGRAPVKAALYMGALVAVRHNPILKEFYEKLLSAGKPKKVALVACMRKLLSILNAVMRDRAPWRPTHVFSP

SEQ ID NO: 379450 - protein, 346 aa, unidentified
MKKIFIGIDFSKEKFDATVIKAEGVEERAERKHEVFDNKVSGFRRLLKWVKSVVDEQDTSLWLFCGENTGGYSKALCNYLYGSGYDMWLENALSIKRSSALQRTKSDKADAGVIAEYAMRNYDQMRLYKPLEKNLERLREVFLYRHNLVKLKASMTTRKGEKKLTQEKSDISRFMAMSSKHLISEFNKKIEECDMRIQKIISEDEDLRRNFEIITSVPGVGTQNAVCLMVYTDNFRRFDYDSRKIACYYGVAPFGRQSGTSVNTPPRVSPFANKLIKALLTQAALASVNFCPQMAIYYHRLVEAGKKKPVAVNNIKNKLLHIITAMVRKGEKYNPDHDYYAALKAA

SEQ ID NO: 379451 - protein, 351 aa, unidentified
MWIIGVDYHPSVQQIAWVDTETGEIEEQRLKHSGGEAERFYRDLKEKGFSVRVGMEATGHARWFERLLRELGFELWVGDAARIRAKQVKKQKNDRQDAQHLLKLLLKDDFPRIWVPTPENRDRRQLLLHRHRLVQMRTRVMNQLQAVAMNEGIRRKRGLWTRQGRAELESLWLPTWTSRRRQELLELVDQLDPSIDQLSQAIEQEAEQQPEVQRLMTHPGVGPITALAFVLVLGTPQRFSCGKQVASYLGLVPSEDSSGNRRRLGHITKQGNTLLRHLLGQAAQSVANSDEEWRRQYAQLAMRRNRSIAKVAMARKLAVRLYWMWRQGYDYQQWASSVRTWGKLEIAHGVK

SEQ ID NO: 379452 - protein, 328 aa, unidentified
MGSCAAPSAKGDDKFITTDYLQQCQKFTRPKLIEFLATCPATTIAMEACGGSHFMARKLEELGHSPKLISPQFVRPFVKSNKNDFVDAEAICEAASRPSMRFVQPRTESQQAMRALHRVRESLVQDKVKTTNQMHAFLLEFGISVPRGAAVISRLSTILEDNSLPLYLSQLLLKLQQHYHYLVEQIKDLESQLKRKLDEDEVGQRLLSIPCVGTLTASTISTEIGDGKQYASSRDFAAATGLVPRQYSTGGRTTLLGISKRGNKKIRTLLVQCARVFIQKLEHQSGKLADWVRDLLCRKSNFVVTCALANKLARIAWALTARQQTYVA

SEQ ID NO: 379453 - protein, 454 aa, unidentified
MRKPQVIPDEDHEVVYERVAAVDVAKASGVVCMRTPDPARPGRFVNRIWDDVPATRARVAELGRELLQCQVQMVTLESTSDYWRVWYYVLEGIGLAVQLVSASQAKNLKGRPKTDRLDAMWLARLTQWGMLRPSLVPPAAIRRVRDFTRARTDLVRERTRVLQRLEKLLEDAMVKITSVASDGLKAKSVVAMVAALTAGERDPRTLADLAKGPLRGKKDQLAEALDGMFDSHHGVIAQMLLDQVAFLDQRIKQMEDQAIAALAQVQESWGVDATGETGPGCGTGPDSLVLAAAYRLAEIPGISVWLAIVIIAEITLDMTLFPTPAHLVSWIGLCRSANQSGARHGRGKQKKGNSYARAAAGQAALGAARTATFLGERYARIARRRGKAIAQVAVARSIMIIVWHLLNDPAARYHDLGPDWHARRTNRDKKIRTHIQGLQALGVTVAITDDEHAA

SEQ ID NO: 379454 - protein, 340 aa, unidentified
MDITTLGIDVSKNSFHVIGANRAGKPVFRQKFTRQKLTEFIANHPPCLIGMEACPGSQHFARKFEELGHQVRLMPAQFVKPYVKSNKNDFNDAAAIAEAVRRPTMRFVTTKTTEQHDLQAMHRVRERLVRTRTSIICQIRSFLLENGITVRTGRAALARALPAILEDPDQRLSERMRSLICRLRDQWRFIDEDINAVSKELEAIARSRDDCRRLLTIPGVGPLVATALVASVGNGRHFKRGRELAAWLGLVPREHSTGGKQRLLGISKRGSSYLRKLMIHGARSCYLNMNREPHRMGQWIDQLSQRGAHRNIVVVALANKLARICWAVMRDGSVYHCVKA

SEQ ID NO: 379455 - protein, 370 aa, unidentified
MKHTDKYIGLDVHKDTITVAIAEGVRLGEVRQYGKISNDLHALEKLLPKLGGENVRLHFVYEAGPTGFVIHRWLLKRGLDSIVVAPSKTPTEKGGRQKTDKRDAEQLARLHRAGELRAIHVPDELDEAIRDLTRGRSDAVDDLRRAKQRLKSFLLRHGYKYQGKADWSEAHRRYLRELVLPIASQKAVLEECLMAITDATNRLQRFNDLIAAQVPQWRMYPAVQALMCLRGFQLTAATILVAELGNVRRFEHPRHLMGYLGLVPKEDTTGDSRHLGAITKAGNCHARWILIEAVQSSFLPPKVSAQLSARQQGQPKLYHELAWKTQVRLFKRGRHLLSRGLMKQKIIVALARELCGFVWDLLRQVPEPKG

SEQ ID NO: 379456 - protein, 433 aa, unidentified
MTNRLQVGIDFSQKKADFCLLFPDGHPLDLHVSFANSCSGYSMAKQLLLDALDTYACDGIDISGEATGYFWLPFFLQLSADPDLTLRNMDLFLLNPRWVKWFKKCFAEDHKCDGKDPFYIAERTRTRRPDVAWSPPDCLPLRFYTRLRFHIVQNLAREKCYFSAFLFLKASSYRCLKPFSNVFGVTSRLVLTQQPTLDELAELPVEDLASHLYELSGHHLPDPLDNARKLQHVAQESFPLDASLVLPVQRILDLTLDHICFLETQLEQVDRWIATELEAYPVIAQLATIPGVGPVFSSGIGAEIGGVQRFLQGQKWDKKRKRYRPRNLRDAEDAVAKIAGLWWPRADSGDFEAQDRRMAKSGNRYLRYYVIQASNLMRLHIPEYAKFYARKHKEASKHHHKRALVLTARKSIGLVVGLLHRDEPYRSKGDRRT

SEQ ID NO: 379457 - protein, 367 aa, unidentified
MSQSSWLVAGMVPGVERQPLKKLKPDEDQLMKLMNRWRYEALRAGHAIERMVVAYEAGRDGFWLARWLRERGVEAYVIHPSSIAVSREHRRAKTDRLDTELLMRAFLGWLRGERRHCSMAAIPTIEEEDAKRPNREHEKLVGDRTRIVNRMKSTLSRFGIRGFKPTLRKADEKLGELRTGEGTLLPENTRAELRRDMTRLRVVREQLKEIEQQRLRKLEAAAPAKKGPHAMVHLIARVIGIGIETADMLVNEILSRHLRDSKAVARYAGLTGSPDESGKRRREKGLARAGNARVRRGMIQLAWRFLRFQKDSVLTQWFRARAADGRSGTRKTMIVALARKLLIALWRMATTGEIPEGVILRPLRPAA

SEQ ID NO: 379458 - protein, 346 aa, unidentified
MMIIGCDFHPSWQQVAWLDSETGETGEQKLLHAADEAKQFYAQLGVPALIGMEATGNSQWFIELVEDLGHEIWIGDAAAIRASYVRKQKTDKRDAAHILKLVVEGRFPRLWTPDREQRDLRQLVLHRHKLVIIRSRVKNELQHLSLNKGMQKKRRLWSQAGLQLLRELPLKPWAACRRQDLLGLLAMLEQQIGKLDQAVQQAADQHPQAKLLMTQPGVGPNTALAFVLTIGDVSRFARGKQVASYLGLIPREESSGGRQKLGAISKQGNRLLRSLLVEAAQIAVRCDPGLRKQYLHRCHQKPKGVAKVAAARKLAVRLYWMLRTQTGYPEIVRIESSPRVALVGAS

SEQ ID NO: 379459 - protein, 370 aa, unidentified
MPVPRTSQNPRADTASRDQTKLELTTREEETKMKLYAGIDLHANNSVVVVIDEDDRILYQKRVHNELGALLQALAPYQATLQGIVVESTYNWYWLVDGLMAAGYRVHLANTTAIEQYKGLKHTDDESDARWLAHLLRLGILPEGYIYPKEERAVRDLLRKRSQLVRQRTSNLLSIQNLLTRNTGSALSGNRIKQLTIAEVEELLPQAELALAVKSNLAVLQCLEEQIEQIEAVVLAQLKLRDGFQPLLTVSGIGQILGMTIMLETGEIGRFATVGDFASYCRCVSSQKLSNGKRKGQGNVKNGNKYLAWAFVEAANFAVRYNAQIKRFYQRKQAKTNGVVAIKTVAHKLARACYYILRDQVPFEVDKAFA

SEQ ID NO: 379460 - protein, 500 aa, unidentified
MEKADMKHNQQRKRTGKSERRASIPLFERIQPDAAGVDCGQKSHFVAVPPERDPEPVREFRTFTADLQRLAQWLAQCGVKTVAMESTGVYWIPLYEILEQHGFEVVLVNARDVHNVRGRKSDVKDCEWLQQLHSVGLLRASFRPAAAMVPLRSYLRQRAILVEELTARIQRMQKALTEMNLMLHIVVSDITGVTGLKIIHAILAGARDPERLAVHRDGRCHASHQELVAALTGNYREEHLFSLRQNFTAYQFHLQQIAECDTEIEALLNTLAAQQPPPSAALPAPRAKATKKHAPAFDIRTPLHVLTGGADLSQIHSIGPQAALQLIAEIGTDMSRWPTEHHFASWTTLAPNNKISGGRLLSSRTPPSANRAAAILRRCAMSLGRTSTALGAFYRRLAVRHRQSQGHHRHCPQARAAGLPRALRQTRPPRSRHRRLPTTQSHALVSSPWVNAPTCSASTWSIALPVRYYSILFLRRRAATTSRTDSRDGGEERLICPRLL

SEQ ID NO: 379461 - protein, 337 aa, unidentified
MTIITVGIDLAKNVFSVHGVDENGKVALQRSVRRNQLLELIATLRPCVIAMEACSGAHHWARQFAALGHTPKLIAPKFVTPYRMSGKRGKNDAADAAAICEAATRPKMRFVPIKTVDQQGTLCVHRVRQGFLEERTATINRVRGLLCEFGIVLPQNANTVRRQAAAALEDLPGWANRAIGDLLSHLHALDLRIAEYDAHVKLNAQSDERARRLMSTPGIGPTTASALVASIGNAHDFKNGRQLSAWLGLVPSQYSTGGKPRLGSITKAGDAYLRTLLILGARSVLANAPGKTDRISRWALGVQQRAGYGKALVAIAAKNARMAWAMLSKGETFRAMA

SEQ ID NO: 379462 - protein, 340 aa, unidentified
MKTLALDAHAASFTLEVMTPQGQVAKRVSREMSAANLIAVVEAETGPKALVVEESHLAQWVKRTLSPYVDKLLICDPQRNAWIARDQFNDDQSSAHKLALLHRGGFLKEIRHPDEKGAYLRGLFQHYYDLNQQLTRFKCKLKAAFRQEAIPTPGQKIYDEEEHEKWLKQLRRQKHLHHTARQSFAIIDLLEGLKEQTYKAMVQCASRQKVFELLQTLPGVGPVLATGYLAMIETPHRFSCKNKLWSYACLANRRLTSDEVVYAEHASRQGNRVLKWVVIEHYLHAVERPKHTNRFQRQYRELRSKGLDDTAARRQVCRALLSTVRAMWIKEEAYREDPLK

SEQ ID NO: 379463 - protein, 487 aa, unidentified
MARRKKSTFERLSSGPLNRKQRRDLGRRLASGDPGLTILHANAGGIDVGNESHFVAVPPDRDPNSVREFGCWTADLIRMAEWLKACRIDTVAMQATGVYWIALYDILTQRGIRVILVNAQSTKNVPGRKSDVQESQWLMKLHTYGLLRDSFRLAENMEGVRTIWRLRDRHVKDAGRAVQHMQKALTKMNIQLANVISDLSGVSGQAIIAAILKGQRDPYQLADLKHERVQASREEVARSLEGNWREDVLFELQQAVDRYQFAHQQMRECDRKLEGYLASLPTRMMDVPSPAAGQQAAAPKKAKKAKKAKKPKGNAPALDLKAELKRICGVDLTSIDGIDVMTAQTVLAEVGTDMSGFQTENHFASWLGLTPSKDISGGKVIGPGRRKVQNRVATALRMAASTLLNSKSYLGGRYRHLRTQLPSKAAAVKAMARYLAVLVYRMLTKGEAWVDRGAAKFEQKRTEWELASLKSKALAKGFQLTPIVAVS

SEQ ID NO: 379464 - protein, 356 aa, unidentified
MNNPNKYIGFDIGDKSTTACVIQDGQPERFKTFRSDVPSMQAFLQQQRQEDGGSIHLTFEVSGQAGYFYDHWVDRVDSLTVSNPSQMTWIYRTPKKNDRMDSRKQAVLLSVGEIPAVHRPSREGRQWRMAIQHRKRLVEQGVVIKNRIRTLLKSQGYTRPIKGCSGWTQANEQWMKEVADEGPLTRQTLWRLGLKDLLDGLELVDKQGAALKRYLDGYLAKQAGWPWLRSIPGVGPRTAEAVLAHTDEVKRFGRGKEYGAYFGLTPKLDESGDSRRIGHISKQGPSVVRGLLVESAWRAIRSSEALRKFYERVTAGHPARRKIAIVAVARKRAVIRRAVLLHGCMYDESLVGGGKE

SEQ ID NO: 379465 - protein, 349 aa, unidentified
MKKIFIGIDFSKEKFDATVIKAEDLSEMLSVGHQEFINKATGYRKMLRWVDSLCGADTCEDWLFCGENTGGYSQMMSDYLYSKGYDLWIENALSIKRAFAMKRGKSDRSDSLMIAEYAMRYQDKACLYEPLSPALSQLREVFLYRHMLVRHKCSFEVRRIEKRLTQQKSSAKTMISQSSRHILTELNHEIQKCNQRIQELVRSDEELSRIFGIITSMPGVGTLNAVCLMVFTNNFTKFDYNARKIACYYGVAPFSRDSGTSVHSAPKVGYLANKMIKSLLSQAALAAVNFCPAMSMYYHRLVDKGKKPMVALNNVKNKMLTIITAMVKNECKYQPEYISIIARSEMLNK

SEQ ID NO: 379466 - protein, 441 aa, unidentified
MKKTTAVKKSAQMNLPVMHPNAAGIDIGATEIFVAVPPDRDLQTIRSFPTFTQDLYRLGGWLKQCGINTVAMESTGVYWIPLFQILEEEGIEVFLVNAHHVRNAPGRKTDVADCQWLQFLHSVGLLRPSYRPAQDVCAVRTLLRHRASLVQTSSTFVQRMQKSMTQMNLQLHHVISDITGQSGLAIVDAILNGEREPNVLAQLCSKRIKASKEIITKSLVGDYRPEHLFTLRQSLQTYRQLQQLISECDTEIRSLINAFESSQHLQNNAPPTSPEITLTAELTRVFGVDLTKIPGLGVESVQTLLGEVGPDFTKFSSASAFACLLTLCPNNKVSGGKILSSKTRKTSSRVATTLRMAAQSLHHSKSALGNFYRRMRSRLGAPKAITATAHKIARIIFHIVTTGQDFDETRSGSDQRIYEKRQENKLRNKAKALGFQLVPLA

SEQ ID NO: 379467 - protein, 328 aa, unidentified
MAVNYYVGIDVSKAKLDVALLTPENKVRSKVFSNDVPGHVALLEWIAVHVPDGKSSAHACMESTGTYHENVATFLHDQGVRVSIVNPMLVKRFAESEGLRVKTDKVDARALARFAREKQPRAWEAPSKGVRMLHALVGRLDALMEMQQMEESRLAIAHEAVQASHRTVIEELSREIKVVRTLIRQTVDDDPDLKRRQQLLETIPGLGERTIPQLLAYIGRPERFKSAKALTAYAGLAPWLRESGTSLNKRKGTHPMGHVQLRRCLYFPAMVAGRYNPVIARFWKRLKAENKPGKVIVVACMHKLLAIVYGVLTSGQPFEDRRTAAAAA

SEQ ID NO: 379468 - protein, 404 aa, unidentified
MSENYAVYVGLDVGKSAHHACALAEDGSRLYDKPLVQDEAALKDVFVGLQQHGPVLMIVDQPNTIGALAIAVARDCGCQVAYLPGLAMRKAADLYPGRSKTDARDAFIIADTARTMPHTLRAVDRDSEVLSALKMLAGFDDDIARDCTRAKNRLRSVLTQIHPALERVFVGEILARAIVLDLLIHYGGPTKLAGAGRGRVLKWARNRSRKDPVDLIDRIFAALAEQTVTVPGTDAAELVIPQLAANIKALQKQRETIAGQVEGMLDEFPLAEVLISMPGIGIKTASNILLAVGDCSDFASASHLAAYAGIAPVTRRSGTSIKGEFPARSGNKRLKNAMFRSAWIASNCHEPSRRYYQRKRAEGKKHNAAVMCLARRRSNVIYAMLTNREFYREPASPPQMPAAA

SEQ ID NO: 379469 - protein, 342 aa, unidentified
MEYYVGLDVSLKQTSICVVDQAGLVVREGVVDSDPEAISVYVTSRAPNAVRIGLETGPTSTWLWTELKRLGLPVICIDARHAKAVLKMQINKSDRNDAIGIARIMQTGWFKEVHVKDIDSHSVRALLASRALLVKIKRDLENHVRGLLKNLGLVIGRAKFNVFAVRAEELIEGRPELVAAIRPLLEARNAVEQQVSELDRKVMKLARHDAQIRRFMTAPGVGPITALCFKATIDDPARFARSRSVGAYVGLTSRRHASGEVDWTGRISKCGDAMLRSYLFEAAGVLLTRVPKWSAVKAWGARLAKRNGLRKAKVAVARKLAVILHRMWIDGTEFNWSKEIAA

SEQ ID NO: 379470 - protein, 319 aa, unidentified
MDGSLAHYQTFIGIDVAKATLDVACLPEQAPLRFGNDSTGFGQLRKRLLLLDRCLIVVEATGGYERRLIADLIDHGFSVARVNPRQVRDYARGIGYLAKTDRLDAAVLARFAREIRPRPLAPTPEKQRELDELVNRRRQLLGLHTAESNRLETVIAQRARQSIQKILKVLQQQIDHMDKAIADLIESDDQWRHKNEILQGVPGIGPVTSTTLVGELPELGQVNRQEVSALVGLAPYNHDSGTHQGQRSIHGGRASVRSALYMAALTAKRHNPLIRRFAERLERAGKKFKVVITACMRKLLILLNQLIKTNTSWNPQIAR

SEQ ID NO: 379471 - protein, 385 aa, unidentified
MQKLNDLSRSPSPLDPDGTLIAVIELSLSSWLVAGIVPGVERQPLKKLAVDESALLKLLHRWREEAAKAGHRIKRIAVAFEAGRDGFWLARWLRARDIEAHVIHASSVAVSREHRRAKTDRLDTELLKRSFLGWLRGERDHCKMVAIPTTQDEDAKRPNREHESLVGEQSRIVNRMKAALIRLGIRGFNPKLKKAAERLDGLRTPEGEPIPPNTLAELRRDMVRRRLVIDQIRQIEDARLERLKQAPSDGPHAMVRLLARVIGVGVETADMLVQEVLSRSMRDRRAIARYAGLTGSPDESGRKRREKGLARSGNARVRRGMIQLAWRFLMFQKESTLAQWFRARTESARGTRKTMIVALARKLLIALWRLVREGVVPDGVVLRPA

SEQ ID NO: 379472 - protein, 385 aa, unidentified
MQAADHRPKQAAIRTDLGAIFVSLELSRSAWLTTSLSPGGSEKMSKHQVCGGDVAELLTRFAALQAKARARTGQLFPLIVIQEAGLDGFWLHRVLQSEGIESHVVDPASIATSRRRRRAKTDRIDGEALVRALLAYKRGEPRVCAMVKAPTPEEEDRRRICRERKTLTAERVEHVNRIKGLLFAQGISDYEPMHRHRRARLEELRTGDGRPLPRHLKAQLSRELDRLELLLQQIGAVEAERDALLASTGKTATPAALLDLKGVGPEFAAVLWSEGLYRHFDNRRQVAAYAGLAPTPWQSGTIDREQGVSKAGNPRLRATMIQLAWLWLRHQPASALSRWFHERVKVVGGRLKKPMIVALARKLLIAIWKYITAGIVIEGAVIKAA

SEQ ID NO: 379473 - protein, 359 aa, unidentified
MIADRTFVGLDVHARSVVACAIDAVTGEVSRARLTPQFEELWRWLQGFAGPVAVAYEAGPTGFGLARFLTDRGMRCVVAAPSKITRAPGDRVKTDARDALLLARLLKMSELTAVMVPSVEAESARDLVRAREDCRSDLMSARHRLSKLLLRQGIVWSGGQAWTGAHDAWLRRQQFTEPARQLAFESAYETVAMTLARRDRLDAAIAVMAADSAFTPVVVRLGCLRGISTLTAFGLAVEIGDWHRLTGSTIGSYLGLTPTEASSGASRSQGSITKTGNTHARRLLVEAAWHHRRQNRAGKVILDRWQQAPAAARLRGQEGNRRLHARWRRFDARGKRPVIANVAVARELAGWCWSLAVMD

SEQ ID NO: 379474 - protein, 350 aa, unidentified
MSANCAPTTIATIGIDLGKNTFHLVGLDTRGAIVLQLKLSRGQIERRLANLPCCLIGMEACSGAHHIGRRLTELGHDVRLIPAQYVKPFLKGHKNDYRDAEAIAEAVQRPTMRFVAIKTPEQMDLLALHRVRSRLVGQRTGVINQIRGFLIERGITVRQGVMPLRKALPDILSSNQDALSPRMVGLIADLAQDWRRLDERIAAVSAEIEALARQDDSCQRLMTLPGVGPIISSAVVAAIGNGSGFKQGRDFGAWLGLVPKQESTGDRTILGKISKRGNKYLRTLFVQAAHVILARRPGTAMRGLWPWIEQASKRLHRNMLAIALANKLARIAWAVLARGRAYEPRVPAHA

SEQ ID NO: 379475 - protein, 373 aa, unidentified
MENSITYVAMDTHKKEHKVALHYPGQEEILNLTVRNSSYEISKMVRKILKKAPGEVRFCYEAGVCGFDLKRKIESSGCKCAVIAPSLIPVKPGERIKTDRRDALKLLSMFMAGLLTEVHAPDSQQEAARELTRLHQTARENLMRIHHQLLKFLTRHGYIYTEGDNWTGKHLRWLRDLEFEEPLLREVFDSYFTEMQHCMERLASLAKQVDQLAESEPYKDIVGLLKCFHGIKTLTAISIITEVFDFGRFSKPRDLMSYLGLTPSESSSGEKQKKGPITKSGNKRVRRLLVEVSWHYRHPYCISKTLKKRRNNQPQWVIDIADRTGHRLRKRYWYLINRGKMPCKAMTAVARELAGFIWSVFREYQARNMEKVA

SEQ ID NO: 379476 - protein, 325 aa, unidentified
MIDQDGQVLANRNVPNGAEPILKVIGGLPLGTPAAFEACYGTSWLVELLEDYGFAPHLVHPSRCKAIASARLKNDKVDAAILGQLLRADLLPEAWIAPPPVRALRALLRHRVYLVRLRTRLRNRIHAIVADYGYDRPAGGYWTGPGRAWLASLQLPAVFRELVEDYLGLIDALQQRIDRLDWEIRQRARSDPRVTVLTQLPGVGPFTALVILAEVGDVSRFASARQLASWAGLTPTVRGSDRVAHYGHISKQGSVWLRWVLCEAAQTAKRHPEFAPAFQRIAKRRGKKIAATAVARKLAARAWHLLTDAGHAAAPQPAAPQTAAR

SEQ ID NO: 379477 - protein, 343 aa, unidentified
MANQTLVAVDLAKAVFEVAVSHHPGQVARQKRYSREQFPRVLAHLPPATIVMEACGSAHFWARHARGFGHTPVLLPPHAVRPYVRRNKTDRTDTKGMLEAFRNEEIHPVPVKSVAQQTLASLHRLRTGWLAERTARINTLRALLREFGIVIPLGARHVVPAASGQIDDAGSDLPAPLRPALAELCTEIRDLERRVKMIEQQLVVLATQTPAVARLMTIPGVGLLIATALVAFVGDVRRFPSARHFGSYLGLTPRENSSGLRRRLGAISKRGDVYLRTLLIHGARSVLHAARSKPPDRLRAWALARQGARGHNKAATALANKLARIVWAVWRHDRPFFSMPAAS

SEQ ID NO: 379478 - protein, 337 aa, unidentified
MEYFAGLDVSMAETRVCVMDRDGAVVFEAKVPSAPADIAAALAQAPACGRIVFETGRMAPVLYHGLSQLRLPIVCIESRQAYQALKSLATHKTDRNDARGLAHLARTGFFKPVHVKSLPAHAIRSLIIVRKKLVGQRVTLENQIRGLAVVFGVQLPRALSSAFIRRALQASDGIPGLSAATRGLAAARSAVLAAVVAIDADIRRMVRASDACRRLMSIPGVGQLTALAFTATIDDPERFRRSRDIGAYLGLVPRRYQSGEVDYTGGISKCGDRRVRTLLYEAANVMLTRYKGSLKLKDWAFAIAQRSTMRKARIALARRLAIIMHAMLRRGTEFQPA

SEQ ID NO: 379479 - protein, 351 aa, unidentified
MKTEQTAQPKLYIGIDIHKRSWKIHCATDLFSGKSFTMPPNPEVLKTYVETHFQDYDVSTAYEAGCCGYYAHRSFEGYGWRSLVVNPADIHRKGKERFTKTDKIDAQLIARELKDGRLESIYIPEVEREQLRSLFRRRNDLVKDFRRVKSYIKMQLLYFGVTVPEEFDNDHWSHAFRVWVDTVIFNHPTARETLDSRMRSFRFIDKELRDVSTKLRAYCRKHYKTDYYLLRSIPGIGGIVACGIICELGDLRRFNSIKHLAGYVGLAPGVHQSGDNQRHTGITMRAHRLMRSYFIEASWQAIRTDPVMQAYYRKHVGKNVKSVIVKVARKLLSRTLAVIKTETPYTIGVIE

SEQ ID NO: 379480 - protein, 384 aa, unidentified
MQKPNDLNQSRIVLKQDSTLIAVIEMSLSSWLVAGIVPGVERQPLKKLAVDESALLKLLNRWREEAEKAGRRIERIAVAFEAGRDGFWLARWLRARGIEAQVIHASSVAVSREHRRAKTDRLDTELLKRAFLGWLRGERDHCKMVAIPTTKDEDAKRPNRERQSLVGEHTRIVNRMKAALIRLGIRGFNPKLKKAAGRLENLRTPEGEPIPPNTLAELHRDMERRRLVSDQIRQIEEARLERMEQAPGDGPHAMVRLIARVIGVGIETADMLVHEVLSRKLRDRRAVARYAGLTGAPDESGSKRREKGLAKAGNARVRGGMIQLAWRFLLFQKDSALAHWYRTRTEGGRNRKTMIVALARKLLIALWRLVTTGEVPAGVVLRAA

SEQ ID NO: 379481 - protein, 428 aa, unidentified
MKYNTQNAKIASITEKTLIIGIDIGSETHFARAFDWRNYEYTKKAFEFSNSEEGFQSFKGWVEELMTKHGKTVVIPGMEPTGHYWFALGKFLQDNGMRPVHVNPHHVKKSKELDDNNPNKNDRKDPKTIAGLVNEGRFSYPYIPTGVYAEIRNLSNLRFQSQEELTRAKNRLARWFSIYFPEYKDVYRDVKAVSGRMVLQVAPLPEDIRKLGVEGVNRIWRDAKLRGAGMKRAKTLVTVAEHSVGSKESPEAARLELKMLLHDMDVYASRVEELLCLLDAKLNEIPYIDKLLEIKGIGKITVSGFIAEVGDIRRFDDPKQLQKLAGYAIVANESGKYKGESRISYRGRKRLRYVLFEAALSLVARNPEFRKIYEYYRTRENNPLKKMQSLVAVACKVIRVFYVMLTKGMDYDPEKMMRDIRRPELQAA

SEQ ID NO: 379482 - protein, 419 aa, unidentified
MKHQKEGTDLNIFCGIDWAEDHHDVAVVGADGHLLIKRRIADDAEGFAELLSMLESVGDTCNDPIPVAIETSRGLLVAALRATGRPVFAINPMAVARYRERYSMARKKSDHVDAMTLANILRTDAHMHRRLPADSDLARSIAVLARAVQDAAWRRTRATQELRALLREYYPTFLDAFAGTVHTNLATPEARAVLAIAPTPEQGAKLTKPRIIAALRRAGRQRMLDQTATRIQHALRRPQLHQPVIVEQAMGRQAIALLATLNTECTNANELIGASAEAFRQHPDYQIITSFPGLGESTGARVLAEIGDDPGRFSDARGLKAFAGSAPITRASGRSTSITHRRVKNNRLAAVGFVWAFAAIPRPGPAKDHYERRRASGDRHAAALRHLYNRFLGQLWHCLQTRQTYDETKAWNSVMPTAA

SEQ ID NO: 379483 - protein, 320 aa, unidentified
MDQHATVVPVFVGIDVAKDRLDVHLLPAGEAFAVTRDHAGLEGLAARLGQAAPALVVLEATGGFEITGAAALSGAKLPLAIVNPRQIRDFARALGRLAKTDALDAQTIALFAERIRPEPRPLADAQAQRLAELVARRRQIVEMIGAESNRRRQARVPELQRELDTHLLWLQQALARIERDLDDTIRGSPVWRATEDLLASVPGVGAVTARTLIAELPELGRLDRRRIAALVGVAPINRDSGTFRGRRMVAGGRSSVRKVLFMATLTAIRFNPPVRALYQRLTQAGRPAKLALTACMRKLLVILNAMIRDGRRWADSGLSM

SEQ ID NO: 379484 - protein, 320 aa, unidentified
MNTIGLDISQKTIDATLHKTDGSTYHTKVGNNREGLQSLKDWIKANKVRKCVIGMEATGIYYEDAAENLSETHTVYVINPLKIKDYGKSQFNRTKTDKADSNLIAEYTKRHADKIIPYSKPKNRYLQKLINLKQQLKDHQKQTKNRLHSSDDEMIQAIHQDLIQTYQEKIDQTQAAIEAQIKEKAEIDGHYRNLQTIVGIGKDTAAILYAQLTDKTFQTANQFVSYAGLSPQTEQSGTSVHKKGRLSRYGHRRVKRSLYMPALVAYRTGAFPQLVRNLTNAGKPKMVIIVAIMRKLAKLAYYIVKTGKPYDSTRHRAAQA

SEQ ID NO: 379485 - protein, 430 aa, unidentified
MGLIDLASTSPARDEQAISYHWYVGIDWGSQQHQVCVLDRDRHVVGERVVDHTGSSLAQLATWLWALSVGQPQRVAVAIEVPRGAIVEGLIERGFHVFAIHPKQLDRFRDRHSVAGAKDDRRDAFVLADSLRTDRPSFRRLHLDEPQLLLLRELSRAEEALLEEFRRSANRLRDQLHRLYPQMLHLCSGADEAWLWDLLDLAPTPAHAALLSQEQIQRVLKAHRLRRVKATEVLTCLQAPALPVAPGAAEAAQVHGAFLLPCLRVLAEQLRSCAQQGEALLKTLAEEPDETGGLSDVAIVQSLPGVGRKITAWLFAEAAQPLTERDDQVLRTQGGVAPVTKQSGKRRQVVMRRGCNPRLRHALYHMARVATQRDAYFGGVYEALRAKGQRHGQALRNIGDRLRRILIAMLQDRTCYDATRSRREPVVQMG

SEQ ID NO: 379486 - protein, 388 aa, unidentified
MIYVGIDIAKLNHFASAISSDGEILIEPFKFCNDSDGFHLLLSKLESFDKSSLIIGLESTAHYGDNLVRHLVAENYKVCVLNPIKTSSMRKNNIRKTKTDKVDTYIICKTLKMQDSLRFVSYYDLDLMDLKSLGRFRQKTIRQRSRLKIQLTAYVDEVFPELQYFFKSGLHQKSVYALLKEAPTPQAVASMHMTHLAHLLKITSHGHFGKEKAQQLRVLAQKSVGASDSALSIQITHTIAQIELLNDQLDKVETEMTEIMKYNDSVIMTIPGIGYINGGMILGEISDIHRFSSHNKLLAYAGLDPSVYQSGNFQAKKTRMSKRGSKVLRYALVNAAHNVVKNNATFKAYYDARMAEGRTHYNALGHCAGKLVRVIWKMLTDDVEFNLD

SEQ ID NO: 379487 - protein, 421 aa, unidentified
MGKLIERCAGIDIGKRFLVCCVMTGAAHEDPRSETRRFDTTVPGLERLRNWLKDEHVTDVVMESTGSYWIPVFNLLEGHVRVVLANPEEVKNRKGHKTDRKDAEHLADLLRHNHIRPSYIPAEPVRQLRDLTRRRVQLTQDATRERNRVQKLLEQVNVKIGSVLTDVFGVSGLQMLLALLEGRTVPEEIAGLARGSAKRKIPQLIEAIEGNRMSDHVRFLIRGCLRHLACLEEEVEELDTEILRRMQLSTFQKAFTLLQTIPGVGQLSAATILAETGPDLDSFPTIEQMASWAGLCPGNRESAGIQKGPQTTHGNPYLCTALVQCAWAATRKRDSVFRSRFQRLAPRRGEKRAIIAVAHHMLITLYCMLKRGVPFLGAEHAPKQRRRERRAHHHLRCLRRLGFSVDIKLSSESTPPDTISR

SEQ ID NO: 379488 - protein, 361 aa, unidentified
MKYYTPMKYYTSTTQFNCGIDLHAHQMYVCLMDRTGRKLVHTNIRNNDFAYFLKLIAPYRHDLTVCAECMFGWYWLADACQDAGLQFVLAHALYLKAIHGGKNKNDRIDSEKIAHLLRTNLIPPAYVYPAQKRPLRALLRQRILYVWRRSELLARIQSHQLAYNRPLIRQTRPNRDPWEEKLLAQEDNPIRQLALQNDLALIRHYDTQITALEEQLQKLTKAAAWRDYSLLQTVPGIGEHLGLTLLYEIGDIARFPTVKDFVSYCRLVKGTVASAGKIKGLRGAKLGNAYLRWAFGEAAVIAKRDHATIGPLAQRLEAKMGGNKFKANTVLAIKLARAVYFMLRSHTVFDPERLVAALTHK

SEQ ID NO: 379489 - protein, 332 aa, unidentified
MYLGIDVHKRYAQVAVMAEDGKIVEEVRVENANLDDLAQQYAGAQAAIEATSNYYHIHDALSEHLDVTVAHPKELNQIADTDKKTDRVDAKELARMVRLNSVPESYVPTDEISEARARVRGRQSLVEHRTEYANKVHGLLSDHGINEDVKPLTQEGREFLRELSLPTPWDSVLASYLEVIETLTDEIQNLEETIEERAGSLEETQLLMTIPGVSYYTALTIYAELGEIGRFDGDKEVVSYVGLNPVIRESGDSRIEGELSKRGSGRVRWLLVQAAHTAVHTCNDGYLGRFYERLASRKNSQKAIVATARKMLVSIYHMLDRGEVYDPPGVSA

SEQ ID NO: 379490 - protein, 331 aa, unidentified
MSVWVGIDVAARTAEVVWRSQGKNSKPISFEQTPAGHRQLIRQLQQLKPVRIVLEATGVYYLDLAIALTEAELPVSVINPKSARRFAELKLERTKTDGVDAGLLAEYGERMTPPRWSAPDTTHLALRDLGRQINRLNGARVQAKNRLHALQSKRSTLKVLIDDEREGIERLDERIRKLQDAALALIAKSAPLTAQMRCLTAARGVGDVTAISVLAEFCVLPPHLKAPQVSRHAGLDVRLHDSGSSVKRPGRLSKAGNAYLRAALYMPAMSAIQHDRHAKAFYTALLARGKKKMQALCAVMRKYLTGLWFCFIHQVPFDSAKLFDDRHLAKA

SEQ ID NO: 379491 - protein, 346 aa, unidentified
MTIVETRAITGGVDTHADVHVAAALDPVGGLLGVREFPATAAGYGRLMSWLGGFGTVALVGIEGTGSYGAGLARHVTTAGVRVVEVDRSDRQDRRRQGKSGSFDAVSAARAAQSGRARGASKGRDGAVEAIRALMVAKRSAAGERTQTINQARALILTGPEDLRARFTGHTAAALVAELASLRPRPGSTVGYATRIALRELGRRAEFPGGQLERLDELIGPLVAARAPGLLALYGIGTHTAALLLIAAGDHPERLRSEAAWAHLCGAAPIPASSGKTVRRRLNPGGDRQANHALWRIVFTRLGNDPATRAYAERRTAEGKSKKEIIRCLKRYVAREVYPHLRATAG

SEQ ID NO: 379492 - protein, 381 aa, unidentified
MEVVYECCCGLDVHAKRVVACLITKGHKEIRTFATMTDELLQLGDWLSGVGCTHVAIESTGIYWKPVFNILEGLLTVILVNARHIKAVPGRKTDVRDCEWLADLLRHGLLKASFIPPPEIRELRELVRYRHTVVTEHTAVANRITKLIESANIKLGQVASEVLGRSGRLMLRALAAGETNAETLAEFAQGKLKNKKAALRRALTGSLTPVQRWVLTALLTRAEELEAARGRVETRINEEVATCTDPFVPEAVELLESIPGIGQRTAQTIVAEIGVDMSPFPSANHLASWAGVCPGNHESAGKRKSGHPTKGNKSVRTILTEAAWTATRAKETVLHAKYHRLAKRMSKQKALGGYCAPLVSDLLSSAETSGAVCRTGHSSAG

SEQ ID NO: 379493 - protein, 341 aa, unidentified
MNVSKEVVGVDIAKRVFQLHWVDQETGEIVSLQLKRERFLEHFANRAPCLVGMEACGGAQHWARKLTVLGHQVKLLPGKAVKPFVTGNKNDRQDARAIWTATQQPHVKRVAVKTEEQQAILALHRMRSGLVKFRTAQINALRGLLIEYGEVMPQGKAALRRGIAAALARLEDRLPAIVIDTLREQWARIDKLDEEIAAIEQRLKLWLKEDESCRRIAQIPGVGPLTATAAVAIMGEARAFKSGREFAAFAGLVPRQTGTGGRVKLLGISKRGDTYLRTLLIHGARSVLTHAKDPGPWMTELRRRRPLNVAVVALANKMARTIWAMLAHERPYQRGFVSQPA

SEQ ID NO: 379494 - protein, 331 aa, unidentified
MNYSHFVGLDVGKKTFDASLMSADEKELSHKSFNNTPEGVQSLLNWIAGYHLSLSKLLFCAENMGSYVTELSVSSVSMGFSLTLVCPLTIKKSIGLQRGKNDRIDAKKIANYAALHYRKLELYKLPDEDLVRLRGWIIVRDNLVKQKVSSIKLLETFSHMVKLADVTESIAFLEEQLKSIKEKILKVEEAMEQLIAASSSLYTNYLLLRSIKGIGIINAIVLLCVTENFQRFDNPRKFACYCGVAPFEHTSGISIRGRTQTSTLANKEVKVYLTRAAITAISWDPQMKAYYKRKIAEGKHKASVINAVRAKIIARSFAVIRRQTPFVTLVA

SEQ ID NO: 379495 - protein, 355 aa, unidentified
MNAIKYIGMDVHVATISIAVLDANGKLIMEVTIATQAGALLDFIRGLSGTLNVTFEEGTSAHWLYTLLEPQVAKVVVCDPRQNPRRLGEKKSDRLDARKLAEWLRLGTLKPVYHGNSLGPALKELARSYRTLVSDTARVMNRLKALYRARGIGCAGTRVYSPRFRDQWLEQLREPGARARAERLYRQLDLLLPLRQEARAAMVAESRKHPAHKILCSIPALGPVRVALLLALLQTPYRFRGKRQLWTYAGLALVTRTSADYQMVDGQVTRARKPALVLGLNANHNHTLKGLFKDAAASTLAHPGPFKDFYTTRVAQGMKPELARLTLARKIAAIVLTLWKKGECFNVEHVKAQAA

SEQ ID NO: 379496 - protein, 345 aa, unidentified
MKEYAGIDVSLEYSSVCVVDADGRIVREVKILSEPDALIAWFGEHGVAMERIGLEAGPLSQWLHAGMVKAGLCVELIETRHVRAAFKTMPVKTDKKDARGIAQLMRLGWFRPVHCKSLAAQEVRALLTARKLIQGKRHDIEMSIRGILRGFGLKVGPTTRRTYAGRIRELIAGHSTLEAIATALLKVRDALVHEFAGFERKLRAIARQDDNAQRLMTTPGVGVLVALTFVAAVDAPERFRSSRAVGPHFGLTPKKYQSGETDQSGRISKIGDGSVRTALYEAANVILTRPVKGSDLKGWALAVARRAGPRKARVALARKLGVVLHCMLRDRTNFIAHKVAPALAA

SEQ ID NO: 379497 - protein, 365 aa, unidentified
MYYCGIDLATRASYLYVSDPRGKKVIAGPVKTEPAALKKALRRFRGHGLSVAVEAGNQTTWVYDFLCELGAEVTVVNPTKVRAIAESRKKTDKIDAKILCDLLRLQALPPPVHMPSTGARELRSLLMARRRLVELRVRIYNTARGMLRQEGQLLRSRALASRRTWKGILAGSYRNASIPEVLKELHGVLSELSASIKSIEKKLIEHAANDDRVRLLRTIPGVGVISALTFIACVDEIERFSSSRKLISYAGLAPIVRQSGERAQYGPINREGRRELRWAWGQVAQRVAWYPDPQAKPLQLWFLRIARRRGKKTAIVALTRKLLTIAYHVLKYNEEYDPSRVFRAGLANKGFKAERVRRPEKRSSR

SEQ ID NO: 379498 - protein, 425 aa, unidentified
MKSTQNEKITQIKIETLVVGIDIGKETHYARAFDYRGIELAKLLKFSNTAEGFEHLDRWMHEVCKQQAKTEIIAGLEPTGHYWFVLGDHLKRQGHKLAIVNPFHVKRTKELDDNSPAKNDHKDPKTIAMLVKDGRYREVYIPDDLYQELREAVSERERLQERLTAVHNRVVRWLDIRFPEFESVFKDWRRNAAIITLRSFPTPEKIVETGAIKIVETWRKQMKRTGFKRAEALVKAASKSVGRTSGKVASEASLQNLLAEYDLYREQYEILEQLMLELLMQVPNAEKLLAIKGIGLITAATFVGEVGDISRFQDPRQIQKLAGFNLVENSSGKHKGKTSISRRGRRRLRHGLFFAMIAILGKNSEFKLLHQRNLTREKNPLNKMQSIIALCGKLIRIFFALLSKGADYSPEKMLSDIQLPMKEAA

SEQ ID NO: 379499 - protein, 491 aa, unidentified
MAARKNAKAKADSAGDGVQAHGGEAAEVSDEVTQVVEFAAGIDVAKGFGMVCTRVPGSRAGRRRQKVWRVNATFSEVTALMDHLVCEGIQRLVLESTSDYWRIWYYLAEAAGLEVWLVNARDVKHLPGRAKSDRADCVWLCKLNERGMLRRSFVPPRAVRDLRMLTRTRSRLAQDQARHQARVEKILEDALLKVSSVISDLFGVSGRLFLGALVAGERSPAALAALGDYRLKASKAMLEETLTGQFRDIHAEEIAVHLRLIDAINAEITGLDAKIEQLLPQVPRTAPACTACGLAGGGHAPDCTDLGVLVLGLADRLDEITGIGAVNARVLIAELGTDPSQFATPGHAAAWAKLTSRMMQSGESSWNGRAGKGNRYLRGALGQAVMSAAKTDTRLGAMYRRIARKRGKQKAIVAVGRVICEIAWILICDPGARYIELGPDYYRPRNARQRTRSSIRQIEKDNPGKKVILIDDPPPPLPPGQRNGRRDAGSP

SEQ ID NO: 379500 - protein, 361 aa, unidentified
MIVIGTDTHKASHTAAGVNAATGEVLADRTVRAKRRSFEDLLRWARRLGGERVWALEDCRHVSGALERFLIARGERVVRVAPKLTAGARDSARERGKSDAIDAVAIARAAIRHGLETLPLAQLAGIELDIRLLVDHRERLVGTRTRLINDLRWQLHDLWPELEIPTGGLIAVHWPERLASRLTRAEQTTRVQIARDELRRIRELTRTINALEAQLAPLVAQAAPHLLAERGCGVLVAGKLIGEIAGIHRFATDSKLARIAGSAPIPASSGSTIRYRLDRGGNRQINAALHRLALCKGLHDPDTAAYLARKQAEGKTHREAMRCLKRHLARRVWHLLQDAPSSPQHATTIHCNTPYNRFHLT

SEQ ID NO: 379501 - protein, 364 aa, unidentified
MTAAQAGRQAASSAVEVVGGVDTHKDTHTAAAVDTAGRVLGSAQFPTDAAGYRALLRWLRGFGTLLLVGVEGTGVYGAGLARLLAAQGVAMVEVDRPDRKARRWQGKSDPVDAEAAARAALARVRTGVPKQRDGRVEALRALRVARRSAVGQRADVQRQIKALIVTAPESLRAQLRTLPDRELIEVCADLRPDRADAGDPGTATKIALRSLARRHRALSVEIADLDELLGPLVAQINPGLLALKGVGPEVAGQLLVTAGENADRLTNEAAFAMLCGVAPLPASSGKTTRHRLNRGGDRAANSALWRIVITRMGTDQRTKNYVARRTTEGLAKPEIIRCLKRYVAREVFLALTPASAEKRPANAA

SEQ ID NO: 379502 - protein, 339 aa, unidentified
MKPKLYCGIDLHSNNHYVSIINQDDKRLIEKRLGNDLSKTLLFLEPYKNNLQGIAVESTFNWYWLVDGLVDAGYSVSLVNTCAVKQYEGLKHTDDRYDAYWLAHLMRLGILPTGYIYPKEQRGLRDLLRKRMQLVQCRTSHVISAQAQYWRSMGLRLRSQDIKKCPGDLLSKITDHNLFLSIQSNLNVIQLLNTQIKTIEDTVITQCQNMPAYKQLKTVFGVGEILSQTITLETGDIHRFNKVGNYTSYCRCVDSQKTSNGKKKGSGNKKSGNKYLAWAFMEAANFAIRFYEPANRFYQRKSEKSNVIVARKALAHKLARASYYVMRDNVPFRPDQLFS

SEQ ID NO: 379503 - protein, 312 aa, unidentified
MEGMVVGIDVSKDRLDVAVRPTGEGLVFKRTAAGILDLVAWLKTLSPVLVAIEATGGFETVVAAGLASACLPVVVVNPAQVRAFAMALGKRAKTDPIDAAVIAHFAEATKPQLRQLPDAMTRRLADLVARRRQIVEMIAAEGQRARRISDHRLSRSIARLRKALEKELAELDRLISDHIRGSTVWVEKEKLLASVPGVGKTIARTLIAELPELGSLDRRRIAALVGLAPWTRRSGQWRGKSFIGGGRKSVRSSLFIGAMVAARYNPQLKQFRDKFVAAGKPKVLALVAVARKLITILNAILRDRRPWQTLPA

SEQ ID NO: 379504 - protein, 421 aa, unidentified
MGKIIERCAGIDIGKRFLLCCVLTGAAHEEPPSETRRFDTTVPGLERLRNWLNDERVTDVVMESTGSYWIPVFNLLEGRVTIVLANPEEVKNRKGHKTDRKDAEHLADLLRHNHVRSSYIPAEPVRQLRDLTRRRVQLTQDATRERNRVQKLLEQVNVKIGSVLTDVFGVSGLHMLLALLEGRAVTSEIAGLARGSAKRKIPQLIEAIEGNRMCDHVRFLIRGCLRHLACLEEEAEELDAEILRRMQSPTFQKAFTLLQTIPGVGQLSAATILAETGPDLDSFPTVEQMASWAGLCPGNRESAGVQKGPQTTHGNPYLCTALVQCAWAATRKRDSVFWSRFQRLAPRRGEKRAIVAVAHLMLIILYCMLKERVPFRGAENAPKQRRRERRAHHHLRCLRRLGLSVEIRLTPESTPPDTITQ

SEQ ID NO: 379505 - protein, 374 aa, unidentified
MKRILKIGLDVHSTNYTICAIEPIIGEEDRVLASMQVAPEYKNIIMFIEGLKIKLGSRDQYDIVCGYEAGCLGYSLYNELTSAGVKCVILAPTTMLTPQGKRIKTDRRDAMIIAQCLAYGGYHAVYIPTEEDDSVKEYLRMRDDHKIALKKVKQQINAFCLRHGAIFPGDKWSTKHLSWLRKMELKPLYREVLNEYLATYDEFSTKIERLDQRIEELATQSRYQEKVKRLGCFLGIKTHTALSLIVETGDFSRFSKGDTYAAYLGLAPGEHSSGPKTNRTGISKAGNSHLRTLLVESARGICKGAIGYKSKDLRKRQSGNSGDVIAYADKANIRLRSKYYRYIRHGKKKNVAVAAVARELACFVWGMMTDHIEV

SEQ ID NO: 379506 - protein, 343 aa, unidentified
MNATRIGLDLAKQVFQVHGVDRQERVVLRRQLKRSQVLSFFEKLPACKIGMEACAGAHYWGRQFEQMGHEVKLIAPQFVKPYVKSQKNDANDAEGICEAVGRPNMRFVAIKTVVQQDMQAIHRIRSELVKSRTAKVNQIRGLLAEYGTVVPARIEQIRRALPIILEDPANGLTALFRRLLEGLRQDLVELDRRVEELDHEIAVIARQDPLAQRLQTVPGIGPVSATALLASIGDGRQFKRARDLPAWLGLTPGQHSSGGKDHLLGISKRGDSYLRTLLIHGARAVLRAVGNKTDPRSRWLAGVAARRHKNVAAVALANKNARIVWALLTRGESYDSQRGMKTA

SEQ ID NO: 379507 - protein, 433 aa, unidentified
MQEAEDEPLFADRAAGIDIAKAGIEVTIRVPSDTRRGGRQQETRSFRTTRKELLALADWLRCWQVTKVGMESTGDYWKPVYFLLEAEGLDCVLYHAAQVKALPGRPKTDKLDSVWLAKITERGSLPGSFVPPEEIRRLRTRTRYRRHLTQARTAEKQRVEKLLEDAHLKLSSVISDIHGVSGRAMLEAIAAGERNPKTLAQLARGTMRGKITRLEDALDCAFVTGEHAAVLAMMLGTIDYYTARIDELTAKIKILCQPYEHQIAQLDAVPGTGVITAQDIIAEIGTDMTVFPTAAHLVSWAKWCPQAAQSGGKRKGANATGRGNRYLSGALGEAAVSAGRTQSFPGAKYRRLVKRMPKKKALVATGNSLLTTYHALLSDPEATYTDLGTDYYERRANIRRQARNHLRGLERLGYKVTIEPIDPATGELQAPAS

SEQ ID NO: 379508 - protein, 377 aa, unidentified
MARKRINKTKKVTLPVMNPDAAGIDIGATEIYVAIPPDRDAEPVRMFATFTRDLNALADWLQQREIRTVAMESTGVYWIPLMQILEARGLEVYLVNAKHVRHVPGRKTDVSDCQWLQYLHSVGLLRPSFRPAQDICAVRSLWRHREALVELATCHVQHMQKALNQMNLQIHHVISDITGLTGLAIIGAILNGERDTQKLALLRDPRIRASHETIAKSLEGDYQQEHLFTLRQSVEMYQQYRKRILECEAEIQCLMEKLEGQADPLSLPPAKDSVKKCKVMKPAKALTLRSEGYRILGVDLTTIPGISVLHVQTILAELGPDHSKFRNAAAFSSWMGLCPDNDISGGRVLWSGTRKVKNRIALALRMRRNRSSKANLL

SEQ ID NO: 379509 - protein, 352 aa, unidentified
MKITTIGLDLAKNAFQVHGVDERGKAVLKKQLKRAQVLPFFADLEPCLVGMEACGGAHYWARKLAELGHTVKLVAPQFVKPYVKSNKHDAADAEAICEAVARPNMRFVPVKTVEQQAILALHRARQGFVKARTAQANQIRGLVAEFGIILPQGIHSVAQRIPDLLEDAENGLPHMMRQLIERLSVNLKALSRQADECEARIQAWHRENEASRRLAAIPGIGPITASALLASVGDAKCFVNGRQLAAWLGLVPRQSSTGGKQKLLGISKRGDTYLRTLLVHGARSVIRVAERKADKHQNWLHRVMGRRHKNIAAVALANKNARTVWALLAYERRYQLNYRAAMTREETTGSIK

SEQ ID NO: 379510 - protein, 391 aa, unidentified
MYFVGIDCSKYKHDCFIATEAGEVIRDTFTFDNSGTGFSQFFSILEVLSCPKSQIKVGFESTSHYMVPLMKHLSVKGYEFILLNPVIVSRFRRSTTLRRIKTDKIDAKTIAQVLASQDFESYHMQVYHFPELKSLTRLRDRLVKQRSYYLVMLTNVLDEVFPEFKEFFNDSLKSKTAFYLLDTYKIPTRMANMNASSFDNLKKVSYGKFSYAKFIKLKELAKNTIGSSSDADELEISSLLSIYKSINDEICRVESKIEEIMNIIDSPTVSIPGVGLMSAASIIAEFGDLSRFANADKMLAYAGLDCGRSQSGIADYKGKMVKHGSGYLRQALMNVVETMMIHAPVFYDFYHKKRDEGKSHRVALSHLARKLVRLIYKLETSHSRFDLNNSK

SEQ ID NO: 379511 - protein, 413 aa, unidentified
MEVLHHRCAGLDISKRDAKVCVRVPGARHNTFTKLVTVSGSMTRNIMELRDYLVAEKVTLVVMEATGDYWKPFYYLLDPVLNVMLVNARHARNLPGRKTDVSDAQWLAELGAHGLVRASFVPPEHIRQLRDLTRSRTIFVAEKSREIQRIEKLLEDANIKISSVATRTLGVSGRAMLEALIAGERDPAALADLARGRLKNKAGQLTLALDGRFNDHHSFAVKMHLDHIDSLDRRISGLSDRIDSVMAPLAWCVDLLTTVPGISKTVAEIVIAETGADMAQFPTAAHLASWAGVCPGHNESAGKVKSSHARPGNTHLKGALGIASMAAVRTNGTFWQSRYKRLTSRRGPMRALVAIEHSMIVAIWHMLTNGTIFEDLGPDHFQRTHRKTTERHAVSQLHQLGYDVQLTPSAQAS

SEQ ID NO: 379512 - protein, 358 aa, unidentified
MRFYTGQHRFYAGIDLHARTMHVCILDHEGTVAFDRNLPCDFPTLLKALTPYRDGIVLGVECMFGWYWLADRCAEHGIPFVVGHALYMRLIHGAKAKNDKIDAHKIARLLKGGNFPLSYTYPQGMRETRDLLRRRMYLVHKRAELITHLEILNAQNNLPPFGKKLAYAANRAELDIPRRFTDPSVQLSAALDLELIDKLDGLIAQAELYLTRTAKVDDVQTYHRLRTIPGVGPILALVLLYEMHRAERFEYAGQFLSYARLAPCDHESAGKKLGSGGKKIGNAHLRWAFGEVACLFLRGSERARQWKQKQEHKHGSAKALAILAARLARAVYHMLRKQEAFDEDRFWGGVAAAEPSGV

SEQ ID NO: 379513 - protein, 310 aa, unidentified
MEITVGIDVSKARLDVHVHPSGDSFAVSNEEAGVAALAERLGRLEGLACIGLEASGRYERLAVAELATAGLPVVVLNPAQVRAYAQAIGQRTKTDPIDARVIALFVEAVRPQPRPLPDVQDQELGALMARRRQVVSMLGAERLRRQQAPKGRVRVSIARIVTALEDDLKALDGDIDKTVRGTPVWRDKEDLLASVPGIGKTIARTLLAELPELGQLNPKQIAALAGLAPYTRQSGRWRGKSFIGGGRPAVRTALFMGALVAARHNPTLKAFRDRLVANGKPKLVAIIATARKLLTILNAILRDQKPWRPA

SEQ ID NO: 379514 - protein, 370 aa, unidentified
MLNTTTFVGLDVHARSIKAVALDAMTGEVRSATFGYDAAEVAGWVSSVDPSAKCVYESGVTGFDLQKRLASMGIDCVVGAVSKMIKPPADRKRKNDRNDAEFLARMLSVGNVVEVWVPDDECEAARDLSRALDDAREDLKRCKQRLSKFLLRHGYAFSETTPTGRRKGNWTAAHWAWIKSISFPEKADDDVLAYYVDAVRQAMEDKARLERLVEAEASKPRWKKRVDSVRCLKGIDVTSAADLVFEAGEFSRFKSARSFAAWLGLTPSEHSSGESVRQGGITKAGNKHLRRVLVESAWHYLGCSPHSKDLAKGQVPDPAARRHAAKGVRRLVERRRAMLERGVHKNKANVATARELACWCWAVGRMVENG

SEQ ID NO: 379515 - protein, 343 aa, unidentified
MYYAALDVSLRSVSVCIIDEEGKIRFERSVSSEVPDIVRCLHTFGHPIHQVGLEAGTLTQHLTYGLREAGFEVVCMEAHQVSAALSAMRNKTDKHDARGIAQLLRSGWYSRVHVKSIESHYARALLTSRKAILRKCIDLENEMRGLLKIFGVKLPMHLAKAAFDAAVRPIVEQNAALSHALLPMLEARRVLYFTFIELDRRVKRIARDDVICRRFMSIPGVGEIAALTFKAAVDDPTRFKSSRTVGAHFGLTPRRYQSGETDNPGRISHAGDADVRTALYCAANTMMSRSLKWSRLKAWGMRLMKSKGRRRALVAVARKLAVILHRMWIDGSEFQMGSKEAVA

SEQ ID NO: 379516 - protein, 388 aa, unidentified
MRTAGVDIGSEQHVLALLDEAGKVLVRPTKFSEDAAGYERLFGLLGEPGETTVAMEATGHYWQNLFAALVGHGYPVALINPLRTARYAEEELRRTKTDAIDALGIARFALEKRPAPAALREEVAGELRELVALRLRAVQDLSDRVRALHRLVDLAFPELTRQIRTLDSELATAVLSRYPTAQAIAAAPPAALAALRYDRRHQVGPARAQRLQDSARATVGAHQGPAYARGVRYACEDIERLRLRIKELDDEIGRTLGGSDLAPLLRSIKGLGETTTAHLLAVLGDPAAFASGKAIAAFVGTVPGLRESGKRRPGHAPLHPLGHAALRHALWMPTLTAIRCNPWIRAFYQRLTAAGKPKKLAIIACMRKLLDAVHYVARTRTAFVPKVA

SEQ ID NO: 379517 - protein, 425 aa, unidentified
MSKRTYRSVLVNSLVGSELEARFRGRKLVIGLDIAKIDLKAAIFDRSEGVVMSTWAWKAPDETRAFVGHVVSLCRVAHVEVALEPTGTYGDVLKALLIAAGVPVYRVSPKHTKDASELYDGVPSQHDAKCAAIVAWLHAQGKSSPWRGVTAAQRDLVAAADLLVIYDKQEQACLGRLEAKLARHFPELSLALELGSATLLGLVAHFGDPKSIAAAPADARDLMRRTGGSFLAADKVEKIIELARTSTGVQMTSGEREMVKTLAAETNRHRINANHAAKQLEKLGAHIDAIRRMGEVIGKRTAAVLYAEGGDPGMYEAPAAYVKALGLNLKIKNSGKPADVGQLKLTKRGSSVARAYLYLAVLRLIQPEPSFAAWYRRKVDRDGGKKMKAIIALMRKLAAALWHVARGAPWTPARLFDAVRLGLAA

SEQ ID NO: 379518 - protein, 351 aa, unidentified
MGKIITDFSSVTTVGLDLAKHVFQVHCVDASGRVVVAKSVRRNKLLEFFASLPSCLVGLEACGSAHHWARELVKLGHDARLMPPAYVKAYVRRQKNDAADAAAICEAVTRPSMRFVPLRSLENQAALMHHRVREMLVAQRTQVLNAVRGHLAEIGVIAAQGPKNARDLAKLITVDEATLPWLVRAALAPLVRQLDRLDEEIGLADDAIKAMAKADERARSLMSIPGIGPVTASAIAASVQDVSSFSGSREFSAYLGLTPRQNSSGGKERLGRVSKMGNRYLRKLLVVGAHAVLYNRKGHDDALRTWACKLMETKPFKLVAVALANKLARIAFAVMRDQTPYSAKPFSPAQA

SEQ ID NO: 379519 - protein, 323 aa, unidentified
MSSSVPTEQLYAGIDVSKGRLDAALRPTGEHFGLPNDHAGIEDLVGRLKRAHPKLVVLEATGGFERAVAAALAAAGIAVAVVNPRQARDFARATGKLAKTDRIDAEMLARFAEAVQPPAKALPDEEAREFAAILARRRQIVEMTTAEKNRLGAAASASVQKRIRAHIRWLEKELARTDSELDETISNSPTWRENEELLRGVPGVGPVLARTLMAELPELGDGELAPKQLAALVGVAPLNRDSGTLRGRRTVWGGRERVREALYMGALVATRFNPTIKEFYERLVGAGKPKKVALVACMRKLLTILNAILEHRTPWRSPHVLAP

SEQ ID NO: 379520 - protein, 465 aa, unidentified
MKANRRPPRKKPAAGPSLLERMNPNAAGIDCGSDTHYVAVPADRDPTPVRAFQTFTADLHRLADWLTACGVTTVAMESTGVYWIPLYEILEGRGFDVVLVNARHVKNVPGRKTDVVDCQWIQELHSVGLLRGSFRPTAAIAALRAYLRHRETLVQSAATHVQRMQKALVQMNLQLPIVISDITGVTGLRILRDIIGGQTDPHALAQHRDYRCQASAAEITAALTGHYRPEHVFVLQQNLELFDTYQHQLAACDAAIEAHVLTLAAQAPTPASPVPAARTRKTPRNNEPRFEIRRPLHQLTGVDLTQIDAIGPYSALRLLSEIGTDMSRWPTEKHFTSWLTLAPRNKISGGRLLSSQTQPSANRAAAILRMAAMNLGRSDTALGAFYRRLAYRVGKAKAITATARKLAILVYRTLKDGLVYQDPGAAAYDAQHRVRILHRLRQRAANLGFSLLNRATGELLEGAVS

SEQ ID NO: 379521 - protein, 447 aa, unidentified
MHKPQVIEDQQHERVFERVAAVDVAKASGMVCTRTPNPSRPGARHSTVWQVPAAMNAVLALADRLVADGIEMVTLESTADYWRIWYYVLESAGLAVQLVTASQARNLPGRPKTDRAMWLARLTEMGMLRPSFVPPAPVRVLRDYARARTHLVQDRTRCWQRLEKLLEGALIKVSAVASKLTTVSAQDMIKAMIGGQRDPHILAGLARGRMKAKHDALVEALTGMFDDHHGELAQMLLDQIAFCDTRIAALATRIEEHLAQVRAAWGVDADGSTGPSAGTGTDAAVLPAAQRLAEIPGVSAELARSIIAETGLDMSRFPTAAHLVSWAGLCPSAHQSGPRTRNGKKGQGDSYLRGYLGQAATGAAGTATFLGERHQRIARRRGRAKAQVAIARSILVVIWHLLNDPQARYADLGPDYHASRTDKDKKIRNHIRQLQALGLTVTIAPPA

SEQ ID NO: 379522 - protein, 350 aa, unidentified
MTTLARQITGGVDTHLDVHVAAALDERGALLGVESFETTPAGYDKLLTWLRSFGTVELLGVEGTGSYGAGLTRHLHGDGVRVVEVDRPNRQRRRRRGKSDPEDAISAARAAQGGDATGEAKSRDGNVEAMRVLRVARASARKGRTQALNQMRSLISTSPDCVRADLRHLNVYRMLERAASYRPGTKRDLASINKLTLRMLARRAIDLEAEVTEIDAILKPMVKETAPALAALSGVGTDVASALLVAAGDNPERLRNEASFAHLCGTSPIDASSGKHERHRLNRSGDRQANSALWHVVITRMVSDPRTREYVARRMKEGQTKKEAIRCLKRYIAREVYNNLPMEHLALDSP

SEQ ID NO: 379523 - protein, 461 aa, unidentified
MRKKRPTGKQGDSAPKQMDWKALEVVHPDAAGIDVGGHEHWVAISPERDPEPVRRFGCFTTDLQEMARWLVEKGVRSVALQSTGVYWMPVFEILEQHGLEVYLVNAQHTKNVPGRKSDIQECQWLLKLHAFGLLNNSFQPTDEIRIARTLWRHRGNLVAEAGSAIQRMQKALIEMNVQLGNVLSDLSGASGMAILGAILKGERDPQRLAALVQPGVKAPPEDIAKSLEGNWRPELLFVLRQQVELYRTYQEKIADCDTQLRRHLESLGGKVDLESQRLGPRPKGKQSSRNAPAFDLRSELYRLTGIDWAQVNGIDVLTAQTVIAEAGADLGAFASEKHFTSWLGLCPTNERSGGQILNRKTRKVVNRATVAFRQAAATLLRSQSYLGAQYRRLRTRLGAPKAVTAMARKLACLFYRLIKHGQQYVDKGSEYYEARYREQQIRAIVKKAQKLGLQVVIPQSA

SEQ ID NO: 379524 - protein, 310 aa, unidentified
MDKIYAGIDVSKAPLDVAVTSQKEIKTFSNGEDGIKQIVSYLRKRRPILTVMEATGGLERLLAASLVEATIPVVVVNPRQVRDYAKAKGKLAKTDSIDAHILAEFGHDIHPEVRALSDKQTEAIKAVLVRRQQIKDMITMENNRLWPADIKVIPSIQEHLNWLKQELKRIDQDLEDKIQKSSLWKEKDNLLQSVPGVGPILSITLLGDLPELGSLTGKQIAALAGVAPFNRDSGQYRGKRMIKGGRRGIRPALYMATLVATRFNPIIKAYYIHLIEKGKAKKVALVACMRKLLIILNAIVRDHHPWQYAT

SEQ ID NO: 379525 - protein, 350 aa, unidentified
MLYTGIDYHRSFSYLTTMDDKGEIIEQKKLPSNGEIVDFLKEFGEEMEVALEASPSWYWLYDHLEGEGFQVKLSHPLKTKAIAYAKVKTDKVDSATLAHLLRSDLLPLSYVPEKAVRLNRELLRYRASLVKIQTGVKNKIHTILAKNNVNHSYTDLFGKQGMAFLHSLTLAENYEIALEGYLTVLDIVRQEIRAASKKVRQLAEEDADTLLLMTIPGMGYYSALLTKSEIGDVRRFQSAKQLCNYAGLVPSTHASGNICFHGHITKQGSRWLRWILVEAAIHAVKRPGVLRRFYFRIERKKGGQIAKVATARKLLEWIYHILRDGRTYPEMEKIADLLGRGELGNYSGSA

SEQ ID NO: 379526 - protein, 440 aa, unidentified
MSNRTEKQNVPQRKASAKDTVLWVGIDWADQKHCVATRRPDGSDSKLHWVDQKPQKLDEFFLELQKQHLTGHIGVVLEQSRGALLYALLKYSFLELYPINPRCLADFRKAMAASGAKGDPSDADLLCELGCKHGERLRALELEDETTRQLELLNEHRRGIVDEQTGLSNQLGSALKCYYPLILELFADHLVAPIALDFLERWPNLAALQKAKPGVLRAFFHKHNGRSEEKIQERIKAIGEAKPLTNDAVVIACYQLQVQTLIERLRAVQAGIAQYDERIKVVFASHAKARVFSSFPAAGPVLAPRLAAAFGTSEANFPAPYAMLCWSGVAPIQIQSGKSKVVHCRWARPKFLHQTFVEYARTSVLFCPWAREFFKSRTEKGWGKFRIYRALAFKWIRIMWRCWKDNVEYDEAKYLAGLQKRGVQLYASLYAAPDAKKPNE

SEQ ID NO: 379527 - protein, 319 aa, unidentified
MSTKSPVRHVGIDVSKERLDVCSLPDGGTFSVANDRAGIDELIARLLEGVRPELVVLEATGKYERPAAVAVAAAGIAVAVVNPRQARDFAKAAGRLAKTDRIDAQVLARFAGAVGPRPSVLPDEEARVLQDILLRRRQLLEMMVAEKNRLQMASEAVARRIAAHVRWLEKELSRVDRELDEAVRESETWRANEELLRSVPGVGPVLARTLLAELPELGTLPRRRLCALVGVAPFNRDSGTFRGKRQVWGGRAPVRAALYMGALVATRHNPLIREFYERLLAAGKPKKVALVACMRKLLSILNAVMRDRVPWHSAHLLTP

SEQ ID NO: 379528 - protein, 393 aa, unidentified
MFTVGVDIAKGSHEACVLAKDGSVVQKAFNFKNDSLGFAKLLNTLLSISKDKSQFVFGMEATGHYWLNLYCKLVDQGFTVHVVNPVQSDALRNLYIRKTKTDKVDAKIIADLIRFGRFSETVLAAPDVVALRELTRQRFYLVDCTSDVKRKVISLVDKVFPEYQNIFSDMFGATSLELLAKYTTPDDLTGVSTAHLASFLSKVSKGRFGQEKAQEIKQLAKDSFGSSIFNTSSAFAIRQYLEQIELLEKQISDLNTYIAQTLKSIPQTLTTIPGIGPAIAATLVAEIGDINRFESPDKLAAFAGIDPTVKQSGQFVGDKVRMSKRGSPYLRRALYLAAVSCNLHNEAMHSLYLKKRAEGKHHNVALSVISRKLVNIIFNLLKSQKPYTMVHPN

SEQ ID NO: 379529 - protein, 320 aa, unidentified
MLSFCGIDVSKDRLDVMMLPQQQCWSVHNDPRGWTELVERLRSFSISAIGLEASGGYERGVMRALLAAGMSVRQINPFKLRQFAKASGVLAKNDRLDARMIASFVAIMPTRPAQQRAPAIERLSEMEAIRRQLSNQKVAAENASRLLEDAMLQRLCHRRIARLAADIDLLDKHLLEVVAADPALADRYRLLTSMPGVGPTLACTLLALLPELGRLSRKQVAALVGVAPYDFDSGKLKGMRCIWGGRAPVRQVLYMAAMRASNWNPVLKAFHNRLKAAGKLPKVVIVAVMRKMITMLNAMVRDDVVWADLLRGRHTVPTAR

SEQ ID NO: 379530 - protein, 411 aa, unidentified
MDVLIERCAGLDVHRDTVVATVRYPGPGGARRSETRTFTTMTGQLEALADWLTAQRVTLVGMESTGIYWRPVYYVLEDHFPVWVINAEHLRNVPGRKTDVADSVWIAQLLEHGLVSPSFVPPRNVRLLRDVTRHGRRLTEESTRAIQRLEKVLQDAGIKLTSVASTILGKTGRAILAALLAGEEDPAVLAELAKGRLRPKIPALREALTHRFRLEHHGALIAQMLAHIDFLESAILETHQRTEVLLRPVADIVELVMTIPGVGRRVAEVLIAEVGLDMTVFPTAGHLASWAGICPGNNSSGGKRRPGRTRHGSMWLRIALTEAAQVAARGKGTYLAAHHAQIRGRRGTQKAIGATRHDILIAYYHVVRDRVAYQDLGPDWSNRRRSTEQQTRRLLRQLERLGVNVTIEPTA

SEQ ID NO: 379531 - protein, 385 aa, unidentified
MQDHKPEDQTAIRTDLGAIFVSLELSRSTWLVTSLSPGGGEKMSKHSVPGGDISGLLMLFSRLTERARKRAGEEFPIIAIQEAGLDGFWIHRALEQEGIESHIVDAASIMTSRRRRRAKTDRIDGEALLRALMAYKRGEPRVCAMVREPTPEDEDRRRISRERNVLIAERVAHVNRIKGLLFSQGIRYEPLRRDRRARLEELRTGDGRVLPEHMKRQISRELDRLELLLAQIKAVEAERNTMLAKTNEANLAPAKMLMGFKGIGAEFAMTLWSEGLFRHFDNRRQVGAYAGFAPTPWQSGMTDREQGIAKSGNPRLRTTMIQLAWLWLRHQPDSLLSHWFQERVAGKGRRIRKIMITALARKLLVALWKYVTAGVVIERAVMKTA

SEQ ID NO: 379532 - protein, 346 aa, unidentified
MEKISIIGLDLAKQVFQVHAADAQGRCILRKQLKRREVLAFFAKLTPCVVAMEACGTAHYWAREMAKLGHEARLIPPAYVKAYVKRGKNDAIDAEAICEAASRPSMRFVPVKSVEGQALAMLHRSRDLSIKNRTMLVNALRGHLAGFGFIAAKGIGKLPDLIKIVSEAPKEALPDMVRATLSGFLDAIAGLNVHLAGIETQLRAWHKSDARSQRLASAPGIGLIGATALCALVPDPSLFKNGRHLAAWLGLTPRLDGTGGKTRLKRISKAGDGYLRRLLVLGATALLRSLANKTTPLALWMQGLLARRPRRLVTVALANKLARIAWALMAKAEAYKPLAAAQMANA

SEQ ID NO: 379533 - protein, 368 aa, unidentified
MLYLGIDQHKSQITVNLRSEDGNAILKRQVSTRREKIQAFFDDLARRAADEGGFMAIVEVCGMNPWLIDMLQEYGCREIVITQPDHRPKKKTDRRDASFLSNLLWINRQRLVGGQRAPGMRRIKPPTPSEAENRQLTAMRQVLTKKRTATLNALHKVLRKHNLEQDRPTKLFQTKKVRQWLAEIHLSEIDRMEVNQLLAQWAVFDEQLQTVNDKISARAEADEQVRLLQSMPGIGEYSALAISSRIGGIERFKRPGSLANYWGLTPACRNSGQATQRLGSITKQGSKIVRYLLGQAVVKVLRFDMEMRKWYKQIKKRRGSKIARVAAMRRMATIIWQMLKKKRKYEYESPIKKHQEFEQFSGEAEAAC

SEQ ID NO: 379534 - protein, 412 aa, unidentified
MDNAAYFVAGIDVHKKMLAVVVANARNRELQFECRRFGTTISELQKLSTWLQEHAVQEVVMESTAQYWKPVWFILEGQFQLWLAQARSNRGPRGRKTDYRDAKRSVSRLLSDDLILSYVPEAEQRGWRTLTRTKYQLRRDRVRLQSQLESLLEECQIKLSSVVSDLLGASGQRILRAIAAGETDPARLRGLGDRRLHATDEELRDALNGQPLPPHRKLLTLYLQRLGLIEGQIAELESMIAEAMKAHQDAVVRLSQLPGLGVDSAQQIIAEIGPRAESFPSAGQLASWVGVCPGLQESAGESSSNRSAKGNRAMRRLLNQLAHAAVRKRDCYLQIVFKRLSPRLGYAKAVWAIAHRLCRLIWKVLHEAVQYVEYGPAVSALTLKRRKQRLVTQLAKLGYSVQLTPILARAGS

SEQ ID NO: 379535 - protein, 409 aa, unidentified
MQPILKSCCGVDVHKNMIKVCIAKGPMDSPPKLYTRTFSTMTADLLKFKDWLKANDVEAVAMESTGVYWKPIFNILEDEFQVILANPQYLKKVPGKKSDVKDCEWIASLLRCGLIPASFIPPRPIRELRELNRTRRKLVGMMASEKNRIQKVLEDANIKLVSVVSKIDGVSSMNMIRALLSKDKLSKEEIADMARGKLKSKVDKLVEAMNGKVTDHHRFLLKLHLANIAFLAEQVQEIDEQIQKLMIPFQKEESLIQTIPGISKTSAAAIIAEIGFDMSQFPAEAHLASWAGICPGNNESAGVKKSGKIRKGNSYLKATLIEVAWAASRTKGSSFSAIYNNIAKRRGKKRALVAVGHQILIAVHRTLKTGEPFVDQGAEAVYQRNLEARQQFAIRLLERSGYTVAKASA

SEQ ID NO: 379536 - protein, 410 aa, unidentified
MLELFVGDDWAEEHHDVELMDPAGRRLGRARLPEGVTGMARLHAMIAAQLGEGVEDAVVKVGIETDRGPWAQALIAAGYEVFAVNPLQAARYRERHSVSGAKSDKADAHTLADMVRTDSHQLRPVAADSPRAEAIKVVARTHKTLIWERTRHTQRLRHALREYFPAALEAFEDLAASDTLELLSKAPDPAAAVRLSISQISAALRRAGRRKIEEKAAVIQTALRAEHLRQPEVVAAAYAASVQSTVAVLKVLVEQVKTLQGQVESHFGRHPVAEIILSQPGLGPILGARVLGEFGDAADRYVSAKSRKNYAGTSPITRASGKKKLVLARFVHNDRLIDALAAQAFAALSASPGARAYYDRIRARGVGHRAALRQLANRLVGILHGCLKTGTVYDETTAWPADATDSPAAA

SEQ ID NO: 379537 - protein, 323 aa, unidentified
MEESAVFAGVDVSKARLDVASTGSEEAWSVGNTPEGITQLVQRLREVRPSLVVMEATGGFEVPAAAALAAAEIPVVIANPRQVRDFAKATGQLAKTDAIDAHILALFAERVRPQVRPLPDEDARALDAIVGRRRQIIDMITAENNRLGFALPAVQKGIEKHIRWLERQLSDVDSDLDGLIRKSPVWQAKSDLLRDVPGVGPNLARTLIAELPELGRLSNKQIAALVGVAPLARDSGLFRGKRMVWGGRASVRSALYMSILSATKWNPVIRVFYLRLRTQGKPPKVAMVACMRKLLIILNAMVRDGREWDPSVPLDQLRLQHSC

SEQ ID NO: 379538 - protein, 433 aa, unidentified
MNSPHPYDLLIGLDRSDAKADLHLINTRTGQRRSETITTSPEALWEWLAELRQEHPQARVAICLEQPAVHLLPFLETYNWITLFAINPLTLLKFREAFVTSRAKDDAKDALYLAELLLAHADKLKAWAPEDAPTRAIQQMVFHRRSVVDERTGLTNRLQALLKQYFPQALVLCGEDLWRPLATRFLLKWSSLGAVKKAKPGTLTQFYHLNGSRSTKLLEQRLALVQKAVPVTEETALIQSFVMRVQLTCRQLQLVVQTIKEYDRQIAAAFAQHPDHPIFNSFPGAGPVLGPRLLASMGADRERFVSANNLQCYTGTAPVTKQSGGKRYIHRRYLCPKYHRQSFHEYAKESVLWCRWAAACYLDQRSRGKPHHTAVRALAYKWQRVIFKCWQTRKPYNDQLYEDALRKSNSHLVPLFKKVELGKSPFKTPAEDK

SEQ ID NO: 379539 - protein, 424 aa, unidentified
MKSTQNEKILQIKNETLVIGIDIGKDTHYARAFDSRGIELAKMLRFSNSAEGYNALRTWMQSTMQQKGKTDAIVGFEPTGHYWFSLGDYLRNQGYKLGIVNPYHVKCARELDDNSQTKTDLKDPKTIAMLVKDGRYRDVYIPSNCYQELREAVLERERLVEQMTALSNQVIRWLDIRFPEFTKVFKSWKGKTAFATLKQFPTPVKVAQAGPEGLIALWQQHVKRNYALKAQQLFQAAKTSIGRVSGSNAAEVVLQNLLVQYELAASQLEQIEALLSDLVLTVPHSDTLLDVKGIGKLSTAVIISEIGEIQRFSSPRQIVSLAGLSLIENSSGRHKGQTTISKRGRKRLREALFRVMIPLLANNAEFRAMHQRNITRDQNPLTKMQSVIALCGKLIRVIYALLSKGCRYDASKLVQDMNRSMMAA

SEQ ID NO: 379540 - protein, 343 aa, unidentified
MKIYALGIDLGKTVFHLVGLDANGQVVVRKRCSRTQLLAFTANVQAQLIGMEACSGANFLGRALRAQGHDVRLMPAQYVKPYVQTNKSDYIDAEAIAEAVQQPRMRFVPIKTEEQLDRQALHRVRERWVMRRTAVLNQVRSLLLERGLTVPKGRRHLNQALPRILEDAELPLSGSFRVLLAQLKLELEQLAARIEQMDAVIEQEARENEACQRLTTIPGVGPVTATALIGAIGNGSAFGKGRDLSTWMGIVPGEFTTGGKQKLLGISKRGNKYLRRLFVQGARSVLQQRDKQAPGLSFWLAQLLACKHQNVVVVALANKLVRIAWAVLCKNESYRAPVLAVST

SEQ ID NO: 379541 - protein, 358 aa, unidentified
MNYIGIDLHKKFSQVTVLGEGGEIKERVKIDNREEVLNRHFNNFDEPSKAVIEATFSWGWLADYLQSRKIEVMLAHPQKVKAIASAQIKTDKVDSLILAKLLRADMIPTAYFCPKPLREVKEVLRSRASLVGLKTQVKNKIHSLLHKYNIREDEKFSDLFGKRGKEFLNSLELGEYTTPVLKRYLETLSFLEEEIKKTSVDLRQVFEKDEVAQFLERLPGIGFYTAIILSKEIGNIGRFFSAKHLCSYAGLVPSTYQSGEHTRHGKIKQGNKYIRWVLIEAVPKTIGKDKVLNAFYQKIKAKKRHNKAKVATARKMLGQIWYLLKTKQSFVDPETGSPVFFSGASSFPLKGIEVNSHR

SEQ ID NO: 379542 - protein, 345 aa, unidentified
MHGQIVLGIDTHKHTHVGVILDGLGRVSGALQFPATEAGAQRLLAWNQENGGALIAGVEGTGSYGYRLTRALQLAGVTVLEVNRPDRANRRRRGKSDTVDAEAAARAVLSGQASAVPKDREGVVDALRALAMARSSAVKATTQASNQIKALLVGSPEHLRERLTVKSLLQLATRCAELDPCSGIHTALRSLGRRWLLLHAEIVELDTEIRALVRNTVPTLIARPGIGIHSAAQLLITAGGNPDRLHNDAAFAALCGASPVQASSGQRQRHRLNRGGDRAANNALWTIANNRLIHDPTTREFAAKRRALGDSRNEILRILKRYIARETFHLIISAIRPPAASARAC

SEQ ID NO: 379543 - protein, 351 aa, unidentified
MSEYIAFDSHKRYTWVDREDHSTRKNSGHRLEHAPGAVRDYLSGCEPGTAVAVEATGNWYWIIDEIEQAGLQPRLVHPRKAKLMMGLTNKTDKLDAQGLNRLQRNGTLPTVWIPPGPLRDLRELTRTRLVLVAQRTRLKNRLSATLAKYGAPASEASDPYGKRGRAELEKHLERLPEQTRWVSGQLLAQLDFVSAQVRQLEQRLNELVEVTPEMQWLLTMPGVGVILAATIALEIGEVQRFPSAMHLASYAGTTPRVHASGGKVRYGPLRADVNRYLKWAFAEAANSVAVNHGRCPERHVSQLYRRLRQRKGHPKAIGAVARHLAEAAFHVLRQKQMYKDPSLGRGRTSQA

SEQ ID NO: 379544 - protein, 351 aa, unidentified
MENPTTIAIDLSKNVFEIAVERKGRICQRKRLNRGQTIAFLSQCQKATVLMETCGSSHYWGRKAQELGHTVMLLPAQHVKPYRIGQKTDRRDAEAILSARGRETILPVPVKTVEQQTICALHRVRAALMKTRTARLNTVRGLLREFGVTIAEGAERVLSAVHDALSETPSAVPEPLHAALLSMMAEARELEEKSRDVEKQLKALSRTVPLVERLETIPGVGLLNATAFSAQVGNLPRFKSGRKFASWLGLTPKESSSGKRRWLGSISKRGDTYLRTLLISGARSVLLAAHRTRRPHHLQAWALEVEKRRGRNRAAVAVANKLARIIWAVASRGVPFKPQFDIQNTPTSAPA

SEQ ID NO: 379545 - protein, 414 aa, unidentified
MFAVGVDVSHGRSTVAVLGAKRKVVMKPFEVPHTVDGFASLAEKLNGLDGEVRIVMEHTGRYYESFAMSMYRAGFFVSAVNPLAIRDYQEGISVRKVKTDKADALKIAQFAIDKWEILPQYTPMDTIRYNLKTLHRQFQLSSKTRTALNNNLIALLEQSYPGANRYFDSPVRPDGTQKWVDFVDTFWHVDCVAGVSQNAFVERYRKWCKRHGYHFSEQKAIEIHTDARRKFPLVPKTDTCKLLVKEAVAQLNAISRTVETYRTEMNRLAAQLPEYDTVMAMTGVSKSMGPQLMAEIGDLRCFAHSKSLVGFAGTDPIKDDSGDKISGSNRSSKRGSPYLRKTLFVIMTILLQLQPQDDPVYQFLDKKRSEGKKYYVYMTAGMTKFLRIYYGRVRDCLKEKGLWDNPASQEVNPG

SEQ ID NO: 379546 - protein, 431 aa, unidentified
MTTENYVAYIGIDWADRKHDIALYDCASGTWQETIIQTRPQDILDRVNQLRVRYGEGRIAVAMEQKRGPLLYALCQYDNLVLFPVNPRTVANYRKAFQPSRAKSDPVDARLLVELMQKHPEKLEQWVAGCPKTRALRQWVESRRMLVGEKVRLTNRIIASLKTYFPQVLDWFEDKDTFVFCAFIEQFPSVNAAQSATPDQLAQFFRSHQAGRKSAIMRRIQQIQDAGTPLTRDQSIVVPAQALTQALTALLKVVLHQLSDFNAKIAKLFETLPDAELFSSLPGAGPHLAPRLLVAFGAERSRFASAQAFMSYVGIAPVKEESGKKRWVHWRWSCPIFLRQTFVEWVNQSRRFSTWAQAFYQQQKRAGKTHQTAIRALAYKWGRILWRCWQDNTPYNEEKYLAALARKKSPLIKHLRVADSDISGLKASQKE

SEQ ID NO: 379547 - protein, 428 aa, unidentified
MRSIALDVHRSFCEVAIKEGTKLRSGRRIKTSVAELELFAKSLAADDQVALEASGPALAIKRILEPHVGRVVIANTRKVRAIAEAKVKTDKVDAATLCELLHAGFLPSVFSPDEWTRSLRRRLQRRSQLVRSRTRAKNELHAVLTRNLKGRPPMSDVFGKARREWLSTLELAPDERETVEGCLRQVDFLDAEVGLIERELAAQALASQEIRRLMTVPGVSLISAATFAAVVGDITRFPTQKKLVSYLGLDPKVRQSGETPARHGRISKQGSPEARHMLCEAAWIVVRSPGPLRAFYERVRARRGAQIALVATARKLSVVFWHLLTREEDYAFGRPTLTRRKLRALELKVDKGLRQGKYSGPRVHETRKDREREREFAEQAEIAYRRLVADWQPKKRKGAGVPVGRASSSHLLSEETAARQDTAPDPAL

SEQ ID NO: 379548 - protein, 342 aa, unidentified
MDEITRIFIDTSKTVFQLHGVNAAEAVVLKRQLPRGRMVEFFRKLPATVIGLEACGASHYWARLLSGLGHEVKLIAPQHVKPYVKRGKNDANDAAGGCEAMSRPTMRFVPVKTAEQQAALMLAGVRDAIVRERTRLTNMIRGHAAEFGVVAAKGLCKIEPLLARIAADQTLPSLARELFEQLGLAYAELQARFQAVDAKLMAWHRANALSVALAEIPGVGPIGASLLVMKAPDPKLFKSGRQFAAWLGLTPRDHSTAGKVRLGVITRAGDEALRGVLVVGATSVIKMARTGKGASPWLIALLERKKPKLAAVALANKIARIAWVMMTTGEAYEARRTNQATA

SEQ ID NO: 379549 - protein, 326 aa, unidentified
MALKTSTIGTVAQTVIGVDVASKHLDAAVHGEPSIKRLNNSPASIARWLDALPAGSVIAAESTSRYHEALVHQAHARGFVVYLLNPRDVRHYARGLGMRGKTDTLDARVLARYAAHEGSELRPWQPLSPEQSLLEELIRRRGVLVKHQAAIEQSLSDSPLLRTGSAALMREFDKLLDQLDTQIAQACADLTLDSGDFERITSVPGIGLLTGAALLTLFHRLATRGADAVIAFLGLDPRPMDSGQKTGVRRLSKRGPAEWRRLLFNAARSASRTKAWKAVYEHELSKRLSTTAALNILARKLVRVAFCLYKSQSSFDASRVIAPQKA

SEQ ID NO: 379550 - protein, 338 aa, unidentified
MPLYGGIDLHANNSVVVLLNEQDQRIYHKRLPNDLATIVEQLAPYHADIEGLVVESTYNWYWLVDGFMDAGYRLHLANPAAIQQYSGLKYTDDHSDARWLAHLLRLGVLPEGYIYPKAQRPVRDLLRKRAHLVAQQTANVLSVQNIILRNTGARLSANRIKSVSQAEVDTLLPNADQALAVSSALAVLHCLAEQIKTVETRVRTRIQSTPLYELLQTVDGIGPILAQTILLETGAIGRFPSVGDYASYCRCVDSTKVSNGKRKGQGNVKNGNPYLAWAYAEAAHFARRFNLKVQRYYQRKQAQTNVTVAHKTVAHKLARACYHMMRHQVPFDAAKAFG

SEQ ID NO: 379551 - protein, 343 aa, unidentified
MADIFALDVSMGKSYCVWYRGKHCLKEFSLVHTKAGFNALRDMIKKAQKPIIYFEATGIYSRVIEHFCETNGLRFCHLNPLELHLKSESLRRVKTDQKDAHRIALTVQENTFRLIVPWKKDYLQLHELSRFYNQLNADWNYRLNHLHTALEQVFSELKQLFVNRTSKLALNIVELFPHPALVRPYSRVKLKNILMASTDKRISKMKAYKYADRLIDLAQKSYPAVSGDAIQVDEVRYYARQLIALTRKKEEVIKRMESIAQRLPEYILYCSFPGIGKQTAAQLMGELGDISRFDNANQLNAFVGIDIRRCQSVTYLGQDHINKRGNPIARKLLYFTVGNMIRQ

SEQ ID NO: 379552 - protein, 261 aa, unidentified
MKQAIYVGVDVSKKQLDVAIRPLEKIFGVSNDRRGIAQLVKRLKKLQPVCIAIDATGGLEKELAYALAAESLPVAVVNPRQVSNFAKSTGQRAKTDAIDAAVLAHFAEVMKPEVRQLPDAASRELSALVTRHRQLTEMMTAESNRRDLASKSVRKLINSLLRSLKDQLAVVDREIRKAISASETWRHKAELLRSVPGVGKVTTATLLAGLPELGELDRRQIAALVGVAPFNRESGTWKGKRMIAGGRGWELLPKVVDRVRE

SEQ ID NO: 379553 - protein, 336 aa, unidentified
MNIKRIGLDLAKQTFQLHAVDHHERVVLRKTLRRSQMLTFFTRLEPCLIGIEACGSSHYWARELTRLGHIVRIIAPQFVKPYLRGNKNDANDAEAICEAVSRPGMRFVAVKSEAQQCMQAEHRVRARLIRDRTALSNEIRGMLGEFGLVLPVDLPALRRALPEILSQQEQWDNRFIRLLCELAEELQALDERLKRYDRRLKQLAQEEARIRRLQEVSGIGPVTASALVAAVGDAGQFKNGREMAAWLGLVPRQHSSGGKSRLGHISKRGDSYLRTLLIHGARAVLNACGHKEDRRSQWLKSVAERRNRNVATVAMANKNARIAWAILSREEEYRVM

SEQ ID NO: 379554 - protein, 319 aa, unidentified
MYSIGLDVSKSTINCYIPNGEVDLIIDNNLKSLNQFYSKLKKIYKKDIDKLVFIFEPTGSYSTLLKRFCTKKKIKAFIVNPKQSHNFAKAVAQRNKSDEIDARVLSKMIVIASENDIKIPIYDENIEDIKDYMSYYKFVVKQLVQAKNALEAMKHNQSNKHILKSLEKKIDAFQKESLQIIVKIKKIISQDQFLYKSFNNIRSINGVGDITAIVLLHLFLKYPAANQRQIISLTGLEPTIKSSGSSVRTKPKISKAGSKLYRGTLFMSALSAIRFNPKIAEFYNRLKSNGKQSTVAQVAVMRKLIIIAHSLYKNNQQFI

SEQ ID NO: 379555 - protein, 349 aa, unidentified
MNKFSKAKSDGNVCTDMFVGMDLHKNYLQVAVLDGKGKVLKNSRIDNDLSKVGRFFDRIGGSGNSSDVKVVMESSCVWYNIYEYLSEERQLDVSLSNPFKTRAIASAKIKTDTLDAVKLADLLRGGYIAKCYVPDRKIMDLRQLVRHRIVLVRMRTKLKNKIHGITLMQGIRITDTSAFSNNYVQKLKQLNDYRIDAYIRLIDSLDSEIKKVSKEIQSRAEKEDMTKLLVTIPGIGYYSALLILSEIGDINRFPDSYHLCSYAGLVPTTHSSGGITYHGAITKTGSKHLRWIMIECVYTHMRISKNSNITRFYTRLANRKGNSKAVVAAASKLLKVVYWVMKEKREYHV

SEQ ID NO: 379556 - protein, 406 aa, unidentified
MTVYLGIDWSQVKHDAVFLNEAGAALAQLTLSHRPEGFLQLDATRQQLGVEAPECLVGLETAHNLLVDFLWDRGYRQVYVLPPKMVQRSRERYRQSGARSDLSDAFVIADVLRTSRGRLQPWFPDSLLTRQIRAKVSFVQHLTHTAVRLSNRLQAVLSRYYPLALQVFSEPTTQIGLHFIQCYPTPQEAAELTLETFRDFARQYRYTRRDGLVRSFSHLQASYPEASPETAQIYRQEAVLMAGLLLETAEARKAALNDLRVLFRQHPDVEIFASLPGVGDLLAPSLLAKFGDDRARFPSPGSVQALAGTCPVTKSSGKRTIITFRYACDREFRQIAVQWARCSLGESVWANAYFESVRPHCRSLSHAYRCLANRWLAVAWKLWQTRVCYDEGYHLRQRAIRAVPRA

SEQ ID NO: 379557 - protein, 405 aa, unidentified
MTSTYGVFLGLDVGKGEHHAVGLDPSGKRLHDGPLPNSEPKLRAVFDKLAGHGPLLVVVDQPATIGALPVAVARACGHQVAYLPGLAMRRIADLYPGNTKTDARDAFVIADAARTLPHTLRQVDVGDEALAELGVLVGFDDDLAAEATRISNRIRGLLTGIHPALERALGPRVTHTAVLEILSRCGGPIGLANTSRRKLISIATKHAPRMGERLVADILAALSEQTVVVPGAAAADTVLPRLAESLKTVLEQRKALAVEVDGILDAHPLAEVLTSMPGIGVRTAARILLEIGDASAFASSAHLAAYAGIAPVTHRSGSSIRGEHPARTGNRKLKRAFFLAAFAALSDPVSRAYYDRKRAEGKKHNAALICLARRRCDVLFAMLRNKTLYQPTRPTTQPPAPPAAA

SEQ ID NO: 379558 - protein, 355 aa, unidentified
MALYGLTSKGIRYVRHRNHWVRYREERVSGSWRRVRRRRCAQEADKAGPVLKFFANLPPCVVALEACFTAHFWAREIVKFGHEVRMIPPQYVKPFVKRNKTDSADAEAICEAAGRPTMRFVAIKSAEQQSILALHRSRDLLVRQRTKLIQALRGYLGEFGLVAPKGAWNVTLLETMMSDADPTQVPDLLKEIAAVMIAQIHDFDDRIDHLHDRLTAWHRANEVSRRLATIPGIGPVTASLISASVTDAAQFRSGRHFAAWIGLVPREFSTGGRQQLGGISKRGNPQMRRLLIVGAHAVLRWTRRGHGMPSAWLTALMGRRHPNIVAVAIANKLARIAWAIMSRGTSFLPQITQPN

SEQ ID NO: 379559 - protein, 400 aa, unidentified
MTTRLEKIFAGVDTHADTHHAAVIDSNGKQLGDAQFPTTPAGYAALAAFLTAFGMAVRVGVEGTGSYGAGLARHLGAAGFVVVEVLRPNRQLRRTRGKSDPLDAYAAARTALAQDEHATPKAGAGQVEAIRYLLVARRSAVKARTAAIVQIKSLLVTAPDLIRERYRSLGDKALIAALARLRLSTDPLLAAVGQGLRSLARRHQLLGEEVSDLDQALAALTAAANPALVAAKGIGTITAAQLLVTAGDNPDRLRSEASFAALAGVSPIPASSGKTTRHRLNRGGDRQANAALHRIALVRMSYEPRTRDYVARKRALGHSNKEIIRCLKRALAREVFTLLTTRVEVPVIDDLRPLRQARKLSLTTVAEHFNVWPATISKLERGKHRDDDLANSYREWLTAA

SEQ ID NO: 379560 - protein, 324 aa, unidentified
MHTINSSLQHFFGVDVAKAELVIHCFGERAVHALPNDAKDIERWLDTLPEHSAVAVESTGSFYLGVARACVARGIPVYVLNAQRVRHYAKGVGRGAKTDRLDAQVISRYLAHEHAKLHPWTPLPEPLAKLSTLLTLRDTVVRSVQSTRQSCKALGLVPTDVQLFLRSGEALARGFEREATKIARAHAPWRELLRRLRTVPGIGPLNALALLLALHRHPLTRVDAFIALTGLDPRPCDSGQRRGRRALSKCGDALLRKLLHTAAMAAVGNPLFAPEYQRLQSRGLSKTAALVVIARKLARIAWGIFRSGKDFDPQILTARAGAAT

SEQ ID NO: 379561 - protein, 346 aa, unidentified
MRILALDLGKYKSVACDYEAETAGHRFTTIATNPKALHDLIVDREPERVVIEICSIAGWVSDLVRALGIELQVANPNDERWQWRKVKTKNDRADALKLAQLSALKQLRLVHVPQSEIRQWRALITYRQHLVQRRTKIKNHIRDLLLREGQLLPRYRSAWTQEGIANLEAMSKPFSEVSLDELWRGELGVELAQFKAVQRQLAEVVTKLDELGAANHSVQLLRTVGGVGPRLAEAVVIMFDDPHRFRTAGQVSSYIGMVPKQFDSGETQRAGRITRHGNRLVRSLLVEVAWCALRHNPWARETYQRISGGKKSRQKIAVVAVGRKLLVRCWAMLRKQTQWRTELPVA

SEQ ID NO: 379562 - protein, 347 aa, unidentified
MKVTTIAIDLAKNVFQVLGMTADAKKVYNKRLNRNQLKELLCNTPACTVVMEACYSSHYWGRVGLQFGHNVKLIPAQHVTPFVRGNKNDSNDALAIFEASSRPNIRFVPIKSEAQQEVLMMHRIRDRLIKQRIACTNQIRGLLVDFGFVFPQGFTAFEQNIWDIINDSEQRPLLRYLLNQVYDEYLQITKQLKDLNKLIKQKVEQTETGQILLSIPGIGHVIASAFEACIDKGQAFNGPKELAVWLGLTPRQYASGNKSQIYGITKRGDSYLRKQLIHGARTVVSHAHKKDDALNQWITQLKARIGFNKTAVATAHKLARLMWILLKKQTRYQAQIGQTAEIILCVR

SEQ ID NO: 379563 - protein, 326 aa, unidentified
MQTQEVFVGVDVSKAQLDWGIYPEDEQARASCANDEAGRGELTKKLLALQPALVVMEATGGLEAPLAASLATAGVKVAVVNPRQVRDFAKALGVLAKTDRIDAQVLARFGQAIRPQVRALKSEELVELEATLTRRRQLVEMITAESNRRASAQPRIAKQIDKHVAWLEKQLEDANDDLDKMVRNSPIMQHKAQIMTSVPGVGKVTATTLLAELPELGQLSRRQISGLAGVCPFSRDSGTMRGRRSIWGGRASVRAALYMASVVACRHNPVIRAFYQRLLAAGKPKKVALVACMHKLLITLNAMLKTGTPWRVSALPVSSSEPSLQA

SEQ ID NO: 379564 - protein, 344 aa, unidentified
MIIIGVDFHLEFQQIVWVDKDTGEFQEKRLAHREDAETFYRALAGQKVRVGMEASGHARWFERLLWELGYELWVGDPAKIRASEPRKQKNDARAAANILRLLLEGNFERLRIRVPTAEERDVRQLVLHRHRLVQMRTRVKNQLQAVALNEGMGPRPGLWSRKGQEQFRALQLPPWSDRRRQDNLELLSDLLRRTAPLDVAVEQQARQRPEVVRLMTHPGVGPITALTFVLTVGEPTRFESSKKLGSYLGLIPAEHSSGNKQRLGHISKQGNALLRGLLVEAAHSAARQEPELGRCYRRLAIKKNRAIAAVAVARRLAVRLWWMWKRELTYAQFSASGSHAGNAR

SEQ ID NO: 379565 - protein, 425 aa, unidentified
MHTKQYSRQLEKRNRIGTGTLIIGMDIGSEFNAACFMDKEGNALGRYPTIYNSRKGFDYFQTMVMKIKKKHKLTDVLIGMEPTGHYWRKIAFFAKEKGYEVRFVRTTAVKHQRELDESSSAKSDSKDAYTIANIVREGKYIDTIIEESVFRQLRTLAHARERMLRYIVGSTHGLQAHLNDYFPELRKLFWSMKAKGLRSLLETYPFPEDVRNAGCAAVTALLMKGTGRKRRIGEQAAQIYQAAVESVGLKAIGKADRARLTMYLEEIKRSDARRILLEGEMKELLKEIPLAQYILSLPGMGKVGCAVFLGELGNPEHFGNPRQIIKYAGYDPKENDSGLRVGRKIISKKGRWLLRKCLFFMVLRLVHRSSFFKAYYEHKKKGFDRPLEKTEALCAVILKLIRVLFALMRDKRMFTEEIPRCEQAA

SEQ ID NO: 379566 - protein, 345 aa, unidentified
METMYYIGLDVHKKTISYCVKDGSGGIYAEGSIPATRLTLDMWMKTLPQPWTAAMEATIFTAWIYDHLKPHAAAVKVAHPLMLRAIAVAKKKNDRIDAKKIADCLRCDFLPECYMASTEIRERRRTLRYRNLLVRQAVQMKNKIAVLLMEAGVSYNKQKLHKVGYFRELLATNQDIDEGLKPLLRLCRETVVRLGKTESALVRSLERDSFLVERVERLMTIPAVGPITALTWALEVGDVQRFSSIKKAISYCGLCGAERSSADITKRTPLSKQRNKHLQTVLIEAAKMAPRNSPELAMVYEQEKQKGNANRATLAVARKMVAYLVAVDRRQKGFLVVENKNRTAA

SEQ ID NO: 379567 - protein, 402 aa, unidentified
MNAVGIDVSKGKSMVAIMRPFGEIVSAPFEIKHTAGDIHSLVELINSVEGESRIVMEHTGRYYEVLAHQLSKANLFVSAINPKLIKDFDNDSLRKVKSDKADAVKIARYALDKWQNLKQYNVMDELRNQLKTMNRQFGFYMKHKTAMKNNLIGILDQTYPGVNTYFDSPARSDGSQKWVDFASTYWHVDCVRKMSLNAFIDHYQNWCKRKKYNFSQSKAEEIYGKAKELVPVLPKDAITKLIIKQAVDQLNSASTTVESLRTLMNETASKLPEYPVVMAMKGVGTSLGPQLMAEIGDVSRFTHKSAITAFAGVDPGVNESGSYEQKSVPTSKRGSSDLRKTLFQVMDVLIKTHPQDDPVYQFLDKKRAQGKPYYVYMTAGANKFLRIYYGRVKEYLSSLPES

SEQ ID NO: 379568 - protein, 415 aa, unidentified
MSLKIVYKICCGIDVHKTFVVACIASTNDKGVTSYESHRFSTYTSGLKTLLQWLLKHNCKDVCMESTGKYWIPIYNILENDCSIVLAHPKYVKAIRGKKTDKKDAKWIADLFKHDLVAGSFMPPADIRQLRDLMRYRFKLTCFQSSEKNRLQNCLTVSNIQLGNVVSDTFGKSAQAILDKLLENPADTSFDLEPLVYKSLKKKLPQLRDAINGYITPEQVGKLKVIKAHYESLESRKAELEELILALATPYQQELAILQTAPGIRSLFTAIGIISEIGTNMEAFPSAKHLCSWAGLTPTNNESAGKKKSVRVSKAGCYIKPLLVQCANAVVTSKKHPEIRNRYLRLKKRRGHKKAIIAIARMLLTALYHMLKNGENYNAELYRKYDLTPVDREITVEQAIIIARNQGYKIKSATA

SEQ ID NO: 379569 - protein, 459 aa, unidentified
MAQKVRQGLVTGNLQSRRTAAALSIAHPNAAGIDIGGAAHFVAVPPDRDSEPVRQFRSFTADLNQLADWMLECRVDIVAMESTGVYWIPLFEILDARGIQVLLVNARHVKGVSGRKSDVLDCQWLQQLMSYGLLRGAFRPQEQICVLRSYSRQRQQLLRGQAKQVQLMQKALVQMNIQLTNVLSDVVGLTGQAILRAIVNGERDGRKLARLRHWRVQAEEAEIAKSLAGNWREEHLFSLKQALAMFDAYAERLAECDEQIENTLSKLQRHSTELPPSQRRQHAKNSPKFDVRERVFRVLGVDITAIAGIDVGTALIVAAEVGPDFSRFPTVKHFTSWLGLCPGTKITGGKVISGRTLRSANRLAQALRVAAVSLRSSKSFLGAYYRRMAGRMEKSKAIGAVAHKLARLIYMMITKGREYVEQGLERYEARQHELALKNVAKRAAALGLRVIPATEACQL

SEQ ID NO: 379570 - protein, 359 aa, unidentified
MGYVGIDYHKRYSVLCATDERGQELKRRRISGNSATGFAQFFSELGEESKVVMEACWNWGWLYDLLAKIEGIDEVVLAHPYKTRLIAEAQIKTDRLDAQMLAKLLRGDLIAQSHAPSAATRARKHLLRQRLFWVRLRTMLRNRMHAILDRQHGLERPQLKNFFSRRGQTWLEEVQLPCAEDQPLLKQDLEVAELLEGKIKQLDRSIGQSQSEEEKLLESIPGIGPLFSSVIATEIDGVGRFNSATKLAAYAGVVPTTHASGGRVFNGRLLWQCNKWLRWALIEASWSAIQFSGYFGSIYRCARARGKNKNIAITMVAHRMIKIIWLLLTEKRPYTETLPDRSEDGMTVVVRRKVLGLAS

SEQ ID NO: 379571 - protein, 416 aa, unidentified
MNAAGIDVSSRKSTVAVLRPFGEVVQYPFDVHHSAENLIALAQQLKAIEGETRVVMEHTGRYYEGIAKALHEAGLFVSAVNPLLIKEYGNNSLRKVKTDKADAVKIARYALDNWADLRDYTPMDTIRYDLKTLNRQFQLASKQKTATANNLIALQEQSFPGIRKLFDSPVRSDGTQKWVDFTHDFWHADCVRGSSQNAFTERYRKWCKRNRYQFSMEKAAQVYALARSAVVLVQKTSVTKTLVQEAANQLTAISRSVETYRTEMNKLASQLPEYPVVMEMYGVGESLGPQLMAEIGDVRRFQRKQSLVAFAGIDPAPNESGDYRSRSNKTTKRGSPYLRKTLFNIMTIHLQRAPLDEPVFQFLDKKRAEGKPYYVYMTAAGNKFLRRYYAKVMAYFATLENLPPVDMESTGLQRTE

SEQ ID NO: 379572 - protein, 429 aa, unidentified
MSYRISGIDVHKKVLAVVVSDVEVDGEHQFERRMFGSSPDQLRSLAAWLLEQEVEEVVMESTAQYWKPVWEALERYWKPLRQKREGAGRRSGTLHLAQAQSNRGRRGRKRDFPDAERLVKRLVARELTLSFVPDAEQRLWRTVTRRKYQLRRDHVRLQNQVESLLEEAHIKLSSLVSDLLGASARRMLKALAEGETNPAALAALADWKLRATPEQLCDALGACTDLKPVYRRLLKMALEQLQFLEQQIDRLDQELASLLHPHQDAVQRLAEVPGLGVDSAQQIIAEVGPTAATFPSEKCLSSWVAACPGDDESAGMNYSHRSPKGNRHMRRVLNQTANAAARTKGSIFDIVYRRSVPRLGHNQAIGAIAHRQCRLIWLILHQGVRYEERGPAVTKQSKQRRTARMIRQLRSLGYRIEPPNPQPSQAQAQ

SEQ ID NO: 379573 - protein, 419 aa, unidentified
MDVIVERCAGIDIGKDEVVACVRGPSGNGRRRKRTRTFRSFTGDIEEMAGWFEAEGVTAVVMEATGSYWKPVWYVLEDRAFELMLVNARHVKILPGRKTDVLDAEWLAELVEHGLLRGSFVPPQAIRELRDLTRYRKRLVQTHTSECQRIQKTLEDAGIKLDSVASDVLGVSGRAMLAALIAGERDPEVLAQMAKGKLRRKIPELRQALRGRFSDHHALMIAMSLDHVDHLEATMSRLDTEIDGLFATNANEVGVPFDRARDHLASITGVGKRAAETILAETGVDMSRFPTAGHLASWAGMAPGNNITGGKRHSGKTTKGDVWLTETLTQCAWAAARSRDTYLSAQFWRLARRIGKKKAAMAVGHSILVIAWHLIANDCDYDDLGGDYFTRRNNPDRHRDRLIEQLHGLGYQVTLNRVA

SEQ ID NO: 379574 - protein, 391 aa, unidentified
MVCVGIDVAKDKHDCCILDSDGMVRADCFTIPNNMDGFKQLLQTIRNCTKKSDKIKVGLEATGHYSYNILGFLLDNDLAVYVMNPLHTNLYRKSLSLRKTKTDRVDARTIATMLLSDVDLKSYTDIAYHNEELKSLTRYRFDKVQECAKLKQSVSRLATILFPELEGLVSSIHGTSIYALLSEYPGAKQISEVHLTKLTNLLATASKGRYGKDKAIQIRDAARTSIGSVMPAKFLELKHTIKLIQELASEIDEIEDSIQKIIDELNPPILSIPGMGVNSAAVILAEIGDFSNFSSPDKILAYAGCSPSTYQSGKLTNCYAHMEKRGSRYLRHALYNATKYVCYWNPVFAEYLAKKRAEGKHYNVALSHAMKKLVRLIYALQKSGKTYLTAA

SEQ ID NO: 379575 - protein, 484 aa, unidentified
MGKRKTSTFERLSKGPLNRKQRRELGRRLVSDDPGLSIVHPNAGGIDVGNESHFAAVPADRDAQPVQEFGSWTADLHRMGKWLQSCRIDTVAVQATGVYWIPLYDILTEHGIRVVLVNAQHTKNVPGRKSDVQESQWLMKLHTYGLLRDSFRLAENMEGVRTIWRLRDRHVKEAGRAVQHMQKALTKMNIQLANVISDISGVSGQAIIEAILKGERDPHRLADLKHERIQASREEVARSLEGNWRKDVLFELQQAVDSYQFAHRQMQECDGKLETYLAMLPTRVIEVADQPDLQPTAVARKARKPKKPRGNAPAMDLAAELKRISGVDLTSIDGIDVMGAQTILSELGTDLTAFATENQFASWLGLTPSKDISGGKVIGRSRRKVQNRVAMSLRMSASTLLNSKSYLGGRYRHLRKHLPTYAAAVKAMAHYLALLVFRMLTKGQAWIDRGAAKFEQKRTEWELSSLKSKALANGFKLVPIAEAQ

SEQ ID NO: 379576 - protein, 412 aa, unidentified
MEVLYPRCCGLDVHKSSITACVLLAQAGKPLKHIRRFGSTTRELLELVAWLREFGVEHVAMESTGVYWKPVWNVMEGHFQIVLANAQHIKAVPGRKTDTRDCQWIAELLQHGLLRASYIPSVMIRDLRDLTRAWTSLSQEHSRIASRIQKVLEDANIKLASVASNALGKSGRAMLEAIIGGEESPERLADLALGHLRLKIPQLQTALEGRVRDHHRFLLRSLLRQLQFLETEIALLDARLEEIGREHLDLAEALDRWITVPGVDRVAAWSFIAEMGIDVTQFPTAAHLASWAGVCPGNNESAGKRISSKTRKGSPWLRRMACQSAWAAARTKNTYLSAQFKRLAARRGRKCAIIAVAHSILVIGYHLQRRRCTYADLGSSYFDRLHADGLKRYLVKRLESLGHSVILQPRTA

SEQ ID NO: 379577 - protein, 403 aa, unidentified
MSTFFAGLDWASQTHAVCVLDERGAVCERIEVEHNAAGLATLVRQLRRYGNPPVAIERPSGLIVDTLVAAGVPVVPIHPNVVKATRPRYRSHGAKSDASDALLLADLLRTDGHRFRALAPQSDEILALRALVRGRDDLVATRVQLANQLRSLLESFWPGAAVVFADVDSPIALAFIERYPTPESAARLGPKRMAAFCAQHGYCGRRSAEQLLERLHAAPISPCGELEMEARGELARSMARTLVPLVEQIRCLTSRIEHHIASLDDGRILMSFPRAGRVCAAQILAELGSVRERFDSDEHLAAEAGVAPLTYQSGKSRAVAFRWACNHRLRAALTCLADNSRHAHAWAASVYARARARGCDHPHAVRILARAWVRVIWRAWIDRQPYDPARHRGAQLLVATAEG

SEQ ID NO: 379578 - protein, 445 aa, unidentified
MNNTKKTRNKVKKNVEFNGLTVKNPNSAGIDIGSRDHWVAVAPHLTKDRIRSFPTFTCNLHEISNWLIDCNVQTIAMESTGIYWIPLLDILEDSGFEVNLCNARHVKNLPGRQKTDALDCAWIQKLHSFGLLSASFIPNIEIRALRTLMRYRENLTQENTRHVLRMQKFLTLMNVLLPKVLSDITGQTGTNIIKAIIAGKTNPKQLLKLKNKKVKASDELFLKALEGDYQHFYIKALSYEMKHYEYIAEKIRTVDIDTDMQLTKMIKLSSPEYDDSIVLSDVDKLIALIGVDLTQVPGFSVLSIRKLISETGLDMSKWKDAKHFSSWLRLSPSAKKSGGKMVNSETLSNKPRAAIIFRMCAGSLRKNKSPLGDFLRRKMAHKHYAKAITATARKLSVIYYNMLKFKSPYVQLDPDYYAQQHKERVINNLRKSAERLGFSLIETVE

SEQ ID NO: 379579 - protein, 348 aa, unidentified
MNVIGVDYHPSWQQICWMDTETGETDEKKLEHATGEAERFYRQLPGRALIGMESTGNCQWFVELLGRLGHELWIGDAAKIRASEVRRQKNDRRDAALILKLLVEGRFPRIWTPSSEEKDLRQLLIHRYKLVLIRAQVKNELQHLAMNQGVTKRQKLWSKAGEKVLRELPLAPWASRRREDLFKVRGMLDEQIALLDVAVKEAAEKNEKARLLMTQPGVGPVTSMAFVLTMGDVQRFRRGKHVASYLGLIPREHSSGGHQRLHSISKQGNRFLRMLLVEAAQSAVRYDPEFRREYLHRCHGKPRGVAKVAAARKLAVRLYWMLRTNTAYPGVVRVESSSRVPVVVRSNG

SEQ ID NO: 379580 - protein, 355 aa, unidentified
MCRTVKGYDRLRSVSNTSRTMKGSRFMIYVGVDVAKLKFDVCFDAHQKQQAKQKKKFATFANTDEGMQEFCAQLPEEAFVIFESTGRYSKLLYKTLCTKGIPCCCVNPYRVLQFSRAMGRNAKTDKTDAETQTLYGEKIQPERTYFMSEQNEELRELVRAREVFVEDLRRYKNRVEVPYISKAVNKMYADTIDHLEKQIKTVNQQINEFMVRNPEHAEKQRRLVTIKGIGAVTATSLLAHFSEIGTFSRQELGAISGTAPHTKQSGTTYMKEHIQGGRPELRRSLYMSAQIARRHDPEMHALYERHISKGKPPKVAITAVMRKLLIRANSILKRRVDYEVRGTLPFKDNQPKKAA

SEQ ID NO: 379581 - protein, 405 aa, unidentified
MKQPPRLHYAGIDWASRTHAVCVVDQHGAIRARFQVPNTGKGFTGLCRRLAKLGVAAVAIERPDGPLVEALIAQGLQVVVVTPRQVKALRSRYRASGAKSDPADALLLADVLRTDGHRLAPLTPDSDPTKTLRALSRTRKDLQEARVALCNQLHAQLERCFPGAIGLFADLHSPTAVAFLRRYPTSHAAAGLTQAKLAAFLRRLHYPGRTPVATLLSRIQTAPVAGTSPAEAAGRAICVLALLDAIQACARQERELEAEIIERLELHADAHVFTSLPKAGHGVRAAALLGELGDVRARFPDNDCLAALAGAAPVTITSGKRRVVKFRWACEKKLRNALIDFADDSRHASPWAAKVYADALARTGRHPHAVRILARAWIRVIWRIWQDGVAYDPAKHRGAVRLLAA

SEQ ID NO: 379582 - protein, 324 aa, unidentified
MIDGILGIDVSKNTLDASMSSCNKVRAKSFANSPDGWRHLLDWLIGQKIRRVHACLESTGLYSLGIACKLNEAGHVVSIVNPAQIRDFARTKLGRNKTDAVDASYIREYCELFKPAPWSPPSHAHRQLGELQTIRAGIVAGLTEWKNRKNSGMIDVVAQSLADATISHFTSQLGAVEKAIAQAIDNDTDLRRKRDLLLSISGVGETLASVVLAELPGPDVLRSSAEAVAYTGLNPRRHQSGTSIDRLTRISKIGNAVLRAALYMPAMSAMRYNPAIVALVTRLKARGRLNPKQIVVAAMRKLLVLCFGVLKTGKPFDPALAMGC

SEQ ID NO: 379583 - protein, 399 aa, unidentified
MDRNRTVAGLDVHKDSIYLCIMGHDGAIIFEKTYGVLTPDLRQMCQDMVERGVTEAAMESTAVYWVPVWNELCESMELKLVNPYFIKQLPGRKSDVKDAQWIAECLLKNLIRGSFVPEPIVQDMRKLNRRIFDLQEDITYYTNKLDAALHRCGFRLSNYVCKITGKSYRKAVASIAEGKTDPGTILKCIHGRVINKHGRETLLAAVTASFSQTDITVIRQYWELIAVYLRQSEECQSQLTALCESNFPTEYKRLQTIPGVKERAATAIIAETGVDMKMFATAAALVGWCGLKPRNDVSNGRYKSRKITHGNKYLRHILIEISWTASRTRNCFFSNFSYIQVTQKHKSKMKIQVAIARKILVAVWHMLSKEEDFIDIYLKRLEEHRLMEEKIKSLESKMA

SEQ ID NO: 379584 - protein, 374 aa, unidentified
MEGITFVGLDAHKVWISVAMLMPGRETAIEWQVPNEAAAIRKMLRRIEREAPGEVRFCYEAGPCGYALQRQIIAWSEASCMVVAPSLIPTKPGERVKTDRRDARKLAFLFRAGLLTEVQPPTEADEAARDLCRAREDARVDLLRCRHRLTKFLLRRGIVFTAGKRAWTNMHRQWLYSLRFEHVYDQTVLADYLLAVEHIEQRLTSFVSQLEQLAKDERYAQAVATLRCFRGFATVTAVTTVAELHTFHRFSSPRKLMAFVGLVPSEHTSGQRRRLGAITKTGNSHVRRLLIEAAWNYRHRPRVGTLARRRTGQSPRVIALADRAMQRLYRRYIHLTLKGVPSQKATVAIARELVGFVWAALSPLALAAELPHAS

SEQ ID NO: 379585 - protein, 438 aa, unidentified
MVRPLKTDGCTPAFAWEGRADTMPHETSSPLSPRAGLAYVGGIDSGMESSMMCCLTMDKRQGIKPSKFSNEADGLEWLFEHLDRLKTSAEQSLIGLEATSRSGETLYHALLKRGYRLCLLHPGQIHAFAQQRGLRAKTARLDAMTIARALLSGEVRFGSVPGEQVVTYREVTRWHHQLTEEVVRYKNDMHALLVVLFPACIQVFADPSRASALSVLKASPWAQAMSQADPEQWYQGLRQQCPGRYGRKPAGKLIQLAKTAVSSGGAIGARSSSMQILADQLEHTQKNLELVQQEIERVGDSDPHTCSVLAISALGPMTVAVLRAELGDVDRFARMDQVVASVGLDLQVKESGKWKGQTKLSQRGSGHVRRILSLAALRSIRRPSSPFGMFYHRLLDRGLKKGMAVIAVMRKLLIVVAHLIQTQEDDDASKVGVQALRA

SEQ ID NO: 379586 - protein, 401 aa, unidentified
MVSDFMKGRYNLMKIFVGIDIAKLNHFAAAISSDGEILIEPFKFTNDADGFQLLVSKLESFDKNSIIIGLESTAHYGDNLVRYLVTELYQVCVLNPIKTCQMRKNNVRKTKTDKVDTFVIAKTLMMQDDLRFITFFDLDMMDLKALGRFRQKTIKQRTRLKIQLTTYVDQVFPEIQYFFKSGLHQNAVYALLKEAPSPKEIASMHMTHLANLLKVNSHGHFTKEQAKELRVLAQKSVGANDSAISIQITQTIQQIELLDSQLEKIEAEMTDIMKFNDSVIMTIPGIGYINGGMILGEIGDIHRFSNPNKLLAFAGLDPSVYQSGNFQAKTTRMSKRGSRVLRYALVNAAWNVVRNNATFKAYYDAKRAEGRSHYNALGHCAGKLVRVIWKMLTDEVEFNLE

SEQ ID NO: 379587 - protein, 312 aa, unidentified
MKEPERFVGIDISKEELVVAVRPTAELQSFPNTEEGLAALVRHLQPLQAHTIVLEATGGFARAAVNALALAALPVVVVNPRQIRDFARSVGLLAKTDAIDARIIARFAEAVRPERRPLKDLETQQLEDLNNRRRQIVEMISAEKNRYAMATEKRVRRDIQVHIRWMEKRLEDINDDINDLIKKSPIWRQKEKILTSVLGVGPVVTTTLLCGLPELGTLSARKLSALVGVAPFNRDSGKSRGKRSCWGGRAHVRAALYMAALTASRCNPVIREFYLRLRLAGKPAKVALVACMRKLLVILNAMVKNNTCWQQA

SEQ ID NO: 379588 - protein, 488 aa, unidentified
MKERKFKNHVKGSRGEEFREKIKGLKAGEIIGVAIDVSRSYYRAMVFNFDGEVLRDPFDVDVFREGYDQLMGEVKRLVNEFGGKKVFWAMEPTACYHHNLARHLVGDGEEVIFLNPSQVASNRDQRMLYGLKGDDIDLGAIADLLIRGEGYFYNLDEGVYLELKERTWWREKKLKMQTQLKNQIRARLERIFPGLSSRYGGNQPLVSDLWGQGFARGLMKVGLTPRQILQMPIRCLKERFKDVGHPISTRCVERMKAYFGRMLLPEDEVLGPIIELLRRDVRLLEALELEMAEVEGEMIEGVKKTPWSHLLGKIKGIGDIMVASFAGAVGDITKYSWGSQIFRKSGLDSKSRQSGEYEAKGLPIRRMGSRLLRCILYKMAGLVIKDNPYFGLYYEYLVGKRKKLSKKAHIAVANKLTRVMFALVRDRAEFSPPTAKIDYLQVLFSKAKKERRQRRDERRKRREKASYDSNLFYGLEAPSLGEAISLNS

SEQ ID NO: 379589 - protein, 362 aa, unidentified
MRMKTHPQYFISKPRRSSRVEITIGIDLGDIWSHYCTLNADGEVVDRGRFRTNPSGVDKRFRDIEPARVAMEAGTHSIWVSEQIRELGHEVIVANVRELRAISHSDRKSDKVDAEKIARFARLDPEILRPIAHRTVAQQETLTLIRARDVLVRLRTGAVNSIRGLAKPCGYRLPASSTLTFAKRCLAMLPPALAQALGPLLHQIADMTVKIKQYDREIQKLTETIYPETQALIKVYGVGHLTALTFVLTLGKKERFQRSRDVGCYLGLRPRRSQSGDSDPQLGITKAGNGYLRQLLVECANHVIGPHGKDSTLRRWGLSLGARGGSHARRRAVVAVARKLAVLLHRIWITQEVYVPFYEVAA

SEQ ID NO: 379590 - protein, 316 aa, unidentified
MAIDISKATLEVWLLPDARGVSVPNTPTGFTQLIRQLADDEPTQIVVEATGSYHVKLTVALDAAGMTPVVVNPSWIYHHSRSQGRRAKTDRGDARQVARYGQQHHLQPRPLLDTTGRERAALVVRRGDVIKLRAMEKARQHTAEGAALTDIRDHLAYLTDRIAGLEATIQTTAAADPFWTRRVAILRSVPGIGPVLSVLLAVRLAELGVVDRRQIAALAGVAPHPQDSGAWHGRRAIGGGRRDVWKALFQGSLVMSQHNPAMQAHDRQLRDRGKPHKPALIAVARQMVGILNAMVRDDLLSSETKVGQGVFLAPSP

SEQ ID NO: 379591 - protein, 346 aa, unidentified
MIIVGCDFHPAWQQVAWMDTETGETAERKLEHSNGEARGFYASLSAAALIGVEATGNCQWFLNLMTELGHQVWVGDAAQIRASYVRKQKTDKRDAAHVLKLLLEDRFPRIWVPNREERDLRQLLLHRHKLVEMRTRVKNELQHLALNHGVRKQRKLWSEAGQELLRSLALQPWAAQRRDDLFQLLAMLQRHIGLLDQAVKEKSQLDKMAQLLKTQPGVGPITSLAFVLTIGDVSRFQNGKQIASYLGLIPREHSSAGKQRLGGISKQGNRMLRMLLVEAAQTAVRSDPEFRKQYLHRCHSKPKAVAKVAAARKLAVRLYWMLRTQTPYPEIVRIESSPRVPLVGAS

SEQ ID NO: 379592 - protein, 400 aa, unidentified
MSTSLSSNPEQLRSLAAWLLEQEVEELVMESTAQYWKPVWEALERHWKPLRQKREGASRRSGTLHLAQAQSNRGRRGRKRDFPDAERLVKRLVARELTLSFVPDAEQRLWRTVTRRKYQLTRDRVRLQNQVESLLEEAHIKLSSLVSDLLGASARRMLKALAEGETNPAALAALADQKLRATPEQLCDALGACTDLKPVYRRLLKMALEQLQFLEQQIGQLDQELASLLHPHQDAVQRLAEVPGLGVDSAQQIIAEVGSTAATFPSEKQLSSWVGACPGDDESAGVNYSHRSPKGNRHMRRILNQSANAAVKAKGTIFEIVYRRTVPRLGHQQTIGAIAHRQCRLIWLILHQGVRYEERGPAVTKQSKQRRTTKMIRQLRSLGYRIEPPNPQHPNPAQGQ

SEQ ID NO: 379593 - protein, 418 aa, unidentified
MGLQVLYARCAGLDVHQKTVVACVLLTQADGQERKAIRTFATTTMSLLSLADWLASEQVSHVAMESTGVLWRPVFNILEGQFQVILVNAQHMKAVPGHKTDVKDSEWIADLLRHGLLKASFIPPKPIRDLRDVVRYRKALVREQNREINRLQKVLETANIKLSSVASDVMGKSGRAMLEAMLAGESSAEVLAGLAKGRLRSKREPLREALEGRVEATHRTLLRHLLDHLACLEEQIAQLEGQIEQHLVPYQHQMNTLLQIPGIGRTVAASILGEIGVDMRCFPSDRHISSWAGVAPGNKQSGGKRLKAGSTKGNTHLRAVLAEAVWAISHTHDNYLSAQYHRLAHRIGKKRAIVAVSHSLLIIIYHLLRDQQQFHDLGPHFFEQLDHERLRSSAVRRLEALGYRVTLEEQDEQKEVLG

SEQ ID NO: 379594 - protein, 349 aa, unidentified
MTTLTFQHVVVIGGVDTHADMHVAAACDHLGAVLATKSFVTTAAGYRALLKFLRSFGQIREVGVEGTGSYGAGLARYLTEQAVAVVEVNRPNRQARRTHGKDDVTDAIAAARAVISGQATVTPKTHDGAVEALRVLQTVHRSARKARTQALNQLHALVLTAPEPIRDQLRALTNPALVTTCAGYRPSKGDDLNCITRLGLRELAVRVRDLDAQISRLQTRRHRLVRATAPALLAIYGVGPDTATALLLAAGDNPHRITSERSYAALLAASPIKASSGKTNRHRLNRGGDRQGNSALWWIVITRMANQPATRAYVERRTHEGLSTPEIIRCLKRYVAREVFNALPREALA

SEQ ID NO: 379595 - protein, 421 aa, unidentified
MNQLADTQYTAYVGIDWAAAKHDICVQSADDSAREFACISSQPEGIEAWAQDLNQRFGGPIAVALELSKGPIVSALQKYDFFVLYPINPSTLAKYREAFTPSGAKDDPTDAELAVDLITRHAERFSPLKPQSVDMRKLIGLVEQRDKFLSDQGRLVNRLGHALKHYYPQVLEWFSEHNTVVFCDFVSQWPTLTQVKRARKASLERFFKSHHVNSAELIERRITAIKAAMPLTLDAAVIEPHRLQVEMLIEQLRITIKALKRFDDAIKVTAQKLPDYDLLFSPLPGAAKVLAPRLLAAFGEDRQRYPQADALQKYSGIAPVTKRSGKSTWVHWRWQCPTFVRQTFVDWAAQTINKSAWAGAYYRQQRAKGCSYQVAVRALAFKWIRILHRCWQDRTPYDESKYLEALRRKGSPLLKYLAEAA

SEQ ID NO: 379596 - protein, 429 aa, unidentified
MDYPPVAGIDVGKNFSEMCILSPNNEIYHRIKIYHDSIDSIKKAIGLLQKAEKDFAIRPVVVLESTGHYHKILFHYLSDSGFEVSIINPIQSDSIKNIGIRKVKNDKFDAHKIALLYRFSFIKTTVVPDDVIDCLKSLCRQYYKLGDELTTYKNRLIGIIDQVMLNFTDVFQNVYSKTALAVLDRYPSPKQILKANKKTLISLIEKTSKKGLAWSTEKYELLVLKAKEFKDLSISNPGNLAILKVNISMVRTLQEAQKNILDAINEIILADSLEDNPVLAPIINLLCSIPGIGVLTAATILAEVGDFSAFSSPNKLVAFFGIDPSVNQSGEFTGTRNKMSKRGSRLLRRVIFTTALANVRSKRNGDKTNPVLYEFYQKKCINKPKKVALGAVMRKLVNIIFAVMRDKKPFELRTPEEHEELLLNRSLVA

SEQ ID NO: 379597 - protein, 356 aa, unidentified
MSEGSWVGLDVHARSVVAGVIDMGSGEVRSLRVPPGSEATVAWLKTLPAPVRVVYEAGPTGYGLARLCAEAGISCVVAAPSKIRPAADRVKTDRRDAKRLARLLRLGEITPVRVPGPVEEAARDLVRAREDARGDLMRARHRLSKLLLRHGAVYDATAWTRAHDAWLRKQRFQDGPLAIVFDECYSRMIDAKTSRDTLDKAIAELAASEPYVDVVERLVCLRGVSTLTAFALTVELGDWNRFRPESLAPFLGLTPSESSSGERRRQGGITKTGNTHARRLLIEAAWHQRSAPRLSVTLERRRTGKSLAVRAQADSSARRLHGRWNALEARGKPRLIVVVAVARELAGHCWALATME

SEQ ID NO: 379598 - protein, 335 aa, unidentified
METKHFVGIDVSKETLDISLVKEGQVIVYSQIKNTTEQIKSSLPKLLKQCKATFGNTLFCMEYTGIYSMLLIKWLQQKEATIWMESGIHIKKSMGLTRGKSDKADSNRIALFAFTNRHKVKLYKAPRLIIEKLKALDAQRSRLVKAKALLVKPVQEHKKFIDASVSKAVEKFATKAGAEIAKQIIAVEKEIKRVIAADDRLKKLYSIITSVDGIGFVTAVYMLVSTNEFISINDAKKYACYSGVVPFEHTSGTSVKGKKRVSQVADKNIKKLLHMAALTAIQHKGELQDYYFRKVKEGKNKMSVLNAIRNKLILRVFACVHRGAKFEKEYQYKVA

SEQ ID NO: 379599 - protein, 347 aa, unidentified
MSIAMIGLDTAKSVFQVHAVDEAGTTEVRRKLRRSDLIMFFEKQEACTVVMEACGAAHHWARVLIGLGHEVKLVAPEAIKPFVKKGKKNDAADAAAICQAACRPDIRFVPVKSLEQQGILAVHSARSLLVKQKTMLANAMRGLATEFGVTVPRGIGRLEELVALADVGNTLPGRARRVIRELLEHCRILAASIEVLEAEIVAHARQDEAARRLATIPGVGPITASLMAATVADIALFKSARQFAAWLGLVPRQYSTGGKTRLGRITKSGNRELRKSLVLGATSMVYRAAAWNSAAGVWTRAILERRPVRLVTVALANKMARIAWAVMTRKEIYHPNAPVTVEAQAVA

SEQ ID NO: 379600 - protein, 357 aa, unidentified
MEKYLKQSLGLDVSKLNLSLSLGSLNEKLVKKFESHPDVSNDLKGYKVLLKWLKASVDSEVELLVVMEATGVYHQGIAHYLYEQGYSVCVMQSGRVKRYAQSLDQRSKTDALDSRMLSMLGLERNIRLWHPPSEELQELKGLSRERSSLLNDRTMETNRQGAIASSVHNNARALKRHKIRLKLLNTQIAAVEEDMQLLISKNEVLKRKLDYLTSIPGISFISAATVIGETLGFESIVNGKQLASYAGYDVVLRESGNFKGKTRISKKGNSHIRAVLHMPSMTCVRCNPTLKQFYNRLKPNKAKPLVALVAVQRKLLILMYTLWKNEENYDAKFEIKKQQKHEALAARDNSLINQPVS

SEQ ID NO: 379601 - protein, 393 aa, unidentified
MIYVGIDVAKDKHDCFITNFDGEVLFKAFTIANNLDGFNDLYQKIVSVTEDITKVKVGLEATGHYSYNLLGYLIDKSLPTYVINPLHTNLYRKSLSLRKTKTDKVDAHTIASMIMSDVNLKSYSDTSYHNEELKSLTRYRFDKVQERAQLKQSVSRLVTILFPELEKLVPTLHMSSVYALLIEFPGAKQIAEAHLTHLKSLLKDASKGRYGRDMATEIRDAAKHSIGSVMPAKSLELRHTIRLIRELDSEIEDIEAAIEAIMEELQSPITTIPGMGFRMAAMILAEIGDFSFFDSPDKILAYAGMSPSTYQSGHLSLAGTYSHMEKRGSRYLRYALYNATKYVCHWDPGFAAYLAKKRAEGKHYNVALSHAAKKLVRLIYALEKSRQPYRRAA

SEQ ID NO: 379602 - protein, 361 aa, unidentified
MKKPAQHLTAEVPRRQAKVEITIGIDLGDVWSHYCTLNQDGEVVDRGRFRTSPKAIEKWFTDVPPARVAMEAGTHSIWISAQLQELGHEVIVANVRELRAISHSDRKSDQVDAEKLARYARLDPNILRPIAHRTVQQQEALTLVRARALLVRLRTAAVNAVRGLTKSCGYRMPASATTCFAQRSLAVMPPGLAQALGPVLQQIAEMTVKIRQYDRQIQQLGQTEYPETQALLKVHGVGHLTALTFVLTLGSKERFGRSRDVGCYLGLRPRRSQSGDHDPQLGITHAGNAYLRSLLIECSNHILRPHGRDSALRQWGLHLAARGGKQAKSKAVVAVARKLAVLLHHLWSTQKPYMPFYEQAA

SEQ ID NO: 379603 - protein, 428 aa, unidentified
MDQVNHNRLEEFRQLRQEVRHSGEYLIVGIDIAKDRHYAFFGTATGKTLLRRLVFSNDHEGFRKLLDQAEALRVQHGLKKVVYGMEPTANYHKPLGEYLIGLGRTVVLVSGVTVKRNRETLDGRWDKHDVKDSANVADLISQGKCLYYEHPSAELRGLRGLLSLKRRLKKQEHGYKVRIRNHLIAQYFPEMDRDYAQLGAEGLSIVRWCFPASQIVQLDVDPFIERVTSRRIRVEKRRRLEVIWEKAGESIGCDGVPGVEHEAKVMVEGLRQIREMIKETEEKILGLCKQFPAYPYILTIPGFGPDVSAKVLGAIGDPDRFQNGKQVLKMGGLDLSADRSGKDSDKATPVISKRGKADLRYALYQAAFIASTKNRDFMLYYTNKLRGREKEKGIHTKMIVKLSAKMLLIAWTLMKKKEAFDPAYLITE

SEQ ID NO: 379604 - protein, 402 aa, unidentified
MIYAGIDIAKSSHVIGAVDERGKDAAKSMQFANSAEGFGKCAAYLEGLGAPAEEMLVGMEATGHYWLPLFSFLHAQGYDVVVINPIRTDAMRRFKGSSRVKTDLVDCTLIADTLRLGEFRPSKLGDESMVELRQLTRLHQGLKESVADLKRQVIVALDQVFPEYDSIFSDTFGESSKAFLRKCPTPEECRGVRVDALGNTLSRASRGKLGREKAEEIKGIAKESCGIDRGTRTLSFQIKLLVEQIDFIEGQIEEVEARIEEGIETTEPLILTIPGIGHVLGAQIASEIGDIHRFRNASAVVSYAGINPSVSQSGKFSSSENHITKQGSPYLRRALYLAATAQLRLSTPFRDYYDKKRADGKSHREALIAVARKLVHVIYAVLSKQEPYRPDAVNANPVSRSE

SEQ ID NO: 379605 - protein, 421 aa, unidentified
MSYKIASIDIHKKVLMVVVASTAAEVADAAGAAVEFERRKFGAGADQRNQVVSWLQHHQVQEVVMESTAQYWKPVWLDLEPHFKKLHLAQAQSNRAPKGRKNDFADAKRLARRLLAGELILSYVPEPEQRQWRLISRGRLQLVRERVRLHSQLEALLEEARIKLSSVISDLLGVSGRRILTALAKGESDPVKLAELGDDGLKCTKEQLADALKGSPAAGHIELLKLHLERLHLLDKQIEELSRMSAKALMSHQNAVVRVAKVPGFGVESAQQMIAEVGVDAAVFPSAGEFASWVGVCPGSNVSAEQNHSSRCPKGNRYVRRLLSEAAQAAVKKKGSHFQNLFRRFLPKLGYNGAIWVVAHRLARLVWKILHDDVHYIEQAQETNPRAKKRRVQKLAQSLRNLGYQVTLTELIPAPAVGGSQ

SEQ ID NO: 379606 - protein, 366 aa, unidentified
MVWSAAYPTVQLGYKGLTEECAMELFTLGIDLGKTTFHLVGMNQRGEVVLRKRFSRVQLLHFTANLKVKLIGMEACGGSHFLGRALREQGHEVRLIPAQYVKPYVKTNKSDYIDAEAIAEAVGRPTMRFVPVKSDDQLDLQSLHRVRERWVMRRTAVINQIRGLLLERGTTLRKGRRYVDEALPGILAGDLSNLSGAVLVLLAELKQELEQLAEKIDRADKSVEKIAREHEACRRLVKMPGVGPVTATAIIAAIGNGAAFRKGRDFAAWLGVVPEEHSTGGKQTLWKIPQRGNQYLRRLFVQGARAVMQHRTKQSSGLSAWLAQLTARTHQNIAIVALANKLARMAWAVLAKNETYRPPLLAGDNI

SEQ ID NO: 379607 - protein, 310 aa, unidentified
MHILGFDVAKESIDIAAITRTGKVKTLWQVENTSEALTDFLSTVVTTLKRPCVVVESTSYYHEKTVRACIAAGIPCRLLNPLLTKQMIRATPRGKKTDKTDAVLIARLGAQGEGYLVETVSQNAKPVLRTGAQLRILASSMLLIQHHLEASLTGQAHLLEVLTTCRDLVNSTATQFQKAGAASADPVTMQLLMSIPGVGENTAAVLLAEYGDITRFHSAKAVVAYAGLDPRIPSIRSCAQQNWQTHQERQSRNQTLTLSGSQCCQNSRFRICRLLSEETITGQGVSRSHYCHCPKAPLPDLCSMDSRDCL

SEQ ID NO: 379608 - protein, 443 aa, unidentified
MSRKKRTHLRGKRGQAFANKIRGIPLDQILCVSMDVHKYFHVVIIHNALGEIVTPSFEIDIFQTGFDLLCRTVDETIVRTGAQVVLTGMEPSSHYFENLARHLHKRPQPVTLVNSFAVKKNRDQQMMHYEKDDEIDTAAIGDLLKRGEGSPYNPPTGIYLQLQHLSRVRFSKVKMRTALQNQIIGHLDRIFPGLIIIGEEAKERYEPLFATDFWECQTMQHLIRVCPNPHDLVAMSPHDLIEAFHARNYRMGPVRAAKIIAYAKKVLLPDPELAAIRCHLLPHDIALLEDVERHIAQLERDLYTLLAETPYLVWTKLKGLSDTQVASLAGAIGDPANYKYAAQVFRRSGLVSGRNDSGTRQRKGKGKRVVKVGDVYLRRALMNGLATLILHQPVLRDYCNKLKVSKHAGVARVATARRAMGILWAVLRDRRSETLILKKGAEM

SEQ ID NO: 379609 - protein, 352 aa, unidentified
MKKTLFIGIDFAKANFVASALLGEDPDPVCLPKSFSNDDKGAKALVSWIVKLLPETCSFSDVLVCGEHTGSYSLLLPRRLFDAGIDCWLENAVCIKNGSGRIVREKSDSADATMIAEYARTFYQKRVRLFVPESPVLSELRECNDIRRRLVKEQAGLKCKKHDAEVRLKAKPGSKAIMMNIKILERQLAYIKEQIAKVDRQMYSLIRAEKKLSGIYDIIVSINGVGPVTAIALIVLTSGFTTFFSKRSLACFLGIAPFRSESGTSIQNGSHRSRQADSYYSGLLYMVAVSAMIWNPEIALYRERLLKKGKPKLVIINNIKNKLITIIWAMVKNDTLYDPDHHLKVARQYQTA

SEQ ID NO: 379610 - protein, 407 aa, unidentified
MTTPTPAVYIGLDVGKSDHHAVALTAAGERVYDKALPNDETRLRAILTDLAAAHGPVLLVVDQPATIGALPVAVAQSCDGVEVAYLPGLAMRRIADLHPGSAKTDARDAAIIAEAARTMPHTLRSIRVDDEQIAELAMLAGADDDLAAQITAASNRLRGLLTQIHPALERVLGPRITHPAVADLLGRYPTPGKLKTAGPGHVRARLRKHAPRLASSLTEEIFEALAQQTVVVAGTEAAATVVPILAEQLAGLIQQRARLATQVEAVVEAHPLHPVLISMPGIGVRTAARILTEVVGKDFADAGHLASYAGIAPVTRRSGTSIRGEHAPRGGNKRLKRALFLSAFASLHHGPSRAYYDRKRAQGKRHNQALIALARRRTDVLYAMLRDGTLYQDPTPPPAPSSVALVA

SEQ ID NO: 379611 - protein, 344 aa, unidentified
MTYYAGLDVSLRTVNICVIDDEGELVAETKLASDVQDIVAYLDDLELELASVGFEAGTLSQYLTYGLQAADFNVICMEARQVKGALSAMRNKTDKHDARGIAQILRSGWYNQVHVKSIESHHIRMLLSSRRAVLSKCVDLENEVRGLFKVFGLKLPPKLGHGAFDDKVRDIIEADEALSHALLPLLEARLALYRSFRELDNRTRKMAHADAVCQRLMTVPGVGFITALTFKAGVDDPARFKHSRTVGAHFGLTPRRSQSGEIDIDGHISRAGDPDVRSALYTAANAMLTRSAKWSSLKAWGMHIAKTRGHRRAVVAVARKLAVILHRIWIDDTQFRWGTEAARS

SEQ ID NO: 379612 - protein, 349 aa, unidentified
MDTTSPLASIGVDIGKEVFHLVGFGTDGKIAFRRKIKRLALTETFKKLAPCVVGMEACLSAHFVSRALRKLGHEPRIIPAIYVKPFVKGQKNDYNDAEAIAEAALRPNLRTVREKSQEQLDLQACHRVRSRLVSRRIATINQITAFLIEQGIAVRAGVTALRNSLFEILKNREDEISPRMSDLIVGLYEDWLWLDERIETITKEIEEISQREGNCLRLMSVPGVGPLISTAVVAAIGTGEAFDRGRDFGAWLGLVPRQYSTGGRSILGSISKRGSRYLRTLFIQAAKVLLMRPKNWPKFSFGPWLTNAAPRMHRNKLATALANKLARIAWSVLSTGKAFDTHKLEIEAA

SEQ ID NO: 379613 - protein, 389 aa, unidentified
MAQPFDASKSLATLEQDNTVIAVIEMSQSKWLVAAVVPGVKRQPLKKLQADEEVLLKLLYRWRTEAGQTGREIKRVVVAYEAGRDGFWLARWLRTRGVEAYVIHPASIAVSREHRRAKTDRLDTELLMRAFLGWLRGEKRHCSMAAVPAAEEEDARRPNRERENLVTERTRIANQMKAILARFGIRSFKPTLRKAAEKLDGLRTAEGTPLLENTRAELSRHLARLRVVREQIRAIEQKRLHKLAAAPAEENGPHVMVRLIARVFGVGVETADMLVNEVFARHLRDRKAIARYAGLTGSPDESGKRRRERGLARAGNARVRRGMIQLAWCFIKFQKDSALAKWFDARTADGRGSTRKTMIVALARKLLIALWRLVTTGEVPEGVILRPAA

SEQ ID NO: 379614 - protein, 457 aa, unidentified
MAEVALRSGRLLGMSARLSGVPWLLIEICARSLVTDASAGCSTGRCQHRDRGDGDTGVAKRDRAWVGVDVGKTHHWVCVVDDQGARLLSRKVANDEADILAIITAARSLAAELVWAVDIIGAPSALLLALLAGSGLTVRYASGRVVAAMSAGYVGEGKTDAKDAYVIAETARLRRDLAAIDADTDLVRNLAVLTGHRADLVADRVRMINRLRDLMTSVFPSLERAFDYSSHKGALVLLTGYASPDRIRRIGETRLTGWLRQRKVRDSAGVAARAVTAAKAQLTVLPGQDLSVDIITELATNILTLDERLKKLDTQIEELFAQHPQAAIIQSMPGFGPFLGASLLVSAGDLRAFPSAGHLAAAAGLVPVPNDSGRRTGNLHRPLRYSRPLRHVFYLSAQTSMMRAGPNRDYYLKKRASKRTHTQAVIALARRRVDVLWALLQDNRTWTTEPPAVAQAA

SEQ ID NO: 379615 - protein, 428 aa, unidentified
MNCNTQNAKIASITEKTLIVGIDVGSETHFARAFDWRNYEYTKKPLEFSNTEAGFLTFKAWVEDIAEKQGKTAVIPGMEPTGHYWFALGKFLQDNGMKPVHVNPHHVKKSKELDDNNPNKNDRKDPKTIAALVNEGRFSYPYIPTGIYAEIRSLSNLRFQTQEELTRIKNRIARWFAIYFPEYKDVYGDLKTVSGRMVLKVAPLPEDIGKLGVEGVNQIWRSAKLRGAGIKREKTLVSAAEHSVGSKEAPEAARMELKNLLDDMDVYVSRLDELLVNIEEKLKEIPYVDKLMEIKGIGLVTVSGFIAEVGDIGHFDNPKQLQKLAGYAIVANDSGKHNGENRISYRGRKRLRYVLYEAAISLIGKNAEFKSIHEYYRTRKENPLKKMQSVVAVACKILRVFYTILTKGVDYDPVKLLGDIKRPQLQAA

SEQ ID NO: 379616 - protein, 386 aa, unidentified
MKDERFTPQDYDVFAGLDVDKRSISVTFTNHEGFIRSLRMPYNVEHLLNHVRKHFPNQKIAFAYEAGPTGYGLYDGLAAQAYPCLIAAPSMIPKAPGQRVKTNRLDSRGLSENLRGGQLKGIHVPSQLYRELRHLTQLRDTFVSEMVAMKQRIKSLLLFEGIEFPPAPAGNGQWSFMVKAKLRQLPCSRTVRFKLDQLLESLEFNEKQIFKTTKEIRRFCQTDPELAQCIKYLMTIPGIGWIVASQLLARIGDWRELKNVRQLAGFLGLAPTENSTGERTDRGSITHTGDGRLRSKLIQASWSAIRQDGELREFFRSVRQTHPRHLASRVAIVAVARKLSVRISVVLMQQRPYVVREKVHSAPLTQEETVPQGTTRRLAEPGEKNS

SEQ ID NO: 379617 - protein, 367 aa, unidentified
MKKISTVAAKQIKNFREQKLTIGLDLGDRSSWYCVLDEAGEVRLEQKLGTTPKAMKEVFGKMPRSRIALETGMHSPWVSRVLSELGHEVIVAHARNVRLIGESRRKDDGFDARTLARLARIDPQLLSPVQHRSAQAQAHRMVIRARAGLVRVRTSLINTARGLTKSYGERLRGCSPRNLNVETARQLSPELQAALEPLLGAIESLSQRIYEYNQQIAKIAKESYPQVARLEQVKGVGTLIALTYILTLEDAQRFRKSRDVGCYVGLQPGRRNSGQSEPQLHISKEGDPYLRTLLVQGAHHILGPFGADSDLRRWGLKLAERGGKNGKKRAVIATARKLAVLLHRLWVSGEAYEALRNSRQVLLPAAA

SEQ ID NO: 379618 - protein, 377 aa, unidentified
MKAPSTRPAAVLGLDVGKSSHWACLIDRDGEVLSSAPVRNREAELDALFASVPAGTLVVVDQFRNIGSLAVRRARAAGLGVAHLPGLAASRAAGLFAGEAKTDERDAAVIARTALGVPDSLSGVPGRGEALEAARALSSQRDHVVACATRDKNRLRAVLLESCPALEAAVDLSDRRWLELLAGFGGAWGIARSGAEGPQAEAAGEAAAASTAPPPALIEAENRQVRFLAARISEALDEAGALEAETAALLEGDETYACLLTVPGIGPRTAAQLAVSVDIGRFPDHDHLASYCGIAPRVRSSGTSVRSVRASRRGDARLKSLLIFSCNSLVRSSGRYGEYYRACRARGMGHGRALKAVARKRLRAIYAVMRDRVPYRE

SEQ ID NO: 379619 - protein, 482 aa, unidentified
MARTKKSTYERLMSGPLNRQQRRELARRLKTEDPGLEIVNRNVAGIDVGNESHFVAVAPSRDTQPVREFGSWTADLERMAAWLKACEVETVVMQSTGVYWIALYDVLETRGFKVCLVNARDTKNLPGRKTDVQESQWLLKLHTYGLLRDSFRPPDEIRALRSLWRLRDRHVKEAARAVQHIQKGMISMNLQLSNALSDISGVSGQAIIRAILKGECDARKLAKLCDRRVKASEEEVARSLEGNWREDMLFELKQAVAAYDFIQVQIAECDQRLLKLLAGLPAREAQTAAIPAAAAVIAKPRKKKKSPAKNAPRLDLETELARICGVDLTSIDGIDIMTAQTIVAELGTDYSRWKDEAHFAAWLGLTPSRDISGGKVVRQQSRKVKNRVATALRTAAQTLLRSDSYLGARYRFLRTRLGAPKAIKAMARYLACLVYRLFTHGQAWVDRGATQFEGRRQQRELAALQNKAAANGFKLVSLNNPT

SEQ ID NO: 379620 - protein, 378 aa, unidentified
MDRATNSTAPADRLFCAVELSKNSWLLGIQFPDRQKASVYPIKGGDSEGLMAKLFAACDRWTKVSGKKPSIIVCYEAGYDAFWLARFLKARGIECLVVDSGSMQVNRRSRRAKTDRIDLAKLLRALIAWCGGEQHVWSVVRTPTVDEEDLRRSHRERNRLITERTAHVNRIKGLLFAQGIRGINVKARYKTLRIDKLVTGEGRSLPPRLAREIKREIDRLELVQQQIAAIEQERDESPTTCKETEKKRAQLLLLKGIGPTGSAVMAREVYYRQFSNRRQIAGFLGLATSPYDSGQVERSQGISRAGSGPVRATMIQIAWLWIKHQPKSEITRWFVQRTADQSGRIKRIMIVAVARKLAIALWRYLEQGLVPQGAALTR

SEQ ID NO: 379621 - protein, 363 aa, unidentified
MPSIAHVGLDVHKETTRAVILPHDKSHPVDECTLPTTRKALVKYLSQWAQEFELRCYYEAGSCGYEPQRWLAGAGIACEVIAPSKTPRGPGDRVKTDRRDARLLAYQGRAQALARVHVPTPEQEAVRAAVRCREAHMRDLVAAKHRGLKFWHSCGHGYTQGEHWTQRHWQWLHARSFAGVNDWTARQYLADVQYRLGRVAEADRAIVALAESEPYRSAVGKRCCFRGIDVLSAMVLITETLDFRRFPGAPQYMGYWGLTSCEDSPGKHRRQGGITKAGSRRARRVWIEAAWHYQHKPAIGARLYRRLAGQPPEVIAHAWKAQQRLYRKYWRIARRKDTRTAVVAVARELSGFVWAVMTQFECD

SEQ ID NO: 379622 - protein, 359 aa, unidentified
MAYVGIDLHTTKFTATFKEEDESEVGKSYYLEDDGIDKFIHDVDDDDHVFVEASTPTFEFVDRIKNSVNSTLVVDPFQFRLIKDSGKKNDRDDSKRLAKMGKYHTETGKEFLPEVYVPEENIRKLRSLFTTYNLIKKEINQTKNRIHSLLKQLLLPYSKTTFFEETRYELDELDMDEVYKIQIKSLLTILDELEIQKEEIKREILLNGEGYMEDIDILTSIPGVSVFIALGLISDYARVDRFPNAKKFCKYLRSTPKTEQSNETTKTGKTQRTGRKLSMVLMLEPISHLKNSADYLSKFYSRIKEAKSSGKARVALVRKIFKIMYFMLRDRKYYHYMRNPLHEKKMREYRNLLKKKKVA

SEQ ID NO: 379623 - protein, 354 aa, unidentified
MQYIAFDSHKRYTYAVVEEKEKGRVMEKRIEHRRGEIEAFLSQCEVGSPVALETIGSWYWIVDEIEAAGMLPKLVNARKAKMMIASSKKTDRLDAKGLNTLQRTGTLPTVWIPSSELRDIRELYRTRMMLTQMVIRLKNRILSCFSKYGISFDETSDAFNIKGRASLEAALEILPTQTCFALKELLRQLDLLQEAVKEFEARMLQVQSNDPEIKLLQTIPGVGPILSYVIAYETGDIHRFPSASCFASYAGTTPSVHASGGKVRYGHTPSSVNHYLHWAFIEAANVISMRHEVLRFRHTARLYERLRQAKGHDIAVGAVARHLAEATYWILTTKIAYREPNQNKQVVVVSSKEG

SEQ ID NO: 379624 - protein, 477 aa, unidentified
MSRAQRLLDLIQLFRRHRRPVSGAALARELGISLRTLYRDIETLKGQGAHIEGEPGVGYILRPDPMAEVDSDRRSWQSEVATPLTLETIMQSVVARPEALSAIRNDLGAIFVSLELSRSTWLITSLSPGGGEKMSKHSVRGGDVAGLLERFAQLQKKAQARTGRNFPIIVIQEAGLDGFWIHRVLQNEGIESHVVDPASVATSRRRRRAKTDRIDGEALLRTLLAYKRGEPRVCAMVKAPTPEEEDRRRLCRERKVLIAERVQHVNRIKGLLFCQGVSGYKPLRRDRRRRLDELRTGDSRPLSKHLKDQISRELDRLELLLEQIKATETERDAVLAAQKVATPSTAAMLLDFNGIGPEFTTVLWSEGLFRHFDNRRQVASYAGLAPTPWQSGSVDHEQGVSKAGNPRLRSTLIQLAWLWLRHQPQSALARWFKERVTRNGGRHKKTTIVALARKLLVALWKYVTAGVVIEGAVMKAS

SEQ ID NO: 379625 - protein, 426 aa, unidentified
MTNSLFIGVDVSLQSNQFCVLNFDQHKFFNLKFPNTPDGCEDAINRIKNIHDKFYFDKIVIVCEATGMYSFHLACYFSSHEYLNNFNTEVYQINAHDFAKYKDSFSDIEKTDPSDAYILADFARVGRTKALHPFRGSQYIALQRLTRQRYHISKNLVKEKLYVMNNIYLSFSGLIIADKKNKPFSNMFGATSCAIFDNFDSPDQIAETPVDNLLDLISKVGKNRTKNPNEKIDLLNKAIRSSYRLEQTAYNGINIAVASSLNTIKFLENQLKQVDKAILDTVSGLDSNAYNSLLSIRGIGKVYAAGILAEIGNINYFKHNSNLAKYAGLYWNRTQSGKFEKEDKKFSQHANKYLRYYLIEATASCVRMNFPFIKNFYDSKYKEVTKHQHKRALVLSARKLVRLIFGLLRKNQYYSPIDSNTQSLVN

SEQ ID NO: 379626 - protein, 359 aa, unidentified
MKIVGCDFHPRWQQIAVFDTETGEITEHKLVNGEGEAERFYRALKAPALVGVEACGNSQWFIELLERLGHQVWIGDAAQIRACYVRRQKTDRRDAAHILKLLIEDRFPRLWTPTAAQRDLRQLLTHRHKLVEIRSRVKNGLQHLAMNRGLQKRSSLWSARGRADLENLCLEGWAGRRREDLLQLLSGLEAQIGELDRAVERAAEEHAQARLLMTQPGVGPITALAFVLTLGEVSRFPRGKQVASYLGLIPREDSSGGRQRLGAISKQGNRFMRQLLVEAAQSAVRYDAEFRRQYAARCHHKAKGVAKVAAARKLAVRLYWMLRKNVGYPEIAHIESSSRVPLAEVKQAVVLIERSRIRR

SEQ ID NO: 379627 - protein, 391 aa, unidentified
MIYVGIDVAKDKHDCFITNSDGEVLFKAFTITNNLDGFNDLYQKIETIMKDITKVKVGLEATGHYSYNLLGYLIDKGLPTYVINPLHTNLYRKSLSLRQTKTDKVDARTIASILMSDVNLKSYSDISYHNEELKSLTRYRFDKVKERAKLKSSVSRLICILFPELEKLVPTLHMASVYALLSEFPGAKQVANAHLTRLTNLLSEASKGRYSKDTAITFRDAARTSIGSNMPAKSLELKHTIKLIKELDSEIDEIENEIKIIMDEINSPILSIPGINYRMGAMIIAEIGDFSRFDSPDKILAYAGFSPSTYQSGHLYGAYAHMEKRGSRYLRYALYNAAKYVCHWDPTFTAYLAKKRAEGKHYNVAISHAVKKLIRVIYHLEKTNQQYIKAS

SEQ ID NO: 379628 - protein, 391 aa, unidentified
MLYIGIDAAKDKHDCCIVDSDGEFKCDGFTFANSKEGFEKFLEIVKQSLSSKDKIIKVGIESTGHYSTNLLSFLNSQGFEVVVFNPLSVSRSRTANSLRRTKTDKNDSRYIVQLLMSGNFKPYHKQSYHILRLKSLSRARFRLVKEIQPLKNRYRRLIHLLFPELQGFFCKLDIPAVITLLTALPGAKDIAACNITKLTNILSTASRGRFKRAKAEALKQLAKNSIAEYNQGDAFELKLTLQRIQFIENQKAEIEAEIRNVMSEIKSPVTSINGVGDVLGAAILTEIGDINTFSSSAKLLAFAGCEPSTYQSGKFTATNTPMVKHGSRYLRNALYLAVKSAYLHSPSFRAYIDRKRAQGKHYYTAMSHGIKKMVRVVFVVLKRNITFTEPI

SEQ ID NO: 379629 - protein, 428 aa, unidentified
MDQVDRNRLEGFRQLKKEIRHSEEYLIVGVDIAKDRHYAFFGTATGETLLKRIVFSNDHEGFRKLLDQAEALRVQHGLKKVVYGMEPTANYHKPLGEYLIKLGKTVVLVSGVTVARNRESLDGRWDKHDGKDSANVADLISQGKCLYYEHPSAELRGLRGLLSLKRRLKKQEHGYKVRIRNQLIAQYFPEMDGYYERLGVEGLSIVKWCLAASKIAQLDVDPFIERVTSGRIRMEKRRRLEEIWEKAGESIGCDGVPGVDHEAKVMVEGLKQIREMIKETEDKIEELCKQFAGYQYILTIPGFGPDVSAKVLGAVGEPDRFLSGKQVLKLAGYDLSADRSGKDSDRAIPEISKRGKADLRYALYQAALVASLKNREVMIYYTNKIRGREKEKGIQVKMRVKLAAKLLVIAWTLMKKKEAFNPAYLNAE

SEQ ID NO: 379630 - protein, 330 aa, unidentified
MSDHSVLKRFSQNPEPEALHKYLVSNYPGANYFSVYEAGFCGFWIHERLTDLGITNIVVNPSDVPTMSKEKLRKTDAVDCNKLARELRSGSLVGIYVPGVETLELRSLIRMRNLIVKDSTRAKNRIKSLLRFHGVDIPEEFTRCSIGCWSKRFLSWLQALELSTEYGKKTLGLHLEQFIRLRMMLLQETRAIREISRKAPFEKPIRLLTSVPGIGVTTAATLMVELDDIARFKNSDRLASFIGLIPMCHSNGESNGTGDITVRRHFMLRCLLVEAAWIAIRKDPAMTLAYTEYRKRMSPQKSIIKIARRLVNRIYYVLKHEKEYVPCVVQ

SEQ ID NO: 379631 - protein, 317 aa, unidentified
MTQTITRVAGIDTAKNKLDIAVHGQTVQWRVENAKQGWRRLQTLLAEAGVTRVGIEASGGYERGVVRHLRAAGCDVIVLQPAQVKAFARLHLRRAKTDALDAALIAAVAALSDQPIRETDQRLEDLADHLTFVEQIEEDIVRLKTRLEHVEDRRLRGFVARDIARLKARRATEMRRIAQALRAHRDLALRLDLVLSIPGVGERTALALLVRMPELGRLSREQAAALAGLAPFDDDSGSRSGQRHIAGGRDRLRRSLHAAALPAAFRWNRALTEFYRRLTAGGKPHKVALTACARKLLIYANTVVARGTPWTETAPAR

SEQ ID NO: 379632 - protein, 373 aa, unidentified
MGEDRTVCVGLDTHKARIAVAVAEPGRSGEVRFHGEIANQPDTVRRLIERLADKHGQLRVCYEAGPCGYGLQRQIAALGHDCTVVAPSLVPRRPGDRVKTNRRDAVALARLHRAGELTAVWIPDPVHEAMRDLVRARTAAMEAVRRARQQLQGFLLRHERVFTGRKTWSPAHRRWLAGLRFAHPAQQIVLQEQIDTIEEAERRRDRLGQQIRELVPDWSMAPVVTALQAMRGIAFLSAVVLTAEVGDFRRFTTPRQLMAWLGLVPSEHSSGAKVERGGITKAGNGRARRVLVEGAWSYRFPARVTSPIQARLDDVPEAVRAIAWKAQLRLCARFRRLVAAGKNVNVVTTAVAREMAAFAWAIACQVQPKEAAA

SEQ ID NO: 379633 - protein, 321 aa, unidentified
MGMEVFVGIDVSKDTLEVAIWPQEERMSFAQTDDGLSLMADFIQPFSPCLVVLEATGGLERAAVATLAARSFPVVVVNPRQVRDFAKATGILAKTDKLDALGIAKFAQAIRPELRPLKTMEAQQLEAILSRRRQIVHMLTAEKNRLHSAPGWTREDIRLHITWMEKRLEKIEKELGGMIRKSPVWRVKDDLLRTFKGVGPVLSQSLLSDLPELGSLNRKKIAALVGVAPMNRDSGKFRGRRRVLGGRADIRSVLYMATVAAIRFNPAIGAFHERLIKAGKAPKVAITACMRKLLTILNAMMKNQTPWRPLTQNMLDMQHSC

SEQ ID NO: 379634 - protein, 357 aa, unidentified
MDGSRDEPRTTAGLDIGDKYSYLCLIDTLSGEVIEEGRLRTSPEAFRRRFASERPMRTAIEAGTHSPWASRVLEECGHEVLVANARKLRLIYSNKRKTDQIDAENLARLARLDPKLLYPLKHRGEDSQAHMAIVRSRQALIGCRTQLVNHVRGAVKSFGARLPKCPARSFHKRAQEHIPDALRPALEPILQQIASLTECIRDYDRRLVAISEEHYPETGLLRQVEGIGPLTALAFVLTLEDPYRFERSRSVGAYLGLVPARDQSGDTDPQKRISKEGDEMLRRLLVGSAHYVLGPFGSDSDLRRHGEKIAARGGKNSKKRAVVAVARKLSVLLHSLWVSGEVYEPLRNTHRSGGQAA

SEQ ID NO: 379635 - protein, 346 aa, unidentified
MIYVGIDLHRKRSQIAALDEQGRELLSRRVANDPEALKAVLAELGGELQVALEATYGWEWLADLLEQEGHELHLSHPLRTKAIAAARVKTDAVDARTLAHLLRTDLLPEAYVAPRELRDLRDLLRHRVVLTRMRSALKNRVHALLARQGIQREHADLFGRGGRRFLAELPLREPARRRLDSLLGLIADFDREIELAKREIDALALRDPRVDVLCQLRGIGPYTAMLVIAEVGEIERFRSARHLCAWAGLTPTVRSSDGRARLGHISQQGSPHVRWALVEAAQKAATGGGPLRAAFERIAKRRGRNIAKVALARRMLTLCYYGLRDGEIRCLQAPGPAPTRPVKTAT

SEQ ID NO: 379636 - protein, 358 aa, unidentified
MNDLHYIGFDNHKKTVNYCRKMASGEIVLEGRLAARREVLRAWAAAQPQPWRGAMEATLFSSWIYDTLKPYAQHLDMGHPARMKAITAAKKKSDRLDARTIADLLRCNLLPTCYVLSPEMRELRRLLRYRQMVVAQAVRMQNKMAGLLMETGAPFVKSKLHGKKYFTQLLATLEEVPDSVKDLLRLSRGAREMFDSVQRRLVQRLLHEPRLEARLERLMTIPAVGPITALTWALEIADPFRFPSIGDAVSYCGLTTAFRSSADKEQRGPLSKQRNAWLQTTLIEAAKLAPRWNPQLAAVYQHELAHGHANRATLQVARKLVAYLLAVDKSGRPFQLRFSPPLLAGEATENQDPAAHSA

SEQ ID NO: 379637 - protein, 428 aa, unidentified
MQRQCTTKPLYVAIDIGKNLHCFAGYAGLDLQPCGPAQTVPSNRTGYVIFSTWLSALLVTGCYGPVLVGLEPTGIYHEPWAYAIARDWGAQVNLRFVNPYHTKKERQQRQLGRRRKTDVLDTEAIAACLRDGLGGPARLPEGLTFRFTVWAATFRRIARERQRLQAQLLAQFDRLWPGALVNMSAFRKSHPALPEPQPLVRSRPLERQLIQLILTAAPNPHDWLNRSPNDIQTFVQGHGLRCGPVTTQRIHHVVHELLPLPPRLSAFLAAQLQADWRRFQLLQQELDQCRQEAQELVPASPVAVLLTVPGINAFLAAAYLAYVIDIRRFQHADQIWSLAGFSPDEEQSGDSRYQGQISRRGNAGFRNVLYNIGLNTSLHCPAIARAKARALQHGKRAVGATIHAAHLANRLCFQMLRDQKPYEEERMR

SEQ ID NO: 379638 - protein, 340 aa, unidentified
MTDTIRVGLDLAKTSFQVHGVNAQEQVTHRRSLRRGQVLDWFSKLAPCLIGMEACGTAHYWARELSKLGHTVRLIPPSYVKPYVRRNKNDAADAAAICEAVSRPSMRFVAAKSEAQQAATGVHRVRELLMKQRTAAMNNLRSLMAEFGIVAAQGTARIKDLLAIVDDSDDKRIPDPLRTALVAQAAMLRSLERELETVDKALAAWGRANKTCRHLNTIHGYGVVIATAMAAFVPNPAVFDSGRHCAASLGLVPRQDTTGGKVKLGPISKRGNGYLRRLLVNGALSVLSSKRAKEDPWLVKLLATKPRMVAAVAVANKMARIGWAVMTRQEDFRPALTVAA

SEQ ID NO: 379639 - protein, 357 aa, unidentified
MNDLTTAPPSVTIGIDLGDRYCRLCVLDQSGDILEEGRIPTTETALRRRFQGSESVRIVLEVGTHSPWVSRLLTDLGHEVIIANPRKLRLIYENDSKNDQVDAEYLARIGRLDPRLLAPVQHRRLDTQADLSLIRSRDMLVRTRAKLVNHVRGSVKSVGGRIPKCSTRAFAGKAASSLPEEMQQPLSQMLDLIEIITGQIKEFDVQIARLADEKYPETELLRQVAGVGPITALTYLLTIEDPYRFKRSREVGSYLGLRPRQGDSGDIQPQLRVTKAGDGMTRRLLVQSAHYILGPFGPDCDLKRWGLTLAERGGKNAKRRAVVAVARKLSVLLHHLWITGEVYEPLFNAQREVSQAA

SEQ ID NO: 379640 - protein, 344 aa, unidentified
MSEVIIIGLDIAKHVFHAHGADERGRAVFSKRISRGKLLDFFAAQPSCAVALEACGGAHHWARQLTQLGHEVRLIPPAYVKPFVKRQKSDAIDAEAICEAAQRPNMRFVAVKSEQQQAAGLVFRTRDLLVRQRTQLINAIRGHLTEYGWIAPKGPSHVAMLADLIEKEEMASSLPEATHAMFRLMLDLLAGLNGKIADLDKEIARRAREDEVSRRLMTVPGIGPISATAIAALAPPAETFAKGRDFAAWLGLTPLQRSTGGKQKLGATSKMGERTLRRLLIIGSSAVVQQASKRGAPKGSWLEQMLVRKPRMLVTVALANKMARIVWALLIKQENYRAPVAAKA

SEQ ID NO: 379641 - protein, 343 aa, unidentified
MGEVITLGLDIAKSVFQVHGVDHTGTVVMRRRIGRSKVLEFFAGLSPCLVGIEACPSAHYWSRELQALGHTVKLMPPSYVKAYLKRSKNDANDAAAICEAVTRPSMRFVPIKTQEQQTGLMLHRTRQLLVRQRTMLSNAIRGHMAEFGIISAKGRNGTAELLQIIGNVSDDRIPPVARFCLELLARQYLTLNAEVSSIDKRIHAWHRSCEQSRRLEQIPGIGPIVATALVAEIGDWRAFRSGRSLAAWIGLVPTQHSTGGKERLGSITKQGNRYLRWLLVAGAMAVIRYARAHGTKRPWLTRIIDRRPAKVAAVALANKIARMAWAIMVRGERYTEPKPLLAA

SEQ ID NO: 379642 - protein, 345 aa, unidentified
MNYKRIGIDIAKNVFQLHGVDSQDKAVLKKKLKRSEMIPYFTQLKPCRIAMEACGSSHYWSRKLTQLGHSVYLIAPQHVKPYVQGGKNDAHDAQGICEADSRPHMNYVATKTEAQQAMQLVHRARRVAIKARTALVNEIRGTLGEFGIICPTLGAACTRRTLSATIHDDTRTYPQPLPQLLSLLELRLNNLDGEISTLDGLLANHQMTDERVKRLQQIEGIGPITASAIVCSVDAKQFNNSRDFAAWLGLTPRQNSSGGKERLGGITKRGDAYLRTLLIHGARNVVRYCSNKTDERSLWLQSLLRRRHTNVVTVASANKVARIVWAMLTSGADYRVPQLVAVETS

SEQ ID NO: 379643 - protein, 355 aa, unidentified
MDSVKYIGMDVHKEAISIAVLNSSGKLVMECVIETKASTILQFLQGLRGSLHVTFEEGTSAAWLYDLLKPQVTKIVVCNPRRNALLKEGSKSDRIDARKLAELLRSNLLRPVYHGEHGVRTLKELARSYLTISKDLGRVMSRLKAIYRSWGIPCAGKQVYAPRYRSEWLGKIQEAGVRRRAEFYYQQLDALRPLRQQVRQELLAEAKKHSAWKLLRGIPSIGPIRAALIIAILQTPHRFRTKRQLWTYSGFGIETHSSADHRCVNGELERAKKQISIRGLNRNHHHDLKNLFKSAATIAAVKAGPFQEFYDALVAKGIKPEMARLTLARKIAAITLVVWKKGVRFDAQYLKPQTA

SEQ ID NO: 379644 - protein, 343 aa, unidentified
MTQRQPVVEVFAGLDVSAREIKVARVQGQDQNPTLATFANHASGHQALLAFLLEKTERVRVCLEASGNYSLDLALSLHAQRQVEVSVINPRRARKFAESLGERSKSDPVDARVLCQYAARMPWESWKPPSATALRLRAIPRAMESLGVMHTQESNRGHALASSQALPALVLRERQRHQRYLENRMKQLRREARRLIARDAELDRRYRLMLTVPGIGETSALQILGELVVLSDTADARQWVAFAGLDPCIFTSGSSVEKRPRISRGGSRHLRRALYMPALVALRREPHLKRFYERLLSRGTARFQAVVALMRKLLHALFAMFRANQPYDGSKLCPSELITKAAA

SEQ ID NO: 379645 - protein, 578 aa, unidentified
MKASRPARAGLRAGRAQRNKTARCLSGRCLKHGHASCDVRNVLGFAHEVRIELRDARVIFASVVRVEDPEAESFVVHPWGVRAPMTLSFEDVARASPVRNMLWERQRSISAHRLDEPVAVRPEAPRTPPVTRAAARDRVERLESSPRAGRRPGAKKGTSLPPVAETTDTPACSEAQIARRLGAQGRLVMRSVGLDLGVRHIAYCEVADGKVVDRTTVKSLSELKSRIGPDRPPARIAFEACREAWHVHDTLTAWGNDPRMLDTTRVRQIGVGQHKRKNDPIDAEAMAHAVEAGRIAEAHVLSPERRALRAQLSVRGALVETRAQYVTTIRGLVRAAGVLLPTCDTDNFVRKLDTLTLDEPTKALIAPLVTVLRTLQTQLAAVEQVLAGLAERDPILGLCATVPGVGLIVAATFVSVIDEAKRFKNAHAVGAYLGLVPAETTTGGPDKRRLGSITKQGNRMARAMLVQAAWTILRSRDPNDPLKRWADHLARTRNKRIAVVALARKLAGVLWAMWRDGTVYDPRGHAEQAVRGVRDAALRQQCRAQALERAALKLHRSTAPETTKPLKPRRNASQVSAM

SEQ ID NO: 379646 - protein, 352 aa, unidentified
MKAVVKQVVGIDVAQDELVVSIGKMYADFSLEIVSRATFGNKLKGFEKLILWLDPLANKAVQLRFVMEATGVYHQSFAYYLNDNVYAVSIVLPNKISNYFRTLSVKTITDKTMSDTITQFGLERNLDDWQPPKGIYRMLQQLTRERSQLTDEKVVIKNQIHAEQAEARPHKKSIERSKKRLVLIEKQIAEIESELKTLIKSDEDVKKIVLLICTIPGIGLLTAATVLGETNGFELIRNKRQLTSYAGLDVKEKQSGTSVKGKPCISKKGNKHLRKAMHLPALSAIRHDERSKAIFVRLVGKHGIKMKAAVAVQRKLLEMVYTIFKTQTAYDKNYFKRQENEVIIEQEVREVA

SEQ ID NO: 379647 - protein, 348 aa, unidentified
MTKLARIGIDTSKSVFQLHGVDEKEQTVLRKQLRRRQFVVFFAKLEPTLVGLEACGASHHWARELQQLGHQVMLIPPQYVKPYVGRNKNDKTDAEAVCEAMSRPKVQERLVPIKSVEQSAAQMLLGVRESLVKRRTQLTNTIRGHAAEFGLVAAKGLDKIEPLLARIAADAGLPALTKEMFAVLGREYAELGPRIAQIDNKMLAFHRSNEVARRLMEVPAIGPIGACLLVTKIVDPHAFRSARRCAAWIGLTPKDHSTAGKQRLGGITRAGDERLRAVLVSGATTCIQHARNRRGRPSPWLVELLKRKPPKVAAVALANKTARIAWKIMTSGERYDPNRCAARQGLAA

SEQ ID NO: 379648 - protein, 338 aa, unidentified
MAILYVGIDLAKSVFAVHGVNDAGKAALVKPSVPRGNLLELIAALPPCVVGMEACTGAHHWARLFMAQGHVVRLMAPKFVAPYRLSGKRGKNDAADAAAICEAVQRPNMRFVPVKSVEQQARLMVHRARQGFVEQRTATLNRIRGLLSELGIVLPLKAATVRREATQVLEDLPARANLVIGDLLSEVHRLDERIEQYDRQIVLMAREDDRAKQLMRLSGVGQTTATALIAMIGNGHEFKSGRQLSAWLGLVPGQYSSGGKTRLGRITKAGDPYLRSLLVLGARAVLNAAKGKSDSVSRWAVQLAERRGYWRAIVAIAAKNARMAWAVLSRGDRFVMPA

SEQ ID NO: 379649 - protein, 362 aa, unidentified
MAHSVIFAGLDVHAAQTHAAQLEAATGELSVTRLAGGTDPAIAWLRRLGPGVRAVYEAGPTGFGLARAAREEGIDLRVVTPGLIPKRPTDRVKTDRRDAVRLARLLAAGELSFARVPTEAEEAFRDVVRAREDVRGDLMRARHRLSKLLLRRELVYPGPGRAWTQAHLTWLTRLAFDDTASTLTMTDYLAAVQALVQRRATLDAAIAELVPTSPYAATVPVLRCFRGIDTLSAAGLCADIGDFARFAHPKLLAGFLGIVPSEHTSDDKRRQGAITKAGPSHARRLLVEAAHHYRRRPHVGVTLQRRQVGADPRVCDVAWRAQQRLYRQWQRLHGQRRKPSGVVTVACARELSAFLWEAATIA

SEQ ID NO: 379650 - protein, 342 aa, unidentified
MEYYAGIDVSLECSSVCVVDASGKIVREARVASEPEALIAWFGALGFSLERIGLEAGPLSQWLFAGMKGTGLAVELLETRHVRKAFEAMPVKSDRNDARGIAQLMRLGWFRPVHCKSMSAQETRSLLTARKLVQSKLQDVENSLRGILRGFGLKVGKVTKREFGGRIEELVAGHPHLQTIAQALLAVRAVLRTEFAAFEKLTRRMARSDLQARLLTSVPAVGPIVALTYASAIDDSARFKSSKQAGAHFGLTPKKYQSGETDYTGRISKIGDASVRTALYEAANVMLTKPVKGCPRLKSWAMRIKQRAGTSKAKVALARRLAVIMHRMLADGTPFNDAVAAA

SEQ ID NO: 379651 - protein, 332 aa, unidentified
MSKKIIAQNEEIVIGVDVSDAKHNAAVVRVKGGELIRDDKVNPDFGSWQKYLEKFPGCDVTVVYESGPQGYNLCDAIKALGRKAVVVAPVKHVGVKTDKRDARSIARDWLAGSAKEVTVPGVQKREARQVLRSRGQLVKELVRIKNRRSALIRFHGLAGRLAPWRKGSISANLRFCLDSLDAVETVIKEQIQKFDKHIGQIAAEPKWSPTVEKLTLIKGIGTLTALEVALEVADIAKFKSSDQFASYTGLCPGEWSSGATRRQGHITRRGPGRLRGALVRSAWILVRYDEAEKKRFQSLAARAGKKRAIVAIARRLAVTIWWTLKESDEKAA

SEQ ID NO: 379652 - protein, 375 aa, unidentified
MAKNTRFVGLDVHAKTISVAVAEGRNQVRSLGTIANRPEAVRRVLGKLGKLTELKVCYEAGPTGYALYWELTRLGVQCEVIAPSLVPMKSGDRIKTDRRDAERLARSYQAGDLTAVWVPDSQHEALRDLVRAREATKEDQLRAKHRLLKYLLRYGQRPADDGRSWTAAWWQWVRALKLPHPEQNTTLLELILEVDHQGQRVDRFDAVIDQAVEAAPEQLRAIVDALQALRGVAKVTAVTLATEFGCFSRFEKAGQVMSYTGMVPSEHSSGPKTRRGAITKTGNSHLRRVLVESAWHYRHQPKLCKRQKELQSSLSPKVAAIAWAAQQRLHRRYWALSNKNKPSAKIVTALARELAGFVWAIGVETEGALKLGKAA

SEQ ID NO: 379653 - protein, 417 aa, unidentified
MSEYAALVSIDWADQQHAVCLLDPNTGEREPTIVKHTPAALQEWALGLHQRFAGAPIAVCLEQSRGPLIYALLQYDFFVLYPINPATLAKYRQAFSTAHGKDDPTDADYLLDLLEHHRKRLRPWHPDDQKTRTLRLLVEQRRRLINDRTRVSNRLTALLKGYFPQVLDWFEDIRTRLVCDFLERWPELSALQRTRPATLNQFFRSHHSTSNSTNHRRLAEIKSAIPLTTDEAVMTSSVINVKVLVAQMKTVIAAISEYDRQLEALCLTHDDYHLFAALPGAGPVHAARLTAALGSDRSRWQTADELLRFSGIAPIIERSGKQFRIRWRYFCPKFFRQTFHEFAAQSIQDSFWARAYYFSQRAKGKDHHAAIRALAFKWIRIIWKCWQTRTPYNEVIYLESLRKKGSSLLKFAADYQH

SEQ ID NO: 379654 - protein, 362 aa, unidentified
MKQFIGCDVHKKYSVFVTMDESGTASRAVRVEHGNGELEGYLSSLPDGTPVAVETTGHWYWILDAMEKAGLEPHLAHALAAKRMMVSPNKTDKLDAKGLATLLRNGTLPEVWVPDGSLRDLRGLMRSRLALRRMGTGLKNRISSALARYGLPEQFRGDLFGKGEAATKCRQESVAALPEYSRFATEQELDLLESVETCVTAVTEEISNSVGKLGWVRRLRTMPGVGEILGPTIYLEIGLVSRFPSPAHLAAYAGLVPRVSSSGGHTRLGRTRRECNRFLKWAFVEAAEVVVAHQESMSAKHVVRLYRRVKNNKPDRHGQAVVAVARHLAESAWHILEHNQDYREPQPTPGMIQRFHTTGRPL

SEQ ID NO: 379655 - protein, 461 aa, unidentified
MKEGEEKLSTTRGQLQGLPLVRTKVAGIDLGSERHWVCAPTEDGNGREVADFGATTPELIRMAEWLKARHVESVAMESTGVYWIAPHEILEAQGLDVLLVDTRQLARVPGRDKKTDPTDCEWIQRLHACGLLQGSFRPGEDICMLRTLVRDKATLVAEGSDWVRRMQKSLDQMNVRVHRAVSSIEGTTGMAILRAIAEGERDARKLAQLRDPRCHKSEQEIAEQLSGHWREDHLFSLQQALKMYDAIQARIAAYEKEILRKLREMERPEQRGQNAPPLQNANKARMIRNRGQEAKRQALFRMSGVDATQIDAIGVETVEVVLSEYGADLSRFPDEKHFVSHATLAPHVPKSGGKPVKKKKRNSASTRVAGALRMAALALRHSNTALGAYYRHTAQRTGADVAVFASARKIATLIYRLLRWGQPYLDEGVQAYEDRHRQQRIKNLISKAKQLGYQMTPATAS

SEQ ID NO: 379656 - protein, 351 aa, unidentified
MWIIGVDYHPSVQQIAFVKTDTGECGERRLNHSDGEAEKFYRELKAAGCSVRVGMEATGYAGWFERLLAELGFELWIGDPAQIKAKRVRKQKTDRLDAELLLQLLLEDRFPRVWVPSPENRDLRQLLWHRHRLVQMRTRIVNPLQAVAMNEGVRRKKALWSKSGRAQLESLSLAPWATRRRHDLLELLDRLNPTIEELSATVEQEAKQRPEGLRLMTHPGVGPTTALAFVLIIDSAERFAGGKQIASYVGLIPCEDSSSDRRRLGHITKQGNTLLRFLLVEAAQAVVRRDPDWRRRYTHLAMRRDQRIAKVAMARKLAVRLYGMMRKEWNYEQSKKFGSYAGESDYGHGVQ

SEQ ID NO: 379657 - protein, 404 aa, unidentified
MDRARIRAYEVFVGIDVGKSSNYIAAFESAEDEPFLDMCVSQDEESIREALARAASHGRTLVTVDQCGTFGRLSVAVAKGMGLDVAHVPPRKFDQIAEGYGEDKDDPVDARIIAEVARSSPKLIGLVEGRPEVLAQVRVLASARRDSVAERTRCYNRLHDMINQVCPPLEKVFSKYKLRNNLEIRLLERYGGPSGLRKAGKARCAKWAASIKYQRTHGPEKVGEIFDAIAGQTVRLPAADAIERQIKRLAARVVALNVEIGDLEAEIEALSEQIPEVGVLRSIPGVGRVYGAVIAAEIGDISRFGDSAHLAAYAGLAPVRRKSGTSVNGKRKRIGGNRQLKNALVQSADRARGTEEWARSYYDKKRGEGKKHRQALLALARRRVDLVYAMLSNGTYYEPRAEKA

SEQ ID NO: 379658 - protein, 424 aa, unidentified
MKLTKVNTHDQLDNTLLVCVDVSKNKLNVFCPGKTKDLEDEIANRSNIIRKKLIEYEEFANQQGFQGLSILVEPTNTYHQNLLRIAHQMNHHTGIVNTESVSKMKVVESNDSGKTDIKDPRIIALLGKMKKVLKHRILDQEYQSLRELNQIYDDETKAMIITKNHVSNMLSKLFCDYPMGKDFIYSKSGKALIRLYHANPFRIARSGHKRFSKRMRQAVPRIRTSTIEKLWDAANQSAYHQTGQELQGIQEDQLDRLMARINEQEVTRSMIEEKVVELYRRLRLKDPSIPKAESGVITEFWMGSLLGEIGPIDDFSSFKKLLRYVGLNLRERQSGAYRGRTAISKKGRVLARRILSRIVFPLIKKENLFGKYYHGKKDNGMPGKKAMVAVERKFLKMFYGWYRSGKSFDKHRVFTCTSQYYKVA

SEQ ID NO: 379659 - protein, 337 aa, unidentified
MGLYCGIDLHSNNHVMTVIDEGDRRLYERRLPNDLAITKAALEPFRAQLVAVAVESTFNWYWLVDGLMDAGYEVRLVHTGAVVQYAGLKHTDDQHDAFWLAHLMRLGILPTGYIYPKGKRGLRDLARQRMRLVQHRASHITSVQSQVWRSTAVRLSGHTIKGEGKQPWPELRDADLALSVETGRAVIDALTVQIERLEEVLLKRVGLSPQFQVLKTVTGIGPILALTIALEVGDIKRFPGVGEFASYCRCVDSQRLSNAKKKGEANRKNGNPYLAWAFMEAAHFAIRYLPAARRFYERKCRQRNALLAVKALAHKLARACFYILRDQVPFAPERLFV

SEQ ID NO: 379660 - protein, 388 aa, unidentified
MDVLYQSCAGIDVHQATVVVCILHGPLTSTRPKREMAQFDTTTKGLKACHDFLSQFHVEAVGMESTGVYWRPVWHELCDDFELILAQPAHMKAIPGQKTDKKDAHWIAQLTRIGLLPRSFVPDETIQELRELTRQRKHYVESRNRETNRIHKILQSGGIKLTTYIEDIMGASGRNLLQLLIDETPITPRIVHQSVYTSLKRKVPQLLEALDGYFSAHHRFMLAQSLEIYDFYQKQIDCLEERMNGYLNLYERPVEILDSIPGIDLTTASVIIAEIGVDMSQFPTAGHLASWAGLCPGNNESAGKKRSTKIRHGNSYLKRCLCQTVFAAKKQKGSPLAERYYQIQSRRGPQKATIALAHQLLKIAYILLKENLTYQEFVLQKRLLETSQ

SEQ ID NO: 379661 - protein, 298 aa, unidentified
MDVHIHPDNLSEYFNNDTQGFKALEKWLNSIPIDLIIFESTGRYHQDLHIFLDKIGYKVCVINPYRSRRFAQALGYLAKTDKADAKMLAQYGAMIKPQPTPLCDKDIKALRELIVARRALLKRMTQITNHVQGCHAALLKRQSQQAVNQCKRHLAQIDLEMEKITSTKSTLKQRFDILTSIPAIGPATAFTLIAEMPELGNMTAKQAASLIGLAPVAQDSGMYRGRRKIKAGRRGPRMALYMAAVAALRFNQDMAKFYTRLKDNGKPSKVALIAVMRKMIVLANTLIGQQRKWQQTSP

SEQ ID NO: 379662 - protein, 410 aa, unidentified
METIVKRAAGLDVHKTQVTACVRVPGRGRERAQEVAEFPTTVRGLLSLRDWLKAHRVTQVAMEATGVYWKPVWAILEDEFDCLLVNARHVKQVPGRKTDVSDAAWLCQLLEAGLLRRSFVPPKPIRALRNVTRYRKAQIGERQREANRLHKILEDTGIKLDCVASDILGASGRAMLDALVQGTTDPQVLAELAKGKLRAKIPALKEALVGRFDRQHALIVSAILAHLDFLDEQIQLLSDEIEEQLAPFAKAVELLCTIPGVQRRTAESVIAEIGTDMSRFPSARHLASWAGQCPGNDRSAGKRRSGKTRHGSKWLDTALTEAAMAATRTSDVYLTAQYHRLRPRRGHGRALGAVKHSILCACWHMLTTGELYREAGGDYFTRRDPERATRRLVAQLERLGHHVTLEAAAA

SEQ ID NO: 379663 - protein, 408 aa, unidentified
MEVLYPRCAGLDVHKDVIVACVRCVSEPTHHEVRSFDSTTRGLLELADWLALHACTHVAMEATGVYWKPVWHILEGNFELVLANAQHIRNVPGRKTDVNDATWIADLLAHGLVRSSFVPPAAIQELRDLTRTRKQLVREISQHSLRIQKVLEDANLKLGSVLSDVLGRSGRAMLKAIVAGESDPQRLAALAQGTARKKTAELREALRGHITAHHRTMLKLHLDVINALERTLSELDAAVGKSLTPIQQRVRLLITMPGVSDLTAQVLLAEIGVDMTRFPDAGHLVSWAGLCPRNDESAGKRRSTRVRKSGTWLKTALVTAAWAAVRVKTSYLHAQFLRIKARRGAKKAILAVAASMLTAAYYMLRDGVAYHDLGSDHFSRHDTSKTICRLLKRLADLGCNVDHLAHAT

SEQ ID NO: 379664 - protein, 332 aa, unidentified
MMDLQGTIIDEFTFTNNYDGIASLASRLTMDDRVVMESTGSVWTNLYNHLDDAHIPVVLANPLKTKAIASARIKSDEIDARILAHLLRTDLIPESYVPTKEIREVRALIRHRTSIVKIRTMVKNKVHAIVDKNGLEHDELFSDLFGKAGMQWLGTIRLPSLDRLMLDNHLDHLESLKKQIHAVDQEIHAKASRDEDVRLLLSMTGVDIFTALLIRSEIGNISRFPEYKKLISWAGLAPSLHQSGSIEYHGSITKQGSKMLRWVMVEAARVAVNHDEKMRAFYARVKYRRGDQKAIVATASKMLKIIWFMLARREPYLSRNQRRYEEKLNTIE

SEQ ID NO: 379665 - protein, 403 aa, unidentified
MGLQPDTKTDFGFLLHHNLSSAPHKRTHSKIILTGSLAVNLISVKGDFAMKRVYDNCCGIDVHKKLIVACFKQGSKQEVREFGATTRELLKLCGWLKDGDCEMVAMESTASFWKPLYNILEASELDAIIVNARHMKNVPGRKTDVKDAEWIADLLQHGLLQASYIPDKDQRELRELVRYRKSLVGERTRELNRLQKMLEGANIRLSGTVSNINGKSARAILEHVLTGESFDDAKYDEMYENNLISHHLKASKEEIIDGLNGVMSELQRRMMKELLIHLDELNVHIRNLDDEINNFMKPEAKTASVALQEMPSIGETSAQAILAVIGTDMSRFPSAGHLASLAGVCPGNKAQNSSKINSHAKAMTLLDQPVTCFLISGCICNFAYLVHRARGLHHRNPLLQRRL

SEQ ID NO: 379666 - protein, 411 aa, unidentified
MVKENFIYVGIDLHKETHTAVMIDCYNQKLGEITFPNRPADFPKLVAKVKKCNTDGKTIVFGLENAYGYGRPLAVWLIDKGYFVKDVNTAISHRQAKHRGAMYRKSDSDDAEAIALATLNMLDKLPDACPNDAYWSLGQLVHRRDNIMKQRTRLVNQLHEQLCIAYPSYKQFFNDISRPTALYFWEHYPSRKYLKGKSVEDLRAELVPVSHNKCSTKTCEKILDAVASDKVKNNAYQDARDMVTLSIVSDLQHYDSQLAEVDKMLEQMYKMLGCTLTTIPGVNVITAVKILAEIGDIKRFSNANKLAQFAGIAPLHLSSSGKGKDVATKQGNRRLQATIYFLAIQMVQLSSKGTPRNPVVRAYYEKRKAEGKTSQQALICISRRLISIIYGMLKNGTEYRMPVVENAGEKL

SEQ ID NO: 379667 - protein, 317 aa, unidentified
MQEVQIFVGVDVAKAESVVAVHGQTGSRTVPNQAQAISAWLRELPEGACVAMESTGRYHQELASLAHAAGLQVFVLNARDVHFYAKALGARAKTDRVDAHVIARYAAEQHEHLHRWIAPCPALQQVRGLLGQRWAVVSKRTALRQSLQGCDGAIAPEVQALEAGFAALLKAIDARIVALLGQDARVRQRQRLLQSIVGVGPQSSALLSSVLEQVKFVSADALVAYSGLDPRACDSGSSRGRRRLSKRGQPALRHQMYLAAMSACHTSTFGALYQALRARGLKTTEALVVLARKLLRIAFAVWHSGQPFDPKRFASVT

SEQ ID NO: 379668 - protein, 454 aa, unidentified
MRKPQMVPDEDHEVIYERVAAVDVAKASGVVCLRTPDPARPGRFVNRIWDNVPAMRAQIAELGAELLRCRVQMVTLESTSDYWRIWYYVLESIGLAVQLVSASQAKNLKGRPKTDKLDAMWLARLTQWGMLRPSFVPPTAIRRVRDFTRARQDLVAERTRCLQRVEKLLEDAMIKVTSVAKDGMKAKSVVAMVAALAAGQRDPRVLADLAKGPLRAKRDQLAQALDGMFDSHHGMIARSLLDQVAFLDRQITLMEDQAIAALAGVPESWGVDADGQTGPQAGTSPDSPVLAAAHRLAEIPGISLWLAIVIIAEIGLNMTCFPTPAHLVSWMGLCRSAASSGTRHGKGKPKKGNSYARAAAGQAAIGAARTATFLGERYSRIARRRGKAIAQAAVARSIMIIAWHLLNDPQARYRDLGPDFYASRINRDKKIRNHIRGLQALGLTIAITGDEQAA

SEQ ID NO: 379669 - protein, 424 aa, unidentified
MRASKKGKMKPWDQITHYVGFDWAKDHHDVVIVDRQGEIVADFQFVHSLAGWKEFGEKIKTYPGLAVAIETNQGAAIDQLLQTGCTIYPLNPLSAKRYRERKKPSGVKTDRIDAWAFGDALRVDGRQWNALKPLDPLTQEIKLLCRDEMGLIEQRTALVNQLQQALLEYYPAALEAFDDWTQRYCWEFVITFPTPALLVKAKSGRWNRFLHTHKLWRPETVQGRLDIFQRADEFAGSQAITSAKSLLAVSLAKMLRILDDHLEAYHQRIRQLFNQHPDHDLFGSLPGAGKTLAPRLLAEIGGDPNRYPDTQSLQGISGTAPVSFQSGQIYRVKVRRQCNKALRHIIHLWANCSRAACNWAQTYYETKRKEGKSHACALRCLGQRWLKIIWKMIQTRTAYDGELHAKNQQKHGSWVLQLNPQKPA

SEQ ID NO: 379670 - protein, 297 aa, unidentified
MKQEETYVGIDVAKDRVDVAVRPGGDLWSVDYDERGMSELVSCLRTAAPAAVLLEATDGLEVPLVSALATAALPVVVNPRQVRDFARATGKLVKTDALDAQVLAHFAEAVRPPVRPLRDADTQELNSLTTRRNQLVTMLVSEKNRLGRASHSERPSIQSDITWLEQELSDLDNDLQEALRRSPVWREKDDLLRSVPGVGEHLSLSLLAYLPELGTLNHKRIAALVGVAPFNRDSGPRRGKRSVWGGRSRLRAVLYMGALVASRCNPVLRAFYQRLLAAGKPKPQSTEDIDRMKIAVT

SEQ ID NO: 379671 - protein, 371 aa, unidentified
MTKHNTFIGMDVHKNSIDIAIADEGRKGQVRHYGKIDGTLSTLDKVVRKLVSTGNRLHFVYEAGPCGYQIYRHLSDQGFDCDVVAPSRIPKPSGNQIKNDRRDALMLARLHRSGNLTAVYVPRAEDEAIRDLTRAREDVKNDEKRSKHRLLSFLLRSGIRYTGGSPWSIAHMRWLSDIKMPHQSQQVVLQEYIGTVNQCKERAQRLTEQIQQLLPEWQLYPIVQALQSMRGVSTIVAATTVAEIGDLKRFQTPSELMSYLGLVPSEHSSGPKTKRGPITKAGNGHVRRVLTEAAWAYRLPARVSRALLKRQEGLPESVYDISWKAQLRLCSRYRRLWNKGKAKQVVVTAIARELCGFMWAIANEIEVPANN

SEQ ID NO: 379672 - protein, 309 aa, unidentified
MKEHLVYLGVDIAKSYLDGAIENEKRRFSNDAIGHRQLIEWIKQMPAKVQVICEPSGGYERRLVQALARAQIKVSLVQANRVRQFARAAGILAKTDRIDAEVLCEFGKVMQPQTVTAATLEQEHLRELESQRRHLTRLLVMEQNRGARVSDASVVKLNRSLINQIKKQIEKLDLLIKEHIEQSPRLSAKAEKLTSIKGVGLRTAALLLAQMPELGQLNRREVAALVGVAPFNRDSGKMRGKRAIYGGRRPVRHGLYMAALVAARHNPILRQFYLRLRAAGKPAKVALTATMRKLLIVLNSSLKPDPLYA

SEQ ID NO: 379673 - protein, 351 aa, unidentified
MKRDKYMGLDVHQATTVVSVIDTEGKIVWETIVATETGAIRRLIESISGPIHVTLEETTQAEWLYDLLQGFVAEVVVCDPRRNKLLVEGSKGDKADARKLAELLRTGMVRSVWHARQTTRGLKELVRAYETFVVDTSRTMLRIKALYRSRGIATKGSGVYQKRERDHWLKQLTEVGMQQRAAWLYEQLDQVRELRKRAKAAVLSEGRRHKAVQLLRTIPQVGPIRAAQIVASAGTPHRFRTKRQFWSYSGLAVVTHTSAEYEMRDGRVVRRNKPVATRGLNTNCNRRLKSVFISAATSGGASWQPYLNHLQEKGMKADMARLTLARKIAALALAIWKKGESFDPKKLNWTN

SEQ ID NO: 379674 - protein, 338 aa, unidentified
MALYCGIDLHSRDSWLAILNEGLEVVGETKVGNDLEAILQVLEPHREALEGVAVESTFNWYWLVDGLMDAGHRVHLTNTWAVKQYEGLKYTDDRHDARWLAHLLALGILPEGYIYPKEERSARDLMRRRSFLVRKRTSFLLAMRGAFECRTGMRINSNDVKKWRMEDVEAHVEDPMAAFGITCLLEPMHALSTQIKKIEKEALSRGRLRTEFAPLETVWGIGKILALTIMYEVGDVARFHKVGNFTSYCRLVNTTRLSAGKRKGSGNRKNGNPHLSWAFSETAHHAVRHYPEAQKYFQRKRAKTNGIIAIRALAHKLARASYHVMRDQVDFDPEKTFG

SEQ ID NO: 379675 - protein, 414 aa, unidentified
MEVLYPRCCGLDVHKSSIAACALLREQGRIRTERRRFTTMTQDLENLAAWLRQLQVTHVAIESTGVYWKPVWNVLEGHFTIVLANAQHVKNVPGRKTDAKDSEWIAELLQHGLLRSSYVPPEIIRDLRDLTRGRATLSQEASRLASRIQKVLEDANIKLSSVASNTLGKSGRAMLDALVAGQINPEQLADLALGHLRAKIPQLRLALEGKIREHHRFLLKRLLHQLRFIESEIDLLDQRLEELGQQDPALAAAVARWTTVPGVDRVAAWSLAAEIGIAMEQFPTAAHLASWAGLCPGNCESAGKRLSGKTRKGSPWLGRMTCQCAWAAARTKNTYLSAQFRRLAAKRGRKRAIIAVAHSILAIAYYLQKKQCDYRDLGSDYFDRLNADGLKRYLIRRLEALGHKVTIEAAGNAA

SEQ ID NO: 379676 - protein, 360 aa, unidentified
MNGTMTWAAMDVHARSTHAAALDVQTGELVRRRFGTGRVEPVVEWLVGLPAPVHACYEAGPTGFGLYRVATKAGVRCEVIAPSKTPRASGDKVKNDRKDTEHLLRQLMAGALTPIAVPTESHEAARDLARAREQVRGDLMRCRHRLSKLLLRHGRVWEQSTWTQTHQRWLGAQHFDHVNTELAYLDNLAACAGLLARREALDERLSRVARDPELWPVVSRLRAFRGIDTLSALVIVLEVGDFQRFARAVQLGSWLGLVPSRQQSGETDTHGPITKTGSRYARRILVEAAWHYLRAPRIGVTLAARHDGVPDHVLQIAWRAQHRLYRVHQRLRSHRKPPNVVNVACARELACFLWAAATAP

SEQ ID NO: 379677 - protein, 417 aa, unidentified
MNTLPDGPFSAFVGIDWADRKHDICVQGADEETREFDRIAHQPQAIEQWAQALFERFGGPIAIALELSKGPLVYALQKYDFLVLFPINPVMLAKYRQAFVPSQAKDDPTDAELALELLTRHPERLKPLQPQSANMRRLAYLVEQRRLLVRDRVRFTNRIGNALKQYYPQVLEWFDHYDTVVFCEFLTRWPTLKQVQRARASTLERFFWQHHVHRPALIKSRINAIKQAKALTNDNVVIEVHALQVLGLVEQIRVTLGALKRIDEVIAELAPKHLDYELFRALPGAGAVLAPRLLVAFGEDRERFADAAAVQKYAGIAPVTERSGNKSWVHWRWQCPMFVRQTFVEWAEKTVTRSYWAGLFYRQQRDKGKGHQAAVRALAFKWIRILYRCWKTHTPYDEATYLRALKRSASPLLQAAM

SEQ ID NO: 379678 - protein, 340 aa, unidentified
METSIKFYLGIDVSKSWFDVSVLKVVNHEKQPMLTEQFVNTKEGIGSFQKWLEQQGVLFDENTLIVIENTGVYHRPIWEFCSKHNLPLHIGNAAHIKWSLGITRGKNDQIDSKRLCNYCYKQSDELKAMPVLNPVFMNLKDLMTSRTRLIAQLQATKSYVKELLCTNDKALLKTLEKAHKAAIDGIEKSIAQIEKAINDLIEADEKIYRNYELIKSIPGIGSITAIYIICCTNNFANKPSGKQLASYAGVVPFEHSSGSSVRGRNKVHKMANKELKKLIHMCAVSSIRYSSEMKAYYERKKAEGKPGLSVVNAIKNKLLLRVVAVVNKQEKYVENYQKVA

SEQ ID NO: 379679 - protein, 338 aa, unidentified
MTNDITTIGVDIAKHTFHLVFANQQGKPIQRKQLNRSKFKELIQTLEITTFALEACGTSHYWARTIQQAGYKVKLINPAFVKPFVMSNKNDFNDATAIVVAATQPTMRYVSPKSTEQQDVLMLHRIRERLVHQKTALINQIRGLLAEFGIVIKGGAKNLINELPFTLEDAENGLSPLGREQFYLLYQDLKQMDQRLNEQSLKIEMLAKQNPVASKLQKLPGVGFLTASAITASVGDPLEFKNGRQFSAWLGLVPRQNSTGGKNILLGISKRGDSYLRRLLVQGALTAIARTKGNDSQVTWAKKLRQAKCTQVAAVALANKTARIMWSLMAHDKEYQVM

SEQ ID NO: 379680 - protein, 345 aa, unidentified
MVILGADLHKRSHTVVVIDATGRKLAEKRIEASVAGHLELRRWAAQWPERQWGLEDCRHLSRQLEIDLLRAGESVVRVPPKLMAGARRSVREPGKSDPIDALAVAQAALRQPDLPVARLDGPDREVRLLVDHREDLIGERTRHEQRLRWHLVELAIPEPAARSLDRGVVQSALGIALAGRTEAIARLARDLLARVTELTSAIRALQREIEALARAQAPSLVSLPGCGPLTAAKIVGETAGVARFRSKEAFARHNGSAPVPVWSGNTVRHRLNRGGNRQLNAALHRIAITQMRIDQRGQAYVAHRRAAGDTKTEAIRALRRRISDEIFPRLHADEATRVTALAAAA

SEQ ID NO: 379681 - protein, 360 aa, unidentified
MTGTMTWAAMDVHARSVHAAALDVETGELVRRRFGSGRVEPVVDWLAALPGPVRACYEAGPTGFGLYRAAVAAGVGCEVIAPSKTPRAAGDRDKNDRKDTEHLLRQLMAGALTAVAVPTPTFEAARDLARAREQVRVDLMRTRHRLSKLLLRHGRVWDASTWTLAHQRWLGAQRFEHVNTELAFIDSLAATQGLVARRDALDERLSHVAREEEYWPLVARLRAFRGIDTLSALIIVLEVGDFHRFDRAVQLGSWVGLTPSRHQSGEQDTHGPITKTGSRYARRILVEAAWHYSRTPRIGAALAARHEGLPDHVLQIAWRAQHRLHRVHRRMQAHKKPLNIANVACARELSCFLWAAATAP

SEQ ID NO: 379682 - protein, 427 aa, unidentified
MFNKIELVNEKTLIIGIDIAKKIHWARFTNSRGITIGKPFKIENTAEGMANLSVRISELIKEYSCTSVLMGFEPSGHYWRTLAWYFKTTEGITLVGVNPYHVKQLKELEDNTQTKNDQKDALVIAHLIRDGRFFEIYMPDDDYAELRILRRHREQMSVNRKRVINNIYTLMDEYFPEYESIGFSYGSPSSNAILRATPFPTDILSFTPEELWKEWKSHSNLQRTRIPKKLAVMFIETAEKSIGVGFGLSAARLKLNDLLDQIELLNKQIDNCDEMMSQIISRLDIEQYLTSVPGVGKVIAASFIAETGDLNRFSDWKQVRKLAGLNLVEQSSGQHKGKTTISKRGRPDLRRIIYIIGDKGMLVSTEMMEFYQYLRHRPNNQLKHDQAVLAVGLKLMRILFHVVKHRELYDPQKALGEYRISQIVNAA

SEQ ID NO: 379683 - protein, 379 aa, unidentified
MEIITRNEKILYIGIDVHKDTYSLCSFDFHKNELSDEMTIKATTKAVIKYLEAIKKKHKEEILFACGYEAGPTGYGLCRGLQKAGYGCVVMAPTTMSNPDGKKRVKTDRIDARAIARILAYKSYSQVHLPSEEMEALKEYTRARDAKKRMFKKAKQELLSFLLRNGKTYPESGNYWTEKFFKWIKTVQFSEKWMQEAFNEYLAEVYSLKAKIELMDMKIREIAELEIIKDKVDMLVCFSGIDVTTAVETVVEIHDFTRFATAAQFVSYLGLCPGEDSSGKAKNMLPLTKAGNKRVRALFCESAKAIKRTNPYGQKSKRILERQKNASPEIVAYADKATKRIRTKMKHLEERGKNYNVSSAAGARELACFVWGMMNGKIA

SEQ ID NO: 379684 - protein, 340 aa, unidentified
MIDFSTSNTVKEHKMKLVIGIDVSKKKLDLSVYDDKKHKLLCIKNEKTNIEVMLKDFDHIKDTCLFVMEATGTYHLRLATILHERGFKVGIINPLIIKRYCQMRMSRAKTDIVDARLIAEYGYEQKVSLFKPRSKERQKIIKLLKAIDNLIVTKESYWNRMEALAQDPFQIELLNRSFKQLIRKIERTIEKFEAELLEIVKNHYSDTYERLLSIKGVGIKTAVVIIGFFGKFEDFETSKQVASFIGVNPSPKESGSSVKGRGRISRQGNSYLRKKLFMTSLSAMQHNKTCKELYERLMSKGKEHKVCRVAVINKLIKQIFAILKYERLYDPNYNRKCLSV

SEQ ID NO: 379685 - protein, 383 aa, unidentified
MRRSARVTHMGLDIHRNFSQATARDEQGRVLWRARLPHADRQVLRRQLGEWPKVPVVLEATFGWGWLSDELAAAGQEPHLASSRKAAGWRDAQGIAKSNRTDADLLSDLWSEKKRWWEVWLAPPEVRDQREWLRYRMSLVRLQTGIKNRIHATLHRHGIVNPHSDLFGTAGRRWLALLVSEAPQQSLMRDSGRRTLKGQLLLLEQVRRLIAQATRELRQQVRHLPPALRLMSLPGISWVLAYSIVAEIGRIERFRSGRNLATYSLLVPKADDTGDESDTTPLGRRIGHAGRLTLKWAWIEAAHGAVRRGGRFKAIFDRRSDNGKRDRGRAYIAVAHELCRIAYVLWKKEVNYTDCPPPRPGSPSATSRPGTGQPDHPMVPALA

SEQ ID NO: 379686 - protein, 384 aa, unidentified
MASQMPLILVSWRWGIIGYRVGLKSGAAGAERACHPWAGGPSLSMLLRFFCLSRTVAWAKGPHSKEEEIGMKMPVFIGVDVSKRYLDVAFPEGVERVSNEAEGLGALAERLSKTAPALVVLEATGGYETGLVLALQRANVPVAVVNPRQARDFARAQGRLAKTDAIDARVLARFGAVMRPAPLPPIDASQEALGALVSRRRQLIEAVIAERNHLEHATPAVITWIDRHIAMLRDQLAQVDAAIAATVEADRALAHRQAIVTSVEGVGPATAAVLLAELPELGHIEHKQLAALIGVAPINHDSGQFRGQRHIAGGRASVRCALYMATLSAVRHNHTLRVFYQRLRDNGKPAKVALVAAMRKLAIILNALVRDDRHWQPALVQDGC

SEQ ID NO: 379687 - protein, 371 aa, unidentified
MHFITKFVGLDVSKEKISVAIADSGNEAPRYYGSIPHTPEALRKLIKHLGPAETLSFCYEAGPTGYATYRWITSMGAHCTVVAPSLIPKRPGDHVKTDRRDAEQLARLFRAGELTPVYVPDQADEALRELVRIREATKADLHRARQRILKFLLRHHIEPPVTIKRRWTKKYLDWLRQLSFPYASMQLAFDEMLHALFEIEQRMERLGKELARQTESSPKAPLIQALQSLRGIGRLTAITLVAEIGTFSRFRSPAQLMAYLGLVSREYSTGLSTRRGSMTKTGNGRARRAVVESAWSYRYRPAVKGDLAERLEGMPAEVQRISWKAQERLHGKYRRLVYAKNKHKNVAIGAVARELVGFIWAVAQFVEQKAS

SEQ ID NO: 379688 - protein, 408 aa, unidentified
MAGKIAGIDVHKKVLMVVVIDARTPEEKPERRRFATMPTELRRLLNWLQAQEVEEAVMESTAQYWRSVWMELEPHMCLHLAQAFSNRAPRGRKHDFKDAERLVRRLIAKELILSFVPDGEQRIWRNLSRMKLQLVRDRVRLRSQIECLLEEMRIKLSVVVTDLLGSSGMRILHALAQGETDAKRLALLGDERLKCSEEQLIEALTGRTHPVHAQMLMLQLERLRLLDEQITKLNSLIAQAMTAHQDAVIRLAAVPGLGIDSAQQVIAEVGVTAATFSSAAEFTSWVGTCPGREESAEKNSSSRSAKGNKYMRRLLNQAAHAAARSKGTHFQAVFRRLLPRLGYQSAVWAIAHRICRIVWKILHEGVSYIEQGTQPEPKLLLYRAQYLAKQLRKFGYNIQITPPNTATA

SEQ ID NO: 379689 - protein, 329 aa, unidentified
MKDLLEISCGLDIHKEKIVACILTGPLGKPTHSEIREFTTLIPDMLALRDWIISENCHHIAMESTGIYWIPIYEILEDAFSGDITLLVVNARHMKNVPGKKTDIRDSEWISTLLRAGLLNASFIPEKRIREFRDLNRYRKSIIRDITSQKNRVEKFLQSSGFRLSSFISDIFGASGRNIILHLMEHGQIDKMSLDSYLKTKTRKRIDEILMSVNGTLSEHQKSFLKILMCHYDSMKEHLIEIETHLQEDMLPFALQIEQLNTIYGISTTASCAIIAEIGTDMKPFKTAEHICSWAGLCPGNNESAGKRKSTSITKGNPYIKSMLCEIAG

SEQ ID NO: 379690 - protein, 369 aa, unidentified
MYYVGLDIHQRSTNVEILDCNGKLVKRGEWKLPWPQLADQLKKDAPTPFAVCFEASCGYGYLFEEFSKVAQMVKAAHPGSLRLIYKSKRKNNRVDAGKLARLLYLDAVPSVYVPGKETRLWRQTIEFRQSLLIRLVALKNQIRASLRERGIASPKGLWTVKGVTWFKTQGESDDAWALRRDLLVEELCELKKKIKRVELQLKKMSNPRPGTALLMTIPGIGPRTAEALVAYIDNANRFSSVRKAGSYFGWDPCQDASADKNRLGHITRNGPPTVRKLLVEAAWQSVRRSPTIKAFYDRVTHNDPDRKKIAIVATAHYLTRVAVSMLKSGEVWREDPRLKPDNEAGTSGDALGGSAPKPPPRKPLPPVVG

SEQ ID NO: 379691 - protein, 401 aa, unidentified
MSGLKGSFNGFVGIDVSKDKFDACGITGDEAKLFQLSATMDRKGFDKLKGHLASVSVSSVLIGMESTASYHVNLFSYLVSEGYNVILINPLLISNYVKMQLRKTKTDKKDAVVIAQFLRTNGDSLIQRVTSSLISDLRDLARQRESLVDEMTALKMEIKRLLNITFPELEHMVGIFTKSILKLLQRYPSAFALRDADLGQLSRTLIADSYGHKREAFATELIKTAHTSIGSSSPAKEMILKQKIALLLHLEDALQEITDVLIEMSKKLMEEDINIMTSIKGIGDKTAVNFLIEMGCDISQYDRSGKIIAMAGLDPAVYQSGNHEGKGRITKRGNRHLRRVIWLMTTRVIHYSDIFKAYYLRRRKEGLPYKMAVLATAHKLIRVIYAMLTQRTSFCPQANSL

SEQ ID NO: 379692 - protein, 347 aa, unidentified
MRFFTNQHQSYCGIDLHARSMYLCIQNQAGKVVLHRNIPAEPKPFLKAIEPFTDDIIVGIECIFTWYWIADLCEEHDIPFILGHALYMKAIHGGKAKNDRIDSRKIAALMRGGTFPMAYVYPAKMRATRDLLRRRNHFNRKRADLLSHIQNTNSQYNMKPFEKNISYKKNRIGIAEQFVDPDVRASIEADLALIDLYDALKNKLELHAVRNAKNHDPQALYRLRTIPGIGPILSLVILYEIENIDRFPRVQDFASYARLVKCARESAGKRSGTGGGKIGNVHLKWAFSEAAVLFLRGNPEGQKLRKRLEKKHGKAKSLSILAHKLGRAVYYILKRDQAFDLDKFVRS

SEQ ID NO: 379693 - protein, 339 aa, unidentified
MNSMAVGVDIAKNVFQVHYVAQGSGEIVNKPIKRAKFLEHFANRARCLIGMEACGGAHHWARELTRLGHEVRLMPAEFVKAFNIRNKNDAADARAIWLAVQQPCKPVAMKTEMQQAMLALHRMREQLVKFRTMQSNGLRGLLTEYGEVMSRGRAKLDKAILAALDRLAERLPAALIDTLREQWSGLARLDGQIAEIERRMREWKKEDGAVAAISEIPGVGLLTATAAVAMMGDPKAFSSGREFAAWAGLVPKQTGSGGKVNLHGISRRGDTYLRTLLIHGARSVLSHAKEPGPWVEQMKKRRPANVVIVALANKMARTIWAVLAHDRPYRKDYVSVKPA

SEQ ID NO: 379694 - protein, 340 aa, unidentified
MKHIGMDLHSSTTDVCVRNGKGEIVLRRRLETTRTELQRFVADIPGPKRIAVEESQMADWATRVLQPHVDEAIRCQPQFNKLISASEDKCDKKDAESISELLYLNRLKRVHHPNLAYRTLRQTVRAYWIASRELTRAKNRLKGLFLFHGLHETGDKIYSVHNRSKYLKKLERAGGNVELGQLLYERMDHCRQLKAKHIRLARKSARPMNDLVRLLMTMPAIGAIYAYTLVAYLEDGRRFPNKRKLWRYAGLALRKHESRDIGARHVSFSGSRLVKYVAMSAAATIACRRGDNALSELWEKEIRNKVDPEQAQRNLARKIVAIAQCLLRSKQEYSDEQVKG

SEQ ID NO: 379695 - protein, 340 aa, unidentified
MGEITTIGLDLAKQVFQVHGIDADGTTVLRKQLRRSQVLSFFSRLAPCLVGMEACATAHYWARELAALGHEVRLMPAQYVKAYIKRNKNDAADAEAICEAVVRPTMRFVPAKTAEQQAALLLHRGRERLVRQRTGLVNALRGHLAEFGVIAPQGLRNVGKLIAVVRDVGDARLPDLARQVLEVLAAQIEQLEGAVAAVEKQLMAWHKSNPVSQRLATIPGIGPIIASAIAASVAEPGGFRSGREFAAWLGLVPRQNSTGGKHRLGGISKRGNQYLRRLLINGASANLLRSKATKADPWVIGLRRRRPSLVVAVALANKTARIAWAVMQRNENYQRMAAAA

SEQ ID NO: 379696 - protein, 358 aa, unidentified
MSDGIGVGRQFVGVDLHLHRSVIGRIDEHGAQLGWERIDNDPKALVAKCRKAGRGAAVAIEATYGWYWAVDALLAAKFDVHLAHPYGMKAMRNRKRVKTDWRDAYELANLLRLGSLPEAYISPPDLRELRELVRHRQQLVKLSTALKAGVRALLAKHNIRLPARQLDGDTAIAIMDCLTLPGTYATRLAAQRRLLMALAEEIAATEIELVRRLNDHPGYRRLLSIGGIGPVLAAVFVAEIGDISRFPNAAALCCWAGITPRHYESDKTVRRGHISKEGNTLVRWAAVEAVQRNCEPAIRAVRDGIIARRGKDARNTAKVAAARVMLEAIYHVLRDGYSHRLNNEWLAQDQHTNFVAAG

SEQ ID NO: 379697 - protein, 370 aa, unidentified
MKSIIYVGMDVHKASFTLSCFSVTTQETFATVKISPDAKAIKKYLDGVSLSRSEECEFVCGYEAGCLGYTLYHQLTAMNIRCVIMAPTTILRNCKRVKTDRIDAENLARCLAYGGYKSVYIPTAQDEAVRDYLRMRDDHKLMLKKIKQQINAFCLKHNKIYPGNKSKWTQAHVKWLNALEFDGYLQDAFNEYMITYRELADKVERLESQIEQLAELEEYRDKVKKLICIKGIKTHTALSLIVETGDFSRFQSAERYASYIGLVPGEHSSSEDQNRLGITKAGNRHMRMLLTEAAQCYSRGVPAMKSKALKSRQKGASPEVIAYADKASIRLRRKYIRMELVNKKKANVAKTAVARELACFIWGMMTNNIA

SEQ ID NO: 379698 - protein, 346 aa, unidentified
MNSMNYIGLDIHKKSISCCVRQADGTIIQESTITATRHALDEWMRQLPDPWIAGMEATLFTGWIYDHLVLGGAVVKVAHPAMLQAIAVGKKKNDRVDARKIADLLRCDYFPECHMAPREIRDRRRVLRYRNLLVRQAVQMKNKVSGLLMEAGVPYNQQKVHQKKYFAELLQKQKKDMPLSMPELLRLSRSTVEALTGMQRQLIRALESDALLAARVERLASIPGVGRVVALTWALEMGDISRFASVKKAVSYCGLCGAEKSSGGKTERTPISKQRNKHLQTMLIEAAKLAPRWNAELALVYDREKQRGNRNRATLAVARKLVAYLMAVDREERLFDTQVRVAGNAA

SEQ ID NO: 379699 - protein, 351 aa, unidentified
MNVTKYIGMDVHRAMTVSAVLSATGKVVAEAIIETKGSVILDFIQSQRGTLWVTFEEGTQAAWLYDLIQPHVAKVVVCDPRKISTQGNKADRPDAKRLAELLRTNALTAVYHGERSTRALKELARSYSAIVGDSTRIKNRLKAVFRARGIDNSGGGIYTTEERECWTSKLEAGAVRLRVQRLWRELDTLDVLRAEAEKDMVVEARKHLSTRILQTVPGIGPVRAALILAFALTPHRFRSKRQFWGYSGLAVVTRTTAEYELVKGRIRRTKKRPALRGLNPNCNRVLKDVFKGAAGTAANGPWRAYFESKVASGNKTELVLLTIARKIAAITLALWKKGERYDETKLTMHAV

SEQ ID NO: 379700 - protein, 340 aa, unidentified
MKDTVIGVDLAKNIFQVHGASRAGEVMFRKKLRRQQFMQFMATQPPALVVLEACGSAHYWARELAGAGHEVRLIAPQYVKPFVKRQKNDAADAEAIVIAARQPEMRFVEPRTEAQQARGVLFRARQRLVHQRTELVNALRAVLYEFGLVVPQGIAHIRHIEAMLDEAVLPEAVKQECLDLLRQISEQSVRIDVRTKKIRMLAQESENTCRLQSMPGVGPLTALAIEAFAPDLQSFRRGRDFAAWLGLVPRQFSSGGKERLGKISKAGQADIRRLLIMGAMTQVNWASRKAPAPGSWLARMLARKPRMLVAIALANRMARAIWVMATKQEDYRDPALSVAA

SEQ ID NO: 379701 - protein, 345 aa, unidentified
MDDPRQTHEQVMLGVDTHAEVHVAAALDERGRLLGTCTIPTTAAGFRELLRWTSQYGELSRVGMEGTGSYGAGLARWLRARDVVVIEVDRPDRRTRRRRGKSDSVDAEAAARAVLAGTATAQPKAGTGAMEMVRTLRVARQSALKARTQAANELHALVVTAPDAMRAELRRLKIPQLVATAAAFRRSAELTTPTAATKLALKSIATRYQHLAAEIEALDKHLDQLVAVAAPALVAIKGVGTDIASTLLTIAGDNPERLASEGAFAHLVGVAPIEASSGKITRYRLNRGGDRQGNRALYLLAVGRMGWDPATKAYVARRTALYPVLLVMTPEARPGRSPKSSLQTA

SEQ ID NO: 379702 - protein, 443 aa, unidentified
MKELPVLDSRAAFCDVGSEHMHVSIAGGLPKVFGTFTSQLHELRDWLLGEGVHSIAMEATGVYWLSLYGVLESAGLEVVMVNGRQTRNLPGRKTDMKDCQWGATLHAHGLLKAGFVPPSHIRKLQDYQRLRTDHIASAASHVQHMQKALERMNIKLHNVISSLMGVSGLAIVHAILDGERDPAKLLELCYSTIRHKKAKDVIEALRGTWEPEHLFALRQALQSWEHYHRQIAECDQQIQLLLQEITFNDTQGGGIGEKPKATAGKHPSANAPQISGLHRMLIDLCQGKDLSILPAHTDYSILQIISEVGTDLSKWPTEKHFTAWLGLAPGTSQSGKRKSNVKHSRSRVGRYFCVMARSLARSKDMALGGFYRRLAARRGGLIANIALARKLAALFWRVMVKGTEFVEEGLAAYEAKFLEGKKRSLRRLARELGQTVSPIPVTV

SEQ ID NO: 379703 - protein, 443 aa, unidentified
MKVSSLACGCLFQQEQEGGGSEMRGLRGRGLRAVKEGTLIATVDIGATTNTGYCTTVDGRDIKVFKFGNSREGFEKFWHMVVAARNRFGCHEVVMGHESTGPYAEPLVHYLMGKPVRIVQVNPLHTKRLKEVNDNSPGKTDDKDPRVIADIIRLGRALTVVVPEGDAAYLRRLNNARERHVCEHIALLNQMQQRVFLIFPEFKTLIAPMRGRTVRFILKKYTTPESIGALAKEVFGEEIRKKSMGKLGIKEAELLVKAAQHTVGIKEGVAGIALDLRHIIAQLEVVERFMSEIEVEMVATLERIPCSARLLSIKGMGVVSVAGLIGEVGDFSKFKTQSELMKLAGLDLYEVSSGKRKGQQRITKRGRSLMRKILYFAVVQMVKKHGIMHEYYERLTGRGTLRMRALVAAMRKLLRIIHAMMRDQRDYVGQYEAPKRRVIKKAA

SEQ ID NO: 379704 - protein, 414 aa, unidentified
MEQVHDRVAGLDVHRDVVAACVRVAGPRGGVATEKERFQTTTVALERLGGWLADRQVSLAAMEATGVYWKPVYYALESRFEVWLCNAHHVKNVPGRKTDMSDAEWLADVAAHGMIRPSFVPPPPIRELRELTRYRKTQTDARTAEIQRLEKVLQDAGVKLTSVASKVLTQSGRLMVQALIDGQRDPAELANLAKGKLRPKIPELTEALAGHFGAHHAVAARRILDHVDFLNATIAALTEQIDARTEPFQAAKQLLSSVPGFDRLVIDTVIAETGADMSRFPSPGHLAKWAGVCPGNHESAGKRRRVGITPGNSWLRRALIEAARAAARTRGSYFGAQYRQIAKRRGPNKAAVAVAHSLSDLIWHQLTTGECFHDLGDDYFQRRRDPERETRRLVAQLEHLGFHVALTPSRDPAA

SEQ ID NO: 379705 - protein, 334 aa, unidentified
MKEIATIGLDLAKNVFQVHGVDAKGIVLVRRQVRRAQVLLFFSRLPPCLVGMEACAGAHYWSRELAKLGHDVRLIPPSYVKPFVKRGKTDAADAEAICEAVTRPNMRFVPVKTERQQAVLMQHRTRDFLVRQLTQLVNAILAHLGEFGIVVPKGVHNMGRLIAEAETADLPPEARMPLDLLAGQFRDTKQRIDVMTGQLKADAEKDETACRLQTVPGIGPITASVLAAMLPDVSGFRSACDLPAWLGLTPKPHSSGGKERLGSISKMGNRYIRRLLYLGAMGVISARKRSDPGTDWLGRLIATKPLKVAAIALANRMARAIWAMLKTGEVWRPT

SEQ ID NO: 379706 - protein, 449 aa, unidentified
MSNYAGVDWAADKHDVLVADEAGEELLAATFAHDEKGLRALCRALVRLKVKLVAIERPDGLLVERLLDAGLRVLALHPNQVAATRARFRVSGGKSDRFDAFVLCELARTDSHRFRVLEPDGDETKALRALTRAREDLVHARVALTNQLRAELERFWPGPIGLFSDLHSQISLAFLERYPSPGDVRGLGEQRLAAFLARQHYPGGQKPAQLLAKLRRAPEGRVGEAELAARRALVLALVAALQPLVAQIKQLNEQIATALREHPDGEIFTSLFRDPRSVVTAAELLAEIGDCRNRYPTRDALAADAGQAAVAVESGKRKTAAFRWGCNKRLRGAFCTLADSTRHWHPWAADRYAAARARGHDHPRALRTLGRAWCRVVWRCWQDRTPYDPARHRALQQHCAVTIPTSSGSLPDLAATQRMLGAAVTEPAARRAEREALDGKPTSAIKLGG

SEQ ID NO: 379707 - protein, 317 aa, unidentified
MSQPLSIGIDIAKDSFQVASWPPQVQGTWLNTRQGHRAFRDRLQGVPIARIIMEATGGYEKTLAAELTQAGYPVVVVNPRQVRDFARGLGQCAKTDSIDADVLARFGDLVQPSCKPPVDPETEALAELVTRRRQLTDLLTQETKRAGMIHHVKVRKSIRKMIHTIEHQIRELDDLIQDHIQGDGDFQQKDRLLRSVPGVGPQTSAMLLSHLPELGRLNRHQIAALAGLAPYDCKSGKQARASHIAGGRKPVRSLLYMAALTARRCNPVIRHFAELLEDQGKSFKVILTACMRKLLIILNAIIRDQQIWTPKKFLKNT

SEQ ID NO: 379708 - protein, 420 aa, unidentified
MTTSNSTPAGAVLVAIDIAKVRNEVLIEDPSHKRRRRLQVLNNRAEHDHLVEVLRTYGRPVVCAFEATGNYHRPIAWRLSEAGFEVRLASSLALARTREALHNSWDKNDPKDAQVILHMLKIQATQRYHDPLRAGINDVQELSKTDEAIARAKTEIQHRILTHYLPLYFPEIDRFRGNSRSDWFFAFLDAFPTPASITALTKEEFVTAAWDVVGRKVSKTQILMDIYETACSSIGLPLPLDAPAIRMFRMVIDEARSLIRQRNEIEAQADELLQHSQDYQLLRQIPGIGPINALTIIAEAGDLRRFGHHRQFLKFCGLDLSTQQSGQYRGQTRLSKFGNARLRRTLWIAGQVAIRQRENGFRHKFERYIARDRDNPDLRRKAMTAITAKMARVVHAVVKGGSDYRPFVEGRVPGGRTSVS

SEQ ID NO: 379709 - protein, 414 aa, unidentified
MRAVGLDVHRDFCEVAIVEEGRLRSAGRIATRPQELELFAQSLGPRDWVALEVTGNAWSIARILETHVARVIVVSPSDTGIRQARAKTDRLDARALAKLLWAGELDGVWNPDERVRGMRRRLARRSQLVRARTRAKNEIHAVLLRCLKARPPASDLFGKKGRGWLAAQELPLTERETVDSALRLVDFLDGEIAAVEQLIAAEALSWPEVKRLMTVPEVNVTVAATFMAAVGDIRRFPDRRKLTAYLGLDPRVRQSGAAPAAHGHISKQGSNSARHALVEACWSTVRQPGPIAAFHARIKAKRGHSIAIVASARKLACLFWCLLIRGEDDAYAQPSLTKKKMRRLEITAGAKRRQGGRDIWSTNLAMRQAERDLALQAQHAYERTIKDRQQKSGASATPGRASSGSSREQVARQT

SEQ ID NO: 379710 - protein, 451 aa, unidentified
MKKKKVSLEVVNPYAAGIDIGSRSHFVAIGQDADEVREFGVYAEDLQELAAWLLENGIKTAAMESTGTYWQNLFSTLQAYGIEVFLVNGKFTKNMRGKKSDVMDCQWIQKLHTMGLLSSSFLPDSTTETIRTYTRHRLSLIQLAADTSKKMQKYLRLMGFRLDVVVNDICGLTGIAIINDICNGNLNPKLLSVHRHYNCRKSIEEIEKALHGNGRKDYMFALIDEFEMYQILKTKIEKCDKEIESLLKEIIEKNENKKYHIAEAKPHKRITKNTNKQLDLNQVAFQYFEGIDLMKIEGVSHATVMTIISEIGLEGFSKFHTTKQFVSWLRLSPNNKISGGKVLSNQIARGSNRLKIALRQAANCIGNLKETHLSDFFRRICIKRGRASAVSATARKLGVIIWTMITKKIQYAPPKEYLMLDQKRKLGLVSRIRKSIAKFDLKPDDLGFATV

SEQ ID NO: 379711 - protein, 339 aa, unidentified
MRLYAGCDLHSSNTYLGIVDEDGKRVFKKKLSNDHEVILSTLAPYKDSMAGIVVESTYNWYWLVDILMEEGYQVHLANTTKIQKYSGLKYADDQHDAFWLAEMLRLGILPEGYIYPKEDRPIRDLLRKRSHLVRLRTSLILSLQNILSRNNGISLKANAVKALTIDHVTPYLAGNEDLALAGKVSKESIDFFTLQIKSLESVVEERIELRDPYNKLLTEPGIGKILGLTIMLEAGPINRFADVGNFVSYCRKVSTAWISNEKQKGKGNRKCGNKYLAWAFSEAAELARRFDKDARAYYNRKAQKTNRMVAHNALAHKLARAAYYIMRDGVPFVPEKCFG

SEQ ID NO: 379712 - protein, 322 aa, unidentified
MQGKVLPERSATQVYVGIDVCKARLDVYLHPLGAKFAVSNDAHGFRRLKRSLEGHEVALVVMEATGKLHRAAHRSLVAESFAVAVVNPLRSRLFAEAAGALAKTDGVDARMLAVLGESMKPSPTAPPSALMQTLRDVLRCRDAAVAARTALLNQLGEASVPVAIAEIKRQIRAVETSLANLEAEIERLVAADPSLARRLAVLTSIPGIGTTTAVALIVGLAEIGSLSDKQAAMIAGLAPIACDRGEQAGARHIRGGRPQLRRALYMAALSATRCNPDLKAVYDRLRAAGQKPKVALVAVMRKLVILANALVTQNRLWEPNHA

SEQ ID NO: 379713 - protein, 338 aa, unidentified
MKKITTIGLDLAKNIFHVICCNEHGKVIRKKMLRRREVILFFTQMPPCLVGMETCSGAHYWAHQFIALGHQVKLIPAQFVKPFVQGNKNDYNDALAIAEAIVRPNMRFVTPKTTAQQDVQALHRLRERRLQERTALCNQIRGLLAEYGLILPQGVNVIRRSIPELLEDAENGLSDLFRQLLAQCYQQLQELDEHITFYTRTLEIQNQRDEACQRLQTIPGFGPIIASVFYATVGDGSAFQRGRDVSASLGLVPRQHSSGGTNTLLGISKRGDSYLRSLLVHGARSVVLHAQKKDDRLSRWINKIRSERGYNKASVALANKLARIGWAVLSQQTVYRTV

SEQ ID NO: 379714 - protein, 454 aa, unidentified
MPGLPVGGLHTFFLRGKDMERVYQRCCGIDIHKRILVACLILVTADGQRHKEVRTFRTITQDLLQLLDWLAANQCTHIAMEATGVYWKPLFNLLEGHFQVLVVNAQHIKAVPGRKTDVRDAEWIADLLQHGLLKASFIPPATQRELRELTRYRTTLVEERARIVNRLQKTLEDTNLKLGDVVTDILGKSARAMLEALLAGQSDPVKLADLARGRLKAKRAELEQALVGTLKPHHRFLLKEHLAHIDTLDQAMVRVGAEIAALMRPFEQAELSETHPDEPTPETQEQSLTWAQAIVLLCSIPGISQRAAEGILAEIGIEMKRFASAKHLASWAGMSPGNRESAGKRLSGKTNKGSPWLRKLLVEAALAASHTKQTYLAAQYKRLAARRGAKKAAIAVGHSILVIIYQLLDQHKSYEDLGGNYFDELDRQAIQKRLVRRLEKLGYEVELKPALPAA

SEQ ID NO: 379715 - protein, 505 aa, unidentified
MKTKRRKAKNQAAKKTDKVRTVSRAEELAILRPDAGGVDCGAEEHYASVPPDRVRAGQASVRCFSAFTEGLDALVDWFKECRITTVAMESTGVYWIALYQKLEAAGIEVYLVNARHVRCVPGRKSDVQDPQWLRQLHRFGLLNASFRPEDVVCRIRSLHRDKENRVASAAAEIQHMQQALQQMNLHLHHVVSDITGETGLRILDAILAGQREPKELVKLRDKRCSKSTPQQMQAALVGDYRPEHLSVLKRSLEAYRFYQSQIEECDRQIEPLLLELAQRVEAASAQLQLPSPKPKAGEPEQKLAEKQQQQSDATEPNTNALRTKKKRKAKANEPKIEIAGLLQRICGVDLTRVVGLNVASVLLIVSEIGVDMSKWRSARAFCSWLGLCPANKISGGKVLDSRTRKVVNRVATALRLAAQSVGRTDTCLGIFYRRKKAHLGAPKATTATARKLACLLYHLLKNKEPYQDPDPVLYQHRLQISALTKLQRQAAALGYTLLPTAPAPV

SEQ ID NO: 379716 - protein, 400 aa, unidentified
MNDSDEIGVFLGLDVGKSAHHGHGLTPAGKKVFDKQLPNSEPKLRAVFDKLAAKFGTVLVIVDQPSSIGALPLTVARDAGCKVAYLPGLAMRRIADLYPGEAKTDAKDAAVIADAARTMPHTLRSLQLTDEITAELTVLVGFDQDLAAEATRTSNRIRGLLAQFHPSLERVLGPRLDHQAATWLLERYGSPAALRKAGRRRLVEVIRPKAPRMAARLIDDVFDALDEQTVVVPGTGTLDIVIPSLAHSLAAVHEQRRALEAQIGQLLEAHPLSAVLTSIPGVGVRTAATLLVTVGDGTSFPTAGHLASYAGLAPTTKSSGTSIHGEHAPRGGNRQLKRAMFLSAFAALHDPASRTYYDRCRARGKTHTQALLRLARQRINVLFAMLRDGTFYEPRTPRLA

SEQ ID NO: 379717 - protein, 363 aa, unidentified
MDVHKRTITLCVYNARTGVILDERGLLHDLPKITKYLWKVQDRHGQVRSCYEASSCGFGLQRALQARGISCEVIAPSSIPRRPGERVKTDRRDARKLATLYAAGLLTIVCIPDEEQEAIRSLLRCRGDLAETITRTKQRILAFLQARGLQYPGKTNWTKTFHTWIGALPMTEIDQITLQTYLHQLDQLEQEVRRIEGDLAAQAERDPYQAPVKVLMAFRGIGLVTALTLVFELGDLRRFAHPRQLMAYLGLVPSEHSSGHHTQRGGLTKTGNVHVRNAVISAAWKYSNPPRRSRVLRQRQEAVSAEVISVAWKAQRRLYKRFHKLSQTKARCVANAAVARELVGFLWEALRLENPLITASARV

SEQ ID NO: 379718 - protein, 377 aa, unidentified
MNRIIKIGMDVHSSNYTLCAMEPVIGAEDRVFANIQVTPDYKNILMFIENLKHKLGAKDTYDIECGYEAGCLGYSLCNQLTSAGVKCVILAPTTMLTQQGQRIKTDSRDALMIAQCLSYGGYHAVYIPTEDDDSVKEYLRMRDDHKQALKKVKQQINAFCLRHGYQYEGTKWTIAHIKWLKKLELSSMYQETLNEYMASYDEQTAKIERFDARIEEIASQARYSEKVKKLECFLGIQTHTALSLIVETGDFKRFAKGNIYAAYLGLAPGEFSSAEKINRLGITKAGNSHLRKLLVEASGGICKGAIGHKSKVLKQRQQGNSAETIAYADKANTRLRSKYYRLIRHGKKRNVAVAAIARELACFVWGMMTDNIGVTVE

SEQ ID NO: 379719 - protein, 377 aa, unidentified
MSPIERSVPVFHSIAFESEQHLSAFDVSSLSLHSLACDLAMTAPDSASSPVSSASPAIGVDVSKASLEVALIGTEETSASHTAVPNTEEGFEELVDWIGRQTVASNVHVCLEASGGYEKPVARHLYEQDLTVSVINPQRTSAYAKSQLTRSKTDQVDARILARFCQREEPSSWQPASSEQRNLKEMTRGLQGLKKERDRLNNQIDQSSNPTVTGSLESVLESVNEQIDRLEEAIDNHVQSADALARSQELLETIPGVGQTTAALVLAELGDPERFESARQAAAYAGLTPSHHESGSSVHRKPRLSKVGSSRLRKALYFPAISALRCNTAIEALGSRLAERGKAKMVIVGAAMRKLLHICYGVLKNQSPFDPSLHPGT

SEQ ID NO: 379720 - protein, 340 aa, unidentified
MSEITTIGLDLAKHVFQVHGIDAEGATVLRKRLRRGQVLAFFSRIPRCVVGLEACATAHYWGRELGALGHEVRLMPAQYVKAYVKRNKNDAADAEAICEAVGRPTMRFVPVKTAEQQAAVLLHRGRERLVRQRTMLVNALRAHLAEFGVIAPQGLRNVGRLIAIIRDDDDARLPGLARQVLQVLAVQIEQLEAAIAALEKRLMGWHKSNPVSQRLATIPGIGPIIATAIAAMVAEPSGFRSGREFAAWLGLVPRQNSTGGKNRLGGISKRGNQYLRRLLINGASANLLRSKATNADPWVIGLRRRRPSLVVAVALANKTARIAWAVMHRQENYQRMATAA

SEQ ID NO: 379721 - protein, 345 aa, unidentified
MIKYSLGIDVASKKFDVCLSVIHIDQSIKIIGSRGFPNNDSGFSNLIEWLKKKHKNKDTPLVICMEATGIYYEKLALFLSDAAFDVSVILPNKAKKYLQSLGLKSKNDKIDAKGLARMGAEQKLDFWLPFGKYFYFLRALTRQLQSIQELKTAANNQLHASELAMFELSFVLKQQKKLIKEYDKMIAALTNEIEKHLHSDKEMMVRIEKIMKIKGVGLLTVAIVLAETNGFELFSSASQLTSYAGYDVVENQSGNRTGRTRISKKGNSRIRRIMHLPAFNVVRYHVPVFENLFNRVYERSNKKMIGYVAVQKKLLLIIYALWKNGEEYDSKINQGACVPGVIEMA

SEQ ID NO: 379722 - protein, 313 aa, unidentified
MTKEQDTTFIQIIHPVCCGLDVHKDKISACLLTVGKNGEEIHELREFNTFTESLYEMKKWLIANNCPVVAMESTGVYWRPIHNVLEDSMKVILVNARHIKNVPGRKTDLSDSKWLAGLLRHGLLKGSFMETISTLEAQIKAINQRVDKLTQEQEDLLDRLDAIPGIDKKSAQAIIGEIGITLEEFACVAAFVSWAGLCPGNNESAGKRKSGRSPVRSHPLKTLLIQVAWAAIKTKGSYYKAKYYKLKVKRGAKKAIVAIAHRIAKAIYNIVKNGDTYRDIGEDFLTGSERERAIYNLKKKADALGYNVVPCTA

SEQ ID NO: 379723 - protein, 423 aa, unidentified
MMKLKYSICCGLDVHKNVIVATIVTTNKDGISEYLQKSFSTINSDIQRFHNWLIENNCYHVCMESTGKYWIPIFNYLENDIDVCLTHPKYVKAIKGKKTDKKDSKWIADLYKFDLVRCSFIPPKDFRQLRELSRYRFKLVCMKSSEKNRIQNCMTISNVGIASVLSDPFGKTATEIISYLLEHTADSMDEKAVRKLIKKGAKSKSDEIIEAIKGYTIETDQAKKLELARGHLEYLDDMITQTEVELYVRIKLYYEFVEFVSTMPGMTELSSTIVLAETGVDMDIFDDAKHLCSWCGLSPANNESAGKKKSVRIAKAGDYLKPMMVQCALAAIKSKKQPYFAIKYGRIKKRRGHKKAIIAIARMMMVCIYHMVSEKKPFTPTDYEELMDPQNHVESVVLNENNVFAYLESLGYDSSKLVKRNDN

SEQ ID NO: 379724 - protein, 442 aa, unidentified
MAMRKREEEVVVFPNAAGIDVGASSHWVAVPRHASDEPVREFGAMTDDLKELADWLLECGVDTVALESTGVYWIPLYDVLERRGLTVWLVDARQMKYVPGRKSDVQDCQWLQKLMSLGLLRAAWRPREEVCVVRAVVRQREVLLVEQSSWVQRMQKALVQMNIQLTEVLTDVMGMTGQAIIRDIVAGQRDPAVLAKHRNQRVKASAASVQRALTGTWREEHVFVLEQALAMYDSLAQRLTECDAKLQALLAPLGRHDVKLAGPAKRAGKNTPGFDLRTALARWAGVDLTRINGLAVTSVLTVLSEIGPDLSRFANVKHFCSWLGLCPGTKISGGKVLSARTRRSTNRVRQALKLATMSLSRNGSALGAFYRRLCARMDKPRANTAVAHKLARMIYFMLTRGEQFVDRGQQHYEEHQRQRSIAALRRRAALLGFAITPTAAAA

SEQ ID NO: 379725 - protein, 312 aa, unidentified
MESGIFVGIDISKSHLDVFAPPLGAFRVEYTDAGLAEILERLSEHAIKLVVMEATGKLEAVCAATLSRSNIPVAVVNPRKVRDFARASGRLAKTDRIDAEVISRFGEALQPEVRRVRDEDEERFDELLTRRRQVVAMITTEKNRLGTVRDRKVRRRITAHITWLRVELKDVDREMSDAIKESPLWRVKDALLRSVPGIGETTSKVLIAELPELGDLNRKEIASLVGVAPMNRDSGTMRGRRIIFGGRSVVRSALYMAVLAATKHNPDLKTFYQRMLAKGKPKKVALTATMRKLVILLNTVLARGTKWQPERP

SEQ ID NO: 379726 - protein, 394 aa, unidentified
MAFKIFRKNCCGLDVHKTWIYACIGITDTNGRTEYKQARFSSFTKGLQEPADWLAKYDCNDVCMESTGKFWIPVFNILEKTCWVTLAYPKYTKPQKGNKTDHKDAKWICDLYMCDMVNPSFIPPPDIRQLRDLMRYRSKLTNIMTSEKNRALNCLTVSNLKLDDVFSDVFGKSSRSVIRYILEHPGETFQVAPFIDRRCKHPVEEIQAVIDGTISYQQAVKLRECLQHLDELEVHKTNVEKEILCLVQQYPYQLELLQTVPGFSGNIMTAIALISEIGADMSVFPSAKHLVSWAGCCPRNDQSSKKVKSTRISRAGVYLKPLLVQVAIQPFTANADKLSAAGALEIRCQICDGRFLSMWAALFIFLGCPLPPCPKNLHVHNGRIVILASVAWIF

SEQ ID NO: 379727 - protein, 412 aa, unidentified
MEVLYPHCAGLDVHKDTVVACVRHMATGSVEREVRTFKTTTKDLLALSDWLAEHGCTHVAMEATGVYWKPVWHILSDGDFVLVLANAAHVKNVPGRKTDVNDATWLADLLAHGLIRGSFVPDEQTQEMRNLLRTRKQLVRECSRHIQRLQKTLEDANIKLDSVISDIMGLSGRAMIEALIAGESDPQRLAQLAHRRIKAPPEALCEALRGRVTRHHRFLLRLHLKQIDAVNVAIDDIDQEVDAQIEPFRTTIQLLITIPGVSELSACVILAEIGHDMNRFPTAAHLISWAGLCPKNDESAGKRRSTRMRKGAPWLKTTLVQCARAAARKKASYFQAQYHRLRARRGDKKAIGAVAASILTTAYHMLKYGTLYEDLGPDYFDKRGKGKHVHRLINRLQNLGFAVQITPVEAAA

SEQ ID NO: 379728 - protein, 337 aa, unidentified
MKLYSAADLHSNNHFLSIIDEQDKRILEKRLPNDLAVTLKTLEPYRAELVGVAVESTFNWYWLVDGLAEAGYSVKLVNTSKVRQYEGLKYADDRHDAFWLAQQMRLGILPTGYIYPKEQRAVRDLLRERRRLVRQRTTHVLTTQSTIWRHTAIRVPSKVILGEKEAAWPELPDRNVKLGVQAHRATIKVLTKQIETIEATLLKQVKTIPEYKILLTVPGIGPVIAWTIVLEAGDLSRFANVGHFASYCRCVDSKRISNEKKKGENNRKNGNPYLAWAFFEAAHFAIQYLPAAKGFYERKAAQRNPILAMKALSHKLARACYYVMRDQVPFDPARLFG

SEQ ID NO: 379729 - protein, 356 aa, unidentified
MNYTGIDYHKRYSVVCIIDAAGDILHEERIEHGFPEHFAALLGEYAPLEVAFEATMNWSWLYELLEVTEGIKRIVMANPLHVRLISAAQVKTDKVDSRKLAQLLRAGLLPASHIPDRATRLRKEVLRQRTFWVRTRTKVRNRVHRLLGRQHGLAMPQVTDLFGRKGRVALDKVVLTSPDDMLLRQQLSVLDVLGTQIRELEARIAEDGAPDETVKLLSTVPGLGPILGNVIATEIDGIERFDDSASLCAYAGLIPSTSSSGDKTYHGKLVPGCNKWLRWALVEAAWVAVGCSAYFGGFYRHHRARGKKANTAIMIVARRMCQVIFRILKERRPYEARPCSNNVPGRSQQGRTTQAA

SEQ ID NO: 379730 - protein, 416 aa, unidentified
MKYARTVLPTEPANGLTCGIDWARDDHAVSVVDSRGKEVLRSTIDHSAMGLQTLLSILTRTGVEEVAIERPDGPVVDVLLDAGITVVVISPNQLKNLRSRYGSAGNKDDRFDAYVLADTLRTDRIRLRPLVPDGPATVALRTSCRARKELIGHRVSMANQLREHLNRAFPGAVGLFAELDSPISLAFLTRFDCQDRADWLTPKRLGTWLAKVGYTGGKSPAILHARLTAAPRGVTGEHGTAHAHITHALVATLSVLVEQIKALSEQIADQLATHADAHIFTSLPRSGKIRAAKLLAEVGDCRGRFPTPEALACLAGVAPSTRQSGTMRSVGFRWSCDKHLRDAVTDFAADSRRANPWAQDLYRRARARGHDHPHAVRILARAWLYVIWHCWQHGVGYDPAQHRALQALLHDEQPAA

SEQ ID NO: 379731 - protein, 321 aa, unidentified
MDTANISVGIDVAKDWLDVAERPDDAAWRVRNDEAGIAALVERLGQREPAVVVLEATGGLEWALAAALAAAHLPVVVVNPRQVRDFARATGRLAKTDAIDAQVLAQFGEAVEPPPRPLPDQATQELAALVTRRRQLVEMLTGEKNRLRTARASVRRDIQEHIRWLERRLNDLDGDLRKAIQSSPLWRVRDHVLQSAPGVGFVSSSTLLANLPELGRLNRKEIAALVGVAPLNRDSGTLRGRRTVWGGRAHVRAVLYMATLVATRRNPVVKAFYERLVAAGKPKKVALTACMRKLLTILNAMVRSHASWQITNPTLAQQDSC

SEQ ID NO: 379732 - protein, 360 aa, unidentified
MKKDTKVESGLTVGVDLGDRWSRYCVLDQQGQILEEDTIASTGRAFRKLFGDRPVARVVIEVGTHSPWVQRLLQELGHETITANPRYVRLIYSSRNKNDQLDAERLARLARVDTKLLHPIQHRGGTAQADRALLRSRNALVECRTKLVNHARGMVKSIGGRLPTCSTSSFHKRVRQDLPDELKPALTPVLDTIAALTLKIQKLETRIERLASKRYPETGLLRQVSGVGPLTAFSYVLTVEDPERFKSSRAIGPYLGLRPRQSQSGDQDPELRITKAGDTDLRRLLVGSAHYILGPFGPDTDLRRWGLALAARGKKNAKKRAVVAVARKLAVLLHRLWVTAEVYEPLRSQRSAITPHAVSA

SEQ ID NO: 379733 - protein, 368 aa, unidentified
MPSTTRICRAGGTAITTIAHTQPARLTVGVDTHKDVHVACAKDQLGRRLATTLVPTTSAGYAELLGWAGTLGQVEAFGIEGTGCYGAELARFLRSRGQRVLEVNRPDRAARRRHGKSDPVDAEAAARAVQAGEATGLPKAGDCVVEMLRVLRVARQTAMRARTQTINALKSLVVTAPDPLRRQLRDLPTRQLVATTAAFQPDTPATPTMATMLALGALARRYQALDGEIRMLGRQLHRLVGQAAPALLEVFGVGPEIASALLVAAGDNPQRLHSDAAFAALCGASPVEVSSGKTVRHRLNRGGDRQANNALWRIVLVRLRAGHPPTVAYLERRTAQGKSKREVIRCLKRYVAREVFAVLQTMAAQAAA

SEQ ID NO: 379734 - protein, 433 aa, unidentified
MEEVTDEPLYRDRVCGIDIGKAELYATIRVPSDTRPQRRMSETRSFATTRRGVLALADWLRCWQVPAAVMEATSTYWMGPFFRLEAEGFECVLADAKQVKNLPGRPKRDPSDSSWLAQCFERGAVRPCFVATKEFRVIRLHTRYRRDLINERTREKNRAEKLLETAAIKLSSVITDLHGVTGRDIMGHLIAGERDPKVLAQLARTRARAKITELQHALEGAEFFTGHHARLLKTMLERIDQIDAQISDLTAVTEELLAPYEEQLQQAESMPGWGRRSAEDAVAETGTDMTRFATGGHLVSWAGRAPLDKQSGKRKGPARHKKGNTYLGGVLGETAVCAGRTQTREGARYRKLARSRGKNKACVAVGNTQLKVYHTLLSHPGMRYADLGPDYYQRRAQTRRTIDYHVRELEALGLEVTLCRLPEPGQAATTPAA

SEQ ID NO: 379735 - protein, 344 aa, unidentified
MQINSVGIDLGKTTFHLVVLGEAGKVLVRKKFNQRQLLTYTANLPTSLIGLEACSGAHFLGRALRKQGHDVRLIAAQFVKPFVKSNKNDFVDAEAIAEAVERKNMRFVPIKTDDQLDLQAIHRVRDRLIARRTAVINQLRAFLLERGLTFAKTPAKLRNALPDILENPEVDLTTQMRNLIDLLWAEWKAVEDQIERLSRELERISAADAGCTRLRRIPGIGPIVATAIVAAIGNGAAFRKGRDFAAWLGVVPRQYSTGGKTRLLGISKRGNVYLRKVLIHGARAAVLRMKRDRAPIGSWLDALDARAPKNIVVVAMANKLARIAWAVLSSGEDYKPASNQLKAA

SEQ ID NO: 379736 - protein, 480 aa, unidentified
MNIKAKKAKVQPLSKKSVINVLSQDEIKKKVQVIEQELKASTWRELETKGKFEKNDKLSFISEEMLIVGCDIGSETHYIRAIDTRGRELSKGAFEFSNSSEGFASAKAWVLKLAAKNDKKQIVLGLEPTGHYWFAIAAWMVSNGISVVQVNPYAVKQSKEIEDNSQLKDDRKDPKIIANLVKDGNYGMPYLPEDIYADMRRLSMFRDQLTEDRIRNINRLHREMKIYFPEYMDAFGKIDGAFTLEILKVAPIPSDIVELDEEGLKSLWHEAKLRGRGYSRARVIVDYAKKSVGLTGGTDAGRESIKWFVEQIIQLDERLAEIENVLHQKCMEIPHAENILEINGVGENILAGILAEMGDISRFDDVKEIQKLSGMGLVACSSGKHKGQTKISHRGRKRLRYWLFQAAKSAVAHAVEFKQLHAYYTTRSMNPLKKMQSLVVIACKILRVIYTILNTGMKYDPERMLRDIRYPQGNTVQAAA

SEQ ID NO: 379737 - protein, 340 aa, unidentified
MDVTTIGIDLAKSVFQLHGVDAHGEVAFRKKLRRSAVLDFLRDLPPCLIGLEACATSHFWARSIAALGHEVRLIPPAYVKPYVKRQKNDAADAEAICEAAARPNMRFVPIKSAERQGVLMLHRTRDLLMRQRTMTLNAIRAHLAEFGLITAQGPHKLLTLIGAIRTGVMPGLPETAREALESLATQLDNFAGEIRKLERQLMTWHRADGISQRLKTIPGVGIITATALAASVPDPSVFKTGRQFAAFLGLVPRQSSSGGKDRLGRISKMGDGYLRRLLVVGATSVIRRAGSNTSATGVWVRCLLERKSARLVTVAVANKTARIAWAVLARGETYRAPKAA

SEQ ID NO: 379738 - protein, 352 aa, unidentified
MTKDNFDELMSVGIDIGKDTFHIVGFDRAGQRVLRKQIKRLALVATFEKLPRCIVGLEACLSAHFVSRKLRKMGFEPRIIPAIYVKPFNKGQKNDYNDAEAIAEAVLRPNLPVVPEKSQEQLDLQALHRVRSRLVSRRTATINQIRAFLIEQGITVRKGLRALKSSFEIILEDRKDEISPRMRSILIGLYGDWMWMDDRIETVSSEIEEISQTEENCVSVMTVPGIGPMISTAMVAAIGTGEAFSRGRDFAAWVGLVPRQYSTGGRTVLGRISKRGSRYLRMLFVQAAKVILMRSNRWQDFSFGEWLAKAAERMHRNKLAVALANKLARMAWSILRLKTAFDAKRDEVAVGI

SEQ ID NO: 379739 - protein, 349 aa, unidentified
MGEVSTIGVDIAKSVFQVHGVDADGAVVIRKRVGRAKVIEFFANLPSCLIGMEACATAHQWARELKKLGHDVRLMPPTYVKAYVKRGKNDAADAAAICEGVTRPSMRFVPIKSVEQQSALMLHRTRDLLIRQRTQLINALRAHLAELGLVAAKGHEGLQQLVMAVTESSDKRLPSNARFACQSLVAQLYALQTQINGLDKRIIQAHRANADSKRLEAIPGFGVILSTAVVATMTDPRAFRTGREFAAWIGLVPRQNSTGGKERLGSISKQGDRYLRRLFVLGAISIVGTARTRPDKYPWVTELLGRRPAKVAAVALANKMARTAWAVLAKGETYRTPTRSSSAVIAAIA

SEQ ID NO: 379740 - protein, 347 aa, unidentified
MSITMIGLDTAKAVFQVHAVDGAGLVVTRRKLRRNELIAFFEKQAACTVVMEACGAAHHWARVLTGLGHEVKLIAPEAVRPFVKKGKKNDAADAAAICEAASRPGMRFVPIKSLEQQGVLALHSARSLLVKQQTMLANAIRGLATEFGLTVALGMGKLGELMALVDADETVPEKARQVLNALFDQCRALDESTQAFEAEIVAHARHDDTARRLATIPGIGPITSSLIAATVADIGVFQSARHFAAWLGLVPRQHSTGGKTRLGRITKAGNREIRRLLVLGATSMVHRAPGWNSAAGAWTRGVLERRPVRLVTVALANKMARIAWAVMTRKEVYHAKGRVAAVAEAMA

SEQ ID NO: 379741 - protein, 368 aa, unidentified
MNSKKYVGMDVHQATISVAVRDSSGKLIMESIIETKAATILEFIRGLNGSLSVTFEEGTGASWLYDLLKPHVSELIVCDPRKNALLKGGNKNDKVDARKLSELLRAGLLSPVYHGERGVRTLKELARSYLTLTKDLTRVMNRIKGLYRSWGIRCAGRDVYTTSHRADWLAKLSEAGVRRRADRLYEQLDDLRPLRQEARKELLAESQNHPACKLLGEVPWLGPIRVALVIALMQTPHRFRTKRQLWMYSGLALETRVSGEYRFAGGELQRSKKRATPRGLNENHNHDLKNVFKSAATRASTSAGPFQDFYTGLLAKSMKPSMARLTLARKIAAITLVVWKKGARFDATQLKSLLAIMKKRRILNFGRR

SEQ ID NO: 379742 - protein, 428 aa, unidentified
MNCNTQNAKIASITEKTLIVGIDVGSETHFARAFDWRNYEYTKKPLEFSNTEAGFLTFKAWVEDIAEKQGKTAVIPGMEPTGHYWFALGKFLQDNGMKPVHVNPHHVKKSKELDDNNPNKNDRKAPKTIAALVNEGRFSYPYIPTGIYAEIRSLSNLRFQTQEELTRIKNRIARWFAIYFPEYKDVYGDLKTVSGRMVLKVAPLPEDIGKLGVEGVNQIWRSAKLRGAGIKREKTLVSAAEHSVGSKEAPEAARMELKNLLDDMDVYVSRLDELLVNIEEKLKEIPYVDKLMEIKGIGLVTVSGFIAEVGDIGRFDNPKQLQKLAGYAIVANDSGKHNGESRISYRGRKRLRYVLYEAAISLIGKNAEFKSIHEYYRTRKENPLKKMQSVVAVACKILRVFYTILTKGVDYDPVKLLGDIKRPQLQAA

SEQ ID NO: 379743 - protein, 336 aa, unidentified
MKRQYVGIDLHRRSSTIYRMSEDGKTLGCVRVPSRPLELAEALAEAGDAPEVVIESGYGWYWAADVLEELGATVHLAHPLGNDWGNRRVKSDERDAKDLAAMLRLGRLAESWIAPPEVRGIRELVRYRAKLVQLRSGLKAQVHSVMAKHGVLPERADMFGPGGQAQLDALALPGPYMARIGSLRHLIELYDREVTVLEREIHKALKDDPGYKALQQIPGIGRTYAAIFVAEIGDVSRFSSAEKLCSWAGLTPKHRQSDTKLVRGRITKQGSTLLRWAAIEATAKCRAGTKLQADYHRIAERRGKAKAHVAVARRLLTLVYYGLRDGEIRALSPKAA

SEQ ID NO: 379744 - protein, 390 aa, unidentified
MFFVGIDVSSVKHDCCILDGSRKMIRSFMILNSREGFSALSATLIELAAPEDIKIGLEATGIYGDNLARFLRRKGFNVCTINPLLCKKHQSATTLRKTKNDRSDAKNIALIVASEDLQPDQPLSYHIVELKSLSRARFLTVKDRSSLKNKVKRLVTVLFPELLDVFTDLFGASGMALMTRYPSAKALAACNLDTLTELLKTASRGRFGREKAEALHKLAKESIGTFSESSVFQLRLLLKRIELLNTQIEMYDDEIRRLMDQIDSPILSLPGIGYTLGAMILSEIGDIKRFSSPAKLLAFAGLEPSVYQSGKFNPASGKMVKRGSPFLRWALLQAATYAPAFSITFAAYYDKKRLEGKSPSVAHSHVAKKLVRVIFSLLSRNVSFVDSFAA

SEQ ID NO: 379745 - protein, 328 aa, unidentified
MCTLGIDVSKNKIDLCLLTAGPGGKKKHKVLTNEPAVARKVIDWLNAQKCVPESVTVVLEATGIYHENLAYGLHEAGVSVCMANPCRVREFAHGMDILNKNDAVDAFVLACYGELKSPAVWVPPSPEVRKLRALLRQRDALREDVQRTVNRLEKANSTSTPQEVIRSLERTKSWLNEELARIEKLITDHTDNDPGLKADLDLLKSIKGVKDQVGREMLALLKDGMFKSASQVAAYLGLTPVEKTSGSSVRGRPHMSKTGPSGVRAKLYVAALTASRWNKQAKAIYERLVAKGKAKKAALGAVMRKLVHLCFGVLKTRLPWDENYVATA

SEQ ID NO: 379746 - protein, 340 aa, unidentified
MEHYVALDVSLKEISVCIIDSKGEVIFEGKAVAEPATLIELIRRKAPRVMRVGLETGSTSPWLFHALASAGLPVVCMDARHAHAALSMRPTKSDRSDARGLADMLRMGWYREVHAKSVTSHEHRTILGARHQLVTMRSELDAQIRGILKTFGLILGTGNKDTLIQRAEKLAAGHPVLSGLVAKLAAVRRHVTLQIAAIDRDIRHLVHTEPTLKRLMSVPGVGPITALAFLSSIDDPRRFKHARDVGPYLGLTPTRYQSGETDRQGRISKCGDTFTRTCLNEAAHVLLTRVQRFSPLKAWGMRLAKRIGGRKARIAVARKIAIILHCIWTDGTEWTREKAA

SEQ ID NO: 379747 - protein, 451 aa, unidentified
MKDLSMEVVNPNAAGIDIGSRSHFVAVGQKEEDVKEFGVYNEDLSSLAKWLSDHGIKTVAMESTGTYWQNLFTVLQGTGFEVILCNGKFTKNIKGKKSDVQDCQWIQKLHTLGLLSGSFLPDQATEQLRTYCRHRMNLIEQGADTIRKLQKYLRLLNFRLDIVVNDVTGLTGLSIIKAICKGEADPEKLASLRNGNCKKSEEEIAKALQYNGRKDYLFALRHEYEMYVTLQSRIEECDAEINTLLKAQISSDENKKQHHIEKKVHKRVNKNNPKNIDINLLSYQYFEGTDLLSIEGLGHSTVLTIMSEVGNGIYKFNTAKQFASWLRLSPNNKISGGKVLSNRIPKGSNRLKIALRNAANVIGNLKGTALSDFFKRIAFRKGRVSAISATARKLAVIIWNMLVKKIPYKPENTYEFLDQKRKRKVMEMKKLIHKFDITPDDLGLQLNISNL

SEQ ID NO: 379748 - protein, 323 aa, unidentified
MTVYLGIDIASKKFDVAELCDGNYRCKAFENTSAGFLALYKWLGQSTMPDIHACLEATGDYGTSLATFLYKNKIKVSVVNPARIKGFGASELSRTKTDKADSKLIARFCKAAVPDGWKPTPAPLRKLQALVRRISALNGMLRMECNRRENADANIQASLDRIISLLKTEIEVVRQEIKDHVRSDDELKKQDALIQSIPGIGAVSSNLILSFMSGKGFRKAKEVTAYLGLNPRHHQSGSSVRGKTRMSKMGDARLRSALYMPALVALRYNPDIKAFGQRLLLAGKPRMLVVGAVMRKLIHIVFGVLKSGTAFSSRIAVHSVVTS

SEQ ID NO: 379749 - protein, 339 aa, unidentified
MKLIPVGIDIAKTVMHVHYVDEGTGEVVNKPIKRAAFLEHFTNRSPCLIGMEACGGAHHWARQLVKMGHQVKLMPGEFVKAFNIRNKNDAADARAIWLAVQQPSKEVAIKTEMQQAMLALHRMREHLVKFRTMQMNGLRGLLTEFGEVSAKGRASLDRAIPDILARVAERLPAVLIDTLREQWNSLKKLDEQISAIERRMREWKKDDHEVKAISEIPGVGLLTATAAVAMIGDAKVFKSGREFAAWAGLVPGQTGSGGRIRLHGISKRGDTYLRTLLIHGARSVLINAKEPGAWVEQLKSRRHTNVVIVALANKIARTIWAVLAHNRPYQKGYVSTKPA

SEQ ID NO: 379750 - protein, 372 aa, unidentified
MTVVWLERGAQDELQPGVPTTVLITVEGRTVMSVIIGIDPHKALHAASAIDRSETQLCELNVRTGPRQLAQLLEWAAPFPARLWAIESAGGLGYLLAQQLVARGEHVVDVPSTLASRVRLLGSGRSNKNDANDARAVAVAALRAPSLQAVRREDHVSVLRLLAKAHLDISRARSRACSRLHATVSELVAGGLRKEVVVNQAECILAGIVPVSVVQRQRLELAHELVDDIRSLDVRMKHSRTRIGEAVTASSTTLTEIFGVGPIIAGMLIGYSGDVTRFATAGHFAAYNGTAPVEFSSSGRTVHRLSRRGNRTLNHAIHMIAVTQIRNPGSEGRAYYDAKLAAGRTRREARRSLKRHISDRVFRHLRADARAL

SEQ ID NO: 379751 - protein, 418 aa, unidentified
MQVETDEPEVIERVAALDVGKAEVVCCARVPGPGGKRMQEVRTISTMTSAVLALGDWLAGLGVTRVVMEATSDYWRAPFYLLEDRFQTWLVNAHDVKHLPGRPKTDRLDAVWLCKVAERQMLRPSFVPPPAVRELRDLTRYRVDLLAVRTAEKQRVEKLLEDALIKLSVVVSDLFGVSGRAMMAALIAGERDPAVLAELARGSMRSKTARLSEALTGRFTDHHAFLLRQMLARVDAITADIGTVQARIEGQLGELAPAVARLDAIPGIGPVAAQMILAEIGTDMSRFPTPAHLTSWARFAPGVSESAGRKKGNAGTGKGNRYLARVVGEAAVSAARTDTFLGERYRRIARRRGKKRAIVAVGRSILVIIWALLSDEQAQFIDLGPDYYASRANSERKVRNHVRELQALGYAVTLNPAA

SEQ ID NO: 379752 - protein, 313 aa, unidentified
MTNVTFPQLIQRGCGIDVHLKVVVATIDGVGIRKETRSFDTFTSCLTEMKEWLLANGITHVAMESTGVYWKPVMRVLEADIPNVWIVNARHIKNVPGHKTDKMDSEWICKLLLAGLLKPSYIPPKEQRQLRDLTRYRNKLIQAIAAEKNRMMRVLEDCNIKLSSVVANTSGVTATALIDMLCEGRKLTIEDIESVYHKKLSASPQELLEACTGFVEEHHVYMLQMIRKSIAQTQGLVDELSKRIKEILIKYDNVLELLKEIPGFNTKVVEDLVSEIGLDMSAFPSEKHLASWAGICPGNNESAGKKKRKNYSR

SEQ ID NO: 379753 - protein, 434 aa, unidentified
MTRYVGIDLHKHLIVGHVVDAAGKKVDTFRYESVDASTLAHIGRTRLTRDDHVVMEATTHCWAVVRALEPFVARVAVSNPMATKAIAKAKVKTDKVDAAVLSHLLRLSYLPEVWQPDPATRLLREWTARRSRIVGQRTAVINRVRSTLAQRLLHCPHEMTSHAARDWIGGQTVDEDTRWLLESDLRLMDSLQAELDAMDKLLAKRGHVDPRVKLLMTLPGVSQHTAQALLAAIGDISRFPDADSLASYLGLVPSTRQSASHCYHGHITKQGRGHTRWMLIQAAHSMRVNPGPLGYFFRRLQKRKPYSVAVVAVAHKLVLLAWHLLTKGEPYRYAIPQTTKTKLQKLRVQSTGQKHRTGPAPGKKPRVKVPGGSHITKPLATVYQIEGVPAASPAPAGERRHLAELKLQTFVDDLQQERVTPRHAQKKAVADNAR

SEQ ID NO: 379754 - protein, 426 aa, unidentified
MRVMYDRVAAIDVHKDMVKVAIRVPGARRGTRKTDVLEFRTFYGVLQAMARELRSRGVTHVVMEASGVYTDPVYYALRELDFTEVMVINPAHAKALKGHKTDAKDAIRLLDLYECGLLSGSYMPSEDLREVRDLARYRMKTVQARTSEIQRLQKTLETAGIKLSSVVSDVTGASATAMIEALISGERRGSVMAGLAQTRLRAAGKMTDLSMALAGRFTEHHALMCRLHRDRIKIFDDAVDDLDAKIAPLVARYAREAELLKTLPGFGDVVVAGWLGAIGPAPHQHFATASRLASWATLCPGNYMSARKSKGGRTGDGGAYIKPLLIQAAWGAVRVPGRLQARFHRLVRKFGGPRNKGARKRAITAIAHTLLKIAYTVLKTGQPYADLGADFYTRRESPDARQDYLIRQLQKLNPGCIITVTPAETA

SEQ ID NO: 379755 - protein, 337 aa, unidentified
MKKYAYYIGADVSKKTIDISVLKGKEKLFHLRINNDEKGFKALKKELQKHGILAKKSILCLENTGFYGYSFSCWAVENAYPVWIENAIAIKRSLGLVRGKNDQVDSYRIALYAARFEDKCKLWQPPRKAVQRLQQLIATRTRLIESRNRLKTPLKELSFAFSKNQNKEVETCCKAAIKGIEKSIDKVEEKIDQLIKSDTGLSHMKKIITSVDGIGLQIATALIVATNEFKELKSQRKMACYAGIAPFEHTSGTSIKGRTRVSHLANKSLKTLLHMGAISAIKNSEEIGAYYRRKVEEGKPKMVVINAVRNKLVLRMWACIREDRMYEKTYTKNLAES

SEQ ID NO: 379756 - protein, 402 aa, unidentified
MDGIGRYAGIDWAKDAHAVCIIDGQGSALARFEVEHSAAGLRELARRLEGVEGVAIERPDGPVIDALLEAGLPVVVIASRHVKALRTRHGLAGNKDDRADAFILADALRTDGQRLRPLRPDAPATVALRATVRARKDLVRHRVALVQQLEAHLALVFPGAIGLFADLSADIARAFLLRFPSAERAAWLSPRRFDHWLAAQGYCGRRTGTELHARLEAAPRGMTGESAEAMAAVTLALVRAIGAIREQVDGLERHIAELLQAHPDGHIFTSLPRAGRVRAAALLVEVGDCRERFPTPESLACLAGATPSTRQSGQHRAVTFRFSCDKKLRDALIDFADDSRQSNPWAADLYRRARARGTTHPHAVRIIARAWVDVIWRCWQDGVPYDPARHHALQRLLLAPAA

SEQ ID NO: 379757 - protein, 351 aa, unidentified
MIIVGVDYHPSVQQVAFLDTETGETGERRLNHSDGEAERFYRDLQRRQVKVRVGIEATGHARWFERLLAELKFELWIGDPARIKAARVRKQKTDRQDAQLLLRLLVEGRFPQIWAPSPENRDLRQLIWHRHRLVQMRTRAMNQIQAAAMNEGVRRKKTLWSKTGRRQLEALPLAPWATRRRQDLLELVDRLNTTIDELTAAAEQEARKRPEVLRLMTHPGVGPITALVFVLVLGSPDRFGCGHQIGSYLGLIPCEDSSADRQRLGHITKQGSSLLRFLLVEAAQAAVRWDPDWRRRFVHLAMRRDRRIAKVAMARKLAVSLYWMWRKGFDYPQTLQFGSHAGEPGYVHGVK

SEQ ID NO: 379758 - protein, 313 aa, unidentified
MDAQGRLLSQERIPNKDESIEEFARKTLNDSDTEIVIESSSTWYHVYELLSRNQNCHVVLSNPVKTKAIASAKVKTDKVDALTLANLLRTGYIPESYIPPRHIMDHREMVRYRTSLVRMRVEAKNKIHAILLQSGTKINEKPFTIGFVEELRKLGDYRIDGYLSVISSLSRQIHSVSTTIKKEAREDESTRLLLTIPGIHYYSALLILSEIGDINRFPDSHHLCSYAGLTPSTHSSGGVTYHGSITRTGSRYLRWILTECAKAHIRSRKDSQLTRFYTRVARRRGGSKATVAAASKLLRIVYWVLKEKRPYHG

SEQ ID NO: 379759 - protein, 373 aa, unidentified
MTASMDEEAPAMESMRWVGVDVHAKESVAAVLDQATGEVSTHRIAGRPDVVLDWLTTVAQPFRAVYEAGPTGYGLVRRASERGLDVVVCAPGHILKNATDHIKVDKRDAVRLARLLSAGELRLVRIPEPDQEQLRDLVRSREDVRVDLTRIRNRIGKFLLRRELYPPQHAESWGVLHRKWLQQLRFEDRASELVFQDAMQAHDILVARREQLERALAEIAASSPWSRTVARLRCLRGIDTLSALGLVAEVGDFRRFVHPRFLSSYLGLVPSEHWSGDKRRQGGITKAGSKHARRLLVEAAWQYRHVPRTSHHISQRQQGQDPRVIDIAWRAQRRLYKRWQRLHEERRKRSTVVAVAVGRELAAYCWEIATLTG

SEQ ID NO: 379760 - protein, 410 aa, unidentified
MEQIHDLVAGLDVHRDSVTACFRHLGPKGGIVREKERFATTTSGLAVLAGWLSERRVELVAMEATGVYWKPVFYALEDTFELWLCNARHVKKVPGRKTDLSDAKWLADVAAHGMVRPSFVPPRPIRELRELTRYRKTQIDTRVAEIQRLEKILQDAGIKLTSVASKVLTQSGRAMVEAMIRGEHDGAVLAELAKGKMRPKIPALADAMNGHFGEHHAVAARRILDHLDFLDVTLAALTAQIDARVGAYRAVYDLLLPVPGFDRLTIDVVVAETGADMSRFPSAGDLASWAGVCPGNHESAGKRRNVGTPPGNRWLRRALIEAARAAARTKGSYFGAQYRQIARRRGPNKAAVAVAHSLLDVVWHLLTTGEHFVDLGDDYFERRRDPQRQALRLVSQLEELGYTVTLAATA

SEQ ID NO: 379761 - protein, 341 aa, unidentified
MNGSKNVVGIDIAKRVFQLHSIDRETGEIVSLQLKREQFLEHFANRQACLIGMEACGGAQHWARKLTAMGHQVKLLPGKAVKGFVTGNKNDRHDARAIWTAVQQPHVKAVAIKTEEQQAILALHRMRSQLVKFRTAQINGLRGLLTEYGEVMPQGKAGVRKGITEALARLADRLPAMVIDTLREQWARIGKMDEEIATIEQRIKLWLKQDEACKRIAEIPGVGPLTATAAVAIMGDAKAFKSGREFAAFAGLVPRQTGTGGRTKLLGISKRGDTYLRTLLIHGARSVLTHAKDPGPWVTELRRRRPLNVTVVALANKMARTIWAMLAHERTYQKEFVSQPA

SEQ ID NO: 379762 - protein, 312 aa, unidentified
MTDIICGVDVGSETLDARIGQDGAWQQFANTVEGIAALAAFCQSHRADLVVMEATGGYERQPFAQLWAANVPAAIVNPCAVRRFAEAMGVLEKTDRIDCGVIAWFAGVKRIKPTRPASATQCRLAALVVRLRQLTELRVEQSNQRRLVTEPDVLLDFQSILTTIASQIRVLEVKIAATIAADPLWAALDAAFRSVKGVADRTVARLMAQLPEIGTISNKAAAKLTGLAPIARDSGKRQGKRPIRGGREGVRSLLFVVAEVVRRHDPDFKAFHQRLCAAGKPKKLVRVALARKLLVRLNAKARDVRNELAYAA

SEQ ID NO: 379763 - protein, 350 aa, unidentified
MRTVAEEYARVVGVDTHAATHTMTLLIGATGAVVEHRTFPTSAAGLRRALTWIRNRTQDQACLVVVEGTGSYGAGLAEHFTQGGIVVAEAPTIPAARPRGKDDAMDSARIARAVLGLRLDQLCWPRAGGTRTAIRVLVSARDQMSTERTKIINALTALVRSVDLGVDARKALTSAQITTIAGWRARDEDPAVAACRREAIRLASRIHALGRDLAANMAELRQFTAAEVPELLDLPGVGPVVAGTILLAWSHPGRVRSEAAFAALAGTSPIPASSGNTIRYRLNRGGDRQLNRVLTTIVLVRMRHDQTTRNYLARRRAEGRTTKEIMRILKRYIARQVFRLLAAAHPTPTA

SEQ ID NO: 379764 - protein, 348 aa, unidentified
MAIVGGFDVHRAQITFDYIDTDSGQVTAGQIRPATRPALRNWLQRFDGRDDVAFAVEGCTGWRFVVEELTRARVEPHLAEPADTANLRGRKKRAKTDRADARLLRELLAQHRLPESWAPPSHVLEVRTLGRLYVTLMDERRAWQQRIHAQLFHQGVPSVRALLTSDGRVALSKAELSPAGVQMLQTALGAVDALSLQIGPLRAQLQTIGTNQPGVLALTRQYGIGLLCGTIIWAELGDCRRFSNADQAVRFAGLDVTVWSSDTKRSAGRLARQGSPELRWALFEAAKSAARQTSPDHAYYDAVRDRLGGKRPALSVARKMVRRCYHALRELGDQAWLASAPSSEQQAA

SEQ ID NO: 379765 - protein, 375 aa, unidentified
MTMTRTLSGSVSEPTLYVAFELGKKEWKLAMSTGFGVQPWLRTVASRDWALVERALTQGRARFGLAATAVVVSCYEAGRDGFWIHRALLQRGIRNRVVDSASIEVSRRARRAKTDRLDALKLVMMLVRVCSGEKRVWSEVRVPTVAEEAGRHVSRERTTLTQEQTRLVNQMRGWLATWGVRLPSRRCGSWWTTLRDWAGAPLLSTVQARLARAEGRLQMLEAQIAELDAQQAATLRTAPPTSAFRQLVRLKGVATTSASVLLDEGLVWRAFQNRRQIGGLLGFAPTPYDSGERAQEQGISRAGNAHLQAISIQLAWNWVRWQPHSALTAWYRTTFGKGKRARRIGIVAVARKLVIALWRYVTSGVVPDGAIVKVA

SEQ ID NO: 379766 - protein, 311 aa, unidentified
MQPTIGIDVSKDRLDAFRLSDGQRLQVTNDKAGHRTLLGWIGRGDPPLVVFEATGAYHRQLEARLGAGSVPFAKVNPRQARRFAEATGRLAKTDRIDAAMLARMGAVLDLAGQAAPGKALLELRELAAARRALIKDRAAAKTRLGVAALPLVRRQLDARLRQIEAQLATIDTAMAERVAEDEEMARKRDILVSIPGIGETTALAMLVEMPELGTLGPKQAASLAGLAPISRQSGKWQGSERIRGGRAPLRHAIYMPALVAARFNPALKATYQRLRLAGKPAKLAITALMRKLVVLADALIRDNRKWTKTAP

SEQ ID NO: 379767 - protein, 345 aa, unidentified
MEYFAAIDVSLELSSVCVVDGTGKIVREKKVASEPEALAEFFRGTGLTFTRIGLEAGPLSQWLHAGLMAAGLPAMLIETRHVKAALKAMTVKTDRNDARGMAQLMRMGWFRPVHVKTLPAQEVRALLTGRKLLLGKLRDIELGIRGLLRGFGLKVGKISKGNYEKRIRELVTGHPMLEPIAAAMLQARASLRAEFGKLHRMLLAIVRDDPVCRRFMSAPGVGPVVAVTYKTAIDDPGRFRKSRDVGPYFGLTPSKYQSGEVDWTGRISKVGDAMVRTALFEAANVMLSRVTRFSALKAWALRVAKLRGLKRAKVALARKLGVVLHRMWIDGSQFRWNKAPAAVAA

SEQ ID NO: 379768 - protein, 317 aa, unidentified
MAQKGTIVGIDVAKGKIDAAIRFGAEASFANSAEGRRELLAWLKEHGVCKAVMEASGGYEKSWATLLRGAAVEVVIADPNRVRHFAKSAGQLAKNDPIDARMIAWFGEVFGHVSGQPHDEERQELDQIVTARLGIGRLKEQIENWGEHEQPKAVQKAQQALLKAVATQLAKLETIIASKIDKIERFAQRAEIIQSVPGLAGTAAAGLIAFLPELGLVDRQAAAALLGVAPFDADSGKRRGERHIQGGRHKLRKLLFMPVLSAATQHNPVLKACYQRLIAKGKKAKVALIACMRKLIGILNTMLARGEKWDPARHAIA

SEQ ID NO: 379769 - protein, 345 aa, unidentified
MKITTIGIDLAKEVFQVHGVDIHGKAVLRKQLRRSEMAKFFANLEPCLIGMEACGSSHHWARKLDGYGHTVKLMAPQFVKPYVKTNKHDMADAEAICEAVSRPNMRFVPVKNVEQQAILSVHRARQGFVKARTAQANQIRGLLAEFGIVIPQGMRSIVKRIPEILEDGDNGLPGTMRRLIDRLTQHLKELDGQVEELEGQIKRWHSESEASRKLADIPGVGPLTASAVVATIGDAKVYKNGRQLAAWLGLVPRQNSSGGKQVLLGISKRGDTYLRTLLVHGARAVIRRAESADPEGWLRKVMARRNKNVAAVALANKNARIMWALLAKDRQFRPDYTSAAFAAEA

SEQ ID NO: 379770 - protein, 312 aa, unidentified
MMEHYIGIDISKHCFDLYDMADGKNMHFQNNPKQIKQCTGELKKRNPKLIVAEATGGYEIPLVTQLQAEKLPLALVNPRRIRDFAKAIGRLAKTDKIDAQVIAAYAATLEPPKQDPIDANARKLKALIARRHQLTNMRTAEQNRTEHALDKTVAKSIKAVITTIDREIEKVEKQIKDHIDSQSLLKQKADHLKSIPGIGDTTAFMLVSELPEMGRLNRRQIAALLGVAPINRDSGTFRGKRMTGGGRKDVRARLFMATLVAVKHNPVIRCYYQRLLKNGKAKMTAIIASMRKLIVIMNTMIKKNEYWNTNYA

SEQ ID NO: 379771 - protein, 352 aa, unidentified
MVVAVQYRRPSLNKNVMVQIYGIDLGMSSFDVSFLSESGSVRHLSGVKNTVHGISKFLLSLPSAAVLCAEHTGVYGDLLLRLCTLNRICLCFVPGYQIKHSLGLQRGKSDPLDACRIREYAERFYDLLRPCFYPGEEMSELQELYRTRSLLVESRKRLDTLNIGDNCKSSVSLAAVHARRAVLAELNTQISGLDHEIEALIQNSSEFSRNYQILTSIVGVGPVTSCELIIKTENFRKLDTAKKCAAYAGIAPYPKESGKMKCGHKISPMGDKQLKTLLFLCARSAKEHNKEIRLYFLKKHKVEKKHFFVAMNNIANKLLRLIYSLIHKQQTYDRDYIQRDPRCVVISDTHKC

SEQ ID NO: 379772 - protein, 378 aa, unidentified
MQPTQRFNGKAVLAVSLELADKSRKVALTDQQRAHPAVFKVDQAGLWDRLEALLQRLQEFKRRWKLPAHCHVLVLYEAGQDGFWIARALQARGVQVVVIDAASVPVPRHARRAKTDRLDALKLLGELQAWLRGERPELRVVHIPSEDAEARRLLTRQRGLLQKEIGQHRDRMRKLLRTQGCKEEMDAGFVERLVAGQVRRGDGRPIPEELWRGLMHECERLELARRQFAEVEHTLLHQLPEPVQRCIALLAGLRGVGWVGAMRLVLELLWRDFSNRRQVGACVGLVPQPYDSGDSHVDQGVSKQGNRRVRALLVEMAWAWLKYQPGSALAQWFARRTSGNNKRGRRIAIVAVARRLAIDLWRYLREGIVPAGAVLKAP

SEQ ID NO: 379773 - protein, 426 aa, unidentified
MRVMHDRVAAIDVHKDMVKVAVRVPGARRGTRKTDVLEFRTFYGVLEEMGRELRRRGVTHVVMEASGVYTDPVYYALAGLGFTEVMVINPAHAKALKGHKTDAKDAIRLLDLYECGLLSGSYIPSPDLKEVRDLARYRMKTVQARTSEIQRRQKTLETAGIKLSSVVSDVTGASATAMIEALIDGERRGAVLADLAQGRMRSRQKMADLPMALAGRFTDHHALMCRLHLDRIKVLDEAVAGLDATIAPRAARYSREAELLKTLPGFGDVVVAGWLGAIGPAPHEHFATAGRLASWATVCPGNYLSAKKSKGGRTGDGGAYIKPLLVQAAWAAARVPGRLQAKFHRLVRRFGGPKNKGAIKRAIMAIAHTLLKIAYRVLKTGTPYHDLGADFYASRESPQARQDYLIRQLHKLNPGCIITITPQEAA

SEQ ID NO: 379774 - protein, 320 aa, unidentified
MSDSPVMVGIDVASEHVDVAAIGAMLPFARCGNDPEGHSALAEALVAIEAALVVMEATGGYEAALACALQAAGLKVAVINPRQARDFARSMGRLAKTDRVDAQTLAELAATLARRPDAERFLRPLPDAVQQDLAALVTRRRQLTTMLLSERQRLRLAVAVVRPSVEAVIEMIRKQLDDIEAQMAGHVRQHYAELDALLQSAGGIGPVASASLIADLPELGRLNRRQIAALVGVAPYAKDSGQHRGRRRIAGGRFELRRALYMATLTATRHNPAIRAFYERLLATGKLKKVALIACMRKLLTILNAMAKTRTTFDPDHTHA

SEQ ID NO: 379775 - protein, 458 aa, unidentified
MTPRKDNFPEPNRRRRARLEVKNPDAAGIDVGAEAHWVCVPADRQANPVARFGTCTADLEAIASWLQQCGVTTVAMESTGVYWVPLYELLETRGFQVLLVDARQVARAPGRPKTDVKDCQWIQRLHSYGLLSAAFRPQDQVVVLRAYLRQRDMLVTGASQHIQHMQKALEQMNVKLTEVVSDITGVTGMAILKAILRGERAPAELARLRDPRCKESAATIARALQGNWRQEHLFALQQAVALYEFYHQQITACDRAIEAHLRTFADQSGGQPLPQRRHRRRREPNEPRFDARARLYCVCGVDLTAIEGIEETTALVLLSEIGTDMSRWPSVKHFCSWLGLCPQHKISGGKILSRRIRRGASRAKRALRLGARSLHHSKSALGAFFRRIKARYGTAAAITAAAHKLARLVYSLLKHGAAYVAQEMTEYEAKYRERRLQVVTRQARELGFQLVPAPAAGG

SEQ ID NO: 379776 - protein, 376 aa, unidentified
MGRRCACRRSGGGAGGIVQPLDLLSPQPSLIHPRFCVPNSNRCLSDASNAPARIARMSQNTTALMNDKPAPVHAGLDIAKASLQLHLQGKSSDLPNTPSGHDQLVKRLAAIPGVHVICEATGGYERAVVAALHAAQTPVSVINPARVRQFARASGELAKTDPIDAAVLTAFGQAFTPAPAEPRTAVEIKLAALVTRRMQLIELRVAEEARAATCADPALRKLFTSWLPQMEKQITKVEALIEELLQEQTVLAGQVQRLDDITGVGRLTAVMVLATLPELGTLHRRQAAALAGLCPYNRDSGQWAGKRCIRGGRAEVRRALYMAALSASRSNHLLKPFYDRLIAAGKPAKVALTAVMRKLVVLMNHLLKNPNFSLAT

SEQ ID NO: 379777 - protein, 282 aa, unidentified
MTVRPSTDNVFIGIDVGKTTLDVQWHRGDSAQYANRPDAIAELVRRLLAGPKVTRIAIEPTGGYEKPMVEALRQAKLPVELVHTSRFKGYRTMVGVKAKSDTSDARLLAAYAAAPDDVRGRKADRVELPQDALREELRELASRRDQLKHMIHAESCRLGITRHATLRQSILAHLETLRSEDKQVLQMMHALVRQRLDLRRDQKLLQTVKGLGVVSALTLIAAVPELGHLDNKQAAALIGVAPFVHKSGTLTAPARIHGRAIAYEQRFRRRSLCSTKRDAFFG

SEQ ID NO: 379778 - protein, 282 aa, unidentified
MSSKVIVGIDVSKARLDCFGLPMQEAWSCDNGPEGIERLVHRLRELDCELALMEATGGYETQAATALAAAGLRVAVVNPRQVRHFAKALNKLAKTDRIDARVLAEFAHSVNPQVRPLPDEHTRELSELLARRAQLVGMRTQEKNRLGQAAGRLREGIKTHIKWLDVEITKLEADLSAKLHASEAWCDKRDLLLSAPGVGPTTTFALLAELPELGQLNRQRIAALVGVAPLNDDSGKHQGRRFTWGGRASIRSVLYMAAVSAMRHNPLIRVFYQRRGCQNFCV

SEQ ID NO: 379779 - protein, 344 aa, unidentified
MKKFVGVDLHKQRIVVCVVNQVRQVLTSARFTHAESNKLAAWLKALGSFDLVLEATASYEWFVKLVEPLAGRVLLAHPRKMRIIAESTRKSDKVDARVLAEFLALDMIPPAHRPTPRQRAHRKLVRRRVYVRARQTSIKNRIRHVAAEYNADRKELFTSEGLKYLRGLKLDPVDRWLVQRLLRELKLYRDELKAVDRQLAAFARTAPAAEAGHRALLNSIPAVGPVTREAFLAEVAGPERFGSQKKLTSYVGLAPGQRESAGRRHDLGITHSGSPILRWVLHQAAWQLVRRSSPWRLTFERLALRRGKKKAITAIARRLLCLMLAVIRSGRPYQERPPAAPSAA

SEQ ID NO: 379780 - protein, 413 aa, unidentified
MQVVYERCCGIDVHKQTVVACVIVPGPDGQPLKETRTFGTMTADLEALADWLAGLGVSHVAMESTGVYWKPVYNLLDGRFAILVVNAERIKALAGRKTDVQDAEWIADLLRHGLLKGSFIPTEVLRELRDLTRYRTKLGDERKSEVNRVQKVLEDANIKLASVASDVMGVSGRAILAELVEGQTDAATLAALAKGRLRDKQDLLLKALSGRVRPHHRFMLAQHLSHIDFLDEAMAQLDQQIAEQMRPFATALATWDSLPGINQRIAEIIVAEIGADLTPFEDADHLASWAGMCPGNNESAGKRKSGRTRKGSPWLRRALIEAAHGAAHTKHKYFQALYRRLASRRGTQRAAVAVGHSLLVTGYHLITRQTAYEDLGGNYFDERDREAVKRRAVRRLEKLGYRVELAPTAVPAG

SEQ ID NO: 379781 - protein, 411 aa, unidentified
MDVVHARCAGLDVHKATVVGCVRVPGERHQERRAQTKTFATTMGGLGKLADWLTAHGVTHVAMESTGVYWRPVYAVLEGTVELLLVNARHVKMVPGRKTDVRDCEWLAQLLECGLLRGSFVPPPAVRDLRDLICYRKALIRERSHSVNRVAKTLELANIKLGCVVTDLMGKTGRAILEALIAGGEDPEALAALAQGLLQKKRAELREAVVGRMTPHYAFLLRQHLTLIDALGAQIAELDARIEAAMAPFAEAYACAQTMPGIAARAAQAILAETGVDMSRFPTPEQFASWARLCPGTHESAGKRRPTTIGKGATWLRATLQEAAWAAVKTKKSYYAALYHRLKARRGAKKAIVAVQHAMLVALWHMLRHRVPHRDLGRDYFDRRNPARIRRHHVRRLEQLGYQVLLVEPAA

SEQ ID NO: 379782 - protein, 334 aa, unidentified
MLYAAIDIHKHVFQAAVFDSESGEVVEERFSADRESLRRWSDQWQGRVTAVVIEATTGWRWVWRELAACGFDVRLAEPVQVRGLLGRRRSAKTDRLDARWLARLLAREMLPESWIPPEEIQRLRDRTRLRKALAEDRRRWAQRLHAYLLHEGWPCSRSRLLSVEGLRWVAALRLPEHARLQVDSLLSVMAALEAQVAAVDAELRRFARDDERCRALQEIYGVGPILACHLLAEIGEASRFRRAEQITRLAGLDPVVEESGETRRRGHLAKAGSPHLRWALVEAAVHAHRSTAPGVALYRATRERRSATVAKLTVARKIGKRVFYTLRELERNAA

SEQ ID NO: 379783 - protein, 365 aa, unidentified
MNVIHYIGLDVHKKTISYCIKTADGRIVRQGRLEASRAALRAWAEGLPAPWHGAMEATLFSAWIYDTLKPYAEKLVMGHPARMKAITAGKNKSDSIDARTITDLLRCDLLPTCYVLPPELRDLRRLLRYRNLVVQQSVRMQNKMAGLLMESGTAFDKNKLHGKKYFTQLMQSLEEVPQSVKDLLRMSRGSMELFESTQKQLIERLLNEPALEQRVERLMSIRAVGPITALTWALEIADPHRFASIADAVSYCGLTAAFRSSAGKQQRGPISKQRNAWLQSVLIEAAKLAPRWNPQLAALHAHELERGHANRATLQVARKLVAYLLAVDKSGQPFQVHTPPPSANTKAKNKTTRKNKKAAALAPAA

SEQ ID NO: 379784 - protein, 359 aa, unidentified
MQRNKLSYNGQKIFIGIDVHKNLWGVAVVCEGGFEDYHTQEPSAEKLFEFLQKHYPDGEYHAVYESGFSGFSTYYSLVELGIDCMVINAADVPTTQYEHTMKTDQIDARKLARSLKSGLLRGIYIHSKENIDARSVVRIRRTIQKQLGGCKSRTKHLLHSNGVTIPERFNKSGSYWSRVLIKWLQEDVQLLSPTRDSLDLLLEQVSVIRSTLLRANRKVRELSRSQLYRTRYELLTSVPGIGLNTAMALLTEVGDFGRFHNEREFASFLGLIPTCHSSGEKTSHGEKTFRGNKTIGPMIVEAAWVSITRDRGLNCAYSNYRQKMKPQEAIIRIARKLANIIFAVMKTETQYVPYQWSNT

SEQ ID NO: 379785 - protein, 345 aa, unidentified
MITMPQPAPARVTVGVDTHADVHVAVATDGFGRRLDATSVATTLAGYAELLGWAQRLGQIDAWGVEGTGSFGAGLMRFLRAHGQVVVEVNRPDRAARRRRGKSDPLDAEAAARAVQAHQGSVPKAGDGQVEMIRSLRVARATAMKARTQAINALKGLLVTAPAELREQLRDLPAVQLVQAAATLELGPVTTPAAAARLGLRTLARRYQALSAELAVLDTELDRLTRAAAPKLVALFGVGSDSAGALLVAAGDNPDRLSSEAAFAMLCGASPIQASSGKTRRHRLNRGGDRQANAALHRIVVARLRHDQPTKDYLARRIRQGKSKKEAIRCLKRYVAREVFAVLQR

SEQ ID NO: 379786 - protein, 355 aa, unidentified
MSQEKYIGMDVHQATISVAVMDAKGKLIMECVLETKAATILEFIQGLRGTLAVTFEEGTSAAWLHDLLDPHVNRLLVCDPRKNALLKDGNKNDRVDAQKLAELLRTNQVKPVYHGKHGTRALKELGRSYLTITKDGTRVMNRIKSVYRSWAIPCAGTSVYTRRHRAEWLAKLVEPGVRIRAEHLYQQLDSLEPLRLEVRRQLLLESHKHAAVKLLRQVPAIGPIRAALLVALLQTPHRFRSKRQLWAYSGFAVEVHDSGEYRRVRGKLQRNRERITVRGLNDNHNKEVKSLFKAAAISASTRPGPLHDFYVARVESGMRPTMARLTLARKIAAITLTMWKKGVSFDPKQLYRQAA

SEQ ID NO: 379787 - protein, 412 aa, unidentified
MQVVHARCCGLDVHKKSVVACVLLTREDGTVQRQVRSFGTMTVDLLALADWLTAAGVTHVALESTGVYWRPVFNLLEDEARTIVLVNAQHMAAVPGRKTDVRDSEWLADLLRHGLVRASFIPPAPIRELRELTRYRKTLVQERAQEVNRLQKLLEGANIKLAAVATDVLGLSGRDMLRALIGGEQDPEALAELARGKLRAKLPALRQALQGRVQPYHLILLTRILAHIDFLEGSLAQLQAEIDARLTSCAEAVTLLQTIPGVGPIAAATIVAEIGTDMSRFPSAKHLASWAGVCPGNKQSGGKRLSGKPTNGDPWLRGVLGEVAQAVTRTRNNYLNAQYHRLARRRGKYKAILAVAHSILVIAYHVLRDKQPYSDLGADYFDKLDAARIERHHVRRLEQLGFTVTLAPNHAA

SEQ ID NO: 379788 - protein, 370 aa, unidentified
MGEYSEAYVAFDTSKTKHAVAIADGGRCGEVRFLGDVASSPARVERLTRKLAERYDKLHFCYEAGPTGYGLYRHIRELGHDCTVVAPSLIPKKPGERIKTNRRDAVTLARLLRAGELTAVWVPDAIHEAVRDLVRAREAAAQDLRRKRQQLLSFLLRHGRIFDGRQHWTLAHRRWLAGQSFAHPAQQIVFQDAIEAMEEALARLRRLEQQLVAIVPSWSMAPIVAAYQAMRGASFLVAVTVAAEIGDLRRFDNPRQLMAFLGLVPRERSTGNVVRRAGLTLAGNRRARRVLVEAAWSYRHPARVSETLRARLEGLPKPVRDIAWKAQIRLCARYRRLSAAGKKLPVVIAAIAREMAAFLWAIAHQVAPAA

SEQ ID NO: 379789 - protein, 338 aa, unidentified
MKIMNVGIDLAKNVFAVHGVDENGKAVLVRPSVRREQLLELVAKLPPCVIGMEACSGGHHWARAFTALGHTAKLMAPKFVAPYRMAGRRGKNDAADAAAICEAVQRPNMRFVPIKDIDQQGVLCIHRARQGFVEERTATINRIRGLMSEFGMVLPKKADTVRKQAAQALENLPGWAKRAIDDLLTHLQTLDERVTEYDGHIKELAKADARSVRLMKMPGIGAITASALTASIGNGHDFKCGRQLSAWLGLVPGQYGSGGVVRLGYITKAGDPYLRTLLILGARSVLAAAGTKTDRMSRWATSVYERRGYGKALVAIAAKNARIAWALLAKGEEFTKPA

SEQ ID NO: 379790 - protein, 400 aa, unidentified
MISVGIDVSKGKSTVCILKPYGEIVSKPFNITHTQKDLSELSSMLFRLNDEVKIVMEATGIYHLPVLTYLQEKGFFVSVINPYLMKSYRNESLRKAKTDKIDSRIIANYGIDHWFKMKEFQTSGEIYEELKLLGQQYRHYMKLHLLSLAELTHLLDLTMPGIKNLLASWNETNRKDKRSDFVERFWHYDVITSMSEQEFTEEYILWAKEKKYVPSQEKAKVIYTLAQESIPTLPSETSSVKILVTEAVRVLKEVDATLGLILSRMQEIAKTLPEYSVVREMGGVGNTLAPKLIAEIGDVRRFRNGKALVAFAGIDPPPYESGQFVGCNRKISKRGSASLRKVGYETMRSLKMRSRPEDPIYRYVVKKESEDKSKKSAKIAGLNKFLRIYYARVTELYKNI

SEQ ID NO: 379791 - protein, 455 aa, unidentified
MVKQSMVEEFLDPDEEQLLDRVCAIDVAKESGMVCTRLPHASRPGRPASRTWEVTATKNAVTRLARDLLDLRIEKVTLESTSDYWRIWFYTLEQHGLDVQLVNARDVKNVPGRPKTDKLDAVWLAKLTEKGLLRASFVPPPEIRVLRDYTRTRIDLTRERTRHWQRLEKLLEDALVKVSSVVSSLDTMSARDMIDALIAGERDAGVLAGLARGRMKIKNAALVEALNGDFDDHHAEIARVFLDQIDALTGQIDQLTVRIDELIAAIPAAQTPPTPPDADGPPDAARPVALPALQRLAEIPGISLLAAQIVVAEIGLDMTRFPTPEHLASWAKLTPATRQSGTKTRTGKTGKGNPYLKGTLGIAATAASRTQTFLGERYRRITKRRGKLKAIVATARSVLVTIWHLLTNPTDRYHDLGPDYHAQHTNTARKTRTAIHQLEALGYHVTLTTPNTATA

SEQ ID NO: 379792 - protein, 321 aa, unidentified
MNKYSKIYGVDISKDVFDVVCSDDAHHQFDNTPKGFSSFLKAIAQGSLVVMEATGYYHYRLAQYLFKHGVVVSVLNPLSVKRFIQMKLAKVKTDKSDARAICEYGRVNDVPCYTALTDVQAECLQLFRLLDSYLKKRTATKNKLHGEETLGIPSRFVHQSLKRDLKHLDKEVKALEERLLLLVKQDQQHQLTLLKGIPGLGTKTALFLIVITDGFDKFETAGQLCSYVGITPTIRQSGSSVRGKSRISKVGNQKLRNLLFLCAFSACKHNKACSEIYERIVAKGKSKKLALIAVANKLLKQAFAIAKSGLPYDEKFVSKLN

SEQ ID NO: 379793 - protein, 340 aa, unidentified
MTFEKISVIGLDLAKNVFQLHAVDESGDVVIRRQLRRNQLLQFFEHLPRCLVGMEACSTSHYWARELGRLGFEVKLMPPAYVKPYVKRGKNDAADAEAICEAVTRPTMRFVPVKSCERQALLMQHKTRDLLVRQRTALINALRGHLAEFGIVTSQGRLGLRAAIEALSAAQEFLPEPSWQPFEHIRKQLEELTHKIAELDRIILRWCRNEAAARRLMTIPGVGFLTAAAIAASVGDATEFKSGRQFAAWLGLTPRQNSSGGKERLGRISKQGDRTIRRLLVVGATAVVRRARLDAASFPWIARLLDRKPAKLVSVAIANKTARIAWAILRRRENYRFATA

SEQ ID NO: 379794 - protein, 358 aa, unidentified
MNRQTGMNAGQILGTIDGLQVVGLDIAKLVFQMHTVDMATGEIVGVQIKRAKVLEHFANRAPCLIGMEACGGAHHWARELQALGHTVRLLHAKAVRPFVSGNKTDAADARAIWLAVQQPGTKCVGVKSLAQQATLTLHRQRELLMKMRTMQTNALRGLLYEFGATFAKGTKTMLGEVEVALQALSNKLPQMVADSLREQVLRIKALGEDIAAIEKRLALQLRQDADMRRIADIPGVGVLTATAAIATMGDPRAFRSAREFCAWLGLVPRQWGTGGKVRLQGISKRGDAYVRTLLIHGARSVLMHAKEPGPWLEQIKARRPANVVVVAQAAKMARTIWAVTARQQEYHRGYRSVRPQAV

SEQ ID NO: 379795 - protein, 419 aa, unidentified
MSFKILKNNCCGLDVHKTWIYACIGITDSFKRTEYKQARFSSFTKGLQELCLWLAKYNCIDVCMESTGKYWIPVFNVLEKNNIFVTLSHPKYTKPQKGNKTDRKDAKWICDLYMCGMVKPSFIPPADIRQLRDLVRYRFKLTCMITGEKNRAHNCLTVSNLKLDDVFSDIFGKSSRSITEQILQHPGEVFDVAPFVDSRCKTPIEEIQAAVDGAISHEQAVKLRQCLKHIDELEMHKAEIEREIFRLSQKYESVLDLIRTIPGFDKNPLTAIQVLSEIGADMSVFPTAKNLVSWAGCCPRNDQSSRKIKSTRISRAGSYFKPVLVQIANALIKSKKHPEFTTRYRRIKARRGHKKAIIAICRMILTAIWHILSDLKSYTPEGFLESRPVKEEKILSTSQALNLLRQRGYVIKDEPLTVS

SEQ ID NO: 379796 - protein, 412 aa, unidentified
MSLKIVHKVCCGIDVHKTFVVACIATTNDKGVTTYKNHRFSTFTAGLRELSKWLFENNCKDVCMESTGKYWIPVFNILEESCNVVLAHPKYVKAIKGKKTDKKDAKWIADLFKHDLLEGSFMPPKDIRNLRDLVRYRYKLTNFSSSEKNRLQNSLTVSNIQIASVASDVFGVSAQRILSKILEDPTLTTFDVEPLIHGSMKAKLPQMKLAIDGFIDEYQAGKIKVIKQHHLDLHERKKDLEELILALAKPYQVYIDLILSMPSIKDPFTAITIISEIGVDMSVFPTAKKLSSWAGLAPSSNESAGKKKSVRISKAGAYIKPLLVQCANSVVRSEKHPEFRNKYLRIKRRRGHKKAIIAIARMILTIIYEMFKTGELYDPERYRKADVLPVEREISVEQAIALAQSQGYRIRI

SEQ ID NO: 379797 - protein, 409 aa, unidentified
MKLFVGIDVSSKDLVTSMISEENHEVVFRGNFVNDLKGATELKKQIINTANSNQIDQVIIGMEATSIYSFHPAMFFQEDIDLKAFNTQSVVVDPKKTKRFHDVFAEDKNDQIDAYYIADYLRVGHYSIGIVRQENYIALQRLTRSRYEIVQSLVRAKQHFIENLYYKLNKLVISDELNTSIFGSTMMQLLTEDLTTDDLLNISINDLTDYLAEHGRGRFADPEALAKTIQKAVWSSYRLDKVVANSVDAVLSVYAEEIKAFQKMIKDLDKSIEKVVKVTDDEQILRSIPGIGPVYAAGILAEIGQIDRFDNEAKLAKYAGLSWREKQSGSYTSDNTPLKRTGNTYLRYYLVEAANLVRTHDPVFGEYYQRKYKEIKHTPSKRALVLTARKLIRVIYFLLKNHQIYQEKR

SEQ ID NO: 379798 - protein, 355 aa, unidentified
MSGEKYIGLDVHQATISAAVIDSMGKLVMESILETKAATILEFFAGLRGTLSVTFEEGTWAAWLYDLLKPHVAKLVVCNPRKIALLQHGNKSDKIDARKLADRLRLNDLVSVYHGETGVRMLRELARGYLTVVKDLSRVMNRLKALYRSWAIPCAGRDVYYTRHRSQWLEKIPEAGTRRRAEQLYQQLDMLQHLRQQARRELLAESRKHTITAKLRQIPSLGPIRSALAVALIQTPHRFRTKRQLWTYSGLGLETRDSGEYHFVQGQVRRRKKQVSIRGLNKDHNHDLKGLFKAAATRASVQPGPFQDFYQRSLAKGIKPTMARLTLARKIAAITLTLWKKGENFDPEKLKSQAA

SEQ ID NO: 379799 - protein, 345 aa, unidentified
MKITTVGLDIAKRVFQLHGVDAAGKTVLRRNLQRSEVLAFFKALPPCLVGIEACGAAHYWARQIRELGHEVRLMPPSYVAPYVKRGKTDAADAAAICEAVTRPTMRFVPIKTAEQQAVLMLHRTRDLLVRQRTMLVNALRGHMAELGIIAPQGIARVADLMAVLFGEDTTNVPALAREALRGLAAELEALDRRMKEIEVAIVRWHKDNEASRRLATIPGVGPITASAIVATITDPFQFHSARHLAAWIGLVPRQHSSGGKQRQGGISKQGDRYLRRLLVLGATAVIRHSRSKSTAEAGWLKSLLERRPARLVSVAQANKTARIAWALLVRGEAYRMPAAVPGGAA

SEQ ID NO: 379800 - protein, 437 aa, unidentified
MSQNKNHAKKSVCLQSLPLIHPHAAGIDVGAKEHVVAVPADRDPPPVRSFKAFTPDLYELAEWLQQCAVKTVALESTGIYWITLYEILEERGFEVLVVNARHVKNVPGRTKTDVLDCQWIQKLHSFGLLSGSFRPDQQIRTLRSLMRLRDNLVVQSTQSVHHMQKALFEMNVQLSNVISDIVGESGMRILEAILAGEHDPARLATLCSPRIKAARETVAKSLHGNWREELLFSLRVALDSFRFAQGKIAECDARITEHLAQFADRAVLETPPSSLKSELHRVCGVDLTKIPGIKEQAAQIIISEVGLDMTRWNTEKQFSSFLGLCPNNSISGGKVLRRSTRKVYNRAADALRLCSQSLTHSKTALGANYRRLKGRLGAPKAIVARAHHLARLVYRMLRYGRQYVEKGIAEYEIKFRLQRLKWLKHEAKSLDMQLLPA

SEQ ID NO: 379801 - protein, 413 aa, unidentified
MKDLLEISCGLDIHKEKIVACILTGPLGKPTHSEIREFTTLIPDMLALRDWIISENCHHIAMESTGIYWIPIYEILEDAFSGDITLLVVNARHMKNVPGKKTDIRDSEWISTLLRAGLLNASFIPEKRIREFRDLNRYRKSIIRDITSQKNRVEKFLQSSGFRLSSFISDIFGASGRNIILHLMEHGQIDKMSLDSYLKTKTRKRIDEILMSVNGTLSEHQKSFLKILMCHYDSMKEHLIEIETHLQEDMLPFALQIEQLNTIYGISTTASCAIIAEIGTDMKPFKTAEHICSWAGLCPGNNESAGKRKSTSITKGNPYIKSMLCEIAWVIAGKRNTYLSAWYWRIKQKKGARKAIVALARKLLVIIYTMLKQGTNFDENCFEVRRKNCEQKQLSRYIRELEKHGEYETFSVK

SEQ ID NO: 379802 - protein, 327 aa, unidentified
MGSEAVETTSDKEEVVERGCGLDIHKKEIVATVNGTGITQETRTFQSTTRSLTELKEWLLTLRVTHVAMESTGVYWKPVLNILETGGFTIMVVNARHIKYVPGHKTDKKDSAWICKLLRAGLLKGSFVPCRSQRDLRDLTRYRRKLVQQQAAEHNRMIRIFEDANLKLSSVFSNIRGKTCTAVIDAVIAGETNPEKLSELCTHWKLKSTKEEIALAVEGKFTEHHIFMIRAIRTSISNIEAEIDHLDKEIERRMQPIEERIRKLCEIPGMSTNSLRELLAEIGVDMDVFPTAEHLTSWAGLAPGNNESAGKKKVHTPTTETKLLRLS

SEQ ID NO: 379803 - protein, 372 aa, unidentified
MKKNITFVGLDVHKDTIDVALADAGRDGDIRFYGTIGGDLESLHKVIRKLQSKGSELRFVYEAGPCGYDIYRSLTKQGFDCIIVAPSKIPRKSGDRIKTDRRDALNLARLHRSGDLTAVYVPTTEDEAMRDLTRAREDTIKALRVARQVLLAFLLRHGHRYSGRTYWTKAHKNWIADIKMPHRAQQITLQEYVHAVQEQLERADRLTMQIRELLPHWSQAPLATALQALRGVSLIVAVTTVAELGDLTRFESAKQLMAYLGLVPSEHSSGGTTRRGGITKTGNGHVRRALTEAAHTYCHPARESRILLTRLEGLPPEVRQIAWKAQVRLCGRFRALLARGKNKKTVITATAREISAFMWAIAHAIRPTGAKQ

SEQ ID NO: 379804 - protein, 332 aa, unidentified
MSVYVGIDVHRKRSQVAVIDQDGKVLTNRNVANGVKPILSVIGGLPAGTQAAFEAAYGWGWLVELLEDYGFEPHLVHPLQCKAIASARLKNDKVDAAILAQLLRADLLPEAWIAPLEVRQLRALLRHRVQLVRLRTLLRNRIHAVLADHGHGRPEGCWSGPGRAWIARLDLPAVSAEVISDALALIDAVESVIGRLDTEIGQHARSDPRVKVLAQLPGVGPFTALVLLAEIGDITRFASARKLASWAGLTPTVRGSDRTVRHGHISKQGSVWVRWVLCEAAQKAKRHPDFAASYQAIAGRRGTKIATTAIARKLLTRAYHLLTDASSAGAPS

SEQ ID NO: 379805 - protein, 318 aa, unidentified
MNTNTLQNINVGVDTGKSQLDIYIRPLDIYFTVPNNEKGIKEAIRAIAKHRPNRVVIEATGRLEMPFIFACDKAKLPYVIANPLHVKRFAGAIGRRAKNDRLDAALIAHFGEAIQPKLTQLKSENIRLMSDLVTRRNQLLSMQTMEKNRLQILPQSLASSIKPILTALKNQIVKVEEKISKLIDTSPEYQAKNEILQSMPGIGKIASASIISNVPELGFITNKQASSLIGVAPITRESGRLKGKRMIQGGRAQVRTVLYMAMMSAIQCNPVFKATYERLLAAGKPKKVAIVACMKKMVVILNSMLRDGVMWDKDSAKK

SEQ ID NO: 379806 - protein, 371 aa, unidentified
MEHTRFVGLDIHKERISIAVAEGGRSGAVEYLGEISNDPVAIGKLCDRLGRSGKSLAFCYEAGPCGYGIHRQLTSIGHRCDVVAPSLIPTKPGDRVKTNRRDATMLARLYRAGELTPVWVPDADHEAMRDLIRLRSVVRQIVTRARQHLQGFLRRHGRKHGRGTAWRMAYRRWLSTLAFEHPAQQIAFQDYVDAVMDAERRLKRVGEQIFSLLPEWNLRPVVDALQTMRGIALINAVVLVAEVGDFTRFSNPRQLMAYFGLVPGERSSGETIRRGGITKTGNAHARRALVEGAWAYRMKARIGRHKVDRIGSMPKIIRDIGWKAQVRLCTRYRRLRARGKTANIVNVAIAREMVGFIWSIACTVQSAPKSA

SEQ ID NO: 379807 - protein, 410 aa, unidentified
MEVMFDRVAGLDVGKESVTVCLRTPRPKGRRHAETRTFKTTTGSLHLMRDWLVEAGVTIAAMESTSVYWKAPFYCLEEVMEVWLLNAAHMKAVPGRKSDVRDAEWIAQLLEHGLLAPSFVPPPEIRRLRMLTRYRVQLMGDRRRDIVRLELMLEDASIKLSSVASSLKTVSARAMLTAMINGETDPLRLADLAKGRMRRKIPDLAQALTGHFDANHARLARSMLRRLDVVEQALAELDAVIVEACQPWAHQIELLQTIPGVGQKVAEVIIAETGSDMSRFPTAAHLAAWAGLAPAMNESAGKQSPAGKRHGNKWLTAMLVEAAGSVGRMHGKNYLAAQHARLMRRRGMGRAQVAVAHSMLVAAYWMLKRDEPYHDLGADWHRRRSDEAHTRRLVAQLEHLGHHVIIDPAA

SEQ ID NO: 379808 - protein, 342 aa, unidentified
MKLKRIGVDLAKQVFQIHGVDSHEQVKCRKQLKRSQMLDFFRQLEPCLVAMEACGGAHYWARELIKLGHEVRLIAPQFVKPYVKSGKNDANDAEAICEAASRPTMRYVPVKSEEQQAALSVHRIRSRAIRARTALVNEARGLLAEFGLIEVRKGVKATRALLAHVSQESGVLPVAMRELMGELHDALQENDDRIAHLDRLIQQQASQDKRVQRLMKIEGVGPISATALVAAVGDARQFKSGRQLAAWLGLVPSQHSSGGKERLGSISKRGDTYLRTLLIHGARAALTASAQKTDPRSTWINELKCRRNTNIATVALANKNARIIWALLSKDESYNPAACSTQ

SEQ ID NO: 379809 - protein, 324 aa, unidentified
MGNTYSEKIYVGIDISKDFFDAALPVKATWHHLKLCNNKTGFRQFLQALQAFDAVVCVMEASGPYYLELAGFLHQAGIEVSVVNPLAVRRFCQMRLSRAKTDKKDAVMIAAYGQAEKPKLWEPAAGHVLALKQLQTVAEGLQRSHHRHSRQLESLRAGGKVNHQAEKSLQRMIRQAKEELDKVEAQLDKLIAEHHCQQFEQLKSIPGLGRKSSMLLLLITGGFSKFVHYKQLISYVGLSPRIYQSGSSVKGKARICKMGMSQVRKVLYVCSWSAIKCNKACRELYERLLARGKAKRLALVAVANKLLKQAFAVVTKGEFYFEKS

SEQ ID NO: 379810 - protein, 310 aa, unidentified
MSKPTIGVDISKDHLDACRWPSGESLRVTNDATGHRKLLRWIGAEVARVAFEATGAYHAVLERALHRADVPCTKLNPARVRRFAQAIGTHAKTDRVDARLIARMAAMLEPAPQAPRPMVIAELHELQLARTALMRERTAATNRAGRLTLALLKRQHATRLRQIERALEELDAAIAALVASDEGLARKAEILCSIPGVSLVTAAAILAELPELGTLEATTVASLSGLAPFTRESGQWKGQARIGGGRGDLRRAIYMPALSAARFNPDLKTVYDRLRAKGKPAKVALVAVMRKLVILANALVRDDRIWQDRA

SEQ ID NO: 379811 - protein, 321 aa, unidentified
MTYVGIDVSKVTFVVAYSSVKTNKTRTFKNTVNGVHEFVQTISASEHNCVLEATGNYSALLVYLLSEAGITISLENPLKIKNFARVMLTVTKTDEIDARLIALYGEKMQPAPYKLRSDAILVLKQKRTVLRQLKKQLVATRNLKGSMEVLPFFDPKCKKTIEKTITFLEKQIKEMEEELASLAQGEYKKQMDLLTSIKGIGVTLAAALIVATGRFSYFDNAKQLTRYLGLSPTYQQFGTSVNVKGHINRNGDSSLRSQLYVAAFSSLRCNTECKACFDRLRSNGKPGKVVVIAVANKLVRQAFAVVTQGKPYVDGFKSEKP

SEQ ID NO: 379812 - protein, 341 aa, unidentified
MEKATIIGIDLAKRVFQVHAASKDGRPVLRKKVSRAQLLGFLAKQPRAIVAMEACATAHEWGRAISGLGHDVRLIPPIYVKPFVRRQKNDAADAEAIAEAASRPTMRFVAVKTEEQQARSMIFRTRDLLVRQRTQLVNALRGHLAEHGIVAAQGLAKVKVLATAMRDTGSLHPLVRELGERYLVHIARLDVEIAELDKILRRPSKDDETAKRLQSMPGMGPITAAAIEAFAPPMATFKRGRDFAAWLGLVPRQHTTGGKPRLGRTSKMGQRDIRRLLIIGAMTVVRWAVRKGAAKGSWLARMLAHKPRLVVAIALANKMARSAWAMLSKGEEYRGSALAPA

SEQ ID NO: 379813 - protein, 333 aa, unidentified
MYYSGIDLHSDNSYITTVDESGAVVKRQRVENNNELVLDYFHSLPGSHQAVVESTTGWYWLNDLLGDHGIELVLAHAKYLKAISYAKVKTDKIDSQTLAILLRQGLIPQAHKISRELRGLRDTMRIRLRLVQQRTACLLRLNSIHLKFNGSVPDPYRFQLAVLEHTRNTLGDQILALEKSLHPVLIPNDDIQRLLIIPGIGKLSAFTIYLEIDGIERFDSDKHFVSYCRLVPAADNSNRSVHHRSSKDGNKYLKIAFSDAAVHAIQFYPEYKRLYQKLARRSGEATARTVVAKELAKIVFYVLKDKTQYKGLKGQPISRHKSQQWPRLSSPDA

SEQ ID NO: 379814 - protein, 385 aa, unidentified
MKTMTLPRESTPSSSTCLLLAFELGERRWKVGFTVGIGQRPRVRDLAAGAVARLDDEIRRAKQRFGVASEAPVISCYEAGRDGFWLHRYLIAHGITNHVIDSSSIEVSRRARRAKTDRLDLGGLLTLLARFVQGERRLWHVVRVPSVTEEDARHLPRTIEAVTQHRTRLINRLKGLLAMHGVRCRIDADFLRTIGEVRLWDGTPLPPGLHERLRCEWAQLEHLQQQLRALKAARTSRQRDLTTPHGRTMTQLLRVRGVGPTSATVLTAEIFGWRQIRNRRQLGALVGLVPAPYQSGEMQRDQGITRAGNTHARHVIMQVAWGWVRHQPHSALTQWYQHRFGGGGKRLQRVGIVALARKLLIALWRYLERGVIPDGAQLKPLPLRA

SEQ ID NO: 379815 - protein, 316 aa, unidentified
MSTVTGLVVGIDVAKDALEVATSAGEHWQTPNDPEGHEALRVRLSAVSVGLIVLEATGGYEVALVAVLAHAGLPAVVVNPRQVRQFARSLGRLAKTDAIDAEVLVSFGVHVAPPVRPLPDAQTKLLEALLTRRRQLLGMIQAERNRLPLALGPIRTDLKQHIAFLVRRLKDTDRDLESRLRASPLWREREKLLTAVPGVGRQMLLTVCAALPELGRVPSRQLAALVGVAPYNCDSGTLRGQRHCWGGRAAVRQVLYMATLAATRCNPVIRPFYARLVAAGKPRKVALVACMRRLLVILNAMARDGTPWNPQLAEAR

SEQ ID NO: 379816 - protein, 397 aa, unidentified
MQVTRIGMDIAKQIFDLHGVDRRGKVVLRRTVRRERLLELLAQLKPCTIGMEACGGAHYWHREISGLGHTVRLLSAHKVKPYVDGNKNNRHDAAAICEAMSRPSMRFVQPKSQAQQDLQTLHRARTLVVRDLTALSNQMRGLLHEYGIVVRKGVAALRRTLPQLLEDDQRGRITAVLKQVVAEQFERFNYLAQRLDQYDRQITQLCQQDPRCRRLLKNAGIGPLSATALVAAIGNGHEFKNGRHFSAYLGLVPGHSNTGDHTVMLPITKRGNRYLRTLLIHGGRSAVYAARRRTDPRSRWLNRLREASGYNLAAVALANKNARVAWAVLRYGEDYRPSRAHRQTPVPRRRAHRSASETMLALTVQSAHPGPRSRAHFFVPPPTLTQGGTKKMLNQRT

SEQ ID NO: 379817 - protein, 423 aa, unidentified
MDIIYERVAGLDVHKAMIVACVRVMADGKAERTCRTYDTTTDGLKSLLAWLMEQRCTHVAMEATGVYWKPVWNILSDGTFELLVANAAHIKNVPGRKTDVNDATWIANLLACGLIKGSFVPCEEIQQLRTLLRSRKQLTREQTSHTQRIQKTLEEANIKLDTVISEILGVSGRRMIEAMIAGVTSPLKLAALADRRIKATPKVLYDALHGRLTGHHRFLLQLYLDQYDAAAEGILRIDQEVDAAIEKMDQAVPAGQASFRSLIGLLYTIPGVSGLSATTILAEIGTDMSRFPDAGHLLAWAGMCPSQNESAGKRKSSRLRKGAPWLKTMLVQCAWAAKRKKDSYYRALFHRIRGKRGQKVAACAVAASLLTAIYHMLKDGTTHQDLGINHFEERSVEVRARRLVGQLSKLGFQVQLQPLATAA

SEQ ID NO: 379818 - protein, 385 aa, unidentified
MNQISCSATSSHTLHCALELSKKSWLLAIQFPDREQPSVYSIKGGDTEKLMAKLTAARDCWAKVSGSLPVITVCYEVGYDAFCLARFLKARGIECLVIDPGSLQVNRRGRRVKTDRVDVKMLLRTLIAWCRGERHVWSLVRIPSVDEEDLRRSHRERSRLVRERTAHINRIKGLLFAQGIRDVKVKSQYKTLAVDKLLTADGHRLPPRLASEIARELQRLAMVQEQIAEIERERDTAPTPCEATERKRQLLLQLKSIGPAISALLSREVYYRQFANRRQVGSFLGLTPSPYSSGEEERCQGISRAGSGQVRAIMIETAWLWIRHQPKSALTRWFVERTAGQSTRMRKIMIVAVARKLAIALWRYVEQGLVPQGAILNPPTTGRAR

SEQ ID NO: 379819 - protein, 402 aa, unidentified
MNAVGIDVSKEKSTVAIYQPGDQVILKPCDFHHTQSGISSLIGIIKELDGETKVCMEHTGRYYEPVATWLSDAGIFVSTVNPILIKNFGDDSLRTPKTDKADAKKIARYTLDRWTSLKQYSHMDETRNQLKTMNRQFGFYTDQKTAMKNNLIALLDQTYPGANTFFDSSARSDGSQKWVDFVYTYWHVDCVRRKSLAAFTEHYKNWCKRKGYNFSAAKAEKVYHKSVDLIAVFPKDANTRMLIHQAVDMLNLASRTVETLRTEMDQTAATLPEYPVVMAMNGVGPTLGPQLIAEIGDVTRFEKRGSLTAFAGVDPGKNDSGKHSQKSVPISKKGSPHLRKTLFQIMDGLIKRSPIDDPVYAFMDKKRAQGKPYYVYMTAGANKFLRIYYGRVNEYLSTLSGS

SEQ ID NO: 379820 - protein, 385 aa, unidentified
MSELNDLSRSLTSLEQDKTIIAVIEMSQSSWLVAGIVPGIERHPLKKLEPSEEELVRLLMRWRTEATKNGHTITRIAVAFEAGRDGFWLARWLRARDIETYVIHPTSVAVSREHRRAKTDRLDTGLLKRVFIGWLRGEPDHCHMAAIPTLAEEDAKRPNREREGLVRERTRIVNRMKSCLARFGIRNFKPTLRKAPERLATLGTPEGVPLPPNTLLELRRDMARLRFVMDQIKEVEEARAQRLEQAPQEKTHAMVRLIARVIGVGIETADMLVHEILSRQLRDRRAVARYAGLTGAPDESGNKRREKGLAKAGNARVRRGMIQLAWRFLVFQKDSALARWYRTRTESAGKKRKTMIVALARKLLIALWRLVTIGEVPAGVVLRAA

SEQ ID NO: 379821 - protein, 341 aa, unidentified
MKVIMGVDPHKASHTAVAIGPRENEVARLKVRATANQVVELLAWAKPFPNRTWAIESAGGLGYLLAQQLVAAGERVLDVPATLAARVRTLATGRSQKTDPNDALSVAIAALRAPALRSVEPTNHVEVLRLLAKRNTDLGNQRTRLVARLHAHLCHLGPGGIAKELYASDAEAFLAELKPLTPADQVRADLAVELLEDIKRSDAQLKESHRRLRTEIKLSGTTLTDIYGIGPIIAAMLIGYSADVTRFADADHYAAYNGTAPVEFSSGGRTVHRLSRRGNRQLNHALHLAAICQIRQSKSAGRAYFDRKLAEGKTKKEAVRALKRQISNTVHRHLLNDARRT

SEQ ID NO: 379822 - protein, 410 aa, unidentified
MPSPLFVGIDVSCKDNKVQLLHSDGAEITRFSVPNNHPGAKSLSEKITGVMGKNKFDSLVIGLEATSVYGHPLVYFLRQEPSIKALNPRIHVLNPKQVANFKKAYPELPKNDWVDAWVIADNLRFGRIAKEVCMDEKFDALQKLTRERYHVAKNLTREKNRFLSNLFLKFSTLAQEDIFSDKFGATSLAIIEDFFSVDDIAYMDVDKLAEFINKKSKGHFADPHELAETINKAARSSYRLPKTVNDSVNQVLAVSLVAVKALKKQLETLDKAIETQFALIPNTLQSIKGVGPVYAAGIVAEIGDIKRFPNHAALAKYAGLAWSEHQSGQFKAENTHMIHSGNRYLKYYLLEAANKVRVHDPEFKRFYELKYAKTQKTPHKRALALTARKFVRLVYALLHSNRLYTPPKGE

SEQ ID NO: 379823 - protein, 359 aa, unidentified
MSTQSKPFSFKGQRIFVGLDVHLRSWSVTVLSEQAVLKKFTQDPSPVALNKFLTNTYPEAEYYSVYEAGFCGFWIHWELCNLGINNIVVNPADVPTMAGERLRKTDAVDSGKLARSLRAGELKGIYVPDSVATEIRSLIRLRDSLTKDQTRHKNRIKSHLRYLGVDIPEEFQRPGCTWTNKFVLWLKGLELETDYGKKTLDLLIAQYEDLRAQQLKLMKELRVLSRTERFEEPLKYLMSVPGIGQLAGLTILSEVDDISRFKDASCFASYIGIVPMCHSSGAHDGIGDITVRRHAKLRWLIVEAAWVASRKDPVLSAAYVEYCRKMKPSKAIIKIARRLVNRIYFVMKHQQPYVNCYVS

SEQ ID NO: 379824 - protein, 435 aa, unidentified
MSTLGIDLAVRAAHVATLTNDQGEVIWSRRRFQSHPPDLAALSEAAGPASELTVVLEPTRNAWVVVAAHFRATGAKVVMVAPERSADLRKYYKKHTKNDRLDSFVLSRVPLLHPEGLIEVDGLGPADPLRRAVRRRVRLVGQRHGCHQRIDAMLDLLGPAYNEALGTRDTKTFAVIIERHGSPKSLRRLGLSRLTDLVRRTSGGHFGAEYATGLLKAANEAIELWKGGGLDFDELAWDLAQEIRIIGQLDVEIGRLDARIAELYSAVDPKGIVRSAPGVGPVLSAGIVGRLGDVNRFANLAGIRSFTGIVPGVNQSGLAETRPGITKQGDPGLRRDLFFAADLARHHDPQLAAKYHRLIVERRLHHHAAVCHVATTLITRIAACMRSGQRYVVRDIDGTPVTPTEARAIIADRYVIPPEARRRSRVPDVTSEPTS

SEQ ID NO: 379825 - protein, 341 aa, unidentified
MNVKTIGIDLAKNVFQIHGVDEHGKRLFNKQLRRAQMASFFANIPPCLIGMEACASAHFWANKLISMGHNVKLMAPQFVKPYVKTNKHDAADTEAICEAVTRPNMRFVPVKTAEQQAVLALHRSRQSFIKQRTAQANQIRGLLAEFGIVVPRGIQQLQRRLPELVEDADNPLPVLFRTQLSLLQHHMAYLFDVIATLDKQIEQCYRQNALCQRIGKIPGIGPVTASALIATIGKANNFEKGRQLAAWLGLVPRQHSSGGKQVLLGISKRGDTYLRTLLIHGARAVLQSAKHKQDAVSSWANQLMARRNNNIASVALANKNARTVWALLAKEREYCAPIISA

SEQ ID NO: 379826 - protein, 451 aa, unidentified
MARKELARRLRSEDPGLAIVHPHAAGIDVGNGAHYVAVPPDCDLQPVRRFECFTADLHRLADWLKNCRIKTVALQSTGVYWIPLYDILEERGFEVYLVNARHTKNLPGRKSDVQESQWLLKLHTYGLLNNSFQPTSEIRVLRTYWRQRAEHVRGVTMCIQRMQKAFTQMNVQLANVISDLSGVTGQMIVRAIVAGERDPWKLAELSNPRIRASKEEIAKSLEGNWRQELLFVLQQELQMFDTYQQRIAECDQELQKHLARLADTVLPPAKNEAKKNKPNKHHPQFHLADELQRISGVDLTRIDGIDVMVAQTLVSEIGLDMDRWKTEAHFASWLGLCPDNRVSGDKVLARGTRHVVNRAATALRMAATTLLKSQTYLGAQYRRLRSKLGAPKAITAMAHRLARLAYRMLKYGQQYVDKGAAYYEQRNRQQQIEFLRKKAAQLGLQVTTTPS

SEQ ID NO: 379827 - protein, 413 aa, unidentified
MFFAGVDIAKRQHEVCVLDPDGHQVLTMPVPNSQAGAERFLRALQGQCGQAPENVRFCMEATGHYWLALYGFLTHRGYQVHVVNPIQSDAARDLYIRKSKTDRKDAFILADLLRMNQTAETLLASESVLKLQALSRTRFAFVDQVAALKQQVLGILDRIFPEYPNCFSDVFIKSSRELLKSYSTPDELAAADLTELAQFLTTHSHGRLGLGHAKNLQQYAKGTFGISIAIDAFALEIKLLLAQIEFLEEQIQTIEEAIQLALEDYRAECPCDRLPANCHHVIETVPGLGPVLTAAIIGEVGDIGRFANARKLVAYAGLDATTRESRQFMGTRNHLSKRGSPHLRRALWLAAISARRFNPELRAYYEEKKAQGKHSMVATGAVARRLVHMIYSVWSQNRPFDPKYRWVHPGSSD

SEQ ID NO: 379828 - protein, 427 aa, unidentified
MLNAQVEKLSLVRGDVIIVGVDVAKKKNVARFFDTDGFELCKYFKFRNDRAGILSFISKCLNIKEQQGAERIVIGMEPSGHYWEPLAYFLKEYPIVQVLVNPYHVKQSKEMDDNSPDKNDIKDARLIAKLVKDGSFFKTYLPEGVYRDLRNLTSEREQQCAKLNSAKNRLVALLDRYFPEYVKVFKNLLGKTSVFILKIYPFPEDIEKLTEEELTGVIKAASNKRLGSKKAKELKKAAESSVGLTEGLDSARYRIKSCLEEIEFHLKQLEATEQKMSALLSQTGYKLNLLSIPGVGIVTAARFLGEVGDLSRFEHPSQVIKLAGFNLRGSTSGEKQTSKTVITKRGRSRLRCLLYQAALIAAARNPQLRALYYYFKTRPKNPLKPNQALIAVANKLVRIMFALIKKNEFYNPALVLGEIRESQLKVA

SEQ ID NO: 379829 - protein, 309 aa, unidentified
MSSFVGIDVSKATLAVAVRPAGSSLSFTNDAQGHRDLLQSLKGLSVSRIVLEATGGYERALLVALLDAGLPAVRVSPHRARAFATAMGRLAKSDPIDAAVLAHLAEVLDVGSTPVVSPKQQALRDLVQRREQLIQWRDDERRRVQQAASPFVRHSLQRSLVATQREITRCDREITAALAAVNLESSQRLLAVPGIGPVTTASLLAYVPELGTLDRRQVAALVGLAPYNSDSGAHTGKRRIHGGRPRIRRVLYMAAWSAIRSQPDFKARYQDLRQRGKCAKVALVACMRVLLIRINAMLRDKTEWKMAKI

SEQ ID NO: 379830 - protein, 322 aa, unidentified
MSVSNQRCAGIDVSKGTLDIAISNNASQFTVPNGSDGFTQIIGELKRNKTRLILMEATGGLESGVACHLQSEGFDVVVINPRQARDFARAMGYLAKTDRIDARVLLQMSEVINQHPEREKYIRPLPDAHRQILAAMVVRRRQLTIMLTAERNRLHPSHPQSYESIKSIISALKGELARIEDEMAIHIKDHFSELSALLSAVKGVGAATVAVLLAEVPELGSLSRREISALIGVAPVNRDSGTMRGRRTVFGGRASVRTALYMSALVATRHNPVIKEFYTRLVAAGKPKKVALTACIRKLLTILNAMLKKNEAWDPMYHQHAS

SEQ ID NO: 379831 - protein, 344 aa, unidentified
MHIASIGIDLGKTTFHLVALGEHSKVLVRRKFSRAQLLAYTANLPCSLIGLEACAGAHFMGAALRAPGHEVGLIPAQFVKPYRKSNKNDFIDGEAIAEAVTKQNLRFVPIKTQEQLDVQALHRVRDRLVQRRTALINEIRGFLLERGITFPAQPIHLRKNLATVMEDAEQNLSPRLRWLLDRLWQEWKQTEIDIQTITDEIERISIEDERCQRLRQIPGFGPLVSTATVAAIGNGAGFHRGRDFAAWVGVVPRQYSTGGKQRLLGISKRGNIYLRRMLIHGARAVLFRIQYDTAGLGQWVHRLSQRAPRHKVIVAIANKLARIAWAVLSSGRDYHHQPLSSAAA

SEQ ID NO: 379832 - protein, 365 aa, unidentified
MEEKKKVLTRFVGIDLGKRTYELAIVGKGGKVTMSNGKTFEAGRQSLYKRLRVTDIVGLEAGNMAFIMAKEIEAAVGCQVYVLNASHLPLIYGSMKKTDKEDALKLAHIVEYFPEERLPLVPLPSDKEIKRRKILAYYRRAQQNRSRGINQLHGLFVSAGITTMKRSDFSTSENRLEAIKSLVGLEREEADYLVASIEQYEQRIKALNLKIKEESAGDEEIQRLQSIPGVGPITAFAFVSHVASERFENSGQVSNYLGLVPRVYISGDTVKYSQITKRGNSYIRALLVQASWALVLAKKDNKLKARYNYMTLEKSISKKKAIVAVARRLGELMYTLMRDGTLYMPKPFIVKMSKGEELAQLALSA

SEQ ID NO: 379833 - protein, 353 aa, unidentified
MLADQADHVLGVDTHRDSHSAAILAADTAVVEGQITVAANERGYRRLLRFACESAPGRRAWAVEGTGSYGAGLAVFLQQEGELVLEVDRPRRPARRDRAKSDELDAIRAAREALTREHLARPRQRGEREALRVLLATRDSAVRSKRAAITLMKGLLVSAAPALREGLRSLPTNEQLARCARLRISPMQDSEQRATTIAIRASARRALALAEEAQELEAEIKPIVARLAPCLVAEMGVGAIVAAQILCAYSHQGRIRSEAAFASLAGVAPIPASSGQTVRHRLNRSGDRQLNRALHTIVLCRMRDDARTRAYAARRQAEGRSTREIRRCLKRYTARHLYRLLQASPPNLANSDT

SEQ ID NO: 379834 - protein, 346 aa, unidentified
MVLIGCDFHPSWQQVSWISRETGEVGDQKLVHEPGAVEKFYRRFPAGARIGMEATGNCQWYLEWMAKLGHEVWIGDAAKIRASDARQQKHDKRDAQLLVKLLDEDRFPRIWVPSREQKDLRQLLIHRNKLVRIRVQVKNGLQHLAMNQGLQKKKRLWSAAGQQALSALPLAPWASRRREDLLKMRSELDAKIDALDRAVVEAAEKDARARLLMTQPGVGPITAMAFVLTIGEISRFPRGKQVASYLGLIPREYSSGGHQRLGSISKQGNRFMRMLLVEAAQIAVRYDPGMRNEYLHRCHSKAKGVAKVAAARKLAIRLYWMLRTQKPYPQIVRIESSSRVALVGES

SEQ ID NO: 379835 - protein, 335 aa, unidentified
MSGQYVGIDLHRRRSVVVHKNEAGEVVSVRRIENDPVNLSAAVADAGEHPEVILEATYGWYWAADLLDELGCNLHLAAPSSLNWGQRRVKNDERDATDLIDLFRLGRMTEAWIAPPATRELRELVRYRAKLVQLRSGLKAQLHSVMAKNGVLPSRWDMFGPGGTAQLDALELPDAYTTRIVSLRGLVDVFDNEVSALDRQIHRELKDDPGYRAIQVIEGVGPILAAVFVAEIGDVHRFPSAPALCSWAGLTPKHRESDTKVVRGKITKQGSRIVRWAAIEAISKQRGGAKLRADYHALTARRGKHKARVAVARRLLTLVYYGLRDHEIRCLNLAA

SEQ ID NO: 379836 - protein, 346 aa, unidentified
MENIALDVHKKYTWARVEDSEGRELYASRLAHSRGCIKNFIGRWTPGCSVAVETVGNWYWVVDEIEAGGGKPQLVNARLAKLMMGNVNKSDKLDAKGMNRLQRTGTLPTVWVASSAVRDARELARTRMVLSRQRTQLKNRVHATLSKYGHVVDEVSDAFGKRGREIINELLTKLPPHTGQALQHVLDQLDEVVKNLQAIERDMIGAFSPCSQTALLKSLPGVGEILAVVIWTEIGIIERFNRAEQLASYSGLVAREHSSGGKFYRGAVRRDVNVYLKWAFVEAANSSILNRERSNYQHIDRLYQRIKGRRGHQRAKVAVARHLAEATFWMLKKGEPYREPMLSTQR

SEQ ID NO: 379837 - protein, 384 aa, unidentified
MSTIIGIDISQESSSFHLLGEGGTQEISGSFAMNRSGFQSLLQRVAHVKAPRFFMESTGRYHMTLAHFLLQEGHKTAIVNPVLVKQFSKANTLRKTKTDKIDALTIARYAQQAPKEIGAIERAMDDQRLSTARRREQIAELVATTKTQLKADLTVAWPEVLSLDVFTKGMLRLFTHYPCARSIEEATDEQLSLALKAPRGRGLALTAADLRHLANGSIGIPSYGPLVADSAQSLLFLEEKLELLTKDLVSLVRETQDLEMRIITSIPGIGEITAAHCLAKIVSIDRFQRYQNLIAFCGTDPGIYESGTILRRGKITKRGSASLRKYLYLMASGVNRCNPYFKTYYDKKRKQGFTHRKAMVAQMNKIIKTLFAMLKKKEMFSVPT

SEQ ID NO: 379838 - protein, 433 aa, unidentified
MKDVEDEALFCERVAGIDIGKAMIMVTIRVPSETRTGGRQQETREFGTTLKDLRALADWLRCWQVEKAGMESTSDYWKPVYFVLERAGFDCTLYQASQVKALPGRPKTDKLDSVWLAKITERGVLAGSFVPPEDIRRLRTHTRYRRKLVQMRTAQKERCEKLLEDAHLKLSSVISDIHGVSGQEMLRAITAGERSPKVLAQMARGVMRGKIKKLEEALDCSFFTEEHAFILAMMLDSIDSLTAQVTVLDEKIADMCRPYERQIEQLDAIPGFGIITAQDLIAEIGVDMTIFPTGGHLASWARTAPRVTESAGKRKGKNATGRGNPYIGGALGEASISTGRTQTFLGEQYRRMCKRMPKLKAQVAIMRKQLVIAHALLSDPEARYEELGPDYHERRKDTRRRVSSHLRELERLGYKVTVEAIDPATGELLPAAS

SEQ ID NO: 379839 - protein, 302 aa, unidentified
MSSNGITWVGLDAHKESIEVAALVPGQPEPVEWSEHTTPEAIRRLGRKLQRIAPGEVRCCYEAGPTGYGLQRMLEAAGVICEVVAPSLTPVKPGSRIKTDRRDARKLAELLRADVLTQVHPPNPADEALRDLCRCRDDVRVDLLRARHRLSKFLLRRHCIYRQTKHHWGTRHWAWLLEFRFEDPVSQATFDSYLLAVQQLEERQRQLDLQLEHYGNQDPYREPVGWLRCFKGIDTVTAVALVAELHDFRRFRSARELMSYVGLVPSEHSSGGRERRGPSPRPAIVTCEDYWSRPPGTIAIGR

SEQ ID NO: 379840 - protein, 320 aa, unidentified
MKTRENSILSAGIDTGKHKLDVAIHGTAKSFVVENSPNGWQSLAARFAAAGVNRIGIEATGGYERGVTRHLQAQGFTVLVLQPLQVRAFAQLRLQRAKNDRIDAGLIAACVHLLDPSNKLPPEPRFDALADHLTFLEQIEDDITRIKTRLEHIHDPRLRRIADADCKRLEQRCERETARLLAELRAHADLARRFDLVCSIPGCGERTALSIVIRMPELGQLGREQVAAIAGLAPFVHQSGKYAGETHIGGGRSRLRRALYRAALPAAFHWNQPLMALYRRLRDRGKTHSCALIACARKLLIYANAVVERGSPWESRPAPG

SEQ ID NO: 379841 - protein, 346 aa, unidentified
MLYAGLDLSRKRLDFHLLDRDGATVEVGAAPPDADGLLGLTRRLDRHREPIRAAIESMNGARFVHDRLELAGWQVEIADAQKVKGLAPLACKTDRIDAWVLAELARRDLVPAIWLPDPMVRAERERARWRLHLVRHRSSLKQRVHAVLLTHGKPCPVSDLFGVRGRQLLARLGLPEPWQTTIEASLRLIDELEREIGDCERELRRLGADHRYVPRLLTVPGIGWVLAYTIAAEIGDIGRFPSPRKLAGYTGLCPRVYQSGERDLRGPLAKQGPKYLRWALVEAATHACTHPAYRDRYQQTKARIGKQRGAKVAQIDLARRLSEAIWHMLTRDQPFAPKGATDPLAA

SEQ ID NO: 379842 - protein, 401 aa, unidentified
MHYVIGIDVSKATSQVAVAVDGKVTQHFKITHDVLGFNQLNTIIMQFNEFPDIVFEATGIYSRRLKSFLDWHNYPYTYLNPLAAKKQLDQLRPNKNDLNDAKNLAETQFILARAKSYVQNPIYIELQDMSRFYQQINHDIVSTKNRLHRILQLTFPEIEGLFSATDSPHYWELLTIVPHAIITRRSRQALMDTIQGRISWHMGHERLRKLVDQLMSMGQISAPAVAANSYNVAQVIYYAKRLIELHGTKGDILTAMVDKAKDLPEYSIYQSIPGFSDKTVVSLIAELGDLHRFRTANKLNAFVGIDLRFNDSGDYKSTGFITKRGNSTARKVLFRAISNIASTASYGHPSHINDWYQKKKQSSLSKGTKKIAIGAMSRLLRTMHYLVINHQLYDYKAVSKH

SEQ ID NO: 379843 - protein, 386 aa, unidentified
MPKPNDCSRSVTAFEQNSTLIAVIEMSLSSWLVAGVVPGIERHPLKKLETDEDALLKLLLRWRDEAVKAGHKIERIAIAFEAGRDGFWLARWLRARGIEAYVIHPASVAVSREHRRAKTDRLDTELLKRVFLGWLRGEPDHCSMSAIPTLEQEDAKRPNRERENLVGQRTRIVNRMKACLIRFGIRNFKPTLRKAPEGLEALRTPEGAPLPPNTRAEMRRDMARLRFVQDQIKEIEATRLQQLEQAPAEGPHAMIRLLARVTGVGIETADMLVNEILARNLRDQKAVARYAGLTGSPDESGKRSREKGLSRAGNARVRRGMIQLAWRFLIFQKESALAQWYRVATKDARGAIRKTMIVALARKLLIALWRTVTIGEMPGGVAMRAT

SEQ ID NO: 379844 - protein, 389 aa, unidentified
MSAEGEAIRSNDYRKDTTVKAPSTRPAAVLGLDVGKSSHWACLIDRDGGVLASAPVRNREAELDALFASAPAGTLVVVDQFRNIGSLAVRRARAAGLGVAYLPGLAASRAAGLFAGEAKTDERDAAVIARTALGVPDSLSGVPGRGEALEAARALSSQRDHVVACATRDKNRLRAVLLESCPALEAAVDLSDRRWLELLAGFGGAWGIARSGAEGPRAEAASTAPPPALVEAENRQVRFLAARISEALDEAGALEAETAALLEGDETYACLLTVPGIGPRTAAQLAVSVDIGRFPDHDHLASYCGIAPRVRSSGTSVRSVRASRRGDARLKSLLIFSCNSLVRSSGRYGEYYRACRARGMGHGRALKAVARKRLRAIYAVMRDRVPYRE

SEQ ID NO: 379845 - protein, 378 aa, unidentified
MPSENTVHIAIELSFSSWLVAVRLPSAKKSALHRIEGGNTGALLALIAELRSRTLIKLGRAVEVACCFEAGRDGFWLHRLLTARGVLVYVLEPTSILVNRRSRRAKTDRLDAEGMLRVLAAWLGGDREVCSMVRVPTPDEEDAKRPHREREHLVQEKLRIENRIEALLFTQGIRARPSLRSWERELTELRTGDGRTLPPLLRAELDRMRRRLVLILELIRELEAERAAALAAAPDEAMAQKITSLQLIRGIGANFSAVLVREVLYRSFTNRRQLASYVGVAPMPYQSGGMDRDRRISRAGNPRARTTLIQLAWLWLRYQPGSALAAWFRERVGTLQGRTRRIAIVALARKLLIALWRYVEAGVLPAGVEIRTGTVPAA

SEQ ID NO: 379846 - protein, 345 aa, unidentified
MLYCGLDVAMVSSYLHVSDEKGKRLVSGWVATQKDALKGRLGRFVPEGLKVAIEAGNQTAWLHEALSEMGADVTVVNPARVKLIAESRRKTDKIDAKLLCDLLRLDGLPCPVHMPCRRTRELRGLLAARRKLVSARTKLCNVVRGVLRQEGVRLAARGLSTRAGWDRLMVRRYSHAHLQPILRAYYLSFQALTESLKDLDGELARYEREDPRAARLETMPGVGRIAALTFLGAVDQVGRFSSSRKLVSYSGLCPRVRSSGERTEYGPISRQGRSELRAVWVQIAHRVAHDERLDAAPLRQWFWRVAGRRGKKTATVALTRKLLTIAYHLLKYEQDYDPGRLSMAA

SEQ ID NO: 379847 - protein, 305 aa, unidentified
MSVTQPVGVDVAKDTLHTDDGHRHRVVPNQPAALRRWLRNLPPGTQLICEPSGGYERRLLACARQTGVSACLVNARQVRAFARGLGRLEKTDRLDAAMLRHYGACVQPRPLPPPDPALLRLQQLVRTRAHYAGQLQRERNRRELLEDPLLDRLNRQQCAHWEQVLAQLDAEVLAHVEAHPLLRDRMQTLCLVCGVGAQTALTLVAEFPELGRLNARAAAKLAGLAPLAQESGQWQGSRHIAHGRANVRRALFQAALVAARHNEHLRPFYLRLRSNAKPPKLALIAVARKLLIFLNRLLKVDSPPP

SEQ ID NO: 379848 - protein, 409 aa, unidentified
MDIMYERCCGLDVHKQTLVACVLVPGSGRQPAKEIRTFGTMTADILELGDWLEAKGVTHMALESTGVYWHPVWNLLEGKLELLLVNAQHIKQVPGRKTDVRDCEWIANLLRHGLLRASFVPERPQRELRELTRYRTSLIRERAAEINRIQKTLEGANIKLGDVASDILGVSARRMLEALIGGTTDPAVLADLAVHKLRNKLPQLQRALKGEFGTHHRFLLAQQLAHLDGLDELIESLGSEIAERVRPVEHVVERVDAIPGFGRRTAEIVIAEIGTDLSRFPSFKHLASWVGLCPGNNESAGKRMSGKTRKGDVWLRSALIEAAHAASRSKDTYLAAHYHRIAARRGKKKAIVALAHTLLTIIYYLLTRDCDYEDLGPDYLNERDRDQTERRLIKRLQGFGYTVTRETAA

SEQ ID NO: 379849 - protein, 483 aa, unidentified
MTDSKIRYVGLDVHKRVVEACLVDAAGKVARRERFALSRPALEVFATKVLRPTDEVALEATTNCWAVADVLRPHVARVVVSNPMATKAIAMAKVKTDKVDAYVLAQLLRCDFLPEVWQPDVATRRLRELTGRRSALVGQRTAMRNRIHSVLAMRLVEAPTRLFNDEGLEWLTSVELDDQARLLIDSDLRQLEFLQKEIDAVDAELARRGHARKEVKLLMTLPGVDVTTAEATLAAWGDAKRFPDGDHAASYLGLVPSTKQSANQCYHGPITKRGNSQARWMLIEAAQHLDRHPGPLGHFFRRLAKKKNRNVAVVAGARKLAMIGWQMLVTGEPYRYAIPRTTETKLARLRVKATGRRRRSGSPKGTKSMATRPGQPGGSRRIRALDEVYRSEGLPSPKPLSPGERRTVQQTDSKAFVAEIAAPRVVPRQTGASRTSDEANHANVAPHDARAKQAPTAAPAFGKQQNQRPSNHAAKTRKSSPGS

SEQ ID NO: 379850 - protein, 397 aa, unidentified
MVKVGIDLHKTQFTICVRERRGNKFEKYPTTEEGYEAFLKKVALWQRSGKEVRAGVESTGNTRYFRDRLETAGVKVTVINTLKLKVVTESVKKTDKHDAATIAEFLEKDMLPVAQLCSRESEKQRRMIKARTTLVRAQVVMKNQIHGLLTAEGMEDVKGSLQSKKGRQQALDTLNKCKNGLEAQTLIETIDDLERSVNGTEKQLRRLTEGDRVVELLMSIPGCGEVSAWTIRAYTDDIKRFSSAKKYAAYCGLAPWVQNSNETVHHGKITKRGPEELRTALVQVVMGMRRMKAKTIDWRLMQRYVAMKKSKGSGRAIIATARKLAVIIWHMLSEEAEFDVGMMVDRKLTGKSETMSNAARLVEEAVCEKKDRPVSKKITGKNTKKSGVASKERKKVG

SEQ ID NO: 379851 - protein, 385 aa, unidentified
MTIQRIGCKFIPRDYDVFAGLDVDKRSMAVVFADHDGSQRALRMASSATPLLNYVRKHYAGQRVAFAYEAGPTGFGLHDELMRQAYTCVVAAPSKVPRAPGERVKTNRLDGRKLAESLRGGQLQGIHVPAPIYRDLRHLVQLRDTHVRQLMASKLRIKSLLLFEGIPFPDPQEKWTARALRELQTLPCSAAVRYKLDDLLETLHFHFQAAARATKQIRQHCLHDAELQQSINLLLSLPGIGWIVGSHLVARLGDPQQIKNGKQIAGFLGIVSSEHSTGDKQNRGEITRSGDSRLRSKLIQSAWTAIRKDPELRAFYRRIYQRHPQKVAARKAIVAVARKLTQRIYVVLKEQRPYVVRLDSSIAPLTVEETVGPRDRLDAAQNDQP

SEQ ID NO: 379852 - protein, 450 aa, unidentified
MEQSTRFVGMDVHKETIVVAVTASGEVGKATAYGTFPNTAAALEKLVKRLRQAGDGPIKFCYEAGPCGYGVHRTLTKMGEDCMVVAPSMIPRKSGDRQKTDKRDAASLAVLHRGGLLTAVWVPDAAHEAMRDLIRARLAAVRAVRAARQQLSAFLLRHERVYPGNRTPWTKAHRGWLADQTFAQPAQRIVLEESIEAVRLGEQRRDRVDGYLRAQIPTWSLFPLVRNLCALRGLDMIASAGLAAAIGDPSRFASAPHFMAYLGMVPSEHTSVPKRRIGAITKAGDMHARTMLIEAAHSYRYPARIARHKLAAVDAVPEAVRAIAWKAQTRLCQRFRQMTAKGKPNQVVVTAIARELAGFVWSIACITSDPAGSDNAVTEAYDEVTALKDEVMMASEEAAQQVQQITPDRPPRRAASPAAGRHDAPRGPTRVNRRRICGREPDGMISHHTG

SEQ ID NO: 379853 - protein, 392 aa, unidentified
MNYFIGIDIAKTNHVASIISQNGDIITKAIKFTNSNEGFNKLIVTIQDKLGSLDNIEFAMEATGHYWLSLYSSLVDMNFNVSVFNPYQIKSYRGAFNNRKQKNDAIDSVIIADYLRVFGSINSSLPKDELLSLKQLTRYRSDLVSNISALKTQVIGVLDKVFPEYSKLFCDIFGETSKQLLLKCPIPDDILQISTTKLTNLLSKYSKGKFNKEDALRIKEVAKNSFGIKFTTNACSFEIKQLINQIIFIENQVNEVAKEIKELYNKLDNHLLSVPGVGQNIAPIILAEIGDINKFDTPNKLIAFAGVDPTENQSGNKQSSGDKISKRGSPYLRHAIYTASLVAIKNEPELRAYYDKKINEGKHHFVAMAGISRKLLNIIYHILKENRDYEKH

SEQ ID NO: 379854 - protein, 356 aa, unidentified
MVMVLGVDVHKDTHTVVAVDEVGRADGERTVRATDTGHRQLLDWARRQVPQDRMWAVEDCRHVSTRLERALLAAGETVVRVPPKLMAGARSSARTRGKSDPIDALAIARAALREPDLPLARHDDTSRTLKLLVDHRDDLVIERTKMANRLRWHLHELDPELDVPARGLNRLNLLDRLITWLAEQSRPDRLGQVLARLAAELLTDIRAATVRINALEREINTLARQAAPRLMTLPGAGGLTTAKIVGETANITRFRSEACFAMHAGVAPIPASSGRTQRHRLARGGNRQLNAALHRIAITQVRITASPGQLYYQRRRAQGDTAMEALRALKRRLARVVFNLLQADTTIAINDLSTAT

SEQ ID NO: 379855 - protein, 460 aa, unidentified
MKLYLGGDASKGYTDWVIISETKKKLLDNFQLDDTFEGHNQLYNAIKCCVDKYPNVEIYAALESTGGYENNWLNTLKGYQKVFNIQVARVNPLAVFHDSKANMTRTITDAVSAIRIAEYQINHPDNIRYEQDTTWKSLRRHWNFVELQKKQRVQTINQLDALLYSANPMLLTYKTDKLSNWLLEVIIQYPTANLLAKANAEELSKIPYVSLSKAEEIIASVQKSIASSTDENTGVLIKQIALQIKMFDQTIESQMSLIKKEMVCPEIHILKTFKGIDTTSAIGLILEIGVVERFYSVKTICSFFGLNPKFKQSGDKIIGVRMSKLGSKNMRKILFNIAIGAIVHNPLIYEVYQRKLSEGMSKMAAIGVCMHKILRIIYGMLKNMKAFDAQVDKQNASRSSSKQDEKNQQKVAYIVKTRRFQEYDQNAPISIRQTKKRKEQTLSQCEITSQSAGSANSSQM

SEQ ID NO: 379856 - protein, 342 aa, unidentified
MHVTTVGLDLAKHVFQVHGIDQNGQVLIRRQLRRGELIGFFRRLPPCLIGMEACSTAHFWARELAALGHEVRLMPAAYVKPYVKRGKSDALDAAGICEAVTRPTMRYVAIKSSEQQAVLMLHRTRELLVRQRTMLVNALRGHLAEYGIIAPQGLPSVPKLIELAEKARSTVLPELAWRCIRLILAQIEDVHGRIGQVEQEILAWHHTSEVSQRLETIPGVGIITASAIAATISDPGSFRSGRHLAAWIGLVPRQSGTGGKVRLGHISKQGDRYLRRLLVLGATTLLRHARGKTSVTVGWINALLARRPASIVKVAIANKLARVAWAVLQGNQGYRAPAAAAA

SEQ ID NO: 379857 - protein, 310 aa, unidentified
MDAIVIGIDVSKDKLDVHVLPAAQAFTVARNGAGIEELAARLAALAPAVVAIEATGGFETIVAAGLAGAGLPLVVVNPAQIRAYAKAIKQRAKTDPIDAAVIAKFARATRPEVRPLPDEVTRQLADLVARRRQIVEMMAAEGQRGRRVDHKRVARSIARVKKTLEAELAELDQEIGDQVRGSPLWREKEDLLVSVPGVGPVVARTLLAELPELGRLERREIAALAGLAPFTRQSGRWRGRSFIGGGRATVRTVLFLAAMTAARHNPTLKAFRDRLVAAGKPKMVALIATARKLLTILNAIIRDNRPWQNA

SEQ ID NO: 379858 - protein, 428 aa, unidentified
MNCNTQNAKIASITEKTLIVGIDVGSVTHYARAFDWRNYEYTKKPLEFSNTEEGFLTFKAWVEDIAEKHGKTAVIPGMEPTGHYWFALGKFLQDCGMKPVHVNPHHVKKSKELDDNNPNKNDRKDPKTIAALVNEGRFSYPYIPIGIYAEIRNLSNLRFQTQEELTRIKNRIARWFSIYFPEYQDVYGDLKAVSGRMILKVAPLPEDIRRLGAEGVNLIWRDAKLRGAGMKRAKTLVTAAEHSVGSKEAPEAARIELRNLLSDMDVYALRLEELLQSIEEKLKEIPYMDKLMGIKGIGLVTVSGFIAEVGDIGRFDNPKQLQKLAGYAIVANDSGKHNGESRISYRGRKRLRYVLYEAAISLIGKNPEFREIHEYYRTRKENPLKKMQSVVAVACKILRIFYKILTTGVAYDAEKLMGDIKRPQLQTA

SEQ ID NO: 379859 - protein, 338 aa, unidentified
MKLYGGIDLHSNNSVIALLDEEDRAIYRQRLGNDLGLILSKLAPHQASLERLVVESTYNWYWLVDGLMEAGYRVHLANTAAIVQYEGLKFSNDDSDACWLAKLLRLGLLPEGYIYPKEERAVRDLLRKRSQLVRQRTANLLSVQNLLARNLGHAPGANAIKRLSPEAVDQLLPDRHLALAVQSNLAVMQALDAQITALEPVVRAEIRPRPEFQPLRTVSGIGEILGLTIVLETGAISRFDTVGDYASYCRCVGSERLSNGQRKGRGNTKNGHRYLAWAFVEAANFAVRYNAQIKRYYQRKCARSNGIVAIKTVAHKRARACYYILRDRVPFDVNKAFA

SEQ ID NO: 379860 - protein, 410 aa, unidentified
MQTLVERGCGMDVHQATVVACLLVVLKNGKVQKQVRTFGTTTRELLGLREWLLSEGCTHVAMESTGVYWKPIYAILEGAFEIVVANAQHVKAVPGRKTDVKDGEWIADLLCHGLLRSSFVPPQPIRELRELTRYRCKLVESRSAERNRLLKLLETANIKLASVATDVFGVSGRLMLQALVQATATSQQMADLAKGLLRKKIPALELALEGNMEEHHRFLLSVQLHRLQAVEEDLCLLEQRIQEKLKPYAMQLALLREIPGVDWTLAAVIISELGVDMSVFGNVSQLASWAGICPGNNESAGKRKSSRIPKGNVYLKTALVEAANAAARAKGTYLKDKFYRLKARRGYKRAAVAVAHKILVAIYHMFPHQVCYNELGDLYLDKLNKHHVTRNLVRRLERLGYTVTLEQKAA

SEQ ID NO: 379861 - protein, 469 aa, unidentified
MATAGRRGGAKRRGRVAGRGVLGLGIVSPHAAGIDVGAEEMWVACPPKDGEPNVRTFATDTASLGELADWLKVGGVTAVAMESTGVYWIPLYELLESRGFDVSLVDARTLGRVPGRKTDMIDCQWLQQLHAHGMLRGCFRPKEETVPLRALLRLRRLLANQQDDWVRRAQKALDQMNVRVHRAVTDIQGVTGMRIIRAILAGERNPAALATLRDPHCHKSARQIARELTGNWREEHLYALRLAMANYDHFARQIAELGRHLIEILARVRQRRAAAGLPACPVEEVAKPADRNKATSIMRDGLEELRVALAATFGIDLSTIEGIGVETASAVLGEIGPEVGDFPNEKAFLAYLRLAPNLAISGGKPVRGKPVPRGSPIVKQLLKTAATSLRQSKTVLGAYYRKIAYRKGAGVAAFATARKLASHIYRALANGTPFVTAGLEAEERKALDRQRAHLDRVATRLGLKVVPAN

SEQ ID NO: 379862 - protein, 370 aa, unidentified
MAHDSTVYVGLDVHKDSITAACIGADPAATPVDLGTLGTQQYAIDRLIKKLSGRGPLRFVYEAGPCGFWLQRYLHSVGQECLVAAPSLIPRRPGVHIKTDRLDARNLALALRAGTLTAIHIPTPEEEAFRDVVRAWQQSKRDITAAKQRLKAFLLRNDIRYEGRSSWSTAHRRWLSRLVLPSPAQQIVFQELIDAVLERERRRDRLEQQLDALAPSWSGYALASALLAFRGIQKTVAYTVVAETVSFARFSHPSRYMAWLGFVPSEHSSGASRHQGPITRSGNRWARTLLVEAAWAYRYSPKVSPIIERRAQHLDPQIRALAWKAQLRLSHKYRRLLARGKHANVAVTAVARELAGFLWDAARLIEQPRA

SEQ ID NO: 379863 - protein, 370 aa, unidentified
MLDTTTFIGLDVHARSIKAVSLDVMTGEVRAATFGYDAGAVAGWVRSVDPRARCVYESGVTGFDLQKRLSGLGVDCVVGAVSKMIKPSADRRRKNDRNDAEFLARMLSVGNVVEVWVPDDECEAARDLTRALEDARDDPSRSKQRLSKFLLRHGLVFDERTPTGRRKGNWTRAHWSWIESIGFAERADNDVLAYYVDAVRRAAEEKARLEGLVEAEARKPRWRRRVDSLRCLKGVDTASAAGLVFEAGEFSRFRNARSFAAWVGLTPSEHSSGESDRRGAITKAGNKHLRKTLVEAAWHYLTCSGRPKDLARGQAPDRGARRHAAKGVRRLVERREALLARGVHGNKANVATARELACWVWAVGLMAEEA

SEQ ID NO: 379864 - protein, 412 aa, unidentified
MRRVVGIDIHRTFGEVVFWEDGVLRRVGRVDMTRTGLEGLGKSLLATDEVVIEATGNCMAVSRVLSPFVQRVIIANPLQVKAIAHAHVKTDKVDAGTLASLYAAGYLPEIWTPDAATERKRRLTACRYQVVRHRTRIKNEVHSILHAHLIPKCPHADLFNRRGRDWLARQPLPDDERGAIDRHVRELDRLAEDLAVLDREIAEAALEDPDVKRLLTITGVNLTVAAGILAAIGDISRFDGPGKLVSYFGLNPRVRQSGLGAVHYGRISKVGRSHARAMLVEAAWAAAKAPGPLHAFFVRIRAKRGHQIAAVAVARKLTVLCWHLLTKGQDYLWARPALVANKARAMELQAGKPPKKGNQRGPAYAYNVKTLRDQEMRIAEQAERNYARFVDRWKTRPGKNEVRERLNSARIE

SEQ ID NO: 379865 - protein, 411 aa, unidentified
MRLFAGDDWAEGHHDVEVMDEAGKVLVKRRLPEGVAGIAQLHELIGRHLGQDADEAEVIVGIETDHGPWVTALIAAGYTVFPVNPLQASRYRERHGVSGAKSDGGDAHMLADMVRTDSHQLRPAAGDSAEAEGLKVLARTHKTLIWERTRAVQRLRHQLREYFPAALEAFEDLAAPDALELLGKAPDPARAARLTRAQVSAALKRARRRNIPDRATAILAALRGEQLGQPPALTAAYAATARALLAVIATLNEQVKGLQGQVEENFGRHPDAEIYRSQPGMGAILGARVLGEFGDAPHRYADGKARRNYAATSPITRASGKKKVVAARFIHNDRLVDALNAQAFASLNASPGARAFYDELRVRGIEHNDALRRLANRLVGILHGCLKTRTLYDEATAWGHRQNHPQSSVAA

SEQ ID NO: 379866 - protein, 397 aa, unidentified
MIAVGIDVSKSKSTVAILNGDASIRAKPFDVHHVADELQALVDYIKRTSELPTILMEPTSHYHYPLLKAFTEAELPVCLINPYQMKKYGDTELRKAKTDKRDSLRIAQYALEKSYSLIPYTPQDQKYEDLRFLSRQYSQRISTLTVAKVQLLSLLDETMPGITTILPLKSRDPDNCVLLRFIKRFKSFDVIRKMGKTRFLDSYQVLVKKTKDRFAGSKGLAIYELVLNSVTTRGENPLSAMTQDQCVDLVSTSQKAADEINLQMRIIAETMPEYKVLRSMAGVGDRLGPIILGEIGDIRRFHSGKALNAYAGNDAPPYQSGQFESRNRHISKRGNPALRKACFEVMQALKLTKPQDDPVYLFLLKKEQEGKPYNVAKMAAVNKFLRIYYARAMELYK

SEQ ID NO: 379867 - protein, 345 aa, unidentified
MELHTIGIDLGKTVFHLVGLDLRGEVVVRKKFSRTQLLRFTANVHVGLIGMEACGGSHFLGRALREQRHEVRLIPAQYVKPYVKTNKSDYIDAEAIAEAVARPTMRFVPIKTDDQLDLQSLHRVRERWVMRRTAVVNQIRGLLLERGITLRKGRHHVDAALPLILEDADANLSGAVRLLLTQLKLDLDQLSVRIDEADAVIQKTAHENEACRRLVAIPGIGPVTATALIAAIGNGGAFHKGREFAAWMGVVPREHSTGGQQKLLGISKRGNSYLRRLFVQGARAVLQQRTKQSSGLSRWLAQLTSRTHRNVAAVALANKIARIAWAVLAKNEQYRPSVLTDVAAA

SEQ ID NO: 379868 - protein, 342 aa, unidentified
MQITTIGLDIAKNVFQVHGIDAKEKVVARKQLRRSRVITFFKALPPCLIGMEACATAHYWARELTKLGHEVRLMPAKDVKAYVKRNKNDAADAEAICEAVRRPTMRFVRIKSAEQQGQLMQHRTRDVLIRQRTQIINALRAHLAELGIVAAQGNAGVNELRAIVTDEQDTRLPIDARASVIVLAAQLEALESVIGAIEKRIKMQHRSSEASQRVETIPGIGVIGATAIVATVADPTIFRSGRDFAAWIGLVPRQDSTGGKQKLGPISKQGDRYLRRILIVGAISVLRRAQENPGKYPWLTQLLARRPFKVVAVALANKMARMAWALLAHGGTYRAPVLAVAA

SEQ ID NO: 379869 - protein, 347 aa, unidentified
MTQAQIYIYGIDLGKNWFHLVAMDRMGHVLTKQKLTRSQLKQFISTTPPCRVAFEACPGSQYWGRLFQQAGFEPKIIPAQFVKPYLKSNKNDFNDATAIAEAGSRGTMRCVPLKSHEQLALQATHRVRQRFIIERTATVNQMRALLLEYGLTVPVGRKVFERALPAILEDAENGLPDFIRALVLRLRERWQQLDIQIDEMSLMLGQASSASSLCQKVSTVPGIGPIVSTALIAAIGNGSQFKKARDLSAWLGLVPRQYSTGGKSSLGGISKRGNNYLRQMVIQGAKALKIHMKRDKSSLGEWVARLEVGHHHHVVLIALANKIMRICWKVLTSGRDYQPYPNASAAV

SEQ ID NO: 379870 - protein, 391 aa, unidentified
MFLLGIDIAKLNHVASCIDSSTNEVVFSNFKFKNDFKGFSALLNKIKSFDAKNLIIGLESTSHYGENLINFLFIHDFKVALINPLQTSHLRKANIRDAKNDNLDSLNIAKSLLFTKLNFVSKKNIECFSLKKLTRFRSNLIKQRSKAKIQLTSLLDLLFPELQYLFKSKIHSKAIYFLLKKYPSTEEIAALKDDEISNLLYASSKGHFKKEKSIELKSLAKTTVGIKDTSISLHLIQLIELIELYTKQIKDIEIKITDTINNLDTTLLSVPGISVIASAIILGETNNFENFSSSKKLLAFAGLDPKIRQSGNFNASSCRMSKKGSPYLRYALIFTAWNIVRHSEKFNKYYSLKRSQGKTHYNALGHVAHKLVRILFTLIKKNISYQEEKLE

SEQ ID NO: 379871 - protein, 453 aa, unidentified
MEPSTSHATAEPDWPLVSPDAAGLDIGASEIWACVPPGRATPAVRAFATFTPDLEALADWLQACGVHTVAMESTGVYWVPVFELLEARGLEVYLVNAAHIKNVPGRKSDVQDCQWIQRLHSYGFLRASFRPEADMVVLRSYLRQRGMLIEHRAAHVQHMQKALQLMNVQLARVLSDITGSTGMQIIRAMVRGERDPKVLASYRHGRCQHSAAEIAKALTGHYRAEHVFALKQALALYDAYTEQLQACDAEIERQYAAIRPRFDPDDPDQPLGPDPKPETHSKNAPQGDIRRQLFQVLGVDLTAVAGVDEATAQVLVSEIGTDMSKWRTEKHFCSWLGLAPHNDITGGRVVHSRTLPTHNRAAQVLRMAAQSAGRGKSALGAFYRRLRARVGPEQATTATAHKIARIVYHMIKHRQPYRLVSAAEYDEQHHQRELKSLQRRAAKLGMVLAPSPA

SEQ ID NO: 379872 - protein, 340 aa, unidentified
MTVMIGVDPHKATHTAVAIGGDERELATIKVRATRKQVLQLLAWAAPFESRTWAIESAAGMGYLLAQQLVDAGESVVDVSPTLASRVRLLGSGRSDKNDPNDALSVAVAALRASTLREVYAVDHGEVLRLLAKRNLDIGSHRTRVVCRLHAALAGLAPGGMSKELNASDAEAFLDQIEPVSPVEHVRLELAREMLADVRRLDAQLKDSHRRIRAAVLASKTSLTDLFGVGPMTACSLIGYTRDVRRFRNRDQFAAYNGTAPVEVSSGGRITHRLSRRGNRRLNHAIHMAAVTQIRHAHSEGRAYFDRKLAEGKTKKEALRALKRQVSNAVYRQLLVDAAR

SEQ ID NO: 379873 - protein, 327 aa, unidentified
MYSITLGVDIAKKKFDVALLIDTKYKHKHFPNDKAGFEALIQWLLTFNLLTPPLICMEATGSYSLPLADFLVAQGYPVSVVNPAKIHAFAKSELSRTKTDKADAKLIARYALTMQPGLWTPPPPEMRRLQALTRRIEHLLEIQQMERNRLETADGSVTDSINTLLKTVEDEIKTIRQAIDALITDHTDLDQRRKLLESIPGVGPATVAYLLMLFSSHQGFTNAKQAVAFAGLAPALRESGQWIGKTRIAKTGDPIFRKALYMPALCAWIHNPVIRTFCERLKANGKNGKAIACAAMRKLIHIAFGVLQSGEPFDPLWVSSKNKPCKA

SEQ ID NO: 379874 - protein, 408 aa, unidentified
MDLTPMHKRVIALDVHQAKITACAVVEDDDGRVEVTKRDFGAFKRDRRALAQWALEIAPEVVVMESTGVYWKSPFAALEAVGIIAWVVNARHVKAVPGRKTDMADAQWLATLARAGLLRASFIPPVQMRQLRLVARQRQKLVGMCSAEKNRLHKVLVDAGIRINVLVADIHGASARAMVKALIAGKAMHEVLDCKGRLRASRDELFEALSTEQFSAVHRFVAEEIMQHIEQIEQRIVRLDQYLLEGLRPWQPQLKLLQTLPGIDEQGAAMLLVEIGADMSVFGSAERLASWVGICPGNNESAGKRKTGRIRKGNAWVRRLLCEFAQAAARTRCALKAKFDALAIRKGRKKSVVALAHKMLRTIYAMLTNGTHYQDKEVDYEALNVERNAPRWIKMLRKHGFIATPATA

SEQ ID NO: 379875 - protein, 314 aa, unidentified
MTKDISETIGCDLGDRKSEICVVDAEGQVVERRSVATTERGMKTAFCRARAHVVIEVGGHSRWVSALLQSLGHRVTVANPRRLKLITGSCNKTDRHDAELLARLGRADVQLLAPTEHRGMQAQADLAVIKARDALVATRTKLVNHIRGTVKSFGVRLPACSAASFTAKTRALVPEQLGVALDPVYRALEALEVQIRAQDKQIARISKRYPETQAVSQPAGVGSVTALAFVLTVENKERFAKSRMVGAYFGLRPRKHESGQADPQLRITKAGDPLVRRLLVTSAQYVLGPFGPDTELRRWGQEMAKRGGRNAKRR

SEQ ID NO: 379876 - protein, 376 aa, unidentified
MRRCREVFVGIDTAKARNAVAVAEAGRQGEVRYLGEFTNTPDAIAKMVRKLGDRYETLHFCYEAGPTGYGLYRQILAMGHSCTVVAPSLIPRRPGERVKTNRRDALSLARLLRAAELTAVWVPDETHEAVRDLVRTRAMAVEDYRRKRQHISSFLLRHGRAYEGGTTWKGRHLRWLDGQNFAHAAQRFAFQEMLNAMRAAVERIDRLDAALVEIVPAWTMAPVVAAFQAMRGVGFLTATAVVAEAGDLRRFEHPRQLMAFLGLVPSERSTGDTRRQGGITKTGNSSARKALVEAAWTYRHSAGVGTTHQRRQLLLPQRVREIAWKAQSRLCARYRRLTAKGKRNTVVITAIAREIAAFLWAIAREVEPASAIPQRT

SEQ ID NO: 379877 - protein, 413 aa, unidentified
MEVLYSRCCGLDVHKSSVSACVALREAGRTQRKHGRFGTMTRDLVGLAGWLHELGVTHVAMESTGVYWKPVWNVLEGQFELILVNAQHVKNVPGRKTDVKDSEWIAELLQHGLLHSSFVPEIRIRDLRDLTRSRASLSQEASRIVSRVQKVLEDANVKLSSVATNTVGKSGLAMLEALIAGESDSEALADLALGHLRAKIPQLRAALEAKVRDHHRFLLERLLLQRRFIAGEIAALDRRLEQIGVKEPDLATTVARWVTVPGIDRVAAWSLVAEIGNNMAQFPTAAHLASWAGLCPGNYESAGKKLGATMRKGSPWLRRMACQSAWAAARTKNTYLSAQFRRLASKRGKNRAVMAVAHTIVVIGYHLQKHQCDYRDLGGDYFDRLHADGLKRYLVRRLESLGHKVTLLPQDAS

SEQ ID NO: 379878 - protein, 307 aa, unidentified
MKLYGAIDLHSNNNVTVLIDEQDQVVYQKRLPNDLPLITQQLSGYRDRLQGIVVESTYNWYWLVDGLMDQGHRVHLANTAAIQQYEGLKYTDDHSDARWLAHILRLGVLPQGYIYPKEERAVRDLLRKRGQMVRQRTANLLSIQNLITRNTGSSIRSNRIKTLDAEQVDDLLPNSDLALAVKANLAMIQCADGQIDILERTVTDRVKLRAAFSFLKTVPGIGQILALTIMLETGEIKRFPTVGDYASYCRCVGARSSATARRKAAAIPRTAISIWLGRLSKQPTSRSDTMRGSKASIRERRPRAMAW

SEQ ID NO: 379879 - protein, 353 aa, unidentified
MTRAMIAVLGIDLGKSSCSLVGLDAEGAVVLRKRMRRETVIAFATKLPTCVVAMEACCGAHHLGRLLAGLGHEVRLMSPEYVRPYVKAQKNDDRDAEAIAEAATRPTMRFVELKREEQLDLQTLHRVRDRLVGLRTMLTNQLRAILLERGLVFPKGRRKLELAIDALLLETHPALGVRMQKLIGDLREEWGGIDQRIGSLDTEFVARARADSATRRLMTIPGVGTLTATALVAAVDDAAAFRRARDLPAWLGLVPRQHTTGGKPKLLGISRRGNSYLRRLFIHGARSALPTLSKADTPTGAWLRALLSRAHANVVVVALAAKMARIAWAMLRRSTEFTPEPGLAMTRLVAPPR

SEQ ID NO: 379880 - protein, 386 aa, unidentified
MIYVGIDIAKETHVAAAMSTDGVVLLEPFAFQNDHEGFKLLKSKLDTLNGNILIGLESTAHYAENVIFFLHSQRFKLAVINPVQTAAMRKTGIRKTKTDKVDSLLICKTLACNSFRLYSETDVKTLQLKSLCRFRQNLKKSKARLKIQLTSYVDTLFPELQFFFKSGLHIKTCYELLKSYPSPDDIAALHLSKLSNFLSKASRGRFGKQDAKSLKSLAKSSVGVKNTYISIQITQTIAQIELIESQIDDLEHIIEKAMDELDSVIMSVPGIGKINGAMILGEIGDIKRFSHPSKLLAYAGLDPVVNQSGKFNAKHTRMSKRGSKMLRYALINAAWNVSLNNDTFKCYYDSKIAQGNSHYSALGHTAHKLVRVIFKLLTDNVAFALV

SEQ ID NO: 379881 - protein, 337 aa, unidentified
MKLYCGIDLHSSNSVIAVLDEQDKSVFEKRLDNDLDDILEALKPFKDEIVGCVVESTYNWYWLVDGLMEAGYRVYLAHVGALPQYTGLKHSNDTTDARHLAKLFRLGILPTGYIYPKQERALRDLLRRRLLLVRQKTLHHLSLQSLIARHSGQRLSANAIKKLEEHQLGEFLEPPILLGGAITHQARCWLDGAVARIEREIQKHIQPREDYQLLQTMPGVGPALGTTIALETGTIERFPSPGNYASYARCVKSEKISNGKYKGQGNKKNGNKYLAWAFMEAAHYSAIWSPQIKRYYQRKQAKAHLLVAKKAVANKLARACYHMLKPNEPFDVARAFG

SEQ ID NO: 379882 - protein, 315 aa, unidentified
MNEVPLFVGIDVSKDRLDVAVRPGGEAWQVPYDPRGINSLTERLRELAPHLVVVEATGGMELALTGELAVAGLPVAVVNPRHVRDFARAAGQLAKTDSLDAHVLAHFAEAMQPKPRELPDASAQELRALVARRRQLVEMSTAEKNRMRVATPRVRPKVQEHVRWLEDSLKELDKDLADSIRSSPMWRTKEKLLRSTPGVGPILSMTLLSGLPELGALNRGEIAALVGVAPFNRDSGTLRGKRKVWGGRGQVRTVLYMSTLVATRFNPVLRDFYQRLCAAGKPKKVAITACMRKLLTILNVMVKHHRHWNPAVQNS

SEQ ID NO: 379883 - protein, 315 aa, unidentified
MQTGLDIGIDVASKTLVAACAAGSFAPCPLRNERGALRKWLGELPEGSRIGMEATGSYHQLVADLAHAAGHCVYVLNARDVKKYAEGVGRRGKTDRVDAQIIARFIAREHDRLHVFAPLGEAQRHLEQLLKRRGKLVAARVALELGWSGVAGIKAELAALLKAHARLLRQVDTLIAQAVAAVPEVKARAERVRTIPGFGEVGSVTLAQALSHLPFTSADAFIAHTGLDPRPQDSGNRRGRRRLSKRGPPELRRVLHICAMSAASTKAWRPYYLAQRAKGLSGTAALVVLSRKMARTAYGICKRQVEFDPARISNA

SEQ ID NO: 379884 - protein, 412 aa, unidentified
MDAIVECCAGLDVHQETVVACVLKGALEGRPRGQLRTFGTTVAGLLELSDWLQEQAVTVVAMESTGIFWRPVWNILEGQEFELLLANARKVKNVPGRKTDQRDAEWLAQLLRCGLIERSYVPAVEQRDLRDLTRRRRRLLQTLAQEKNRVHKTLQDANVKLTTSVSDIFGVSGRALVQALRSGQKLDSEEVLALLKGKLRQKAPEVAAALEGRVRPHHLEMIEFSMDHIDFLERQVQVIEERIEATLAPPFREARDLICSIPGIERASATEILAEIGIDMSVFHSEAHLASWAGVSPGNFESAGKSKSGRTGRGDRYLKTVLVQAGWAASKTKATRLSGRYQRLARRLGRDGKKKAVVATAHTLLRIVYFVLTTRRPYQEYGAEYGVASAEARTRRVIAQLQRQGYTVTKAA

SEQ ID NO: 379885 - protein, 366 aa, unidentified
MKRVMAGMDLHGNNVMIGIVDADGTRLRHRRLACDLEEVIAFLNPYKPFLDRVAVESTFNWYWLVDGLKAAGFPVVLANPAKIDQYEGIKHADDKNDAYFLAELLRLGILPTGYIYDPESRPVRDLFRRRMGLMRLRTTLLLSSKSLHHRTTGHSLAVGQLKALSPADLAAFYSHPANRLTAEIQKELIEALNQCIRRIEKMVASEALKKPYYKRLQTLPGIGVILGLVISMEVGEIERFAEPGRFASYCRTVDSNRVSNGKKKGSNNEKCDNKYLAWAFVEAAHAARRYDAHCRRWFDRKSAKKGTTIATKALACKLAKAAWHVMAEAVDYDPAKMFPELAAGRIEQISGRQTSASKGVGPEPED

SEQ ID NO: 379886 - protein, 350 aa, unidentified
MTISHYIGFDVHKKSISYCVKTKDGTIVEEGKLRATHDVLRQWAGKRREPWHGAMEATLFSAWIYDTLKPFAAELQIGHPALMKAIGASKKKNDKLDARKIADLVRADLLPACYVAPVEMRELRRLLRYRNLVVGQAVRLKNKMSGLLMEVGAEYSKQQLRGKKYFSELLDTVAEVPESVKDLLRLSRGAMEMFETTQQQLLIRLRQDPLLAKRVALLRSIAGVGEVTALTWILEVSEPRRFSSVARAVSYCGLTSALVSSADKQQRGPLSKQRNAHLQTVLIEAAKLAPRWNPQLAALHEPELGRGKRNRATLAVARKLVAYLLAVDKSGQPFQVRVTPVSASEAAGEA

SEQ ID NO: 379887 - protein, 314 aa, unidentified
MKTPLFVGIDVSQSQLDVAVRPGARFAAPNDETGLATVVAQVRRLAPVLIVLEATGGLEVPLTGALAADGLPVVVVNPRQVRDFARATGQLAKTDALDAQILAHFAEVIRPAVRPLPDEQTQALAALATRRRQLVEMLTAEKHRLRTASPSIRKSLRTHIAWLQRELTHTDTDLAQAIQDSPVWREKDDLLRSVPGVGPVLTTTLLANLPELGTLTNKQIAALVGVAPLNRDSGTLHGKRMVWGGRAQVRTALYMAAVVATRHNPAIKTFYQRLCGLGKAKKGALIACMRKLLTMLNAMLKHRTPWRTEQPQHA

SEQ ID NO: 379888 - protein, 391 aa, unidentified
MGISVGIDIAKEIHWVTALDGDGVVQIDHKLLNTPPDLAALAAELAALGAPVRIGLDVVGGIAGLAEAMLAQAGFALVHVPGLAVNRARQGTVGGENKSDPRDARTIADQVRTRSDLRAIEPLTEIDLEIRLLVGRRADLVDAQTQRLSRMHDLLVGIFPGLERTFDLTTKGPLHLLTRFVTPAELRSVGKRRLVRHLRAAGGLPNVGALADRALLAAAEQTIAVPAEAMTARLIRELAIEALASRARVIELDRELEGLLARHPDAALIRSLPGMGAVLTAELIAEAGNLSRFRSADALASAAGMAPILRQSGKVRFLRRPNGGNKGLKRVFYQSATRRKTPSPGRHRPRSTSRERPLGRPPKPNALPDRIQNSRLTDALGCRLHKRRTQG

SEQ ID NO: 379889 - protein, 457 aa, unidentified
MRKKNKRTPGVEEARPFSGMSRIHPHAAGIDIGAIEIVACVASDENTQIVKAFGNYTVDLQALAQWMKSHHIKTVAMESTGVYWIPLFEELERQGFECLLISSRSLRRVAGRKSDISDAQWIQTLHTYGLLEGSFRPQGELVALRTLLRHRSQLVEHRSPHIQHMQKALLQMNVQLSQAVTDITGMTGQKIIRAILAGVRDPQTLAAMREPGCKKSAEEIGKALTGTWREEHLFVLQQSVLLYDFYTQQIQSCDEEIERVYGMTRPDWEAGDVEPFTLRKKSSHSKNLPHHSEEIRKHLKRISGVDLSVVDGFGVSLAQTVIMEVGTDMSKFPDEKHFCSWLGLAPKHEISGGKVLKNNTLKTKNRAGQAFRMAAQSVKKAESVFGVFYRRLRARLGPSQATVATAHAIARVVYRMLKYKVEYEPLSVNEYQRQYEVQQIKYMKKKAAKFGFQLVPA

SEQ ID NO: 379890 - protein, 351 aa, unidentified
MPEIAHKAVAVVGVDIGKNSFHVVGLDQRGAIVLRQKWSRGQVEARFANMPPCLIGMEACVGAHHLSRRLNALGHDARLMPARYVRPYSKGQKNDFRDAEAIAEAVQRPTMKFVATKTADQLDQQALHRVRERLVSQRTGIINQIRAFLLERGIAVRQGQRFLRMELPRILATPPEVLSPRMVQLIEGLASDWRRLDERIEALSGEIADLARRDAGCERLMSIPGIGPLISSAMVAAIGTGDGFSKGRDFAAWLGLVPKQISTGDRTILGKISKRGNRYLRVLFVQAAWVVLVKVKPTRWDGHGLKRWIEAAKKRLHHNVLAIALANKLARIAWSVLARGRAFEASRLQVA

SEQ ID NO: 379891 - protein, 405 aa, unidentified
MKQPARLHYAGIDWATRTHAVCVVDQTGAVRARFQVPNTGKSFAGLCKRLAKLGVAGVAIERPDGPLVEAMVDQGLRVVVVTPRQVKALRSRYRASGAKSDPADAYLLADVLRTDGHRLAPLTPDSEPTKVLRALSRTRKDLQEARVALCNQLTAQLERCFPGAIGLFADLHSPVAVAFLRRYPTSHAAAGLTQAKLAAFLRRLHYPGRTPVATLLGRIQTAPLSGIGPAEAAGRAVCVLALLDAIQVTARQERELEAEIIERLEVHADAKVFTSLPKAGHGVRAAALLGELGDVRARFPDNDCLAALAGAAPVTITSGKRRVVKFRWACDKKLRNALIDFADDSRHASPWAAKVYADALARTGRHPHAVRILARAWIRVIWRIWQDGVAYDPAKHRGAVRLLAA

SEQ ID NO: 379892 - protein, 419 aa, unidentified
MSKIETKKLKKVNEKTLIVTVDIGKTTNMGYGRCPDRTEIKPFEFSNNGQGFKKFWKRIFEAKEANHLEEMVVGFESTGSYGEPLQHFLMKRPVSMVQVNPMHTKRLKELQGNSPGKTDRKDPKVIADIIELGHALTVVIPEGAAAELRRLTQARERAIRRRTALFNQVQDLVFMVFPEFLQVMKNIKTRSAQYLLRHYPCSEDIVRCGLEALSAILRRVSRGKLNKERAQALYEAARHSVGLQEGRKAILFEMEEILSEIESSDQFIGKVEQEMACLLPEIPYSHLILSLKGIGEVTAAGLIGEVGDFRKFHTIAEVLKLAGLNLFEISSGKHKGNRHISKRGRSLLRKILFFAALNTVRKGGVMHDVYQKHLDQGMPKIKALVAIARKLLGIVFALVRDHNEYIENYSKGETLKLAA

SEQ ID NO: 379893 - protein, 311 aa, unidentified
MTDHNIGVDISKSHLDVFRLEDKMAKRFDNSVAGFRALIRWLGKARVARVVFEPTGAYHKAFEVALGTTLPLVKVNPLQARRFAEAHGTRAKTDAVDARMLALMGAAFNLEPQVPQSKETRDLRDLHVARAGLVKDRTRLRNRAVTQDLSVLKRQTKARLKLVEQQIAELDVEIVKLIEARESTARTCDILCSMPGVGAVSAAAMLTLMPELGTLDRKQAASLAGLAPITRKSGQWQGKSFIGSGRKPLRDALYMPALAAMRWNPDLKAKYEQMRAAGKPAKVAIVAIMRKLIEVANALVKANRKWAPKTA

SEQ ID NO: 379894 - protein, 338 aa, unidentified
MLYSGIDLHKRTVVIATVDETGKVVCEASLPTSRFAVARYFAELPDSTRATVEATSSWYWLRDLLHQEGVPLTLAHAKFVKAIAYAKVKTDAVDALTLAQLHRVDLIPRAHMVSPELRPLRDLLRTRLQLVEKRVSAKNSVHRLLEKFNVPDPAALPDEATLQASLYEEQIELLGSQIRRIEQQLQPRLIPEHDIQRLLWIPGIGKITAFTLYLEIDGIDRFPSVRQFFSYCRVVPGAHNSGSKNRHGRRKDGNRYLKLALSHAAVRAIQYYPEIKRFYQRKARQKNPAIARTLVQKELARSVYIVLAEGVEFNHTFKGQPLERRKQSKWPRRASPDV

SEQ ID NO: 379895 - protein, 342 aa, unidentified
MTITIGIDPHKGSHTAVAIDSNEVVLDEIRVRSCSTQTVRLREWADRFEVRTWAVESAHGLGYLLAQQLVAAGENVIDVPPVRASRVRVLGSGRSQKNDPNDARSVAIAALRADDLATVRADDHARVLKLLSKRHRDLGRLKNKASNRLHALLLEMVPGGASFRITAVTRVNAIIDDFEPADAMGRQRQEIARELATDIDRYNDLLDSSKERITAALAASATSLTTICGVGPITAAMIIGQSGNVDRFKSKHHFASYNATAPVEASSGSKVRHRLNQRGNRQLNWAIHIVAISQLRHDNVGRAYFDRKVADGKTSKEAVRALKRRLSDVVYRHLVADARQRS

SEQ ID NO: 379896 - protein, 410 aa, unidentified
MELLHRRCCGLDVHKETVVACLRLVADGKVTTEVRTFQTITSDLLRLSEWLAANECTHVAMEATGVYWKPVWHILDDGEFALVLANAAHVKNVPGRKTDVNDATWLAELLAHGLIRASFVPDTQTQEMRNLLRTRKQLVREQSSHVLRVQKILEDANIKLDSVLTDLMGKSGRAMIEALIAGETNPAKLASLADRRAKASPEEFREALRGRVTKHHRFLLRLHLNQIDALDAAMATVDAQVEANLGPFRTAVDLIISIPGIKNLGAHVIVSEIGIDMSRFPSHAHLISWAGICPRNDESAGKRRSNRLRKGAPWLKTTLVQCAWAAVKKKDSYLQAQFYRIKARRGPKKAIMAVAASILTAIYHMLKDGTMYKDLGRNHFDRRSTDQQKNRLVKRLADLGYAVEIKPLAA

SEQ ID NO: 379897 - protein, 344 aa, unidentified
MQPQEYVGIDLHRRRSVIVRRSAEGETLAVSHVDNDDLLAFERAVTAAGEHPEVVLEACYGWYWATDLLEELGCKVHLAHPLGNNWGNRRVKNDTRDAEDLADLLRLGRLAEAWIAPPEVRELRELVRYRAKLVSLRTNCKLQVYAVLAKEGVNVPMTDLFGVSGTELLETCRLATAYRTRVESLRDLIEVFDREITKLEGDVRHELRGQVGYQAIQQIPGVGPLFAAVFVAEIGDVTRFRSPAQLASWAGLTPKHRESDLTVHRGPITKQGSRLVRWAAVEAAQRQANGTKLRADFARITAHHGDSAGARKIARVAVARKIVTLVYYGLRDGTIRSKAISEAA

SEQ ID NO: 379898 - protein, 388 aa, unidentified
MEVIKKNVGIDISKDDFVATTVTLMSNQEIIYHGSKKFKNNPEGFKKFYLWVNSIFDDDDLPVHFTMEPTGVYYESLAYYLFEKEQIVHVVLPNKAKKFAESLNIKSKTDKLDSKALGRMGAERKLDRWVLSSKIYRKLKILTREREMLQKDKTRTQNQLHAENHSAEPIKRTINRMKNRTKYLEKQIKAVEKDIRELIENDEFVSQKVKKITTIPGIGLLTAAVIIAETNGFCSIKNQKQLTSYAGYDIILKESGKWKGKSKISKKGNSHIRRALYMPSLSSINHTETYKNIYTNLNEYKQNGLIAGTAIQRKLLCLIYTLWKNDTCYIENYQQMKRSKDVTSGNDETKSSFCAFAKQKKVGEKLPLNKIDFGLMNQLKPSFCALQN

SEQ ID NO: 379899 - protein, 327 aa, unidentified
MFSITLGIDISKDKLDVALYQADIYRDGLFSNDKDGYRRLNKWLKKNKAKEAAVCIEATGRYGDGVAFYLHEHGYRVSVVNPARIKAYGESLLKRNKTDSEDAKTIAHFCATQETYLWTPPSAEVQELQALSRRLGTLKEERTRELNRQKSGLTVTVILEAIDKHIAFLNEQISTLEQRMYDLIAEHPDLHQQHTLLVSIPGIGKLTAANFIAEVPDVTRFESAAQLAAYAGLTPRQHKSGSSVRRRTRLVKTGNVRFRTLFYMPALSAKRHNPIAKALADRLEDRGKKRMTIVGAVMRKLVHLAFGVLKHKRPFDPNYIVNLQVTA

SEQ ID NO: 379900 - protein, 345 aa, unidentified
MYYIGIDVSTKESALCILDAKGKIVRETRLPTDPEIIARFIAATGLAIVRVGLESGCTAAWLFAGLQRYGWPVICIDARHAAAALQAGFRNKNDRNDARGIADLMRVNKYRPVWVKSPEAQRQGRLLTARATLQSQLVALENTIRGLLRQEGIGLTDRRTAFEAAVREAIGDDRLLEAAVHPLLETRNAVLQNRATLDRQILRIVRADPVCRLLMTAPGVGALVSLAFKVAVDDPRRFSRSRDVGAHFGLTPREYSSGEVSYHGRISKMGDREVRRLLYVAASRMLRRDAALWCPLKVWAVRLAQRVGIRRARVALARKLAVVLHAMWSDGQVFQWRRAEASASA

SEQ ID NO: 379901 - protein, 347 aa, unidentified
MKIIGCDFHPSYQQIAMLDTETGELLEFRLEHEKGEARRFYERLQGPVRVGMEAVGNSQWFEQMLAALGHELWIGDAGEIRRLEVRRQKTDRRDARHILDLLLDGRFPRLWVPSAEIRDVRQLLRHRQKLVEWRTQVKNQLQHLALNQGVQRKRKLWSKEGRAVLEQLPLQGWTARRRAELLGMLDRLEEQIKELDTAVRAEAERRPEVRLLMTHPGVGPVVGLAYALTIGPVGRFSRGKKVASYLGLIPREHSSGGRQRLGAISKQGNTMMRTLLVEAAQNAARFDEQLRRDYRQLAARKHKALAKVMVARKLAVRLYWMLREQRPYVPPSVARMQGGSSHSVVEG

SEQ ID NO: 379902 - protein, 368 aa, unidentified
MKDVITYVGIDAHKKDLFVAMLIGQAKTPVTWQLANEPQAVRRLVRKVEREAPGAVQVFYEAGPCGYALQRQVTTSRVHCDVVAPALIPRKPGERVKTNRRDARKLVELGRAGLLTTVQPPSPADEAVRDLARARDDAREDLQRCRHRLGKLLLRRGLHFSGRNWTRTHRAWIDGLAWTHAPERAVVDDYLLAIDQTEARLKELDTQLATLAERDPYREPVGWLRCFRGIDTLSAMLILAELHDFRRFGSARALMAYLGLVPGEDSSGEKHRRGRITRTGNALVRRVLVETAWHYQHRASVGVALTRRRKGQPARVIGIADKAQQRLCRRFRKLGAEHKPAQKIAVAIARELAGFLWAALQPALAPTP

SEQ ID NO: 379903 - protein, 339 aa, unidentified
MDQTIRTNVGLDISKDTYWATITVLSSSRGVKNLKSEEFKNNNTGFRMMDKWIKKAAVSTPELHFTMEATGVYHESIAHYLHDKQHLVHIVLPNKAKKFAESLDARSKTDKLDSKALGRLGAERNLTIWNPSNPVFKELKSLTRERATFIHHRTQLKNNLHALKHSHNPNKATLKRMESMVKEFDKNVKSIESEIISTIKGNDELRRKIAFMVSIPGVGVITAAVVVAETDGFSMIGNVRQLCSYAGLDIVIKESGKWKGKSKIRKKGNSHIRAALYLPSLSTIRYSQQHKAFYERIVDGKKKPKIGITAVSRKLLVLMYTLWKNEEKYEDKHLLKEAA

SEQ ID NO: 379904 - protein, 361 aa, unidentified
MQSTTIIAFDQHAATTVAAVLLPDHRTPVLHPLSSESATILRFVERVRRQGPVRCCYEAGPCGFELRRALAAREIPCDVIAPALIPRRPGDRIKTDRRDAGHLAVLYRAGALTAIHIPTAQEEAARDLLRCREDIRADLLRARHRLSKFLLRHGRRFTGTKKAWSKRHDAWLRAQTWPLPTLEQTHRAYLRAVDEVLARLRAIETDLLALLDLEPLRPRVQRLRCFRGIDDLTALTIAAELGDPHRFATAPSTMAFVGLVPSEHSSGTKRVQGGITKTGNAHLRRVLVESAWHYRHHPFVSATLRARQRGAPASVIARAWTAQQRLYRRYQRLAVRGKPKQHIVTAVARELTGFLWAALIQ

SEQ ID NO: 379905 - protein, 341 aa, unidentified
MERTVIAVDIAKKVFQLHWVDMETGCIERLQLKRAKFLEWFAARTASLVVMEACGGAHYSARALAEFGHEVRLISPRKVRPFVQRNKTDAADAQAIWTASHLPGMRFVPVKTEAQQLVLSLHRLRAQLMKTRIMQTNELRGLLYEFGIVLPEGHVALLEALPDAMSGAKIRLPPTLTDSLDEQIRRIQQLQADIGNIERRLSQQMREIPACKAVAQIPGVGLLTATAVVASMGTPTAFKDGREFAAWIGLVPRQTGTGGRVRQLGISKRGDAYLRTLLMHGARAVVIRSNDGPTWPWLAALLQRRPYSVAVAAVANKLARTIWAVLARGQAWRPEAWQTAH

SEQ ID NO: 379906 - protein, 392 aa, unidentified
MYIVGIDIGKNHHEASIVSPEGKQIGRSLRFATTHKGADSLMSFIFKNIGNSPCVFGMEATGHYWYPIYSFLKAKGYTICVINPIQSDSLRKMYIRQTKNDSIDSFLIAEVIRFGQFGTTSMADENILAMRQLCRYRDSVISSRTEIKLRIGAIMEQIFPEYEKQFSSLWVSTSMGILEKYLTPENIENAPIDELFEIIKDKSHNRLTKAKAISIKEAAADTFGIKIAQDAFSFQLKQLIDRMNFHDKQIEALDIEIMKYYEQFDCYLHTIPGIGIIGAATILAEIGDISRFKNSSALVAFAGIDPTVRQSGEFNSTHNHMSKRGSPYLRHAIFLAATTCSFHNSPLNAYYKKKRDQGKHHLTATGAVARKLTTVIYAVLRDSKPYEPKKFC

SEQ ID NO: 379907 - protein, 400 aa, unidentified
MLSIGIDVSKGKSTVCGMKPGGEIVYAPFEVQHTRKGMSELVSLLRSSGEEVRAVLESTGSYHCPVVAALLENGIFVSVVNSLRMKRFCSQSIRKVKTDRIDAMQIALYGLAYWQELQPTRLPEDTYRELQLLARQYYQMTSLLIKAKVDFNAICDQVLPGMQELMSDHAGRHKLSDFVLRYRHTTHILEMGETRFRKDYCKWAEKKGYRNCERMAALIFATAQNGIPVLPNAPSTQIVITEAIRVLHTVEASRDAILTQMQALAKTLPEYSLVREMPCIGDTLAPRLIAEIGDVRRFHSKRALIAYAGIDAPPYQSGKFCANNRHISKRGNRYLRKTGYEVMQSYVMHKPANDPIFTFIEKKRGEGKSGKLAMVAGLNKFLRVYYGKVTELYRSLPAIE

SEQ ID NO: 379908 - protein, 347 aa, unidentified
MRFYTQQHPHYCGIDLHGRTMYLCILNQAGAIVLHRNMKADPDSFLSAIAPFRDQIVVTVECIFTWYWLADLCAREGITFVLGHALYMKAIHGGKAKNDKIDGHKIAVLLRGGMIPQVYVYPADMRSTRDLLRRRMHLMHQRSQLLAHIQNTNSQYNLPEIGKKIAYKSNREGVAERFADVSVRSSITFDLRRIDFYDGLLNEVELEILRHAKLHNPNTLHLLDSVPGVGKILSLVLLYEIHDICRFPRVQDFVSYCRLVKPKKESAGKTYGFIGAKIGNAHLKWAFSEAAVLFLRNNPQGQAYVARLEKTHSKGKALTILAHKLARAVYYMLRRNEAFDMKRFLNH

SEQ ID NO: 379909 - protein, 340 aa, unidentified
MNQVSTIGFDLAKHVFQVHGTDAQGRLFRRKLRRKEVLAYFASLPPSLIGMEACGSAHYWARKLQALGHEVRLMPPAYVKAYVKRGKNDAIDAEACWEAVTRPNMRFVAIKSEEQQSVLMLHRARDLLIGERTQTSNALRGHLAEFGIIAKQGRGGTDELLALVEGSEEEGLMPELARTALLVLAAQLRELRVKINKIEREIHAWHRSNAQSRRLETAPGVGPITASAMVATVPDPSRFKSGRQFAAWIGLTPNEDSTGGKQRLGRITRAGDPYLRRLLVVGAHAVLRHSGNAKSAPTRWAAELKGKKPYTVAAVALANKMARVIWAMMMKGEAFRTGEA

SEQ ID NO: 379910 - protein, 317 aa, unidentified
MTKTSIAVAGIDTAKDKLDVAVHGRTERWQVGNTLSGWRRLRSELVKAGVSRVGIEASGGYERGVVKHLQAEGFVVLVLQPIQVRAYARLHLRRAKNDGLDAVLIAACTAAIEGPRIEPDARLVGLADHLTFVEQIEEDIARLKTRLEHIDDRRIRKIVVADIARLKARRIAELLRIVNRLRAHDDLARRLDLVLSVPGIGEWTAISLIIRMPELGRISREQVAALAGLAPFDDDSGKYKGQRHIAGGRGRLRRSLYAAALPAAFRWNKALVELYARLTARGKAHNAALVACARKLLIYANTVVARGTPWVEKKAAT

SEQ ID NO: 379911 - protein, 407 aa, unidentified
MVGTFRRAKDHPDVVIVDRAGQIVAQFAFPHSAEGWQRWRPCVQSYPALGVALETSSGPAVEQLLESGVTVFPLNPQSAKSYRERKAPSGTKTDRLDAWSFADGLRTDGHGWRPLAPLDPLVQELRLLCRDEVELTQQRTALVNQIQQALSEYYPAALHAFADWTAPYTWEFVRAFPTPQALVKAGRRRWENFLHSHKLYRPQTVDARLEVFAKANELAASPGITRAKSRLVLTLAATLLALEKHLEQYRQAIAQLFAEHPDHQLFGSLPGAGEKLAPRLLSEVGQDRHLFDDPQGLQCVAGTAPVSSQSGQVDRARIRWHCNKHLRYAVHLWADCSRKYCAWAQAYYQAHREKGNSHASALRRLGNRWLKILWTMWQEGQTYDSERHARNQQKHGSWLLQLHPAKA

SEQ ID NO: 379912 - protein, 407 aa, unidentified
MDVIHPRCAGLDVHKQTVVACARIAGDGPASQGVRTFETTTSGLLALADWLESLGIEHVAMEATGVYWKPVWHILEGHFELMLANAAHVKNVPGRKTDVNDAMWLADLLAHGLIRASFVPPTAVQELRTLTRTRKQFVRERASHVQRIEKVLEDANLKLSVVLSDILGKAGRAVLQAIIDGHSKPEELAACVTTRVKASPEELLEALRGRIRRHHRFMLKLHLGHIDALDKAIGDIEKEVGQGLEPFRAAAKLLTTMPGISTVAADALIAEVGIDMGRFATPGHLLSWACLCPRNDESAGKRRSTRLRRGGKWLKATLVQAAWAAVRVKGGYLQAQFHRIRARRGAKKAIIAVAASMLTAAWHMLKDGTEWHDLGAAHFDRQDASKTANRLIRRLQQIGYQVSAVPA

SEQ ID NO: 379913 - protein, 346 aa, unidentified
MEQIIRIGMDTSKHIFQLHGVDAAERPVLRKRLGRKQMVEFFAKLPPTVIGIEACGASHYWARVLEQLGHEVKLIAPHLVKPYVTRNKNDGRDADGVCEAMSRPRMRFVPVKTAEQQAALMLAGVREQLIARRTQLSNTIRGYAAEFGVTAAKGLDKIEPLLAQIAQDESVPALARGLFAMQGREYAQLQVELKAIEVKLRAWHRANADSRRLAQIPGVGPIGATALVMKTPDPRAFPSGRHFAAWLGLTPKDHSTAGKTRLGKITRAGDERLRSVLVAGATAVIQQARHGRGHPSPWVVTLLKRKPPKLAAVALANKIARIAWKLMVTGESYDGARMPGASAVAA

SEQ ID NO: 379914 - protein, 482 aa, unidentified
MKKKNIYVNQSQELLSLFEEAGNNDKIMCVPIDYAKKDHIVMFCNGYGHFLRKPFSVKNSPEGIEYLTEQVTRSCSHRHIDPKHVFFGGEDVGSYAENFTNTLRSGGWIVAGVNAHDAKEQRANIQASTDRLDLMGIASMLLNRRGNCSPAQSGIYRNLRTLARHRRKLVSMSTEEKNRIHTVIDRLFPGFLDEKKTGILPFSKSSLYLMENRFSPLQIRRRKRHKLIEVLHRYGTTKSENTAAKLQEYAVRVLNTPDEYVFTLQLSLAQHVKHFRCLQDSINQLENEIAVWLAQTQGAFLTAVRGIGIVLAAGVSAEIGNPYEQKPLNNLVSYSGIIPRVKQTGGSEGKTRTGKVAKRCNRILKDYVVQSGLHMGLHGPEDLMADYKRREAAGQHSDFGIGRRYLRMAMCLMRTSQIYMPQRLRNTEVKPEERAGYYLMTWPSLRNKWNKAGALEAAFEKDRPLGQWRNMVQELYEIKLKL

SEQ ID NO: 379915 - protein, 417 aa, unidentified
MAESNDTPEPISAFVGIDWADAKHDIYLHPADGSTASHEVIDAKPEALHDWILKMREHFSAAGKIYVCLEQSKGALIHQLMQYDFFVLYPINPKTLARFREAFRPSGAKDDRSDADLLCELVRLHTHRLRPWKPDDEQTRKLNAFCQNRRQAVGSAVRLLQQVREQLKLYYPLALELELNTVLACDFLQRWPTLEELRQAKPQTIRKFFYAHNFRRGDKIEQFVQKLQKQTPVTSDRAIIEPAAMQVRLLAAQLRVILNSIPEFDQTIAEIFHSHPDAAIFESFPGAGPQLAPRLLTAFGTDRDRLESAEQMSVISGVAPIKIASGKSFATHKRWACPKFIRQSFHEFAGCSIKFCAWAKAFYQAQRDKNKGHHTAVRALAFKWMRILFACWKNRKPYDDALYTGALKKRGSAFASP

SEQ ID NO: 379916 - protein, 455 aa, unidentified
MPRRPVRPNRLPPQLQQVNLNAAAIDIGSTSHFVAVPEGRDRLSVREFAAFTADLHLLADWLRQCGIDTVVMESTGVYWIPVFELLEQRGFEVLLVDARKVKNVSGRKSDVLDCQWLQQLHTFGLLQGAFRPTDEIMPLRSYLRQRAMLIRGASMHIQHMQKALQQMNLLLHHVVADITGLTGMTIIRAILAGERDPQVLAQHRDPRCKRSVEVIAKSLVGNYREEHLFALQQALSLYDTYQAQLAALDQRIEAYLARLARVTEEQPPAPAKQRQTPKHNQPRFDARGYLYQLTGVDLTRIDGIEAGSALALMSEIGTDMTRWKTANHFVSWLGLCPGTKISGGRVLSSKTKPTASRAAAILRNAAASLHHSQSALGAYYRRMAARIGKPQAVTATAHKLARIVYSLLRHGTEYSDAGQDYYERQYQERVVRNLHQRAKALGFELVPTAAESAVT

SEQ ID NO: 379917 - protein, 463 aa, unidentified
MKQKHGRKKQEKRSGDLGSLPPITPNAAGIDIGSEEHWVAVPEDRDEKPVRSFRCFTADLQAMATWLKACGITTVAMESTGVYWIPAYQILEAHGFEVKLVNARHVKNVPGRKSDVSDCQWIQRLHTYGLLSASFRPDNEVCVLRSYWRHRDSLVHYASSHIQHMQKALTEMNVQVHKVLADITGVTGMRIIRAILAGERDREKLALMRAPGVKSTPEEIAKALEGDYREEHLFVLRQAVELYDFYQRQIEACDHEIETCLCRFDTKADLESNPLPPLKKGKKKPKDGPLVDLRAHLYRMTGVDFTQIDGLDVLTVQTILSETGLDPGAFRTMKHFTSWLALSPDNRVTGGKVKSTRTRKVANRAAMAFRIAAQSLANSTSAIGGFYRRIRARLGAPKAITATAHKLARIFYTLWTTGKQYVDLGAQHYEQRYKDRIVRSMKKRLHDLGYVVTIEPTATAATL

SEQ ID NO: 379918 - protein, 347 aa, unidentified
MNITTVGLDLAKLIFQVHGVDGRGKVALRKQLKRSQVAAFFAQLAPCLIDMEACGGAHFWARKLMEFGHTVKLIAPQFVKPYVKTNKNDAADAEAICEAVGRPNMRFVPIKNTEQQALLGMHRARQGFVTERTAQANQIRGLLAEFGLVMPAGIRSIGRKLPEFLEDAENGLSGASRALFARLFEHFRALDRQVEELEREINAWHREDTASQRLQAIPGIGPLTASALVASVGDAKLFHNGRQFAAWLGLVPRQSSSGGKTNLLGISKRGDTYLRTLLIHGARSVLLHLKSHPDQAEGWLAQVANRRNPNIAAVALANKNARIVWALLAHGRDYRAGYRTARGVAAA

SEQ ID NO: 379919 - protein, 344 aa, unidentified
MVTTIGIDPRKATHTAVAIDGSENVLGEITIRADKDQTRKLVDWAGSVDGDGRLWAVEAATGLGYLLSQQLMAQGETVVDVPPVLASRIRVLSSGKSQKNDENDARSVAIAALRRDGLAEVHREDEAAVLRMLAKRHRELTALRTQAVCRLHAMLAVLRPGGMGHRLSAKQASRMLGGIRGLDAVGEQRRLMAKTHLVDIRRLDRDLDANKARIRQAVAAADTSVTDIYGVGPVVAAFLIGYTPPIERFTTPDRYAAYNGTAPIEVSSGGKVRHRLSRRGNRILNHAIHTAAVTQISHQTPGKVYYDRKIDEGKTNKEALRALKRRISDAVYRQLRQDAERRDG

SEQ ID NO: 379920 - protein, 469 aa, unidentified
MKRKSRRAKCQKVSPFSGDLQLIEPDAAAVDVGSRSHWVAVNPQRDPNPVREFGTFTADLISLADWLAQCEAKSVVMEATGVYWVSLYELLERRGFKVYVVDAHTVRHLPGRSKSDVKDCQWLRRLHSYGLLRGSFRPPAQIRQLRNYQRSRTKIIEAAAQQQLRMQKALTLMNIHLHHVISDLSGLTGMAIVRTIVGGERDPIRLARLRDPRIRASRETIQKSLEGHWQEELLFDLKIALESYDHFQGQIAAYDEQIRQELKEVESKVDLANEPLPATRLRACRKRPGMSQQNQLDLREELYRISGVDLTRIDGISLQTAQKVFFEIGTDVSPWSDEKKFSSWLGLSPNHRISGGKVLKRSSRKVVNPLSVALRLAARTLRNSHSALGANFRRLIAKIGMPKAITAMARKLAVLVYRMLKYGTQYVDKGMQHYESKYQETKLQYLRGQAAKFGMILLPRQAASTSVAS

SEQ ID NO: 379921 - protein, 321 aa, unidentified
MNKDKEIYGIDISKSVFDVYSSQGGHIQLKNDDKGFKSLIKTLPQNALVVMEATGYYHYRLAQYLYSQGIAVSVVNPLSVKRFIQMRLAKVKTDKSDARAICEYGIQNQVPLYNALTEVQAECLQLFRLLDIYIKQRTATKNKIKGEESLGRPSRFVYSSLRRNLKHLDKEINGLEARLLKLVKQDQQHQLSLLKSIPGMGVKTALFLIVVTDGFRKFENARQLCSYVGITPTIRESGSSIKGRSRISKIGNRKLRNLLFLCAFSACKHNKSCKELYDRIVAKGKSKKLALIAVANKLLKQAFAIAKSGLPYDENYVSRLS

SEQ ID NO: 379922 - protein, 367 aa, unidentified
MSRMKRLAVQQLDVSKDYLVIGLDLAKTDTAVIAITTDGELYAIDRLKYSDLLNQARQLGSTVFAMEPCNGMTYLVHELEELGHECRVINGEAVKDYVKSHFAGQKNDLNDAQAIAFLAQDEMLKFIRVKAKSEMTMQTLQVVRQQLIKQRTCSVVCIKGICQNYGLVISKSIMSEAKIRPIIEETQKLPDEIKEPLKRLLRNAARFTIDIKQIDKAIEQGLKGNETAERLLEVPGLGPQCVSRLLTTIGDINRFEGPKNLAAYYGLVPRSHTTGHNEKMGKITKHGDRLMRAFLVQGAHAVLIQHTKGRLPKSALKKWIDKKLSAGMPCLKLSIALAAKLLRIAFAVLKYKKKFDIKKAGVARCSL

SEQ ID NO: 379923 - protein, 341 aa, unidentified
MQITTIGLDIAKNVFQIHGIDAAEKVIVRKQLRRGQVTAFFEALAPCLVGMEACATSHHWARELTKLGHEVRLMPAKDVKAYVKRNKNDAADAEAICEAVRRPTMRFVRIKSAEQQGQLMLHRARDLLMRQRTQVINALRAHLAEFGITAAQGREGIKELLAMVAHEEGSRLPSDAHASLTVLATQLQAVQTMIGSLEKRIVAQHRSNEASKRLETIPGIGVIGATTIAAVVPDPRVFRSGRDFAAWIGIVPRQDSTGGKQKLGPISKQGDQYLRRILIVGAHAVLRRARQQPETYPWLTQLLARRPFKVVAVALANKMARIAWALLAKGGTYRAPQLVAA

SEQ ID NO: 379924 - protein, 343 aa, unidentified
MEYYAGIDVSLESSSLCVVDATGRIVREAKVASEPETLTAWFNSLGFALSRIGLEAGPMSQWLYAAMKQAGLTVELLETRHVRNAFKIMPVKTDRKDARGIAQLMRLGWFRPVHCKSLPAQEIRSLLGARKLLQGKLHDIELSLRGTLRGFGLKIGKTTPKTFAGRVRSLVTNHPTLTLIAEALLRARAVLLGEFLNLDQKVHTLARQDPRARLLTTAPGVGSMVALTYAAAIDDPARFKSSKTVGALFGLTPKRYQSGETDVTGRISKIGDAAVRTALYEAANIILERPVKGGWLKAWALGVAKRAGMRKAKVALARKLAVVLHRMLVDGTPFNMEKAAAKA

SEQ ID NO: 379925 - protein, 347 aa, unidentified
MNYYAGIDVSLECSSVCVVDGTGKIAREAKVASEPEALIAWFGLLGLSLERIGLEAGPLSQWLYAALREAGLAVELLETRHVKAALSAMPVKTDRNDARGIAQLMRLGWFRPVHCKSAEAQEIRALLAARKLVQSRLYDVEMSLRGILRGFGLKVGHTTPKRFAERIQELVVGHETLEVVGAALLSVHAVLLREFNGFEKRVRAIARSDGRVRLLMSTPGVGAIVGLTYISAIDDPARFKSSKSVGAHFGLTPTKYQSGETDVTGRISKLGDGSVRTALYEAANVILTRPIKGGGLKSWAMKLAKRAGMKKAKVALARKLAVILHRMLADASKFIAEKASGCVRVAA

SEQ ID NO: 379926 - protein, 372 aa, unidentified
MKEHSIFVGMDVHKNSIDIAIAEKGRQGQLRHFGTIESSLAALDKVVRKLVSNGKRPCFVYEAGPCGYQIYRHLTAKGFDCAVVAPSLVPRASGNRIKNDRRDSLMLARLHRAGELTAVCVPHDEDEALRDLTRAREDAKIDEKKAKQRLLAFLLRSGHRYSGRASWSQAHRRWLADLKMPHRCQQIVLQEYIEALSHCSLRLQRLTDQIRQMVPQWRLFPVVQALQSLRGVSLIVSATTVAEIGDFKRFQNPQQLMSYLGLVPSEHSSGDKTRRGSITKAGNTHVRRMLVEAAWAYRFRARVSRALLQRHEDLPQSIRDIAWRAQVRLCARYRRLWARGKIKAVVTTAIARELCGFIWAIATAVKGPPTAS

SEQ ID NO: 379927 - protein, 429 aa, unidentified
MRTESTPGARGPVFCGVDTHADTHWLCVLDWRGRKVLSRQFPADAAGYEALAGAIAGAGEPACIAMEGTSSYGAGLTRHLASLGMPVREALSPARTQRRRPGQGKCDEADAERAARAAMSGSKLGTPKSQDGWVDGVRCMLAARSGAVKARTSAINTARSLLTTAPEGLRSRFRGMGGTRLMEELPSVRSEGALGAALGALADLWAAARDAALDMERAIEASLEENCPALLAMYGCGPVSAAKLAVAAGDNPGRLRSEASFAAICGACPIPASSGKTVRHRLNRGGDRQANSALHEIARQRVMRDPETAEYAERARGRGKSDREVMRCLKRYVAREAYRALMHPHEVRRPEDASALVAARRAAKISQVRAASILGTSEKYISMLERGQRELKPIRRAYEAWVEAGLPLDWDGQAFEAERKMNSKKDLAK

SEQ ID NO: 379928 - protein, 348 aa, unidentified
MLIIGCDYHPGFQQIAFVDTETGEFGERRLTHREEAEQFYRTVKQRGVRVGMEASGHARWFERLVSELQFELWIGDAAEIRTKRVRKQKTDRQDAQLLLRLMVEDRFPRIWVADAANRDLRQLLWHRHRMVEMRTRVMNQLHEVALNEGVRRKKALWRPAGRQELESLVLAPWASRRRQDLLEVLDQLTPKIQELSAALEEEVEKRPVTRRLMTHPGVGPLTALAFELVIGTPERFPCGKQIASYVGLVPSEESSGDRRRLGHISKQGNSLLRYLLVEAAQVTVRSQPQWRSKFFHLALRRGRKIAKVAMARKLAVHLYWMWRQGRDYGQFEKLGSHAGEPGNRHGVQ

SEQ ID NO: 379929 - protein, 348 aa, unidentified
MSKHTAIGIDLAKRVFQVCVVDIRSQEVRVNRELKRPELVDFIRQQSPCRVFMEACGGAHYWARQFAALGHEVKLIAPQFVTPFRKGHKTDANDALAIVEAGLRPTMRFVPLKNLEQQDLQGLHRIRERLVKQRTQLINQTHGLLQEYGIASGRGQKALKQSVWLALEDGENELTVAMRELLSEQVAELERLNTRLTQLDKRVQQHSRAVAGCRDLQAIEGIGPVVSTLLYCALGDGKAFANGRQAAAYMGLTPRQYSSGGKVTLTGIGRTGHPQLKAALIRGAHAVIKTLGDKTDAKSHWLRALIARAGVNKAAVALANKTVRTAWAVLHGGQSYRRDYEHTVLKAA

SEQ ID NO: 379930 - protein, 341 aa, unidentified
MSDYSYFCGIDLAKNHFSLHAVDQNGKVILHKSVTRSKLLTTIANMPLMRIGVEACGGAHYWARTLNKLGHDARIMAVKYVIPYRTKGKNDLNDAVAICEAVQRPSTRFVPIKSPEQQAILSVHRMREHWVRERTALMNRMRALLSEFGLIIPVGRSSLMKHVPLMLEDAENELPHLARTVIADAYHHLGELNQRIADTEQVFDSFAKVSANVQRVMKVRGIGPQTATAILASIGNGSQFDKSRDFSAWLGLVPKQYSTGGKPRLGRITKHGDKYLRTLLVHGARTVIANLGDKQDKLSQWCRGVLERRGMNRAIVALAAKNARIIWSLLHNQTEYENYAA

SEQ ID NO: 379931 - protein, 343 aa, unidentified
MMEAILECCAGLDIHQETVVACILSGPLDQRPRAKIRTFGTLTDELLELGEWLTELGCTHVAMESTGVYWKPIWNVLEAFDLELLLANAHHIKNLPGRKTDMKDAEWIAKLLRCGLLENSFVPPVEIRELRDLTGYRKKLVHDATAEKNRIYKLLQDANVKLTIHMSDIFGVSGWMLLQKIVDGEVITMDFLETQMKGALKHKSPKLLQSLNSRLRSHHRSMIRLSWEHLLYVEKAIADVEEQIRQNLADKQEAFELLLTVPGVNENAAAIILAKIGTDISVFKSDHSLVAWSGVSPGNHGSAGEKKRQRARSGNSMLKAILCECAWAASVTRGTRLSTRYWS

SEQ ID NO: 379932 - protein, 398 aa, unidentified
MVLKVAGVDIDKDFLHIAIRLDGEVRIVDFVSNVEGIREAVEFLKNLGVNRVVMESTGSFWIPLAEMLSENNISSVILHPGDVKRVGAHKSDIRDAEWLLIIGEVGAITGSYVPPREIRVLRTLVRARMRISDRISSAKQRVLNLLYSRGIRLSAIGGINSRLVRLVLETAVKGGHLDDVDDYVREVLGKIIDALSVEERLLLGLYLTELKTLEALAKRYDELIYEAAKPFMDQIKLLMSIPGVGFFTAVGIIAEIGDITRFPSPSKLSSYAGVVPRLNQSGGRNKGSRLVKRSNRWLRRLMFLVARAAIRSKSALIREFYTRLRRRGKHYLSAIIAVARKILVAIWHILTNGEPWVENIKRVSVPVFSRNGKWVSVLALVKLLVSIDYSDLYDRSWR

SEQ ID NO: 379933 - protein, 380 aa, unidentified
MKRILKIGMDVHTTNYTLCAMEPVIGEEDRVFATIKVTPDYKNILMFIENLKQKLGLNYEYDIQCGYEAGCLGYSLYNQLKAVGVKCVILAPTTMFAPQGVRIKTDTRDAHMIAHCLSYGTYRAVYIPTEEDDSVKEYLRMRNDHKLALKKIKQQINAFCTRHGFCYTGTKWTQVHLKWLKNLEINNTLYREVMNEYMISYEEQALKIERFDKRIEEIASQTKYQEKVKRLGCFLGIKTHTALSLIVETGDFERFAKGNQYAAYLGLTPGEYSSSTNVNRLGITKAGNSHLRQLLIEAAGGICKGAVGHKSKALQARQNGNPADVIAYADKANIRLRSRYYKFIRREKKRNVAVAAIARELACFVWGMMTNKIEIRTATA

SEQ ID NO: 379934 - protein, 347 aa, unidentified
MEFYAGLDVSLELTSVCVVDDGGKVVREGKVPSDPDAIELFLADCGVHLKRVGLEAFSFSAWLFSALDEKGLPVLCIETRHTKAALNAMLNKTDKNDARGIAQLMRTGWFRAVHVKSGEAQTLRVLLTGRKAMLGKVLDMENMIRGLIRPFGLKVGQVSTGKFEARVRELVAGLAAMEQIVEPLLAARAAMRLQFSKLHRMALAAARRDEAARRMMSVPGVGAIVALTFRATVDDPARFRKSVTVGAHFGLTPRRYQSGETDWSGRISKCGDDMTRSMLYEAAIAILTRISKSFKLRLWGLKLMKKKGLKKAATAVARALAVLLHKIWVDGSTFRYGAPKRGRVARA

SEQ ID NO: 379935 - protein, 352 aa, unidentified
MENIALIGIDLGKNSFHIHCQDRRGKAVYRKKFTRPKLIEFLATCPATTIAMEACGGSHFMARKLEELGHFPKLISPQFVRPFVKSNKNDFVDAEAICEAASRPSMRFVQPRTESQQAMRALHRVRESLVQDKVKTTNQMHAFLLEFGISVPRGAAVISRLSTLLEDNSLPLYLSQLLLKLQQHYHYLVEQIKDLESQLKRKLDEDEIGQRLLSIPCVGTLTASTISTEIGDGKQYASSRDFAAATGLVPRQYSTGGRTTLLGISKRGNKKIRTLLVQCARVFIQKLEHQSGKLADWVRDLLCRKSNFVVTCALANKLARIASGPNGTTANLCSITAEIHRFKESLIWFCEY

SEQ ID NO: 379936 - protein, 361 aa, unidentified
MIIIGCDYHPGFQQIVFVDTETGDYGEQRVEHSEGAEKFYRELAAQGKKVRVGMEASGHARWFERLLAELQFELWIGDASEIRARRVRKQKTDRQDALHILQLLMENRFPKIWVPSGENRDLRQLLWHRHRMVQARTRIMNQLQAVALNEGLRCKKRLWREAGREQLESFRLSPWASRRRRDLLELLDRLTPTIAELTAAIEQEVEKCPAAQRLQTHPGVGALTALAFVLIIGRADRFQCGKQIASYLGLVPLEDSSGQRRRLGHITKQGNSLLRFLLVEAAQVTVRSDQDGNAARTKDRQNRHGAKAGGAPVLDVAQGMELWAVNKVQFARGRARTSRWCAVQHRVIDWVSRSPSRGSSK

SEQ ID NO: 379937 - protein, 321 aa, unidentified
MEKDLLYCAIDVSKDKLDLDAAALALPEQLGNDQAGYRRLIKAAKKYPGPVQFVFEATGPYHLGLALALWEAQIPLSVLNPARVRFYAKAQGKAKTDPLDRQVIGDFARCFRPQLTPAPDPVRRELTELLQRRDGLVDSRAAEQNHLGQCRHPMLKSQIRRMMIQLAQQIDQIDRLMKKLVGTSLELQAKVKTLCQIKGVGHLTAVTLLITLPELGTLGRTRIVRLVGLAPLNDDSGKQSNKRFIQGGRKRPRCALYMPALTASRHNPVLKEFYQRLLKAGKLKKVALTAVMRKLLICLNALLRNLADQHRSAQGLCLAKP

SEQ ID NO: 379938 - protein, 371 aa, unidentified
MGKSSKSLFIGLDVHKDTIAVAYAAEDRGTEVVSLGMIGTRQYDIDKLIRKLEAKGATLLFAYEAGPCGYWLYRYLTRRGLSCAVVAPSLIPRKPGDRVKTDRRDAVTLARLLRSGDLSSIYVPTVDDEAIRDLSRAREDAVRDLKRHKVRLKAFLLRQDIRYEGRANWNAAHLRWLARVVCPTPAQQIVFQEYVHAVSEQTDRLGRLGTELQTAVTTWRLYPVVAAVQALRGLNLTGAVTLIAEVGDLTRFDTPRKLMSYLGLTPSEYSSGEHRHQGGITKAGNGHARRALVEGAWAYRYPAKVSRHLQLRLENVPAEVRAIAWKAQLRLCKRYRLLSARGKHVNQVVVAIAREMAAFAWAIARTVPIAA

SEQ ID NO: 379939 - protein, 354 aa, unidentified
MNNIKYIGIDVHQATSVFAVSNREGRIIAEAILETGEIPIIDFLKSQRGTLWVTFEEGTYANWLYDVIKPHVTKLVVCDPRKIRRDGSKTDKIDARKLADLLRSNSLKAIYHGENGSGTLKELARSYIALQQDSTRVKNRIKAIFRGRGIACKGQAVYGTKKRQEWLQKLEDRGAGLRAQRLLEELALLGRLRLEAQKDMVRESRKHSGCKILRKIPGLGSVRAALILAFVMTPYRFRTKRQFWTYVGLAVVTRGSGEYEIVQGKLTRSKKQPLPRGLNHNYNRVLKDVFKAAAITAAGRGPFKKLFDARIEKGIPSNLAVLTMARKISSIALALWKKGEPFDLQRHALSEQTK

SEQ ID NO: 379940 - protein, 314 aa, unidentified
MINNFLGIDVSKDRFDVFLSFISKKGKRETRKRSFKNDDHGFQGLLSFLQKHNVEQVKACMEATGCYSEALAEFLHNTGHFVSVVNPYCIKSYARSKLTRQKNDQTDAEIIADCCQRQEPTRWTPPSPELKKLKHLYRCSVALKDELILVNNHLEKKERLPKEVANAWEDLAMNIAQKIETIKNSVRELLKQHKELLENFQLLLTIPGIGEESAVAILAEVPDIEVFRNARQLAAYAGVIPRNITSGSSVYAKPILSKSGSQPLRKALFFPAIVAKNHNPIIMSFCQRLKEKGKHNMAIVGSAMRKLLHIVLVF

SEQ ID NO: 379941 - protein, 388 aa, unidentified
MIYVGIDIAKLNHFASAISSDGEVLIEPFKFTNDYDGFSLLVSNLNTLDQNSIVIGLESTAHYGDNLVRYLISMGYKVCVLNPIKTSVMRKNNIRKTKTDKVDTFLIAKTLMVQDSLRFITLEDLDYIELKELGRFHQKTIKQRTRLKIQLTSYVDQVFPELQYFFKSGLHQNAVYALLKEAPTPNQIASMHMTHLANLLRHHSHGHFKKETARELRVLAQKSVGINDSSLALQITQTIEQIELLSSQLFNTELEMCNIESCLHSVLFTIPGIGIVNGGIILGEIGDIHRFSSPNKVLAFAGLDPTVYQSGNFQAKRTRMSKRGSKTLRYALMNAAHNVVKNNQTFKEYYDSKRAEGRSHYCALGHCAGKLVRVIYKMLTDNVEFNLI

SEQ ID NO: 379942 - protein, 348 aa, unidentified
MQSKAQVKSIGIDLGKTTFHLVALGTRSQVVIRKKFCRDQLLQYTANPCIIDRDGGGSRVTLLGRALREQGHEVRLIPAQFVRPFVKSNKNDYRDAEAIAEAVERENMRFVPIKTEDQLDLQALHRVRDRLVARRTSVIDQIRAFLLERGISFRKGPASLRRQMPEILENANTRLSTAMRRLLDFLWQEWKGLQLQIETLNTQLEQIANCDPSCIRLQQIPGVGPLVSTAVVSAIGNGAAFKKGREFAAWLGLVPRQSSTGGKAKLLGISKRGNPYLRRMFIHGARAAVLRVKPKESILGNWMSKLETRAARNVVIVATANKLARISWAVLASGENYHPTFSALALSH

SEQ ID NO: 379943 - protein, 418 aa, unidentified
MNAEYAVLVGLDWADQKHDLCWRETATGKIHTRVLEQRPERINEWIVELIAKYPGRRIAVCLEQSRGPVVYALMGYAEVDLYPINPLSMAEYRKALRPSGAKDDPSDAALLLDLLERHRDRLQVWRPDTEPTRLLRSLCEDRRKAVDARTALCNSLGARLKEYYPQALELVGEDLGSELGCALLLKWPRFEAIAAARADTIRRFYYALHCRSEQQIQERLELIATSRPLTTDGAVVEAGIRWVQTLVAQIRPFNRAIKAYDERIAELFKTHPDGFIFASFPGAGKQLAPRLVAVFGTDRSRYETAVNLAMYSGVAPVIERSGQQVWIHWRWHCPKFLRQSLVEFAGHSVMFSAWAKVYYQEQIKRGKRHPAAVRALAFKWLRILFRCWKDRTPYDEAKYLAALQRHGSWIVTALKNVA

SEQ ID NO: 379944 - protein, 362 aa, unidentified
MRIIGCDLHARQQTLAMLDTTTGEVVEMTLKHEGDNVREFYSSLPRPVRVGIEATGSMQWFVNLMEELGIECLVGHPAEIRAAEPRKQKHDRRDADLILKLLVENRFPAIWLPSKELQDLRSLLRHRHQWVRMRTRIQNALQSIALANGLRRGPSLWSHDGQNTIASLPLAPHTAYRRSELQTLYAKFDAEIEKLNQRVEEQACGRAGARLLMTHPGVGPVTALATEVFLGDPARFADSKALASYVGMIPREYSSGGRQRLGGLTKQGNPLLRFLWGEAGAHAVRRDPELQRFYRRKVIQKGFGKASVAVARKLGIRLWIMLRDQIEYNEFCRRGQKQQKSSDACAGMPETRYGAKSHRPVD

SEQ ID NO: 379945 - protein, 350 aa, unidentified
MRFYKNHHQFYIGIDLHARNMYVCVINNLGEKVFHKNLPCSVENLEIIINTFGNDIVVGVECIFTWYWIADFCLERNIDFALGHALYMAAIYKGKTKSDKIDSEKIADMLRGGFFPLAYAYPKQTRAVRDLLRRRLYYVRQRAELSVHLQNTNHQYNINEPLTASKIATKKYRDTIGEKFSDPAIVDMVDADLYLYDQYHLIISKIERQINDLVKLQLPQELKILQTIPGFGFVIPLTILYEIGDVSRFKDVGHFLSYARLVKCTHDSADKKQSGGHNKIGNVHLKWAFSEAAVMILSGNPEAQKWHERLVSRYGKAKAMSIIAQKLGRTVFYILKRKEPFDEIKFYTGQ

SEQ ID NO: 379946 - protein, 355 aa, unidentified
MDSRKYIGMDVHKESISIAVMNGAGKIVVECVIETKASMILQFIDGLRGDVHVTFEEGTSAAWLYDLLKPHVTKLVVCDPRKNASMREGNQNDKIDARRLAELLRLNHLNPVYHGEHGLRSLKELVRSYLTITKDLGRVMSRVKAIYRSWAIPCTGKQVYAPRHRAEWLGKIGEPGVRRRAEFYYQQLDALRTVRQEVRRELLAEGKKHQAWKRLCQIPSIGPIRSAVLLGILQTPHRFRTKRQLWTYSGFGIETQSSADHRSVNGQLERVKKQSSIRGLNRNCNHDLKNLFKGAAIVASSKPGPFQEFYTALLTKGIRPEMARLTLARKIATIALIVWKRGACFDAQHLKPQTA

SEQ ID NO: 379947 - protein, 345 aa, unidentified
MSAEYDGHQVVGIDLHRHRSVLVRMTEAGERLDTVRIDNDPMTLATEIAKAGEHPQVVLEATYGWYWAVDVLTGAGAEVHLAHPLGVKGFAYRRVKNDVRDAADLADLLRMGRLPEGWIAPPAVRELRELVRHRAKLVAWRSGLKASVHAVLAKQGLRLEVSDLFGVAGRQLLAAAPLDAPYRLRVNALCRLIDALDFEIRAVGGPLRVALAEHPGFTAVQAVPGVGPVLAAVFVAEIGDVHRFTSPAHLASWAGLTPKHRESDTVVRRGPITKQGSTLVRWAAVEAAQGARKAGWRSEHRAAIAERRGRNIATVAVARRLLTLVYYGLRDGHIRALDQARTVAA

SEQ ID NO: 379948 - protein, 341 aa, unidentified
MDKTLYCGVDLHSNNAMYVITDHQDRPLFKRRLPNALAVVLEALEPFREHLKVVAVESTYDWYWLVDGLLDHSYPVVLANPSKIDPYDGIKEADDLTGVAFLARLARLNILPTGYIYPAADRPVRDLLRRRRLWVRHRVALMLSLQTLAMRQSGQSVGWRALRRLSEDQRRLLVGDHDCLAFVTDQQIELVELLNERIKRFEDKVLEHACLRPAYECLLTMPGVGVILGLTIMLETGPIERFKTVGDYTSYCRCVRATHRSNGKIKDKHNERNGNPYLAWAFVEAVHHAIRSCPSAKRFYDRKLAQRNGALATKALAAKWTKAAYYMLRRQESFVEARIFG

SEQ ID NO: 379949 - protein, 406 aa, unidentified
MFIGWDWATDTHDVTVMDKSGKRIDRWELAHTEEGFAKTLARLRKHGAPADLPVAIETTRGLAVDRLLAAGHPVVPVHPNAFHAMRPRWGASKAKTDAGDSMKLADYLRTDGHLLPRLEPTEQATTDLQALTRTRADHIEAKVAAVNQLAALLDAYWPGGKAVFAELDSDIAMGFLEKYPTPASAAKLTAGRLQAWCKRRGYSGKKPGSVLIERLRAAPDAASRLSEAAVEQLVRVQVQLVQGIRATIRTLDRAIAEALETHPYAPLFATMPRIGKVSLGQVIGEIGPLLERAQTCEQLIAEAGVVPVTRASGKSRVVAFRFATNRRARLALTVFADNSRHGSDWAAKIYNDARARKKRHPHAVRILARAWLRVMWACWRDGACYDPDIHQANGKVTPAAKEPLAA

SEQ ID NO: 379950 - protein, 404 aa, unidentified
MDSPTRYAGVDWASRAHAICVVDEHGTALERFAVEHSGPGLRTLGRRLAKAGVARVAIERPDGPVIDALFAAGLEVVVIASRHVKALRTRYGTAGNKDDRSDAYLLADVLRTDGHRLRPLQLDSRATVTLRATVRARKDLVRTRVRLVQQLTAHLELVFPGAVGLFADLDSPIALRFLLRFPSAAKAAWLSPKRLGAWLRAEGYPGRTSADELCRRLAVAPLGLTGSEAEARAAVTLAFVRTLLTVREQVGELEARITEQLELHPDGAIFRSLPRAGQVRAAALLAEIGDVRERFPTPESLACLADAAPSTRQSGQHLSVTFRFACDKKLRDALIDFVEDSRFANAWAADVYRRAIERKKTHPHAGRILARAWVYVIWRCWQDRVPYDPARHRALQEVLLAQAA

SEQ ID NO: 379951 - protein, 429 aa, unidentified
MGAMSESKVLGQELQFAALVGIDWADQKHAWCLQAADTTQRENGEVEHTPEAIEAWVGQLCRRFDNRPIAVAVEQVKGALVFMLSKYGALHLFPVPPTMSAKMREALYPSGSQDDPRDADLLLELLLQHRDKLRRLSPDSEATRRVQNLVEERRNLGDEKTAQINRLTHQRKIYFPQMLEWFEQLDTELVCTLLERWPTLEELQKVPPERLRTFFRKQRCRYPELIERRLVGIRQAIAAIRDRAVIEAKSAVVKVNAQVIRSLVRGIADLDRKIEEAAAAHPDFFIFESLPGAGAVLAPRLLATFGSQRERYASAEEVQTYSGIAPVMKRSGKKKWVHFRWACPKFVRQSFHEWAGHSIAHSQWARSYYQQQRERGKGHHAAVRGLAFKWIRIVFRCWKDRAVYDESRYLTTLAKRNSPLTAVPGGTML

SEQ ID NO: 379952 - protein, 352 aa, unidentified
MKYYIGCDAHKKYSVFTGISEAGEIIPAKRVEHEKQKFRSFLETLPTGCEIAIESVGNWYWLIDEMEKAGHKPSLVHAGKAKLMMGNINKTDKLDARGLAVLARNGTLPAVWIPPGELRDQRELPRMRLVMVSMRTKLKNRIHATFAKYGITFEEVTDIFGGKGRRLLEQALAELPSETRHSVEEQLQLIDQVEQSIKGAEKRIHSVIKEDHAMQNLKTLPGVGPILAITIALEMGDVDRFPTGEKFASYAGKVPRVSSSGGKTYYGKVRPDVNRYLKWAFTEAANAIVLQQHRLGDCHVLRLYWRIHQHKGHAKAITAVGRHLAEAAYWMLKNDEPYREPGLKMMAPATRE

SEQ ID NO: 379953 - protein, 386 aa, unidentified
MATPTTPRMTQDSLSQSTLYLAFELGKNTWKLGFTIGMAQQPRERTIPAGALETLQKEITRAKQRFGLPEDACVVSCYEAGRDGFWLHRYLAAHGVTNHVIDSASIEVNRRQRRAKTDRLDVHKLLTMLLRHMAGERKVWSVVRVPSVEEEDRRQLHRELTTAKCDRTRLSNRIKGLLAGHGLQLVLQGDVDAQLDQLHQWDGSPLPPALLSRLKRAWQQVCFLTAHIQTLEAQRRAVLRRREDAGVDQVRQLFTLRGIGVNSAWLYVMEFFAWRDFQTPKQVGALAGLTPTPSQSGQSRRELGIAKAGNRHMRAMAIEIAWAWRRFQPTSALSQWDEQRFGHGSARLRKIGIVALARKLLIALWRFLKTGVLPEGAVLKAETLGQ

SEQ ID NO: 379954 - protein, 358 aa, unidentified
MNKFIFVGCDLHDKNMLLKIAHDRTPATKRSFGNDADGRRALIAELKKRSAEAGGARIVFAYEASGLGFGLHDELSEAGITCHVLAPTKIARSEKHRKSKTDEKDAERILELLRGHYLAGNPLPAVWIPDKQTRDDRELVRARLDAQEKCSTVKTQIRTLLKRNTIAKPKNAGAGWTKTYRNWLKALSECDAPLACGARQNLASLLRQFECLEDEVHTLDVQIVALSEAPRHAANVKKLTVLSGVGILVAMVFITEMGDAARFANRRQIGAFLGAVPSSNETGESNDRKGHITRQGPPRLRHVLCQAVWNRVRFDQHEKAVYERIAAKNPKHKKIAVVAAMRRLAIKMWHLIQVKKPA

SEQ ID NO: 379955 - protein, 389 aa, unidentified
MSEAPVEASVSATSKTILHCALELSKSCWLLAIQYPDRSQPSQYRIKGGDAEGLMAQLLISRQRCAKSTGEVPSIVLCYEVGYDAFWLARFLIARGVECLVVDPASLQVNRRGRRAKTDRIDVAMLLRALIGWCQGERHVWSVVHVPSVDEEDVRRSHRERGRLIHERTSHINRIKGLLFAQGIRDLNIKAHYGKLQLDQLVTGDGRRLPPRLVNEIAREIARLALLQEQIAVIDRERDEAPTPCKATEKKRIQLTQLKGIGPAISAVMSREVYYRQFNNRRQVASFLGLATSPYDSGDMERSQGISRTGRGQVRAIMIQAAWLWTKHQTKSTLTRWFVERTKGQSGRVKRIMIVAVARKLAIALWRYVEQGLVPQGAVIELPRTKSAR

SEQ ID NO: 379956 - protein, 374 aa, unidentified
MDAIVERCAGLDVHLDTVVACVLYGKLDIKPKKEVKTFSTTTKGLLELLDFINQKECTHVAMESTGIYWKPVWNILESGAFDLIVANAKKIKNVPGRKTDVKDAEWIASLLRCGLIEKSFVPPERIRDLRDLTRLRKELLGEVNRNKNRIHKVLQDANIKISSVLSDVFGETGKSILNQIIDNQCITEEFIYSLYEGRGKSKLKSTPMEMYEALNGKIRGHHVILLGMHNSNIVFLEKQINELEKEIDILLQKERDSLELLETIPGISKISASSIIAEIGTSMDVFKTEKHISSWAGLCPKNNESAGKKKRSGIKSGNNWLRSMLCECAWSATKKKDSRLWKRLQSRRNFCRMRELTEWKYMRYMKDIFLISLH

SEQ ID NO: 379957 - protein, 388 aa, unidentified
MPAAERPVAYLGIDVGKSSHSACALDAGGGVAFRAELANRPDDIDRLLERAGSGALVVVDQKRNIGALVLARAHAHGNPCAYLPGYAEKQARGMFPGTAKTDAIDAEVIARTALGVPRALRPAPEEPEGTASLRILSSQREFASSARTRAKNRLRATLLEADPALEGAVDPSSRWQVSMLAEFGGAAGCSAAGWRRFSNAPRRAGAPAAGARRLWEALLASSRSGRRLPAGEDVAVRMLAREIASLDADIEELDSLVADSLAGDEVYECLLTVPGIGPKTAAALVTSIDISAFRGHDELASYCGVAPSDRRSGSSIRSTSPQRGGNRQLKNLLIFSCNSLIGTDNRFGRYYGECRARGMRHSKALKAVARKRLKVIYAIMRDAVPYAA

SEQ ID NO: 379958 - protein, 346 aa, unidentified
MLYAGLDLSRKRLDFHLLDGDGTTVDVGASPPDADGLSQLSQRLARHGEPIHAAIESMNGARFVHDRLELTGWQVEIADAQKVKGLAPLACKTDRIDAWVLAELARRDLVPAIWLPDPLVRAERERARWRLHLVRHRSSLKQRVHAVLLTHGKPCPVSDLFGVRGRQLLGRLGLPEPWQGTIEASLRLIDELEREIGGCERDLRRLGADHRYVPLLCTVPGISWVLAYTIAAEIGDINRFATPRKLAGYTGLCPRVYQSGERDLRGPLAKQGPRYLRWALVEAATHACTDNAYRDRYQQTKARIGKQRGAKVAQIDLARRLTEAIWHMLTRGETFAPKGATDPLAA

SEQ ID NO: 379959 - protein, 366 aa, unidentified
MALELSERTWKVLFASPAGRRRERSVAARDVAALVGEIAAAKRRLGLPAQARVVSCYEAGRDGFWLDRALRANGIDNLVVDSSSIEVARRARRAKTDRVDLVKLMGLLLRWVAGERKVWSVVRVPDTQAEDIRQLSRSIERLKGEHGRHVTRIKALLATQGLKLARIGGAGWGKRVGELRCWDGSALGPWLQRDLVLEGERLAVVAEQLAALKAERDRLVKEGREAAAVKARELARLGAIASESSFVFATELFGWRTFSNRRQLAGSVGLTGTPYNSGQSAREQGISKAGNKRMRTMLVEIAWCWLRYQPASALSRWWRERFANTGGRARRIAIVALARKLLVALWRYLERGVVPQGAHLKTRAAA

SEQ ID NO: 379960 - protein, 351 aa, unidentified
MLYAGVDTHKKYSRIVVTDNSGAKVAQATLQNTQDSFRDFFHQFNEPTRSVLEAGNTWGVIYDILEDIGVDPVLANPLKTRAIAEAKIKTDTIDAQTLAALLRADLIPTVHVPSQTVRSHKNLLRQRFWLVELRTRVKNRTHNILDRNHVTLPDCSNLFGKAGRQLLDQIAIPNPDNCLLKANLELLDHINEQIKSAEKWTKEAMEGHPGLAVLRTIPGLGKILSAVVALGIDDISRFSLPDKLCAYAGLVPTTYASGGKIRHGNLLPSCNRWLRWAYVEAAWVAQRTSPYCYSYFERIKRRKGANCANTALARRLCEITWHCLTEQRSYEERTPRRIGSNQPAAFESSWS

SEQ ID NO: 379961 - protein, 390 aa, unidentified
MQVKADRPEAPSAIRSDLGAIFVSLELSRSIWLITSLSPGAGEKMSKHSVPAGDIGALLARFSEMKQKVFARTGKSFPIIVIQEAGLDGFWIHRVLQKEGIESHVVDPASIATSRRRRRPKTDRIDGEALLRALLAYKRGEPRVCAMVKAPTPEEEDRRRLCRERKVLTTERVQHVNRIKGLLFCQGVSGYEPLRRNRRQRLDELKTGDGRLLPDHLKAQISRELDRLELLLEQIKAVEAERNALFAVAKAAAPTAAPVAMLLDLKGIGPEFAAVLWMEAFFRSFANRKQIAAYAGLAPTPWQSGSIDREQGVSKAGNPRLRTTLIQLAWLWLRHQPQSALAIWFKERVMCNGGRFKKTTIVALARKLLVALWKYVTAGVVIEGAVMKTV

SEQ ID NO: 379962 - protein, 329 aa, unidentified
MSKQLMYVGVDVGKDEVWATLATTKPKSFAQSTAGVQALRAWMRKNATGARVHVCMEATGIYSQALALRLLTGADDLEVSIINPAQIKAFARAQLRRTKTDQVDAAVILAFAETQTPRPWSPEPSALHTLSRLVAHREALTEDLRRWTNRQHAASCDPRVVQAVDRSQAAIVRILTRELTKIEQALAALMAAEPTLAEQRAVLQTIPGIGPVASLELMAAAKGCLTARTSRQVTAHAGLAPAHRQSGSSVRGHSQIAKQGNVRLRTCLYMPVISAIRHNPVIRMLYQRLRTNGKPKKVALIACMRKLLVIARAILISKKPFDPAYQPLT

SEQ ID NO: 379963 - protein, 394 aa, unidentified
MKLVGIDVGKNSHHFCVMDKETGELNVTPSSFSNNKEGFDFLINSLKPYSKKSILLGMEDTGHYHVALLKFLLSNGYTVALINPKTTDLTRKMEGGITKNDKLDTITICDVLDTPERKKQYRITKVDRFDLYEQRQLTRHHHNLKEELNVYCNRLQKSIDLVFPEFNTLFGSKYGVVYMNLLKTFGSAEAIASTDIRTIRKCFEIKGRGGRISLTPEKLKECAKNSIGISSEVETIQIKHLVSQIMLIKEQIAEIDKKIEEFSIKNNSPILSIPGISHFSGTSILAELGDIGNYSKPSQIIKFAGVAPYHYESSQYNAQHTGITKKGSKYLRKTLYQIILTVINNNPVFKKYYLLKISQGKGHRCAQGHCIRKLLRIIYHLLETGQSFDPALLR

SEQ ID NO: 379964 - protein, 459 aa, unidentified
MDLLVERPGALDVHKESVTACVRVPREGQRVQEVREFKTTVRGLLGLRDWFTESGVTHVAMEATGVYWKPVWAILEDDFELLLCNAAHVKNVPGRKTDVGDSQWLCRLLECGLLRASFVPPKPVRELRELTRRRKTLVRDRQREAGRLHKALEDTGIKLDCVSTDILGVSGRLMLDALIGGERDPAKLAGLAKGRLRVKNSALVEAFEGVRFGDQHALLIGGILRHIDFLDAEIDALGSAIETHITAQSQPARDADQTGADAGTARPFELAAQLMCSLPGIQQRTAQTLIGEFGIDMSRFPSEKHFVSWAAQCPGNHESAGKRRSGRTRKGPEHLNTALNDAAMGAIRVKDGHFARKYRRVKARSCHGVALGAVKHSLLIAIYHMLKNGELYRPPIVHPDAERKQQERTTKRLIAQLERLGHRVCTRNCVGTSERDRHVYDNEELTEQQCRVDAGSGAG

SEQ ID NO: 379965 - protein, 373 aa, unidentified
MMEVGKMSKAETGRLCVGVDLHKTQFTVCALNEEGEYLLEKQYPTKEEGYSEFAREMHRFEEQGCSIELAVETTGNARFFKNRMESEFFAVKVVNTNRFKVITMSTKKTDANDAATLAFYLMKDMLPEAHLCSQTSEEIRRLLKTRSVLVQSMVKIKNQIHGMMLGYGIETKAAQLQSKRKRQELINDLEDHNFSAYTAPSLKVMLKILDDLSAEIKGIEKLLEEMVASNEDVALLMTVPGIGINTATVIAAYTAELERFEGNYKKFASYVGIIPSVHNSNETTHYGRITKHGPQELRTAFVQAALGMIRLTNVSSEWRIIKEYQRRKGDKGSGRAIIALARKITRIVFVMLSKREGFNPTLMRYEQEIQQTA

SEQ ID NO: 379966 - protein, 295 aa, unidentified
MNTRLSKKQMFFNKVKLTKDDNLYIGIDVHKESYGVALWLNDTPAIDFIMPADNEKLLKLLEKVRIALKKIVYEAGPTGYTLARTLQKANLPTTVVVPSKTPRQSARDSKTDQLDAKTLARYAAKGLLRPIAIPTRRQEADRQLTRTRDQLVSKQSEVKLQIKSFLLQHGIEQPPAVRAWSANAARALDALKLSKQLRFCLDLLVQELQFQQNQLTTMEEQLKQTFDNDRHAREVALLKTHPGVGPVIARQYTAELFNPKRFKHTTEVAKYVGLAPMSDVNNKFSLTTIISTVLW

SEQ ID NO: 379967 - protein, 330 aa, unidentified
MNSQGGAPGGLERPNCGIDISKAHLDVRLGDEDLRLTNDSAGWGQTIAKLKKADVDLVVVEATGGYERGLVCAMQEAAITVARVNPRQARDFAKSMGVLAKTDKVDARMLRDFADVLTRHPGRAKYVTPMVEPERQALLELVTRRRQLIEMRVAESNRLDHAGKLTKRGILSVIKLLDKQIKAIDDEIDDNLEKHFKPQKDLLDSVKGVGPATIMSLVAALPELGRLDRRSIAKLVGVAPLANDSGQRRGKRSIWGGRASVRSVVYMAALVATQHNPVISAFYARLLAAGKPKKVALVACMRKLLTILNAMLRDAKSWDAAKALNLAPAA

SEQ ID NO: 379968 - protein, 337 aa, unidentified
MEYKRVAIDTSKHVFTLHAVDASGRPVLRRDLSRARLVPFLSSLPPTEIALEACGSSNHWAREAVKHGHQAKLIPPQYARQYRKRGKNDRTDAEAINEAADRPTMRFVPVKSEEQQAASMLMKTRGLLIGQRTQLVNAIRGHAGEFGIVVARGISNLRELREKIAASSIPEAAREAIELLAAQADDTDARLTEIDRKLATLHKSNEVSQRLAVVPGIGLQTALTLATTVDAATFESGRHFAAWLGLTPKQHSTGGKQRLGGISKAGNERLRSLLVTGAMAVIRHVRPGGRNATPWLLKLLERKPRKVAAVALANKMARVAWAMMARGEAYRRSPVAV

SEQ ID NO: 379969 - protein, 411 aa, unidentified
MELVVARCAGLDVAKDEVVACVRVSDGRGGRRQEVRTYLTFTSGLEALADWLAAEAVTQVVMEATGQYWKPVWQVLEERGFALMLVNARHVKILPGRKTDVGDAAWLAELLEHGLLRGSFVPPATIRELRDLTRYRKRLIQAHTAEVQRVQKTLEDAGIKLDSVAADVVGVSGRAMLAALVAGERDPQVLAELARGRLRTKLPQLRQALRGRFGDHHALLVRLALEHLAQLEGTIAALDRRVEEVMAPFARARDQLDTITGVGKRAAETIIAEIGTDMTVFPTAGHLASWAGRCPGNNRTGGKRRSGKPSKGNRWLGEVLTECAWAAARSRDSYLSAQFWRLARRIGKKKAAMAVGHSILVIAWHLLTDDCDYADLGGDYFVRRDADRARQRAVAQLQALGYQVTLEPLAA

SEQ ID NO: 379970 - protein, 345 aa, unidentified
MNRTTIAVDLAKSVFQLSVADGDWRVQSRHRLTRAQLVRFFGERQPCEVVMEACGSAHFWGRWLCSLGFTVRLLPPQYVRAYVRRNKTDRADADALLDAARREDMAPVPIKSEQQQAIASLHRLRSAWMATRTARINAIRGILRELGVNLPLGARKVPATVLARLAEPASSVPASLQPALVTACAEIRELEQRIVETERQLARLAAELHVAARLLSIPGIGLLTATALVAAVGEISRFPSARHFASWLGLTPSESSSGTKRRLGGISKQGDRHLRTLLIHGGRAVLAAAHRYKEVDHLRGWALAVERQRGRNRAAVALANRLARIAWAVWCHDRDFESRPLQRAA

SEQ ID NO: 379971 - protein, 321 aa, unidentified
MNYVGIDVSKATFVVAYSSAKGSETKTFENTTKGVHKFIQTITPEDTHCVMEATGNYSMLLVYLLSKAGITVSMENPLKIKNFARVMLSVVKTDKIDARMIAMYGEKMNPASFKLRSDSLMVLKQKRTVLRQLKKQLNANTNLQESMEALPFIDSVCKKILDKTVKFLRKQIQEREEELSSLANIEYKKQMDLLTSIKGIGVTLATALIVATGGFTYFDNAKQLTRYLGLSPTYQQSGTFVNLKGHINRNGDSYLRSQLYVAAFSSLRCNTECKACFDRLRANGKPGKVAVVAVANKLVRQAFAVVTQGKEYVDGFISAKK

SEQ ID NO: 379972 - protein, 420 aa, unidentified
MKAYNVDDFAALIGIDWADKKHDICEHPKNTKQYHYTIIKHKPEALHKWAMELKLRYPDQKIAVVCELKKGPLIYALAKYDHLVLFTVNPSAVANYRKAFTPSGAKNDPTDAFIQVEMIKLHIDKLSVIVPESTSMRALAQLVEYRRNVVQDGVDLSNKITATLKNYYPQALEWFKEKDTLIFCDFISKWPSLTAVKKARKQTLLDFFNRHNSHYETVNNARLLSIKEAVPLTEDEGVIAPNQLLVEVLITQFKVLLIGIEQLDKAIKQLYKKQQDKAIFDSLPGAGPQLAPRLLVAFGHNRERYTDASQMQKYAGIAPVIESSGKKTWTHWRYSCPTFLRQTFVEWAGFSIRYSFWAKAYYEQQKSKGKPHNSIIRSLAFKWIRIIFRCWKTKTPYNESKYLEALKQRGSPLLKFAINS

SEQ ID NO: 379973 - protein, 430 aa, unidentified
MKNFQLDDTFEGYCRLHDILSQFLAAHQDATLFAAVESTGGYENNWYNALVKFQSTLNIQTARLNPLGVMYNSKADLKRNNTDKISAQNIAEYLITHSEKVTYQQQDQMATLRKQWGFIKMLTKQSTQLLNQLESLLYTANTELLGYCKNGTPDWVLKVLLKYPTAAKLAKARVPALARIPYVTSERAQELAISAKRSVASASDRITEKLVAATVKQILNLKKTIDEQAELMVKECSMPEVDILKTFTGISDSSAIGLILEIQAIERFKTVKKLASFFGIHPVYKISGDGSGSFRMSKKGRKEPRKILFMVALTAIRSNPLIRNIYLERTEKGMEKMAAIGLCMHKILRILYGMLKHGKPFDPQIDLDNRQRSVKKKPAGRRDKSRRFQDYDSNAPISRRQNKKRLERKQSHSVNDTKFGINAPVPEFAS

SEQ ID NO: 379974 - protein, 359 aa, unidentified
MTKINQLDFTGTTIFCGLDVHKVSWRVNVRDTELELKDFTQPADALLLHKHLTKNYPGARYRAGYEAGFCGFGIQRQLAALGIECVLLNAADIPKGDKDRRQKNDKRDARSISHELSIKKDLKSLYIPTPEWEHARTLVRNRQQQISDSTRYKCRIWHFLHFSSLPAPDKAETGQYWSRKFIKKLEDMDCGSSELKTALQIKLQDYLHKRSLLLQSTRAIRSLYKQDAYWQLMQLILSIPGIGEINAAIILFELQDILRFKTFDKLCSYVGLVPDTDDSGDTKRDKGLTHRRNTYLREALIESSWVLIKKDPAMLMKYKDYCKRMHKNKAIIKIARHLLARINYVLRKKTEYVSGLVAG

SEQ ID NO: 379975 - protein, 312 aa, unidentified
MTAIVPTIGIDVSKDRLDVAVHPSGEQFSIDNDAAGWRVLVRRLKPIGARAIGIEASGGYERGAIGALLKAELPIRSVNAWKLRQFARAADLLAKTDRLDARAIAWFVASLPSREARHDPAVAHLAELVQARRQLVDALQQVGNQTEHLHDAALRRMQARRIRQLERDVAQLDLRIGQAIETTPDLKTRHDLLCSMPGVGPVLAATLLALLPELGSLSNRSIGSLVGVVPYAFDSGKMRGLRCIFGGRAAVRRVLFMAAQAGTRFNPTLKLFKQRLIAAGKKPKVAIVAVMRKMIVTLNAMVRTNTPWRTAS

SEQ ID NO: 379976 - protein, 319 aa, unidentified
MATVSIPTTPAGYQDLLAWARGLGEVEAWGVEGTGCYGAALTRFLVAHGQVVLEVNRPDRQARRRRGKSDPVDAEAAARSVQAGEVTTVPKAGNATVEMIRSLRVARQTAIKARTQAINALKALLVTAPVELREQLRGRSAAMLVRQAAALEPGPLVTPTAAAKLALRCLACRYQALHAEVATLDTELARLVAKAAPGLVARFGVGPDSAGALLVAAGDNPGRLRSDACFSMLCGSSPIEASSGKTRRHRLNRGGDRQANAALYRIVVVRLRWHQPTKDYMARRLTEGKTTKEIIRCLKRYVAREMFTVLNQTVPTPAT

SEQ ID NO: 379977 - protein, 354 aa, unidentified
MNYVGVDIHKRYSVLVAVDERGRELARGRISGNSVHAFAQFFEALQGPGKVVLEACWNWGRIYDVLSEIEQVEEVVLAHPLKTRLIAEAQIKTDSLDALALATLLRGNLIARAHVPSKATRARKELLRQRLYWARLRRRVRNRVHAVLDRQRELEMPQCSDLFGCKGLNALSKLRLAEPDATLLSEELDLLKLIDGQIKAQEGRIVAFNANEQATQYLQSLPGMGKILAAVAAAEIDAIERFDGAAKLCAYAGLVPTTYGSGGKVHQGHLLKSRNKWLQWAFIEAAWVAVGCSSYFGGIYRYHRARGKKANIAITIVARRMCRIAFTLLKERRNFQEQHRTFPGRSAVRLTAAA

SEQ ID NO: 379978 - protein, 362 aa, unidentified
MTKHSTNPKTRKTLATTRSIGIDLGDRFSELCVLDGEGALVSQARLRTTRAALQEYFGAQAPARVALETGTHSGWVSRIAAVCGHEVIVANAREVRKIHQSNRKNDRADAEILARMVRFDPQLLAPIVHRSEQMQTDISLIRARDALVSARTKLINAARGLTKALGGRLPRCSSPCFAQRVREQMPEELASTLAPLVAAVDALTEQIRSCDQRLETVAQERYPETALLQQITGVGTLTSLAFVLTLFDKERFASSRDVGPYLGLVPRQDQSGDRSPQLPITKAGNGYMRRLLIGSAHYILGPFGPDSDLRRFGQRIAGRGGKNDKKRAIVAVARKLAVLLHRLWMTAEIYDPLRLGKVEAAG

SEQ ID NO: 379979 - protein, 417 aa, unidentified
MEGLSPVHRRVAGIDVHRMVHAVTVLVEQPDGSISRSSREFGGFKRDCRALAAWLVELGVELVVMESTGIYWKSVHAHLERAGINAWVVNAHFIKHVPGRKTDMADSEWLAVLARFGLVRASFIPPQDLRELRLVSRYRRKLNAMRASELNRLHKILDDAGIKLGAVVSDINGVSAREMVQGLIEGQAIDTLLGHARGVLKRKNEALAASLEGDLSARHLFVLKHIHAHVGALHQELAEIDEYLLQAMQPYAWAHALLQTIPGIDEIAAALILIEIGDDMARFGSPERLASWAALCPGNNESAGKRKSGRTRHGNNVIRYILCECANAARMTKSTLAAKYRSLMVRKSHKKAIVAIAHKMIRLIYILLTRKQPYLDQHIDYAAESAKKNAPRWIKQLKAIGKWPSTSSPSMPATARA

SEQ ID NO: 379980 - protein, 348 aa, unidentified
MTLTIVETRAVTGGVDTHADTHVAAALDPIGGLLGVEEFPATPAGYAGLLGWLGGFGTVCLVGIEGTGSYGAGLARHVTAAGIRVVEVDRSDRQDRRRQGKSDPLDAVSAARAAQSGKARGAPKGRDGAVEAIRALMVAKRSARAERTQTINQARSLIVTGPDDLRARFSRHTPADLVTGLAGLRPRPGDVPGYATRMALRELGRRAEFLDGQLGRLDELIVPLVTGRAPGLLGLYGVGPDTAALLLIAAGDHPGRLRSEAAWAHLCATAPIPASSGKVTRHRLNPGGDRQANHALWRIVITRMSSHPPTRAYVERRTEEGLSKKEIIRCLKRYVAREVYPHLRPGAG

SEQ ID NO: 379981 - protein, 398 aa, unidentified
MERVWAGVDIGKEHHHVVVIDADGARMLSRRVANDEPTLLDLLGQVTALAERVHWAVDLSTGGAALLLGLLVAHGQQVFYLSGNQVSRAAGGYRGEGKTDAKDAAIIADQVRMRRDLAPMRVDDELIVELRMLVARRRDLAGDRVRLVNRLHEHLLGISPALERVLNLTNRGPLVLLTHVQTPAAIRQLGPAGLEQWLRSQKVRGAAALAATVTAAANSQRTTLPGEQLAAQLVADMAKGVMSLDEQIAQTDTLIEGRFHRHRHAAALLSMPGIGVLLGAEFLAATGGDMAAFTSADHLAGYAGLAPAPRDSGRISGNLHRPRRYHRGLQRVFYTSALVSIRYNDQSRTFYDRKRSEGKRHTQAVLALARRRVNVIWALLRDNRCYQPAPPPLIAAAA

SEQ ID NO: 379982 - protein, 362 aa, unidentified
MSTITIGVDLAKSMFSACEMGGMGHVLRRQDLRREPFGLWLAQLPPGTVVAMEACSGAHHWARRCLDHGLQPRIMAAQFVKPYRKSSRSKNDRNDAEAIATAARQGNMRFVPVKSIDQQVRLSWHRVREGYKVESLATGNRIRGLLAEFGLIVAQSDLALLRLLADLDAQVGLPAEFKELLRDLAHHWKQLRLHFDACSARIEAHARQDERCIRLRAIVGIGPITADAAVATVGKAREFKHGREMAAWLGLVPTQHSSGGHARLGEISCHGDAYLRTLLIQGARSSLQRAKAVATEKATPEQLWIRTLDRRMPFGKVIVAIANKHARQIWAMLAHDVDYDPYACLNHPMHQQTREAPTAHAA

SEQ ID NO: 379983 - protein, 367 aa, unidentified
MEKSSKVFLGMDVHKESIDVSVAAQGGEVRWLGQIGGDRVSLLKMVRKQQSKGGERVFVYEAGPCGFWIYRELVALGERCMVVSPALIPKRAGDHVKTDRRDSERLASLARAGELAAIHVPDIRDEAIRDLVRGRDDAVIAQRRVRQQLKALLLRNDIRYVGKTSWTGAHRRWLAELKLPEPAQQITFEEYVDAITVATGRIERLTRAIATEVITWRFAPVVAALQALRGIQFVHAVTLIAELGDLTRFASARQLMGYLGLVPRENSSGEHRRQGAITKAGNSYARRALVEAAWAYRHPARVTRIIATRQTGLPKVACDIAWRAQLRLSAKYRRMNVRHLNHNKIVVALARELSGFVWAIGQSVRPL

SEQ ID NO: 379984 - protein, 344 aa, unidentified
MTTKLMAGIDLHSNNLFCAIVDLEGKRVFEQKLPCELDSVLRALQPFKKRLEKIAVESTYNWYWLVDGLQDHGYPVVLANPAAMQQYDGLKHADDKSDGFFLAEMLRLKILPTGHLCDRAVRPVRDLLRRRMGLVHKRTSLILSLKSLHTRMTGRDLGTGRIKAMEPQEAEKLFDHPADQLITRLDLQLVEQLGQSIQQIEATILATVQSLPHYQVLQTMPGVGRILGLTITLETVDPQRFASPGDYASYCRCVDSRRLSNGKKKGENNGKCGNKYLAWAFVEAAQFARRHDDRCRRFHDRKSAQVNGIVATKALACKLAKAAWHMMRQNTPYDAGRMFPQAKQ

SEQ ID NO: 379985 - protein, 340 aa, unidentified
MDYYAGLDVSLEETAICIVDGCGRIVKEARAASEPAALVAALRGVALPLERIGLEACSLTAWLHAGLSAICIETRQANAAMKTMPNKTDRNDARALAQIMRTGWYRQVHVKSRQCRLWRSLLVARRTVMNEMRTIENVARAILREAGIKLGTPSRAGFAGRVRELAGGDTLVMGLVDPLLTILATMLEQFSRLTKQVLDLVRQEEVCRRLMSVPGVGPITALAFRATIDRPDRFKRSRDVGAHLGLTPARYQSGETDIQGKISRCGDELARTALYEAAHSLLVRSKKWSSLRAWGMNIAKRRGMARARVAVARKLAVILHRMWSDGTAFRFGKEAGPVGA

SEQ ID NO: 379986 - protein, 411 aa, unidentified
METIGERPAALDVHKAQVTACARVPDANGAREQHVAEFQTTVRGLLALRDWLAAHGVTQVAMEATGVYWKPVWAILEDEFDCLLVNARHVKQVPGRKTDVTDAEWLCRLVEAGLLRASFVPPKPIRQLRNLTRYRKTQIAERQREVNRLHKALEDAGIKLDCVATDILGKSGRDMLDALVAGTTDPVVLAELARRQMRKKIPALQEALEGHFDAHHSLWIGAILRHVDFLDEQIDQLSEVIEEQIRPFQGAVELICTMIGFQQRGAECVIAEIGADMSVFQTARHLASWSAQCSGNDQSAGKRRSGKTRNGSKWLDIALEEAAMAAIRVKGHYLAAQYQRLKPRRGHKKALGAVKHSMICAIWHMLSTGETYRDLGGDYFTNRDPERQTKRLVTQLERLGHHVTLEKAVAA

SEQ ID NO: 379987 - protein, 353 aa, unidentified
MEYANRVDFTGQPIYIGMDVHKKSWTVSIFLEHLEHKTFTQPPMVAPLVSYLHRHFPGACYRAVYEAGYCGFWVHDQLRENGIACMVTNPADVPTRDKERRRKGDRSDSRKLARTLRSGQLEGIHVPTRARVEDRGLVRTRQAMVRKQTRCKNQIKSLLFLYGLPVPDAGSSWSRNFLRSLEALRFERDSGNLALKAYLTELMQLRQIIAQLNRDLRALSRTDEYREGVQLLKSVPGISTLSAMVFLTELGELSRFASFDKLCGYVGLTPDTHGSGEKQGIGDITRRCNQMLRSLLIECSWTALRKDPALALAYHCYCQRTRKTKAVVKIARKLLNRIRFVLNHRHPYEMNVV

SEQ ID NO: 379988 - protein, 312 aa, unidentified
MNIRRVQHFVVDGKEIFVGLEDSKKTWKLAVRSEGMLIHQASMEAKYSVLIQYLRNNFPNCTIHLICEAGFKGFNLYDRLTDDGIDCVVIPPHVVTEPKVNRVKTDKRDARRLALILENHDFRDACHVPDRERREDRQISRTLIAMQKDVIRTRNRIRKLLDFHGIEASFPDRWGRDEFRALKKLSLPEPLKISLDALLTQLEELWNHQVTLRTALRKLCRKERYEKAYTIARSLPGIGWFTAIRLVIELGEDLSHFTSGKKIASFVGLTCSEYSSGQTEWKGHITGMGSRFIRATLIENSLSRSRKCRGVR

SEQ ID NO: 379989 - protein, 345 aa, unidentified
MSSIKRLGIDLGKSNFHLVGLDATESTVYRKKLSRPKLIEFITQLEPCTIAFEACGGSHWLARKCIELGHRVKSIPPQYVKPYVKGNKNDFIDAAAIAEASIRPDMRFVPIKSESAQSISACHRIREGFISERTACMSRIGAMLLEFGLSLPTGHKTMKELFFWLGKQKGSSLPEVFLLELQVAHDHYLYLNEHVAQQDQKIKQWVRQNPLCQLLKTVPGIGDMTASQLVMEVGNGAEFKNGRHMAAWLGLVPRQYSTGGKTTLLGISKRGNKRLRCLFVHGARAVLSRLESHDGPFTEWLKKLRGSKPFNVVCIALANKLVRIAWAVLHNNQEFSGKTLQPGLQ

SEQ ID NO: 379990 - protein, 401 aa, unidentified
METVRDNAVRVKRFRELKTTLRTNRQRLLVGIDVAQAEHVIHLRHAHTRVVVPTLTIPNTTRGFTQLWTRIQQAQRSTGCREVVCGLEPTGTYHQAVATFLEAQGADVVLLSSSVAYWNRRTQDGTWDKHDRKDAVNCVDLLEQGKVLFYSQPTGPLAELRHLVKVLRRARTELAACKARWRTTLRPALAPTGDPLPQRLWADLPGVLQAWERAAPGRPAFPKGRLPLGLATACADLGAQVTAVQARITALETALAPLAERLPAYALLRSIPGVGATVAAILLAEIGDIAWFTTFSQLRKLAGLDIVRVQSGQYAGQQRISKCGRGLLRWALYHAAVGMARTAAGRAWLAALKAKRCGDRYAGFKAVVELAAKVLRIVWGVWRSGTPYDPTRAGGLRRQPR

SEQ ID NO: 379991 - protein, 329 aa, unidentified
MSNLLKKVIGVDVGSKFLTLSFLDDEKGEQVLNLPNNERSILSFLSKISPSDYCFVIEATGNYSSRLLHLSIGKGFESSLINCMSVKHFARMKNIITKTDAEDAKLIRNYGEMFRPEFYVPKTQDIEYLDQEIKLLNDLEEEKRRYAVKLKALRFHPVVNPSTEKHYEKRLKQLEKEIKEVEARLPQLQDEEFTETKNLLQSVSGIGEKTSLQLMTATSGFKNFHSSKSLVKYFGLAPRIYQSGKKSYSPGKCRTSKAYIRSILYVCSWTAIKHNQKCKELYLRLLEKGKAKKLALIAVCNKLLRICFSVVKNKTPFQQDFQNKLKIST

SEQ ID NO: 379992 - protein, 340 aa, unidentified
MNITTLGIDIAKSVFHLHGTNKQGKLELKKRLRREQLLTFMKNLPPCLVAMEACAGAHYWARKFQSYGHTVKLIAPQYVKPYVKTNKNDYNDAEAINEAVGRPTMRFVGIKARWQQDIQSLHRARSRLMQLRNTLSSHTRGLLMEYGIVVPRQIGQLRRKLPLILSDVDNELSPDMRALFAGLYAQLQNADKLISEKDKQILSIHRGSEISQRLGEIEGIGPLTATAFISAVGDAKMFKRGRDCSAWLGLVPRQYSTGGKTILGSISKRGDRYLRTNLIHGARSVIAKAGNKKDARSRWIQQLTSRVGMNKACVALANKNARILWAVMASGERYRVSEQV

SEQ ID NO: 379993 - protein, 429 aa, unidentified
MSYRIAGIDVHKKMLAVVVSDVEIDSEYQFERKKFSSNPEQLRALAAWLLEQESEEVVMESTAQYWRPVWEALERYWKPICEKREGARRKSGTLHLAQALSNRGRRGRKRDFPDAERLVKRLVAQELTLSFVPEAEQRLWRTVTRKKFQLRCDRIRLQNQLESLLEEAHIKLSSLVSDLLGLSAQRMLKAIAEGETNPATLAALADKRLRATPEQLCDALGACTELNPVYRRLLKMALEELRLIDEQIGRLDQEMASLLSVHQDAVQRLAEIPGLGVDSAQQIIAEVGPTAATFPSDKCLSSWVGACPGDDESAGVNHSHRSPKGNRHMRRLLNQAANAAARTKGSIFEIVYRRSVPRLGHNQAIGAIAHRQCRLIWLILHQGVRYEERGPAVTKRSKQLRTWKMIRQLRTLGYRIEPPNPEPSRAPAQ

SEQ ID NO: 379994 - protein, 382 aa, unidentified
MQASRKSTPTADHCGTIFVAIELSQKTWLITVHSPDRDQFSRHRLEGGDHAGLLALIEKVRARATQQLGSTPRVVSCYEAGYDGFWLHRLLEAAGISSLVFDAASIAVEQRSRRAKTDRIDGELLLRTLMAHLRGEPRVVRIVRVPSVEEEDARRASRERDRLITEQTAHSNRIKSLLRLLGMAVGNPRRRDWLAWLKRQRDWQGRPLPPHLLAEAQREHARLMLVREQLAALEQVQAAQASAVPAPMAERRDLLQRLKALGPAFTATLVNELFYKDFRNRREVASYCGLAPSPWQSGGIDREQGISKAGNRRARHKAIELAWLWLRHQPNSALSHWFRTRTANAGRRAKRIAIVALARKLIVALWRYLTAGLVPEGATMKA

SEQ ID NO: 379995 - protein, 318 aa, unidentified
MTFSPIGIDIAKAKFDAAALRNGKYKTKVFQNTPEGFRAFLAWLQAFPTPHVCLEATGRYGEGLALFLVDHGLAVSVVNPAQIHAFGQAELSRTKTDKSDAKRIARFCLSQRPLLWQPPPPAVRPLQALVRRLESLLEMRQMEKNRLDGADPTVRASIEAVLATLDTEIAATQQRIREHIDHDPDLRQRRDLLDTIPGLGDATIPVLLAALGDVHRFENARSVAAFAGLSPKEHQSGKWKGHTRLSKTGDALLRKALYMPAIVAWRHNPLIRAFCERLKAQGKNGKLIVGAAMRKLLVLAYGVLKSGRPFDPNHGLAS

SEQ ID NO: 379996 - protein, 341 aa, unidentified
MNITTVGLDLAKSVSHVVCCNQAGKIVRKKMLRRTQILHFFSELAPCLVGVESCASAHYWAREIAKYGHQVKQIAPQHVKAYVRGNKTDFNDALAIAEAVVRPEMRFVRTKTQTQQDIQALHVMRKKCERDRTANCNEIRGLLNEYGIIVPVGINHVYKSLPELFDRQVENGLSELFKELLERHYQKLVELDEHLDWYTKKIKQLSQHEACRRLQSIPGVGPIIASALYQHIGNGSEFKNGRAVSASLGLVPKQHSSGGKHNLQGISKRGDSYLRTLLIHGARAVMRVSKHKETPLSQWIKRIEQTRGRNKAAVALANKLARIAWALLAQGGDYQPELTTA

SEQ ID NO: 379997 - protein, 344 aa, unidentified
MENYAGIDVSLELSSVCVLDAQGKILKEAKVASEPGAFVEFFETLGFAVKRIGLEAGPLSPWLHAGLKRAGFETVLLETRHVKAALSAMTVKTDRKDARGIAQLIRMGWFRPVHAKSIGAQEIRALLVARKQLLGRLIDVELSIRGILRGFGLKVGPVTRRNFEARIRELVAGQATLERVATAMLSARLALKAEYGRLHKAVLAIVRDDAVCRRLMTVPGVGPLVAITYKSAIDDPHRIVKSKAAGALFGLTPKKYQSGEKDVTGGITLAGDEIVRTVLYEAANVLLSRITRFSKLKRWGMDVAKRRGSKRAKVALARKLAVILHRIWVDGTTYRWAEAGSMAA

SEQ ID NO: 379998 - protein, 342 aa, unidentified
MKDMMIGVDLAKNVFQVHGALRTGEVQFRKKLTRKQFPAFMARQEPCLVIFEACGGAHHWAREMEVFGHEVKLIAPQYVRPFVKRQKNDAADAEAIVIAARQPEMRFVAPKTVEQQSRAAVFRGRERLVHQRTADVNALRALLYEHGQVFPIGTRHLDRMTTLVEDEATDLPALVREECQDLLAQIAEKTARIAERTAKLSALAARSDRARRLQTMPGVGPLTAIAVEAFGPDMAQFKTGRDFAAWLGLVPRQHSSGGKDRLGRMTKAGQADIRRLLIIGAMSRLNWLGQRTIVEGSWLSRMLARKPRMLVAIALANKMARQIWAMLTKNEDYRDPALAVAA

SEQ ID NO: 379999 - protein, 417 aa, unidentified
MKKHNNSAKKSEPTSKRAKSRGPVQRDTKEVLAELVGELREKLDPKVGAASAGEKNQRGELRPNLDRLTVGVDLGDQWSHYCILGLEGETLAEGQLRTTQQDVAEFFRALNAARVAMEVGTHSAWVREVICSYGHEVLVANPRLMEGSKRRKRKNDRIDANKLARLGRVDPESLHPIEHRSAEVRQDLVMLRARDALVAARTELINATRGLVKSMGARLPKCSSPSFAQKVEEAVPAQVREALLPLVHMTAALSDCINGYDEKIEKLASEKYGHTGLLRQVKGVGPITALAYVLTLENPERFVKSRDVGPYLGLVPKQEDSGESQPQLGISKSGDTMLRKLLVGSAHYILGPFGPDTDLRRYGLRLCERGGKNAKKRAAVAVARKLAVLLHCLWVSGEVYEPLRQGMSATIAPAVAA

SEQ ID NO: 380000 - protein, 369 aa, unidentified
MQRKEISFKGQKVFIGIDVHKDSWRVAIAPEIGVVKGHSQKPSAQELLDFLKKYYPDGEYHAVYESGFSGFSTYYALQDVGIDCIVIHAADVPTTQYEETMKTDKVDAAKLVRSLKSGLLTGIYIHKRDDIDARSVVRLRKTVQKQLGSYKSRVKHLLHSNGVTFPERFSTPGSHWSKVFIRWLKEEVVLLSATRISLDLLIVQVEFIRKTLLMATRNVRELSRSERYRHGCELLTSIPGVGVNVAMTLLTEIGDINRFHNEKEFASYLGLVPTSHSSGGKVAHGEKTFRGNKYLGPQIVEASWVSIYRDRGLGCAYLNYKKRMKPQEAIVRVARKLSNIIFSVLKTGKKYKPYEWDEKQKHTDLQATL

SEQ ID NO: 380001 - protein, 343 aa, unidentified
MQSISTIGLDIAKSVFQVHGVDAAGQVVLRRQLRRRYVLAFFQKLPPCLVGIEACASSHHWSRELQALGHTVRLMPPAYVKPYVKRQKNDVTDAEAICEAVTRPNMRFVPTKTVEQQSCLMLHRARHLFIRQQTAVINSIRAHLAEFGIVAPVGRRGVEQLLEVVADTADRRLPEVARACLAALGSQLRALKAQILEFDRRIMVWHRSNATSKRLDAIPGVGPALATALVASIAEPGAFRSGRDFSAWVGLVPKQNSSGGKDKLGSISKQGDRYLRSLFTAGALAVIRYAKIHGTRHRPWLTGLLARRPTKVVAIALANKLARMAWAMMVRNERYKEPAALAA

SEQ ID NO: 380002 - protein, 340 aa, unidentified
MKKLYGAFDLHSSNNYLGISDEKDRRVYKKRLPNQRDVILAELEPYRNDLVGIVVESTFNWYWLVDLLMEEGYRMHLANPAGIQKYGGLKHSDDKDDTFWLAHLLRLGILPEGYIYPKEERPVRDLLRKRGHLVKLRTSLINSLQGIIHRNCCVKLNATKIKALKVNNVAPLLSGQEDLALSGMVSKEAIDYLGQQIRKVENIVLGKVKLKKEYLYLLTIPGIGKILSLTIMLETGTMARFQKVGNLTSYCRKVPSKWTSNDKKKGKGNKKNGNKYLAWAFSEAAEFARRYDDNARAFYNRKAAKKNFMVAHSALAHKLARAAYYVMRDQVAFDPQKLFA

SEQ ID NO: 380003 - protein, 354 aa, unidentified
MKTQSKQIDFSGQNFYCGLDTHKKSWAVTIETEDIYLKTFTQDADPNVLVNHLRKNYPGGTFIAGYEAGYFGFGIQRKLSSMGVECLVLHPADIPTTNKDRDQKRDPRDSRKIAKAIKNKEVTTIWVPPVNLEEDRQLLRTRRALSKDLTRTKNRIKAFLQIHNIDHPDIFSQKRTYWSARYIKWLQDVQLHESSGTDSLQSFVRHLQFLRSEILSISRKIKTLTLSNIYENGYKRLIAIQGIGMITAMTLLTEIGDVRRFKNADHFRSFLGLIPRSNSSGEKEYHSGITKRANTHLRCLLVEASWIAIRRDPHYLHLFKKYKQGMKENKALIRTAGKLANRIYYCLKEGNAIN

SEQ ID NO: 380004 - protein, 401 aa, unidentified
MEGPIVSIDVSNGNSHYMCFIKNNKRFGKVKKIDHDIEGFKRLLEDIQKLEAETNEKVCAVFEATGVYTKPLERFLSKNSIKTYMINPLESARKRKEEIHNKKTDKLDPISISKVYYDKEKMMELKKKDETYNWLRKKNRLYEDQLNHLRKYKVTFQNQLSICFPGYLDLFKDGYSDIPMTILKKYPHPDLLKNKKAETVARYLEKNTCHTHKVSLEYALKIIEFAKKTYPGCEKDDVEVEIFKILLDKVIETQRECEKTLNEMITVASTLEEYRYISSIDGIGPNLAARIIAEIGDIEEFKSREALVAYAGLDPHIYQSGDQDGKHLKISKKGNKYLRCLLFLAVGCSIRGAKDNPVNRFYQKKKQQSNPLNSKAAKTACTAKLLKIIYGICKNKTTYER

SEQ ID NO: 380005 - protein, 400 aa, unidentified
MISIDGVGVFLGLDVGKAAHHGHGLTPAGKTVFDKPLPNTEPRLRAVFDKLRTKFGTVLVIVDQPASIGALPLTVARDAGCQVAYLPGLAMRRIADLYPGEAKTDAKDAAVIADAARTMPHTLRSLDLADEVTAELTMLVGFDQDLAGEANRTSNRIRGLLTQFHPSLERVLGPRLDHQAVTWLLERYGSPAALRKAGRRRLVEVVRPRAPRMAERLVDDIFAALDEQTVVVPGTGTLDVIVPSLAKSLAAVHEQRRALETRIEALLEAHPLAEVLTSMPGIGVRTAAVLLTTVGDGSTFPTAAHLASYAGLAPATRQSGTSIHGEHAPRGGNRQLKRAMFLSAFAALHDPSSRTYYDRCRARGKTHTQALLRLARHRISVLFAMLRDGTFYEPRSPRTA

SEQ ID NO: 380006 - protein, 411 aa, unidentified
MRYYIGVDWADAAHAIWVEDEHGVKMLTRTVPHTAEGLAEWGRWAEWGRWLDEQRARGMELWAAIERPDGRVVDFLLDHGVVVYPINPKALDRARDRYRTSNSKSDFFDARVLASFLRTDQAHLQALQPSSEAAQELKLLTRDYDRLVREQTRLLNQLTATLKEYYPRVFEICLDLTAKRTAAFLRAYPTPAALAALTEDTWQQFATAHRWTAEQAAALWAVLQRPQLPVPEHVVRAKRRLVEVLLRQLEPVVEAVDDYRKVVMDFFAALPAAEWASTLPASQGTLVPPIWAELGDAVGRWRSWQHLQGHSGVVPVTRRSGKSQSIAFRFACNRHLRRALQQFAFCSLKSSEWARAYYDRQRARGHRHQAAVRALAAKWVKIIFVLWSRHMAYDENIHLAMMARQHLRQAA

SEQ ID NO: 380007 - protein, 377 aa, unidentified
MRKVALDLGGKKTVLCEVRNGTVVQRATVTAVETLIAVLGPQQPNAIVAIEACREAWYVHDLLTSWGNEVVMVDTTRSRRLGIGQHGRKTDRIDAEVLALALERGGIPVAHVLSPHRRELRRWLNVRRALVESRAQMVTTARGLAREHGAAFARCGTAYFAANARKRPMSGELRAVVDPLLTLLDVITQQLAVVEAELTKLCAAEPVITQLATVPGVGPIVAASFVSVIDDAERFRSAHHVESYLGLVPCEDTSGGKRRLGAITKKGNKYLRALLVQAAWSILRNGDRHDPLRLWADAVAARRGKRVAVVALARRLVGVLWALWRDGTVYDPAPLANASTRGTRKTAQSLNFQAEALHSASKKLSTGLTTKGVTLQA

SEQ ID NO: 380008 - protein, 410 aa, unidentified
MDVFCGIDWAEDHHDIALVNRDGGLLARARIGDDAAGLTRLLDLLAEHGDSAEDPVPVAIETPRGLLVACLRATRRVYPVNPMAVARYRDRHSVAGRKSDHGDAVVLANILRTDLHAHRPLPADSELAQAIAVLARAQQDAVWGRITAHNKLRSHLREYYPGFLAAFAAAKGGITRPEARAILAAAPTPADAAKLTLAQLRALLRKAGRSRGIDAGAARLRDALRKGQMRQLPLVEQAMGRQALALLRQLDAACHSADDLEQAATESFNLHPDAGIITSFPGIGPLTGARVLAETGDDRSRFTDAKGLKAYAGAAPVTRASGKTRSVTRRHIKNNRLAQAGYIWAFSALTASPGARAHYDRRRGNGDRHAAAQRNLFGRLLGCLWHCLATGQHYNEKTAFPNQAARPAAA

SEQ ID NO: 380009 - protein, 343 aa, unidentified
MKQFVWVDVGKLSLYIYDAMTSTDVKIKNDFTEIKKFFNKYSGKKEVTVVLEPTWIYFQKLVKVLNDLTIDYFLIPLDVIHNLNKILGEANKNDTIDARKIANYWALIKEHEEKWSYKIRTVKKIPNEVMIIKTTYSQIFSLEKVLTRIKQLKHNTENNAFQKELWYIRDGYDYQIEMMENMIKKLYEEVEHMIEKLWYKAQMETLETCPWVGKKVALIMTVFFIELEHKWLRRWDGKQVRKYSWLSPQQMQSGEVLHKTKISKRGNKFVRYAITFSAMNWKTHLDYEKRANTTIGKFWLRMKEKFENWNKKWGLSTNCAIASKLVTTLWVMFCDNTLLSGKN

SEQ ID NO: 380010 - protein, 230 aa, unidentified
MVSRGIDISKSSFVAAYPSTNGNPTKTFPNTTARMRELIGTLAVAEHHCVMEATSNYGCCCTCYIRTVLPSVLPPPKKQIKHFSRMMMPVTKTDEKDAYMIAMYGEKMNPPIYKMPSQATIRILTTEGFTYFDNAKQLSRFIGICPTYQQSRTSVNIREHINRNDDERLRSLLYIAFWTALRYNSRECYIRLKANEKPFKVALIAVTNKLVRPVLTITTINSIYRWICPG

SEQ ID NO: 380011 - protein, 352 aa, unidentified
MESITYLGIDFHKRTSTLCFMNEKGGDIEMVNIHTKNLNKFLANRKNLLIGIEASGGTNDAAEKLKLSGHDVRIVNPNKLGLVGQGGKKTDEKDARAIADCLRLNFVCEVHHKSRRARELKSLVVGREMLVRSKVNQINHIRGTLREYGITMPAGVEKFMALARASIEKIDCGYLKEHLLYLLDRTVDLEERIKHTEDHLEKILEENEQAKNLRTVPGIGLMTVAAILAVVDDVSRFKDAKSFASYLGLVPREHSSGDKRRMGSITRSGSEIVRRYLIHGARCILALSSRPTKYDSDPNISWAQHLKSRIGMNKATVALAHRMARTALAILRENKPYEAKKPKRLKTIDLAS

SEQ ID NO: 380012 - protein, 406 aa, unidentified
MFYGGIDVAKYRHEVCIVDQSGNVNLQIFVDNTRDGLEKLIHNLKRLEIEADKIEFCLEATGHYWLSLYCHLTELGYKVHVINPIQSNALRNFYVRKTKTDRKDALLLADIVRFGYVSETKLASETILKLQTLSRLRFEFVKQVGGLKNKVLGILDRIFPEYQQCFSDVFINTSRELLKSFSAPEDLAEVDLSELTAFLNKHSRGRLGIDRAKQIQALAKGTFGINMALDAFTLELRLLVEQIEFIEEQIKVIEEAINQVMEEMRPSKETAYRHVLETVPGIGPVLAASIIGEIGDISRFPNAKALVAYAGLDATVRASGQFEGTRNRISKRGSPVLRYSIWLAAVSARRFNPEMKEFFEKKRSEGKHTQVATGAVARRMVHLIYSIWKDNRPYDPNYQWSPAKPH

SEQ ID NO: 380013 - protein, 411 aa, unidentified
MEAIVECCAGLDVHQATVVACLNKGPGNKRSRKDDIRTFSTTRRGLGEMRDWLVASGCTLVAMESTGIYWRPVYAELEGHFELIVGNAQHIKNVPGRKTDVKDCEWISDLARHGLIAKSFVPPRPIRDLRDLTRYRRKLSQAQAAERNRLLKLLESANIKLSGTVSNVFGVSGRAMLTALIEGEETPAEMAQHARGRMKRKRAELALALDGNFDEHHRFVLRLQFERIKAAEADLERLDARLREKLAPYVEIIDRLSRIPGVDWVLAATIIAEIGVDMSAFISANHLASWAGICPGNHQSAGKQRSGKARKGNVYLKSALVTAAVNAAKKRSSYLADKSRRLRARRGELRAHVAIAHKILVAIYHMLASGSDYQDLGPTYLDRLDQRRTANQLTRRLRDLGYDVQIRPKAA

SEQ ID NO: 380014 - protein, 354 aa, unidentified
MSQKFESAIAVIGIDIGKNSFHVVGHDARGAIVLRQKWSRGQVEARLANIPACLIGMEACVGAHHLSRKLASLGHDARLMPAKYVRPYSKGQKNDFNDAEAIAEAVQRPTMKFVATKTAEQLDLQALHRVRERLVSQRTGIINQIRAFMLERGIAVRQGIGFLRTELPTILATRTDALSPRMLRIIEELAGDWRRLDQRIEGLTGEIEALARQDQACSRLMTVPGIGPIISSAMVAAIGTGDAFSKGRDFGAWLGLVPRQISTGDRTILGKISRRGNRYLRVLFVQAAWVVLVRIKDWERYGLKSWIEAAKRRLHHNVLAIALANKLARIAWAVLAKGRAFELTRTDDAGVRPA

SEQ ID NO: 380015 - protein, 401 aa, unidentified
MNAHYTPNELQVGIDVGSINHAVAISDGNGKIIREFEITHTQKGFDKFFTIVAKESKQRDAIASIAMEGYNGWARPLDGLILKQGYKLYNVNNVKLARFKEIFPAAAKTDAIDARKIVELFSLQKHLPIAKKVLQEIQVSDSINIQLKKLSRRRKQLVDERMVITNRMGADLQAEAPDLQSLASCVDDLWFLRFITLRQDMRLLVKVHKSTIEKIPRIRKNHIDKITAWQTEASFTDAIDYIASMFYDDAMRILELKLKIKDIEKQIDQLIPSSNIASTLITIPGFATVSAGTLAGEIGTLNRFEGEGSLALYLGMTNLDNSSGKKTGSKRNMATNRHAKKAMINATMQHSRNAVESSVYLKKKISQGKKYQQAIRSLGRHLVRVIWSMIQQERSYEIREK

SEQ ID NO: 380016 - protein, 421 aa, unidentified
MSGVDVVYQRAAGIDISKSDAKVCVRIISGAGKRVALETRVFGSTIAQIRLLRDWLVDQKVESVVMESTSAYWTPFWDGLVDSGFELVLANAHAVKQLKGRKTDVADAAWLAKLASLNMAPASFVPDRVVRDFRLLTRSRQKLVERRSGMVASLEKLLEDTGLKLSNAASKLLTVSGRRILDAICSGQTDPVELAKLSMLRKTTGEDLVEALEGRIREVHVVLIRCLLTQIDAMDEQAGILQTRIEEAAQAFEPQIELLSTIPGVDTTLAHAIIGEIGVDMSVFPSSDRLAAWAGVAPGANQSAAKIKPAKTRKGDKHLKAALSQAARSAANTNNTFLQARFRRVRARRGEAKAYTALARSIIVSIWHMLTRSETYRDHGGDYYTRNATPAQRTRLQANAEAQLTRLGVQYTIHQQPAPPL

SEQ ID NO: 380017 - protein, 387 aa, unidentified
MTEFFDAHRPATAFDHDSTLVVAMELSGKSWQLGAVIPGVSRRPKTGVKARDMNEVMRVVDRWKAEAVRAGKTIGRIVVAYEAGRDGFWIARELTERGIEAHVMQPASIPVERKGRRAKTDRIDLDMLLRTLLAWLRGEPRVCTMVRVPSVEEEDARRPGRERDKLVRERVGLENQIQSLLCLQGIGDFRPRLKKAAEKLEALRTRSGAALPAQTMAQLRRLMKRHSVASEQIAEIDAARVTELDAPDPDRGIGMIRLLVAICGMGLETATRLVREVFSRPFRDRRGIAAFVGLTGTPFQSGGMEREQGISKNGNTRVRCLLLQLTWRWLRFQPDSALSRWFFGRVGEGKGRIRKVMAVALARKLLVALWRYLETGVIPEGVRLADA

SEQ ID NO: 380018 - protein, 350 aa, unidentified
MLIIGCDYHPGFQQIAYVDTETGELQERRLRHPEEAEKFYRDLWQQNVTVRVGMEASGHARWFERLLEELSFELWTGDAAKIRAKRVRKKKTDREDARHILELLLENRFPKIWIPTWENRDLRQLLWHRHRMVQTRTRIMNQLQAVAINEGVRCKKRLWREAGRKQLEALRLAQWASRRRQDLLEVLDRINPTIAQLTQAIEDEAEKCSEARRLMTHPGVGALTAVAFVLIIGEAHRFDCGKQIAAYLGLVPEEDSSGERQRLGHISKQGNSLLRFLLVEAAQATARCDRRWRNQFFHLAQRRGRKIAKVAMARRLAVRLYWMWRREWNYEQLQSFGSHVGQPGNPHGVQ

SEQ ID NO: 380019 - protein, 431 aa, unidentified
MSERKSLEIRVSVDVGSRSHQVAIGLSSGEVLEEFEIAHRVEGFEDLFSRIERHRKGNSYRVAVAMEGFNGWARPLDSMVRGRGYRLYNVNNLKLARFKEIFPGAAKSDRIDARKGLELFQLRDHLPLAKEVLQEVVGTPHENEVLKRLSRRRRRLVDERVRVVNNLQADLQAVCPGLLEITKEAGNQWFLNFLISADTLPQLARLRRTTLLKIPSVGVKYARLIQDWQERAHFSEEVEWVSAMIQEDARRILELDETIKALEVKTAEVAETSTIAKLLRSIPGYGAICTSELAGEIGTIERFNKEGSLALYLGMATLDNSSGKYQGTKRPKHINTRAKAAMMTALDRHRKYVPQSQKYYEKKRAQGKSHNQAIRALGRHLCRIIYKMLKEKREYEVRPLKRDTQAKVTSRSSRIGQIGKKKISAKDKITI

SEQ ID NO: 380020 - protein, 347 aa, unidentified
MRKIAYLAMDVHARNTVMGDMNGDGKFLGNRCFPTSDDNIANALKMVKAKKKLLVMEAGPLANWVAQTATPFVTEAFISDPRENALIYNSSVKKDKIDTQKLCRLLRLNEFKAVYRPENDQRAIFKAAVQHYNDLRDQLKAIKQKTKAMYRQWGVIDVFTDSVYSTSGRDKFLVQVQQRPILLQLKRLYALMDFTADMKQDAKKTMIALGRKYPEIKEFKKMPGISTVGAHTFDAYIQTPHRFARRNRLWKYCRTVVTDRSSDGKPLGFKRLDRAGIGELKAVSYRAFISAMKSDNEVKRFYLQSLQRTHNHKHARLNTQRKILAVMLGIWKKGQPYRAELFLDPCK

SEQ ID NO: 380021 - protein, 393 aa, unidentified
MICVGIDVAKDKHDCVILNSEGKVLAGVFTIPNNADGFDTLLQKIHGCTSPDDKIKVGLEATGHYSYNILGFLLNQGLPTYVINPLHTNLFRKSMSLRKTKTDRVDAKTIAAMLMSNVDLKSYTDTAYHNEELKSLTRYRFDKVRERAQLKQSVSRLVTILFPELEKLVSTLHMSSVYALLIEFPGAKQIAEAHLTHLKSLLKDASKGRYGRDMATEIRDAAKRSIASVMPAKSLELRHTIRLIRELDSEIKDIEAAIEAIMEELQSPITTIPGMGFRMAAMILAEIGDFSFFDSPDKILAYAGMSPSTYQSGHLSLAGTYSHMEKRGSRYLRYALYNATKYVCLWAPTFAAYLAKKRAEGKHYNIALSHAAKKLVRLIFAMEKSRQPYCSAT

SEQ ID NO: 380022 - protein, 340 aa, unidentified
MAIVAGFDVHRAQITFDALDQETGELHRGRIPASPEAVAAWVTRFPGESIHVAVEAGTGWLFVCEALAEAGVTAHLAEPAETSALRGPKRRAKTDREDARWLRTLLAEGRLPEAWIPPAHVREWRTRTRLRKTLVDERTAWLVRVQATLFHHGIGGVPDKLLSDRGREFLAGLELPPAARERIEVALAMIEAADRQLAPLERELRQLARRQPGCRALMRHYGIGELTAPTILCELGDVARLSASRKAVRCAGLDVGVHRSDRRARLGKLTKQGSPHLRWALYESAQAACRPSSPDRSDYLALKARGLSHTRASVTIARKLARRCFHTLHALGPEALEPVT

SEQ ID NO: 380023 - protein, 464 aa, unidentified
MPIRKKRSVPKKKGGAPPPTSLPTIRPMVAGLDVGSSQHWVCGPARADGNPNVQVFDTTTSQLNELADWLTEEGVESVAMESTYVYWIPIYELLESRGIEVLLVNARQLHNVPGRKTDFSDCQWLQLLHSCGLLRGSFRPGEAITRLRALQRQVANLVAERTRCVQWMQKALDQMNVQVHRAVTDITGLTGMAIVRAIVAGERDPVRLALHRHGRCHKSAKEIAQYLTGNWRDEHLFNLASALRLFDALEKEIATYEARLLEEVEGLQLPERREDPVPPHPNPAKERAIKARGEQQARTTLWRFAGVDLTRIDGISAGVAQVVLTEAGPDLTAFPTEDNFVSWLRLCPRTPISGGKPLKKRRNGLGANRIAGALRMAATSLQRSRSALGASFRRIARHKGGAVAVFATARQLARLIYRMLRYGHDYVDIGEKAYERQFQTRRLAAITETAKSLGYKLVPEAGAA

SEQ ID NO: 380024 - protein, 475 aa, unidentified
MNLKGTKKKNQVSNVNIFEQQELLKKIEVVRENLTASTWRELETKGKFDKNAKLSFICDDMLILGCDIGSETHYLRAIDTRGRELSKSAFSFSNNADGFSKAKEWAVKIAAEYDKKQIVLGLEPTGHYWFCLATWMISNGLSVVQVNPYAVKQTKELEDNSQLKDDTKDPKLIANLVKDGNFGMPYLPEQLYADLRRLSMFRDQLNEDRIRSINRLHRELKIYFPEYKEALGKTEGTFSLELLKQAPFPDDLAALKEDGIRQIWHNAKLRGRGYSRAGEILEYAKASVGLREGKETGKLVVQWFVQKILELDAELALIETQINQKCLEIPHTDKVLEICGIGENTLSGMMAEMGDISRFDDVKEIQKLSGLGLVASSSGKHKGETKISHRGRKRLRYWLFQAAKSAVVHAEEFKELHVYYTTREQNPLKKMQSLIAIACKLLRIIFTILKKGIKYDPRKMLKDIRRESRQESLAA

SEQ ID NO: 380025 - protein, 347 aa, unidentified
MAEQPAVVGGVDTHTDFHQAAVIDSVGRHLATAPFPTTPDGYRRLLEWLHSHGDLMAVGVEGTGAYGSELSRFLLANQVTVIDVDRPDRRARRSNGKSDPVDAYAAATAVLSGRASGQPKTRDGIVEAIRSLRVVRRSAIKSRTQTINQIRTLIVSAPAQVRERLRGLATYELIKQLARSRPGTDLADPSCAVKTALRRLARRYQHLTEEIAEADADLEPLVAQAAPSLVELVGIGTETAAQLLITAGDNPDRLRSEASFAHLCGAAPIAASSGRTHRHRLNRGGDRQANRALHTIALVRMRYDPRTRHYVARRTAEGMSKKDIFRCLKRFIAREVYKHLTSANTRQ

SEQ ID NO: 380026 - protein, 468 aa, unidentified
MTPRIQKKLRPPRSHESLRMTHPHAAGIDVHADIHWVAVPPGDAPPPEANHPINLPAHVRSFGTCTADLIALADWLAECGVKTVAMESTGIYWIPLYELLESRGFEVFLVEPRQSRHAPGRPKSDVLDCQWLQRLHSYGLLTASFRPAEKVVVLRGYLRQRQMLIRYAGRHVQHMQKALEQMNVKLAEVVSNITGVTGMAIIQAILKGERNPLELAKLRNDKCKRTEAQIARALYGNWREEHLFALKQAVTLYEFYRQQLAECDIQLQAYLGTFADRSQGRPRPPRQRRSTPTLNDPVFDVGGGLYRMAGVDLTVLEGINANTALVLLSEVGPDVSRFPTVKRFTSWLGLCPQHQGSAGKIRSRRVLRGGNRAGRALRLAVQGCYQAKHALGAFYRRIQARAGAPKAIVATARKLAERVYRLLKYGAEYVCQGVEIYEAAYRARVIKGLARRAAELGYRLELATEPGT

SEQ ID NO: 380027 - protein, 399 aa, unidentified
MFVGIDWANESHDVCVVDPAGKIRGRATVAHSQGGFDELTGHLARWAKQGEILVGIERPEGRLVDRILEAGYPIVVIPTFAMKDLRRRYAVGGAKSDPGDAYVIADVTRTDGHRMRRLEPLSEQTRALRSVVRARDDLVHQRVALGNQLRSCLEAYWPGAAVIFADVCSEICLAFVERYPTPESAARLGEVRLGSFLKKAGYSGRRSPAELLERLRTAPEGVVGVEAEARADAVRSMVRVMRSLNGSIKDLDRAVVAHLGEHPDAEVFTSLPRSGRINAAQMLAEWGDCREAYPEPDAVAMLGGLCPVTHASGKHRDVAFRWACNKRLREAITTFADNSRHASPWAAKIYWRAIARGCDHPHAVRILARAWVRVIWRCWQDRRPYDPALHGAAVLLEAA

SEQ ID NO: 380028 - protein, 343 aa, unidentified
MTIMIGIDPHKASHTAVAIDNTECVLDELCIRACSKQTDRLQSWASPFPDRVWAIESARGLGYLLAQQLVAAGETVVDVPAVMSTRTRLLGSGKAQKNDPNDARSVAIAALRNDQLCKVGLDDHARVLKLLVKRHRDLGRLKSKAACRLHALLMELEPGGMAKEMTVTRANDILDRIEPASQMVEHRLAVARETLADIEHYETQMKASMKRLRTAVAASGTSLVEIRGVGVVVAAMIIGQTGDISRFVSAGHFASYNGTAPIEASSGEKKRHRLNQRGNRQLNWAIHVVAVSQLRYPCEGRDYYDRKRAEGKNSKEAIRALKRQLSNVIYRALVADTRRSTGE

SEQ ID NO: 380029 - protein, 341 aa, unidentified
MEQYAGLDVSLKAVSICVIDGAGAVLWRGEVANEPEVVAAVLLRRAPGLVRAVLETGSCGIHLYRGLEASGVPVVCVCARHAQGVLKCRVNKTDAHDAEGLAHLSRTGWYREVYVKSADAHVIRAHLLARRQVAKGRRDIENQIRALLRTFGLKVGQAARGRFEARVRNLLKQVPALSLPVDQLLLARRSLLASQDALDVEVKRLAKEDERCRTLQTMPGVGPLTALAFVASVDGAARFAKSSSVGAYLGLTPRGHQSGEVAWSGHISKAGDGVARALLYEAANILMVRVKATTPLKRWANALAERAGGKKARVALARKMAVILHRMLADGAAYRPSHATV

SEQ ID NO: 380030 - protein, 365 aa, unidentified
MSRVPSAAELIHLGMDTSVKEIVCAVLRPGEEIPVVDRVPSDEESVRRLIGRFADRRVLSACYEAGSGGYELHRLLTSMGVACDVVAPSLIPKGASEKVKTDKRDSVRLALTHRAGLLTPIRVPSPAEEAVRDLVRARGDLLDDRKRMQQRLNAMLLRHGRIWHGAKWTYAHRVWAGKQVFDEAALAEAFALYRGALDAREAELAAAEAQMAAWAGRDPLAGPVARLGAYRGIAQLTGLTLAAEVAGWRRFASAPAFMGFSGLTPTEYSSGSRTRRGHITKAGPEGVRTALVEAAWAYRYRPAIGVTLRRRQEGASPDTLARSWKAQQRLHAKYNKMTARGKPPGVAVVAVARELAGFVWAEMTS

SEQ ID NO: 380031 - protein, 430 aa, unidentified
MTKRSSNPTDAVLVAIDMSKHRQEVLIERPEGGRRRRMTVMATKADYDRLATDLGEIHRPIIVGFEATGNYHRTLAHRLLAAGFELRLISSVALARTREALHNGWDKNDSKDAQVILHMLRIGATQRYVDPLAAGINDLQEMSKTHEAISKAKTQTWHRILTHYLPLYFPEIERFAGNSRSDWFLALLERFPTPASMTSLGQEAFTHEAWSLVGRKVSKARLINDIYETACASIALPVDEDSVAIAMFRMVIAQARSLIRQRDEIERTAHALLSDNRDYQLLRMIPGIGPINALTILAEAGDLRRFAHHRQFLKFCGLDLSTCQSGTFRGRTKLSKYGNARLRRTFWMATQVAIRQRDNSFRDKLGRYVAGHGNDPDRRRKAMTALTAKMARVAHAVIKTGAEYRPFVERADTRWKDPSLLCREGATATL

SEQ ID NO: 380032 - protein, 417 aa, unidentified
MARISREGEEIIMKVYIGIDWSENKHDVCFLHETGEVLLVKQIPHTIAGFQQLDQARQSLGVGRQEVIIGLETAHNLLVDYLWEQSYEQIYVLPPAAVKSAQKRYRQSGAKDDAWDAHLIANLLRTDQRCYTAWQPDQPLTRQIRAEVRFAQQLGQEVVRDGNRLRSLVLRYYPAALDAFPHLDSLVGLAFLQTYPTLSQAQALSFEQLKVFLREHHHTQVRSWPTIYAGLHSDHPASNPELDAAYAPLAVAQARILETLIRTRQACLARLDKLFRLHPDHAIYDSLPKAGTLLAPALLAKLGDDRARYPTPAVLQAVAGTCPLTKRSGKHSYVLFRKACDRDFRHIVQQWARLTLDVSPWAATYYHTVRPHCQTDNDAVRRLANRWLEILWRVWVDRKPYDEAFHLKQHMLRHQIY

SEQ ID NO: 380033 - protein, 344 aa, unidentified
MQIAVIGLDLAKNVFQVHGIDDAGQAVLKRKLRRSEVLPFFAGLDAALVGIEACHTAHYWGREIAALGHDVRLMPPQFVKPYVKSQKNDAADAEAIAEAVQRPTMRFVPIKSADQQAVLMLHRTRDLLIRQRSSLISAIRAHFAEFGIVVGQGIRNVERLLALLETAGDQRLPALAAEMLGILAAQLRYVAEQVKEVEVKLLAWHRADETSRRLQSVPGLGPITASAIVATVGDPKQFKSGRQFAAWLGLVPQQRSSGGKERLGGISKRGDGYIRRLLVHGARAIIGWRKRSATHKTPWIERLLARRPTNVATVAYANKLARIAWAIMMHGNRYNPALAFATIP

SEQ ID NO: 380034 - protein, 461 aa, unidentified
MAKKAKKVKTAKGAELRIVNPDAAGIDIADGIMQVCVPADRSKDNNRAFGAYTSDLHAISAWLRECGIKTVAMESTGVYWIPLFCRLQEDGMDVVLTNARDVKNITERKTDESDAEWLMLLHQYGLLKASFQPHNDAKRMRTLTRHRDTLSREASSIVLRMQKAMQQMNIKLTLVLSDITGKSGIRIIEAILAGERDPKKLADLADIQCKTPKEEIAKALEGNWEEDLLFVLRQNYDTFKHFCAQLDRCDTELEKLMENYRTEVAGTGRPSYSPTKKRCDYHKRKRNVGFDVERKAYDMWGVNVFEIPGISHLTALGLMSELGHDFTRKFPSSKQFCCWCNIAPNTKISGGKRISSHVPHRRNNVGLIFRSIASSLANAKNQLGNFYRRIRSRAGGKAAVIATAHKVAEIFFAMVANQTTYNPEKVGIDEKVLLEKRIARYKRELERITGMHIEIGNACVP

SEQ ID NO: 380035 - protein, 346 aa, unidentified
MRFYNEQHRHYCGVDLHTKRMYLCILDEEGNKLLHRNVRAKPHDFLSAVEEFRDDLVVGAECMFTWYWLADLCRNEKIRFILGHALYMKAIHGGKKKDDKLDSEKIARLMRGGTFPLSYVYPSEMRATRDLVRRRMFLVRRRSELLAHVQLMNQQYNHDPFEKNLKYASNRDVLDRFAESGARLSVDADLKMVGHYDQLLKQLETKLIQEAKLHDPKACSLLRTIPGIGKILSLVLLYEIHTIDRFPSVGDFLSYARLVTPKQTSDGKVTGHGGAKIGNVHLKWAFSEAVLWMLRYSEDAKAFLKRKKKKYGKARAMTLLARKIGRAVYQMLKRKECFDAVKFFAS

SEQ ID NO: 380036 - protein, 275 aa, unidentified
MALRPAGERWAVPNDASGVTPLVDRLLALHPTLMVLEATGGLERAVTSALATAGLPVVVVNPRQARDCARATGQLATTDALDARALAHCADVIRPTPRPLPDAQMQELRALLGRRQPLLVRRTAAQNRLAGTSARLTQDSAAHIPWLNARLATLDDDRETVLRASPLWRDNDDLVQRAPGMGPVCARTLLALPELGTRTRQQSAALVGVAPLHGDSGTRRGRRTIWGGRAPVRTVLYMGTLVATRDNPQSKVFDERLRAAGKVKKVALTACMHKL

SEQ ID NO: 380037 - protein, 418 aa, unidentified
MGIIKPKKVKVVNSKTLIVTVDIGKETNMGYCRCPDKSEIKPFEFRNDRRGFTKLWEVMVKAKLANNLDETIVGFESTGAYGEPLQHFLKDKPVRLVQVNPMHTKRLKELQGNSPAKTDHKDPKVIADIIELGHGLTVIIPEGAAAELRRLTQARERAMKRRTALLNQIQDLVFISFPEFLLVMKGVKTKSAQYLLRHFTTAQDIVGLGLERLAAALKQVSKGKLGMTKAQALYEGAGQSVGIREGFISVSLEIQEMLSFLEACDRLVVLLEKEMSRRLSEVPYSHLILSMKGIGKVTAAGLIGEVGDFAKFNRSKELLKHAGLDLFEISSGKHKGNKRISKRGRPQLRKLLFFAALGTVRRGGVMHEQYQRHLQKGMKRMKALVAIARKLLCVIFALVRDECEYLENYRPQQLKKAA

SEQ ID NO: 380038 - protein, 411 aa, unidentified
MEVVHVRCAGLDISKRDAKVCVRVAGAGRRKAVETVTTWGSTTNQVLALREHLISERVSCAVMEATGDYWKPVYYLLEDAGFEVLLVNARQVKTLPGRKTDVADATWPAQLGAHGLVRGSFVPPEPIRQLRDLTRARTAITRERGREIQRLEKLLEDAGIKLSSVASEITGVSGRAMLEALVAGQRDPAVLADLAKRRLRSKIPALTEALTGRFTDHHAFLARVHLDLIDRHTTAIEEITARIEVVIEPFQGFRELISTIPGIGPINADVIVAETGADMTRFPTAGHLASWAGTTPGCNESAGRVKSTKTRPGNPYLQGALGAAAMACAQNPGTYLGARYRRIASRRGPMKANVAIQHSMLIAIWHMGRDGTPYHDPGPVSLTQLHPERAKNRALHQLEAIRYHVILDRVG

SEQ ID NO: 380039 - protein, 340 aa, unidentified
MQRPNFYIGIDVASTTFTATILREPGKPSHSTSVANSMEGFSSFLQWLTERNVTLSNAIVCLEATGVYGEALCYFLTSHGYHIVVEPPLKVKRAFDITGHKTDAVDSAQIAEYAHRFFDELNVWKPNDAIIEHIKVLLATREQFSRQLVANITTLKTLERKYIQTPLANQAYQETIEHLKEQISDIDQEIKRFIDQDPTFRQRVALMTSIPGVGFLLASNLLVLTRGFTKILTAKQLAAHAGICPYQHTSGISVYKRPRSRRHGPSMLRKLLYLAALSLRTHNEQFRRYFHRKVAEGKSKRLVINNIENKLLKIICAIIASRTQFIPNYQSVNPILLKSA

SEQ ID NO: 380040 - protein, 342 aa, unidentified
MESTTIAVDLAKSVFQIAVSRHPGKVSESHRLTRSQFLRFFAERQPALVVMEACGTAHFWAREIQGLGHRVRLLPPHAVRGYVYRNKTDQADAEGLLEANRNDRIREVPVKSVFQQTLAALHRLRSAWMKDRNARINLVRGIVRELGFSIPVGPRHVVIGVRALLKDDQIPELLRPTLETACQEILDFDRRIEDVEQQLRAAAKQTPVVKRLQSIPGVGLLTSTALVAFVGESQRFASGRRLASYLGLTPREHSSGLRRRLGSINKAGDAYLRSLLINGARAVLIHAARRQEQPDQLRHWALQVQRLRGHHRATVALANKLARIVWAVWKNDTSYQARTVAP

SEQ ID NO: 380041 - protein, 374 aa, unidentified
MTMMQHRQIRYIGLDVHKVSITVAIAEESGAPTSYGSIANDPSAMRKLMTRLGGPEVELRVAYEAGPTGYALHRQLAKMAIDCIVVAPSLIPKQPGNKVKTDRRDALKLARLLRSGDLTPVWVPDEAHEALRSLVRARADAKADQLRAKHRLSKFLLRQGCRPPSGVRNWSQRHVQWLRQLEFEHLPDRVVFADYLAEVTAAGERIKRLEAALHQCAQSSSQVAVIRALEAFRGIGFLSAVTLVAEAGDLRRFRTAPQFMAYAGLVPSESSSGGKQQRGSITKTGNSLLRHVLGETAHHARHAPRVSSKLKQRQADLPREIVELAWRAQLRLHARYRHLSSRIGSLKALTAIARELAGFIWAAGQVLQEVPTAA

SEQ ID NO: 380042 - protein, 362 aa, unidentified
MRGVAVQEKLYVGVDLHKTQFTICVINEEGDSFESGTKFPMDKEGYIAFADKMKKLSRRHDGATVSIAIESTANARFFRDIMEAKGFEVTVVNTLRFKVVNLSTKKTDKNDAKTLAEFLARDILPKSHLCRPESESLRRVLKSRTLMVQDAVALKNQAHAVMLAYGYITQPAQFQSKSSRTKLLARLPAKVKEVIEIIFETLDLVESQTHVLERRLRRITIDNECVNLLMTIPGIGIVNACTIYAYTDDIDRFESYKNFSAYCGLVPWVQTSNESIYYGKITKRGPQELRTALVQCVVAMVRMPGKTADLGIMKQYHQLKDDKSSGKAIIATARKLSRIIYVMLKTMTPFDSAKLIKDDPKE

SEQ ID NO: 380043 - protein, 359 aa, unidentified
MMMTDAEKKAATEVILGVDTHLDVHVAVALDHLGRRLGELSVPTTAKGYEKLVRWAEGFGTLRCAGVEGTSTYGAAITRYLRTAEIAVKEVERPKRRHLHRSSKSDSRDAESAARAVLAGETAGEPKSADGRVEMIRALRSARRSAMKSRTQAANQLQGLRVTAPEELRHRLRRLSTKELVAVAARFRLRDAPCNVLAATKFALRSVARRYEALSAEIDELDAQLHRLVRQVAPELVSLAGIGTDHAATLLTVAGDNPQRLRSEASFASLCGVSPVEASSGKVVRHRLNRGGNRDANRALYMVCLARMRRDPRTREYVARRTQEGKSKREIIRCLKRYVARETYRVLVSCVACSSLTRP

SEQ ID NO: 380044 - protein, 360 aa, unidentified
MSAAPAPAPETSTGPDVVIGVDTHKLIHMAVALSANGGWLGSLKLDAKRSGYEELIHWSAEFGRSPVFAVEGTGCYGAGLCRALQLAGLEVVEVNRPDRSTRHRRGKVDTIDAEAAARSFIAGQSTVIPKAGNDLVEMIRMLKVVKDSASGNRTAALNQLHAIVVTAPAALRERLQRLKGKKLVECCIGLRSGEISTPLAAAKMALRALARRIQQLDQELKETLAQLDQLTTQHCPELRNTYGIGVDISATLVVAVGDNQERLKSEASFAALCGVNPLPASSGKVVRHRLNRSGNRQANCALHRIVICRMQRHQQTRDYVERRTAEGRTIREIIRCLKRFVAREVFGILRGGPTVRTAAA

SEQ ID NO: 380045 - protein, 343 aa, unidentified
MGLDPVFRKKERFQKLTASLSNYQCTRGVNVGIDVAKDTLEIAVRPDNQQWSTKNRVEDFPALIDKLRQIAPERIILEATGGWEVPLANHLAAADLPVIVINPRQARDFAKATGQLTKTDKVDSRILAHFGEAIKPPVRPLPDEQTQALADLITRRRQLVDMLVAEKNRLVTVQHRPALKRDVEAHIKWLEKRIDQLDDDLRKQLEKSTVWRVNDELLQSVPGVGDVTSRTLLAELPELGTLSDKEISALVGVAPRPNDSGRRTGQAHIRGGRANVRSVLYMAAMTAIRYNPVIKTFYQRLLGKGKLKKVALTACMRKLLVILNSMIKKQKSWSPTQIPAAQD

SEQ ID NO: 380046 - protein, 311 aa, unidentified
MKQSVVYIGIDVAKAHLDVAWAGTFRRLPNERSGHAVLVRWIKQSATPVQLICEASGGYEQGLLESLEKSEVKVTLVQAVRVRQYARAAGILAKTDQMDAKVLAAFGSAMQPPPTPPLCAEQKRLRQYEAQRRHLSRVLVAEQNRLAQLSCAELRTLSRGLISKIKKQIETIDTRIGDLIAQDQTLREKAQKLTAIRGVGVRTAALLLAQMPELGQLNRRQAAALAGVAPFNHDSGSIRGKRAIFGGRRALRSGLYMAALSAARFNPILSRFYRRLRTKGKPHKLALTAVAVMRKLLLALNQTLKPIPSLA

SEQ ID NO: 380047 - protein, 411 aa, unidentified
MDVVHERCAGIDISKADAKVCVRVQGRGRRRTEQSVRTWGATTGQILALRDELLELRVGLVVMEATGDYWKPFYYLLEDAGFEVVLANPRRVRAIRLSKSDVSDAAWLADLGAHGLVAGSLVPPPPIRELRDLTRTRTAIIRERSREYQRLEKVLEDAGLKLSTQTSSLTLVSVRRMLEALVAGERDPRVLAEMAQGQLRNKIPALAEALVGRFTEHHAFLVRLHLDLIDRHTEAIEELTGRIDAQMEPFRGFHTLICTIPGVSTLVADVVVAETGGDMTRFPTAQHLASWAGTSPGSNESAGKVKSSATRPGSPHLKGALGVAARAAARSKGTFLSARYKRIAARRGPMRALVATERSILVTIWTMAHTGELYADLGADYYRRRNPERSKQRALAQLRALGYQVTLSAVS

SEQ ID NO: 380048 - protein, 355 aa, unidentified
MNQQNNTTISFKGQHFFIGLDVHKKNWKVTIRINQTQIKRFSMDPSPSQLFKFLTKNYPDGIYHCVYESGFCGYWIHRELVDLGIDNIIVNPADIPTSHKEKDRRDDKIDSAKLARELENGSLKGIYIPTPQQQSLRSVSRLRYQHRNHITRLKNRIKMFLHLHGIKIPEKYNSGYWSSGFIKWLGNISFEYDYDRQYLDQYIAQLQYQRNLMTQVLLQMRDQCNSNNVLNCVRSVTGLGTVSAFTFYSELIDMKRFKDLDHLASYVGLVPSKDSTGEKRGIKGLTPRYSRYVRYLLVECAWRAIGSDPALTAAYADFTKRMTKQQAIIKIAKKLLNRIRYVWLNEKTYVTGVMR

SEQ ID NO: 380049 - protein, 344 aa, unidentified
MSEVIIIGLDIAKYVFHVHGADERGRAIFSKRISRGKLLDFFAAHPRCRVALEACGGAHHWARQLAQLGHEVRLIPPAYVKPFVKRQKNDAIDAEAICEAAQRPSMRFVAVKSEQQQAAGLVFRTRDLLVRQRTQIINAIRGHLTEYGWIAPKGPSHVTMLADLLEEEEMANSLPEAARAMFRLMLDLLAGLNGKIAALDKEIARRAREDEVSRRLMTVPGIGPISATAIAALAPPAETFAKGRDFAAWLGLTPLQRSTGGKQRLGATSKMGERTLRRLLIIGSSTVVLQASKRGAPKGSWLEQMLARKPRMLVTVALANKMARIIWALLVKQENYRAPVAAEA

SEQ ID NO: 380050 - protein, 418 aa, unidentified
MSYKIAAVDIHKAVLMVVVATAGDEVADPIGEELGFECRRFGTGAGERLHVASWLQERGVTEVVMESTAQYWKPIWMDLEPHFPKLHLAQAHSNRAPKGRKNDFRDAKRLARRLLAGELMLSFVPGSEQRMWRTLTRSKHQLVRDRVRLQNRLEALLEEMRIKLSSVISDLLGVSGRRILTALAKGETDPAKLAELGDDRLQCGREVLADALKGSPEPMHLGILKLDLERLSLLDKQIEAIDVMIAKALKKHEDAVIRVAEIPGFGPDSAQQLIAEVGVDAEAFPSAGEFSSWAGICPGSQVSAEKNQSSRSPKGNRFVRRILTQAAQAAVKKKGSHLRTVFRRLMPKLGYSGAIWAIAHRLARLVWKILHDGIRFVEQGQETSPAAKKRRAQKMVRALRKLGFAVALTPVAPEPARS

SEQ ID NO: 380051 - protein, 424 aa, unidentified
MLAVGIDWAEAFHLVALGRPGEGVIEVRRVEHTPAAVAALLADIAALEPDPAEVRVVLETRHGVLVEWLVDAGFTVLPVNPDLIARRRGPARKKDDAEDARLACLLALDRYTSLRPLLPHGELAAELRAIARDDERAARDQRRLLNRLRQDLLSTFPAALQLAGEELGAPTILKLLARWPTAAALGTATRHELVAFARGAHHGWPERLADQVAAALATDQFTPRDYLVRAKADTIRLAATQLLAIATQRRVWERRMGTLLLGAPRRGRANTPRQDELDQGQAFPGGEVYLSFPGLGDRLAARVAGEIGDHPQQFGSPNALACYAGKASVTRRSGKSELVVACRLACNRYLAGAVQQWAFCSLRESGWARAFYDAQRARGKTHQAALRALGNRWLEVLWHCLRKGVRYDEATHVANRNRALGKAA

SEQ ID NO: 380052 - protein, 481 aa, unidentified
MKAKQKEPIEKYTGQSRQLNWRHMNRKQRRDLERKIQSADLTLQLIHPDAAGIDIGNESHYVAVPPDRDSQPVQRFGCTTAELRTMANWLKQCRIRTVAMQSTSVYWIAVYDVLEQAGLEVYLVNARETKNLPGRKSDVQESQWLMKLHTYGLLRNSFRPPQEIRTMRTYWRQRNDLVRSAARHIQRIQKTLTQMNMQLANVLSDVSGVTGQAIIKAILAGERDPQRLAAFRDPRVKASEKDIARSLEGNWQEDLLFVLKQEQAAFEFCRKQMAECDHQLELYLQKMEDRSQGATLPEEKRKDRQQKKGNQPQFDLQQQLFRMTGTDLTQIDGIDVMTAATILSEAGWDMIKWKDEDHFVSWLRLAPDNRISGDRIVGKGRLPTSNRVTVALKLAANNLRTSQSYLGAQFRRLRARLDTPVAIKAMAAKLARLIYRMLRYGTKYLDHGSPYYELQQRTRDIRRLKLKAATLGFQLIPSTAA

SEQ ID NO: 380053 - protein, 363 aa, unidentified
MEEAKRRYVGIDLGKREYTMAVIGKNGKMTIHQGKTSIQGRQALYKLLEPTDKIALEAGNLAFITAREIQERIGSEVRVLNSAKLPFIWDAPTKTDKEDAMKLAHLVEERRDEKLPIVPLPSEKEIERRKTLASYGREMKNRIRHINTLHALFVHQGHTTIVKRNLATAEKRREAVQILTGLEREEAEWILKYLELHEQRIKELGGKIRKEAKNDEDMKNLQTIPGVGPIVAYAFTAHVGDGSRFSTGAQVSNYIGFVPRLDYSGTIQREGSITKRGNGYLRGLLVQAAWVMVRCKRESSLKDRYVCLTVFGGKGRKKTIVSIGRRLAELMYSVLRDKSSYESRIWTGRREYLAKLKELKNSA

SEQ ID NO: 380054 - protein, 365 aa, unidentified
MRKVSTAKQGRNVSEQKLTIGLDLGDHSSCYCVLDETGHILVEEKVSTTRKGLQAAFGAMPHCRIALETGMHSPWVSLLLSDWGQEVIVAHARKVRLIGESRRKDDRLDAQTLARLARIDPQLLCPVKHRSAKAQADLTVIRARAGLVRARTALVNSARGLAKSYGERLRGCNVRNMNPEKAEGLSPELQAALKPLLAALESLSEQIREYNERIGKLAQESYPQVALLKQVKGVGTLIALTFLLTLEDAHRFQKSRDVGCYLGLQPGRRNSGRSEPQMHISKEGDPYMRTLLVQGAQHMLGPFGVDCDLRRWGLKLAERGGKNGKKRAIIATARKLAVLLHRLWVSGEVYEPLYNSRRVAIPAAA

SEQ ID NO: 380055 - protein, 462 aa, unidentified
MTRHKARRSKKDAPPLPTSLPAIRPMVAGIDVGSAQHWVCGPPRPDGAPNVRVFGTTTVQLQELAAWLAEQHVESAAMESTYVYWIPIYELLESQGIEVLLVNARQLHHVPGRKTDFSDCQWLQLLHSCGLLRGSFRPGEAITRLRALQRQLANLVAEQTRCVQWMQKALDQMNVQVHRAVTDLTGVTGMAIVRAIVGGERDPTRLAEHRDPRCHKSADEIARYLTGTWRDEHLFNLASALRLFDALETEVASYDARLLTEMAALQPPERQEQPLPAHPSPAKEKALTARGQQQTRTALWRFAGVDLTRIDGLSTGAAQTILTEVGPNLAAFPSEDHFVSWLRLCPRVPISGGKPLKKRRNSLGANRIAGVLRMAATSLQRSKTALGATFRRVARHKGGAVAVFATARQLARLIYRMLRYGHDYVDIGEQAYESQFQIRRLSALTETARDLGYILVPKIALS

SEQ ID NO: 380056 - protein, 389 aa, unidentified
MFEAPVEAPVSATSKTILHCALELSKSCWLLAIQYPDRSQPSQYRIKGGDAEGLMAQLLISRQRCAKSTGEVPSIVLCYEVGYDAFWLARFLIARGVECLVVDPASLQVNRRGRRAKTDRIDVGMLLRALIGWCRGERHVWSVVHVPSVDEEDVRRSHRERGRLIHERTSHINRIKGLLFAQGIRDLNIKAHYGKLQLDQLVTGDGRRLPPRLVNEIAREIARLALLQEQIAVIDRERDEAPTPCKATEKKRIQLTQLKGIGPAISAVMSREVYYRQFNNRRQVASFLGLATSPYDSGDMERSQGISRTGRGQVRAIMIQAAWLWTKHQPKSTLTRWFVERTKGQSGRVKRIMIVAVARKLAIALWRYVEQGLVPQGAVIELPRTKSAR

SEQ ID NO: 380057 - protein, 370 aa, unidentified
MKSIIYVGMDVHKASFTISCFSVTTQETFATVKISPDAKAIKKYLDGVSLSRSEECEFVCGYEAGCLGYTLYHQLTAMNIRCVIMAPTTILRNSKRIKTDRIDAENLARCLAYGGYKSVYIPTAQDEAVRDYLRMRDDHKLMLKKIKQQINAFCLKHNKIYPGNKSKWTQAHVKWLNALEFDGYLQDAFNEYMITYRELTDKVERLESQIEQLAELEEYRDKVKKLICIKGIKTHTALSLIVETGDFSRFQSAERYASYIGLVPGEHSSSEDQNRLGITKAGNRHMRMLLIEAAQCYSRGVPAKKSKDLKSRQKGASPEVIAYADKASIRLRRKYIRMELINKKKANVAKTAVARELACFIWGMMTDNIA

SEQ ID NO: 380058 - protein, 350 aa, unidentified
MTIVGGLDVHRQQITFDYVDDDGLVHWGQIRPATRKTLRGWLAEHFRDGDAEFALEGCTGWRYVSEELAAAGLGVHLGDPAEIAGLRGRKKRAKTDRADARLLRTLLVEGRFPESWIPPAHVVEVRTLGRLYCTLMDERRAWQQRIHAQVFHQGCPPIRALLTRAGREALAGAELSAAGRQYVDTALRRIDELSAEIDPLRTQLIGLARRQPGCRALQRHYGVGWLCAVIIWAEIGDARRFASSDQLVRFAGLDVTVYSSDSKRAPGHLSRQGSPELRWAAFEAAKSAARRGSPDHGYYHKLAAKKDGNNGKNPTLAVERKILRRCYHTLRELGDSALAMPSAQPQEVAA

SEQ ID NO: 380059 - protein, 343 aa, unidentified
MGEVSTIGLDIAKSVFQIHGVDVDGAVVIRKRVSRAKVLEFFAALPCCLVGIEGCPSAHHWSRQLQALGHTVRLMPPSYVKAYLKRSKNDANDAAAICEALTRPSMRFVPAKSEQQQSGLMLHRSRQLLVRQRTMLSNAIRGHMAELGIISAKGRNGTGELLEVIANAKDNCIPAAARFSLEVLARQYIAIATEIGVLEKRIHAWHRSCEESRRLEEIPGVGPIVATALIAEVGDWKAFASARSLAAWIGLVPKQHSTGGKERLGGISKQGNRYLRWLLVAGAMAVIRYARRHGTKRLWLTRIMERRPIKVAAVALANKIARMAWAIIVRGERFREPRLLLAA

SEQ ID NO: 380060 - protein, 367 aa, unidentified
MTCSERRAETFIGLDVHKKQIVAAMLLQDGEVKETRQPHTAPGITRLVRWMRKESQGGFECCYEAGFCGYDLCRQLTGHGVLCRVVAPSQTPHAPGDRVKTDRRDARKLAWYLRAGMLSEVRLPTEEQEALRGLCRCRDDARRALHTARQQLVSFLDQRGLFYPQGPHWTTRHWSWAKSLRFENAIAQMTYEQYLSHVELEEARLREIDAQLREVAESEPYREPVGYLCCFRGIQWLTAILLLGELYDMGRFESPRTLMAYLGLTPSEQSSGEREQKVDVYLNFIGRFEVPEVTPAPRQDPKGFHDWIIGQGILVNQHIHCDKRIAGRAMCYRRVQIVLIIEQRWITRGLYPNRTTTRAVHTPSNTP

SEQ ID NO: 380061 - protein, 530 aa, unidentified
MAEDRMVRLRSDSYGRRITGVICTRSRAWSRVFPVVSLVIRSRLGDFNHTIPTRVGMRSTLPIQGASAMKKHTKEKNHTQQKKERRQPAGLPIINPDAAGIDVGSEEHWVAVPGDRDEQPVRCFGCFTADLHEMARWLKACKVTTIAMEATGVYWITPFQVLESYGFEVKVVNARHVKNVPGRKTDVEDAQWIQRLHSCGLLAGSFRPDDNICVLRSYWRHRENMIQSASASIQHMQKALIQMNVHLHKVLSDITGVTGMRIIRSILEGERNPRTLASLSTSGVKTSRETIAKALEGDWRAEHLFVLAQALEWYEFSHRQIAACDTKIEEHLGSFQSKADPQDLPGKGNITPRKNQSHIDLRAELFRITGRDYTRIDGLDTLTVQTVVSEVGLDSSRFPTVKHFTSWLTLCPENRITGGRIKNSRTRKSANRAATAFRLAAQSLASSKTALGGFYRRLKARLGSPKAITATAHKLARIFYKLWTTGEIYEDKGAHYYEEQYKNRMLRSIKRKARDLGYDVFLQPVAGQVS

SEQ ID NO: 380062 - protein, 339 aa, unidentified
MLYLGIDQHKNQLTVNIRNEQGDVIQKGQVSTNHTDIDEFFTAFVKKARKHRGYMAIVEVCGFNDWLLEKLKKTQCSEIVVIQPDNSAVNKTDKRDANALCELLWNNRNRLRGGQRPNGIRRIFPADSADAQVRQLANFRQHLIKQRTRVINKIKGIINKHNMAQDAASEDCSTKKFRQWVVVVQLPVIDRLEIDMNIQSWELYDKQIVEVEAELVKRSETRMKDVLRLKAIPGISAMGAITLLSRIGDIKRFNNPDSLANYFGLTPGCHNTAGKQRVGGITKRGNAVARQVLNFAVIHVVRKDPAMKEWHKRIKNRRGAKTARVAVMRRMATIIDTVS

SEQ ID NO: 380063 - protein, 400 aa, unidentified
MLSIGIDVSKGKSTVCGMKPGGEIVYTPFEVQHTREGMSELVSLLRSSGEEVRAVLESTGSYHCPVVAALLENGIFVSVVNSLRMKRFCSQSIRKVKTDRIDAMQIALYGLAYWQELQPTKLPEDTYRELQLLARQYYQMTSMLIKAKVDFNALCDQVLPGMQELMSDHAGRHKLSDFVLRYHHTTHILEMGETRFRKDYCKWAEKKGYRNCERMAALIFATAQNGIPVLPNAPSTQIVITEAIRVLHTVEASRDAILTQMQALAKTLPEYSLVREMPCIGDTLAPRLIAEIGDVRRFHSKRALIAYAGIDAPPYQSGKFCANNRHISKRGNRYLRKTGYEVMQSYVMHKPANDPIFTFIEKKRGEGKSGKLAMVAGLNKFLRVYYGKVTELYRSLPAIE

SEQ ID NO: 380064 - protein, 409 aa, unidentified
MNPLFVGIDAGSRQNAIYIMLPDGSKHSSFTVQNNLGGAQSLVKRVAAAALDQHLNHIVFGLEATSVYGDNLVCFLREDAHLRPFSCKIHVLNPKQVKKFKDAYPELPKNDAIDAFVIADHLRFGRITAAVYMDDYRYKALQNLTRARFYSVQNLTREKQRFMNYLFMKFSGLAQEKVFSNNYGTTALAVFEEFKSPEELATISLDVLTTFLIEKGKNRFPNPEKVAKAVQAAARGSYRLPKTVNDSVNQVLSISISSMRALQAQIKAFDKEIERQFENIPNTLTSVPGIGPVLSAGIIAEIGDINRFKSHAAIAKYAGLAWSQHQSGQFEAQNTRLIRSGNRFLKYYLCEAANALVRCDTEYRSYYDLKFKEVNKFQHKRALALTARKLVRLLFRLLKENRLYIPVTT

SEQ ID NO: 380065 - protein, 333 aa, unidentified
MNHIAIDLGGSKSQVCIRNGTGEILEEKQVKTIQLSGYLAQQERSRVVMETCAESWAIGDAAKLAGHELRIVPGHLVRTLGVGRRQIKNDQKDAQVLSEVSTRIDLPSVHLRSVFAREIQTKLRMRSCLVSSRTSLINNVRGWMRTQALRIRTGASPSFPERVRSQGIDLPSHVIRQLEQIQALNQAIVAADQELGDLAQPISGIEQLRSIPGVGTLTALAFLSTLDEVNRFGNAHRFQSYVGLTPGEHSSSGKIRKTSITKAGSSLFRHYLVQAAWALYLHRPNEPMVQWMKGIEKRRGKKIAIVALARKLAGILFAVWKTKRPYQARLTSA

SEQ ID NO: 380066 - protein, 354 aa, unidentified
MSQKLNVAIAVIGIDIGKNSFHIVGHDHRGAIVLRQKWSRGQVEARLANLPPCLIGMEACVGAHHLSRKLQMLGHDARLMPAKYVRPYSKGQKNDFRDAEAIAEAVQRPTMKFVATKTADQLDLQALHRVRERLVGQRTGVINQIRAFLLERGIAVRQGLHSLRSELPGILATRTDVILPRMLRIIEDLAGDWRQLDARIEGLSSEIETLARQDQACERLMTVPGIGPLISSAMVAAIGTGDVFSKGRDFGAWLGLVPKQLSTGDRTILGKISRRGNRYLRALFVQAAWVVLVKVKCWERYGLKSWIEAAKKRLHHNVLAIALANKLARIAWAVLNKGRAFECVKTEETASRAA

SEQ ID NO: 380067 - protein, 347 aa, unidentified
MVYVGIDLHRNRSQIAVLDQQGGELLSRRIVNEPNSFLELLNGLGDDVQVALEATYGWEWLADLLEDAGYELHLAHPLRTKAIAAARVKTDAVDARTLAHLLRTDLLPEAYIAPRELRDLRDLLRHRVALTRIRSALKQRVGAILAKQGIARPYSNLFGPGGSRFLAELELREGPRRRLDSLLALIAAFDREIDNTTKEIEQRASEDPYVDVLCQIRGVGRYIAMLVIAEVGDITRFPSARHLCAWAGLTPTVRSSDGKARLGHISGQGSPALRWALVEAAQHAPTGGGPLRAAYERIAKRRGKQVAKVAVARKILTLCYYGLRDGEIRCLAPRAKARTIRTTAVTR

SEQ ID NO: 380068 - protein, 453 aa, unidentified
MPKIRSSTSQNLTQVNPGAAAVDIGSTMHMAAVNPEQTDMPIRAFGTFTHDLHDLAAWFRSCGVTSVAMESTGVYWIPAFEILEQHGFEVILVNARYAKNVPGRKTDVSDAAWLRQLHSYGLLRGSFRPNAMVATLRAYLRQRERLVEYAAAHIQHMQKALMEMNLQLHHVVSDITGVTGMKIIRAIVSGERDPYVLASLRDVRCHSSDETIRASLIGNDRDEHVFALSQSLDLYDFYQLKMLECDRRLEAAIAAMTSDPEAPLAPLPKIRTRTKQTNAPSFDVRAALYGLTRIDLTQIHGLGSSLALKLIGECGTDLRAWPTAKHFTSWLCLAPGNKISGGKVLSSRTRRSSSRAAALLRLAATTLGRSDTALGAFYRRLAGRIGKQKAVTATARKIAVLFYNALRFGMVYQDPGAAAYDERHRGRVIANLQRRVRSLGFQLEPTHVGESVS

SEQ ID NO: 380069 - protein, 350 aa, unidentified
MPRKFDTAVVTIGIDPGKNTLHLVGLDARGEIVLREKVARTKIVSRLANVPPCLIGIEAGMGTHYVTRELLALDHDVRQVPPVYAKPFRQTHKNDFRDAHAVAEAVQRPTTRCVPPKTDEQLDLQALHRVRYRLVGQRTAIINQIRCFLLEHGITVRQRLHWLRHALPDILAQRIDVLSPGMVRILEDLAQDWRRLDDRIEAVTDEIDALSKNTEPCRHLMTIPGIGPIISSAVVAAIGNGTAFACGRDFAAWLGLVPKQISTGDRTILGRITKRGNRYLRMLFLQAARVVLLRPKNWMKHGFGPWLAAAAQRLHHNVLATALANKLARIAWSVLVQQREYEARLSVAAI

SEQ ID NO: 380070 - protein, 330 aa, unidentified
MNINKEVYVGLDAHRETIHGTALNKEGEVISSCNFPANKEAIEEFMKFFSIGNTHIAIEACNHWKFAYNILHEKGYEVMLANPEKCRQISKDKKTDAVDSMIIADLRRINYLPTVTILSDKILKLRDLCRHKSNITRMKSKVQTKIKSHLSRNGIPYERSLWKKEKIVWLKSLKDLEIDSFLRIYDLLRNEEMLAKKEVIKIAMINQDIILLKTIPGVGHYGAVMIYEEIGDINRFKEPKNLHAYAGVVPGIYQSGNKSRTKTRSQVNYWLKWIAGQCAGSIFRRKNKLQKYYLKMKSRRGCKIARKATARKILTIAWHVLNEKNPYKES

SEQ ID NO: 380071 - protein, 355 aa, unidentified
MTHRTYQPRNYEAFLGLDVDKNSFSFTVTDHFQTKRSKKMPSNPEHLYNYIHKHFDLNKIICAYEAGPTGYHLFDYLNKNGVKCFITSPASIPKASSDRVKNNRLDSIKITDYLMSAKFKSIRVPQGDYRELRDLVKIRENYARDRKTAKQRIKALLLFANLYPILKDSDIKWSRNYIKELIQLDCPFSTRQRLDMLLDDLEYARKKMLTIHRTLKSFCKEHSEINQYMHYLQSIPGIGFVVAVSILGKIGDPKQLQNPRELAGFIGLSPSEKSTGDSVNRGSITHLGDKTLRFMLVQASWAAIRKDTQLEQFYNRVRNKNNPRYASKIAITAVARKLTQIIYRILKDKRNYLQH

SEQ ID NO: 380072 - protein, 343 aa, unidentified
MKIKRVGVDLAKNVFQVHGVDSKEHPVWRRRLSREKWLKSLLTKVEPGCEVGMEACAGAHHWARELQAHGLTVKLVAPQFVKPYIKSNKNDANDAEAICEAMSRPTMRFVTVKSVEQQDIQAVHRIRSELVSQRTAKGNQIRGLVAEYGLVAPQRLSHLRRAIPRWLEDAENGLSGRLRRLLDGLRGDLVELGRRVAELDEEVEAIAKAYPVAQRLQQLRGVGPLTATALIAAVGNGEQFAKGRDLAVSLGLTPKQHSTGGKERLLGISKRGDPYLRSLLVHGGRAALYAARNKDDRLSVWVTNLAARSHPNVAAVAWANKTARIAWSMIRHGTDYQPERATS

SEQ ID NO: 380073 - protein, 392 aa, unidentified
MVCVGIDVAKDKHDCFIISSEGEILADVFTIPNNAEGFDTLLQAIRRSTRPEDKIKVGLEATGHYSYNILGFLLDKGLPTYVINPLHTNLYRKSLSLRKTKTDRVDARTIAAMLMSDVDLKSYTDTVYHNEELKSLTRYRFDKVRERAQLKSSIARLVCILFPELEKLVPTLHMASVYTLLSEFPGAKQVASAHLTRLTNLLHEASKGRYGREKAIQIRDAARISIGSAMPAKSLELKHTIHLIRELDAEIEEIETEIDSVMETLHSPITSIPGIGNRMGAMILAEVGDFSNFDSADKILAYAGLSPSTYQSGQLTSSYAHMEKRGSRYLRYAIFNATKFVCNWDPTFAAYLAKKRNEGKHYNVAISHAAKKLVRLIYTMEQTRQPYRRAAV

SEQ ID NO: 380074 - protein, 335 aa, unidentified
MALPCHPTERALSVVTIGVDPHKASHTAAVLDAQQQVLARLRVPSTRAGYQALRRWAARWPQRRWAIENAAGLGRPLAQWLLGDGEPVVDVPAKLSARVRVLSTGHGRKTDPADAVSTALAACGSTPLHAATLEAHATTLRLLSDRRDDLVARRTQVLNRLHSLLAVLAPGRVPPHLSAEQATVLLRRVRCTAGPAQTRRLLAKELIREVRQLDTARTASEKQIAAAVKDSQTTRAEWFGIGAVLAAKVLGRVGDLRRFPSAAHFASYCGVAPIEASSGDVVRHRLSRAGDRQLNYALHIMATCQARGHPEGRAYDLRRRLADIVYRQLRRDAQG

SEQ ID NO: 380075 - protein, 351 aa, unidentified
MEEYIAFDSHKRYTWVEHQEANTGKTRAYRLEHGAGAIGQALAGCAPGTAVAIEATANWYWIIDEIEQAGCVARLVHPRKAKLMMGLINKTDKLDAHGFNTLQRNGTLPTVWIPPGGLRELRELTRTRLVLVAQRTRWKNRITATLAKWGLPPSAYSDPYGKKARVELEQQLERLPEQTRWATRQMLAQLDSLSEQAQQFEKRLEELVEVTPMMQWLMTLPGVGVILGATIALEIGEIERFANAERLASYSGTTPRVHSSGDRTRHGRTRPDVNRYLKWAFAEAANSVAVNHRRNPERHVSRLYTRLRASKGHARAVGAVARHLAEAAFHVLQRKEVYRDPSLNPRPERGV

SEQ ID NO: 380076 - protein, 341 aa, unidentified
MSTMIGVDLAKNVFQIHAATMSGEVLFRKKLTRTQFQRFMAQQDPCVVVMEACGSAHHWAREMQKSGHEAKLIAPHYVSPFVKRHKNDAADAEAIVEAAQRPEMRFVEPKTMEQQARGVLFRARDLLVRQRTQLINSLRSQLYEFGYVAPIGPRQLTVIAEIVDDPNTDLPAIVRSASRDLLDEIAEKNGRIDALREQIQQDAALAETARRLQTIPGIGPITAMAVEAFAPPMESFRRGRDFAAWLGLVPRQHSSGGKHRLGRVSKAGQADIRRLLITGAMSRLNWMGRKTIQEGSWLAQLAARKPRKLVAVALANKMVRTIWAMMIRKEDYRDPAQAMAT

SEQ ID NO: 380077 - protein, 457 aa, unidentified
MSKRSKKAKSHSFKVPNLPKHLQHINLNAAGIDIGSERHMVAVPEGRDTVSVREFGTFTADLEALATWLKQCGVTTVAMESTGVYWIPLFELLERRGFEVKLVDARHVKNVSGRKSDVLDCQWLQQLHTYGLLAGAFRPPDEVCVLRSYLRQREMLIQTASMHIQHMQKALQQMNLLLHNVVSDITGVTGMKIIKAILAGERNPRVLARNRDERCQNTAATIAKSLVGNYRAEHLFALRQAVDLYETYQAKIADCNQALIKQVEQQPDISDEGPPTPEKPVQARDRLREGVDVRDLLFKKSGVDLFAIPGLAADTLLTLASEVGFDLTPWKTEKHFASWLNLCPGTRISGGKLLTNKTKRHPNRATQAFRMAAASLHHSQTALGAFYRRIKSRAGGKYAVTATAHKIARIYYAMLTQGTSYVELGQQAYEQRYKERRLDHLKSQAKSLGFQLVPCTT

SEQ ID NO: 380078 - protein, 418 aa, unidentified
MNEDGNTRGSRRYIGLDIHKKYSVIGGVDREGRVVLHAVRVEHADLEGWLKKNLRATDHVVFESTTNAWHVYDLLEPLVERVVVANPAKVKQIATARVKTDVRDTFILARLLAANLVPEVWVPPVHVREMRQLLSQRRQLVETHTQIVNRMHSVAHRHHLQHERGKRFNEKNTLWQKDKRLSKVEQFQLELEMENRAYIEKQISRIGKEVAKMTHQKPWAQSMTYIMQLPGFGVITGMTVLAAIGEVQRFGSAKHLASYSGLTGGLDQSGTKLVQKGITKEGRKELRWALVEAAQRAVKSDPVWKRKFQEMEKRMHRNQAIVAVARQLLELVWYVLTRHQPYRHFSQERIAYKYLTWAWQMDEAARDGLTRQQFARYYLMRLGIGHDLTRIALDPKHPRKIASEAELLALRPELKQTE

SEQ ID NO: 380079 - protein, 423 aa, unidentified
MTKRSSNPTDAVLVAIDMSKHRQEVLIERPEGGRRRRMTVMATKADYDRLATDLSDIGRPIIVGFEATGNYHRTLAHRLLSAGFELRLISSVALARTREALHNGWDKNDSKDAQVILHMLRIGATQRYVDPLAAGINDLQEMSKTHEAISKAKTQTWHRILTHYLPLYFPEIERFAGNSRSDWFLALLERFPTPTSMTVLGQETFSREAWDLVGRKVSKARLINDIYETACASVALPVDEDSVSIAMFRMVIAQARNLIRQRDEIERTAHAMLAENRDYQLLRMIPGIGPINALTILAEAGDLRRFSHHRQFLKFCGLDLATRQSGTFRGRTMLSKYGNARLRRTFWMAAQVAARQRNNSFRDKLGRYTAGHADDADRRRKAMTALTAKMARVAHAVIKTGTEYRPFLERSDARWKDPSLQVP

SEQ ID NO: 380080 - protein, 338 aa, unidentified
MIGVDLAKQVFQLHGATMTGHVRFRKKLSRAQFVRFMTDHAPALVVMEACSSAHHWARELDQLGHEVRLIAPQYVRPFIKRQKNDAADAEAIVIAAQRPEMRFVEPKSEQQQARSMLFRGRERLVRQRTELMNALRSNLYEYGYVAPQGATHLNRIAEIVEDPDTILPEIAREECRDLIEQIAEKTARIEARMKKIKAMASETDMARRLQTMPGVGPLTAMAVEAFAPDMSHFRSGRDFAAWLGLVPRQHSSGGKERLGRVSKAGQADIRRLLIIGAMSRLNWMGRRSIAPGSWLARMMAKKPRLLVAVALANKMARAIWAMLTRNEDYRAPAQVAPA

SEQ ID NO: 380081 - protein, 337 aa, unidentified
MRFIGVDLHSNQITVCYLTKTGKEKLATFALSQLPDFQKSLRPTDRLAVEATGNTRWFVGQIKELVEQVVIVNPNQFEVIRKSVKKCDRHDARALAQFLSKEMLPEARLKSESAAEINSLATTRDKLVKLRTTLVNKLHALMRARGIASRKSQFLSQKGLRGVLKQDWSATSRVEVEVIVSQIGSLNEGIKRLEQQLKTSGEQLAGQKNLVSIKGIGPKAAAILLAVIGDVSDFESEEKLGSYFGIVPRVANSNETVHHGRITKRGSKLGRTTLVQCTLVAKKYSPYLSRFYERIKARKGSGKAIIATARKFLGIIYRTLKNDWVFEDFPNFVLAEG

SEQ ID NO: 380082 - protein, 360 aa, unidentified
MAQARTSVAFDVHVAGTVAAVLDHESGELRRRRLSGRSEDVAAFAAGLPGPVRATYEAGPTGFGLARRLEAVGVECLVCAPGLIPRGPSDRVKTDQRDAERLVRLLVAGELRRVAVPSVEEESLRDLVRAREDLRGDLMRARHRLAKLLLRHDVRFDGPERNWTQAHLRWLASVRFEHEGSQRAFADYRGSVEALVLRRAQLESDIARLLPESPFAETARRLMCLRGIDTLTAAGLCAEIGDFNRFAHPAQVMSFLGVTPSEHSSGGQRRLGPITKSGSQHARRLLVEAAWHYRRPPGVSTNLRRRQADADPRIVALSWKAQRRLHHVWQAMEARGKRRTIIAVAAARELAGFCWALATE

SEQ ID NO: 380083 - protein, 519 aa, unidentified
MATLATARGRRTRRASEIHRPNGAIHPRVQAVGPEHFGIVSCDCAKARSKWMLADFYGNVLIDPAPLPHTKPDLEAAIGRLRTALAERRITDQIVAVERTGRYHLVVKHAFAAAGFEVRVVHPFATKQFRQPADPGNKTDDTDLAAIHRAAVNGFGLLERPLDPVHAQLRLLARHRRDLVRKNAAVRCQIRDHLNVYLPGYDACFADPFAGEVALAIARRLDSPRAIRQAGVAGLARLLRDRGVRFQAPTLERLIAWAERAPEAAEEAAVHQRIVAALDDDRLTKLQQIAALERDLAALLARTPYVLLLSIPGINVVSAAEFAGEMGPIGNYASSRSITRRAGLVPSRHQSDEVDRPDGPLLRRANRDLRQAILTIADNLITCNEHFRGLARKWRQEGKAPQQAHVKVAARFCRIAYQMVAGGRVFEHPCCRRRDYILSKLIKFQREHATPLGQAQATLASAVEQLPRAEHGAEAAPLVAELETAAGRRGRGPCPIGELLPAVLAKLGVTGVESTPSGE

SEQ ID NO: 380084 - protein, 412 aa, unidentified
MRVIVERCCGLDVHQETVVACLLIGASGDRPTKEVRTFRTVTRDLEALRDWLAAAGVTHVGMESTGVYWRPVYAVLEGHFDLIVGNARHIRNVPGRKTDVKDAEWIADLVRHGLIAKSFVPPRPLREMRELLRYRRKLTESQAAERNRLLKLLETANIKLASIMSDVFGVSGRAMLRALIDGQASVEAMADLARGQLRRKRSDLILALEGRMEEHHRFLLATQLRRLEAIEQDIAALDLRINERLEPYRMPHALLTQIPGVDWLVAAVIIAEIGVDMSVFLSVYHLSAWAGVCPGSHESAGRQKSGRARKGNVHLRTMLVGAAISAARKRGSYLKDKFHRLKARRGAMRAALAIAHKILVSAYHMLAKGLAYHDLGEAYLDQIGQSRTVANLKRRLERLGYHVTLERTTQAA

SEQ ID NO: 380085 - protein, 350 aa, unidentified
MITLGIDAHKHTHTVVAVDEVGRELGTKTTLATATQDHLALVRWADGFGPERSWAVEDCRHLSRRLEADLLRAGERIARVPPKLMAHARDAARTYGKSDPIDALAVARAALRYPDLPVAQLDGPTRELRLLVDRREDLVAERTRAINRLRWHLHELDPGWDPKPRSLNAYVNIDAVTRRLVGIDGMVARLAAEVAADVRSLTVRERTLHKEIARLAAELAPHLLELVGVNALTAAKILGEVADVRRFTHKDAFAKHNGTAPLPAWSGHPKRHRLSRTGNRQLNAAIHRIVITQARCHEDAIRFLKRRSEMGNTPTEARRALKRRISDVVYRALLLDAEPHVCSTRGGGLT

SEQ ID NO: 380086 - protein, 342 aa, unidentified
MSVMAGFDVHRRQITFDALDTETGEVTRGRIDASPAAVRLWTERLGSREVHVAVEACTGWLFVCDALVASGAVAHLAEPVETRALRGRNRRAKTDREDARWLRELLAEGRLPEAWIPPEHVRQWRSRARMRHTLIDERTQWLQRIQASLFHHGVGGTPERLRSAEGREFLQRLALPEDARERIEIALAMIDAIEAQLIPLERELRQLARRQAGCRALMSLYGMGELTSLVTLCELGDVQRLSASRKAVRMAGIDIGVHRSDRRARAGKLTRQGSPQLRWALYEAALAACRPSSPDHADYQALKARGLSHTRASLTIARKLARRSYHVLRELGPAALEPVAPN

SEQ ID NO: 380087 - protein, 349 aa, unidentified
MTKALMAGIDLHSNNVVIGIVDQAGGRVKHQKLACDLEQIKQFLRPFKSRLKSVAVESTYNWYWLVDGLQAAGYPVVLANPAKITQYSGLKHADDQSDAFFLAELLRLGILPTGYIYDAELRPVRDLLRRRMSLVHQRTALMLSFKSLFTRTTGGQMSLSRVKAMEVKEAQELYAHPANQLIAGLQLQHIEQLDASIGRLEKAVLAVARELPCYPKLKTLPGVGIILGLTITMEMGDIKRFAGPGQFASYCRTVAAECTSNGKSKGENNRKCGNKYLGWAFVEAANFAKRYDERCRRWFDRKAARTSKVIATKALACKLAKAAWYLVAEETDYKPGRMFPELAGGAMEK

SEQ ID NO: 380088 - protein, 363 aa, unidentified
MFTERTSVGLDVHARSVAAAAIDGVTGELFQAKLTPSHEHIRSWVQALPGPVAVTYEAGPTGFDLCRGLTAAGIRCEVAAPSKLQKPAGERVKTDAKDAIHLAKLLRLDQITAVAIPSVEQESARDLVRAREDCRGDLMCARHRLSKLLLRHGIVYYGGKAWTGKHDTWLRHDALGQLSLRATRMAFDSDYETVLAVKARRDRLDAAIDQMAAESEFTPLVRRLGCLRGVRTLTGFALAVEIGDWHRFTGNTIGSFVGLVPSEHSSGSSRVQGSITKTGNTHVRRLLVEAAWHHRARYTVGKTMRDRWELAPAAARVRGDEGNRRLHHRWVKFIERRKRPTVANVAIARELAGWCWSLATLEE

SEQ ID NO: 380089 - protein, 464 aa, unidentified
MKIAKVNQQTRKGKKTRVPSFPIINPNAAGIDIGSAEHWVAVPEDRDEQPVRKFACFTQDLHAMAAWLKKCKVETVVMESTGVYWIPVFQILETHGFEVKLVNAKQAKNVPGRKTDVLDCQWLQRLHTYGLLSGSFRPDDAICVLRSYWRHRHTLIGYISAHVQHMQKALTQMNVQLHKVISDITGVTGMSIIRAILSGERDPVKLAQMKNYRIRSTTETIAKALEGDYRQEHLFSLRQAVELYDFYQQQIQACDHEIEAYLSQLDGINIASNPIPPSRRRIRTHKGNQPDFDLRTHLYRISGVDFTQIDGLDVLNVQTILSEVGLNPDAFPTVKNFTSWLAICPNNRITGGRIKSRSTRKAVNRAAEAFRMAAYTLSHSSSALGGFCRRMHARLGAPKAITATAHKIARIFYQMWKYRTPYQDLGADYYEQRYKQRLLSNMKKTAKQIGYFIELTPMPQSAVS

SEQ ID NO: 380090 - protein, 438 aa, unidentified
MSNKVIFNLDDLFISVGIDVGADFSWMSIALPNQQFVGKPYKILHNSIDSLTTAVSKIKEAEELYSLESRIFLESTGIYHYPLFCYLRDKGFNCSVINPIITKNSTNINIRKVHNDRFDSKKAALVGLKPDLKVSLMPSDLALNCRNLCREYYDLMDNRSAYVNKLQGELRMAFPQYLGIFSKVTINTSLTLLETYTSPSAFLEADKQEIIDIIKSTARFGLTYAQNKYNAIIQAATDANQFGYIIDSNIKRIRLYISFIRKYDEEINSILESLHELVDANEDSDFVKQIHLIETFKGAGFLSAVSIMGEIGDFSAFSKPKQLFAYFGLDPAVKQSGKFEGTKVQMSKRGSAIARRVIHTLTLQSISISRNGEAKNPVLREYYLKKCDSKPKLVAMGAVSHKVCNMIFAILRDNKPFKIIAPQEHIKQYNSAKCDIAA

SEQ ID NO: 380091 - protein, 392 aa, unidentified
MYIVGIDIGKNHHEASIVSPEGKQIGRSLRFATTHKGADSLMSFIFKNIGNSPCVFGMEATGHYWYPIYSFLKAKGYTIYVINPIQSDSLRKMYIRQTKNDSIDSFLIAEVIRFGQFGTTSMADENILAMRQLCRYRDSVISSRTEIKLRIGTIMEQIFPEYEKQFSSLWVSTSMGILEKYFTPENIENAPIDELFEIIKDKSHNRLTKAKAISIKEAAADTFGIKIAQDAFSFQLKQLIDRMNFLDKQIEALDIEIMKYYEQFDCYLHTIPGIGMIATATILAEIGDIHRFKSSSALVAFAGIDPTVRQSGEFNSTHNHMSKRGSPYLRHAIFLAATTCSFHNSPLNAYYKKKRDQGKHHLTATRAVARKLTTVIYAVLRDSKPYEPKKFC

SEQ ID NO: 380092 - protein, 346 aa, unidentified
MEHYAGIDVSLELSSVCVVDAQGQIVREVKVASEPEALVALFASLGFAVKRIGLEAGPLSQWLHAGLRRAGFDTVLLETRHVKAALSAMMVKTDRKDARGLAQLIRMGWFRPVHAKSMSSQEVRALLVARKQLLGRLIDLELSIRGILRGFGLKVGVVTRKGFEGRIRELVSGHITLERVAGAMLSARATLKVEYEKLHKTVLTIVREDAVCRRLMTVPSVGPLVAITYKTAMDDPNRIAKSKAAGALFGLTPKKYQSGEKDVTGGITRTGDEMARTALYEAANVLLARITRFSKLKRWGMDVAKRRGSKRAKVALARKIAVILHRMWVDGTTYRWTNAQPTAVQV

SEQ ID NO: 380093 - protein, 310 aa, unidentified
MFVGIDVSKDRLDVGIRPHGESLGFTNNDEGISELVRMMTSKKPTLVVLEATGGFELPVAAAMAVAGIALAIVNPRQVRDFARATGKLAKTDKIDAAVLARFAEAVRPEPRPLRDEESRALSALVARRRQLVEMLVAERVRRATVHRSQWKSIDRHLAFLERELTRADLELGKAIEQSPLWKAKDELLQSVPGVGKATSRVLIAGLPELGLLDRKAIAALVGVAPFNCDSGKMRGKRSTWGGRADIRAALYMAALVASRRNPVLKAFYERLCSNGKPKKLALVAVMRKLLTILNSILRHETAWNVKLATP

SEQ ID NO: 380094 - protein, 400 aa, unidentified
MRAVFGIDVSKASSEVAILVNGEKVHGYTISNDALGFARLLGDLKTVHKPEIIFEATGVYSRRLQAFLEDNGYAYTRLNPLEAKKQLDSLRVRKTDQIDAEKLAQSQFVLNRKPTYVQEEVYQELRDLSRFYQNLTEDIVRAKNRLHKVLQVTFPELENILSTPSGEQYWNLVIAFPCKDCVLELSKDKLSESIRQSTSKRISDKRVAYLAEKLIALANQSYCAVKKTSPILEEVRYYAKELLRLSEQRQTVLDQMVELAQPLPEYDILLSIPGIAETTATSIIGELGDIRRFQSANQINAFIGIDLRHYESGNFLAKEHITKRGNPYARKILFKCIHNIASASHTNPCHIADFYEKRKRQSQTTSTKPHTIASIHRLIRTMYYLITHNKLYDYTSTQNR

SEQ ID NO: 380095 - protein, 336 aa, unidentified
MIVGLDVHKRMCYGTVMAEKGVAVKQAKFTNAPEGLEEFMEDIDMALVAMEAGYCWQPLYDRLEETGYDVRLAHPLKVKAIAQAKVKTDKIDSETLAHLLRADLLPESYVPPKDIRELRDRVRRRAFLVGMRTMLKNRVQAELAKRGIKPGVPLWTREGRILLDGLELEAVDQVLPVMDVLDRQIKEISWGLKRMCGEDPRARLLTTIPGVGYYLALLLVSEIGDVNRFPDSEKLCSYAGLVPRVRRSGGSTHHGGITREGSKWLRWGLSQAVHVHLRSETNLTRFYRRLAGKKPRQVAIMATARKMLKVVYWMLRNNEPYHPGPDVVDPVVGRGL

SEQ ID NO: 380096 - protein, 353 aa, unidentified
MTNTTIETIGCDLGDKKSEICVLDAEGNIKLRASVRTTPKGISAFFVRAAAHVVIEVGAHSRWVSGLLRGLGHQVTVANPRRVKLISESNNKTDRHDAELLARLGRTDVKLLAPVEHRTPQAQADLAVAKARDTLVATRTKLVNHVRGTVKSFGERLPMCTTASFARQTRVLVPTELKAALEPIYQVLDRLDEQIKEQDKLIERVAKRHVDVDVVSQASGVGVLTALVFLLTIEDKNRFAKSRMVGAFVGLRPRKSKSGDGDPQLRITKTGDPFLRRLLVNGANYILGPFGQDSDLRRWGLELAKRGGKNAKKRATVAVARKLAVLMHRLWVTGEVYEPLGYQSRRMEETAAA

SEQ ID NO: 380097 - protein, 425 aa, unidentified
MNFTQNEKISQVTNETLVVGIDISSENHYVRAFDWRGIELSKTFKFESTSYGFKRLMEWLDETCKSNSKTKVIMGAEPTGHYWFTLAEYLKGNNIKFVFVNPMHVKRTKELDDNHPSKNDRKDTKVIAKLVIEGRYLIPYIPEDIYAELRVANERRMRITREIVAIKNRIQRWFAIYFPEYTHVFGSWECDSSIEVLRNCPLPADVMSLGAEDINQLWREKKIRAVGIKRANALIETAKTSVGVKNGANAARFEMSMLIEDYLIKKEQEARIIEILKTLCIQVPNSEKLLSIKGIGILTVASFFGEVGDIRRFESPKQIQKLAGLAIANDDSGKHRGKAGISKRGRKLLRYTLFQAVISLLMHSPEFRYLHHYYTTRSNNPLKGKQSKIALCCKLIRVFYAILTKGVEYDSEKLLYDIVRPELAA

SEQ ID NO: 380098 - protein, 371 aa, unidentified
MRRDSTIKFIGLDVHSKTISVAIADEGRKGEVRHCGTIENTFGAIDKVIKSLTATGIELRFIYEAGPCGFTLYRYLSGNGFTCIVTSPAMIPRPKNVRIKNDRRDALTLARLYRAGELTGIYVPEPEDEAIRDLARTRDDARVAERKAKQRLNSFLLRQNLIYRGKTKWNRTYFNWLGSVGMKYPAQKVALQEYIEAVNECTGRVARLREQIGLAVEEWRMAPMVKALQALRGVSLICATVTVAELGDLSRFQNPKELMAYLGLVPSEHSSGETIRRGGITKTGNGHARRVLVEGAWTYKHHARVTLPLIKRQRDLPKSICQISWKAQLRLCARYRKMVARKKPNNVVVIAIARELAAFMWAIAQEVRAAA

SEQ ID NO: 380099 - protein, 317 aa, unidentified
MQEPTLFIGVDVSKAELVISMEPERRALSIANDAASINCWLREIPAHALIAMESTGRYHGLLALLASQAGLKVYVLNARDVFFYARALGTRAKTDGVDAGVIARYLTEHHARLHPWQPGSALQQRLLELLQRRAQVAQHRSALRQVFTGIKTEGIETAGLHAAFDALLRSIDKQVAGLIASDALMAQGCERLRTITGIGPQTSALLATLLSRFEFTNADALVAYSGLDPRPNDSGAKRGRRRLSKKGPPLLRRQMYLAGFAASHSKALKPLYQSIRAKGFATTEALVILGRKLLRVAFAVWKGNAVFDPARLMPNSA

SEQ ID NO: 380100 - protein, 325 aa, unidentified
MGVDVSKDKLDVHVDNAKKPFSVPNTPAGRGKLIARIRGLPLARVVVESSGGYERPLLFEMLEADLPGSHVNPRVVRDYAGSFNQLAKTDPVDAKVLSCFGRERQPRLFTAEDKLRHMLQDLNRCRRQLLEQITALKNQAESALHPSAVKVLSNSAAALEEQLEVIDRDVQAEIDKLPELKRRQELLLKVEGIGPVTSRTLVIELPELGTIDRRKLAALVGVAPFNDDSGTINNRRIIKGGRSHVRAALYMATVTGVRCNPVLSAHYGRLIEAGKPPKVALVACMRKLLTHLNALLGHADDAGAAGPGAAPQAKSAPARGGGEKE

SEQ ID NO: 380101 - protein, 424 aa, unidentified
MTYPTTASEQTYIEVTGGVDTHKDTHTAAALDASGRLLGHREFAATAAGYAALLAWLGTLGQLVRVGVEGSGVYGAGLARFLQAAGVELVEVDRPDRKTRRWQGKSDPVDAEAAARAALAGRASGVPKTRGGKVDALRALRVARRSAVAARADAQRQIKALIVTAPDALRVTLGGLGDRELIAYCATRRPDRAAAGDPTVATMLALRALARRHQQLSVEIDELDALIGPLVTAINPTLIGLSGVGTDVAGQLLVTAGDNPQRLRSEAAFAMLCGAAPLPASSGRTHRHRLNRGGDRQANAALYRIVLCRLRWDPRTRAYAQRRTTEGMSKPEIIRCLKRYLAREIYTALLDPQPSSVPAITSTAPEASTWSARSAARTNDVCDTRSHSASERIDWGSADAEGVVPSQCSRLVPVLAGVVGNRGV

SEQ ID NO: 380102 - protein, 496 aa, unidentified
MNNCAASQNKTGERPALARSRSAESNRKTVSERLPAEPVALAQTSNRKKPLEGHNISLVDSRAKRRNPQKKRNSMNEPQPWLHQHRAFGAVDWASEKHCVVVVNQVGKIVEDFQIEHSALGWKKFREKLQPYGSIPFAIETSRGVAVEQLLEAGMIVYPLNPKSAQAYRERKAPSGVKDDRLDAWSFADALRMEGQDWKSLRPEQPLIKELRLLCRDEVSLIEQRTAFVQQLRHALAEYYPAALEAFEDWTSVSAWMFLQRFPTAEVLAEAGKRKWQNFLHSRRLWGSTDGARRMEVFARATQFAGTPATVKAKSLLALSLVDMLFAIEKHLALYRQRIEELFARHPDHDLFGSLPGAGPKIAPRLLSEIGDDRERFEGDVQNLQCLAGTAPVTKRSGKLRKRWPVHQRWACNKHLRHAIHLFSEQSLSRCVWAQRYYQHHRQKDQSHASALRRLGHRWLKIIYKLWTDRTPYEAELHHRNQLRHGSWIFQLQPLS

SEQ ID NO: 380103 - protein, 370 aa, unidentified
MEQITTIGLDLAKNVFQVHGVDAAGKVLVRKQLRRAEVLRFFAALPPCLVGMEACGTAHHWARELTQLGHTVRLMPPAYVKPYVKRGKTDAADAEAIAEAVTRPTMRFVAGKTVDQQSVLMLHKVRDLLVRQRTMLINALRGHLAEFGIVAARGPGGVTAAITALHEAQDGLPALARQVLHGLIAQMRLIGAEITKTEKQIMAWHRASAASQRLATIPGIGPITASAIAAAVPDATLFRSGRQFAAWLGLTPRAHSSGGRQRLGGISKQGDGYIRRLLVIGATAVIRFARQDNASKTWAARLLERKPARLVSVALANKTARIAWAVLARNQSYTAPAVSQGFPSARVSTPAEGNARVVRSDDEPVEPGIG

SEQ ID NO: 380104 - protein, 360 aa, unidentified
MPSIALGRSDVIVGVDTHKDEHVAFAIDGLGGTLGDPLFVPASPDGYADLLAWADSLGAIYAFGVEGCGSYGCGLARFLRRQDQKVFEVARPRRTDRRLSGKSDTLDAERAARSVLSGTGNATPKLADGKIEAIRLIKIARDTAVKAHTATLITLKAVLVTASDELRGRLEALTDHKLVVASAAFETQESVSDPEAAMRHVLSHLARRWLDLHEEIKVHSSHLKILTKAVAPQMLERFGIGFDTAAELLITAGDNSERIRSEAAFAKMCGVCPIPTGSGKSSGRHRLNRGGNRQANAALHRVVIARMQWHAPTIAYFARRTADGLSKKDVIRCLKRFVAREIYSLLPGTSNSSESGELAA

SEQ ID NO: 380105 - protein, 359 aa, unidentified
MASIASDPAGVIVGVDTHKDQHVAVALDGLGRRLGERFAPATPSGYADLLAWAARLGRVAAFGVEGTGSYGLGLARFLRRHGIVVLEVARPPRKGQRRRQGKSDPVDAEHAARELLAGTSAVTPKTAEGAVEAIRLLKVARDTAVTAHSQAMITLKATLVTASDTLRAELEPRTDFALVTACAELAVAGDLADPDVAARHALCALARRWLALHEEIKVHTRQLKRLTSQTAPALVATFGIGFDCAAELLCAAGDNAARVRSEAAYAKLCGACPIPASSGKTTRHRLNRGGNRQANAALFRIVVVRMRWHPTTIAYVQRRTTEGLSKREIIRCLKRYVAREVYRLLPVPTATPAEPLQAA

SEQ ID NO: 380106 - protein, 406 aa, unidentified
MRLFVGDDWAEDHHDAEVMDEAGKVLARRRLPAGMAGMAQLHALAGGLLGEEADGSEVLVGIETDHGPWVSALAAAGYRVFPVNPLQSARFRQRHQVSGAKSDAGDAHVLADMVRTDSHQLREAAGDSPEAAGIKVLARIHKTMIWERARETQRLRHQLLEYYPAALEAFGDLDAPDTLELLGRAPDPRQGRKLTRAQVSAAMKRAGRRNITERATAVLTALRSDQLAQPEVLALAYAAAVRSLIAVITALNEQVKLLEEQVREHFGRHPDAEIVLSQPGLGPILGARVLAEFGDDPRRYRDGKARRNYAATSPITRASGKRKVVAARYVHNGRLAGALNAQAFAALTASPGARAFYDQQRAAGHEHNDALRRLANRLVGILHGCLKTRTLYDEDAAWGHRQQHAA

SEQ ID NO: 380107 - protein, 326 aa, unidentified
MDDTGRIVKEVKVASEPEALLKVLGKPAYRFKRIGLEAGPLSQWLFSALAEAELPVICVETRHMQAVLKAQINKTDRNDARGIAQMIRVGLYRPVHVKTLRSQKLRMLLTHRKLLQSKAIAIENDLRGTLRNFGLKVGMVGKVRFEARIQELVENIPDLAVLVEPLLIVRRVLREQIVILHRRLLAIVREDEVCRRLMTTPGVGPVVALTYRATVDVPARFRKSKSVGAVFGLTCSRYQSGEIDWSGKISRCGDEMMRTMLYEAAQSMMHSKKWSWLKAWAMQIARRRGMKKAIVALARRLAVIMHRIWVDGTEFCWTREQATAAA

SEQ ID NO: 380108 - protein, 374 aa, unidentified
MDKAYYTTIGMDVSDRKTQVCVMAKAGTTPRIVMETTIPTTKDGLAKFLSTQDGAAPVVFETGMHCRWMNEVAEGMGFKVYVANPCRIRMIAESKTKNDVNDARTLARLALSDPGLLHPVKLRGPEHQKMLNLHEMRNLLVKQRTGIVVQLRAVAKSMGFRIAKCQAASFHKLERRAWPKELNDIAWPMMKNLEQLAVTIKTYEKLIRELAGTPTFKAQVERLMEIRYVGLYVATGFVAVTGGDMDRFERPRDVGPWLGVTPRQDQSGDIDRQCHITKAGSPLMRRLLVESAQMILRDGSADTDLKAKGLRICARGAKIAKRKAITAVARSLAVLMVAMLKKPDAPYVPLSARCEKELLAMRATVEAAGPGKNP

SEQ ID NO: 380109 - protein, 449 aa, unidentified
MKKSSSERHGLPVIHERAAGIDIGSPFHVVAVPADITEEPVQTFKAFTADVERMADWLGDLGVTTVAMESTGVYWIPVYEILESHGLHVVLANARDARAVPGRKTDVNDAQWIQRLHACGLLRASFHPDREIAALRSYLRLRERHLDYAAAHIQHMQKALTHMNLQLQHVVADITGATGMRIIRAIVAGERNAATLATLRDTRCKSSVETIQSALVGNYQPEHVFALAQALAMYDAYQAQLEVCDHQIAQSLQRLSRKRPSPSEPLPKPRHRARQPNALNFDVRALLYQLVGVDLTQIHGIGPYLALRLVAECGTDLSRWRTAHHFTSWLTLAPGCRISGGKVLSAHTRKTKNRVTAHLRLAAVTIGRTNTALGAFYRRLSARIGKAKAVTATARKIAILFYNAMRFGMAYQDPGADHYEQRYRERVVKGLHRRAAEFGFTLQAVEGVS

SEQ ID NO: 380110 - protein, 286 aa, unidentified
MDNHTQYSGFAGVDLAKKIMQIHFVTEDGEITDRQVKRAEFLDFFRNRSKCLIGMEACGASQDWARKLEAMGHEVHLMSPKAVKPFVSGQKNDHNDAIGIYKAMFNGVRRVPVKSTEIRDLQTLRRIRSQVAKDRIKEINHVRGLLAEYGIVMGRSVAAFNKGISSALVNLKERGGVSPLVAEELRTTVESIKTKTERQKRLDREIEQLARGCKNYENFLKTPGVGPFTAAMLCVLLCDPDIFANGRQFAAYIGLAPRSRGSGGKKCCYRHTLEIQLRQRIQGRIC

SEQ ID NO: 380111 - protein, 367 aa, unidentified
MIKNSTAFVGLDLGDKRSNVFILDQEGELIEETRIPTTEPAFRRKFASLPPCRVAMEAGTHSRWASRLLEQLGHEVLVANPRRLRLIYESSRKTDEADAEHLARLARLDPQLLSPIRHRGPEAQAHLTVIRSRDSLVRARTLLINHVRGSVKSTGARLLACSADSFHHRVEPSIPAELQPALLPIVQTIASLTAQIHAYNRQIEQLCQEHYPETQGLRAVGGVGPIVSLAYVLTLDDPDRFRKSREVAPALGLVPKRDQSGSRDPQLRITKTGDSYLRRLLVGSAQYILGPFGPDCDLRRWGLKLAERGGKNAKKRAVVAVARKLAILLHRLWVTGDIYDPFYHSRPDQTSLTETNLLVRQPETVCA

SEQ ID NO: 380112 - protein, 437 aa, unidentified
MMKKIRKNTAGIDIGAKEFFVALKGQKVKSFYTFTEDIAELIAYLTAHKIESVAMEATGVYWYILYDMLQAAGFDVWLVDGRSTKQVPGRKTDVKDCQWIQQLHSYGLLSRCFIPEDAIQELRTFERLREDHIRSASMHINHMQKALTQMNIRLKEVINQIHGASGMKIVRAILSGERDPEKLAALCHTSILKNKKDNVIKSLKGHYSANHLFALEQAVECYDFYQDKIIACDKKIEGSLKRMNRDKGIDEDQKNKRKPIRHHKPEIPHLDQYLLGIFDGKDATVLPGISDYNWLQLLSETGTDLRKWKTEKHFTSWLALAPKQHNSGKKNRNYKSKGSPLAGLIFKQAAAGLLNSKKIALGVFGRKIRAKKGGAVAVKAVARKLAVLYYRLQTKGLDYVEKGIQEYEEKLVEQKQRNILKAARNIGLELAVKQIVT

SEQ ID NO: 380113 - protein, 359 aa, unidentified
MKKRSTEREREVCGLDLGDRYSRLCLLDGETGEVVEEGRIATTDAALRRRFSSAAPMRVALEVGTHSPWVSRVLSECGHEVIVANPRKLRLIYTNRRKNDAVDAMYLARLARTDPALLAPVHHRGQGAQRDLAILRSREALVRARTQLVNHVRGAVKSIGARLPRCGAEAFARKAGTALPPGLVTALTPVIGVIASLTAQIRSCDRTLAGLAKTYPETAVLRQVKGVGPITSLAYVLTLESPERFATSRAVGPYLGLIPAQHDSGDSTPQMRISKEGDSFVRKLLVGSAQYILGPFGEDCDLRRHGLRLGAGGSRKDKKRAVVAVARKLAVLLHCLWKTQTPYDPLYNAARAQRATAAA

SEQ ID NO: 380114 - protein, 340 aa, unidentified
MAEQYVGIDLHRRRWVVVRMTGEGQVLETVRIDNDPVALSLELAKAGPDPEVVLEATYGWYWAADLLQACGATVHLAHPLGVKMFGYQRVKTDARDSTNLAELLRMGRLPEAWLAPPQVRELRELVRYRAKLVALRSGLKAQVHAVLAKQGVRVPMSDLFGVAGSRLLEQLRLERAYALRVASLRRLLAAYDQEIAMLGREVGQALAGDVGYLAIQAIPGVGPVLAAIFVAEIGDVDRFASAPRLCSWAGLTPRHRESDTTVRRGPITKQGPRLVRWAAVEATQRLPGASKQAADFHRIADRRGTGIGRVAAARKLLTLVYYGLRDGQVRCLAPTSKKAG

SEQ ID NO: 380115 - protein, 310 aa, unidentified
MAQHVGIDISKDRLDVEVLETAERFHVGNDKAGWARLVARFKGRQIAAIGLEASGGYERNSIRALLKADLPVRRINAFRLRRFADALGIKAKNDKLDAGVIARFVATLPTRPTQIDPLVERLAELVTARHQLSNELTRAQNQAEQIRDPLIRRLGKQRIAQLKSQIVLIDKHIAQAVAADHTLAHKDRLLRSVKGVGPVFSHTLLAFMPELGRLTRAQAGSLVGVAPFDHDSGKLKGQRCIWGGRRNVRDVAFMAALSASLHNPILKAFHQRLRAAGKKPKVALVAVMRKLITILNAILRDNTEWQNCPA

SEQ ID NO: 380116 - protein, 436 aa, unidentified
MNQTKLNRKTIVSDGGDFAALIGLDWASQQHALCLYDCATGKRESSTLEHAPEAIAQWAHGLEQRFWGRKIALCLEQAKGALINALLEYSFLVLYPINPATAARYRQAFKTSRAKDDPSDAQVCLELLLHHREKLTPSLVNDGATRELSRLLEARRSLIDLRTLLTNMLRDALKSYYPQALELAGQDLFAPLGCQFLLKWPSLGQLQKARTESVRKFYYAHNCRRMDVIEKRLHSIASMIPLCRDPALIEPAIVQVKMLARQLLQLGIALKEYDSRIEQLFTQHKDASIWESFPGAGPTLAPRLCCAFGNERSRYQSALAIQQYSGIAPVIETSGKNQHWVHRRWGRPHFVHQSFFEYASQSVLHCSWAKVFIQDQIARGKAYPTAVRALAFKWQRIMFVCWRDRLPYNETIYLNSLKRRGSHLTSKLNHELPKAA

SEQ ID NO: 380117 - protein, 347 aa, unidentified
MEQIIRIGMDTSKHVFQLHGVNASEQPVLRKKLRRKEMQDFFTKLPPTVVAIEACGGSHHWARQLQRLGHEVKMLPPQYVKPYVKRGKNDAADAEALCEAMSRPTMRSVPVKTAEQQAALMLVGMRDRLIRNRTQLANAIRGYSAEFGYTAAKGVRHIVPLLDRIAADETLPDMARDLFAIHAREYVQLQAEIEKVETRLMAWHRADECSRRLAQIPGVGPIGASLLIMKTPAPVLFRSGRDFAAWLGLTPKDHSTAGKVKLGVITRAGDEALRRTLVVGSTSLLQQIRAGRARNASPWLIDMLRRKPPKLVAVALANKIARIAWKMMMTGAVYNSRSAGPAAASAI

SEQ ID NO: 380118 - protein, 287 aa, unidentified
MGVTIGVDPHKASCTAAVLDERGELVDQQRFAATRTGSRALGRWAKRWPERRWAVEGASGLGRTLAQQLVASGEPVVDVPAKLAARVRLLSAGHGRTSDPHDAISVAVAAHGAKRLGQVRLDDHATVLRLLSDRRDDLVRARTQTINRLHVLLSDLLPGGAGRSLDADAAAALLRRLRPAAAPARTRRQLAVDLVADLRALDRRITAVEDRLRDAVTQSATTLIELFGVGPILAAKLLGEVGDVGRFATRHRFAAHNGTAPSRPPAARSSATACREPATASSTTPCA

SEQ ID NO: 380119 - protein, 428 aa, unidentified
MGRSIGLDVHREFCEVAVSDGGPARSAGRVGTSAEQLQLLALSLEAGDRVVLEATGNALAIARILAPHCAEVLLAHPKRLRAISHAKVKTDKLDARVLAELLAANLIPAVWIPDEQTRRLRRQISRRRALVKRCTAMKNEISAVLIRNLKRRPEATDVFGRTGREWLHRLELPLDERETVDACLRQLDFVTRELSMIDTQIAEAAIRSAQMRRLMTIPGVDATTAATVIAAIGDVTRFPSSRHLVGYLGLHPKVRQSGSSPARHGRTSKEGPAAARHVLVEAAWITTRSPGPLRAFGQRVAARRGKHIAAVAVARKLATLAWHMLTHEQDYAFQRPTLTRRKLRRLELMTGAPRVKPGPNHTPIRKTGAAQIEWQLAEQAEIAYRRLIADWQATGPKEGAGATPGRASQRPSKGKAARQATRPQTPAL

SEQ ID NO: 380120 - protein, 430 aa, unidentified
MKKGINEKIDEITAVTLIVGVDVSKSVQWARFVDYRGKEVGKAVSFKNESQGFERLISKINEIMANKVLRQPLERVIIGMEPTGHYWKTLANYLIKSGYAVVGVNPYHTKKAKELDDNSQTTHDKKDALTIARLIKDGRYFDPYLPTDVYAELRVLTNARVSILKRNNAVKNTITAMLDEYFPEIWTVFKRPFDGKASRQVLRDCPFPVLILEMGESGVLATIKKAVRRSVGMKKVRQLIEAAEVSVGVEYGLISSKLRLNLLLDELEMIERHISEIESSMEQMLYATGYAEQILSIKGIGMISAAGFLGEVGDPLRFRNARQIAKYAGYNLVEDSSGKSKSGTCISKRGRGQFRCLLYKMAFTMVSTNAEMKALHHYLTSRTTNPLKKKQSLVVISKKIITVIYSLLKKQMFYDPALALGTVRREMIVI

SEQ ID NO: 380121 - protein, 344 aa, unidentified
MEDFDVAGIEVSSESFLVRVVRHGRLGSPQTFPNTAEGRLAILRLLTRSGARVRVCLESTGLYGLDLALALHEKAVIEVMVANPRSVRHFGEAMMQRSKTDPLDAALLSEYAARMPFQRWQPPTLTARQLCAITRQIHALTSMSTMDKNRLHAANLSETTPKIVRDELERNLAAQKASIGRLTRAALKLIDTDPELKRRFALLVNGPQKAPGIAQTSALQILGELVLVGPDFNVHQWVAYAGLDPREYQSGKSVHKKVRISKVGNAHLRRALYMPALVAVRCNAYFRAFYQHLLAKGKLKMVALVAAMRKLLHALYAMMKYNQPFDGSKLFPNACPPLSEATRA

SEQ ID NO: 380122 - protein, 355 aa, unidentified
MGQVSTIGLDIAKRVFQVHGVDAAGAVVFRRQLRRSEVLKFFAKQPPSLVGIEACASAHYWGREIAALGHQVRLMPPTRVKPYVKWGRKNDKVDAEACCEAVSRPSMRFVPLKTAEQQAALMLHRARQLLVEQRTRLGNAIRSHMAEFGIVAAKGRAGLGALLAMLGNPEDEHAPAAIRPILLPLVEQWRQAGAAIAALESQILAWHKNNPDSRRLATIPQFGPILSSAMVATLGDAARFDGARRCSAWIGLVPTQNSTGGRARLGGITKTGDRYLRQLLVVAASGLISRARAHPEVAPWFAALLARMPAKQAAVALANKMARIAWAVLTKKTAYRAAAGPFVPGDAAPSQTQAA

SEQ ID NO: 380123 - protein, 401 aa, unidentified
MQTLVERGCGLDVHQATVVACLLIIRKDGRVHKQMRTFATTTRELVSLRTWLLAEGWTHAAMESTRVYWKPIYTVLEGALEIVVANAQHVKKVPGRKTDVKDAEWLADLLCHGLLRSSFVPPKPIRELPDLVRYRRKLVQSQAAERNRLLKVEGAIIKLGSVATDVFGLSGRLMLRALIEGEAKPQEMAALDKGKLRNKIPELELALEGNIEEHHRFLLELQLQRLEAAEKDLATLKQRIQQKLEPYATEMQLLDEIPGVDWTVAAVIIAELDIDMTVFQTVSQLVSWAGICPGNNESAGKRKSSRITKGNVYLKTALVEAAASAARAKGTYLRDKFYRLKARRGYKQAVVTVAHKILVAIYHMLSQNVSYNDLGHLYLDKLNKHHLTRNLVHRWSVWDFR

SEQ ID NO: 380124 - protein, 331 aa, unidentified
MYNYIGIDVSKQSLKISDETKEYDVPNEKGLKTLKKLFRKNYGKDWKETRLIYEPTGPYSNYLREFVFKHKIRIYEMNPKKSANFAKALGNRSKTDDIDAKMLYKFHVLLKEEDFRIPEIDKVVEQLGAYVSSYRIIQKTRTMLSNHLQSREYENGIDPKLKESIKKEMEKLKQIEEALEKEMEAFGRDNPEIKEDFENLLSIKGIGVISATALLYLFRKYPDANRNEITALAGLDPVKRQSGSSINGGRKISKAGDSSLRKILYVSCLSSIRYNDRIRVFYEHLITNHKKPKVALIACMRKILLIAHQIYVKKSEYKPLYIDNKSLCSSY

SEQ ID NO: 380125 - protein, 397 aa, unidentified
MIAVGIDVSKSKSTVAILNGDGSIRAKPFDVHHTADELKSLISYIKGTSEVPTILMEPTSHYHYPILKAFQDAALPVCLVNPYQLKKYGDTALRKAKTDKKDAVKIAQYALEKSYTLTPYTPQDQKYDDLRFLSRQYNQRMSTLTANKVQLIRLLDETMPGITTVLPLKSRDPENCVLLKFIKRFKSFDSVKKMGKNRFLDSYQVLVNKTKDRYAASKGLAIYEMALSSVTTRGDNSLTFMTQNQCVDLISASQNAVDDINLQMRTIAETIPEYRVLRSMAGVGDRLGPIILAEIGDIRRFHSGKALNAYAGNDAPPYQSGQFESRNRHISKRGNPALRKACFEVMQALKLTKPQDDPVYLFLLKKEQEGKPYNVAKMAAANKFLRIYYARAMEVYK

SEQ ID NO: 380126 - protein, 346 aa, unidentified
MNYIGIDVHKSICTAVVMNNDEKVIDQIIDFGTNDEGCSFIVNHYSPEDSYILFENLTTAHRVYHFFKDRGYRVEGLHTGHGCVTEISKTDFKTDLEDATKLARMCKDHFTGRREYSLAHFADIDSMKAKELCRVMNDCSEQRDRLNLRIQAYMDLFDIRLPKGLKNVYSNKAMAYLKSLNHPALTIMIEEMGSTMAHIETAREGLESLFKDNEDVKNLMSIKGIAIQTAATIYTVIDGIERFETPESLVSYFGLKITRHESGGDRDLHGHINKRGDPLVRKYLANVVVKHPMYYPDSDLAGFYKRKKEVMPHWKAVTAAMRKLVCIIWAMLTRHQVYRFSSPVKA

SEQ ID NO: 380127 - protein, 385 aa, unidentified
MNATVNPAPIQTDLGAIFVSLELSRSTWLVTSLSPASGEKMSKFSVIAGDAADLLSRMSVLRDKALHRTGRAYPIITIQEAGLDGFWLHRLLTREGIESNVVDPASITVSRRRRQAKTDRLDGETLLRALMAHKRGEPRVCAMVHVPSPEEEDQRRVSRERKTLTGERVTHVNRIKGLLYSQGISGYEPLHKDRRKRLDELKTGDGRDLPVHLKRQVSRELDRLELLLEQIKSVEAERNALLGSQVKKANQPQVEMLLGIKGIGAEVATILWTEALYRHFDNRRQIASYAGLAPTPWQSGSIDREQGVSKAGNPRLRVTLVQTAWLWLRHQPNSALSKWFRERTQANHGRRKKSTIVALARKLLVALWKYVTSGVLMEGVITNKV

SEQ ID NO: 380128 - protein, 414 aa, unidentified
MDALHACCCGLDVHKQTVVACLLRTTAEGRRKELRTCGTMTDDLLALADWLRAAGCTQVAMASTGVYWKPVCNILEGAGTVLVVNAAHIKAVPGRKTEMKDAAWIADLLQHGLLRASFIPDRPQRALRDLTRTRTRLIDARTAAVNRLRRVLEDANITRAGAATDSMGVSGRAIRAALLAGTSDPAVLAALATGKLRAKREALTRARSGRVGDHHRLLLTTHLAHSDFLDEEVARLSAEVAERLRPLEGELARLDTIPGVDRRTAEVLLAASGADMGRFPTAGHRASWAGMCPGNHERAGKRKGGKTRKGSKWLRRARTEAARGAARTKQAGRTAVVDQYRRLVDRRRKLQAAVAVGHRILTLAYALLQRGEDYCELAPADLDERRRAQARRRAVRQLRQLGFEVILTPKEAAA

SEQ ID NO: 380129 - protein, 367 aa, unidentified
MSERITYVGLDAHQERIHAAILLPGRKDPIVDSFANTSEGIRRFVRRLQKQIPGSLESCYEAGPLGYGLQRSLIALGLACIVIAPSLIPSKPGDRIKTDRRDARKLAELLRAQLLTEVHTPTPDQEAVRDLCRAREAVKEDQKRVRHRLSKFLLRRSIRWTMGRKAWTRAHQEWLRVQRLDHSADQVILDDHLLALDQVDGRLFALDEQIEAWSKQEPYAEPVGWLRCFRGIDTLTALSIVTELHDVRRFPSPRALMAYLGVVPSEHSSGSQVRRGPITKAGNGRLRRLLIESAWHYRHRPAVGHRLKKRREGQPAHVIAVADRAQQRLHRRYRRLAERGKVPNKIVTAVARELVGFVWAALQPHPN

SEQ ID NO: 380130 - protein, 421 aa, unidentified
MNDYRIAGIDVHKKMLAVVVAELTAAGELAFQRRPFDNTEAGIHQMRDWFVECQVREAVMESTAQYWRTVWLELEEKFRLHLAQAMSNRAPRGRKRDYADAERLVRRLIAGELVLSYVPGREQRLWRMLAREKHLARRARVQQVNALEAFLEQIRIKLSSVLSDITGVSGWRILEALAKGEPEPAKLAKLADPSVQCTREQIQAALAAAPHVCAEERAVLRQFLDRIELFGKQIADNDRLLAACLARYQDAVTRLAEIAGLGADSAQQMIAEIGPKAEAFDSPAQLSSWIGVCPGREESAGVSKSDRSPKGNRPMRRLLAQCANAAIKAKGSVFELYYRRKVAHLGHFQAVWAVAHKLCRVIWKVLHDGVRYEERGSRLNSKQEAKQLQRLKRTLRLLGYDPNSLRKLQAPNNIAPGLSMA

SEQ ID NO: 380131 - protein, 359 aa, unidentified
MIKDSILFVGLDLGDRWSQLQVLDQEGEVVEESRLPTSESALRRKFGAMGRWRVAMEVGTHSPWVSRLLTELGHEVIVADARKLRLIYRNPRKNDRIDAEYLARLARLDPQLLSPVRHRSPEAQADLALIRSRDALVRARTMLINHMRGMPKSFGERLPACSAESFHHKVREAMPQALQPAFEPFLDTIGEMTDRIRAYDRQIEDLCRSRDPQTKELRQVGGVGALTSLAYILSLEDPARFRKRREVGPFLGMVHRQNQSGGADPQPRITKTGDAYLRRLLVGSAHLSFDPSVHRALRAHPECERKCGVQELSRQISEERSPRRPLTTKAFSWKWLGGRTEQEGGRLIRRHRWWIVSQR

SEQ ID NO: 380132 - protein, 342 aa, unidentified
MRIVVLGIDLGKNLCSLAGLDETGAVVLRRRMKRASVLPFTAQLEICTVAMEACCGAHHLGRQLVAQGHVVRLMSPAYVQPYVKAQKNDERDAEAIAEAATRPTMRYVEIKSEAQLEVQSLHRVRGRLVAERTALINQLRALMLEHGIAVPQGRCKLARYLPEILADERNGLGPRLRQLIEDIREEWRSIDQRIKGYDDELAEQVRNEDTAKRLISIPGIGVLTATALVAAVGNAQTFSCGRDLAAWLGLVPRQATTGGKPRLLHISKRGNGYLRMLLIHGARTALPGLAKKDTPLGRWVKALLARAHRNVVTVALANKLARIAWAVLARDRQYVTVQAIGK

SEQ ID NO: 380133 - protein, 306 aa, unidentified
MEKVSFAQVVKVGCGIDVHKEIIVATVRQNESEYETREFSSYTSSLTDLREWCKSKGVTHIAMESTGIYWKPVFNILEEGDFDILLVNARHVRNVPGHKTDKKDSQWLSKLLLSGLLKGSFIPPVEIRELRDLVRYKRKVVAQAASEKNRIIKILEDANIKLSSVLSNVDGAVGTKIIDDLIAGKTAVNELLKHYHGKIKATREEMGKALEGRLTKHHQFMLGIIKESISDKEKLIEKLDKQIDEAAAQYRVEIELLQTIPGVGHDRAVNIISEIGTDMGQFPNEQHLSSWAGMSPGNNESSGKKK

SEQ ID NO: 380134 - protein, 343 aa, unidentified
MQSISTIGLDIAKSVFQVHGVDATGQVVLRRQLKRRHVLAFFQKLPPCLVGIEACASSHHWSRELQALGHTVRLMPPAYVKPYVKRQKNDSTDAEAICEAVTRPNMRFVPTKTVEQQSCLMLHRARHLFIRQQTAVINSIRAYLAEFGIVAPVGRRGVEQLLEVVADAADRRLPEVARACLAALGSQLGALKAQILEFDRRIIAWHRSSATSKRLDAIPGVGPALATALVASVADARTFRSGRDFSAWVGLVPKQNSSGGKDKLGSISKQGDRYLRSLFTAGALAVIRYAKIHGTDHRPWLTRLLARRPTKVAAIALANKLARMAWAMMARNECYKEPAALAA

SEQ ID NO: 380135 - protein, 376 aa, unidentified
MEWSAPLPKRLQMSHDVIFQVNIKTEVRQTMKHNIAKGTVTVLGIDLAKQSFQLHGVDEQGQVVLKKKLSRKQLTAFIARLPICVIDLEACGGAHHWVRVFMEMGHTVRMMAPQFVKPYVKSNKNDAVDAEAICEAVQRPTMRFIPSKTIEQQDIQSLHRIRSQLVARRTAQANQIRGLLQEYGIVIPQGITSVRKSLPDILEDAENQLSVIFREQLSALYDEMVHLDARIETLEHRLKAICAQNQDCKRLLTIPGIGLLTATALVAAIGDISVFKNGRELAAWLGLVPRQLSTGGKPTLLGISKRGDSYLRTLLIHGGRAVVRCAHKHQDNHNRWVGEVEERRGKNITAVAVANKNPRIAWALLSKNEDFQTVTA

SEQ ID NO: 380136 - protein, 326 aa, unidentified
MTSWIGIDVSKAHLDGVLLNAQGHQHTQVSNDKHAFRTLENFLKKRCPQGGHVCLEATGLYGDAVAEFLFQHSYVVSVVNPARIKAYGDSQLKRNKTDRADAALIADFCRTQPPDPWQPPAPQVKELRALLRHLDDLQAMRQQESNRAQSGEQSLTVLGQLQQHITFLDTQIQALKHQIDDHFDQYPDLKRQRDLLTTIPGIADLTAGRLLGELSERRGFHSARQVAAFVGVTPRQHRSGSSIHGHSRISKQGNAALRAALYMPALAAKRYNPILKAFAQRLHARGHSKQSIVVAVMHKLLHLAFGVLKSGQPFDPLYLDKRLITP

SEQ ID NO: 380137 - protein, 389 aa, unidentified
MNRIIKIGMDVHSKNYTLCAMEPTIGAEDRIFGEVQVAPDYKEVICFIESLKMKLGPDNKYSIECGYEAGCLGYTLYHQLTGAGVKCVILAPTTMLTQQGTRIKTDKRDARLIAQCLCYGGYHPVYIPTGEDDAVKEYLRMRDDHKLALKKLKQQINAFVLRHGHQYSGTKWTIRHVTWLKKLELAPMYRETLDEYLASCEEQEAKIERYDKRIEEIASEARYQENAKKLGCFLGIRTHTALSLIVETGDFKRFAKGNTYAAFLGLAPGERSSSENVNRLGISKAGNTHLRCLLIEAAKGICKGAIGHKSKELRSRQSGQPAEVIAYADKANTRLRSRYYKMIRHGKKKNIAVAAVARELACFIWGMMTGNISIRPTTAGTSMPAVRQG

SEQ ID NO: 380138 - protein, 396 aa, unidentified
MAQETFAWFAGVDWGSEKHQACILDAEGTIKGEREFPHTGTGLAELGDWFLSIAGTASAVAVAIEVPHGPVVDTLVDRGFVVSVAGAKDDRRDAYVLGDGVRADRHLFRRLHVADPRLVELRAWSRLAEELQEERVRLSNRIFHQLWRYYPQMQKITDDLAAPWFLELWTMAPTPAKARQLRKSTVEQLLKQHRIRRVNAETVLGTLREPAIKVADGVAEAASIHMRSLVARLRVVNRELREAEHKLDALCTAVGETAASGECLQRQDVVILKSIPGIGRINLAALLSEGSGPLSRRDYQGLRTLSGAAPVTKRSGKSHVVTMRYAAHVRLRKTVYHWARVASQRDPKCHARYDALRKRGKSHGRALRGVADRLLGLACVLLQRQTVFDPHFGQAK

SEQ ID NO: 380139 - protein, 348 aa, unidentified
MAGSTLPHRWSVGIDLHKDTLTACVYCSCCGEIRFQKIACRCRKQIAEFFGSLPRPHVVAIEAVGFYRWLWEMLEPLVERLVLADATQARALAGRRMKTDREDAQNVAELLACNRLPLAYAPPFEVQVLRDCSRQRNALSRQHAHVLHRVKSVMNANNRPGPARMASSGLIRYLEAFQSKLPERHGRYLWLCVDQLALIERQRAQLERELERLLAQPLFAETSAILNSFPGVGLVTCATVLAEIGDFGRFSYRKSISRYGGFDPRTFDSAGKQRTGHISKRGPSNLRWVLVQAAWAAIRLDPQVKRIWLRISRKAGKKAATVAVARRLLVWMWKAVRTGRPYRAPVAA

SEQ ID NO: 380140 - protein, 362 aa, unidentified
MTKSTTIIGFDLHAATTVAAVLLPGQRTPALHALSSDIPTVVRFVERVRRQGRVVCCYEAGPCGFELQRALANREMQCDVIAPALIPRRPGDRIKTDRRDASQLAILYRAGALTIIGIPTEQEEAARDLLRCREDIRADLLRARHRLSKFLLRHGRRFTETKNAWTKRHRAWLQAQHWPLAALEQTHRAYIRAVDEAVARLQSVDTELRDLLTIEPLRARVERLRCFRGIDDLTALTIAAELGNPRRFPTAPRLMAFTGLVPSEHSSGAKQARGTITKTGNAHLRRVLVEAAWHYRHHPFVGRALRLRQRGAPAPVIQQAWHAQHRLNRRYRCLAARGKPKPHIVTAVARELTGFVWAVLTQ

SEQ ID NO: 380141 - protein, 268 aa, unidentified
MNNHNVEKQLAVLGIDLAKQSFQLHGVDQSGNTIIKKMLSRKNLVQFIAQLPPCTIGIEACGGANHWVRVFEQFGHTVKMMAPQFVKPYVKSNKSDAADAEAICEAVQRPSMRFVPAKSIEQQDLQSLHRIRSQAVARRTAQANQIRGLLMEYGLVLPRGIAYIRKAIPSILEDAENELTVLFRELLADLYREMVETKLEAICAQNTECQRLLSIPGVGLLSATALVAAIGDINVFKSGRELAAWLGLVPRQHSTGGKPALLGRACPV

SEQ ID NO: 380142 - protein, 353 aa, unidentified
MKRDKYMGMDVHQATTVVAVIDAEGKIVLETIVATAAAPIRRLIESISGAVHITLEETTQAEWLYGLLQGFVAEVVVCDPRRNRLLSEGSKGDKADARKLAELLRTGMVRSVWHGRQTTRGLKEMVRSYETFAADTRRTMLRIKALYRSRGIATTGTGVYQVKQREHWLKQLTEVGMQQRAAWLYQQLDHVRELRKQAKAAVLAEGQRHRAVELLRTIPQVGPVRAAQIVATAGTPHRFRTKRQFWSYSGLAVVTHTSAEYELRAGRVVRRNKPVATRGLNPNCNRRLKSVFVSAATAGGVSHPWQPYLDNLKRKGMRADMARLTLARKIAALALAIWKKGEAFDPKKLNWTT

SEQ ID NO: 380143 - protein, 310 aa, unidentified
MQDTIGIDISKDTVDVHRLSDGTHRQFDNDKAGLGRLRRWIGRRSVRVVYEATGRYHRDLEGMLGAAGHGLVKVNPNRARKFAQAISHGAKTDRVDAAMLARMGAVLELDAKPSHSESMHEIRELHVARRGLVKDRIACRNRLHGARNKVVLAQLRARLRQVEKQIDQIDTELRRLVAADPCLARRYEILMSVPGIGPIAAVAMIVEMPELGAMSGKEAASLAGLAPITRESGKWKGRSKIGGGRGALRTMLYLPALVAIRHNRQLGKSYQTLCDAGKPAKVAITAVMRKLLVLANSLIRDDRKWAEIAP

SEQ ID NO: 380144 - protein, 344 aa, unidentified
MSKQVVRGGDVAELLERFARLREKARARTGKVFPFVVIQEAGLDGFWIDRALQNEGIESHVGDPASIATSRRRRRAKTDGIDGEALVRALLAYKRGEPRVCAMVKAPTPEEEDRRRLCRERKVLIGERVQHVNRVKGLLFSQGISGYEPLRRDRREQLDTLQTGDGRLLPDHLKAQVCRELDRLELLLEQIKAVEAERDVLLAAQQVAAPAPAAMLLDIKGIGPEFAAILWSEGLFRHFDNRRQVASYAGLAPTPWQSGSVDREQGVSKTGNPRLRTTLIQLAWLWLRHQPQSALTLWFEERVRRNGGRLKKTTIVALARKLLVALWKYVTAGVVIEGAVMKRT

SEQ ID NO: 380145 - protein, 397 aa, unidentified
MEKSTTYVALDAHKKQHTVAMLLPGENEAEVWTVPNTARDIRRMVRRVRKRGSGEVKFCYEAGVCGFGLQRQIEAEGATCEVIAPSLIPVKPGERIKTDRRDAKKLVELFRGGLLTVVHAPDEEAEAVRDLVRCREAAQSDLQRSRQRLGKFLLRRALIYVDGRAWTQRHTRWLDGLEFTQPADTLVFGEYRMEVSRRQERVAALTVEVTAAAADGRYAEAVGWLRCFRGIDTLTAMTILVELHGFERFVEARQLMSYLGLTPSEFSSGQRQRKGGITKAGNRRVRRVLIEASWHQAKPARVSKALQQRRAGQPPWVIALADRALKRLHRRYHRLVNRGKLPAVANTAVARELVGFLWAALYLKGRAAATAQTPETAAAPPAERRVTAREFYASAAP

SEQ ID NO: 380146 - protein, 376 aa, unidentified
MKTIGTERPDTELAVILGVDTHLDFHVAVAVDHLGRRLGEVSVPTSAKGYERLLRWAEGFGSVRCAGVEGTSSYGAGLTRHLRARRIEVLEVERPKHRRRSSRRNFEKSDSSDAEAAARAVLAGEASGVPKSGDGQVEMIRALRAARRSAIKARTQAANQLQGMRVTAPEQLRRRLGGLSTKELVSVAARFRLADGPRDVPTATKVALRSVARRYQALSEEIFELEAHLDRLVGQAAPGLVALLGIGTDNAATLLIVAGDNPQRLGSEASFANLCGVSPIEASSGKVVRHRLNRGGNREANRALYMVCLARMRRDPRTQEYVARRTQEGKSKPEIIRCLKRYVAREVYRVLVCCGACSSPTGLQDAVHIAVGSSAA

SEQ ID NO: 380147 - protein, 407 aa, unidentified
MKLTCGIDWAEAHHDVALVDEGGRVVARARIDTGATGFSTLLTLIAEHEGSAGDTPVAIETDKNLLVVALVEAGFTVYPINPRAVARYRERYGQAGGKSDPGDAAVLAHILRTDRHLHRRMPAVSEGGRAVKALARQHQESIWALHQTVSRLRSVLLEFYPQALQAFPKLTHKAALSVLAAVPTPAAGQRLTRRRAVTLLQRSGRGNHPALVEQILTDLHTPALRQPPRVEQALGRTVAGLITIVVTMGQAVDDLETELAREFDQHPQAAVLRSAPGLGPILAARVLAEIGDDPARFTDPTGLRAFAGTAPVTIASGRSHYVKARKVRNKRLGDACHWWAFAILTKSSGAREHYDKRRAAGDRHNAALRNLANKLLGRLWWCLPHNQPWDDTAAWPHPTEHPNPVAA

SEQ ID NO: 380148 - protein, 404 aa, unidentified
MHNDLGFDIWCGLDVGKQAHHACALDAAGKKVFDKPLPQDQSKLEDLFTRLSEHGRVLVIVDQPNTIGALPIAVARSMGIQVAYLPGLAMRRAADLYPGNAKTDARDAFVIADAARTMPHTLRRVDLGEETLAELKVLVGFDEDLAAEATRLSNRIRGLLTQIHPALERVVGPRLATRQGLAVIEQLGGPQGMTAASKSTLLRVITKANPRHAQNFADAITQALSEQTVVVAGTAAAEQVLPKLAASLRQTWDQRCELAAQVEKVVDAHPLAEVLTSMPGVGVRTAARILLDVGDASLFPTAGHLAAYAGLAPLTHRSRTSIRGEFPARSGNKHLKRALFLSSFAALRSDPVSRAYYDRKRAQGKKHNAALICLSRRRVDVLFAMLKNREPYRAPNPTPQPLAA

SEQ ID NO: 380149 - protein, 338 aa, unidentified
MMCYVGIDLHATSSVVVVIDETDRVLYQKRLRNDLTLVLTALEPYRATIQGVVVESTYNWYWLVDGLMDAGYRVHLAHAPALPQYSGLKHADDQHDARWLAHLLRLGLLPTGYIYPKAARAVRDLLRKRSQLVRHKTMVVLSLQSLLTRLTGTRLSLPRLRALTPDSIQTLVSFPEQVHAVRSSLTILQCLEQEIRRMEEMVREAEQKQPGYALLQSVPGIGPILAGTILLEIGDLRRFPTVGHFASYCRCVGSEHLSNGKRKGAGNTKNGNKYLSWAFIEAAHFAIRYEAVIRNYYQRKQTRTHPLVALKAVAHKLARACYHMLREQVPFNLSRAFG

SEQ ID NO: 380150 - protein, 359 aa, unidentified
MKIVGCDFHPAWQQVAIFDPETGEVAERKLLNGDGEAERFYRELESPALVGIEACGNSQWFIELVERLGHLVWVGDAAQIRASYVRRQKTDRRDAGHILRLLMENRFPRLWVPSAEQRDLRQLLIHRHKLVEIRTRVKNGLQHLALNRGLQKKSSLWSVRGRAYLEELPLAGWTARRREDLLKLLGELSRYLDELDEAVQRAAEKHPQARLLMTQPGVGPITSLAFVLTIGDVSRFKHSGQVASYVGLIPREHSSGGKQRLGAISKQGNRFMRQLLVEAAQSVNRLDEGFRKEYAARCHHKAKGVAKVAAARKLAVRLYWMLRQNVGYPEIAFIESSPRVPLVGESHTEILNGRSRTQQ

SEQ ID NO: 380151 - protein, 370 aa, unidentified
MQIRSFVGLDVHKATISISIADEGRSGLVRFVGVIPNTAEDVAKMARRLSRHGELDFCYEASGCGYGIYRQLTELGHRCTVAAPSLIPRKPGERIKTDRRDSEKLAILHRSGDLTPVWVPDATHEALRDLVRARVDASMHLMRARQQLLAFLLRHGRTYATGKHWTQRHRAWLASQTFQQEVHRIVFQDYVETVWTAQERRDALIERIAAMVASWSLGPLVEALRGLRGIDLISAATFIASTGDLSRFQSPRLLMGYLGLVPSEHSSGGTIRRGGITKIGNREARRMLVEAAWSYQYPARVAKEKAEILVRLPKDVRDIAWKAQTRLCARYRKMIARGKKPTVVVAAIARELAGFIWAIGHEMRITMAAG

SEQ ID NO: 380152 - protein, 358 aa, unidentified
MQRNKKTFKGQNIYIGIDVHKKNWQVAVITESGYTERLSTAADAKALFKFLKSHYPDGNYRAVYESGFSGFATHYALTELGVSCVVAHAADIPSSQYELTMKSDRIDAEKLARALRAGLVRGIYVRPKDNLDDRGVLRIRKTIQIQVGGYKTRIKHLLHSNGVELPERFSRSGTHWSRAFIAWLREDVRLLSDTRRSLDLLLLQVETLRANLLEATRRVRALSMTDRYREDCALLMGIPGIGLTVAMTILTEVCDIGRFGNERQFASYLGLVPTSHSSGERVSHGEMTFRGNKHIGPLLVEASWVLIVRDRELGRMYTEYRWRMAGQKAIIKIARKLSNIIFAVLKTRKAYEPYRRDA

SEQ ID NO: 380153 - protein, 359 aa, unidentified
MKIIGCDLHARQQTLAMLDTTTGEVVQMTLQHEGVNVREFYRDLPRPVRVGIEATGSMQWFVNLMEELGIECLVGHPATIRAAEPRKQKHDRRDAELILTLLAENRFPAIWLPTKELLDLRALLRHRHQWVCLRVKVQNALQAIALANGLRRGSSLWTQGGQHAMASLPLSPHAAYRRNELQAMYVKFEREIENLNQRVERHARERVGARLLMTHPGVGAITALATEVFLGDPARFADSKALASYAGMIPGEHSSGKRQRLGGLTKQGNPLLRFLWSEAAIHAVRRDTELKHFYRRKLIQKGLGKARAAVARKLGIRMWIMLRDGIDYNEFCRRGQMQQKSGDACAGMPGPRYGAKVTG

SEQ ID NO: 380154 - protein, 337 aa, unidentified
MEYFAGLDVSMAETHVCVMHRDGAVVYEVRVPSTPADIAAALAKAPACGRIVFETGRMAPMLYHGLRRLGLPIICIESRQAYQAVKSLATHKTDRNDARGLAHLARTGFFKPVHVKSLPAHALRSLIIARKKLVGQRVTLENQIRGLAVLFGVRLPRALTAAFIKQALRASEGITGLSAAMRGLVAARAAVLAAVTAIDADIRKVARASAACRRLMTIPGVGQLTALAFTATIDDPSRFRRSRDIGAYLGLVPRRYQSGEVDYTGSISKCGDRRVRTLLYEAANVMLTRYKSPLKLKDWAFAIAKRSTMRKARIALARRLAIIMHAMLRDGTEFHPV

SEQ ID NO: 380155 - protein, 385 aa, unidentified
MNGVSPAVGCVQRRVDHENTVPALRGLDVHKDMVMSRLRCVSEPRIEETRSFATTTSALVELQEWLTSRGVTHVAMEATGYIGNPRGMLEEHLELVPANAQHIRNVPGRNTDVNDAAWIADLLAHGLIRSSFVPPAPIQALRDLTRTRKQLVREISQHSLRIHLADLAQGAARKKRAALIEALHGRITVHHRRLLKLHLDLVAALEHALEEVDADVGKCLAPIRQCARLLTTIPGVRDLTAQVVLAEVGADMTRFPTPGHLLSWATMCPRNDESAGKRRSTRTREGSPWLKTALVTAAWAAVRVKNGYLQAQFLRLRSRRGAKKAILAVAASMLTAMWHMRKNGVPYHDLGADHFARRDRSKAILRLVRRLNDLGCDVQITPQAA

SEQ ID NO: 380156 - protein, 426 aa, unidentified
MLNSQINKIQAITSDTLIVGVDIAKNIQWAQFINFRGIEVSKHIYFENNYSGFNSIMEKIEEIKSKNNFLSVIVGMEPTGHYWKTFVTFLHNNGIKVVQVNPYHTKKAKELDDNSQTKSDKKDALVIAKLIKDGRYSAIYFPEGEYADLRNLSNTRLEVSRLLNICKNRIHACVDEYFPEFETVFKSFIKGKVALHILKRIPFPTDILELTLEDIISVIREAAKKSVGKKKAEELIRAAKVSIGVKVGLEGARIRLNNLLEEYELYHNQLEKIEKEMAQELEKTGYKDILTSIPGIGIISAASFIGEIGDPKRFSNPQQIIRLAGYNLVEDSSGKHKSKTMISKRGRKILRMILYKISLIVVCKNQEIKLLYKYLITRKENPLKKKQALIVISGKMVKIMYSLIKKEEVYDKEKVLGIYRKQQIVA

SEQ ID NO: 380157 - protein, 350 aa, unidentified
MLIIGCDYHPGFQQIAYVNTDTGELSEARLGHKEQAERFYSELQAQGQQVRVGMEASGHARWFERLLGNLQFELWIGDAAEIRTKRVRKQKTDRQDAQLLLRLLREDRFPRIWVADAENRDLRQLLWHRHRLVQMRTRVMNQLHVVALNEGVRRKKALWRSTGRMELESLVLAPWAGRRRQDLLDLLDQLTPKIQELSQALEAEVEKRTVARRLMTHPGVGPLTALAFELVIGTPERFACAKQIASYVGLVPAEESSGDRRRLGHISKQGNALLRFLLVEAAQVTVRSDPQWRSQFFHLAMRRGRKIAKVAMARKLAVELYWMWRRGWDYDQMQKLGSHVGEPGNRHGVQ

SEQ ID NO: 380158 - protein, 367 aa, unidentified
MGINFHGIDMHKRYATISVRDQSGEEINFIVNCTDVHSYVSALGENDVVCIEAASGSFYWADQIEKQGAICHIVDPFRFKIIRDSWCKTDKKDSRNLSLALWMMFAAKECMLPIIFKPEKEIRDLRRLFTQYELLNKQIRQYKNTTLAILHECGIVLSETEKEHLFNPKRGLEVFESFILNQAERICVLMNIYLLWNLFDQKEILKREIYKAGTPFKSEIELLVTIKGVTPLLALAFLSDIGDITRFSNVRGFSAYLGVAPRIKSSGGKTRMGTINKSSRHLSRSLFTQSITHFISSSPFLQSHYENLKNRRGAPRARIALIRKLFATMRSMLLSRAEYKWKDNNSEYKMHEYEMELNRMEHLARAG

SEQ ID NO: 380159 - protein, 388 aa, unidentified
MKFVGIDNGIYNCVAVILDTDTGKTERVMFSTKEDSIRAFAENELTKETVVGIEATTNTFFLANQLKPYVDKVIAIVPEKHKDGVKTDKKDAERIAKSLALGTYKPCWLPPLPINELRDMMHHIYNLTKDSVRARNRIYAFLWREGIVLKNKDFSTKKGEEELREILASLPQHKAQILSDYLDDWRRANEKLKAKDKYLLELAKDDYTVQLLMSVYGVNVRSAYYLLAEIGDIFRFPSPRQLAKYAGLTPSVHQSGKHCYTGRITKAGRKLLRWAMIQITNNAVRQEGPLRDFYLRLLSKKGHNKAIVACARKLLSIIWHMLTKGEIYRSCATQLYGRKIKKVMKTKKSSSEISLPELLAKLKDFIEAEGTKSPNEMREAIARLMKNV

SEQ ID NO: 380160 - protein, 340 aa, unidentified
MGEITTIGVDLGKHVFQVHGIDAQGRTVLRKRLRRGQVLAFFSRIPRCVVGLEACATAHYWARELGALGHEVRLMPAQYVKAYVKRHKNDAADAEATCEAVQRPTMRFVPVKTAEQQAAQLLHRGRERLVRQRTMLVNALRAHLAEFGIVSAAGLRNVAQLIAIVRDAGDLRLPDVARQVLQVLAAQLEHIEAAIATLEKQLMAWHKTNAVSQRLASIPGIGPIIATAIATTVAEPSVFRSGREFAAWLGLVPRQNSTGGKTRLGGITKRGNRYLRRLLINGASANLLRSKATKADPWVIGIRRRRPPLVVAVALANKTARTAWAVMLRQNEYQPRAVVA

SEQ ID NO: 380161 - protein, 324 aa, unidentified
MRKASMHGTIVETSGAAGIDVGKDWLDVALAAGEATLRQPNHAKGHAAIVGFLRRHGICRVGMEATGGYERGLLAALGAAGFQTLVLQPRQVRAYATFRLNRAKSDRIDARLIASCTAAAAPQEGRDARDARLLPLAEHLTVIEQIEEDLARARVRREHVSEPRLIALQATEIARLKSLRKAELERLEADVLAHPDLARRFQLLISIDGIGARTALALIVRMPELGHLTREEAAALLGVAPYVRESGRLKSERHVAGGRSRPRKSLYAAAQAACRRWNRQLIALYDRLTRAGKPHRLAVVACTRKLIVFANAVLARGTKWNTAQ

SEQ ID NO: 380162 - protein, 475 aa, unidentified
MNLKGKKTKNQVVTANIFEQQELLKKAEVIREKLTASTWHELETNGKFDKNAKLSFISDDMLILGCDVGSETHYLRAIDPRGRELSKSAYSFRNNCEGFQSAKEWAVELAAKNEKKQIVLGLEPTGHYWFCLATWMIANGISVVQVNPYAVKQTKEVEDNSQLKDDTKDPKLIANLVKDGNFGMPYLPEKVYAELRRLSMFREQLNEDRIRAINRMHREMKIYFPEYKEALGRVEGAFSLELLKQTPFPEEIQTLGEEGIRQIWHDAKLRGRSYSRVREIVGYAKTSVGMKDGAEASAMAVKWFVKEIRELDEKLAEIEKLMREKYQEIPYAKNILEISGIGENTLSGILAEMGDISRFDDVKEIQKLSGLGLVACSSGKHKGETKISHRGRKRLRYWLFQAAKSAVAHAEEFKELHVYYTTRADNPLKKMQSLIVIACKLLRIIYGILKNGTVYDPKKMLRDIRRPEKKEVIAA

SEQ ID NO: 380163 - protein, 412 aa, unidentified
MNAVGIDVSKGKSMVSVLRPFGELVAKPFEVRHTSSELSELAKRLKSLEGETRVVLEHTGRYYEPVAQLLHDAGVFVSAVNPLLIKEYGNNSLRKVKTDRADSLKIARYGLDNWTELRQHTPMDTIRYQLKSMNRQYGLYTKNKTAMKNNLIALLDQTYPGVNTLFGSPVREDGSQKWVDFAASFWHVDCVRGIGQAAFVERYRKWCKRHGYNLRADKAAQIHTEAKELIAMLPKNSLSKVMVQEAIAQLNTVSKTVEVFRAEMNRLAKELPEYETVMSLYGAGKSLGPQLMAEIGDIRRFAHKGSLTAFAGVDPGANQSGTYDAKSTRSSKRGSPELRKTLFVLMTVLLQSAPPDDPVFQFLDKKRAEGKPYYVYMTAGCNKFLRIYYGRVKEFMNTLDTPVDMDSTALCQ

SEQ ID NO: 380164 - protein, 325 aa, unidentified
MAALDPVGGLLGVREFPATAAGYASLLGWLSGFGNLALVGVEGTGSYGAGLARHLAAAGVRVVEVDRPDRQDRHRQGKSGPLDAVSAARAAQSGRAAGAPKGRDGAVEAIRALMVAKRSARHERTQAVNQARALILTGPEELRTRFAGHTTAQLAAAIAALRPRPGDVPGYATRVALRELGRRVQFLDAQLERLDEMIGPLVTARAPGLLALHGAGPDTAALLLVAAGDHPERLRSESSWAHLCGVAPIPASSGKVAGRYRLNRGGNREANQALWRIVICRMSSHPATRAYIERRTKEGLSKREIIRCLKRYVAREVYRHLRDGA

SEQ ID NO: 380165 - protein, 399 aa, unidentified
MSQLWAGIDAGKTHHHCVVIDSDGTRLLSRRVANDETELIMLIDAAVSLSKGGVVTWAVDLNSGGAALLIALMAEREQRLLYIPGRAVHHAAGGYRGDSKTDAKDAAIIADQARMRRDLHPVRTGDEISVELGILTSRRTDLMRDRTRAINRLRALLSTYFPALERALDISNVKATLILLSGYQTPDAIRRIGQSRLETWLRKHKAYNATQIAVKAIGAAQSQYARVAGQDVAASAVAKFAVQVMNIDAEMTELDRDIEERFRRHRHAEVIESMPGFGPVLGAEVLAVTGGDFTAFETVDRLAGIAGLAPVPRDSGRVSGNLRRARRYDRRLLRVFYLSAQLSLRSCEPSQIYYARKRAEGKRHTQAVLALARRRLNVLWAMLRDNAVYRSELTVASAA

SEQ ID NO: 380166 - protein, 438 aa, unidentified
MRRVIGIDVHRTFGEVVFWENGRLRHAGRIDMTRTALEGFGKTLLASDEVVVEATANSMAVSRVLAPFAARVIIANPLQVKAIAQAHVKTDKIDAGTLASLHAAGYLPQIWTPDAETERKRRLVARRYQVVRHRTRLKNEVHSILHTHLIPKCPHADLFNVRGRAWLAAQSLLNDERAAIDRHVRELDRLAEDLALLDREIAQDAIDDPAVNRLMTITGVNLAVAAGIVAAIGDISRFNSPQKLVSYFGLNPRVRQSGLGPAHHGRISKIGRSHARAMLVEAAWTAAKTPGPLHAFFVRIRARRGHQIAAVAVARKLTVLCWHLLTKGEDYQWARPALVANKTRAMQLQAGHPQQKGSRRGPAYAYNIKALRDREMLIAAQAERSYERFVSQWKPRRPKNRRAGASARQDQIGSPVTLAADASRFATRSPARDDHNRR

SEQ ID NO: 380167 - protein, 338 aa, unidentified
MYYTGIDLHKFTSYLTTVDSSGNIVKQENIKNVAHNFVQYFNSIPGEHKTTVESTMTWYWLNDLLTSMNIPLVLAHAKYVKAIAYAKVKTDKVDSHTLAQLLRLDYIPVAYKISNEKRLLRDALRARLKIVQRHTSVTNSMQLLLAKYNYDTPDQLSGIPKFQYEQLSEVEALLNDQMLDLEKQLYPFLIPNDDIQRLLWIPGIGKMNAFTILLEVDDINRFPDVKNFFSYCRLTPSARNSARKSKQRSSKDGNKYLKIAFCDAALHAVQYYPVIRKYHNSLLRKKNKQIAKTIIAKEIAVIVFHVLKNKTVFNNKFRGQELQHLKSLQWPRVVSPYA

SEQ ID NO: 380168 - protein, 430 aa, unidentified
MKSNTQNAKIEAITEKTLVLGIDVGNETHYARAFDYRGIEYSRKPFKFSNTEAGFVTFKEWILNLKERHEKDKVVSGMEPTGHYWFNLGKFLQDNEMKPVLVNPHHVKKSKELDDNNPTKNDRKDPKVIAGLVREGRYMIPYLPEGVYADLRTASNIRFQLQAELTRIQNRISRWFNIYFPEYKTVYGKPDAKSGMLILKAVPLPEDILTLGIDGVNQIWRDAKLRAVGKARAKTLIEAAEHSVGSKEGAVSARMEIRMLLEDYESRNRRLQEVMVLIEELVKQIPMAEKLLEIKGVGIRTVSGFLAEVGDISRFNNPKELQKLAGLALVENSSGKHKGETTISRRGRKRLRYLLFEVAMSLVAKNPEFRELHNYYTTRRLNPLKKMQSLMAIAAKLIRVFYAMLTKGVDYDPKKMVSDIKRPAVYLQAA

SEQ ID NO: 380169 - protein, 353 aa, unidentified
MKRTTKYVALDVHQATTLASVREESGRVIARSILPTDGPALTEFFRGMRGAIHVAIEEGTQAQWLHDLLAPHVDRLIVCDRRGQPRQGNKDDRHDADALSEQLRRGGLRAAYHGGGTGTGLKELTRCYQNLVEDTTRVMLRLKALFRARAIQTPGRAVYRPARRAEWLAQLPPGGARVRAEALWAELDALVARPPAKAALLAAAAREPGWAVLRTIPYFGPVRVVLLLATMQTPWRFRTKRQLWAYAGLAVVTRSSADYVLVDGQAVRRRRAPLTRGLNRNHNRLLKHVFKSAATAARARPGPLQDWHRALVARGLREPLADVTLARKLAALTLRLWKKGERYDPTQLTQQAR

SEQ ID NO: 380170 - protein, 341 aa, unidentified
MESITTIGLDLAKQVFHVHGADSSGAAVLSRKLSRAKLMSFFASQPRCVVAMEACGGSHHWGRELSRLGHEVRLIAPAYVKPFVKRQKNDAADAEAICEAAQRPSMRFVLVKSEEQQASAAVFRARDLLVRQRTQTINALRSLLAEYGWVAPKGLFHMAGLMARVEASDCPLPSSARGAFLMIADSIKQQDSRIRELEREIQQRAREDADARRLMTIPGIGPITATALLALAPPPETFARGRDFAAWLGLTPLQRSTGGKQKLGAISKMGERTLRRLLIIGSSAVVMQASRHGAPAGSWLAQMMARKPRMLVTVALANKTARIAWSLLAKGGTYRAPAAAA

SEQ ID NO: 380171 - protein, 444 aa, unidentified
MAMRKRENEVFPNAAGVDVGASNHWVAVPQHLAEQADCEPVREVGAMTDDLNALADWLVALGVDTVALESTGVYWIPVYEVLEQHGLTVWLVDTRQLKYVPGRKSDVQDCQWLQRLMSLGLLRAAWRPNGDVCVVRAVARQREVLLIEQASWVQRMQKALVQMNLQLTEVLSDVMGQTGQAIIRAIVAGERDPKVLARHRHSRIKASAEQITKALTGNWREEHLFVLGQALAMYDDIARHLLECDAKLRTLLAERSACCVDLGKAPRASAKARLEFDVRQALANWAGVDLTRIDGLGVTAVMKLLSEIGPDLSRFASVKHFCSWLGLCPGTKISGGKVLSSTTKRSANRARQALKMAAMSLAHSDSALGAFYRRLCARIDKPRANTATAHKLARMVYFMLTRGEAFVDQGQQRYEEQQHQRSVAALKRRAAALGFQVNPIEVAA

SEQ ID NO: 380172 - protein, 390 aa, unidentified
MRTIYSSVAYGGMDVHYKFSTVTFRDEAGRVVRRERLEHPQRDLLREQMNRWPKGLPIVMEASFGWGWLSDLLIEVGFKPHLSNCYKLEQMRKARGWVKTNKKDADMLSLLPFEPSDWWKVWRAPLQVRNQREQMRFRGNLVGLQTMVKSRIHAIFHRHGIFHEFSDLFGCRGRRFLVELCLHNPTNLSPQALLALRGQVKLLDHLRRQLADVARILHKQLAKTPLTMRLKKIDGIGLILAHVLAAEIGTIERFRNHKALASYSLLAPRANDTGQDDPKHSPLGRHLGFRGNRTLKWAFIEAAHGAVRSGGRWRAVFDRVTNGGRKDRNRGYIKVARELVKVVYVVWSKGIDYQPVSPARPGSYTKKKNKKKSRSGTGQPSHPMVHVFPA

SEQ ID NO: 380173 - protein, 407 aa, unidentified
MPRTSRAVIGGVDTHKDVHVAAALDDLGVLLAATSFPTTSAGYENLRRWMAGFGPLQRVGVEGTGSYGAGLTRHLRAAGIDVVEINRPNRQLRRRRGKSDTVDAEAAARSVLAGQAAGIPKSSTGPVEGLRALRVARRSAVKARTQAGNQIRDVIISAPQELREQLGRLSLGAQVARAATWRPGPASDLLQATKRSLRHLARRHRALSTEITELDRDIAGLCAQTNPALLATDGVGPEVASTLLVAAGDNPDRMHSEAAFAALCGASPVEASSGKTIRHRLNRGGNREANNALWRIAMVRLAHHHPPTATYVRRRREQGKTDREILRCLKRYIAREIFNVLTNPNKVPRATELRQHRLAAGISLTAAANQLGTTAIRLSRLERGILHAAELATTYQNWLNAQPPHAA

SEQ ID NO: 380174 - protein, 377 aa, unidentified
MDVIYPQCCGLDVHKKAVAACLITSTAGAEPVKEIRTFRTMTADLLALADWLQQAGCTHVAMESTGVYWRPVYNLLEGQFELLVVNAQHIKAVPGRKTDVKDAVWIAELLRHGLLRGSFILSKPQRQLRELTRYRSTLVPDHARALNRLQAVLEDANLKLASVVTDIYGVSARAMLAAILAGQRDVEALADLARGRLRTKRDQLREALEGRVTAHHSFLLTEHLSTLEYLDEAIARISTEIAQRLTAEQEAIALLETIPGVGLRAAEMLIAEIGTDMSRFPSAKHLASWAGMCPGNHESGGKRLSGKTRKGNRWLRQILVEIAHVASKTKNTYLAAQYKRLAARRGKKRALIAVGHTILTIVYTFEFIPIKSLVARA

SEQ ID NO: 380175 - protein, 316 aa, unidentified
MNSTGCSVIGIDASQQRLDCCWGKTNSSFHIANTAQAIKAKLLALQQEQEDLFLVVESTGKYHAVLFRVATELEIPIAIVNPKRIRDFAKALGQLAKTDCIDARIIARYGLTVALEPTKAPSKELQNLRALVTRRTDLVRMVTQERNRLGDIEDPILIKSLKRHLKWLLGECAALEAQIKATLRSAEFASKLSMLRGFKGIGDLSAAALIAFLPELGTLTKSSIAALAGVAPFADDSGSSCKGNRRILGGRSSVRSALYMSALTAARWNPIIKSFYQSLRAAGKPFKVALVAVMRKIIIILNAMLRDNSTFRTVQA

SEQ ID NO: 380176 - protein, 485 aa, unidentified
MAKESVYERLTGGNRKQRKDLLRRLYSDDPGLDVVHAKAAGIDIGNESHFVAVPPAMDTQPVREFGSWTADLECMAAWLKSCSIETVAMQSTGVYWFAVYDVLEKHGLKVFLVNASHTKNLPGRKSDVQESQWLMKLHTYGLLRNSFRPPEDIRPIRAVWRLRDRHVQDAGRSVQHMQKALTSMNVQLANVISDISGTSGQAIIRSILAGERDPRKLARLRDQRIRASEEEVARSLEGNWQEDQLFELQHAVDEYDFRLKQIAECDSKLQAYLAVLPTRISPGADTGTPPPAPAGVTGKKRKQPKKAQGYAPSSFNLAAELIRVSGVNALRVDGINLITFQTVVAELGTDLANWFPTEYHFASWLGLTPRRDVSGGKVIRHTRQKSRNRVAGVLRMAANALLRSDSYLGARYRSLRTRLGSPKAIKAMARYLACIIYRLFTKGQAWVDRGAEHFEQNRQTRDLARLQAQACSRGFRLVPVTGEQA

SEQ ID NO: 380177 - protein, 390 aa, unidentified
MDVLYQSCAGIDVHQATVVVCILHGPLTSTRPKREMAQFDTTTKGLKDCHDFLSQFHVEAVGMESTGVYWRPVWHELCDDFELILAQPAHMKAIPGQKTDKKDAHWIAQLTRIGLLPRSFVPDETIQELRELTRQRKHYVESRNRETNRIHKILQSGGIKLTTYIEDIMGASGRNLLQLLIDETPITPRMIHQSVYTSLKRKVPQLLEALDGYFSAHHRFMLGQSLEIYDFYQKQIDCLEERMNGYLNLYERPVEILDSIPGIDLITASVIIAEIGVDMSQFPTAGHLASWAGLCPGNNESAGKKRSTKIRHGNSYLKRCLCQAVFAAKRQKGSPLAERYYQIQSRRGPQKATIALAHQLLKIAYILLKENLTYQEFVLQKKATRDEPVA

SEQ ID NO: 380178 - protein, 324 aa, unidentified
MTLPPLGLDLAKLKFNACLLREDGRLRHKVFPNNPDGFSQLSDWLAKQVVGRAHACLEATGAYGDSLATYLHEQGHIVSVVNPAAIKAYAQSRLSRTKTDRVDAALIAGYCAERRPPAWMPPAPELRELQALVRRLDSLVEMRTMEENRLSSGIAVEAVRASVEELIAHLSEQIKRSEALIRDHINNHPTLKRQRELLDTIPGIGETTAAALLAEVPDITQYKSARQVAAFAGLVPRERQSGSSVRGRVRLSKIGNARLRKALYFPAVTALRCSPFFQAWAEGLRQRGKSKMAVIGAVMRKLVHLAYGVLKTGKRFDPEWAKTA

SEQ ID NO: 380179 - protein, 391 aa, unidentified
MLNDVPRPAQAAIRTDLGAIFVSMELSRRAWLITSLSPGAGEKMSKHSVPASDVSGLLHRFAELRRKAAARTGRDFPIIVIQEAGLDGFWIHRVLQSEGIESHVVDPASILTSRRRRRAKTDRIDGETLVRTLMAFKRGEPRVCSMARAPTPQEEDRRRVCRERRTLMGERVRHVNRIKGLLFAQGIFGYEPLRKHRRERLENLRTGDGRPLPVHLKAQIIRELDRLEVVLAQLKSVAAEPDALLKEATDEPASPPAMLVQLKGIGPESAAVLWSEGLFRRFDNRRQVAAYAGLAPTPWQSGSIDHEQGVSKAGNPRLRTTMVELAWLWLQNQPTSALSLWFHERVQRLGGRMRKTIIVALARKLLVALWRYTTAGVVIEGAVMKPAPATI

SEQ ID NO: 380180 - protein, 461 aa, unidentified
MSRTRPRGKQEKSAPKQMDWKALEVVHPDAAGIDIGGREHWVAISPERDAEPVRCFGCFTADLQEMARWLVEKGVRSVALQSTGVYWMPAFEILEQQGLEVYLVNAQHTKNVPGRKSDIQECQWLLKLHAFGLLNNSFQPSDEIRIARTLWRHRGNLIAEASSAIQRMQKALIEMNVQLSNVLSDLSGVSGMTIIAAILKGERDPEKLATMVQPEVKARPEDIAKSLEGNWRAELLFVLRQQVELYRTYQEKIADCDVQLRRHLESLGGKVDLTRQAIGPKPKGKKASKNAPQFDLRSELYRITGIDWTQVNGIDVLTAQTVMAEAGADLEAFPSEKHFTSWLGLCPTNERSGGKILNRKTRQVVNRATTALRQAAMTLLRSQSYLGAQYRRLRTRLGAPKAITAMARKLACLYYRLIKRGQQYVDKGTEHYEAWYRAQQIRAVVKKAQKLGLQVVMPQSA

SEQ ID NO: 380181 - protein, 393 aa, unidentified
MICVGIDTASDKHDVCIMNKEGEIFKRIFTIHNNKTEYKKLFNEIESAKKFWNDSKVCIGIESTGVYSETLVNYLSKIEAYEIIYINPILTNMFQHSELIHYAKTDKIDAKGICTFLSDKRKRLYTYTPPSYTILEMRSLGREINHLNKQINKTVNRLTGMLHVVFPEFFQVFDKVKGSTCLEYLRLFPTPDMIVKKHSLNDVYKKLDGRGRKIKNLNNLIHFAKETIGHSTKSDAIAISFLASQLQLSYSQKGALIDRMDILATENAMNLTRIPGIGAITACTIMGEIGDISNFRGADSLVAYAGINPMVYQSGKYEAKGLSMSKKGSSYLRNAIILVSRLIVQYDEKFKTYYEKKRAEGKSYNVAIGHVSNKLTRVIYHILKYNEPYDETK

SEQ ID NO: 380182 - protein, 349 aa, unidentified
MSNKYIGMDVHQASTVIVVLNEAGKTIMETILETKTGTLLDFIQGLRGRLQVTFEEGTYAAWLYDVLTPYVERVVVCDPRKNKLLPSGHKSDKVDARKLAEWLRQGQLVAVYHGNRTLRGLKELVRSYLCLVQDVTRVMNRLKALYRGRGISCGGRAVYRLRQRDSWLALLSEPGVQQRAALLVLQALRQTARQALLTESRKQAAFPILRQIPGLGPIRAGVVLALVQTPHRFRTKRQFWAYLGLAVVTSSSAEYRIVQGRVQKSGKPVSTRGLNPNYNRALKDVFKAAATGVSQREGPFKTLYARWLDRGLAPELARLSLARKLAALTLTLWKKGARYHPEQVTQQAA

SEQ ID NO: 380183 - protein, 343 aa, unidentified
MKIHALGIDLGKTVFHLVGLDSGGRVVVRKRCSRTQLLAFTGNLQVQVIGMEACSGAHFLGKALRAQGHDVRLMPAQYVKPYVKTNKSDYIDAEAIAEAVQRPRMRFVAIKTEEQLDLQALHRVRERWVMRRTAVVNQTRSLLLERGLTLPKGRSHLGRMLPRILEDAELKLSGAFRALLAQLKLELEQLAARIEQMDTVIQQEARENESCQRLTTIPGVGPVTATALIAAVGNGSAFGKGRDLSAWMGIVPGEYSTGGKQKLLGISKRGNKYLRRLFVQGARSVLQHRDKQAPGLNCWLAQLLARTHQNVVVVALANKLVRIAWAVLCKNENYRAPMLATTT

SEQ ID NO: 380184 - protein, 356 aa, unidentified
MNVIHYIGLDVHKKTISYCIKTAAGQIVKEGTLAAERSVLRSWARSLPQPWHGAMEATIFSAWIYDTLKPYAQQLDMGHPAKMKAITAGKKKSDTIDARTIADLVRCNLLPGCYVFSPELRDLRRLMRYRHMMVQQSVRMHNKTAGLLMESGVSFQKTKLQGKKYFADLIKSLEEVPESVKDLLRISRGTKDMFESVQNQLVRRLLVDPTLKQRVECLSSIDGVGAITALTWALEVGDPHRFASIADAVSYCGLTAAFRSSAGKQQRGPLSKQRNAWLQSTLIEAAKLAPRWSPQLAQLYAQHLERGHANRATLQVARKLVGYLLSVDKSGQPFQVRTPPKPIPTRKKARRRLAAA

SEQ ID NO: 380185 - protein, 404 aa, unidentified
MERVIERCCGLDVHKKTVVACVRVPGRTSAREQQVRTFGTTTAELLALRDWLAGYGVTHVAMESTGVYWKPIFYVLEDAFTCVLANAAQIAQVPGRKTDVKDCAWIAQLLEHGLVRGSFVPPAPIRELRDLTRYRAALIGEHTRETNRLQKVLEDAGIKLASVASDVLGVSGRAMLDALTQGTHDPDVLAELARGALRRKLPALRQALTGRFLVSQVLAHLDYLDEVIEALSTHLDEVMAPFAEEVSRLDTIPGVNKRTAEVLIAEIGVDMGVFPTAGHLASWAGLCPGNNESAGKHRSGKIRKGNRWLRGALIQAALAGGTRATKGAFAARYRRVMRHRGHKKAVVAVAHAMLVAAYHLLARHTTYQEPGADYYERRHAERVRQRAVQLLERQGYRVTLEPAA

SEQ ID NO: 380186 - protein, 345 aa, unidentified
MIPQDVYAGLDVSLETTTICVVDSKGATVWRGSCPTDPDSIAGALRRHAPKAQLVGLETGQLSNWLMRGLCEQELPVVCLDARHAKAALKLQVNKTDANDAWGLAQIVRTGWFREIAVKSMDAQMLRMLLVARTHLISQRQATANVIRGLMKTFGLVIARGASGLFALRVREAAAGNGALLAIVEPLLAAWQALREQIALFDKQILSRAKNDAVVRRLMSIPGVGTIVALSYTAVIDDPARFRRSSSVGVYVGLTPRRYQSGEIDVSGHISRCGDSLLRSHLFEAANVILARYSKASALKSWGLALAKRIGKRRAKVAVARKLAVIMHRMRVDGTSFIAEGKAAS

SEQ ID NO: 380187 - protein, 349 aa, unidentified
MKIIGCDFHPGYQQIAMWDQATGEMLEKALRHERKEEVRAFYAGLTGPVRVGIEASGQSQWFEQLLAELGHEVWIGDAAKIRASCERKQKTDRRDAELLVKLLDEDRFPRIWVPTPAERDARQLLLHRHKLVRMRTQVKNQLQALALNQGVQRKWKLWSEAGRKQLEALPLLPWASRRRTELLELHDQLEASIDELDGALAEQANTRPAVRRLMTHPGVGAVTALAFVLTMGPVRRFRRGKQVASYLGLIPREHSSGGHGQRLGHISKQGNPFLRGLLVEAAQSAVRHEPEMRRAYQRLAQRKCRALAKVAMARKLAVRLYWMLREEVDYAQLLQGSHAGQLESFRGRG

SEQ ID NO: 380188 - protein, 373 aa, unidentified
MRFYNGQHPFYCGIDLHARSMHLCILDQAGQVVFDRNLPCRPETFLRAVAPFRDGLVVGVECMFAWYWVADLCQQEGIAFVLGHALYMKAIHGGKAKNDKIDAGKIARLLRGGTFPLAYAYPKGMRETRDLLRRRTYLVRKRAELLTHVQILNAQYNLAPFPKKLSFAANRVEMNIAARFADPSVQKSAAVNLALVDRLDELIGELELYLTRTAQVDDVQTYHRLRTIPGVGKVLALILLYEMHDVQRFERAGQFLSYARLVRCAHESAGKKLGSGGKKIGNAHLRWAFAEAACLFLRSSERAKKWKQKQAAQRGEGKALAILAARLGRAVYHMLRKREAFDEERFWQGGTRRTGTGCSSPSPVEACHAGTMT

SEQ ID NO: 380189 - protein, 330 aa, unidentified
MNVAGIDVSAKTVTLVISRDERTGKPREFKNTPAGHATLRNRLRKAHVSRVCLEATGLYHLDLALALEDAGLPLMVINPKAAKRFAEAFQTRTKTDAVDAAVLAQFALRMPFTPWQRPDDLALAIRACARRIAALDKLRTQTKNQLHAAQLTAMTPDFLIASLQQTVAFLDDHIEHLRQQARDLIATNEARRHAFDLLITVTGIADASAIQLLGELLVLPDDMQAKQWVAMAGLDPRQHQSGSSIDKKPRISNAGNRYLRLALYMPALSAARHDPNVRAYYRHLIEDRGLKKLQALCAVMRKLLLAIHAMLKTQNPFDSSRFYTPTETAA

SEQ ID NO: 380190 - protein, 345 aa, unidentified
MVVRTVAERGSPFVVPVIPNSRLVRSARPHLQEWGMERMYVGIDVAKDRLDVHVRPTGEAFAVARDGEGLAGLAARLAELGPRLVVLEATGGFEVTVAAALAGAKLPLAVVNPRQIRDFARATGKLAKTDALDAAVIAHFAEAVHPEPRALPDEQVQALGELVARRRQVVEMIGAESQRRRQLTQPRVLRRIDRHLRVLQAELSEIERELDDAIRGTPVWRENDDLLKSVPGIGPATARTLLAELPELGTLGRKQIAALVGVAPFNRDSGTMRGRRTIRGGRTTVRTALYMAALVATRYNPVISSFYRRLRAAGKLPKVALVACMHKLLLILNSILRDRRPWQNA

SEQ ID NO: 380191 - protein, 363 aa, unidentified
MKKSNRNTRLAEWKEKPAITVGMDLGDRFSHYCMLNKDGEVVEEGRIPTNEAAMRRQFEGEARQRIAMECGTHSPWLSRLLKKLGHQVIVANARKLRAISQNESKNDRADAEMLARLAYSDPQLLSPIQHRSVERQRDLNLIHARDTLVRARTMLINAVRGLVKSAGGRLPKCSTVSFAAHVVPALPTELKPATEPLLEQITALSLQIQRMDQAIEKLVERYPEIRVLRTTPGIGPVIAAAYVLTLDQPDAVTSSRGAGAFLGLRPKQSQSGDSDPEHRITKTGNIYLRRLLVQAAHYVLGRFGPDSALRRWGLKLAASGGKRGKKRAIVAVARKLAVILHCMWRSGQVYQAFPVTASAAASA

SEQ ID NO: 380192 - protein, 351 aa, unidentified
METRITALPKLFIGIDIHKRSWKIHCSIDLFGGKSFTMPPEPEKLYEYVQNHFCDHQVTTAYEAGCCGYSAHRSFESFGWKSLVVNPADIHRKGKERYTKTDRIDAQLISRELKDGRLDGITVPDIEREELRSLFRRRNELVKDFRRIKSRIKMHLLYFGIKVPAEFDNDHWSHAFRHWVDSQEFHYPTAQETMASKMRTFRFIDKELREVSSQLRAYCRKHFKKDYYLLRSVPGIGGIVAVGILAELGDIRRFNTLKHLAGYVGLAPGIYQSGATSKALGMNPRCHRLIRSYFVEASWQAIRTDPVIQAYYRKHVGKDVKKIIVKVAHKLLSRTLAVIKTEIPYEVGVIA

SEQ ID NO: 380193 - protein, 340 aa, unidentified
MGDIITIGLDLAKNVFQVHGVDEAGSVVVRKRLRRGQVLAFFAGIPPCLIGLEACATAHHWARELIALGHEARLMPPNYVKAYVKRNKHDVADAEAICEAVKRPSMRFVPLKTAEQQSVFMMHRARDLLIRQRTMLVNALRGHLAEFGLIEAQGLHKVARLITIVMDEMDGRVPDIARQVLKVIVSQIEDIRRGIAELETQVLAWHKNNPVSQRLATIPGIGPIIATAIAATVADPNTFRSGREFAAWLGLVPRQNSTGGKARLGGISKRGDSYLRRLLVNSAHTVLLCSKAAKTDPWLISLLRRKPRLVAAVALANKTARVAWAIMSRRETYRHVAAAA

SEQ ID NO: 380194 - protein, 491 aa, unidentified
MGQRGKRKPAPADRSVPVEIADAEHELVIERAAAIDVAKAAGKVCVRLPGKSGRRFSRVWDVSARTGAITELAEQLVQLDVEKVTVESTSDYWRIWYYLLEDQGLDVQLVNARDVKNVPGRPKTDKLDAVWLAKLTEKGLLRPSFVPPAPIRRLRDYTRLREDLTRERSRYWQRLEKLLEDAAIKVSAVASTLDTLSTRDMIEALIAGERDPRRLAELARGRMKTKRSELIAALDGRFDDHHAELARLLLGQIDSLTAQIATLTARIEQLIAAMNEPDHDSDDHDASGTAAPQATNPASPGDQTTAPGPGATTAISAETDTATVIECRRLTAVERLDEITGVGQRAAQTIIAEVGLDMTRFPTPEHLVSWAKLCPRSIQSGPISRGGKTGKGNPYLKGALGEAAAAAARSNTFLGERYRRIVKRRGKLKALVAVARSILVIVWQLLSDPTARFHDLGPDYHTRRAVTERKVRNHIAQLTAMGFHVTLQPAA

SEQ ID NO: 380195 - protein, 343 aa, unidentified
MSEVTTIGLDLAKNVFQVHAIDASGQVVVRRQLRRSQVLSFFERQAQCVVGIEACATSHHWAREIAKLGHDVRLMPARYVKPYVKRNKNDAADAEAICEAVTRPTMRFVAVKTEEQQSVLMLHRTRQLFVRQRTTLINAIRAHMAEFGIVAGVGRNGVERLLRLIDEGADDRVPPVARECLQALRTQLVLVKRQILEADLRILAWHRSNELSRRLETIPGVGPLIATALVASIPDPHAFGSARDMPAWIGLVPKQNSTGGKERLGSISKAGNRYLRSLLVVGALSVIRRAKQVGYTRRAWLAELMARRPVKVAAIALANKIARIAWALMVNGTRYKEPVPQAV

SEQ ID NO: 380196 - protein, 346 aa, unidentified
MEHYAGIDVSLEWSSICVVDALGKIVKEAKISSEPATLVAFFEALGFAVKRIGLEAGPLSQWLHAGLKRAGFEAVLLETRHVKAALSAMTVKTDRKDARGLAQLIRMGWFRPVHAKSIRSQEVRALLVARKQLLGRLIDVELSMRGILRGFGLKVGPVTRKGFEARIRELVRGQATLERIAGAMLSAREALKAEYERLHKTVLAIVRDDAVCGRLMTVPSVGPLVAITYKSAMDDPNRITKSKAAGALFGLTPKKYQSGEKDVTSGITRAGDEMVRTALYEAANVLLSRITRFSKLKRWGIDVAKRRGSKRAKVALARKIAVILHRMWVDGSTYRWSEAQPIAAQA

SEQ ID NO: 380197 - protein, 355 aa, unidentified
MSQEKYIGMDVHQATISVAVMDAAGKLIMECLLETKASTIVEFIQGLQGTLSLTFEEGTSAAWLHDLLKPHVSQLVVCDPRKAALLKEGNKSDRIDARKLAELLRTNQLKPVYHEEHGIRALRELGRSYLTITKDVTRVMNRIKALYRSWGIPCSGAGVYAPRHRAEWLAKLVEPGVRVRGEHLYQQLDSLQPLRLQARGELLRESHKHPAVKLLRQIPSIGPIRAALLVALLQTPHRFRTKRQLWAYSGFAVETHDSGEYRCVRGKLQRNRERITVRGLNDNHNKDLKNLFKSAAISASTRPGPLRDFYVARVEKGMRPTMARLTLARKIATITLTMWKKGVGFDPQNLYRQAA

SEQ ID NO: 380198 - protein, 416 aa, unidentified
MSCALPEALFFTGIDWAAEAHAVCVLDAAGKIVAEFTIEHSADGIATLILRLARYGAPGDLPVAIERPDGRLVDLLLEAGHPVVAVKPNAIKAWRDGEVLSGAKSDAGDAVVIADYLRLRAHRLRIVAPYSDETKALRTVVRTRGDLVETRVAATNQLSALLEAHWPGAKAIFADVESPISLEFLTRYPTPAAAAHLGEKRMAAFLIKHGYSGRRTPAQLLTRLRSAPAGTGREALTEALRDAVLAAAGVLTALNASVKNLDRSIAAHLGEHPDGAIFTSLPRSGQVNAAQVLAEWGDARPAYEHPDAVAALAGVTPVTSQSGKHRAVYFRWACNKRFRAAITTFADNSRHASPWAAKIYTDARASGKDHPHATRILARAWIRVIYRCWIDNTPYDPALHRAAATLAKQTTGQIAA

SEQ ID NO: 380199 - protein, 393 aa, unidentified
MSVVGIDIGKNQHVAAVCREQCQEAERGVLRLASGRGGFEQLDAWMARQGEVSLVVMESSGHYWMPLASHLRSQGRAVAVVNPLRAKYFAKSRLQRTKSDPADARMLAVLGMSTRPTPREPLQGSELREASRFVMTLVQEQAKVCQRLQRLIDLAFPELGDAFEDPSCASALAVLRVAPTAAAVRRKRAASLAAMKAPGGKRSLGAKKAVELKALAERSVAPPELEAQMAFEIPILIGQYDLLESQIQGAEAHLASLLDDDVARRLQSIPGVGPATAATLMAEIGDIWRFDDVDQLLAYAGVHPREASSGQKGSNPETSWHMAKTGNAHLRTAVYRMALVGTQHNPVIAAHYQRKREAGKSKMNALGHCMSKSLSLVWGVWRNGQPFDPGYRA

SEQ ID NO: 380200 - protein, 394 aa, unidentified
MRYVGIDIAAEKHVVAVLDDERQVVVKPTTFGEDTEGYAKLVALLGEPADALVAMEATGHYWKNLFAALASHGFAVALLNPLRTRRFAGEDLERTKTDAIDALAIARFAAEKHPTATRLPNETTQEMRELVRLRDRLVQDFGDQVRQLHRLVDLGFPELTRHVHDLDSELAQALLSRYPTAKAFAEAREGELANLCYDGRRHVGRALAQTLIAGAKISVGQHHGEAYRIQVECACETLALLRKQLRRVERDIGTKLDAHEVGKLLTTIDGIGPTTAARIIAECGDPADFRDAKALASYLGLVPSLRHSGKRIGMRAGLTNLGNLAVRAKLWMPTLTAVRRNPWLRAFYERLRAAGKLPKVALCAAMRKLVTAIYSVAKNRKPFTPRLIAAEVTP

SEQ ID NO: 380201 - protein, 337 aa, unidentified
MEYFAGLDVSMKETRICVVDREGNVVLEVTAASLPETIAGALGKAPDCQRVVLETGRMAPMLYHGLDALGVPVTCIESRQAYQALKSLATHKTDRNDARGLAHLARTGFFKPVHVKSLAAHAVRALIIARKKLVGQRVTLENQIRGLAVVFGIQLPRGLSPAFAAQVIDGSQGVAGLTTAIAGLLAARNAVLAAIIAIDRDMKRLARASGACRRLMTIPGVGQLTALAFVAAMDEPERFRRSRDVGAYLGLVPRRYQSGEIDYSGSISKCGDRRIRTLLYEAANVMLTRYRGKLALKDWALAIGRRSTMRKARIALARRLAIIMHAMLRHGTEFRAA

SEQ ID NO: 380202 - protein, 402 aa, unidentified
MIFINCLGIDIGKSESVVAHYKDEVLVKEMVIQNNQNGYRYLKNYIKHLDSLFILFESTGIYSRGMKRFCEIHKIDYLEMNPLEAKFKTSSLKSWKTDKSDAHKLALLAFRMKDSKVQRQSEEIYFELRERARFHLEMEINQNRLKVELVETLHQTFPGLEKLFTNRYSKIALSIAKAFPHPDFVSTLTHDELVEKVLHSTDKGISVNKAHKYVQKLIEIQINSFPNVDKSSFLLQKVQYLCDKLLIGIEEMKEFDQEMIDLAKNTTEFENIISIPGIGELTAALLIGELGNIREFKTNKQLNAFVGIDIKRYQSGTSKSRDTINKRGNKKARRLLYLIIMNIIRGRNHYQSHIVDYYYKLREQPHGKTHKTAVIASINRLLKTIHYLIVNNKLYDYQKAPH

SEQ ID NO: 380203 - protein, 428 aa, unidentified
MAVFCGVDWAEGHHDIALIDDEGKLVAKRRINESVEGVAELTAMLTAAGDSAEEPIPVAIETPRGLLVAVLRASGRPIYPINPLAVARYRERTSVSGKKSDHVDAMALANILRTDAHLHRLLPDDSPLVRSIMVLARAYQDAVWRRTKLVQELRARLREYYPGFLDAFAAGSGSGRGLSSTQLASADARAVLAIAPSPEEGLRVSTARVETALRRGGRQRRITSLAASVVTGLRAPQLRQDPVVEQAMRTETLALLGVLNAACESVEQLTAALGEAFAQHPDYAIITSFPGLADVSGAIVLAEIGDDRNRFSDDRALQAFAGSAPITRASGKSRTVTRRRTKNNRLAAIGYSWAFTAAARTSPSREHYLRRRERGDGHPAALRHLFNRMLGQLHHCLRTEQNYDPIKAFPHTRPPATPPIEHAAGVAA

SEQ ID NO: 380204 - protein, 321 aa, unidentified
MVFLFIKSPVLCCGENITFHQVAKFSVPLHTTKGHDELVSWLKGHKIDHAHICIEATGTYMEPVAECLYDAGYIVSVINPALGKAFAQSEGLRNKTDTVDARMLAEFCRQKRPAAWEAPHPLERALRALVVRHQALTDMHTQELNRTETAREVQRPSIDAHLLWLEAELKRLEKQIKDLTDDDPDMKHRRKLLESIPGIGEKTSAVLLAYIGLKDRFAHARQFAAFAGLTPRRYESGSSVRGASRLSKAGHVSLRRALYMPAMVASSKTEWGRSFRDRLVANGKKGKVILGAMMRKLAQVAYGVLKSGVPFDASRHNPVAA

SEQ ID NO: 380205 - protein, 254 aa, unidentified
MAFLMEETGECGEQELNHSDGEAERFYRELKLRGVSVRVGMEATGYSRWFERLLAELRFEVWIGDAAEIKRLRVRKQKTDREDARLMRKLLLENRFPRIWVPSPENRDLRQLLWHRHRLVQMRTRIMNQLQAVAMNEGYRWKKKLFSAQGRALLEKLSLAPWASRRRKELLELLDQLDPKIAELTAAVEQEAQQRPEVLRLMTHPGVGPITGLAYVQVIGTPDRFPCGKQIGSYTGLIPCEDSSAGKQRLGHPQ

SEQ ID NO: 380206 - protein, 421 aa, unidentified
MGKLIERCAGIDIGKRFLVCCVTTGAAHEEPRSETRRFDTTVPGLKRLRNWLNEERVADVVMESTGSYWIPVFNLLEGHVRVVLANPEEVKNRKGHKTDRKDAGHLADLLRHNHVKSSYIPAEPVRQLRDLTRRRVQLTQDATRERNRVQKLLEQVNVKIGSVLTDVFGVSGLHMLLALLDGRAAPEEIAGLARGSAKRKTPQLIEAIEGNRMSDHVRFLIRGCLRHLACLEEEVEELDTEILRRMQLSTFQKAFTLLQTIPGVGQLSAATILAETGPDLDAFPTIEQMASWAGLCPGNRESAGIQKGPQTTHGNPYLCTALVQCAWAATRKRDSVFRSRFQRLAPRRGEKRAIVAVAHHMLIILYCMLKRGVPFLGAEHAPKQRRRERRAHHHLRCLRRLGFSVEIRLSSESTPPDTISR

SEQ ID NO: 380207 - protein, 323 aa, unidentified
MTKDIKYFGLDISHLVFDVTDSDGNYYQFKNNAFGFKKFTKLLNNESHCVMEATGYYHYQLAYHLLESGIKVSVENPLAVKRFIHMKLSKVKTDKSDSKLICDYATQVELKLWQGNSKDEIECLQITRALSVYTKQSTMLKNKLHGESVLGNPSKVVVSSLKRSLRGLHREMKTLEDKLLVLVKEVHQDLLTRLKTIPGIGPKTAIMLVVLTGGFDRFTSAAELCSYAGLTPVIRQSGSSVKGRPRISKIGNQKLRNLLFMCSFNACKYNKACRDLYERIVAKGKSKKLALIAVCNKLVKQAFAIAKSGLIYDDTYRSTLVKN

SEQ ID NO: 380208 - protein, 390 aa, unidentified
MIYFGIDIGKFNHQAIAIDEKGNSLCVSFPFSNTDEGFKLFIKSAITFMEKDTICIGMEATGHYWLNLYFALLDLGMELHVVNPIQTDAMRKMSIRKTKTDSVDCKYIAQVIRIGNFSDVVIGDEDVSELRQLCRYRFHLVDTIGAVKNQIIGLLDRVFPEFSSLFSNVFGVTSMEILKKYTTPEQILAVKTSTLVNLLAKASRGRFKDAKAKEIKEAAKFSVGLKSANASFVFQLRQMIMQIDFSETQLKELEQKISEYYNKCECFLSTIDGIGDTLGAVIFSEIADISRFDNPKKLVAFAGIDPTVKQSGNFIGTHNTMSKRGSVYLRRAIWTAAVVAAQKNPVLSEFYQKKRAEGKDYMTSIGAVSRKLCYIIFAVLRDKKTYIPIA

SEQ ID NO: 380209 - protein, 403 aa, unidentified
MNNVAGIDVSKGKSMVSVLRPFGEVVAKPFSVGHTGSELKELADYLKSLDGETRVVMEHTGRYYEPVARFLHDEGVFVSAVNPKLIKDYGNNTLRKVKTDKADSRKIARYGIDNWAELRQHTPMDTIRMQLKTLNRQQSLYSKTKTMMKNNLIALLDQTYPGVNALFDSPVREDGSQKWVDFATTFWHVDCVRNMSLTAFAERYRKWCKRHGYNFSQSKAVEVHAGAQDLIAMLPKDALTKTMVRQAIDALNAISASMERLKAEMQALAAQLPEYPVVMAMHGVGDSLGPQLMAELGDVTRFTHRNAITAFAGVDPGADQSGTHEAKSTRVSKSGAPELRRALFLVMDCLLKTQPQDDPVYRFMDKKRAEGKPYLVYMTAGANKFLRIYYGRVKEYLASLEGN

SEQ ID NO: 380210 - protein, 349 aa, unidentified
MVAEVVDYVVGVDTHRDEHTLALVEAATGAVLAQRTVASNGRGYAQALRFARQQAEGVRVWAVEGAGHYGAGLARYLSERGETVLEVGRSPRGERRLRGKDDQLDAVRAARAALGDERMPVPRSGERREALRLLLVARRGAVEVRREALVRLRSVIVTAPERLREELRGLPLQRLLGRCSRLRRSSSSTVDELAARLVLRTLARRIEAATVEAAELEGEILAHVRALAPQLLEEPGVGPIVAAQLLVAWSHRGRVRSEAAFARLAGVAPLPASSGQTSRHRLSRGGDRQLNRALHTVVLHRRQHDAATRDYIARRVAEGKSRREATRLLKRYLARRLYRLLQNQEPLMA

SEQ ID NO: 380211 - protein, 371 aa, unidentified
MASIIQVGMDVHKDSYTLCCYNFEEDKIQYQQKLPPDYKMILNYLEQIRKRYTEEVEFECGYEAGCLGYTLYHQLTDHGINCVILAPTTMAITNNRRVKTDKRDAGNIARCLAFHTYNAVNIPTGEDESVREYIRMRDNQKKALKIIKQQILALVLRQGYRFIEGRNYWTIRHVTWLKSLKLGGILQETLEEYLITYEYLVDKIGRLDKRIEELAGDERYRDKVKKLSCLIGVKTHTALSVIVEIGDFKRFAKADKMASYLGLVPGENSSGEKQHRTGITKAGNAHVRRLLVESAQGYTRGAIGHKSKDLKRRQNGNTPQVIAYADKANERLRRKFCKMTLKHNIHKNVAATSIARELACFMWGLMTDNVA

SEQ ID NO: 380212 - protein, 329 aa, unidentified
MLFLGIDVSKDKLDGAAVSEGTGAVLGRRSVPNTPDGVARLRCWAETIAGPSESAGIHAVIEATAAYHEPAAYSLAAAGVSVSIVNPAQVRSFARGVAVLGKTDRLDAVVLARFGRLTQPKAWRPSAPAVRDLQALLARLDEIEADLRREANRLEQARVRGCPEAVLRSFADTMAALKASRSELRRAIDSHVAAHPELQAGLDRLLTIPAVGPKTGLRMLGLLRSRGFESAREVAAFLGLVPVEHRSGTSVRGRPKLSKAGNPRLRAALYMVAVVATRLNPDVRAQYQRLLARGKSKMAALGAAMRKLVHLCFGVLKSGGDYRPAANRA

SEQ ID NO: 380213 - protein, 364 aa, unidentified
MKKSSKKQQGATVAESKPMQVVGLDLGDRHSHYCVLSSTGEAMEEGRIQTTRAAMEKHFASEPRMRIALEAGTHSPWVSRLLKSYGHQVIVANPRKIPTLTKSESKNDRNDAEQLARMAAFDPKLLHPIEHRSPERQQDLNLIHTRSVLVRARTMLINSARGLVKSAGQRLPACSSEAFPQKAPTAVPPALKAACTPLLEQITQMNQTIAAMDKQIDQLDQKYPEITILRTVPGVGPVVAACYVLTLDSPQAMETNRQAGAYLGLRPRQQKSGDSDPQCKITRMGNTYLRSLLVQSAQHILGRSRPDSELRRWGLKLAASGGKRGKKRAVVAVARKLAVVLLSMWRNHKKFEPFPQSVAQLTTA

SEQ ID NO: 380214 - protein, 466 aa, unidentified
MENNYILYVGMDSSKGKADAAILKVSDRRSVKPKFLRKKLSFKFVKSEVTSFLETVRSYSDDNCTSICFALEVTGIYSTNVYNFIKDNLNDNESIKFLNTDFVNQWRNAHNIAKSDPLDAQTISTIIGTDSDVQYVNDNVFENKNGYQDLKALVHRHYQIKKIYSQEINRLIAQCDCLFPELQYVFEPKSAAFIAVLSSYPTTHDIINASRLEVFNVVYEATKHRCSMDKIDKLFDLCHDTLVPDNISSYGRSIILDLVENIKNIKGQLKMIERYIRDVASLNPAYKLLLTITGCGPLTAATVIAETGDIKRFKNADCFVSYSGTSPRNKRSGTSVETMGKISKKGSRYLRHAIYMIAEFARRHNPVLKHQFERIKNGNKKRHKLANIAIANKIARYIYSIMKNESSFVILHEHIMRLPEETQNTFFNSISLDFPKNTRKQIYQYSDITGEIHKFVYTKLEETMII

SEQ ID NO: 380215 - protein, 352 aa, unidentified
MDEKYVAMDVHKASVVIGVRNAAGKMISRATVETKAQTLKDYVRGLSGTIHLTFEEGTQSAWLYDLLRPLVAECIVCDPRRNKLLEDGNKSDEIDVDKLSELLYLGRLRPVYHGNHGTRALKELAHNYEALVKDQTRVKNRLKAIFRGRGISYEGEGIYDCQQTEPWLAKLSERGVRERARQLYQQLDQLAGWVATARRQMLAESRRHQAKKILQLIPTLGEISVAELIATVDTPHRFRSKRQFWTYCGLAVVRHTSADYHFEQGELRRRAKAGPTRGLNRNYNRRLKRIFKSAALTGSTKGPFKSYYQGLLGRGLSSELAQVTLARKIAAITLTLWKKGERFDPEKLVKPD

SEQ ID NO: 380216 - protein, 341 aa, unidentified
MEKYVGLDVSMEETSVCVVDGGGNIVFEGKTSSQPDALSKLLRAKASGAARIVLETGSLACWLWHELRGRNFPVICLDARHARAALSMRVNKTDRNDARGLAELARMGWYREANVKSMESRYTHSLLAARAKLVDLRRDVENQMRGLLKGFGLPPGKGGIKALLEKIVVIMREAPHLHMLFKPMMLAHSALVTQVEFYDVQILKLAKGDETTRRLMTAPGVGPATALAFRSTIDDPNRFKSSNDVGAYLGLTPRRYQSGELDRTGRISKRGDRLTRFYLFEAASVLLTVVKRWSVLKAWGVRLAKRVGIKKAKTAVARKLAVILHCIWVDGTEFQWGKKKA

SEQ ID NO: 380217 - protein, 337 aa, unidentified
MKTLFIGCDISKKDFEAMLRADDVEQSIGTFKTNPHGYGELRKAVDKFNKADYQIHLIAEPTGTYHLGFIAYAYEQEWEVSLPNPVVIRQWAKGQGVRIKTDKIDAHTLAAYGFKEQPAAENSLPTHVEELDLMLKRKDDIKKSLRQEKNRLESYVHRTTGSDATHQSILDAIAFYGAQFLEIQAAIKSYLKQHQDLAKQRTLLSAVPGIGEQGVLKILVFLYRWDARTASLGNANGLVAFAGLDPVLHSSGTSVYRRPTISKMGDSEIRRTLYMSAFGGMKAKSSPLVDFCQRLLERDKPNKVALVAGARKILVWAFAVFRSGLPFDNAKAMPKSL

SEQ ID NO: 380218 - protein, 339 aa, unidentified
MKLYTSFDLHSNNSFLGIKDENGKPVFRKKLPNEPERILNALRPYKNDIAGIVVESTYNWYWLVDLLKKEGYNVHLANTSAIQKYSGMKHTDDQDDAFWLCEMLRLNILPEGYIYPSEDRPIRDLLRKRMHLVHLRTSLIVSLQNILTRNNGFRLKTSDVKALKEDRVAPYLSDNEDLALAGSVSKKTIDFLTEQINEIERVVLAKVNLKASFTRLLTVFGIGKILALTIMLETGPITRFAKVGNYVSYCRKVASKWLSNEKIKGKGNKKSGNKYLAWAYSEAANCAVRSYTPARAYYQRKLQKSNMMVAYNAIAHKLARAAYYVIRDDVNFKPEKIFS

SEQ ID NO: 380219 - protein, 367 aa, unidentified
MTIPPATVTVIGGVDTHKHTHYAAAIDDQGRLLGHQEFPANDAGYASLLAWMLAHGQLEAIGVESTGSFGATLTRALTKAGQRVVEVNRPNRIARRMDGKSDRLDAEQIARAVLGQVSTAVPKTKTGVVEVIRTLRVTRTSAVKARTQTFNTLWGVMIGAPSPLRDELVVLTKRTLVNRCLGLRPETADLITLAKDPDRLLLAGVKASLRDLARRWKALDEEVKTLNRHIDALVRSAAPQLLELHGVGVEIAGQFLVTTGDNGDRIRNEAAFAKLCGVAPQPASSGRTSGRHRLSRGGDRAANSALYIVTIVRMRHHQPTRDYVERRTAEGLSKREIIRCLKRYIAREIYSNLPRPEVTRPALEHSA

SEQ ID NO: 380220 - protein, 341 aa, unidentified
MEQATTIGLDIAKHVFHVHGADAAGHVLFRKRITRAKLLGFLAVQARCVVAMEACAGAHYWAREIAKLGHHVRLIAPVYVKPFIKRQKNDAADAEAICEASQRPSMRFVPVKSEEQQANGIVFRARDLLVRQRTQCVNALRGHLMEYGYVFPKGIAHVETLAAVVEDLQSSLPDSVRVILKLLVDTFTALEAQIAALDAEIRQRSKSDPTARRLMTIPGVGPIASTAITALVPAAEGFPAGRDFAAWLGLTPLQKSTGGKQKLGAVSKRGERTIRRLLIIGASAVVQQASRRGAPKGSWLAQMLARKPKMLVTVALANKMARIIWALLVKGGTYRTPAAAA

SEQ ID NO: 380221 - protein, 351 aa, unidentified
MEEYIAFDSHKRYTWVEHQEANTGKLRQYRVEHAAGAIHRALAGCTAGTPVAIEATANWYWITDEIEQAGCVPRLVHPRKAKLMMGQINKTDKLDTHGLNTLQRNGTLPTVWIPPGPLRELRELTRTRVVLVAQRTRWKNRITATLAKWGLPPSEYSDPYGKNAREELEQRLEGLPEQTGWATRQMLAQLDSLSEQIREFEKRLEELVEVTPEMQWLETLPGVGVILSATIALEIGEVGRFLSAERLASYSGTVPRVHASGDRVRYGRTRPDVNRYLKWAFAEAANSAAVNYRRCPERHVSQLYARLRARKGHSKAIGAVARHLAEATYHVLSRRQAYRDPTATAGRTREV

SEQ ID NO: 380222 - protein, 369 aa, unidentified
MSNGMRCVAPDVCAAQAAACAVLDGSSAERPRAIVMGLDQHRAQITAEWIDTATGEIGRARIAPAHRVGVRRFLQRFDGLRVEAALEATTGWRFVTEELRAIGAAVHLAEPAETSARRGTKKRAKTDRADARHLRELLMVGRLPESWIPPDHLLDLRARVRLRHALVNQRGEWQQRIHSVLYHHGHPQRRDLLTREHRAWVERAALPATARQQITVALALIDALDVQLAPIDRELRAYARRQAGCRALMAHYGIGALVSVVILAELGDCRRFSSSREAVRYAGLDITVHQSDQRRAPGRLSRQGPPALRWALFEAAQQARRTTSPDRAYYEQAAERLGGNRACLAIARKLLKRSYHTLRELGEEALTPA

SEQ ID NO: 380223 - protein, 343 aa, unidentified
MKKQQYVGLDVSLEQTSICVVDDAGATIWRGKCRSTPESIQTVIAKHAPEAVRIGLESGQLSTWLFHELKARRLPVICIDARHAKAALSLQINKTDANDAHGIAQIVRVGWYREVAVKSMDSHATRAVLVARAQLVTQKVKLTNCIRGLLKTFGIVLGEGKGRRFETMVRERIVENPMLTTIIEPMLVVLLMTREQLAVFDRLVRRRARADHDVRRLMTVPGVGAVIALAYTTTIEDPTRFKRSSTVAAYLGLTPRRYQSGEMDRAGHISRCGDAMLRTYLYEAANVMLRRSTRPSQVSIWGRALSERIGARKALVAVARKLALVLHSMWRHRMEFRFEQAAA

SEQ ID NO: 380224 - protein, 472 aa, unidentified
MRYIGLDLALTTAHKAVVIDEQAQAITSVLSVKTSAAALEQLFQCAREGAPADEPLVVVMEPTGMAWFPIAVFCQRQGIRVYLVNSQQVADLRRYYRKHAKSDRIDARVLARLPIVSLEKLHPLQLMSADQLACQRGCKELDRLTDQMTAIQNRLRAIDRFAWPGLEQVLPNNVAPLTRWFREHWYDPHDIVTLGADSLEQAWQENGSKSTESPPSEDWALALVQLAQQVLALYGPEADFLDYAYLQAEVTREQALLAMLENEHHRLQLKTVRPLYRQLHPSRNLESLYGVGQDGGAVYLSFIGDPQRFPDHASFRGWSGMIPRSSQSGASEAKGLSISQAGPDLVKKFSFLGAETARQWDPQIAAIYYNQVVHHGKHHTQAVCACATHLLDRIWTILKEDRPYELRDVDGTPVTTQQARHIIAERYTVPKEVRQRNNQRVRKMHREQQAEKKHKRESRPNKVRGESLTPSE

SEQ ID NO: 380225 - protein, 341 aa, unidentified
MSIITVGIDLAKNVFAVHGVDESGRAVLVKPKVARDRLLDLVAQLPACLIGMEACSGAHHWARLFRAHGHTVKLMAPKFVTPYRMSGKRGKNDAADAAAICEAVTRPKMRFVPIKDVDQQATLCLHRTRQGFVTERTAVYNRVRGLISEFGIVLPLKVERLRRDILEHLEDLPGWANRCVGDLLAHADQLDGRIAEYDKAISQAARQDERSRRLMQLPGIGPNTASALLASIGSGHDFKHGRQVAAWMGLVPGQYSSGGKTRLGWITKAGDAYLRSLLVMGARSILAGLGDKQDRFSRWARSLVERCGYWKAAIAIAAKNARLAWAVLRYGEEFRLNASVA

SEQ ID NO: 380226 - protein, 469 aa, unidentified
MHKRAGTNGSSGTPANAGKQPRRPLRAIHAAAAGLDVGATFHVVAVPPDRADEPVRTFKSFTGDLHRLADWLTEVGVTTIAMESTGVYWIPVFELLEARGFEVLLVNARDAKNVPGRKTDVNDAQWLQQLHEYGLLRGSFRPSDRVVPLRALLRHREGLVDQAAAFIQRMQKALMQMNVQLHHAVSDITGVTGMKIVRAIVSGTHDPDLLAQYRDVRCKASTETLRNALTGTYRPEHLFALRHALELYDVLQSKVAECDGEIECLLRVLNAERPSPDAPLPAVRHAGGRNEPGFDVRASLYTLLGADLSQIHGLGAYSVLRLVAECGNDMRKWPTAKHFTSWLCLALGNKISGGRVLSSKTRRSSNRAAALLRIAAVNVGRTQTAIGAFYRRLAARVGKAKAETATARKLAVLFYNALRFGLDYTDPGASYYEERYRQRVLHSLQRRAHQLGFALVPSPEELLAEAGVS

SEQ ID NO: 380227 - protein, 332 aa, unidentified
MYYIGIDLHKQDLVMAVENEHGPVARPRRLSCRDVTAIRAAIERWKPFRAAVEASASYRWLYDLVSPLGDVVLAHPLRLRAIATARAKTDRLDAALLAQLLRANLIPASYVPPARYQTLRDLTRSRARLSGNATLAKNQVHALLARANVHPPLKTIFGVRGRRWLAGLDLGSGGSLARDELLRRLEHYGREVAVLDGHLERLAPEFPEAAALDVLHGIGRYSALLIVAEIGEPTRFKNARQVGAYAGLTARVRQSGKTEHRGGISKQGSRWLRWILVQAAIKLVRRDERLGNFYTRVRKRAGRNVARVAVARKLAGICWVRLRAWHQAHTAA

SEQ ID NO: 380228 - protein, 412 aa, unidentified
MFKIFRNNCCGLDVHKTWIYACIGITDANGRTEYKQARFSSFSKGLRDLAAWLANYSCFEVCLESSGKYWIPVFNILEKTCLVTLAHPKYTKPQKGNKTDVKDAKWICDLFMCDMIKPSFIPSPEIRQLRDLIRYRIKLTNMLTGEKNRAQNCLTVSNLKLDDVFSDVFGKSSRSITNHMLDHPGETFDVAPFVDARCQTPLDEIQAAVDGAISSEQAVKLRQCLAHIDELEAHRKEIEREILMIAEPFSAVLELLYTLPGLDKNPMTAIAILSEIGPDMSVFPSSKHLVSWAGCCPRNDQSNQKVKSRRISRAGCYLKPLLVQVANSLIKSKKHPEFKERYRRIKSHRGHKKAIIAVCKMLLTAIWNMLSKLEPYNPDGFLEHRPVNEKRVLTKSQALELLRLRGYTITND

SEQ ID NO: 380229 - protein, 283 aa, unidentified
MENFYFIGVDVSKKKLDFCVMFEGKVVHEEETSNNQGAIMSLLHHLEEDYGIASGQMLVCAEHTGQYTFPLACACKAVECKLWLENAAEIKYSSGVQRGKNDKVDAKRIAIYACRFQDKVQYYERPTEDIERLKQLESERTLYVNDLAKYKGQLNDQKDYMPKDLYERKIKRLQALMEDLEEAIQAITEEMDEVINSCPVLSRQKELLMSIDGVGRVVATNMIIVTEAFTRFEDPRKFNCYAGVAPFSYSSGSSQHSKARVSHRADKVMKRLLHLEVYLLVDT

SEQ ID NO: 380230 - protein, 340 aa, unidentified
MEHIAIDLGSRTSQICVRDAKGQIVEERACMTRCLGAYLRRRPASQVIVEASSEAFGVARLAQAAGHQISIVPSVLSRALGVGYRGTKTDVRDARALSEASTRVTLPSIHIPSEQSVHWRAMSTSRQVLVRARTMLINRARGYLRTQLRTPVRGTSKTLPKAVRRAMESSEDGLPSHIEAVLSSLETLSAQIADIEAEMATILDNEPVAKLLMSMPGVGPITALRFMAAVDDISRFPSAQALTSYLGLHAGERSSGQTRRRTGIIKAGSSAARHALGQAAWSLWRTRPEDPMVLWARRIAERRNTQIALTALSRKMAGVLYAMWRDGRPYQPQPAAQPTA

SEQ ID NO: 380231 - protein, 385 aa, unidentified
MQWNDLSRSLVAFDQNSTMVAVVELSLDSWLVAGVVPGLKRQPLKKQAADPDRLLALLERWRAEAIKGGRAIDRIAVAFEAGRDGFWLARWLRARGIETYVIHASSIPVPREHRRAKSDRLDTAMLMRAFLGWLRGEARHCSMAAIPTLAQEDAKRPTREHESLVAERTRLINRMKATLIRLGIRDFNIKLRKAPQGLAALCTPEGEPLPPNTLAELRRDLERLALIRAQIKATEQARLGRLKQMPSAGTHPMMLMLAKVLGVGIETADMLVHEVLSRPLRDQRAVARYAGLTGSPDESGSKRREQGLAKAGNARVRRGMLQLAWRWLLHQKESALTQWYRTRTADGRKDTRKTMIVALARKLLIALWRYVTAGEVPAGVVLKAA

SEQ ID NO: 380232 - protein, 418 aa, unidentified
MAMKIVRFNCCGMDVHKNLVVATIGITDRKTNITEYFQRSFSTLNSDLYRLKDWLRSHHCSDVCMESTGKYWIPIFNILEDEINVHLTHPKYVKAIKGKKTDKKDSKWICDLFKHDLIKFSFIPPKEIRELREIARYRYKLVCMRSSERNRYQNCMTVSNVGLASVVSDPFGKTASNIMKEVMKSNVIDDDKILKLVHKNCKNKDKILDSLHGYRIESDQRFKMEKSLDHMEYLDQLIDSCEVELIKRAYPFRRSFQHITQIKGISALSAILIISEIGIDMSQFGSDKQLVSWAGLSPANNESAGKKKSVRISKAGQYLKPLLVQCALSAIKDKTSYFGRKYSNIKKRRGHKKAIIAIARMMLVSIYHMILTGEEFQPCDYESFMDPKPNANPSLTVEKALNFLKQSGIDISSIPINL

SEQ ID NO: 380233 - protein, 397 aa, unidentified
MIAVGIDISKAKSTVAVIDSDGTVLASPFTMAHTQPEMEAFVSYLKGLGEPTTILMEYTGHYHYPVLKKLQDEGFPVCIVNPYQMKKYGDVEIHKAKTDKKDALRIAAYALEKSYKLVPYSSMEQKYEDLKFLSRQYNQRISYVAKLKVQLIALLDQTMPGITRILPLNSRNPEKCALLLFIKRFKSFDEIQRIGKARFLASYDVLAKKASERSASSKGLSIYELAVDSITTRGEDPYIWLSQNQCVDLLSTTQNAADEIISQMRNIAETIPEYKVLRAMHGVGDRLGPIILAEIGDVHRFHSGKALNSYAGNDAPPYQSGQFESRNRHISKRGSSALRKACYEVMQALKLIKPQDDPVYLFMLKKEQEGKPFNVAKMAGVNKFLRIYYARAMELYK

SEQ ID NO: 380234 - protein, 401 aa, unidentified
MPELWVGIDAGKREHHCVVIDEGGTKLLSRRVENDESTLLELIAEVRELASGDPVTWATDLNAGGAAALIDLVTSNGQRLLYIPGRIVHHASATYRGDGKTDAKDAGIIADQARMRRDLQPIRGADQISVDLRIMTARHTDLICDRVRAINRLRATLLEYFPALERAFDYSKSKAALTLLTTYRTPEALRRIGRTRLQTWLKNRGCRNSAGLAQRAIEAADTQHNTLPTQSLGAGMVAKLGAQITAIDAELVEFEKEITDRFLQHSDALILLSMPGFGPILGATFLANTGGDLSAFESADRLASVAGLAPAPRDSGRISGNHHRPRRYNRRLLRVCCLAAFSSLKNSPASRIFYNRKRGEGKNHKQALLALARRRINVIWAMLRDHTNYQEPSAVLRPLAP

SEQ ID NO: 380235 - protein, 302 aa, unidentified
MKLTTIGIDSAKNVFQIHGADERGTAVLKKQLKRDQVVPFFANLLPCKIGMEACGSAHDWARKLQALGHSVQLIAPQYVKPFVKRNKNDAADAEAICEAVTRPNMPAVPIKNASQQAILSVHRARQGFVKARTAQANQIRGLLAEFGIIIPQGISHIAKRVPEIIEDGENELPGSFRLLIQRLVDHLKVLDQQVGELEREIQAWHRENEASKKLAKIPGIGPMTASALVASVGNARSFRNGRQLAAWLGIVPKQHSTGGKATLLGISKRGDTYLRTLLIHGAGPSSGWQSESRSPMRGWASC

SEQ ID NO: 380236 - protein, 340 aa, unidentified
MPLYGGIDLHANNSVIALMNEQDEVIYQKRLPNDLPTILEQLAPYHADIEGLVVESTYNWYWLVDGLMEADYRVHLANPAAIQQYNGLKYSDDHSDARWLGHLLRLGVLPEGYIYPKADRAVRDLLRKRAHFVRQHTANVLSVQNIMVRNTGSRFSVKRIRELTATELRNLLPEAYQVLAITSSLAVLECLSQQIKTLEQAVSKRLKHTPSYKQLLTVDGIGTILAQTIALETGHIGRFPTVGDSASYCRCVNRTKLSNGKRKGQGNVKNGHRYLGWASMEAAQFAIRFHPQAQRFYQRKLAKSTNNTVLARKSVAHKLSRAWYYMMRDLVPFEASKAFG

SEQ ID NO: 380237 - protein, 403 aa, unidentified
MNSVGIDISKGRSTIAVMRPFGEVVISPFEVRHTGSELSKLAKQLKSLDGETRVVMEATGNYHASVAKLLHDAGLYVSVVNAKLVHDYGNNELRRVKTDRKDAVKLANYGLDRWLTLPRYIPEEDTRLLLKNCYRQYRQYSKVQTVLKNNLISLLDTVFPNANRLFSSPIRGDGSEKWVDFVAEFWHCRCVSEKSERAFTSKYLRWCRNHGYNFSEAKAHTIYAEASGHIGVMPKSETTKLLVEQAVAQLRATSTALAALKHEMQSLASQLPEYPVVMDLFGVGPTLGPQLIAEIGDVRRFYSKKALVAYAGLDAPPNDSGDVTGRHKSMSKIGASSLRRTLFLVMSVYLQTAPLDEPVYRFMDRKRAEGKPYRVYMMASANKFLRIYYATVKAYLESLEHTA

SEQ ID NO: 380238 - protein, 316 aa, unidentified
MPSSPLFVGIDVAKATLDIALRPSEQLWQIIYDDAQIEALVTQLSELSPTLIVIEATGGLERILVAALVAAKLPVVVINPRLARDFAKAIGRLAKTDRIDAQVLAHYGEAIRPSLRPLPDADTQQLRALVDRRRQLIDIMSAEQSRLNTSTARIRDSIEHHLTWLRQQVAKLDDDLDGMLKASSLWREYDAILQSTPGVGPVLSRTLISQLPELGDLNRKEVAALVGVAPFNRDSGTWRGRRTIWGGRATVRAVLYMSTLVATRYNPVIREFYERLLVSGKVKKVALIACMRKLLTILNAMIKHQQPWQPRVAKSM

SEQ ID NO: 380239 - protein, 374 aa, unidentified
MMARVHADVRRVPIVNMQPHRRSVMKYYKSTTEYNCGIDLHSRQMYVCVMDKEGNKLLHTNIKGNDFDYFLKRIEPYRQDLTIVCESTFNWYWLADACCEAKLEFVLAHALYLKHIHGGKNKNDRIDSEKPAHLLRANLIPPAYVYPAEYRPVRALLRQRMKYVWARASLIGHLTMDQHAEGVVPASTSSNRDDWEQRILEQYTDPLHRMAVETDMELIRFYDKLIKQLGNELERRAKKFFRKNYLLLTSVPGLGKIMALTILLEIDTVDRFPTVKDFTSYARLVKGSVASAGKVKGLTGGKTGNAYLRWAFGQIAVLAKQHDPLIKLYAERLVAKHGKFKGNAILSNKIARAVYFMLKNKTVFDVEQLLAASI

SEQ ID NO: 380240 - protein, 397 aa, unidentified
MIAVGIDISKAKSTVAVIDSDGTVLASPFTMAHTQPEMEAFVSYLKGLGEPTTILMEYTGHYHYPVLKKLQDEGFPVCIVNPYQMKKYGDVEIHKAKTDKKDALRIAAYALEKSYKLVPYSSMEQKYEDLKFLSRQYSQRITYVAKLKVQLIALLDQTMPGITRTLPLNSRNPEKCALLLFIKRFKSFDEIQRIGKARFLASYDVLAKKTSERSASSKGLSIYELAVDSITTRGEDPYIWISQNQCVDLLSATQNAADEIISQMRNIAETIPEYKVLRAMRGVGDRLGPIILAEIGDIRRFHSGKALNSYAGNDAPPYQSGQFESRNRHISKRGSSTLRKACYEVMQALKLTKPQDDPVYLFMLKKEQEGKPFNVAKMAGVNKFLRIYYARAMELYK

SEQ ID NO: 380241 - protein, 324 aa, unidentified
MAKRITICAGIDTGKRKLDVAIDGRSLQLQVENTAEGHKVLLEWLRRHKVKRIGIEASGGYELPVVTELRRKRFVVVVFQPAQVRAYAKFHLQLAKNDKIDAALIAACTAAVKKIHAAPDPRLQPFAEHLTLIEQIGEDIKLYKNRIETCRDPRIQKLWKEEISRLAKRERAELKALVAAIRQHRDLAQRLELIYSVSGAGMPTAVAILVRMPEIGTLSREQVAALAGLAPYDDDSGERSGARHIAGGRKRLRRALYTAALPASFFWNPHLIALYQRLRAAGKVHKSALIACARKLLIFVNTVVARGTPWQEQQPVPATNPAAA

SEQ ID NO: 380242 - protein, 338 aa, unidentified
MYYTGIDLHKKTSFITTIDKDGKIVTRANLQNVEEDILAYFATLDKETRIVIESMASWYWLYDLLTGEGFEVVISNPVKTKAIASAKIKNDKLDSHMLAQLLRADLIATVHVSSLETRKLKELLRHRSRLVRDATRMKNRIHMLLMKNNFRSPFSDLFGVKGLRYLEEIDLPDYHRQQVETYLLLYQKLREQIEPLTQRVRALAKGNHTAQLLMTIPGIGPITAMFIMAEVDDISRFRSYRNLASYAGLVPSLDASAGKEKRGRITKQGSRYLRTALVEAAQAAVRMKNCRVSIFFRRRIVKGGYQKAIVATAHKILQYAFYVWKNQTPYKETYPVCA

SEQ ID NO: 380243 - protein, 450 aa, unidentified
MNLYIGVDIGKELNYASFLNEKGVEIDKRFKFKNNYLGFLKLKDNIDKLTYDYNLKYDDILVGFESTGHYWINIDWFLTEKLNIKTVMVRNDAVRHTRALNSQGKGKNDSLDSRTIAECLKNGYYFDVQGRKEDYIVLRRLTRERSELEKEIARYKNRFRAWLDVNNPIFLENFSNVFSAGALALLKVYPSPLDIIQDSYLEVREKLREVGYSRTNKTLKIYYEEVQTYKNIINGISYADRLEISEYIEALEMYIKKKENLDERIEVLMNFLEGKVYTSLSEIKGMPKAQVASLIAEIGNINNFKSARHLLSYAGLNLQGEGSGKNKGYSWISKTGNRKIRKELYVITFTLVKHNDYFRGLYCYYKSYKRANEKSNKAMLIALACKILRVIYGMLKYNMEFDLNEMLKNYDFRNINKEKFIDEFLGSSEKKQKIISQEIEDIFLSNRKSN

SEQ ID NO: 380244 - protein, 430 aa, unidentified
MKFNTQNAKIEAITEKTLVLGIDVGSEMHYARAFDYRGIEYTKKPFKFSNTEAGFMSLQAWILDLKEKHEKDKVVPGMEPTGHYWFNLGKFLQDNEMKPVLVNPHHVKKSKELDDNNPTKNDCKDPKVIAGLVREGRYMIPYLPDGVYADLRTASNIRFQLQAELTRIQNRISRWFNIYFPEYKTVYGKPDAKSGILILKTAPLPEDILTLGIDGVNQIWRDAKLRAVGKARAKTLIEAAEHSVGSKEGTVSARMEIRILLEDYESRNIRLQEVMALIEELVAQIPMAEKLLEIKGVGIRTVSGFLAEVGDISRFNSPKELQKLAGLALVENSSGKHKGETTISRRGRKRLRYLLFEVAMSLVAKNPEFRELHVYYTTRRLNSLKKMQSLMAVAAKLLRIFYAILTKGVDYDPKKMVSDIKRPAAYLQAE

SEQ ID NO: 380245 - protein, 357 aa, unidentified
MISPNSHVDFTDQNFFIGIDVHKKNWTVTLRHNQMELKTFSMNPSPQALQHYMLRHYPGAHCQSTYEAGFSGFWIHRELEQFGFTNMVIHPGDIPTTHKEKTTKTDKVDSRKLARELENGTLRGIYIPGEFHQQLRSLCRLRYRQLQNLVRVKNRIKGHLYTYGISIPSHDELPHWSGRFIQWLKSLHFSFAPGNEYVRLCLEELEDHKKRLAQTIRLLRTYCKEHGITDKIRFLCSVPGIGFVTAITLYTELIDIHRFSGLDSFASYVGLIPSLHSSGERESQCGLTHRHNRYLRYILVEAAWVAIRKDPVLLCTFNRLTRRMKKQDAIIRIAKKLLSRIAYVWKNETPYVCPQKA

SEQ ID NO: 380246 - protein, 326 aa, unidentified
MEKLYCGIDIHKEKLAGCIMDKDGKITREHTFPSSKDAIERFLCRIPRSDITIAVETCGMWRGVNKILTEMGYEVKLANPKKTHDIAGSKKMDKIDAKTLADLLRTNYLPLVWIPDEKTLEYRDIARHKSNLTRLKVQIQGKIKGYLLRNGMKYSKQLWNEKSLSKLSEKDPNLKNLINVYWSLKNEEKETLRRIRIIASKIKETNILMSMIGVAEFSSLMIIGEIGDIKRFETPKELVSYAGLCPGIYQTGSTKRNVRNNTVNKWLKWIIYECSGRAVMLDPRFQEYYYRIKQRNGANVARRACARKMLTIIWYMLTNEEPYRAS

SEQ ID NO: 380247 - protein, 323 aa, unidentified
MFFLGIDIAKRTMAVALLRPDGKWRSKSVANTADGHGALLAWVGHHAPEGPVHVCLEATGTYGTAVAETLHDAGHRVSIVNPAAIEAFSRSRLSRTKTDPTDARLIAQFCRAHEPAPWTPLPRELRELQALVRRLDALEGMRQQERNRLEAAPDSAVVCASIQHLLDTLDDEMTALKDQIHDHFDRHPPLRQQRDLLTSIPGIGAATAALLLAEFGLMRRFAQARQCAAFVGVVPRERRSGTSLHGKPMLSKLGSAAVRKALYYPALTALRCNPIVIALRDRLRRKGKHPMAIVGAAMRKLVHLAYGVLKTDHPFDPNFSQTR

SEQ ID NO: 380248 - protein, 312 aa, unidentified
MEKLSYGGIDVSKDRLDVVVLPEGWFFSVSNDTAGWAELVARLRPLAVCAIGLEPSGGYERGIIRALLAAGLSVRRINPNKLRQFARARGVLAKNDRLDARLIAEYVAIMPTRVVQRDDAVERLAEIVTMRRQLCDEHVAVENQAAHLEDAMLRRLSKRRLVRLEADIRLLDKRLAEMVATNAAFARLYELLTSMPGVGPVLAFTLIALLPELGKMGRKQSAALVGLAPYDFDSGKLRGHRSIYGGRMPIRNVLYMAALSASRYNPALKTFSNRLAHANKKSKVIIVAVMRKMITTLNAMLRDNAAWQPQSN

SEQ ID NO: 380249 - protein, 464 aa, unidentified
MTAGKKLWRNRKERKEWARRLQSEDPGLDVVHPHAAGIDVGNATHYVAVRPDRDPEPVRRFECFTVELHRLADWLQSCGVKTVAMQSTGVYWIPLYEILEERGLEVYLVNARHTKNLPGRKSDVQESQWLLKLHTYGLLNNSFQPVSEIRVLRTYWRQRGEHVREAATCIQRMQKALTQMNVQLANVISDISGLTGQAIIRAIVAGERNPLKLAALSDPRVHASREEIAKSLEGNWRPELLFVLQQEVDMYDIYQKRIAECDQRLQKHLASLTHPLQVQPPTQKPKTKKPAAKNAPRFDLSSELQRVTGVDLTRIDGIDVMVAQTILSEVGLDMSRWKTESHFASWLGLCPDNRISGDKVLGRGTRRVVNRAATALRQSANTLMRSRSYLGAQYRRLRTKLGAPKAITAMAHRLARLVYRMLKYGQAYVDKGTEYYEERFRQQQIQLLRKRAAKLGLQIAEIHA

SEQ ID NO: 380250 - protein, 354 aa, unidentified
MMIIGCDYHPGFQQIAWLDTETGELRERRLAHREEAEAFYRDLGAHGVSVRVGMEASGQARWFERLISELRFELWIGDAAEIRTKRVRKQKTDRQDAQLILRLLLEDRFPRIWVPSGENRDLRQLLWHRHRMVQARTRIMNQLQAVALNEGLRCKKKLWREAGREQLESFRLAPWASRRRRDLLELLDRLTPTIAELTQAVEREAENCPEAQRLRTHPGVGALTALAFVLIIGRAERFQCGKQIASYLGLVPLEDSSGQRRRLGHITKQGNSLLRFLLVEAAQVTVRSDPQWRSKYFHLAMRRGRKIAKVAMARRLAVRMYWMWRKGWDYEQMTRFSSHAGQPGHRAGVSLNTE

SEQ ID NO: 380251 - protein, 414 aa, unidentified
MKVIYPICCGIDVHKTFLVGTIISTTDGVQPHYQKKRFSTYNSDLHRFADWLHSNNCLDVCMESTGKYWVPVYNILEERKIRVTIANPKWVKAVKGNKDDTKDSKWIGDLFRLGLVPGSFIPTKDIRILREFTRYRYKLTSMKSSEKNRFQNAFTVCNVALDSVVSDMFGKSATAITDYLISEDAFNPEYCVSLLQRSLKKKSESVLESIEGYSITQEQKLRIRIVRSHLNYIENLISQIDSAIDGMVAKHESLISLLCTIPGVDRNSAITIISEIGYDMSGFGSSKRLCCWAGLTPGNNESAGKKKSVRITRAGVYLKPALVQVAHAAVKATDNSYYRLKYEQISKRRGKKRAIIAIARMILTAIYQMMSTGEVWNPTDLFKVDMPETLKEKQLSKAVKQATKFLEKQGLTVA

SEQ ID NO: 380252 - protein, 366 aa, unidentified
MEKISTVQVFGNEIWKEQKLTIGVDLGDRWSFYCVLDEAGKIILEQKVTTTPEAMKQTFGKIPRSLIALETGTHSPWASRLLTELRHEVLVAHAQKVELITKSNRKDDRHDARTLARLARIDPALLGPVRHRSAKAQIHLTVIRARAELVSARTALVNAARGLVKSYGQRLPQCGTQQVNRELAVGLNTELREVLEPLLTEIESLNERIPEYDERMEKIAQEVYPEVSLLKQVKGVGTQIALTYVLTIEDPYRFEKSREVGCFLGLKPGRRNSGKSEPQKKISKEGDRYLRTMMVQGAHYILGPFGEDSDLRRWGLKLAERGGKNAKKRAVVAVARKLAVLLHRLWVSGEVYEPLRNSQKAMRAVA

SEQ ID NO: 380253 - protein, 365 aa, unidentified
MWEAPVKVQRTSIGLDVHARSVVGCGLDGDTGEVFQRRLCPDHQEILEWIQGLPAPVAVTYEAGPTGFGLARALICAGVDCRVAAPSKLQRPSGDRVKTDARDAAHLARLLHLGQVVEVAIPSPAQEAARDLVRAREDCRGDLMGARHRISKLLLRQGIVYCGGQAWTGKHEMWLRAQRFDTAGLQLAYDAAFDAMVCCVHRRDRLDEAIVGLAADSEFTPVVRRLGCLRGVSTLTAFGLAVEIGDWSRLTGRSIGAYLGLVPTEYSSGNTRAQGGLTKTGNTHARRLLVEAAWHHRAPYRPSRDLRRRWEAACPAARARGHAANHRLHTRWVGFDTRKKRPVVANAAIARELAGWCWSLAVLDG

SEQ ID NO: 380254 - protein, 400 aa, unidentified
MRTVFGIDVSKASSEVAILVNGERVHGYTMPNDIIGFSRLMEDLKTVSNPEIIFEATGVYSRRLQAFLEENSYDYTRLNPLEAKKQLDGLRVRKTDKIDAEKLASSQFVLNRKPTYVQEEVYQNLHDLSRFYQNLTEDIVRTKNRLHKVLQVAFPEIENLLSTPTGEQYWNLVSIFPTKHWVLELSEVELKEAIRNSTSKRISENRVGNLTEKLVGLAKQSYAGISKTSPMVEEVKYDAQELIRLTNRREQVLQQLIALAEPLPEYKILLSIPGIAETTATSIIGELGDIRRFKSANQINAFIGIDLKHYESGDFLGQEHITKRGNPYARKILYKCIHNIASASHTNPCHIADFYEKRKRQSQITSTKPHTIASIHRLIRTMYYLIMHNKLYDYTLAQSH

SEQ ID NO: 380255 - protein, 321 aa, unidentified
MVKKNPHIEFEQVIERGCGIDIHKMVLVATIRGIGIIEETRSFNGFTESIEKLRDWLKENQITHVAMESTGVYWKPVYNILEADFEILLVNARHIKNVPGQKTDKKDSKWITKLLLSGLLKGSFIPPKPIRELRDLTRYKRKVIEQISSEKNRIHKLLEDANIKLSSVVSNLSGATATKIINAMIGGEENIEELLKYRHGKMQSSIEDLASSLKGNLTDHHRFMLQTVKESIKSKEQIIFKLEEQIDKQLKENELMLDAELLATIPGVGKDGAAYIIAEVGNNMDQFPNEQHLASWAGMSPGSNESAGKKKAHELPTGTST

SEQ ID NO: 380256 - protein, 338 aa, unidentified
MTTIKYFVGIDIASSTFTAAVGGTPGKVVLKPQTFANSEDGYQTFLEWLASHQIPARQSVVCMEATGVYSEGLAYFLFAKNYQVAVQSPLEVKRTFKPNGPKTDAVDSLQIAEYAGRHLDKLSFWQPRNEILEQIKALLATREQFVSQNVAHKNALQAIQRKPVRTPFAEQAHLQMIEQFKKHIQGIDHEIRRLIENDPTFKEMLLLLLSVPGVGLLLASHMILLTQISLDHKELASYLGIAPIEHSSGTSVYKHATSRHFGPAAVRKLLYLASCSVRTHQFQFKSYFARKTREGKPAKLVLNNIANKLIKIICAVLLTKTAFIKNYHSVQPLALTGS

SEQ ID NO: 380257 - protein, 421 aa, unidentified
MQVLYERCAGIDVHKDQVTVAVRTPGRGPGGRDTRVRKFGAFYGVLRDMTRWLAAQGVTHVAMEATGVYTMPVYHALLEPGSFEQVLVCNAAHVKNVPGRKTDAVDASWLAELLECGLLRGSFIPPEDIKAVRDVVRYRRKIVQERGSETQRLGGVLQDAGIKLDSVASSIDTVSGLAMIRALIDGERRGEVLAELARGRMRSKIGDLSQALEGRFDDHHALMCQLHLDHIAHLNEMIAKLDAQVETMMVPFGRQRDLLTTIPGIGLVAAAAIISEIGASPGEFFATAAHLASWAGLCPGNHESAGKRKHGKPRKGSQHLKPLLVECAWSAVRTSGRLKARYHRLVLRFGGYRNPAAKKRAIVAIAHTLAVIIWHVLTTGTAYTDLGPDFYATRSDPAKETQRLIAKLEALGHKVTLAPAA

SEQ ID NO: 380258 - protein, 354 aa, unidentified
MTDIQYVAFDVHQATISAAVLDLSGKLITQAVLQTEASAICDFLRGLSGNLHLTFEEGTQAQWLFDLTRPLVAELLVCNPRENHSMKRGNKSDRKDALQLATLLRAGLLKSVYHSAPQTQTLKHLAHNYDALTEDTTRCMNRLKAVYRSQAIKCAGRDVYYPRNRQAWLAKLKAAGLRWRAEFLYQQLDHLRELRRAARKALLCEARKQTAFKRLVVVPGLGPIRVAQIIAAIGSPYRFRSKRQLWAYCGFGVITRSSADYQVSGDKLERRHKQTQTRGLNQSFSRRLKVAFKGAALEALKTEAIKKVYERLTAGGVRAEMARLTIARKLAAVTLAIWKSGEDYDEKKLSKLAA

SEQ ID NO: 380259 - protein, 317 aa, unidentified
MNATNPTVVIGIDVAKDTLEVATSTGEHWPCANDPKGHRALRERLMAMNCSLIVLEATGGYEAALVGTLAQAQLPVVAVNPRQVRQFARAVGKLAKTDRIDAAMLVRFGEQTSPEVRPLPDEQTRLLDALLRRRGQLLEMIQAERNRLLQAVGPVRTDIRETIHFLVKRLKQTDRDLDDQLRSSPIWREKEKLLKAIPGVGRQTVLTLLATLPELGRVPRKKLSALVGVAPYNCDSGTLRGQRHCWGGRTQTRRVLYMAALTATRHNPQIRAFYQRLTAAGRPTKVALMACMHKLLLIMHAIVRDGVAWSPEMQTVN

SEQ ID NO: 380260 - protein, 341 aa, unidentified
MYYIGLDIHKKSISFCVKDASGQVYQQGKVAATRQDLDAWMQTLPQPWTAAMEATIFTGWIYDHLKPYAAAVKVAHPLMLRAIAASKKKNDRVDAGRIADCLRCDFLPECYMDSLEIRERRRTLRYRSLLVRQIVQLKTRLASLLMETGVSYDRQQLHRLGFVSELLASEDATKSIRPLLRVSQDSILRLRRIESALIRSLERDPLLAERVRRLQTVPCVGRITALTWALEMGDISRFRSIRQAISYCGLCGDEQKSADKTVRTPLSKKRNKHIQHVLVEAAKLAPRYDPSLALLYAKEKQKGNANRATLAVARKILTYLLAVDRERRDFVPVGEFHVAAA

SEQ ID NO: 380261 - protein, 316 aa, unidentified
MTTNAVVVGVDVAKDRLDVAVRPSGETWSAANDEAGISALVARLRPLGPALLVCEATGGFERAAIAALAAAGLPVVVANPRQVRDFARATGQLAKTDQLDAAILALFAERVRPTPRPLPDAAAQLLDAVLTRRRQLLEMLVAEKNRLGFAPKPVHRGIQAHIRWLERQLDDVTKELAALIEASPVWRAKDDLLQSVPGVGPIVSSTLLGELPELGTLSHKQIAALVGVAPLARDSGTLRGKRMVWGGRASVRTALFLAAMCGRRWNPVLKVFYDRLKAAGKPTKVALIACARKLLTILNAMVRDHARWSPNLQYSC

SEQ ID NO: 380262 - protein, 339 aa, unidentified
MQVTTIGLDLAKNVFQVHGITEDEEVVFNRPLRRAQLLPFFSKIEPCLIGMEACSSAHHWARELTALGHDVRLIPPIYVKPYVKRGKSDAIDAEAICEAVTRSTMRFVAIKTVEQQALLSLHRARALLVRQRTQLINGLRGMVAEFGVYIARGLARVIGFAEDILAGEVLDLPEIANEVIHNLCEHLMALHARIRWYEDRLKLLAKEDTRVRLLRTIPGVGAVTASAIIASIGDGHQFRNGREFAAWLGLTPANKSSGGKEKLGRITKMGDQYLRSLLVVGMTSLVRQTKSHPEHASKWLISLLERKPARVATVAMANKTARIVWVVLTRNEPYTPHTA

SEQ ID NO: 380263 - protein, 341 aa, unidentified
MEHIAIDLGRRESQICVRDETGQILEEARHTTSELRSYLRRRPKGSRVLVESSAEAFTVADWAAELGHEPRVVPSILVPALGVGERGLKNDVRDARKLSEMDCRMAVPSVHIPSAERRAHQARLTARDALVRVRTKLINTVRSFVRMRAIAPIRATPPTLPRAVRAKLLNTPEGVPEYLEALLQSLEHLNAQIQQADHALREVAHGEPVCRLLMTMPGVGPVTALSFVSAIDDVTRFEDASRLTSYLGLVPGERTTGFKTRRTAMTKAGPSRVRWTLTQAAWTLVRVQPESPLGQWYAQVSKRRGKKIAISGLSRRMAAILYAMWREQRPYDATRAASRHG

SEQ ID NO: 380264 - protein, 340 aa, unidentified
MEWTVAIGVDTHKRTHTAVALDRVGVQLASCEVEATSAGYAQLLAWASELGEPAFALEGTGSYGAGLASLLVAVGLPVCEVERPRRERRRGKNDLIDAARAAERLLSGQGLNALRGGGPAREDLRLLLLERRSAVRARTAALNQVHAVLLTAPARLRERLDALKGDKLAQRCARLRPRDESERVLVSVLNRLAARARLLTRELAQLESELERIVSTLVPDLLGECGVGPICAAQLVVSSGDPKRMRNEASFAALAGTSPVEASSGPSRRHRLNRGGDRQLNAALHVIAHTRLRCHPETRAYRDRLLARGKSKREAMRCVKRQLARHYYRLLITNAALTST

SEQ ID NO: 380265 - protein, 393 aa, unidentified
MYFVGIDVSKYKHDCFIVTEAGEVIKDTFTFDNTRTGFNQFFSILDGLGPKNEIKIGLEATGHYMNNLIKHLSVKGYSFILLNPIIVSRFRHSETLRRTKTDKVDAKLIAQVIASKDFNSYPLQAYHFPDLKTLTRLRDRLIKQRSLYLVMLTNQLDLSFPEFKEFFDGRLKSKTAQFILTKYGIPSRIANMNSQSFELLNKVSHGKFSYAKFAKLKELAKNTIGCSSEIDEMLFTLTINLYQSIDEAITNVESKITEIMEKLDSPIASIPGIGLMSAATIIAEYGDISRFANDGQMLAYAGLDSGRYQSGTSDYPGRMVKHGSGYLRQTLMNVAETCMIHVPSFYDYYLKKRNEGKSHRVALSHIARKLVRLIYKLETSHTHFDLSVFNSQH

SEQ ID NO: 380266 - protein, 338 aa, unidentified
MSYFVGIDLHSDNSYVGVLDKKDSRIFGKKLPNDLDVILKALEPFQKKIQGIVVESTYNWYWLVDGLQEEKYQVHLANPAQMQQYSGMKYTDDVWDSYWLAHLLRLGILPECYIYPKEIRPVRDLLRKRTMLVRHRTAHILSLQNMVNRNTGRKVNVNDTKRLSEEEISRQLTDEHHKMAVQSDKAVIDFFHEQIDGIEKAVLKEVKLRYPYEELLTVPGIGKVLGITIMLETGDINRFPTVSDYSSYCRCVSSKKVSNGKKKGEGNKKNGNKYLAWAYVEAANFMVRYSEPARIWYQRKTAKTNKIVAIKALSNKIARACYFIIKDQTAFDPRKLFR

SEQ ID NO: 380267 - protein, 422 aa, unidentified
MMDKERRWFVGIDWAAQEHVVSLYDDAGNRIGQRKFSHGGTGLTDMIAWLLKASGGEPGEIHVGIETPHGPIVEALLERRFNVYSINPKQLDRFRDRFTVAGAKDDSRDADVLSDSLRTDMRAFRKLSIADPLIVELREWSRIDEELKVEHGRLTNRLKHQLWRYYPQMLELADDVGAKWFLELFEAVPTPEKAANVREKTIARILKNHRIRRFDAAHVLAELRKPALAVAPGTIEAATAHIRSLIGRIRIINGQLADAGQQLDRLCKKLSEPVADEDGEAAPGQKPEQRDAAILDSLPGVARTVLATLLAEAPDTLQRRDYHALRALCGSAPVTRRSGKSRMVVRRYACNHRLRNATYHWAQNAIQHDHTSRAKYDALRARGHGHARALRSIIDRLLSVACAMLDSGTLFDPEFASKRATG

SEQ ID NO: 380268 - protein, 363 aa, unidentified
MVDSRDRPRLDWKPAAASVDRPRMSLALQSFLPFPNSCQGTSPHQQGRGTKMTEHCYCGIDVAKERLDVQVLPHRQRFWVDNNATGWAELVERLHALPIAAVGIEPSGGYERGIIRALLAAGLSVRRINPSKLRQFARARGILAKNDRLDAQLIAEYVSIMPTRVVQRAATAERLAEVVTMRRQLCDEHVTIENQAAHVEDAILRRLNKRRLARLKADIHLLDKRMAEIVAADANLAQRYELLTSMRGVGPTLAFTLIALLPELGQMSRKQIAALVGLAPYDFDSGKLKGHRCIYGGRMPVRNILYMAALSAARYNPALKVFHNRLAAANKKPKVIIVAVMRKMITTLNAMLRDNAAWQPRAA

SEQ ID NO: 380269 - protein, 351 aa, unidentified
MKILAIDLGKYKSVACNYVTATGTARFATVVTHANEFDRLLSQESPDLVVIETCSIAGWVHDLCCQRGVKCQVANPSSEAWKWKNVKRKTDRDDALKLAQLAALEQLPTVHVPAPETRQRRALLKYRQSLITRRVAIQNHLRAIVQREGILLDRGGRAWTAAGFEVIQEIAKPLEQCSEDELWRGEAALELQALEAVTKLLREVERKLEVLAASNERVKLLRTIPGVGRCTAEVVVAYLDNPQRFENGRQVSAYAGLVPKQFQSGETDHRGRISRRGPSLLRKMLVEAGWILLRYNPWAQRLVLRLSRGQKTRRKQAIVALARKLLVRCWAMLRDGTAWHEPPPHAATAIA

SEQ ID NO: 380270 - protein, 412 aa, unidentified
MDVLVERVAGLDVGKQVVVVCVRTPGPGGRRVSETRTYRTMSRSLEAMADWLVDQGVTLAGMESTATYWKPVFYSLEDRMGTWLLNAAHMKAVPGRKTDVKDAEWIAQLLEHGLVAPSFVPAPEIRRLRNLTRYRVQLMGDRTRDAVRLERLLEDASIKLSAVASSVTTLSARQMLAELVAGNRDAAAMADLAHGKMRRKLPDLVEALTGHFDAHHALLVGAMLHRLGHVETALAELDAMIAAAMAPWAHQLELLQTIPGVGLKTAQVIVAETGGDMAQFPTAAHLAAWAGVAPAVHESAGRRRPAGSRKGNKWLASMLVEAASSVSRSKQTYLAAQYAQIASRRGRKRAALAVAHSMLVSAYYMLERDEPYREVGNDWFDQRHADAHTRRLVAQLKRLGHTVVLDPADSPA

SEQ ID NO: 380271 - protein, 348 aa, unidentified
MMIIGCDFHPSWQQVAWVDTETGEMGEQRLKHADGEAERFYRQLPTPALIGIEATGNSHWFIDLVTAMGHEVRIGDAAAIRAKQVRKQKTDRRDAIHLLDLLLKHDFPKIWAPSPAQRDQRQLLIHRWGLVRLRAQAKNELQHLALNQGVQKKSKLWSVAGQKVLRELPLPYWAGQRRQNLLRLLTIFNEQIAVLDQAAEKAAQESEMARLLLSQPGVGPITSLAFVLTMGDVSRFHGGKKVASYLGLIPREDSSGEHQRLGAITKQGNRFMRMLLVEAAQSVIRCDPGFGKHYAHLCHKKAKGVAKVAAARKLAIRLYWMLRTKTAYPEIVHMESSSRVPLVGKGKG

SEQ ID NO: 380272 - protein, 413 aa, unidentified
MLMFIGDDWAEDHHDIEIRNETGRRLAKARLPEGMEGITRLHALVAEHGPAEWADMPSEEVAARVIIGIETDRGPWVTALRAAGYRVYAINPLSAARYRQRHSTSGAKSDAGDAHVLAEIVRLDRDHHRQIAGDTDLVDAVKLLARAHQTAIWERTRQILRLRSTLRDYFPAAIEAFEDLAAKDALLLLARASSPAQVAKLTRSQVVSALRAARRHHVEAKADALLAVLRAPNLRQPAATEAAYAAVVVGQVGILTALNVQIAQLQEVVAEHFGRHPAADIYLSQPGLGVVLAARALGEFGDDKQRFTDARSRKNYSGQSPITRASGKKTIVMARYATNRRLGAALHLQAFSALIASPGARAYYDELRARKIGHHAALRQVANRLVGILHGCLKTGVKYDENTAWAHRIALTA

SEQ ID NO: 380273 - protein, 409 aa, unidentified
MKLFVGLDVSSQDAKVCFLNGEGDRLESFTITNDLPGAIILKEKILNTASKLTCEVIKIGLESTSIYSYHPAMFLHNDKELRTYGSQVFMINQKQIANFKKSYPEMDKTDAIDAFVIADYVRFGRHTMSIVKEEQYIALQQLTRSRYQLVHALTKEKQHFLQHLGLKCSQFTQDVGSSVFGNAMMELFLERFSLEELAQMPLQDLALFLQEKGKNRFGNPEEIAKSIQKAVRGSYRLSKVVEDSIDLLLSTSIQIMRTYQAQIKEIEKGIESLMSSLPQTLESIPGIGPVFAAGIVAEIGQIERFTDETRIAKYSGLFWKKYQSGRFTAENTSLTRSGNQYLRYYLVEAANSVRRHVPEYRDYYAKKSAEVPKHKHKRALALTARKFVRLVDALLRNNQIYTPGRSVDR

SEQ ID NO: 380274 - protein, 401 aa, unidentified
MNAVGIDVSKGKSMVCVMRSFGEVVLEPFEVLHTAQNLNDLAGKLKALDGETRVVLEATGNYHKPVAFVLHNAGLFVSVVNPVLIHDYDNNSLRRVKTDKKDAVKIANYTLDKWTRLRQYLPEDEARLALKNCYRQYQQAVAIRTMLKNNLISSLDLTFPDANNLFSSPAKSNGCEKWVDFIGEFWHSGCVSSLSADAFAKKYLKWCQKHRYNFTRSKSDEIYSCAVNATSLPKSPTSKLLIQQQVAQLKAVSKSVAAFQQEMLRLSQQLPEFDTVMEMYGVGPSLGPQLMAEIGDVRRFSSKKSLIAFAGIEPQPNDSGKIMGNDKGISKVGSAVLRKTLFLIMTVILQTQPQDEPVFQFMNKKRSEGKPYKVYMMASANKFLRIYYARVKAVMDSECSQ

SEQ ID NO: 380275 - protein, 315 aa, unidentified
MTIISFDVSKLELVGARMRASGKVAERYIVVNTPEAINQFLDTLSKKKVTIGSEATAEYHLHLARACLAREIPFKLINPIITKQFTRATIRKRKTDRDDAEIIGKCLLQGAGRELSPHDLEPATRILRTASDLSMLARSLHLKHKRFVDNFPETTVVQDGIAEAEDALRRVAQMLRTHGAGLVPHKERALADSVIGIGEDLSSIIVSEIGDPMRFKSGKQLVAYAGLDPKVKQSGASLARNTTITKRGSPYLRRAFFIAASVAQRYDPDLKAYYEKKRAEGKLYSPATIANARHIAHRVLAVLKRGTPYVKRELA

SEQ ID NO: 380276 - protein, 321 aa, unidentified
MNKNSVILGIDISKETFDVYDEDKGHRQYSNDEKGFQSFHSSLEDGSCAVMEATGSYHHRLALFLYERGIGVSVLNPLVVKRFIQMKLNRVKTDKSDARMIWQYGQEQLLSPWEPNVEYLEECKSLQSVIQLYFKQRTALRNKLHSLQSKGLSKGKAIRSLKRQLRNLEKEIGLLESEMEALIKANEPELYSRIKSIPGLGKKTALLLIVATNGFKDFESSKQLSSYFGLAPHERSSGSSVRGRTRIGKNGHPLIRNHLFLCSFTASRYNPQCKALFDRIVSKGKSKKLALIAVSNKLIKQAYGIAKSGLPYDENYSSKLT

SEQ ID NO: 380277 - protein, 322 aa, unidentified
MNKYKEIFGVDISKDVFDVYGSKSGHNQFKNDAPGFKFFLKSLPKESLVVMEATGYYHYRLAQFLFKQSVLVSVVNPLSVKRFIQMKLAKVKTDKSDAKAICEYGQINEVPLYTALTDVQSECLQLFRLMDSCLKKRTATKNKIHGEDVLGIPSKYVYRSLTRIKKYLDKEISGIEAKLLSLVKQEQQVQLTLLQSIPGIGLKTALFLIVVTDGFNKFENSKQLCSYVGITPTIRESGSSVRGRSRISKVGNRKLRNLLFLCSFTACKHNKGCRDVYERIVNKGKNKKLALIAVSNKLIKQSFAIAKSGNPYDEKYVSILPK

SEQ ID NO: 380278 - protein, 360 aa, unidentified
MRIIGCDLHARQQTLAMFDTVTGEVVTRTLMHEGHEVREFYSKLPRPVLVGIEAIGPMQWFLDLLEELGIECQVGDAAKIRAAEPRKQKHDRRDAELILKLLVEKRFPAIWRPSKEQLDLRALLLHRHHWVRLRTQVQNALQAIALAHGLRRGPGLWSHDGQAKIAFLPLPPHASYRRSALQAMYRSMAEEIKNLTEQIAEQAEQRGGARLLLTHPGVGPVTALATEVFLGDPRRFADGKALASYVGMIPREYSSGERQRLGGLTKQGSPLLRFLWGEAGAHAARRDPELQHFYRRKLVQKGLGKARVAVARKLGIRLWIMLRDQIDYQEFCRRGQKHSGAACAGMLETRFGASRHRPVD

SEQ ID NO: 380279 - protein, 365 aa, unidentified
MNATAALPVVGIDVANSVFQLAVADGAWRVTEEHRLTRTQMERWFANRSVGLVVMEACGSAHHWGRWLNALGIEVRLLPALYVRAYVKRNKTDAADACALLEAARCADIVPVKVKSIEQQALQGLHRTRSLWMGTRTSRINALRGFCREFGIVIAQGARLGVERIARVLADPHSAVPELIRGTMKLLIEEIRLLEARIAQLERELTLVARASGACTRLLTIPGVGLLTATAMVAATSGSVQHFRDARHFASWFGLTPKERSSGNVRHLGRISKRGDRYLRMLLTHGARSVLNAAGRAVQIGKNVDALRHWALAVQARANHNKAICALANKLARICYATLRDAQPYGEPVRRPNKKIERSSFPIAA

SEQ ID NO: 380280 - protein, 423 aa, unidentified
MEVMHERVAGLDVHKAMIVACVRIMAGGKISRECRTFETSTAGLEALLGWLTQSGCTHVAMEATGVYWKPVWNILSDGEFELIVANAAHIKNVPGRKTDVNDAMWIADLVACGLIKASFVPEQEIQELRSLLRARKQLTREQTSHIQRIQKTLEEANIKLDSVISDILGVSGRRMIEAMIAGVRSPLRLAELADRRLKASPKALYDALHGRLTDHHRFMLELYLGQHDALSDAIARIDQAVEALIARMDEEVAAGQATFLSLIMLLCTIPGVSILSATVILSEIGRDMSRFPTAGHLLAWAGLCPGQNESAGKRKSSRLRKGAPWLKTMLVQCAWAASRRKDSYYRAQFNRLRSKRGPKKAICAVAASMLTAIYHMLKDGTFHQDLGADHFDRRSAEVKAKRLVAQLTKLGFQVELQPLPQAA

SEQ ID NO: 380281 - protein, 454 aa, unidentified
MAQSKRSSSMPAIHPNAAGIDIGSQFHVVAVPLDRTDEPVKTFKSFTGELHIMAKWLKSCRIETIAMESTSVYWIPAFEILESYGFEVFLVNAREAKNVPGRKTDINDAQWLQKLHQFGLLRASFQPAKEIAELRAYLRQRERLLDYKASHIQHMQKAMMQMNIQLHHVVSTITGKTGMEIIRAIVAGQHNPKTLVKFRDIRCHNSVDVMTAALTGNYKAEHLFALTQALELFDIYTEKVDDCDRIIATVLERLQKMTVVPKKSIPKPKHKECNKNAPSFDVRTALFNFTGKDLTQIHGLGSYLALKLVAECGTDMSRWPTSKHFTSWLCLAPGNKISGGKVLSSRTRRTASRATALLRLAATTIGKSDTALGAFYRRLAARSGKAKAVTATARKIATLFYNTLKYGMEYIDKGADYYEDQYRKKVLNNLRRRADAFGFTLQEKVLPGLAVEVS

SEQ ID NO: 380282 - protein, 427 aa, unidentified
MSEEKSIELRVSVDVGYRRHSVAIGLPSGEVLEEFEIEHRLEGFQDFFSRIEKHNPKQGYSVAVAMEGYNGYARPLDSMVRQRGYRLYNINNLKLARFKEIFPGAAKSDRIDARKGLELFQLRDHLPLAKEVLQEVSGTPQHNEVLKRLTRRRRRLVNERVRVVNNLQADLQAVCPGLLEITSEASNQWFLNFLLSADTLPQLARLRKASLLKIPAVGKKYASLIEAWQKRAHFGAEVEWVSEMIQEDAQRCLDLEEKIKTLETKIQQVATDSKIAKTLLSIPGFGPVCTSELAGEIGTIERFSKEGSLALYLGMSTLDNSSGKYQGTKAPKHVNTRAKAAMMIALDRHRKYVPESQRYYEKKRSEGKRHNQAIRALGRHLCRIIYKMLKEQREYQLRSEKGNTKTKVASRSCVKTNIRRPKISVNV

SEQ ID NO: 380283 - protein, 343 aa, unidentified
MKMASIGIDIGKTTFHLVALDEHGSTVIRRKFWRKALLTYGAKLKTSLIGMEACGGAHCLARLLRDQGHQVQLIPGQFVKPYRQSSKNDYLDAEAIAEAVTRKKLRFVAIKTEDQLDVQGLHRVRERLVHNRTEVINQIRGFLLERGVTFSRGPQSLRKGMPDLLEDAERNITPQLRSLLAHLWQEWQYLDSQMDQISDAMEAVAESDAACRRLRKIPGIGPLVSTATIAAIGNGAAFQRGRDFAAWLGLVPKQHSTGGKAKLLGITKRGNRYLRKLFVHGARAVLLRVKYDTGGFGQWVHRLAARAPRNKVIVAIANKLARIAWVVLSSGNEYQHPPLAAVA

SEQ ID NO: 380284 - protein, 350 aa, unidentified
MLPPVVLGSTRTVVCAPGAVFEGAPISPYLQVRVFHMPEPIVYLAVDVAKATLDPFCCDQHYPTMANTLEALAQLVSQVQKGHPHRKLHLVCEASGGYERKVVEFAMSNRLLVSVVSPSRVRNYAKACNQLAKTDRIDAEMIARFAQSVHPRPLQEQEAWGADLQALVMAKLQLKENITRLGNQLENLSHAQLGRCLQRLLRAHEKELKNLDRLMEKLLKQHQDLNQKVSRIESVQGVGKATALGVIALMPELGSLGDNQAAALAGLAPFNRDSGPSKGYRSIRGGRRKVRTLLYMPALTAIRLNPVLKKVYQRLRNNGKKPLVAITAVMRKLIVLFNRLLANPDFSLAS

SEQ ID NO: 380285 - protein, 317 aa, unidentified
MRIHTIGIDLGKTKFHVVGLSERGEVVVRKQFSRVQLLRFTANRKVHVIGMEACGGSHFLGRLLQRQGHDVRLMPAQYVKPYVKTNKSDYIDAEAIAEAVGRPTMRLVPIKSDDQLDLQSLHRVRERWVTRHTAVINQIRGLLLERGITVRKGRRYIEAALPGILEDADAKLSGTLRLLLAQLKLELDQLAQRLEEAEALIEQTVQENEACQRLVKVPGIGPVTATAVIAAIGNGAAFRKGWEFAAWMGVVPREYSTGGKQKLLGISTREPLFVKTVCAMCACRPAAEDQADSRPESVARKTHVPYPPPCRRRHISQ

SEQ ID NO: 380286 - protein, 356 aa, unidentified
MKILAIDLGKYSSVACLFNTTTSQSEFETITTQGWAFERLLGQAKPEQIVIETSSITGWVHDFCQSLGYKVLVANPSAEAWRWKNVKRKTDKDDALKLAKLTALEQISSVYVPVAEHRQYRLWVKYRKTLVNRITRIQNIIRALFDQQGVSIPGGHRAWTATGIETLSSYRKPLNECGAAELWQGELDLELQSFDVLWQQLQSVDDQLEKMAQQDEQVKLLQTIPGVGRKTAEVIVAALDDPHRFKNARQVSAYAGLVADQRQSGQTNRLGKTTRRGSRLLRSALVEVAWVMLRYNSWAESVYQRICGGQKTRKRTAIVAVARKLLVRCWAMLRHKQPWQDDTSPLNASASPSSSN

SEQ ID NO: 380287 - protein, 403 aa, unidentified
MGAVAGLDWAAEKHDVLIADERGALLDARVVEHSEQGVRELVCLLADHRVQRVALERPDGLLVARLLDAGIEVLAIHPNQVKAARERFRPAGGKSDPFDAFVLCELARTDHHRLPRLAPSGDETVALRALSRSREDLVAMRVELANRLRAELDAFWPGARAIFADVDSKIALAFLERYPSPLEAKALGPKRLGGFLARNGYCGRRSAQELLERLRRAPVGCAGEAELEARRAIVLALVAALRPLVEQIGLLTAQIRGALAAHPDAAIFGALFCDPKSAVTAAGLVAEIGDNRARYPSADALAADAGMSPVAVESGKRRSAAFRRGCDHRLRSHFACLADSTRHWHPWAGEVYHRARARGCDHPHAIRVLGRSWARVLWRCWQDEAPYDPARHGNLRRLQTQGG

SEQ ID NO: 380288 - protein, 363 aa, unidentified
MQVRHIFVGIDLGDKNSVARIAVDRDKSERFGFLNSRQGRARLFREVKRRSEDSDGANIVMAYEASSCGFVLSDEAEALGIKCWVLAPTKMEKSVEQRQHKNDDRDADDVLEKLRGHVLAGNRLPTVWVPDVQTRDDRELIRTRLDLTEKQTQIKAQIRMLIKRHGLEKPSGIGAGWTIGYRRWLEALTESEQQLGWSTRQGLDSLLRQLQFLEAEIDRVQKPLEELANEPRHKPIIEELRQEAGVGLLTAMVYRTEIGQAGRFGRGRQVGKFVGLTPRSHESGQQSDRKGHISRQGSPRLRKVLCQASWVHIVHDDRAGRIYQQLVWRNPKKKKIALVAVMRRLAVRMWHRMRKIELQQVQA

SEQ ID NO: 380289 - protein, 460 aa, unidentified
MRILGIDLAVVAKHRAILADERGRFIGRLVKFRTCQADLERVYALARRGMTPDEPLAVVLEATDIVWYPVAIFFQQRGATVYLVNPRMAADLARFYQRYAKSDRLSAQTLARLPVVNPDSLYPWVRSGPDYLALQRSCKEVERLTTQASAIQNRLRSTDHLGWPDLHRRVFANPFSRAARWFRDHFYDPRCVVEAGVSGLRRAWRAAEVYDGDEDWIEPLLTLAQEVLSLYGEQGSYLDYRALAEEVQREQRRLAELEADAHFVRLQVTRPRYRQLHPSRNLETIKGVGQDGAAVHVAFVGDPSRFASNRAFRGWSGMVPYSDQSGEREGKGLRITQAGPDPVKKYAFLEAESARQWDPQIAAIYHDQMVNKGNHHTQAVCACATHLLDRIRVILTQDRPYELRDVDGTPVTTQQARAIIAERYTVPEEVRRRNTRRARRERAERRAERKEKKKRRSRSR

SEQ ID NO: 380290 - protein, 350 aa, unidentified
MSITAIGMDIGKRVFHLIGHDAKGHEVWRRALRRVEVLPFMVQVPACRVVIEACGGSNYWGRELERLGHEVVRLPTQHVRAYVRGNKHDYNDADALLEAARRVRHRSVALKGLEAQDVQSLHRVRQSYVKQRTSLVNQSRGLLAEYGVVLPAGIAAFRREVPKILASEDPRITAVLRELLSTQWEWLKLVEVQLSTIERRLRQVERDDPRMGLLRGMLAGVGTLTATALVSRIGDGRDFRRGRDLSAWLGIVPRQHSTGGKTKLLGISKRGDPYLRTLFIHGARTVVQHAARKTDPFSAWVNRLRARRGMNIAVVAVANKNARIAWALLHKQAHGLSIQPVSVACGEAVE

SEQ ID NO: 380291 - protein, 411 aa, unidentified
MPSTLFVGIDVSSQSNSVFFIDQDGNNLIKKPFSVSNDIPGADSIISEVISHANAINASCVKIGMEATSHYAWHLHLHLASSPDLAPFNPKFFVMNPGVVKGFKKAYTYLPKTDDFDARIIADCVRFGRVNPTPMPDFRYAALQRLTRFRYHLVQTISSEKSRALNLLYLKFSSFKEDCPFSDVFGSASTSVFDSFTPDEIAVMPVEELVDFVLSHGNNRLKNPEEIAKTLKSAANRAYRLNPDMCDTVSMTLTMTLENIRFLESQLKKLDKEISKQLNGFRQTLTTIPGFGNVLAAGLVAEIGDVKRFKNECAVAKFAGLVWNKYQSGNFSAEDTSLAKCGNQYLRYYLVEAANCVRIHAKEYADFYCKKYNEVTKHQHKRALVLTARKLVRLVFAMLSKGQIYQPGGNG

SEQ ID NO: 380292 - protein, 354 aa, unidentified
MKVYHVGVDLHKEFSQVTAMDDKGKILSKGKLENDADTLEEYFSKIPKGSPVVMEATRNWYWMSDFVEEMGLKPILAHPKKVRIIAEATVKTDKIDSEVLAHLERTNFLPISYIPPKEIRDVRELLRYRMSLVVVRTSLKNRASSVLAKMGVRHSFSDAFSGAGLKFLKELKLPEIYRYELDGYIKLVEDIKKPVADIEKKIKRCVKEESEDARLLMTIPGISYFSALLLAVEIGDIGRFRSYRKLCAYGGVVATTDQSAEKVHQGHIIRDANKYIKWCLIEAVNRGGAVRKDPKLSSLYNKVLRKKGKPKARVAVARKLLISIYYMLKNRTEYEVRHRGKYGRTICHIKPFCG

SEQ ID NO: 380293 - protein, 372 aa, unidentified
MKEDSVIFIGLDTSKLKISVAVANGERNGEVRFFGDISSEPASVASMVNKLSKRGAKLHFCYEAGPTGYGLYRQIIELGHECVVVAPSLVPKRAGDRVKTNRRDAVSLARLHRAGELISVWVPDEGHEAMRDLVRAREVASDALKQARQQIQSFLLRHGRIYTGRKPWTRAHTRWLACQAFDHPAHQILLAEYCQAIEDAGVRLDRLTTLVVETAASWSMAPVVAAYQAMRGVAFMTAVTFVVEVGDVRRFNNPRQLMAYLGLVPSEHSTGERVKRGGITKAGNTRARRVLIEGAWTYRFPARVSPTIQARLEGVPRNVREIAWKGQVRLCARYRRLVAAGKPKVIAVTAIAREMAAFLWAIGQEITPATKV

SEQ ID NO: 380294 - protein, 334 aa, unidentified
MSEIKLVGIDLAKNVFQVHAVDGRGAAQVSKTLTRAKLLSYLAQLPACTVAMEACAGAHYWGRRIAALGHQVRLLPPQYVKPYRKGSKTDRNDAEAICEAALRPNMRFVPLKSEEQQALMAAQGARELLIAQRTQLVNQIRGRLAEFGIIAPKGIGHVRRLLNEPQLERVPQLMRQVCAQLHEALVWLDEQIRQASQRLERCAQDSPMCRHLMRRDGIGVINAVALSTQIDPVHFRNGRHLSAFLGLAPKEHSSGGKVVRLGISKRGNTQLRTLLIHAARSLARVAARKRDPFSMWITQLIARRGKHKAIVAAANKLARYVWVDMMQARQMGIA

SEQ ID NO: 380295 - protein, 384 aa, unidentified
MQKPNDLNQSGIVLKQDSTLIAVIEMSLRSWLVAGIVPGVERQPLKKLAVDESALLKLLNRWREEAERAGRRIERITVAFEAGRDGFWLARWLRARGIEAHIIHASSVAVSREHRRAKTDRLDTELLKRAFLGWLRGERDHCKMVAIPTTKDEDAKRPNRERQSLVGEQTRIVNRMKAALIRLGIRGFNPKLKKAAGRLEDLRTPEGEPIPPNTLAELHRDMERRRLVSDQIRQIEKARLERMEQAPGDGPHAMVRLIARVIGVGIETADMLVHEVLSRKLRDRRAVARYAGLTGAPDESGSKRREKGLAKAGNARVRGGMIQLAWRFLLFQKNSALAQWYRTRTEGGRNRKTIIVALARKLLIALWRLVTTGEVPAGVVLRAA

SEQ ID NO: 380296 - protein, 342 aa, unidentified
MTTFAGLDVSQARTTVCIVDERGLVIWRGSCVTSPAAIAQTLAAQASLLERVGLESGPLAPWLVHELRALELPVVCLDARHARAALSVQINKSDANDADGLAQIVRTGWYREVEVKSIESHLVRATLGVRKQLVGMRAEMINQIRGLMKIFGLILPKGSGARFEAGVRAGLAEKTELGVVVEPLLTAWRALDDQVATLERQLVRRARRHAVCHRLMTVPGVGPLTALAFVTTVDDPTRFRRSLSVGAYLGLTPRRHQSGERDVSGRISRCGDRLTRSYLYEAANVLLTRVKRWSFLKAWAFRLAKRSGPKKAKVALARKLAALLHRLWRDGTTFSWTTEATA

SEQ ID NO: 380297 - protein, 409 aa, unidentified
MSEETADIIYVGLDWAAATHAVCVLSAVGKILAQFMIDHTADGIATLIRKLSKFGDPADVHIGIERPNGRLVDLLLEAGHPVIPVSPNAIKTWRDGEVISGAKSDAGDALVIAEYLRLRHHRLRPAAPYSSSTKALRTVVRTRDDVVAMRVAATNQLSALLDDHWPGAKAIFADVESPISLAFLRRYPTAASAARLGEKRLAAFLVKHSYSGRRPVKELLTRLRSAPAGTTDPVLTIAVRDVVLALVSVIEALNSAGKALDRSVIARLGEHPDAEVFTSLPRSGQINAAQVLAEWGDSRAAYDGPDAVAALAGVTPVTKSSGKQHAVHFRWACNKRFRRALTTFADNSRHQSTWAADIYNRARARGHDHPHAVRILARAWIRVIYRCWHDQSPYDPARHGAVQKLHTAA

SEQ ID NO: 380298 - protein, 349 aa, unidentified
MQITTIGLDIAKNVFQVHCIDAAEKVVVRKQLRRGQVMKFFEALPPCLVGMEACATAHYWARELTKLGHEIRLMPAKDVKAYVKRNKNDAADAAAICEAVRRPIMRFVGIKSADQQGRLMQHRTRDLLVRQRTQVINALRAHMAELGIVAAQGHEGLKKLVAIIADEKDERLPADARASLIVLTAQLQALQTMIRVIEKRIIAQHRASEASKRVATIPGIGPLGASAIIATVTDPSAFRSGRDFAAWIGLVPRQDSTGGKPKLGPISKQGDRYLRRLLVVGAHSALRRAKQSPQNYPWLVQLLARRPFKVVAIALANKMARVAWALLARGGRYRAGGGSTYRAPQLAAA

SEQ ID NO: 380299 - protein, 401 aa, unidentified
MIDTGDIDVFLGLDVGKGEHHATAVTPAGKKAFDKRLPNTEPKLRELFAKLQAKHGTVLVVVDQPASIGALPLAVARDMGCRVAYLPGLTMRRIADLYPGEAKTDARDAFIIADAARAMPHTLRAIDGEDETIADLEMIVGFDDDLAGEATRVANRLHGLLTQIHPSLERVLGPRLQHPAVLALLERFGSPAQIRKAGRRRLVTLLRPKAPRMAERLVEEIFAALDEQTVIVPGTEAAALIVPSLAGSLAAVLDQRKLLAGRIEELLEDHPLSKVLTSMPGVGVRTGARILIEVGDGSTFPTAGHLAAYAGLAPVTRSSGSSIRGEQPSRRGNKQLKRAFFLSAFAALGDPASRAYYDKKIAQGKHHTQALLCLARRRADVLFAMLRDGTFYEPQPSAAVT

SEQ ID NO: 380300 - protein, 364 aa, unidentified
MKKSIKKPQAKETKPNRTMGIDIGDRWCHYCWLNEDGEVVETGKIRTREKDLREFFEGEKRMRIAMECGTHSPWISRLLEALGQEVIVANARKIEAITGSESKDDDHDAEQLAVFAHFDPRLLYPIQHRSAERQRDLSLIQARRTLVQARTMLINSARGLVKSMGGRLPQCSSESFGQKARPAVPANLVGLVTPLLEQVTLLNQQIKRMDQQIKELEKRYPEIIRLRSAPGVGPLVAAAYVLTLNGSDSVTHSRQAGAFLGLRPRRKQSGDSDPQCGITKTGNNYLRALLVQSAQHILGRFGPDSALRRWGLKLAASGGKRGKKRAVVAVARKLAVILHRMWASGQNYQPFPPATAGTQTVTAK

SEQ ID NO: 380301 - protein, 361 aa, unidentified
MRNVASESKKVYVGFDVSEKTIETFAVCRTETSKGSFKIDNNEASIKKFLSMFKKPEQVCVVMETGTHSLWMSELIKKLGFEVIVAHARDLALIYGADKKNDQLDAEKLARLAQADRKLLHPIKHMTMERQTDLTIVKARDLVVRQRTQIINTIRGLLRAAGHKLIEEEYSAATIKKCCSSLPDQIKPAIAPLLQQICYLDLAIKEYDRQVKMLCKKYHATKILRQIPGVGEVTALTFVLIVGDPNRFENPGRLCAYLGVVPKQDQSGNTDKQLGITKKGNKLGRKLLVQAAHYIMGPFGPDCELRSYGIRIQSRGGKIAKKKSFVAVARKLVAVMLVLWKNPEVTYDPNFKKNKKVKNVA

SEQ ID NO: 380302 - protein, 338 aa, unidentified
MKYFVGMDLHSSNTVLGIIDEKGNRVYKAKVANFLPLILNELELFRRGIVGVVVESTFNWYWLVDGLMEAGYKLHLANPSAIKQYEGLKHTADYHDAFHLANLLRLGILAEGHIYPKQERAIRDLLRKRLMLVRHRTAHILSFQSLYNREKGCRIGGDDVKKLGEEDIDELFDQDYVVLSAKANISTIGFLKRKIEEIEKIVLGTMKLLPEFQKLKTVTGIGDILGLTISLETGDIRRFAKVGNYSSYCRCVGSQRLSNEKKKGEGNRKNGNKYLAWAFIEAANYTKRYCSYARRFYQRKTAQTNKIVAIKALAHKLARASYFVMRDRVDYDPMKAFG

SEQ ID NO: 380303 - protein, 351 aa, unidentified
MGRVTRGAGKGRVTTIGIDLAKNSFTVYGVNAQGKPVLQRTLTRAGVIRFFANLPECLVGMEACASSEYWARTIESMGHTVRRIHPRYVKAYLLGAKNDTNDAAAICEAVQRPNMRFVPHKSPEQTDIQCVHRIRQGFVRSRTALVNQVRGLLGEYGIVMRQGVSTVRNSLPELIADETNVLSPIMRRNLSSLYESLCFLDNRILEQEKVLRDIVRENEACKRLMQVPGIGLLTATLLLSVAGVASNFKNGREFAAYLGLVPRQNSSGGKTKLLGITKRGDNYARTLLIHGSRAVLHALVAGRTPQARQNAWLAELAARRGNNRACVALANKTARIAWSMLAQGTEYKFAA

SEQ ID NO: 380304 - protein, 352 aa, unidentified
MIMEPYDFGKGSIDYRDFRQSIGIDVSKEEFHARMCMFQIGLDYGDFSEDKVFSNTKTGFNQLVRWARKEFVKGQEYRFIMEATGSYHELLACHLHACGFTVLIIPPLKAHHFAQYYGFSVKTDRVDAYVLSILGCVERRIKPWQPADPLFARLRSLTRTRHELGVERVSLSNRIEAVRHMNNPAREAVKALEQSRDYIGRRIKLLERMIEETIKSDAALWKKCQHMMSIPGVGLISCATVMAETNGFEFVVSAKQLVRFAGLDVKIHDSGKTKGQSRISKKGNKYIRCALYMPALCASRCNPQQNQMYERLINKRKNAIGVKVYALTAVMRKLLTVMFSLWKNDMDYDMNR

SEQ ID NO: 380305 - protein, 371 aa, unidentified
MEGRDRPIPPWCKKTVIKRGSSRPHSKRARTVVRSCWEDQQARIVQGRARKGDRMEKVYVGIDISKGSLDVAVYASSKQWSFANDRAGIARLCKLLAKLEPALVVFEATGGYEMPLYVALSEAGLPAAPVNPRQIRDFARSMGKLAKTDAIDARVIAHFANTATDLKPKPIPDTQALKEIVTRHNQLVEMITMESNRLRGAGQALTEGIEAHIAWLKQQLKDVDGKLRSCIEQDPVCREKDDLLRTTPGIGPTVSAALVAELPELGTLNRRQIAALVGVAPLNRDSGIFRGKRVIWGGRGRVRAALYMATLTATRFNPVIRSFYTRLLAAGKAKKVALTACMRKLLTILNAMLKHHTGWSNSYSLTLASCY

SEQ ID NO: 380306 - protein, 345 aa, unidentified
MTTMNYIGLDVHKKTISYCVKDVSGRIQQEGKIGSTRRELDCWMKTLPQPWTVAMEATIFSGWIYDHLLPHATQIKVAHPLMLRAIAAAKKKNDQIDASKLADCLRCDFLPECHMMPRAIRDRRRTLRYRHLLVRQMVQMKNRVSGLLMETGVEYNKQRLHKVSYFRELLSANGEVPPSIRPLLKLSRETIERCQKTEYALVSSLQRDPVLADRIKRLRTVPGVGPITALTWALEIGDVSRFGSIKKAISYCGLCGDERSSADKAMRMPLSKQRNKHIQRALVEAAKLAPRQNHEMAVIYDQERQKGNSNRATLAVARKMVAYLLAVDRQQRDFVPAEERRTAAA

SEQ ID NO: 380307 - protein, 385 aa, unidentified
MPKFDDLSRSLVALDQDSTLIAVIELSRSSWLVGAIVPGLEREPLKKLTADAQALLGLLHQWRDQAVASGHPIARICVAYEAGRDGFWLARWLRGRGIECHVIHPTSVSVSREHRRAKSDRLDLGLLKRSFLGWLRGEKRHCSMVAVPTREAEDGKRPLRERERLVGDATRLVNRIKGLLALHGIANFNARAKAAAHRLRALHTAEGEPLPPNTLAELLRAIERLQQIQTQIAAIEAAQRQRLKEAPGAGPHPMIGLLARVRGVGIATAELLVREALSRHLRDRRAVARYAGLTGVPDESGSKRREQGLAKAGNARIRRALIQLAWRFLQHQPDSALAGWFRQRTQDGRSTTKKTMIVALARKLLIALWQLATTGVVPAGVHLHV

SEQ ID NO: 380308 - protein, 341 aa, unidentified
MQITTIGLDIAKNVFQVHGIDAAEKVVVRKQLRRGQVIAFFAALPPCLIGMEACATAHYWARELTKLGHEVRLMPAKDVKAYVKRNKNDAADAEAICEAVGRPRMRFVRAKSAEQQGRLMQHRARDLLLRQQTQVINALRAHLAELGMVAAQGREGLKQLLTIIADDKDARLPIDARASLIVLAAQLQALHTMIGSIEKRLTVQHRANEASKRLESIPGIGLIGASAITATMTDPKSFRSGRDFAAWIGLVPRQDSTGGKQKLGPISKKGDRYLRRILVVGAHSVLRRAKQSPEKYPWLTQLLARRPFKVVAIALANKMARVAWALLARGGTYRVPALAAA

SEQ ID NO: 380309 - protein, 338 aa, unidentified
MKLYGSFDLHSTNNVGTLIDEQDRLIFQKRLSNDIGPILKELEPYREFITGFVVESTYNWYWLVDGLKAAGYKLYLANTAAIQQYKGLKHTNDNTDGRWLAKLLRLEILPVGYIYPKGERGIRDLLRKRGYLVHQHTSHINSVKTTLSRNTGHTLSANKVKKLNEGGVEHLLGTGLEAMAVKSSLAVMACLEEQIGKIEEELKGWLHLRASYRNLNSVPGVGDILGMTIMLETGDIGRFPTVGDYSSYCRCVKSDKVSNGKRKGKGNRKNGNQYLSWAFHEAATFAVRYNDRFRRFHQRKASKTHWRVADNAVANKLTKASYYIMRDGVVFDIDMAFR

SEQ ID NO: 380310 - protein, 358 aa, unidentified
MDTDRKDSGGRVMGQTERPSSPVDASSFQYVVGVDIGSQTCSCCALKPDKSQALKPLEFANAPAGFTQVQEHLEHLGVPANHLLIGLEATSRYGENLYRFLESRGYQLCLLHPRQTHQFAQQRGLRAKTDQLDASTIARILLSGEARRGYVPTELIATYRELVRLHSHLSDEVARYKNEIHAELFVLFPEFRQIFSDPCRPTALGILKRYPSAQACASAGVEAMTVTLHELAPRHYGRKTAEQLVNLAQHSTSAGIAVSARSSSLKILCDQLEHTQSNLAHLEEEIENLLDADRGATGLQSVPEFGRQTVAVLRAELGDVTRFGRADQVVAYAGLDIQVRQSGKWKGEAKLSKRGSGR

SEQ ID NO: 380311 - protein, 346 aa, unidentified
MQRIVKQVCGIDVSQNELVVSLGRLFEDFTLELYANRSFQNSEKGFLSLEAWVQKLTISTAPIRFVMEATGVYHEKLAYFLHDDGRELTVVLPNKISNYFRTLDVKTVTDKTAAEAITRFGLERKLDSWVPPSPACKRLRQLTRERDQLVQMRTIAKNQLHAEQSEAMPNSGSIKRIKAQIALLDAQELEIKAELAATVKQHREIKKKVDLMTSLPGIGLLTAITLLAETNDFNLIRNKRQLTSYAGLDIREKQSGTSVKGKPKISKKGNRYLRKAMHLPALAAIRSDERFKAIFSRLVQRHGVKMKAAVAIQRKLLEMVYIIYKTELPYDQAFLEKSREQQLVAP

SEQ ID NO: 380312 - protein, 426 aa, unidentified
MSYRIAGIDVHKKMLAVVVSDVEIESEYQFERRMFSSNPEQLRSLAAWLVEQKAEEIVMESTAQYWKPVWGTLERYWKPLCEKREGARRRSGTLHLAQALSNRGRRGRKRDFVDAERLVKRLVARELTLSFVPDAEQRLWRTVTRKKYQLRRDLVRLNNQLESLLEEAHIKLSSLVSDLLGVSARRMLKALADGETNPAALAALAHERLRATPEQLCDALGACTQLKPVYRRLLKMTLEHLQILEQQIAQLDQELATLLHPHQDAVERLAEVPGFAVDSAQQIIAEVGPAAATFPSEKCLSSWVGACPGEEESAGVNYSHRSPKGNRHMRRLLNQTANAAVKAKGSIFEIIYRRCVPRLGHNQAIGVIAHRQCRLIWLILHQGTRYEERGPAVTKRSRYQRTWRMIRQLRNLGYRIDDPSYRGGVP

SEQ ID NO: 380313 - protein, 367 aa, unidentified
MKEQENKRNKITIGLDLGDRRHRFCVLGEKGEVLEEGSVGNNRAALSELGGRYPEALVVMEAGCHSPWVSRHLEQAGCEVVVSNPRKTRAIYQHERKSDRRDALMLARIARMEPALLYPVRHGSEEAQQDLLRIKLRDSLVRARVALINSLRFTLKSLGYSIANPSTERFHKVIQSALPQSVAQVIAPSVQALEELTLRIKLLQREISDQARSKYPDTAWLEQIPGVGPITALYFVLKIEDPARFKRARDVGAFLGLCPRRDQSGENDPQLRISKRGDAYLRRLLVSSAQYILGPFAPPSALRQYGLALASGATARAKKRAVVAVARKLAVLLLTLWKNKSSYEAFPQRSSKEKMRTNDLERLRCIA

SEQ ID NO: 380314 - protein, 429 aa, unidentified
MNYTQNEKIEQVTDTTLVVGIDIGSQTHYARAFDNRGKELTKKVVSFGNDIEGFNSFDQWIESLKTANDKTTVLIGCEPTGHYWFALGKYLTDHKKTLVMVNPFSVKKIKELDDNSPKKTDAKDPKTIAKLVIDGRYSIPYMPEGIYAEIRDLVYSRDRIVKQHNISANRIQRWLAIHFPEYLGIYTRFDASSGLIVLEKAPLPKDVVALGVNGIRKLWHDKKIRGRGVTEDRAKILVEAAHNSIGLEGGAGTRSELYMLLEEHRLWISQLEAVEKALSEAVLKVDHVENLLAIKGVGSITIAGFIAEVGDVRRFKSPKQIQKYAGLELVENSSGKHKGRSRISKRGRRRLRKILYQVMVPLLASNKEFRGIYDYYVTRVKNPLKRRQAMIAVSCKLIRVFFAVLTKGVDYDRFKMMSDIHRDNELTAA

SEQ ID NO: 380315 - protein, 397 aa, unidentified
MYIVGIDIAKRKHEAAVIDGEGTVIIKPFSFTNNCSGYNRLLAMLTKAKLPLDEVSFAMEATGHYWLALFTRLQKEGFRVQVINPVQTNSIRSFYIRQAKTDPRDALLIAEVIRFGHFSESTLHPENIYELRELCRGRHAIVSMQADVKRKVVALLDQVFPEYETAFTNLFSDTSMAILQTCPTPKELSEMPLEELCHLIEVSSRKRFRMVKAQELQELARNSFGFAMAGDVFSTMIRLYAKHLDFLKQQVREMDRKIAEIMETLDTPITTITGIGPTLGAYILSEIGDISRFSSAAKLAAYAGIDPTMRQSGEYNGVRNRMSKRGSPYLRHAIWLAASSAVLHDPALKLYFQKKRDEGKPYMASVGHACRKMVSIIYAVMRDNKAYTPCIPNEISA

SEQ ID NO: 380316 - protein, 341 aa, unidentified
MKKNLFFIGLDISKADFAASIYKTPGEPIVTKEAIPNDRKGFEMLLLWLNDYHIDKKNCRICMEATGVYSQAISYYLLFQGFPVSVEPPLKVKRAFDPVGHKTDPVDSKQIAEYAYRFQDELTSWQPRDETLEKIRQLLSVREQFTKQKVALKNAIQAYHKQRVQVALIKKAHQETLAQLEKQIARIDKELAKLINQDPNTFQKASNLKSIPGYGMLLAAHLLVITENFTKIQQYKRLAAFIGIVPYKHQSGTSVCKRAKIRHFGPMPSRKLLRLAAQSVATHDVTFRRYYLRKVAQGKAKALVLNNISNKLLKIACTIIRNNTRYIKDYRSIHPMYLKSA

SEQ ID NO: 380317 - protein, 358 aa, unidentified
MQRNKISFKGQKIFVGIDVHAKNWEVAIAPEVGIVKRHSQKPSAKELFDFLKKNYPNGDYQAVYESGFSGYSTYYALKEVGIDCMVIHAADVPTTQYEEVMKTDRVDAVKLARSLKAGLLKSNYVPEKQYIDDRSVVRIRKTIQKQLSGYKSRVKHLLHCHGVEFPERFSKKQTHWSRAFITWLMNDVRLMSDTRASLDLLIRQVEVLRGTLLEATRQLRMMSQTERYKRRHDLLRTIPGIGIIITMCILTEVCDIKRFHNENEFAAYLGLIPTSHSSGEKTVHGEKTFRGNKQLGPMIIEAAWITIGRDAGLGAQYFQYKQRMEPQEAIVRIARKLSNIIFSVLKNEKEYVPYQTGN

SEQ ID NO: 380318 - protein, 466 aa, unidentified
MKRHRRRPSAKPRPSRAVLEEINPNAAGLDCGAAEHVVAVPPDRDRRPVQTFGVFTGELHTLADWLAACRVTHVAMEATGVYWIPVYEILEARGVHVSLVNARHVKHVPGRKTDVSDAEGLRDLHMMGLLRGSFRPADDIVPRRAYLRHRTALLQGAAAHVQCMQKALVQMNLQLPLVVSDITGQTGMRIVRDLVAGERDPQVLARHRDPRCRASEAEIVAALTGNYRPEHVLVLTQHLALYDAHQAQLTDCDAAIETHLTTLTATVPESTTPLPPPRDPHRRVAKNEPAFEVRAPLHRLTGTDLSQIDGIGPYNALRLIAELGTDMRRWPTERHFTSWLTLAPRNKVSGGRLLSSRTQPSANRAATILRVAAMTLGRGDTALGAFYRRLAARVGKAKAITATARKLAIHVYYALKGDRPYVDPGAAAYDARFREQTLRRLQHRAQHLGFTLVSLNTGEILEPTVS

SEQ ID NO: 380319 - protein, 336 aa, unidentified
MEPTTIAIDLAKRVFQIHYVETETGAIRSKVLKRAQLVPFFANRPASRVVMEACGSAHHWARVLARLGHDVRLIAAQFVRPFVKSNKNDAADAAAIWEAAQRPGMRFVAVKTEDQQAMLAMHRIRQQLVRIRVMQVNQLRGLLYEFGIVLPQGRRASIEAAKVALASLGEQLPAMLADSLQDQFSRLRALDEQIAQIEQRILDWRRNDDACKRISEIPGVGVLTATAAVSVIGQAQTFRSGREFAAYLGLVPRQNSSGGKVKLGSISKRGDVYLRTLLIHGARSVIVSARHLPERLRQMLSRRPTNVVAVALANKMARTIWALLAHGRTYEAAQAQ

SEQ ID NO: 380320 - protein, 361 aa, unidentified
MNFYIGLDISQRKTAICVVDDKGKIVVEGSSLTLPSDIYNWLVGKSVDLAAVQNVCLEAGAMTSFIYKGLEALGLPVVCVEAFQAHQFLKAQRNKTDKNDARGLAQYIRMGGDYIRPVIVKDTITQEDRMLLTLRQKYVTQKIAIENSITGVLKPFGILVPRRRGSADSFCNAFTETVAKAESLGPTLREAVLESIEVYRAVNHTLEKITKTITRIAREQPVCRRLMTAPGVGPIVALSFVTAIDTPHRFRRSEDVGSYLGLTPKRYQSGDADNPGRISKFGSSMTRTHLVQAATTLLYASKKWSSLRAWGVKIAKRRGYQIARIAVARKLAVILHRMWIQERDFCWSTADNVAEALRKAA

SEQ ID NO: 380321 - protein, 407 aa, unidentified
MKKKEFIEFEQVVERGCGMDVHKDLIVATIQGKDIKTQTNSYKTFTSSLILLKEWLLKNGITHVAMESTGVYWKPVFNVLGDDFKILLVNARHVKNIPGHKTDKRDSRWLAKLLLSGLLKGSFIPERQIRELRDLTRYKTKLTNLVSGDRNRFQKILEDANIKLSSVLNDVFGATGTKIINHLVTHENYRPEELLQYVHGRVKASRAEIKEALTGHITPHHRYMLKTILSNIARVECTIAELEAQIEFCIEPYKIERELLESIPGVGKDSAASMIAEVGVDMDQFPDQNHLASWAGVSPGSNETAGKNKSGRINYGNKYLRSLLVECGWAASRTKKTYLSAKYKNLVGRRGKKKAIIAVGHKILIATYFIIRDKVSFKELGEDHLNNYRKDRLIAYYQKQLEKLTAA

SEQ ID NO: 380322 - protein, 391 aa, unidentified
MIYIGIDVAKDKHDCFITNSDSEVLFKAFTILNNLDGFNNLYQKIESVMDDVTKVKVGLEATGHYSYNLLGYLIDKGLPTYVINPLHTNLYRKSLSLRQTKTDKVDARTIASMLMSDVNLKSYSDTSYHNEELKSLTRYRFDKVKQRAKLKSSVSRLVCILFPELEKLVPTLHMASVYAMLSEFPGAKQVANAHLTRFTNLLSKVSKGRYGKETAIAFRNAARTSIGSNMPAKSLELKHTIKLIQELTSEIDEIENEIKLIMDEINSPILSIPGINYRMGAMIIAEIGDFNRFDSPDKILAYAGFSPSTYQSGQLDGAYSHMEKRGSRYLRYALYNAAKYVCNWDPTFAEYLAKKRAEGKHYNVAISHAVKKLIRVIYHLEKTNQQYIKAV

SEQ ID NO: 380323 - protein, 342 aa, unidentified
MQHAAIDLGSRESQICIRQPDGAIVEERKHPTRKLPELFKTWPTSRVVMEASAEAFKIADAALAAGHEVRVVPGKLVRLLGVGDRGVKNDQQDARHLSKASWQTDVPSVHIPSAAAREIKSFCGARDVLVATQRNLSNNVRGWLRTQLWKPPGGTMVTLPERLRTHAQASQRELPEHVERQLTMLTQVTEQVQAANKQARRLAKTHPVCPRLMTVPGVGPITSLRFVAAIDDPSRFPTAHRVQSYVGLTPGEHSSGGGGGKRGITKAGPSELRRCLVQSAWSVMLARRPHPMLEWARQIAQRRNRPVAVIALARKLAGILFAIWRDGTTYEANHAARRCEPT

SEQ ID NO: 380324 - protein, 371 aa, unidentified
MFQPIRYVGLDVSKETIAVAVAEPDGSVVEYGDIPNDPSSVRRLVEKLSRDAQLRTAYEAGPTGYPLHRQLTSLGVENKVVAPSLIPRRPGDRVKTDQRDAVQLARLLRSGDLTPVWVPDEAHEALRDLVRVRDDARTEGLRAKHHLSKFLLRQGVSAPARVGRAWSAKHQAWLNTLTFRDRAAQVTFDDYLACVRASTERIRRLDAALLECGATSPHVELLRAFQAVRGIGFLTAVTIVAEAGDLHRFRSAPAFMAYVGLVPSEHSSGGSRRRGHLTKTGNRLLRHVLGEAAHHARLQPAVSEALKQRQQGVPKEVVEISWRCQQRLHHKYLHLGGRIGRQRAISAVARELAGFVWAIGQALQPVAAVAA

SEQ ID NO: 380325 - protein, 391 aa, unidentified
MYYIGFDIAKENHYTSIANSNGEIIQEAFLVKNSINGFNFFMDKLKEKNINISDCLVGMESTGHYGENLIQFLHNKGFHIGIINPIQTDALRNSNIRKTKTDKIDTYLIIQSLMLKHYTPFVSKDIKILELRSLCRHRDDVLKYRTKLKVRFVSFVDQLVAELNLIFNSIHLKSCYALLSKYPSPKDIASTRVDAIANLLSTASKGHFSFDKAQKLKELAKSSIGVNNSSLSIQIKHSLKQIELLDSQIKEIDLKIKEIMDELNSVILTVPGISYTLGAIILSEIGNIDKFASPTKLLAFEGLDPSVKQSGNFNATIIKMSKRGSKLLRYAILKASGIIIWNSETYNAYYNRKLSQGKSHNNAVCHVAHKLTRVIFHLLKENVKFKEQLEN

SEQ ID NO: 380326 - protein, 344 aa, unidentified
MSEVIIIGLDIAKYVFHVHGADERGRVIFSKRISRGKLLDFFAAQPNCTVALEACGGAHHWARQLTQLGHEVRLIPPAYVKPFVKRQKNDAIDAEAICEAAQRPSMRFVAVKSERQQAAGLVFRTRDLLVRQRTQLINAIRGHLTEYGWIAPKGPSHVAMLPDLLEEEEMASSLPEAARAMFRLMLDLLAGLNGKIADLDKEIARRAREDEVSRRLMTVPGIGPISATAIAALAPPAETFAKGRDFAAWLGLTPLQRSTGGKRKLGATSKMGERTLRRLLIIGSSTVVLQASKRGAPKGSWLDQMLARKPRMLVTVALANKMARIIWALLVKQENYRAPVAAKA

SEQ ID NO: 380327 - protein, 319 aa, unidentified
MAQNDLVVVGIDVAKDKVDACIRRFKLRQTFPNNPQGRRKLIAWLRKYQVGKAVMEASGGYEREWRNVLHNAGIEVRIVDPRRVRNFALSAGRLAKNDPIDAEMIAWFAETFSQAPGQIPDAAREELAGLAKARKALMDVKIRLQAQNEHAAPEPARKAHARILKSLDAEIDKLEVAISAKVKATPEFAERAEIIQSVPGLAQTTSAILIAGMPELGQVSDQVAAALVGLAPYDDDSGKRRGERHIKGGRRWVRNAIYMPCLGAATQNNPVLRVFYQRLIAKGKEPKVALVACMRKLIIILNTMLAHRQKWHPGAHAIA

SEQ ID NO: 380328 - protein, 311 aa, unidentified
MVDVSSEAKSSTTGVTNPYRRTEHCDKIHEYRCDKEVGVIGIDISKEHLITSRGRVRRYENSKKGYEEILKMKPCVIVLEPTGVYAIRPSQYFKEKGIKVLQVSPNVLSREKELRGKKTDFYDAEKLENMVNKAKEYDYNPLKELVTLYLFLKDIETKYKNRLKRALFLVSDNDKVNKDRLERLAKGDFTREELYQLEYTPIVLEEIKILAKNLLEIQERLKEVRRMIEGQVPQDHVLLTIPGVGKLAAGIIIGIVGDIRRFPKPESFVAYCGLDPVVERSGRAVISRGISKRGNKYLRSLFYFFGSEELF

SEQ ID NO: 380329 - protein, 425 aa, unidentified
MKFTRNDAANQRIERITNHHAIVGIDIAKDIHAAQITDFRGRTLTPRHVSFTNTKTGFEKLLTWIQAVGDKHGKTSFLVGMEPTGHYWHNLADWLLEQGLEVVLVNPVTTHRNKENRDNSPSKNDPKDALVIADVVSRGYYTDYSPQEPVFDQIKAVMSAREYWSGQSTSLGNRIVRWIDLYFPEFRHVFPEWDGVRALATLKAFALPAELRKLNAEEVVEGWRSQGMRRVAGVSGKAKAVELLAAAARSIGKSNTNDAARQDILRLLHVYEETQLILTKMKQELETLLEQVPFVQQLYSLRGLGTITIASLLGCAGDLRHYAHGRQLLRRAGLNLAERTSGKHKGQIKLSKRGSSMLRKYLYLGVLGLVRQHPDFKYWHTRNQAKGMSRMYSIFKLMGKLARIIIGMIQRGETYQSQMPQAVAA

SEQ ID NO: 380330 - protein, 463 aa, unidentified
MLNCTAKRLKEIELKTLLIGIDIGKKRHACVIMDLRANVVAQFKFSNSRQGFEKLLERVYMLQTKTQSNHLLLGMEPTGHYWRNLAYFLEGQRYRFRLVNPFTLKRHREGQDLSRTKNDYRDAAMVAELLRTGKFTLTRLTYGRRAELRRTFILYTRLVDDRARQKNLLRAALDSLFPEFTQVFRDPLGLTARAVLLACPSPHKIREKSLEEFVSLVREAYRGRRLALGKLRALHEVAKESIGIPAENGTLALELRTIIQIVETLDHQIKEVEAQMIEQFLALEESIYLLSIKGIGPITGAGILAEIGDISTYQSVKSLPKLGGINPSQNDSGVHRGTHTPMTKKGRARLRRVVYQAALCCIAHNPVFQADYRRLRERKRNPLPKMKAVGAMMNKLLRVVYALLKERRTFEEEHQWQVKPLTSAFGILPALARSVPDPTESRDGRPGRMPQNPKEARVTTLVA

SEQ ID NO: 380331 - protein, 353 aa, unidentified
MHATTVAIDLAKDVFELAFAETGNRVVERKRLSRRSFAHCLDNRSPLRVVMEACGSAHYWGRRFEALGHHVRLIAPRDVRPYVRRNKTDRTDVAGILEADRCADIASVPLKTPEQQGVQALHRIREQLKAQRTATINLLRGVLREFGVVIPNGAAKVRPTVLSALEDGDNDLPMGLRDALAAQLDQVLALEARMRGIEQHLEEFAARDATTMRYQDVPGIGLLSATALRASVGSLDRFPSGRHLSAWIGIVPREHSSGSQRQLGRISKRGDGYLRTLLIHGARSVLHAAAARRRKDQPLDRLQAWALEVQQRQGHNKAAVALANKLARRLWAMERHGKGFDANHCSVRAEATH

SEQ ID NO: 380332 - protein, 332 aa, unidentified
MSDRYCIGVDVSKKTLDIRIYASENMLSSNYVQVSNDLSGFTSFARWLKQRNISWPDVLICMEHTGYYGYDFRSFLQEKDVFYSVVSGLEIKRSMGLVRGKSDNIDAGRIARYCYLHRDELKRSIGKSSEMLMIQRLLSERSDYKKRASRARAYLTDHRQAPDTPVYRRYESDLKHCTSVLKVIELDIIHLIESDVDLYRNFSLLISIVGISFINAANVLLYTDNFRLFKDARSYASYVGVAPFPYRSGTSVYSADRVSKLCARHLKSDLTQGALSAITHDPELRAYYKRKIASGKSSGSVLNAVKFKLIERMFCVVKRGAPYVKLSNHVSL

SEQ ID NO: 380333 - protein, 418 aa, unidentified
MVGDNLTEKRTAIKPDTLVVGVDVGKSTHVARARFPDGSFTRPLPVVTDADGFRNLHEHIVQWQQQAECADVMVGLESTGVYWENLAFWLEGRGYRVMQVNPLHVHQSKEMLDNSPGKTDGKDALLIADLVAQGKYLSFVMPRGVFADLRQLAALRARLVVERTTYLSRLHLMVSLLFPEFGGVFRDLATRVARRMLYYFPTPEDVRNHTVAAMARRVRKDGGIRLRESKLVLLRERAAATVGVSEGKSALVMTLRDTLTALDGLDQRIGQIEVRMAENLARVDESRYLLSIDGVGTVSAAVILGETGGLRRYVSAEAILKLAGLNLFEVSSGMHKGARHISRRGRPRLRQILYFVALHHARPGMPLYSYYARLVDRGMPKPKALVALSCRLVRIMYALVRDGRYFSVQTPQPVSQVA

SEQ ID NO: 380334 - protein, 327 aa, unidentified
MQNQTIVGIDVSSATLDICVRNPQQCNHSIVISNQAGAIRAFFSQYHQSLLIGMENTGRYNWALYEVLKELPQHQVFVVSPLHLKRSIGLVRGKSDKVDAIRIAAFISKNHQELPRWRPTGDNVEKLRVLICERNSRIKTKKQLLKQQYDYAKMKHLELDEWLLEINREQLTLVSEQIKKIENRMQELINADEQMQQQARLMRSVPGVGKVLCWMMLAKTEAFQTITEPRKMACYSGVVPFSQQSGTSLKGKGRVSCYADKSIKATLHLAAMSAIRLNNDLREYYLRKVEQGKNKMSALNAVRNKIIHRIFAVIKKQMPYQKHLLLS

SEQ ID NO: 380335 - protein, 347 aa, unidentified
MKHFAGLDVSLDETTVCVVDEAGGIVREARVPSEPEALVAFFRGLGLAMERIGLEACSLAAWLHEGLTAAGLPAVCLETRRAKAAMGAMPNKTDRNDARGIAQIVRTGWFRAVHVKSPACRSWRALLAARRLVLNKMRDLENGVRALLREAGLKLGRPARKELAARVRELVGADAVLSASVEPLLAIVATMAHELAQLTRRVLAIVRDEPVCRRLMGVPGVGPLTALAFRATIDRPERFRHSRDVGAHLGLTPKRYQSGETDVQGGISRCGDELARTALYEAAHSLLVRSRRWSSLRAWGMQVARRRGMARARVAVARKLACVLHRMWADDAEFRWGKQETASAVPG

SEQ ID NO: 380336 - protein, 427 aa, unidentified
MAYRIAAVDVHKKMLAVVIADVEGEGEYHFERRKFGASPEQLHILAQWLVEQEIEEVVMESTAQYWKPVWGTLERYWKPARQKRDGATKMSGKLHLCQAKSNRGPRGRKNDYADAERMIKRLVAQELVLSFVPDPEQRLWRTVTRRKHQLTRDRVRFQNQLESLLEQAHIKLSSFVSDLLGLSARRMLKAIAEGETDPAAVAALADCRLRATPAELRDALGACAELNVVYRRLLQMALDELKLMEEQIEQLDREASNLLQEHHDTVQRVAEVPGFGVDSAMQMIAEVGAEAAAFETAEKLASWVGVCPGEEETAGKSKSTRSPKGNSTMRRLLNQAAQSAVKVKGSIFEITFRKLQPRLEYKEAIWAIAHRLCRLLWMILHKKIRYEERGPAVSAKSQRARTARMIKTLQKFGYRVEGGPLPAGSPA

SEQ ID NO: 380337 - protein, 344 aa, unidentified
MIYYAGLDVSLRTVNICVIDGQGELVAETKLASDVQDIVAYLDDLEFDVESVGLEAGTLMQYLTYGLQAAGFEVVCMEARQVKGALSAMRNKTDKHDARGIAQILRSSWYSPVHVKSMESHHIRMLLSSRKAVLSKCVDLENEVRGLFKIFGIKLPPKLGHGAFDVAVRDIIETDEKLSQALLPLLDARLFLYQTFRILDNRTRKMAHADTVCVRLMTVPGVGFITALTFKSGVDDPSRFKRSRTVGAYFGLTARRFQSGEMDIDGHISKCGDADVRGTLYTAANALLTRSSRWSPLKAWGMKLAKTRGHRRAVIAVARKLAVILHRVWIDDTQFRWGTEGARS

SEQ ID NO: 380338 - protein, 352 aa, unidentified
MGEVTLIGVDTPKHVFTLHGVDGSGGCVLRRELRRGQVEGFFAGLAPLEACGGSHRWGRRLSALGQRVRLIPPQYVKPYVKRGQENDRRDAAAIAEAAQRPEMSVVAVKSAEAQAGLMLLKVRELLVKQRTQAVNALRGPAAGFGLVAAQGTGKVAALLVAVASDPGVPDAAKALLALLARQIEHLDEQVKALDDQLLALHKGNDLSRLLAGVPGIGPLTAVGPALTVDPAQFRSGRHSAAYLGLTPQQNSTGGKTRLGGISKAGNTRLRTLLVVGASAVIRHAKPGRRQAESPTGAWLLGLLARKPKKLAAVALANKMARIVWASRLRRAGAMMSRGEAYRHRPTPVPVPA

SEQ ID NO: 380339 - protein, 336 aa, unidentified
MTLYCGIDLHSNNSFVSVINDKDERLLEKRLANDPGLIIQALKRYRARLKAVAIESTYNWYWLADALEDAGFKVCLVNTAQIIQYEGLKRTDDRYDAFHLAHLMRLGILPTGYICPRVNRGLRDLLRRRMFLVQDRSRHIISLKTQYQRQTGQTLSTNAIKGKKFVLPVVGDENVQLAMASSLTIAKALTYQVRALEKVILRQVRHVGAFELLKSVSGIGDILSETILLETGDISRFKSPGNYASYCRCVDSKRTSNSKKKGVGNRKNGNKYLAWAFIEAANFAKRSNPQAQAFYERKKAATNNVIALKALAHKLARACYHIMKNEVPFDSNKLFT

SEQ ID NO: 380340 - protein, 419 aa, unidentified
MSFKILKNNCCGLDVHKTWIFACIGITDSHRRTEYKQARFSSFTKGLQELCDWLAKYNCTDVCMESTGKYWIPVFNVLEKNNIWVTLSHPKYTKPQKGNKTDRKDAKWICDLYMCGMVKPSFIPPADIRQLRDLVRYRFKLTCMITSEKNRAHNCLTISNFKLDEVFSDIFGKSSRSITEQILQHPGETFDVAQFVDGRCKTPIEEIQAAVDGAISTEQAVKLRQCLNHIDELEKHQAEIEREIFRLSDKYEEVLNLIRTVPGFDKNPMTAIQVLSEIGGDLSVFPTAKNLVSWAGCCPRNDQSNQKIKSTRISRAGSYFKPVLVQVANALIKSKKHPEFTTRYRRIKARRGHKKAIIAICRMLLTAIWHILTDLKPYTTEGFLESRPVNDSKILTTSQALNLLKQRGYVIKDDIVSVP

SEQ ID NO: 380341 - protein, 389 aa, unidentified
MKIFVGIDIAKLNHFAAAISSDGEILIEPFKFTNDADGFQLLVSKLESFDKNSIIIGLESTAHYGDNLVRYLVAEFYQVCVLNPIKTCQMRKNNVRKTKTDKVDTFVIAKTLMMQDDLRFITFFDLDMMDLKALGRFRQKTIKQRTRLKIQLTTYVDQVFPEIQYFFKSGLHQNAVYALLKEAPSPKEIASMHMTHLANLLKVNSHGHFTKEQAKELRVLAQKSVGANDSAISIQITQTIQQIELLDSQLERVETEMTEIMKFNDSVIMTIPGIGYINGGMILGEIGDIHRFSNPNKLLAFAGLDPSVYQSGNFQAKTTRMSKRGSRVLRYALVNAAWNVVRNNATFKAYYDAKRAEGRSHYNALGHCAGKLVRVIWKMLTDEVEFNLE

SEQ ID NO: 380342 - protein, 351 aa, unidentified
MTLTELVDHVVGVDPDRDRITAAVVCARTQGEIASRSFATTARGYGQALRWAKERTTDGRRAWSIESSGSYGAGLASALAAKGEFVIEFDHPSTRPSKDGAKSDSLDAVRAAREILGRKAWATPRSRGAREGLRTLITARDSAKLARVAAINVLKALVVTAPTDLREELRGRPLMELVGRCQRLRPDTAADPEYAATKLSLRSTANRVRQLTDECRELELAMIPLVRAMAPALLDEPGVGVLMAAQILVSWSHPGRCRDEAAFARLGGVAPLEATSGQTQTRHRLSRGGDRQLNRALHTVVLARAKHHQPTKDYIARRTSEGKTKREAIRCLKRYYARHLFRLLEAAPMTA

SEQ ID NO: 380343 - protein, 340 aa, unidentified
MRMHKVTEITTTGKLGQEYDHYVSIDWSLSTMAIAHMGRRDNIPRVFERPSELKELKTYLRSLKGRIIITFEETGCAHWLYLELVDCADRILICDPFQNKLLCHGPKTDKIDARKLCELLRAGLLKEVYHSNSELYELRLLVSAYEDVVRSGIRVLNQKAALTLGHREKGKSSAFIGGILKENIDLYRRSKEQYEQRFNVVARGNKLVRFQREIDGIGTIGAVKILACVVDARRFPYSGKYMSYCGLVKHEKLSGGRSYGWRKPRYSRVLKSVYKTAALAAIRGHNPIREYYDHLLDQGVAEHNARHTVARYIARISYGMLKSGTRYEPYRWRDTERQSA

SEQ ID NO: 380344 - protein, 373 aa, unidentified
MEESTKVHVGLDVHKDSITIGAAEPGRAPARVIGKTAHDVNKLLKVLVKLGRPEQLHIVYEAGPTGYGLQRALQARGYLCEVIAPSQMPRRPGDRVKTDGRDCVQLAECSRAGQLRAVWVPDPADEAIRDLSRAREDAVNSRTKVRQQLKGFLLRHGVRYTGKTSWTKAFYRWLATLSFGAGASQTAFTEYWLAVQAADDRVQRLTQALQPSIAGWRFEPVVAALQALRGIDVISAIGLVAEIGDLNRFDHPRKLMGYLGLVPSERSSGERVSRGSITKTGNTHARRLLTEAAWNYRFKARIGRQAQRRQEPLSEQIRSMGWKAQLRLSRRFAALLERGVQPNKACVAVARELAGFVWAIGTTASREQTATQQ

SEQ ID NO: 380345 - protein, 477 aa, unidentified
MAARKKKDMAAHGGEAVEVSDEVTQVVEYAAGIDVAKGFGMVCTRVPGSRAGRRRQKVWRVNATFSEVTALMDHLVCEDIQRLVLESTSDYWRIWYYLAEAAGLEVWLVNARDVKHLPGRAKSDRADCVWLCKLNERGMLRRSFVPPRAVRDLRMLTRTRSRLAQDQARHQARVEKILEDALLKVSSVISDLFGVSGRLFLDALVAGERSPAALAALGDYRLKASKAMLEETLTGQFRDIHAEEIAVHLRLIDAINAEITGLDAKIEQLLPQVPRTAPVCTACGLAGGGHAPDCTDLGALVPGLADRLDEITGIGAVNARVLIAELGTDPSQFATPGHAAAWAKLTSRMMQSGESSWNGRAGKGNRYLRGALGQAVMSAAKTDTRLGAMYRRIARKRGKQKAIVAVGRVICEIAWILICDPGARYIELGPDYYQPRNARQRTRSSIRQIEKDNPGKKVILIDDPATAPPAGPAERAA

SEQ ID NO: 380346 - protein, 310 aa, unidentified
MEQITVVGIDVSKDRLDVHVLPAGEAWSVSRDSEGLSELCRRLGGTARLVAIEATGGYETIVAATLSSQGVPLVVVNPAQVRAFAHALGQRAKTDPIDARVIARFAEATRPEIRPLPDRATRMLADLVARRRQIVEMIVAERQRLHRTEPPRVRKSITRLLKALEKELASVDRDIDGSVRGSPVWREKEDLLASVPGIGSIIARTLLAELPELGTLDNKQIAALAGLAPFTRQSGAWKGKTRIAGGRSVVRTALFIGAQVAKRWNPPLKAFYDRLIAAGKPKMVATIAVARKLLTILNAILRDKTPWQNA

SEQ ID NO: 380347 - protein, 377 aa, unidentified
MHSENIAAYVGLDVHKETLAVAIAAPERLGEVRYYVTINNEAQAVRRLFQKLQGLYGNILSCYEAGPCGFGLYHQLTAMNIKCQVIAPSRIPKSPTDRIKNDHRDAISLARLLRAGELTPVWIPDLTHEAMRDLIRARAAAKRDSRVARQRILSMLLRTDKHYAGKHWTGKHRTWLANQSFSQPSQQIAFQHYCQSLEQIEDRILQLDQEISRLLPEWSLCNLVCQLQALKGVGQLIAITLVAELGDFSRFSNPKQLMAFLGLVPGEYSSGNSIRPRGITKVGNSELRRLLYEAAWSYRTPAKVGAWLIYYRPDSVTQYSKDIAWKAQQRLCSRYRSLTAKGKKSQVAITAVARELTGFMWDIAFAAQSSFSQQKQN

SEQ ID NO: 380348 - protein, 325 aa, unidentified
MTGNPHTAWLGIDVAKAKLDCALLRDGKYRHKTVQNHAAGFAELLVWLTRQQVAGPLPVCLEATSVYWEGVAQFLAEAGHVVAVINPALAKAHAQSCGLRSKTDAVDARLLADFCREKRPPAWQPPSPNEQALRALVLRHQALVEMRTQETNRLGTARQVVGDSLREHLQWLDAELKRIEQAIARQIDDDPDLRGKRDLLDSIPGLGERTIATLLAYLGQMRRFARAGEFVAFAGLSPRLHESGSSIRARPRLSKVGHAFLRRALYMPAMVTLWRTAWGRAFRDRLAANGKPSKLIIGAMMRKLAQVAFGVLKSGRAFDPAMHPA

SEQ ID NO: 380349 - protein, 383 aa, unidentified
MDVHKKSCTMTAIDDAGREISCWKMPTTPAQLNAFIRGVPTKAKIALEASTTGKAVAHWLRNAKLDAHMASPRELAAIRASGVVTDERASYHIAHLFRNNYFPESYIPSVETDRVRDLTRFRIRLGRDVASIKNQIHALVSKNLFDSEITQTDMFGKTGLQKLVSLPFSDQDRSILKSHLEHLTLLIRQEEQYSEELARIGKGRPDVGLAMSIPGIDFYGAIGILGEIGDVHRFATRRKLYSYCGLVPGADNSGEQVSTHRRCKRGNSVLKYFLCNAVQGAIRASKPNSIAKFYKKKAKQIGHGKAQVAAARKLAGILWTILMTETPYIEENPALTQRKMARMELKAKAPIHHVTTEELNELASNISAKEQVLKRLLPEDEEE

SEQ ID NO: 380350 - protein, 359 aa, unidentified
MRNAGIHANSLLEVRRMYNAVGIDVSKGKSTVAVLQPGGTVIRKTFDVSHTSQNLNELADYLSSLDGTTKIVMECTGRYHEPMVKALSEAGLFISIVNPHLIKNFGNNSLRKVKSDPADARKIARYTLDNWTELRQYSGMDNTRTQLKTLNSQFSFFMKQKVAAKANLIALLDNTYPGVNKLFDSPTREDGSEKWVDYAYSFWHADCVRKIGLKAFTERYMSFCKKHHYIFQQDRPEKLFNASKELVAVFPKEKTYKLLIQQSIQQLNLASEHVERFRREMNELASTLPEYSTVMGIYGVGKTYGPQLIAEIGDVSRFTHREALTAFAGVGSGVDESGQHKSKSNRASKVGSARHCFRS

SEQ ID NO: 380351 - protein, 392 aa, unidentified
MVVSVGIDVSKDKHDCFIVSSEGEVRADVFTIPNTMDGFHCLLQRIRDCANAQDKIKVGLEATGHYSYNLLGFLMDNGLATYVLNPLRTNLYRKSLSLRKTKTDRVDARTIASMLLSDEGLKPYSDAAYHNEELKSLTRYRFDKVKERAKLKGSIARLVCILFPELEKLVPSLHIASVYALLEEFPGARQVAVAHLARLKALLETASKGRYKRDIAQEIREAARNSIASRMPAKSLELQHTIRLIRELDAEIHEIEAEIEAMMDEIQSPITTIPGIGCRMGAMILAEAGDFSRFDSPDKLLAYAGMSPSTYQSGQLKNCYPHMEKRGSRYLRYALYNATKYVCLWEPTFAAYLAKKRAEGKHYNVAISHAAKKLVRLIFAMEKSRQPYRAVA

SEQ ID NO: 380352 - protein, 425 aa, unidentified
MNSNTQNAKIEAITEKTLVIGIDVGSETHYARAFDHRGFEYSKKPFQFSNDEAGFESLQEWILDIKEKHEKENVVPGMEPTGHYWFNLGKFLQDNDMKPVLVNPHHVKKSKELDDNNPTKNDRKDPKVIAGLVKEGRYMIPYLPEGVYADLRSVSNIRFRLQSELTRIKNRISRWFNIYFPEYKKVYGNPEAISGILILKQAPLPKDIRALGVEGVNRIWRDAKCRAVGIKRAKILVEAAEYSIGSQEGVVAARMEIRMLLEDYESRITRLQEVMALIEELVGKIPMAEKLLEIKGVGLKTVSGFLAEVGDISRFSNPKELQKLAGLALVENSSGKHKGETTISRRGRKRLRYLLFEVAMSLVSKNREFASLHHYYTTRKVNPLKKMQSLMAVAAKVIRVFYAILTKGVDYNPAKMLGDIKRPAV

SEQ ID NO: 380353 - protein, 361 aa, unidentified
MRKGSTAMKAATATDYIGLDLSDKTATYVVLSAEGEVVQDGKLKLSQAGLQRALGTRPPTQIAIEVGGHSPWVSRTLTDMGYDVTVANPRQVKLISHGQKKSDLLDAENLARLLRYDRAMLRPITHRGPAAQADLALLRSRDAVVRARTRLISSARNMVKAAGGRLPRCSAESFHYKACDHVPELAKQAILPLLEAIAGLSEQIARMTRDLDKLADERYPETKVLRQIKGVGPLTSLGFVLTLEEAHRFGKSRSVGAFLGLVPRQHDSGESQPQLRITKAGDPFLRRLVVQSAQYMLGPFGEDCDLRRWGLKLAGDGKNKIRRNKAVVAVARKLAVLMHRLWQTGAVYEPLHQALLEQGAA

SEQ ID NO: 380354 - protein, 343 aa, unidentified
MKIRTVGLDLAKTQFQVHGVDETGTKVVNKALKRSQMLSFFANLPPCLVGMEACGSAHYWARKLSELGHTVKLMAPQFVKPYVKSNKNVAADAEAICEAVTRPSMRFVPVKDEEQQAVLALHRARQGFVKTRTAQANQIRGLLAEYGVVIPQGIGHIAKRLPDILEDGENDLPFLFRQLLERLGEHLKELDRQVGELDAAIQTWHRQSAASRRLAEIPGIGPITASALVASVGDAKNFANGRQLAAWLGLVPRQHSSGGKPTLLGISKRGDTYLRTLLIHGARAVVRVAEGKENADPRLKRLLERRHKNIATVAWANRNARIVWALLAHDRTYQTDYAPAHSA

SEQ ID NO: 380355 - protein, 335 aa, unidentified
MKEITTVGVDLAKSVFTVHGVDAMGRVVLRKTVRREQLMELIAGLPPCLIGVEACGGAHEWGRKFQIHGHRVGIMMARFVAPYRKSSKNDGNDAEAICEAVARPNMRFVPVKSAEQQAILSLHRVRQGFIEQRTATINRIRGLLAEFGIVLPQRAEQVRRAAVVVAEELPVLAREAIADLRAHLTYLDERITRYKRQLVSLARQREAAVRIQRLPGVGPLTASAITASISDGHEFANGRQFAAWLGLVPRQYSTGGKPRLGRITKRGDPYLRTLLMLGARAVLQSAAQKTDRLSRWALALRARRGYHRAIIAVAAKNARIIWALLVKNRDFVLPA

SEQ ID NO: 380356 - protein, 345 aa, unidentified
MQPMYYIGLDVHKQKISYCVKEGGGKVFAEGWMPATRFDLDRWMKTLPQPWSAALEATMFSGWIYDHLKPHAAAIKVAHPLMLRAIAAAKKKNDRIDANKICDCLRCDFLPECYMAPTAIRERRRTLRYRSLLVRQMVQTKIKISTLLMEAGVSYNKSKLHKAGYFRELLANNPDIDESLRSLLCQCREMVVRLSKMETALIHSLQQDPLLVERVERLMSIPGIGPISALTWALEIGEVQRFSSIKKAISYCGLCGDEQRSANSVQRTPISKQRNKHLQTTLIEAAKMAPRYSPTLAMLYEREEQKGNANRATLAVARKLVAYLMAVDRGKTHFLVIDQETRAAA

SEQ ID NO: 380357 - protein, 421 aa, unidentified
MTPPSHDTFAAFIGIDWADARHDGCLQAAGTAKRECFQLEHTPEAIDAWVTTLRIRFNGQPIAVCLELNKGPLVSALRKYDFLVLFPINPLTLARYREAFTPSRAKDDPTDAELQLELLLTHRDKLQPLQPQSPPMRALAQLVEHRRRVVGDKVRITNRLPSALKNYFPQVLHWFQEKDTRIFCDFLSRWPTLKAAQLARRSILERFFRDHHVRTADVLATRLHAIKTATPLTTDEGVIAPNVLLVQTLVSQLRVTLDAIEAFDQAIAQRAQHHPDFPLFQALPGAGPVFASRLLVAFGEQRERYASAAALQKYAGIAPVTERSGKKAWVHWRLQCPKFLRQTFVEWSAESMRHSFWAQVYYQQQRDKGNTHQAAVRALAFKWIRILYRCWQEHTPYDDSTYLQALMRRNSSLIQNRAKVS

SEQ ID NO: 380358 - protein, 344 aa, unidentified
MQHYVGLDVSVKGTSVCIVDKAGRVIREVKVATEPMAILAVLTEETLAIERIGLEAGPLSQWLYSALAEAGLPVICVETRHMKAALSAQINKSDRNDARGIAQMMRVGLFRPVHVKTLASQKRRMLLTSRQLLQAKALDIENDLRGTLRNFGLKVGMVGTVKFEARIRELVADHPDLAAIVEPLLIARRVLREQLDVLHRQLLEIVRHDEVCRRLMTTPGVGPVVALTFRATVDVPSRFTSSKSVGAAFGLTPRRQQSGEIDRMGGISKCGDAMMREMLFEAALVLMTHSGKWSWLKAWGMKIARHRGMKRAIVAVARRLAVIMHRMWMDGTEFRWSSKEVAAA

SEQ ID NO: 380359 - protein, 361 aa, unidentified
MSLASWLVAGMIPGVNREPLKKIAPNPEVLLQLLHRWRDEAIKAGKEITRIAVAYETGRDGFWLARWLRARGIDAHVIHATSVAISREHRRAKTDRIDTAMLRRGFLGWLRGEPGHCSMAIVPTVEEEDAKHPHRERETLIKQRTSTVNRMKSILIKFGVRDFNPALRKAPAKLASVRTPEGIPLPSNAVAALQRHMQRFSVIKEQIKAIERTRLQRLQRDPTEKFNAMVFLLVRIIGFGVETAQQLVHEMLSRSLRDRKAVARYAGLTGSPDESGSKRREKGLSRCGNRRVRNILIQLSWRLLKFQPKSDLVVWFKKRTANARGSRKPMIVAFARKLIIALWRYVNTGLVPEGFQLRSAA

SEQ ID NO: 380360 - protein, 366 aa, unidentified
MEKSSTAFVGMDVHKDSIDIAIADGREARLFGRVGGEAAALDGAVRKLRSAHRSPMFVYEAGPCGFWIYRRLRAQGLACMVVSPSMTPRRAGDRVKTDRRDALQLARLARAGELEPIYVPDARDEAVRDLVRAREDAVAMQRQARQLLQALLLRNEIRYVGKSSWTAAHRRWIAHLKLPDPAQQIAFEEYVQAVEEAGARLERLAATIAAQLEHWRWRPVIEALQALRGISGIHAVRIVAELGDLARFASARKLMGYLGLIPSEDSSGARRRQGSITKAGNSSARRAFIEAAWAYAHPARVSWVIARRHTGLAKSITDLAWKAQLRLCARFRRLAARGLNRNKIVVAIARELSGFVWAIGQSVKPV

SEQ ID NO: 380361 - protein, 431 aa, unidentified
MKNITKNRRLSEINTTTLIVAIDIGGYEHHARAFDWRGIEQQKKAFKFKNDRYGFESFLSWIERIQWMSGFTEVMVGLEPTGHYWFALFDYLLSRNLRLVITSPISVKQTKEAATTSASKSDPEDPKAIAHVMISGNYQEIYRPQGNYAELRKAYTLRNSVMEQKKATANRIHAWASTYFPEWHKVYSSVQRIGFLTLLRRAPLPSDIVKLGVHGILHHWHECQLLGGISRNRAERLVEEAKCSVGVTEASEMARVEIQMLLQHYDLQEAQLTRLDKRLEELVEQYPGGKRLMQIPGIDLQIAAGFLAEVGDIRRFPSAAQLQSYAGLDILRNSSGKRRGQSRISKRGRNKLRRIMFVAALCVVNHTSEFRAVHQYYKHRTKNPLKAMQSLIAVACKLLRVFHVMLTKDVDYDPDKVTCGLVVKSSEKQVA

SEQ ID NO: 380362 - protein, 409 aa, unidentified
MERVIERAAGLDVHKKTVTACLRVPGPAGDREQEVQTFGTTAAALLALRDWLQAHGITHVAMESTGVYWKPVYYVLEELFTCLLVNAAHVSKVPGRKTDVRDCEWLAQLLEHGLLRGSFVPPVAIRELRDLTRYRAVLVQDRTREANRLHKVLTDSGIQLASVASNVLGKSGRAMLTALVEGTTDPLVLADLAQGKLRRKLPALREALVGRFRKHHSLLVSHLLAHLDYLDEALDDLTVQIEEALRPFAAEAARLDAIPGVGARTAEVLIAELGVDMRQFPTARHVASWAGLCPGTHESAGKRRAVRTTKGNRWLRGALIEAALAAVNVRDSALAGRYRRLRPRCGHKKAIVAIAHKLLTTAYLLLAQGSTYRELGADYYDVRRKDRDVRRALHALERHGYRVSLEPAA

SEQ ID NO: 380363 - protein, 463 aa, unidentified
MARKNKGKKHKKPVRSLKTIQPDTAGIDLGSREHWVAGPPLKDDRPNVQRFGTTTPELLRLADWLKEQKVTTVAMESTGVYWIPLFEILDSRGFEVILANARQVSHVPGRKTDMLDCQWLQLLHACGLLRGSFRPSDDICRLRALLRERNTMIDQRSDWVRRIQKSLDQMNVCVHHAVSDITGVTGMTIIRAIVDGERDPRILAQMRDRRCQKSEKQIAEELTGNWRPEHLFNLRQAVKMYDQFCQVVAEYDAEILAYIKSLQPNVNDDESLPPPGSKSKASNIAKKGQEPMRQALYQLSGFDLTTIDGIGVDTAAVLISELGFDFSAFPDEAHFVSYLRLAPNLSISAGKKVPSKLKGTTTSRVAAALRMAALAVRNSKTALGAFYRRISRRKGASVAVFATARKLAQIIYRLVCHGQAYIDIGAKAYEAQFNNRRLKYYTKALNDMGYKVKPLTAAEPLTA

SEQ ID NO: 380364 - protein, 447 aa, unidentified
MGKSEQKALQIENSNAAGIDIGDTEHWVAVEPDRDNEPVRKFGTFTEDLVAIAKWLEKCGITTVAMESTGVYWIQLYLLLEEKGFEVFLVNAKHVKNVTGRKADDTDSQWIQRLHSYGLLNNSFQPEGEIRELRDYARQRKQLVQGAAREIQHMQKAMEQMNIKLHTVISDLTGVSGRRIVEAILAGNRNADYLAGLVDPRVKASQEEIIKSLTGYWRKEYLFALKQANDLYKYYNDKIIECDEEIEKALQGLIKEDIPSQEDVKKKVKKSRQKNHPSFNMSYYLEGIFGVDVTEIYGISSLTGLEILSETGCDMTKWKTYKHFVSWLGLAPNNKKSGGKLISSHIPKKKNRAGQAFRTAAASLTKSRNELGDFYRRIRSKAGPKQAVVATARKIAIIWYNMILKQEKFNPIGYDDYNEQYKQKKIKYLMKQLKQFGISPQQLTEVS

SEQ ID NO: 380365 - protein, 441 aa, unidentified
MPAMPAPPRVPAAPALPPVAAYVGIDWAATHHDIACQLAGASAVEAQRVPHTPEALQAWLAALAQRVAGQPVAVALETSRGPLAAALLDVPWIVLYPVNPRSLQRFREVFTPSGAKDDAPDARLLLELLLHHRAKLRPIRPAAEGLRALARLVEHRRALVGLRTRLVQQLQAALAEVFPQALTWAGADLSAPLAVAFLTRWPTLAALQAEPPAAVQRFYAAHHWRRPALLAARLRAIAAATPLTTDPALLSATTPYVQCLVAQLCTLAAGLAPLEEAIAARFAAEADAALFAALPGAGPALAPRLLVAFGSDRARFPAAADVQRAAGIAPITRRSGQTRQVTWRWQASTFLRQSFHEFAQHSIARSVWARAFYQQQRQRGRSAATAVRALAFKWIRILWRCWHDGVPYDEARYLRALRQRGSPLARLLPPDPAPAPAPAPT

SEQ ID NO: 380366 - protein, 327 aa, unidentified
MRYIGIDVSKATFMVAYPSKEKEYKTREFGNNAKGIHQFIHTLKEDDHCVMEATGYYSYLLLYLLNQANITTSMENALKVKNFARTMLSVTKTDKADAQLLSLYGERMRPAPFKMPPDSILLLKQKRAALRQFQKQLQANNNLRKSLEALPHRDAATFKYIDKISETLEKQIRKIEEDLVALTQKEFERQMQKLTSIKGIGASLAAALIIATGGFTYFDNAKQVSRYLGICPTYQQSGTSVNVKGHINRNGDSHLRSQLYVASWSMSLYNKECRNLYLRMKEKGKPGKLIMIAVANKVLRQCFAVVKHDTDYIDGFVSRKPNSSMEG

SEQ ID NO: 380367 - protein, 348 aa, unidentified
MRFYTKQHKFYCGIDLHARTMYICILDQTGKTVFHNNRKTSPEAFLQAIAPYRDDIVVAAECMFVWYWLADVCAQESIPFVLGHALYMKAIHGGKSKNDKIDSHKIATLLRGGTLPIAYVYPREMRATRDLLRRRNYLMRKRAELLAHIQNTNSQYNLPEFKKKIAYKANRQGVTDHFPDPAVQKSIETDLHLLDFYDRLLNDLELSIVQTAKKHDAHMWYLLRSVPGVGKILALILLYEIHDIHRFPRVQDFVSYSRLVKCPRESAGKKAGTKNSKIGNVHLKWAFSEAACLFLRGNERAQQYHDRLVNKHGKGKALSILAHKLGRAVYFMLKRKEPFNMETFFAQP

SEQ ID NO: 380368 - protein, 363 aa, unidentified
MKEEKRRYVGIDLGKREYTMAIISVKGKMILHKGKTSIQGRAALRKLLEKSDKIALEAGNLAFIMAREIQKAVGSEVRVLNSAKLPFIWDAPTKTDKEDAMKLAHLVEERRDEKLPIVPLPSEKEMERREVIANYGRETRDRTKAINRLHSLFVKQGHTEIARKNLATADRRLEAVAILTGQEREEAENILQHLDLYEKRIKELKGKIKKEAKTDEDMKRLQGIAGVGPVVAYAFVAHVGDGSRFSKGAQVSNYLGFVPRLDYSGTIQRQGHISKRGNGYLRGLLVQAAWSTVRSRNGGSLKERFQYLTMFQGKSKKKTIVSIGRRLAELMYSVLRNKSEYEIRPWKRPTSGRAALAGLARSA

SEQ ID NO: 380369 - protein, 362 aa, unidentified
MEYFAGLNVSIEETAICVVGDDGKVVLERSVATDPALIGEALKRYAGHLRRVGHEAGSLSPWLHAGLLEIGIPAVCLETRHVRAALSAQRKKTDANDALGIAHIMRTGWFRQAHIKTEGAYRIRLLLVQRRNLKRKFLDLENAIRHSQKVFGVRLGKVGRGGMEKAVRDAVAGDAMTAGLMECMLRARAALWAEYLVLNKLVVQIAMRDELCRRFMAIPGVGPVTALNFSSAIDDPVRFRRSRDVAAYFGLTSKRWQSGSSIDVKGRISKAGDPDVRRALYDAVSAMLTRFKGRDTIKSWGLHLAKTKCHAKARVAVARKLAVTMHAMWRDGTFYIGDPDASEADIAAWNAAKAQRLSYARS

SEQ ID NO: 380370 - protein, 339 aa, unidentified
MQVTTIGLDLAKNVFQVHGIDEHGEVAFNRALRRGQVLAFFERLEPCLIGIEACGTSHHWARELIKLGHNVKLIPPAYVKPYVKRGKSDAVDAAAICEAVTRPTMRFVEVKPPEQQAILAVHRTRDLIVRQRTQTINMLRAQLAEFGIVLPRGVYHALQFAKDCMNGEQPGLPKDAEEVVFDLCDQLLFLHSKILHLSRHMTQIAKREKRVALLRTIPGVGPITASAIVATVGSGKQFNNGREFAAWLGLTPLNKSSGGKERLGHISKMGDQYIRRLLVLGMTSRIRSIRSEPEKFDPWFADILSRKPSRVAAIAMANKTARMVWAVLIRNEPYKVRTV

SEQ ID NO: 380371 - protein, 341 aa, unidentified
MEYIGIDVHQRESQVCIVAEDGRVLLERRVRTRGERFTALLEGRDRARVVLEAATESEWVAQALEALGHEVIVADPNCAPMDATRSRRVKTDRRAARTLADACRLGAYRVTHRTAAAPRTVRAQRAVREALVRTRTRYISVLRAVLRRDGVRVPSGGAATFGQRVQTLPLSATQARLVAPLVAWLKPLNRQLAALEAQLARGVAAHAAARRLCTVPGVGPVTAAAVVATLDDVSRFASADQVAAYVGLVPRERSSGEQQRRGPLTKAGNSRVRWRLVQAAWAYWRSRATVRTVLRRWVERLAERRGKLRAVVARARRLTRILFAVWRDASVYEPARVGAAA

SEQ ID NO: 380372 - protein, 359 aa, unidentified
METVYCGVDLHYGKSTFRFLDETGTTKQAVEIRTEKAEIERLLNCYKTNGIAYAFEAGNMATYFHRIVSQMPNTQKIHVVHPYKFKVISESKHKNDKEDSLKLAKGLLKDYLPAPVYIKSEICRQIKFLLNIRRRMVGARAKLILQAKSVLRSLGVKESQRSLTTAKGFARVVGSLANEPFYRQMMETLSTECSMEAKKIEDTEQQIMTLINQNFPQEYELLNTIPGISFVTSATIISVADEIKRFERAGQFSSYCGLVPSEHSSGEKIRHGRITKEGVKELRWLFTQSAWVIIRFKKGRDACMDKMKKKFYRLSCKQKSTAKAVCAIARHLSRIVFGILKNNTPYCGDLTNKAKACCQ

SEQ ID NO: 380373 - protein, 400 aa, unidentified
MNRKTSKSRVDRTMPMMHPNAAAIDVGATLHMAAVRADRATEPVRSFGTFTTDLHRLVDWFTECGVETVVMESTSVYWIPIFELLDARGFTVFLVNARDAKHVPGRKTDVSDAQWLQRLHSYGLLRASFRPKGQIAELRAYVRQRERLLEYAASHIQHMQKALTEMNLQLHHVVADITGSTGLRIIRAILAGERDPEVLACLRHYSCHSSAETIAKALTGSYRTEHLFALEQALAFYDAYHEKASACDVRIEAVLKELCIHRGRGIGSVAPAPRRRHRTDQANALAFDVRAALFALLGKDITTIDGLGPYLSLKLVAECGDDLSSWPSAKHFSSWLGLAPSNKVSGGKMLSSRTRRSGGRAAALLRLAAVTVGRTDTALGAFYRRLSSRIGKANTNSASE

SEQ ID NO: 380374 - protein, 398 aa, unidentified
MKRILRIGMDVHSTNYTLCAMEPVIGEDDRIFANIQVTPDYKNILMFIENLKMKLGLDAEYDIQCGYEAGCLGYSLYNQLTAAGVKGVILAPTTMLTPQGQRVKTDARDALMIAQCLSYGGYHAVYIPTEEDDSVKEYLRMRDDHKTALKKIKQQINALCLRHGYHYEGTKWTIKHVAWLRKLELLPLYRETLDEYMASYDEQTAKLERFDKRIGELASQSSYEEKAKRLGCFLGIKTHTALSLLVETGDFSRFAKGSTYAAFLGLAPGENSSGETINRRGITKAGNRHLGQLLIEAARGICKGAIGHKSRELRARQSGNTPEVIAYADRANTRLRSRYYKLIRHGKKKNVAVAAVARELACFVWGMMTDNTGMKMAERNSKDSCQSRVLCTAGAAGP

SEQ ID NO: 380375 - protein, 337 aa, unidentified
MKYSGIDLHANNSVVTVTDEEDRVVAEKRLPNDLAKILCLLEPWRKEIAGVVVESTFNWYWLVDGLQAAGFKVHLANTTAIKKYEGLKHSGDEADARYLAHLLRLGILPTGTILPPEQRAVRDLARKRMQLVRSRTTHILAVENITARQHGARISSNQVKRLTAERIDQMALPDDVAFAIKSNVAVIATLSTQIDLLENRLQERIGERPEYGLLTSVPGIGRVLATTILLETGPIDRFSAPGNFASYARCVDSVRISNGKKKGEGNTKNGNKYLAWAFVEAANFALRYCAEAKRFYERKKAKTNNVVAIKALAHKLARACFHVLKERKPFDVTRCFA

SEQ ID NO: 380376 - protein, 338 aa, unidentified
MECPTIPRWFGVDVSKATFDIALYEEGSRKPPHDKFPRSRKGCRDCLGWLQKHLPPGHHPSLVMEATGGYGKEMALWLLAMDHALKVAIAQPVKVHHFAQTCGLANKTDLQDAIMLARFGELHKPPPFQPMSETYEKLRALTRERAAMVKAAIRLGNRNEIPSQSREAQKIRERMIANHEKAVADLEKAMKALIVGDPALSKDCRILQTIPGIADVVAPTLMGELGDLRDYPHPKTLPAYTGIAPKLRDSGTSVHETAHMTKHGSARVRHVLYLAAMASLRGNNTFSRSYNHLVAEGKPPMVALGAVMRKILVVARVLLITEKNYDPNYVKNPPSQEG

SEQ ID NO: 380377 - protein, 341 aa, unidentified
METYYVGLDVSKDETAICIRGQDGRIKLAVKKVTDPDAIAGVLGRTGLHIACVVMETGRMANWLYHELELRGVPVVCVDARQAHAVLSQMHNKTDANDAAMLADLARTGFYRQIVVKSPLAQKRRALLRAREVAIKSRMNVENTIRGLLASFGVRLPKQLSTFEQRILDAINRAPMLADIILPLLRLRTEALRQAAQLSKVMLSHARQDEACQRLMTIPGVGAVSAVTFVATIDVPERFRRSRSVGAYIGLTSRRHQSGGMDYGGRISRRGDRMLRTVLYEAANSLLCRAKSGTGQHLKDWALALKRRTSHTRAVVALARKLSVIMHALWRDGTVFEMKEA

SEQ ID NO: 380378 - protein, 345 aa, unidentified
MKKVMAGIDLHSNNLVIGLVDSDGKRVGQRKLPCQLSEVVKFLSPFRKRLAQVAVESTYNWYWLVDGLKALNYPVVLANPAAMEQYNGIKHADDTNDAFFLAELLRLNILPTGYIYDSQLRPVRDLLRRRLLLVHQRTSLMLSFKSLYTRTTGEEMLLGRLKQLEVKEAQSLYKHPANQLIAGLQIKHIEELTESIERIEKAVLGSARELPCYAKLTTLPGVGRILGMTITMEVGEIKRFAGPGQFASYCRTVEAKSLSNDRKKGANNSKCGNKYLAWAFVEAANFARRHDEQCRRWFDRKAAKSGNVLPTKALACKLAKAAWYLMAEGTDYDAGRMFGAPAKTS

SEQ ID NO: 380379 - protein, 329 aa, unidentified
MIGIDISTERLDIADSQLGIDSEVEYSVDAIQSKITKRIKEPSETLVVCEATGGLEYILVDALHDANVDVVVANPARVRDFAKGHGYFEKSDKLDARMLQLYGQQVKVSLAKPRTMEERNFIALTRRRTQLLQLISQESNRLCRCMDAQTITFVKDMLQLLKSQLKSVNSAIETSLEKQSGTNPTIDIIRSVPGVGVVMTSTLIAELPELGSLSRAKIAKLVGVAPMIKQSGKSDGKRRARGGRGNVRRILYMAALVATQNNSVIKRFYVKLLASGKPKKLALVACMRKLLTILNDMVRHQKKWDDTKKSVAGSIVSKGPAPAHVLDNN

SEQ ID NO: 380380 - protein, 374 aa, unidentified
MNFIGIDLHTNKFTCCYRDEQSSVENPKKGKKIITFPIDASGLTAFYKTLTEDTYVLVEATITTFSFVRLFKDLVKDVLIANTYELKQISLARKNTDKIDADILCRILKAQVLSGERMITAVVLPPVEIQELRSLFTTYRLLKKQNTQFKNRIHSLLKEQLHGFTKEEIFSDKSRVKIRKISPGTAMNYQVNMLLNMLEQLEVQIEELKNEVLAHAAPFMKQIEILTSLKGISVFTAIAIIADIIEISRFRNSKAFTSYLRSAPKVSNSNTSVSIKGTNKKGRKLAATLLAQSLNHVLDASEKLQRWYDKKCENTKPGKVRTGLRRRVFAEIFQMLKKGEYHYGREPEKHKAKVAQYQRFLEKQKKGGIFEKVA

SEQ ID NO: 380381 - protein, 404 aa, unidentified
MWYAGIDWADTHHDALVLDEQGHQRGSLRVDHTPEGLAKLNTFLETISGPLEKEQMACIIETTHGLLIAFLLEAGWPVYPVNPRTVDRRRSASGAKTDSIDAYLLAKTGRADLADLHRLTPDSELVQELKTLTRDQDGLIQTQTRLVNQLTACLKTYYPVALQLFTKLQQHSTLIFLQTYPTPQAALAASVEQITEVLKHAGHTTAKKVAPTIFQTLHQPQLTANAITVRTKSRLMLALVAQLLPLVEQISAYEKEIARLFLRHEDNEVFSSLPGAGKRLAPRRLPEIGDEPTRYADAASLQALAGTSPVLFQSGNYAKAHRRLGCIKPLRNALHQFAWESTQQQGWARDYYQRKRAEGKSHSVAVRALSNVWARIIFAMLTKHELYDSARFEAAQRLHARRVA

SEQ ID NO: 380382 - protein, 336 aa, unidentified
MNFVGIDLHKKTISVCVVNQERKVLKRATLYCVEAQRIADFFRGLGAFTAVVEATASYEWLWQLLEPLAQRLVLAHPKKLRVIAESKNKSDRLDAQVLAEFLALDMVPEAYRPTPRQRQHRALVRQRQQIRRALVRARNRLRHLLGNYNADRRDLFTAAGLAYLAEVPVSAADRFVRDQLLATWEHHREQLAALTKELAALAKKAPAAERAARECLASAPGVGPVTVDVLISEIGDIGRFRSNKKVMAYAGLVPGQRESAGRKKELGITKEGSRLLRWAMVQAAWRVVRPAGRWRLTFEQLRKRRGAKKAIVAVARRLLGVLATLWRTGQRYRLAL

SEQ ID NO: 380383 - protein, 338 aa, unidentified
MRTAYIGMDIHKNFIQAAAMDKHGNILKEQRIKSDINGVRKFINNLNCEKIKAAIEATCTWYHVYETLSSLGVDTTLVNVRRTKVIAESKIKTDKLDARSIAHCLRTGFIATAYIPPKEIIEQRDILRHSISLRKDINRFKNKIHAILLRNGVKHKFSDLFGTEGMNILRNLKLKDSEQYRLDSYLTIVETLLQERKQTQKKIEKLCKSNKQAMLLTSIPGISYYSAMVILTEVGEFSRFSNPKKLCNYAGLAPRTIQSGSQVFHGKILKECNQNIKWILVQCAHVHIRYCQNSTATHLYNRVMRKKGKAKATVAASRKMLTIMWHMLMNGERFKYSD

SEQ ID NO: 380384 - protein, 318 aa, unidentified
MNTNTLQNINVGVDTGKSQLDIYIRPLDIYFTVPNTDKGITDAIKTIKKHKPQRVVIEATGRLEMPFILACDKAKLPYVVANPLRIKRFAEAIGQRAKNDRLDAELIAHYAERVQPELTKLKSENMRLMSDLVTRRNQLLTMQTMERNRLQILPKNISSTITPILTALKNQLEKVEAKIARLIESNPEYQAKSTILQSMPGVGKVLAASLISNVPELGFITNKQASSLIGVAPLTRESGRFKGKRMIKGGRPQVRTVMYMAMMSAIQCNPVFKATYERLLAAGKPKKVAIVACMRKMVVTLNSMLRDGAMWDKDSVKS

SEQ ID NO: 380385 - protein, 424 aa, unidentified
MTYRIAGIDVHKKVLAVVVADVASEGEVQFERLTFWTAPEQLKVLAEWCVEYGVQEVVMESTAQYWKPVWEALERYWQPVVRTAADATPMTGSLHLAQAQSNRGRGGRKNDFGDAERLVRRHVAQELVLSFVPSAEQRLWRTVTRQKQQRVVARVRLRNPMEAFLEEAHIKLSSLVSDLFGQSGRRMLRALAEGKTDPAEIALLGDHALRATQAQLRDALSAARELHPVYRRLLNQSLEDLRVLDQQIQELDQEIAALLKQHQDAVQRLAEVPGLGPDSAQQIIAEIGPTAAVFPSAKDLASWVGVCPGDDISAGQSHSTKSPKGNKNMRRILNQAAHAAVKAKGSIFEVVFQRLRRGLDYKEAIWAIAHRLCRLIWLLLRRGVPYEERGPAVSAASKQMRASRMMRELRRMGYRVDPPQPQNA

SEQ ID NO: 380386 - protein, 389 aa, unidentified
MGWTQPHYLKRPLKGQDGKLDHPNRGSEEGPVMKVTTIGIDLAKDVFGLHGVDGEGRVTFKRRLVRSRLLEFLSQLPRCLVGLEACSSAHYWAREIERLGHRVRLMSPRFVKPYRKSDKNDANDAEAICEAVTRASMRFVPIKSEAQHEVQALHRVREQLLKSRTALVNQVRGLLAEHGIVAPQGIARARRLLLEILADPERHGLSGLFRETLQEIAERLRFFDERVGAYDDRIERVFKEDERCRRLAKVEGVGPLVATAVVAAVGNASEFKSGRELSAWLGLVPRQHSSGNRSQLLGISKRGDRYLRTILIHGARAALRRADHKSDQRSRWAMRIKLARGYNKAAVALANKNARIIWALLTRGENYRPPAISVASPTADRISLTQVQA

SEQ ID NO: 380387 - protein, 352 aa, unidentified
MTEHTKEQCITVIGIDLAKRSFHLCGMDAQGRRVFSKQVSRAKLAQELANRPPCRVAMEACGSAHYWARRFQSYGHEVKLIAPQFVKPFVKSNKNDAADAEAIAEAAQRPTMRFVPIKSVEQQDLQAIHRLRSQAVAQRTAQVNQIRGLLAEYGVIIPQGRAHVGPCLAEILENAENGLSALFRASLQGLADERRHLDARVAAYDAQIAALARESEPAQRLMTIPGIGPLVATALIAAIGSDPRLFGNGRSLAAFLGLVPRQHSTGGRDRLLGISKRGDTYLRQLLIHGARAVMRWVERKADALSRWATALRARRHTNIAVVALANKLARIAYAVLTSGQPYDPARGAVSNA

SEQ ID NO: 380388 - protein, 311 aa, unidentified
MEHSCVVGIDVSKDHLDVHLCPTGAAFRVAHDEAGLVTLIARIRPLSPTVVALEATGGYEVTVAATLAGAGLPVAVVNPRQIRDFARATGQLAKTDVLDARVIALFAAAVRPAARPVPDQQADALGELVARRRQLVDMLGAEHNRRRLLRDPRLQGNVDAHITWLEEALRRLDDDLRTLIRATPLWRAAEDLLRSVPGIGPITACTLIADLPELGQLDRRRIAALVGLAPIARDSGAFRGRRMIMGGRSHIRRVLYMATLAAITHNPVIRAFHQRLVAAGRPGKVALIAAMRKLLTILNAMLRDRRPWLPA

SEQ ID NO: 380389 - protein, 451 aa, unidentified
MAKRKEKQERRSMVLEPDAAGIDIGAEEIYVAVPPDRDEESTRRFSSFTGDLHALADWLGRCRIQTVAMESTGVYWIPLFQILEERGFKVYLVNAHYLKSVPGRKSDVSDCQWIQYLHSVGLLRASFRPPEAICALRTLWRHRGSLLEMAAEHILHMQKALSQMNVQLHHVLSDITGTSGQAILDAILSGQRDPVALAQLCHRRVQSPRDKVAQALVGDYRPEHLFTLKQSLEGYRYYQKLILELDQETARLMQALPSATEDPIPPRTKPTAYHRKGNDPRFDLRSELYRIAGVDLTDIPGISAATAQVMLTEVGTDVSRFRHASAFASWLGLCPEKRISGGKVLSCKTRQVKHRAATALRMGANSLCRAKGYFGEFFRRMRAKLGTAQAITATAHKIARILYHVLLTKEPYSETVFHRCDEQAQQRAEMRLRKQAARLGFQLLPIPATGE

SEQ ID NO: 380390 - protein, 340 aa, unidentified
MLYCGGDLHAKSSNFCLVNRRGKRMAEGLVPSSRRGFTTLMASGKGEEIRVVLEASTRSRWAAGVLEGLGAEVIVVDPRKVRVIAETKHKTDRTDARILADLLRTGALPPALWRAPRGIRELRDQIRLRWGLVQQRSILLVRTRSMLASVGVSLGQRALAREATWDRILQRREVTPKMRRLLEILRQRVEALSSAITEVEREYAPRLEDPDVQRLQGIPGVGPVVALTTLASLGDPGRFRDSRKAAAYTGLIPSERSSGGHQRRGHITKQGPSELRRVWIQAANAALRMRDHPLKAWAQRLIYRRGRAVAVVALARRMFRWAFALWRDGKSFDARLATAC

SEQ ID NO: 380391 - protein, 520 aa, unidentified
MASTRTRRRCSRRRTPVSVGKPRGVLHPRVQQVGPEHFGIVCFDCHKARSKFLLADFYGRQLIPPTVVTHNRPDLDSAIAQIRQAFEQHQVRDGVVAIERTGRYHRLVQRAFAAAGFETRILHPFVTKQYRQPVDPGNKTDDADLAAIHRATVTGCALLEATRDEAWTTLQLLIRHRRDLVRKGAALNCQIRDHLEAAVPGYAACFDELWESPLPWHLLRHYATARQLHAAGLTTLCHCLRQAGIRFQQRTLQKVLGWAEQAAPGDVAADQHLRIALALYDDRQRKTQEIHALERDIAGRLVQTPYVLLLSFPGINVVSAADFAGEMGPMEHYANPKCITGRAGLRPSRYQSDQVDKANGPLVRNANRALRATILGIADNLILCNHHFQHLAIQWAHQGKDPRDIRVRVGLRLCRIAFQMVAGRQVFRHPCIQGRHYIVDKLSAFHREHDTPIAELLRDLQAASGQVPQREHAAEARPLHEELRRIQEGRRRGPQPLADILPIVLARLGVGVVQSEESGE

SEQ ID NO: 380392 - protein, 412 aa, unidentified
MEVMYPRCAGLDVHKETVVACVRIVEGGDVSRSVRTFATTTASLIELGEWLEVNGCTHVAMEATGVYWKPVWQVLVDSSLELVLANAAQVKNVPGRKSDVNDATWVSELLAHGLVRASFVPEPAVQQLRGLLRTRKQLVREKASHVQRLQKTLEEANIKIESVLSDVMGCSGRAMIQALIDGESDPAKLAALAHWKVCASAATLRAALHGRIKRHHRFLLRLHLQQVDALDAAIAEIDREADAGLACFRDAVKQLSTIPGVSELSAQVILSEIGTDMGRFATAAHLRSWAGLCPRNDESAGKRRSTRLRRGAPWLKAMLVQCAWAAARTKATYLHAQFVRLRGRRGPKKAICAVAASILTAAYHMLRDGTFYEDLGAVHFDRRRPETQARRLVKRLAELGFSVELKPVAAVA

SEQ ID NO: 380393 - protein, 438 aa, unidentified
MSNKVIFNLDDLFISVGIDVGADFSWMSIALPNQQFVGKPYKILHNSIDSLTTAVSKIKEAEELYSLESRIFLESTGIYHYPLFCYLRDKGFNCSVINPIITKNSTNINIRKVHNDRFDSKKAALVGLKPDLKVSLMPSDLALNCRNLCREYYDLMDNRSAYVNKLQGELRMAFPQYLGIFSKVTINTSLTLLETYTSPSAFLEADKQEIINIIKSTARFGLTYAQNKYNAIIQAATDANQFGYIIDSNIKRIRLYISFIRKYDEEINNILESLHELVDANEDADFVKQIHLIETFKGAGFLSAVSIMGEIGDFSAFSKPKQLFAYFGLDPAVKQSGKFEGTKVQMSKRGSAIARRVIHALTLQSISISRNGEAKNPVLREYYLKKCDSKPKLVAMGAVSHKVCNMIFAILRDNKPFKIIAPQEHIKQYNSAKCDIAA

SEQ ID NO: 380394 - protein, 388 aa, unidentified
MQIVTDRSLAPTAIRTDLGAIFVSLELSRSTWLVTSLSPGGGEKMSKHMIRSGDVAGLWSRFSQLKDKALDRTGQVVPIIVIQEAGLDGFWIHRLLQSERIESHVVDPASIATSRRRRRAKTDKIDGEALVRALLAYKRGEPRVCTMVRAPTPQEEDRRRICRERKTLTAERVEHVNRIKGLLFAQGISDYEPLLRKRWERLEELRTGDGRPLPEHLKAQIRRELDRLELTLQQIKAVETERNAMLSPSDDGTPAPGAMLKNLKGIGPEFAGVLWSEGLFRSFSNRRQVAAYAGLAPTPWRSGSVAHEQGVSKAGNPRLRTTMIQLAWLWVRHQPRSILTLWFHQRTQLNGGRVRKVLIVALARKLLIAFWKYVTAGVVLEGAETTSA

SEQ ID NO: 380395 - protein, 350 aa, unidentified
MNATTYGLDIAKSVFQLYWVDPGSGEVFNRRFSRDQLIRFLSNREPGRVALEACSGAHWWARKIVSLGHQAILLHAKYVRPFVQTNKTDAADARAIWTAAQQPGMRTVAIKSEAQQAILSLHRIRSALVDTRTRQVNQIRGLLGEYGLHFRYGRKALMNELRARIAEIEQTVPPLIWRALQRQMAHLRQLETDIAEAERENLNWMKADPDAQTLATINDIGPLTATATVGVMGSPDAFRSGRTFAASLGLVPAQTGSGGKIRLGHISKRGDPYLRKLFIHGARIVVTRSKQRPEWVEALLKRRPVNVVIVALANKMARTAWALLAHGQTYDRQHVSVRPRASGPHAVESI

SEQ ID NO: 380396 - protein, 319 aa, unidentified
MNNIILGIDISKKTFDVALLNNHKVNTKKFSNDSKGFSTLKQWLVSKSIHDAHACMEATGGYEVSLAEYLYGNHFKVSVVNPACVKGFSMSRLSRVKTDKADCELIAYFCQAIQPDLWQPVPSHVQELQQWVRRLDSLITNKHQETRRLEGACNIISANIRIHIDFLDKQIEEIEELIFSHIKKHQDLNDRNTLLASIPGIGEKTIGVILAFLNVENFNSAKQLAAFVGLNPKPRQSGSSLRGVGRISKTGAANLRKAFYMPALTAMRFNPIIKNFSERLSNTGKSKMVIVIAAMRKLLHIIYGVLKNKTPFNRDIKTI

SEQ ID NO: 380397 - protein, 336 aa, unidentified
MKIKAIGLDLAKNVFQVHGVDEQDRPVLRRALKRAQVVEFFTRLEACLVGMEACASAHFWARKLQGLGHTVRLIAPKFVKPYVKTNKNDARDAEAICEALLRPSMRFVAVKTVEQQGLLALHRLRRGLIDSRTALVNQLRGLLAEFGVVVGTGRTRFEQALPRLIQDEHEEVPVLLREVLEPMREQLLAINRRIAELETRIAAWHRQNPASRRAAEVPGVGLLTATAAVATIGDPKVFDSGRGFAAWLGITPGQHGSGGKQRLLGISKRGDTSLRTLFIHGARSVIRAHRPGTNAWLDELLVRRPKNVAVVALAHRNARTVWALLASGEHYTPLAA

SEQ ID NO: 380398 - protein, 342 aa, unidentified
MKLFIGLDVSLAKTAACVLDEHGRIVREAETSSDPEALARFAKHQPGEIAAIGLEAGPLSQWLHRGLAEAGLDAVLMETRQVKGALKAMPIKTDRRDAEGIARLLHLGWFRPVHCKSVSAQEVRALLSARKALQEGMIALEMSLRGLLRNFGLKVGTISRGRFEARIRELAHGNAMLEATAGPMLRARASLRKELAGLERQVRQLAKDDPVCRLLMTMPGIGAVVALTFKSAVDDPARFTSSKKVGPWAGLTPSRQQSGERDITGGITKAGDVGLRRALCQAATVMLHRGRASWLRTWAARVAKRRGNKRAMVALARRIAVVLHRMWRDGTEFQPDAAPKVA

SEQ ID NO: 380399 - protein, 330 aa, unidentified
MKNEFIGIDVSKGTLDVHLYCGNRHQSFKNNVDGRQSLIDWVIEKTNLKLVELRFCLEHTGIYSQPLCELLEQMDLTYYLISGLELKRSMGIKRGKNDKVDAKRIAQYAFLRRDDLIAYKMPGQTVITLKKLLGQRSKLVRQRAGYKASIKEEKQMYPSTQKSFVIESSGAIIVFLTLQIKLIEKEIVSLIKSDQEILKTYENIQTIKGVGPILATTMIAHTNNFKSFQNWRKFACYAGIAPFEHSSGTSYRGRTRISVLGNRDLKTILSSAAATAILHDSQLKMYYNKRLKEGKNKMSTLNIIRNKIVSRIFAVTKRQTPYVETFKFAA

SEQ ID NO: 380400 - protein, 354 aa, unidentified
MSDDKYIAFDVHQATTVTSVLNAAGREVNTSIIAAKAQPILSFVEGLRGKLHLTFEEGMYSAWLYDLLAGRVAELVVCDPRHNALLKEGNKTDAGDARKLAELLRAGMLRAVYHGSRSLRSLQELACSYEALVQDTTRVMNRIKAFYRSRGIDCAGRGVYTRKQRASWLERLPAGASRLRGELLHDQLDHLRSLRRKARRALLEESRKHTVAARLGEIPGLGPLRVALLIARVQTPHRFRSRRNFWTYVGLGLVRRGSAEYGLVGGRVVRRARAVNPRGLNPNHRPELKEIFKPAALTAIRRLGPFKDYYDPRAQQGVDPAILRVTVARKLAALTLSLWKKGGHYRAEGLKPQA

SEQ ID NO: 380401 - protein, 508 aa, unidentified
MRRAGIDIALRAAHKAAVYDDGERRGRPFPVPQTRAGIDELVRRTTAGQQGACEFVMEPTGLAWLPLAAELSRQGHKVYMPKPQKTHALRKFLAQHAKTDGIDACAAALVRHVDTDTHELRVPTSTVTTLRLVVKQRARLVVEAAKAKGRIQSYLVLANPHLGKALGRDGTSEVATAFLRRHLDPFEVAARGKAELRRFWQRQSHGRFNEAQLEAVWSACVTTRDLYAALCNGKRLPFDYRSLQLLVRQSLEHIEFLEGQLDELDAVVARCYAELDPERFLEREVCGFGPTIAAAVEAFAGDIERFGSVKRYAAFFGITPRTKQTGAAGEKPRQRMTKGGHNLLKQYVFLAAETARRHDPELANTYAHAIARGKHHYSAVIIVAHQLVRRVYGLLKARAAARAAGTAPPSYRLQAPDGRPLSKTAARSFVAKHYPSKAAKAAAKRAAQTAPRSRSLPQDTGSSEDAAKAVAAALPSALVAEPSPCGKSEDNPVSNISDSQANISLDET

SEQ ID NO: 380402 - protein, 331 aa, unidentified
MTITTVGIDLAKNVFAVHCVDQHGKTVLVKPKVSRAALPELIASLPPCVIGMEACSGAHYWARLFRQYGHEPRLMAAKFVSPYRMAGKSGKNDAADAQAICEAVRRPHMRFVPVKDESQQAMQCLHRIRQGFIEEKTATYNRLRGLISEFGVIAPQSTDALRHMVSEQKSSLPLQVQQCVNDLLEHIDRIEDNITEYDRILSRMAKTDHRSQRLMELKGIGPTTACALVASIGNAHDFKNGRQLAAWLGLTPSQYSSGGKSKLGRITKAGDSYLRTLLVQGARSVLIGAEKRTDLFSRWVCSLVDRRGYWRAVVAIAAKNARLCWASVSVV

SEQ ID NO: 380403 - protein, 281 aa, unidentified
MMIIGCDLHTRYQQIAMVDTATGELVERRLEHESGEARTFYAGLKDAVRVGIEATGHTQWFEAMLSELGHELWMGDAAKIRAAVVRKQKTDARDAAHLLDMLCTNRFPKIWRPSLAERDLRQLLWHRQKLVWMWGAVKNQMHALAMGEGVCRKKKLFTAKGRKELEGLMLGPWASYRRQELLRMFDELQGSVKKLDQAVELAARSQPLAVRLMTHPGVGPITSLAFVLIIGPIERFERSNQVVSYLGLNPQEHSSGGRQRLGVDTILRFSYYYQIVTDTIR

SEQ ID NO: 380404 - protein, 346 aa, unidentified
MNQIIRIGMDTSKHFFQLHGVDAAEPPVLRRKLRRNEMLAFFGKLPATVIGMEACGAAHYWGRVLREFGHTVKLIAPQHVKPYIKRNKNDGRDAEGLCEAMSRPTMQFVPVKTEEQQAALMLAGVRQQLIARRTQLCNGIRGYAAEFGITAAKGLDKIEPLLAEIAQDQSLPALVRGLFAIQGRDYAQLQVELKAIELRLMAWHRANADSRRLAKIPGIGPIGATTLVMKTTNPRAFPSARHFAAWLGLTPKDHSTAGKTRLGKITRAGDEMLRSVLVAGATAVIQQAKNGRGRPSPWLLALLARKPPKLAAVALANKNARIAWKLMMTGESYDGARMPGASALAA

SEQ ID NO: 380405 - protein, 316 aa, unidentified
MGKSSKLYVGMDVHKDSIDIATGDEGIGEVRHYGAIGGDLASVSRLARKLESTGKVLVFVYEAGPCGFGIYRMLRDRGHECWVVSPGMTPRSNADRVKTDRRDCLKLCRLARAGELTPIHVPDETDEAMRDLVRSREDAVVMQRQARQRLGALLLRNDVRYNGKTAWSPAHRRWIAELKLPHAAQHIAFEEYAQGVDEAGKRIERLEAAIGDELSRWRWRPVVAALEAFRGIRTIHAVRLVAELGDLTRFAAARHLMGYLGLVPSENSSGNRRRQGAITKTGNSSARGLNRNKIIVAVARELSGFVWALGQQVKPL

SEQ ID NO: 380406 - protein, 406 aa, unidentified
MHSPTGTTYAGIDWATGSHAVCVIDDHGTVLERSEVEHTGVGLRTLVRRLDSRRVSGVAIERPDGPVVDALVEAGLQVIVIASRHVKALRTRYGLAGNKDDRADAHILADVLRTDGHRLRPLVPDSEATMALRASVRARKDLVHTRVGLVQQLAAHLALVFPGALGLFKKLESPIAVAFLTRFPSARQAAWLSPRRFDAWLARQGYTGRRSGADLHARMVAAPAGVSGPEAESLAAITLGYVRAITALCQQIRLLEERIAEQLSGHPDGAIFTSLPRSGSVRAATLLAEIGDCRERFPAPEALACLAGAAPSTRRSGQHHAVTFRYACDKKLRDALIDFAGGSRFDNVWAADLYDRAIARGKRHPHAVRILARAWVYVIWRCWQDSVPYRPERHQALQQVTLARAA

SEQ ID NO: 380407 - protein, 415 aa, unidentified
MSKILNIGIDISLRKAAVALVDQSGVRLGKPFEVPNTLPGAKDLEERILALLKAGGFECMRLGMESTGLYGFHLAEYFTASSQLAPWRPLIYMINAKRIHDFKGAFSAADKTDLVDAEVIAEFIRFGRLPEPYEGQASYLPLKRLVRYRYHIVRTIQRETQYFVSHLFLGFPGWVQNKPISSLGASARAVLTEFTPDELVEKPLEELALFIAKAGKNRSPDPEALAAAVQQAARESYRIRPELGKSVQLILASILRNIQALRACLKEIDAAIAGAGKGFVNPLLSVPGIGPVYASGITASIGNIRRFSSDEPLAKMAGLVWPRSQSGEFEAQDRRMSRSADRYLRYYLVEAANSLRVHNEEYRSYYQKKYQEVRTHKHKRALVLTARKLVRLVYALLAQNQLYDPARRFQSASAG

SEQ ID NO: 380408 - protein, 377 aa, unidentified
MHSENIAAYIGLDVHKETLAVAIAAPERLGEVRYYGTINNEAQAVRRLFQKLQGLYGNILSCYEAGPCGFGLYHQLTAMNIKCQVIAPSRIPKSPTDRIKNDHRDAISLARLLRAGELTPVWIPDLTHEAMRDLIRARAAAKRDSRVARQRILSMLLRTDKRYAGKHWTGKHRTWLANQSFSQPSQQIAFQHYCQSLEQIEDRILQLDQEISCLLPEWSLCNLVCQLQALKGVGQLIAITLVAELGDFSRFSNPKQLMAFLGLVPGEYSSGNSIRPRGITKVGNSELRRLLYEAAWSYRTPAKVGAWLIYYRPDSVTQYSKDIAWKAQQRLCSRYRTLTAKGKKSQVAITAVARELTGFMWDIALAAQSSFSQQKQN

SEQ ID NO: 380409 - protein, 336 aa, unidentified
MRYIGVDLHTTQITVCYLTGTQEFSIRKYQLFEMEKFISGLEPTDEIAVEATCNTKWFAAQVRAAVKRVVLVNPRAFEVVKNSVKKTDKNDAINLARFLKADLLPEVRAKREEAGRVQSLVNTRTKLVRLKTSLINKIHALYVANGRKLKKTGLSSEKGLGHVLEEKWSAIEAIELEIIVEQIRSLKQSIRKLEQAINEEAGKLKGFANLQSVAGIGSLSAGILLAVIGEITDFASVDKLASYFGIVPRVSNSNETVHHGRITKCGSKTGRTTLVQCSLAALKKSEYLKKYYDQIKARRGHGKAKIALARKYLGIIYNTLMNDWVFADFNNFELAE

SEQ ID NO: 380410 - protein, 403 aa, unidentified
MSDMITNHADTDVFIGIDVGKHNHHAVAVDRDGKQLLSKALPQNETKLKALLTRLAKHGQLLVVVDQPATIGALPIAVAQAEGFAVAYLPGLAMRRIADLHPGEAKTDARDAGIIAEAARTMPQTLRGIRAADENVAELSMLCGYDDDLAKQATATSNRIRGLFTQIHPGLETVIGPHLDHPAMLALLAKYPTPKALKHAGKHRVETLLRKQAPRAWKRWATAIFTALNGQTVEVSGTDAAGLVLPELATSLAQTRTSRDDVLARIEELVESHPLFGLLTSMPAVGVRTAARILTEVVGKDFESAGHLASYAGLAPVTWRSGTSIRGDHSSRRGNKILKRALFLSAFAALKDPLSKAYYDKKRAEHKKHNQALIALARRRCNVLYAMLRDGAYFHTPEAATAA

SEQ ID NO: 380411 - protein, 435 aa, unidentified
MRLTEYGRNPNKRKEYVHQPDLLLVGVDVSKAKHSACLGTQTTVSCRKLEFTHTREGFRRFEQTLRAHLVKNKCQRMLIAMEPSGIYWQALYERLKSCGYGVCLVHCQAVRNNRKTMQDGTSKTDEKDAYSIFDLLRQGKFFLPVDRDPELQAAYRLMRRHMALKKRVSQLRNHLRAAIHLTFPELNPLVKDLTQPTALRFLQVNPTPTSILRNGQRHFLETWQPRSRCGQWRPEKFQQLYDLAQHSIGLSDPYGIDEFEIKALAHDLADALAKQQLWLDKAIELLAPRADFQVLMQLPRIGQPTAAAILTAIGDLSTYTNGKQLVKLAGLDIRLFESGSSIRKLPKISHVGSAYLRYWLYHYALRLVAHEPHFTAYYQRRKHQSPGKGAGQRALIAVCDKTIRMIYRILTDYAPYDPKKDQSIAAYYAAQRKAA

SEQ ID NO: 380412 - protein, 385 aa, unidentified
MTNLDHTDTPAAVDYATVYVAFELSKAKWMLGVILPGAKKLSRYTITGGDVAALAARLAEWRKKAALGGKAVRILSCYEAGFDGHWLHRWLTDQGVINREIDPSSIEVSRRARRAKTDRIDLERMMRALLDLLRGEPQACRVVHVPSVEDEDRKRRSRARERLLKERTAHTNRIKGLLHGQGIRDAFPLKPGFVKNLESVRTGDGRLLPPGLKQEIVHEHERLSLVNKQLALLEASSKAERRAAVPGSAEARIVQLATLKGIGPVGGQRLVHEVFYRDFDNRRQVGSYIGLTATPYNSGSSVREQGIGKAGNRRARETAIEIAWLWLSHQPDSELSSWFRKRVGDVKGRIRRIAIVAMTRKLMVALWRYLNTGVVPVGAVLRPTS

SEQ ID NO: 380413 - protein, 452 aa, unidentified
MGGALVHSDSNGLVMVGIDAAVVANHRVVVRRPRAGEPGEVIDDFEASPTLAGLDRLSARLAAYSGAVAVAEPTSMTWLPLSVALDRAGVSLSLVGNRHSARLRAALSGKDKSDVIDAQVLSRALELFSLEAARIPDASELALRRAVQRRHKTLIEANRWYRRLLSLARWAFPDVWAACGGSRATATAVLTRWPHLNQLSRARLVTIADVVAANTKSVADVNRRAERIRYAARGWADFWDGHLDLEALGWETAELLADVTSAQARLARADTVTATRWESLWGDDNLLLSVPGMGPRTAPVVRGFFGDATQFPTSKEAQAYVGLNPSNWSSGLTSQPSRAITKEGPEELRLAFYLAANAARTVDPQLAWFYRKLMCERGHCHTEANCAVARKLVARTWTTLVSGSPYELRDLDNQPITRRHAKELARSLAVPDEVRRRSRARSAATRRGRLTS

SEQ ID NO: 380414 - protein, 456 aa, unidentified
MPEKEKRPRARLSSGLSTINEHAAGLDVGSTFHVVAVRADQDYEPVRTFRSFSGDLHQMADWLTSVGIKTIAMESTGVYWIPVFEILEARGFEVLLVNARAVKNVPGRKTDVNDAQWLQQLHQYGLLRGSFHPRAEVAQLRAYLRLREQMVEYAAAHVQHMQKALMQMNVQLHHVVSDITGATGLRIVRAIVAGNHGPEELARYRDVRCGASEETIREALTGNYRAEHVFGLKQALELWDFHQAKVAECDFEIEAVLKSLNETRVEPGRPIPAVRHAKARNEPKFDVRSALYTLLGADLSQIHGFGPYTVLRLVAECGDDMNKWPTAKHFTSWLTLAPGNKISGGRLLSSKTRRSSNRAAALLRIAAVNIGKTQTSLGAFYRRLSARVGKAKAVTATARKLAVLFYRALRFGLAYADPGAEYYEERYRRRVFENLQRRARGLGFTLVETTKSSGVS

SEQ ID NO: 380415 - protein, 403 aa, unidentified
MMNAVGIDVSKGRSMVAVARPGEVVARPFIVSHTQSGIHELIDQLSSLDGETRIVMEHTGRYYEPMAQRLSDAGFFVSAVNPKLIKDYGHNSLRKVKTDKADAKKIACYTLDNWLDLRQYTGMDTLRKQLKTMNTQLDFFTKQKTAAKNNLIALLDQTYPGVNAFFNSPVRSDGSQKWVDFAKSFWHVDCVRTLSAASFMQRYQKWCHRHGYNYQPDKAKAIFDTSTELIAMLPKNAMNKMLVMQGIDQLNAVSAIIEQLKAEMNTLASDLPEYSVVMAMPGVGPSLGPQIMAEIGDISRFPHKSALTAFAGVDPGANQSGDFEAKSNHASKRGSPRLRKALFMVMDCLIKTSPPNDPVYCFMDKKRSEGKPYLVYMTAGANKFLRIYYGRVKAYLASLSPAE

SEQ ID NO: 380416 - protein, 337 aa, unidentified
MEYFAGLDVSMAETHVCVMTRNGAVVHQAKVPSTPADIAAELAQVPTCRRVLFETGRMAPMLYHGLSQLGLPVVCVESRQAYQALKSLATHKTDRNDARGLAHLARTGFFKPVHVKSLPAHAVRSLIIARKKLVGQRVTLENQIRGLAVVFGVRLPRALSPAFIKQALGASEGIPGLSAAMRGLVAARAAVLAAVVAIDGDIRRMVRASDTCRRLMSIPGVGQLTALAFTAAVDDPGRFRRSRDIGAYLGLVPRRYQSGEVDYTGGISKCGDRRLRTLLYEAANVMLTRYKGPLKLKDWAFAIAKRSTMRKARIALARRLAIIMHAMLRHGTEFKPA

SEQ ID NO: 380417 - protein, 411 aa, unidentified
MNLTTLFVGIDVSKTQNAVRLMDGGGDTLSLFTVPNNADGAAKLQEKLRHTLLHTDYSKVMIGMESTSVYADHLAAYLRNDEFLRKWESAVHVINAKNIKNFKKSYPELPKTDNIDTLIIADFLRFGRIPKSTGHDEKILALRNLTRARFQAAQNLSREKTRFVETLFQKFSTLDSAKVFSNTFGATSLAVVCEFLTVDDIIYTPIGELTAFVNQKGKGKFADPEAVATALQAAARSSYRIPKTVNDSLNQLLAIRLVGIRSIEEQIKSLDKAIESYMGAFQNVLISVAGIGSVYSAGIMAEIGDIKRFEGQAALAKYAGLAWSRHQSGDFNAANTKLIASGNKYLKYYLLETANQVRMHDAEFARFYRLKYREVPKHQHKRALALTARKLVRLVYSLLSTNRLYTPPETQ

SEQ ID NO: 380418 - protein, 349 aa, unidentified
MSQTLSTAIAVVGIDIGKNSFHIVGLDQRGAIVLRQKWSRGQVEARFANMQPYLIGMEACVGAHHLSRKLTALGHDARLMPAKYVRPYSKGQKNDFRDAEAIAEAVQRPTMKYVATKTADQLDLQALHRVRERLVSQRTGIINQIRAFLLERGIAVRQGQRLLRAELPRLLATPPDVLSPRMVRIIEDLAGDWRRLDERVEGLSSDIQAIARQDSGCDRLMSVPGIGPIISSAMVAAIGAGDAFSKGRDFAAWLGLVPKQISTGDRTILGKISKRGNRYLRVLFVQAAWVVLIKPQSWERHGLKHWIEAAKRRLHYNVLAIALANKLARIAWSVLARGRAFEASKLQAA

SEQ ID NO: 380419 - protein, 397 aa, unidentified
MYIVGIDIAKRKHEAAVIDGEGTVIIKPFSFTNNCSGYNRLLAMLTKAKLPLDEVSFAMEATGHYWLALFTRLQKEGFRVQVINPVQTNSIRSFYIRQAKTDPRDALLIAEVIRFGHFSESTLHPENIYELRELCRGRHAIVSMQADVKRKVVALLDQVFPEYETAFTNMFSDTSMAILQTCPTPKELSEMRLEELCHLIEVSSHKRFRMAKAQELQALARNSFGFAMAGDVFSTMIRLYAKHLDFLKQQVREMDRKIAEIMETLDTPITTITGIGLTLGAYILSEIGDISRFSSAAKLAAYAGIDPTMRQSGEYNGVRNRMSKRGSPYLRHAIWLAASSAVLHDPALKLYFQKKRDEGKPYMASVGHACRKMVSIIYAVMRDNKAYTPCIQNEISA

SEQ ID NO: 380420 - protein, 322 aa, unidentified
MIVLGADTHKRSHTIAAIAAVSGELLGEQTVAVGRGGFGALLQWARTLDHERVWALEDCRHVSGSLERFLIERGERVLRIPTHLTAKARKSARQRGKSDPIDALNVARAALREGLESLPAAQLDGPELDLRLLVDHRERLVRHRVELNSTLLWHLHDLWPELELPGGALFSKKWSARIGRRLARAQQTMRVRIARDELRRLRELTGTINQLEREITTLVTKIAPQLLSEPGFGPLIAAKLVGEIAGAQRFATHAKLARAAGVAPIPASSGNTQRHRLDQGGNRQINAALHRVIVTPRPLPHTDTRLHRAPPQRRQEHPRSDP

SEQ ID NO: 380421 - protein, 452 aa, unidentified
MNEPKRDLSMINADAAGIDLGAEYHWVSIPEDRSPTCVRRFACFTADLYEMAKWLHECGIKTVAMEATGVYWIPVFQILETEGFEVKLVNARHVKTVPGRKSDVLDCQWLRQLHSYGLLAGSFRPNDQVCVLRSYIRQRDTLIKNASAHIQRMQKALTQMNVQLHRVISDISGTTGLAIIRAIVAGERDLHKLAALKDCRIHASTNEIAAALTGDYRTELVFLLHQELQLYEMFQAQIAACDLQIEQCLNQFADPVDVSLSPLPPSKRRGKKQPGNAPNFDLRMHLYRISGIDFTQIDGFGVLTVLTLLSELGLDPSRFPTAKHFASWLGLSPGSRITGGKRKSSQTRRVVNRVANALRMAAQTLSRSHSALGAFYRRMQARMGAPKAITATAHKLARIFYQLWTSGQSYVDPGINAFEQQHHERVVKNLRKKAQAIGFDLVPHPGSPECVS

SEQ ID NO: 380422 - protein, 372 aa, unidentified
MEKYCGLDVHKGSVFMCILNENNEKYEEVFGTLTPELERLRDALVDHGVGQVAMESTSIYWYPVWRVLETDFDVKLVNPFFIKQLPGRKSDVKDAEWIATVLMKGLVRGSFVPPGIIQQLRMYNRKIINLSKDLRRSEQGMDLVLQRCNMRLSNYISDIGSKSMRKVAQSIAQGDFRPEHLLGLVHKRIITKHSAATIHAALCGHFTPGDLDMLKLTMQEIDFLENQISFCKARLLENCRDYFGLQMELMVTIPGVQEHTAASIISEIGTNMNFFPSASALVGWAGLRPRNDQSAGKIKGRKTLHGNKYLRLMLVQSAWGASRTKGSPFMARYQRLRKRMHHNKALIANARKLLVVAWHILAKKEPYFAKAT

SEQ ID NO: 380423 - protein, 426 aa, unidentified
MNNCLFIGVDVALKGNQFCVMNFDQHVYFNLKFSNNPEGNNLLINKIKQIEEKLFFEKIIIVMESTGMYSFHPACYLSSNEYLNNFHTEVYQINACDFNAYKKSFHDVPKDDGIDAYILADYARVGRIKQLHPFRGSQYIALQRLTRQRYHICKNLIREKSYVLSNLYLSFSGLVSANKSDIPFSDMFGATASALLEEFVSPDQIAESSIEELIDFISLKGKNHTKNPSEKVTLLKKAIRSSYRLDQTAYEPINIAIASSLNTIRFYQSQLKLLDQTILRTANGLDSNTYNILLSIRGIGKVYAAGIMAEIGNVERFSHNSKLAKYSGLYWKRNQSGEFESTDKKSSKKSNKYLRYYMVEATNSCNTQSFPFIRDYYIQKYNEVNKHQHKRALVLSARKLERLIFGLLRKGQYYKPLDSVQNNCES

SEQ ID NO: 380424 - protein, 341 aa, unidentified
MEQATTIGLDIAKHVFQLHGADAAGHVLFRKRITRVKLLGFLAAQTRCVVAMEACAGAHYWAREIAKLGHHVRLIAPAYVKPFIKRQKNDAADAEAICEAAQRPSMRFVPVKTEEQQANGIVFRARDLLVRQRTQCVNALRGHLMEYGYVFPKGITHVEALVALVEDLQSSLPDSVRVILKLLVDTFTALEAQIAVLDAEINRRSKSDPTARRLMTIPGVGPITSTAITALVPAAEGFPAGRDFAAWLGLTPLQKSTGGKQKLGAVSKRGERTIRRLLIIGASAVVQQASRRGAPKGSWLAQMLARKPKMLVTVALANKMARIIWALLVKGGTYRTPAVAA

SEQ ID NO: 380425 - protein, 338 aa, unidentified
MTIVMGLDQHRAQITAEWVDTETGEITRSRITPAHRQGVRQFCEKFRGQELDVALEATTGWRFVAEELAQVGAVVHLAEPAETAARRGNKKRAKSDRGDARHIRELLTIGRLPESWIPPDHLLDLRAQVRLRHTLSHQRGEWQQRIQAVLYHHGCPQRGELLTLGGRTWLAAQPLPPAAREQITIALAVIDALEVQLAPLDARLRAFARRQAGCKALLAQFGVGELTAVTILAELGDARRFSSSRDAVRFAGLDITVHQSDQRRAPGHLSRQGPPALRWALFEASMCAARRCSPDYEYYAQAAERLGSNRARLSVARKILKRSYHLLRELGDEAIAQD

SEQ ID NO: 380426 - protein, 310 aa, unidentified
MDIIAVGIDVSKDRLDIAVCPSGEVFAVERNASGVDRLIDRMRTLSPSIVALEATGGFETVVAASLAAAALPVVVVNPAQIRAFAKALGQRAKTDPIDAAVIARFAEATKPEPRPLADEATRLLADLVARRRQIIEMIGAESQRQKRIAVPRLRKSISRVIDMLKKELAELDGDIGDSVRGSPAWREKEDLLASVPGVGLIISRTLIADLPELGTLSRKQIAALAGLAPFTRQSGQWKGRSFIGGGRASVRTALFMGAMVAMRHNPVLKAFFDRLIAAGKPKMVALIAVARKLLTILNAIVRDKRPWQIA

SEQ ID NO: 380427 - protein, 387 aa, unidentified
MTTRANDMSRSLAAFDQDSTLIAIIEMGWSSWLVAGLIPGVERQPKKKMEPDAEDLLRLLERWRDEGVKAGRPITRIAVAYEAGRDGFWLARWLESHGIETHVIHSTSVAVSREKRRAKTDRVDAEMLLRVFLGWLRGERGHCSMVAVPTIEAEDARRPGREREALVAECTRIINRMKADMARLGVHGFKPHLRSAPKKLGSVRTPEGVAVPPNTRAELERDMARLAVLREQIVAIEKARLERIKNAPDNGPHAMIRLLARVLGLGIETADMLVNEVMTRGLRDRRAVARYAGITGSPDESGARRREKGLAKAGNARVRRGMIQLAWRWLLFQKESALALWFKARVDGAPGLRKKMVVALARKLLIALWRMATIGEIPQGVVMRPAA

SEQ ID NO: 380428 - protein, 460 aa, unidentified
MVPDGRQVEVEENEQIVERVAAIDVAKASGMVCTRVPHQTTPGKRITRVWEVAATTNAIIALADQLTGQGIERVVVESTSDYWRGFVYLLEARGLCVWLVNARDVKQVPGRPKTDKLDAVWLAKLNERGMLRPSFIPPAEIRQLRDYTRLRSDLTQERSRHVQRLEKLLEDALIKLSTVATDIVGVSGRAMLEALIVGQRDPKVLAELAKGRMRGKRAALVQALTGRFDDHHAELARVLPDHIDALTAQIDRLTARIEELIAAVPAAQPPQDQSGLSHGRAGGSATGEGAHGQTAQVLLPTPDRLDEVPGIGIKAAQVIIAEVGLDMGQFPTSAHLVSWAKLSPRTIQSGAKHRAGTTGKGNPYLKGVLGEAAAAAAKTNTFLGERYRRLVKRRGKLKALVAVARSILVIVWHLLADPTARFHDLGADFYTNRTDTDRKTRNHIRQLQALGFTVTLTPAA

SEQ ID NO: 380429 - protein, 459 aa, unidentified
MSKRVPAGRKSKLGKERLDWKALDIVHPDAAGIDIGGSEHWVAVSPERDQEPVRCFDCFTADLNRMADWLIEKGVRSVAMQSTGVYWMPVFEVLEQRGLEVYLVNARHTKNLPGRKSDVAECQWLLKLHTFGLLNNSFQPTDEIRIARTLWRQRGGLVMQAGSAIQRMQKTLTEMNVQLGNVLSDLSGFSGMAIMHAILEGERDPWSLAALADPQVKASQEVIAKSLEGNWRQELLFVLSQEVEMYRMYQDKIGECDRKLQEHLKQMVSKVDLNTQPLGPRPKGKKAKRNMPKFDLRTELYRITGVDWAQVNGIDVNVAQTVIAEVGVDLHAFPSERNFASWLGLCPTNETSGGKVLIRRTRHVANRAAVAFRQAASTLIRSQSYLGAQYRRLRTRLGAPKAITAMARKLACLFYRLLEHGQQYVDKGIQYYEARYREQQVRSVTKRAQQLGLQVVKLN

SEQ ID NO: 380430 - protein, 431 aa, unidentified
MLKINPLSTLYVGIDVSSKSNYVCALDFYKNKYINSSFANNQPGAEELALKILECLKEHPDITTIVAALESTSVYSIHIANYLSSCEELMRFKPYVFVLNPKCTANYKKSYIGLGKSDPIDAFVIADYARAGNIESEPWRGSQFLALKRLTRHRLHLVECMTREKTYLISNLYLKFSELQMLEGDDQPFCDIYGATSSSVLMEYLSPEEILASSEEDLIAFLAKKSRNRIKDISKTADLLKKAARDSYRLDKALYEPLNVSIASSFNCIETFKREIKVIDNAIEKEIKGLNPNAFIILQSIDGIGPVFAGGIIAEIGDITAFHSSDALAKYAGLTWKSNQSGDFDGEDTPMIKAGNRYLRYYLGEAANSMRKHNVEYGTYYRKKYNEVPKHQHKRALALTSRKFVRLVYGLLARNQLYSGVSLDTSIKDSN

SEQ ID NO: 380431 - protein, 351 aa, unidentified
MNIIGCDLHSRYQVVAWVEAETGEIVTRRLEHENGAVGSFYARWPPGAIVGIEATFPALWLERLLAERGHELWVGDAARIRASEVRQQKTDSRDAEHLLDLLRTDRFPRIWVPSLAERDLRQLLVHRMKLVRTRTAVQNQLHALALSQGVCRKHRLGSARGRAELESLALLPWASRRRQELLALLDQLAGPIAELDRAVEAEAQQRAAAVRLMTHPGVGAVVSLAFVLTLGPVERFANSRKLVSYLGLNPREHSSGGRQRLGAISKQGNTLLRWLLVEAAQTAARLDPELRRAYQRLKFRRVSGVAKVAIARRLAVRLYWMLRARLDYAQLVRTSGSPRSAVVPPRAASKV

SEQ ID NO: 380432 - protein, 400 aa, unidentified
MMTPDDIDVWVGLDVGKSAHHAHALDHDGNTLYDKPLKQDEKAIRTMLGKLSKHGRVLLVVDQPNTIGSLPLTVARNMGIAVAYLPGTAMRRTAQLLPGDTKTDRRDAHVIAWAALKLPETLRDAGPDDETLAALKLLAGHDEDLAHESTRHVNRLRSLLLQTHPAFERALKGERITRDATLALLERYGGPMGVKRAGIEDVKDWAKSNGLRAGRIIDDMFKAIGEQTVTVPGTLMAETIIPSIAHDIKTIRDRRREVGRQVEKLLEDHPLLTVLTSMPGIGVRTASNILLGIGGDIANFKSSAHLAAYAGISPVTGQSGTSIKGERPSRRGNKRLKNALWQTAFVASTKHPPSVAYYKRKREQGKRHNAAIICLARRRCDVIYSMLKNGTLYQEPALVA

SEQ ID NO: 380433 - protein, 344 aa, unidentified
MANLNPFCNFTKIIGIDIAKSVFQIYSCDTQTGEITNVQVKRNKVLESFANCGKCLIGMEACGSSQYWARQLQALGHTVRLMDPKLVKPFVRHNKSDKADAEGIYHAMVAGVRSVAVKTETERDIQSLLTMRALLVKQRTARINHVRGLLAEYGQVMPKNVDQFDKKVDECINGLEGDAVQLVIDTMRDIVKSIRDDDDRIKTLDREISILAKQTRNAKHFLTVPGVGETIMAYMCVLLADPSQFSSARQFAAYLGLVPMHTGSGGKTVNTKIPGRCDKALRAILVQGAHAVARSKYRTDWVKNILAKKAKKVAMIAIANRIARQCWAVASKGQDWRRMPVTAA

SEQ ID NO: 380434 - protein, 325 aa, unidentified
MPDRAYLGIDIAKRKFDVALVRADGRVRVKACPNTPAGYTELVAWITRQYDGAVHACLEATGTYGDALAEALADAGYTVSVVNPAMIEAYARSRLTRTKTDRTDARLIAQFCATQQPAAWVPLPREVRTLQAFVRRLDALEGMRTQERNRLAAEPADAVIRASIQHVIDLLADEMAALRARIHDHFDQHPDLRAQRELLTSIPGIGDATAAVLLAEFGPLTRFRQAPACAAFAGLVPRHGESGSSVRRQPVLSKLGAPALRKALFYPAIVALRHNPIIAAFGQRLRAKGKHKMVVIGAAMRKLVHLAFGVIKTGQPFNAHYLVRR

SEQ ID NO: 380435 - protein, 367 aa, unidentified
MTRHSIVRSLLLVGWKVTATSKGAWDVTMIAAGRPDSKVEVILGVDTHLDVHVGVAVDHLLGRSLGELSVPTTANGYERLLCWAESFGPVRCAGIEGASSYGAGIARHLKAQGVEVLEVERPKRRQRSSRRNVKSDPSDAESAARAVLAGETSGVPKSGDGCVEMIRALRAARRSAMKSRTQAANQLQGLRVTAPDELRHRLRGLSSKKLVSVAARFRLGDDPRDVPAATKFALRSVARRHEALSAEIAKLDAQLDRLVTQVAPELVSLPGIGTDHAATLLIVAGDNPQRLRSEASFASLCGVSPVEASSRKVVRHRLNRGGNREVNRALYMICLARMRRDRRTQEYVARRTAEGKSKREIIRCLKL

SEQ ID NO: 380436 - protein, 359 aa, unidentified
MSTQSKPFSFKGQKIFVGLDVHLRSWSVTVLSEQAVLKKFTQDPSPAALNKFLTNTYPDAEYYSVYEAGFCGFWIHWELHNLGISNIVVNPADVPTMAGERLRKTDAIDSGKLARSLRSGELKGIYVPDSLATEIRSLIRLRDSLTKDQTRHKNRIKAHLRYLGIDIPKEFCRPGRTWTNRFVLWLKGLELETEYGKKTLDLLIAQYEDLRGQQLKMMKELRVLSQTERFDKPLQILMSIPGIGQLAGLTILSEVDDISRFKDAAHFASFIGMVPMCYSSGEHDGTGNITVRRHAKLRWLIVEAAWIASRKDPVLSAAYVEYCRTMKPSKAIIKIARRLVNRIYFVMKHQQPYVNCYVS

SEQ ID NO: 380437 - protein, 376 aa, unidentified
MNDHIAAFVAFDTSKLRNAVAIAEEGRTGEVRFFGEIDNTADATAKLVKKLAAKYERLAFCYEAGPTGYGLYRQITGLGHDCLVAAPSLIPKKPGNRVKTNRRDALELAKQLRSGDLTAVWVPDSRHEAMRELTRARGAAVQDVRHKGQQVSAFLLRLGRHYDPAKKTWTKAHLGWLASQKFEHPEQRIAFEEMLLAVRQAQDRVGRLEDAIRSAVPDWSLAEVVPALMAMRGIDMVTATAFLAEIGDLSRFRTPRQLMAYLGLVPSEKSTGDTVERGPITKAGNRRARRLLIESAWSYRHPPRIGRDKQAKVDAAPREVAEIAWKAQNRLYRRYLALIRKGKLKTVAITAVARELAAFIWAVGRAVATAARAEAQ

SEQ ID NO: 380438 - protein, 355 aa, unidentified
MIIIGADYHPGFQQIAFVDTDTGEFQERPLRHREEAEKFYRDLAAQGMKVRVGMEASGHARWLERLLAELNFELWIGDAAEIQSKRVRKAKTDREDARLLLRLLLEDRFPGIWVPSWENRDLRQLLWHRHRMVQARTRIMNQLQAVALNEGLRSKKKLWRESGRQQLESFRLAPWASRRRHDLLELLDRLNPMIAELNQAVEQEVERSPAAQRLMTHPGVGPLTALAFVLIIGETKRFGCGKQIASYVGLVPLEKSSGNRRRLGHITKQGSSMLRFLLVEAAQVTVRSIPEWRGKYFHLAMRRGRKIAKVAMARRLAVRLFWMWRKQWDYEQLKKFGSHAGQPGSGDGVYTTPSN

SEQ ID NO: 380439 - protein, 320 aa, unidentified
MQIQSTALDIGADVGKDEIVFASAEGGLPRRKVPNQRTELKVFLKTLPAGSRIGMESTGIYHELLAELAYKLSLVVFVLNPKDVRHYAKGVGLRGKTDRVDADLIARMINREHENLHPWIPPTPEQRQIHQLLARRAKISRIRAALNQSIKGLAGFGADLKMVNERLDRFVKHIDDKVKALIEANADRRQQYARLSKIAGLGGVVVRSSVLNTLERVPLRSADAFIAFTGLDPRPDESGHHVGRRRLSKRGPSELRRLLYIAAMAAAKTKLWKPVYEHYRAKLSTTAALVVIARRIARTAWSVYTHKTEFDPQRVALTLT

SEQ ID NO: 380440 - protein, 329 aa, unidentified
MKQGRDPSPVCHKEVALSKTFVGVDVSKEWFDVAVTPGRSSWRVPYTQEALTEFVRQLLPLNVALVVTEACGRLERPLARALEQAHIPVAVVNPRHIRDFAKSVGQLAKTDDLDARVLALYAATISPQPRPLPAVDEESLQSLLARRRQLVGMLSAEKNRLRTAAPELRPGIERHLVWLQSEIDGLSDEIGQRQENHPLWRETKRILEHVPGVGSTTSAMLTAYLPELGHLDRKKIAALVGVAPFNRDSGQRQGTRSVWGGRREVRAALYMCTMASIRWNPVIRDFYAQLRGRGKRPKVALVACMRKLLTILNAMVRDGTDWECAPSSP

SEQ ID NO: 380441 - protein, 345 aa, unidentified
MKITTVGIDLAKNVFQVHGIDERGKAVLGKQLRRAQVAVFFGNLPPCVIGMEACASAHHWARTLQRFGHTVRLMAPQFVKPYVKTNKNDVADAEAICEAVGRPNMRFVPVKSIEQQAILSVHRVRQGFVKARTAQANQIRGLLGEFGLVIPQGIINVAKRVPEILEDASNELPVPFRHLIDRLTKHLKELDRQVKEFEREIIAWHRSSELSRKLEKIPGIGPLAASALVASIADAHSFKNGRQVSAWLGLVPRQSSSGGKPTLLGMSKRGDAYLRTLLIHGARSAILAAKNKVDNTHGWLTNLLKRRHPNIAAVALANKNVRTVWAILAHGREFRPDYVPTRMAA

SEQ ID NO: 380442 - protein, 350 aa, unidentified
MQTIYIGVDFHARQQTICYLTTDSGELLFHHLKHEDKALVRAFYAQFRGHVIVGLEASGYSPWFERLLEELGCEVWLGHATEIRRRARWRHKNDRRDAELILDLMVHNEFPRLYLPPLQSREVLRMLRYRQKLIKMRTIGKNSLQALALQSGLAKGPHLFTKTGLQELRSATMSPAMQWQREQWLQLLEPLNERLLETMRWLQQQSQADQRISRLRTHPGVGLLTALCLVHSLEPVRRFANSRKVTAYAGLDPVERSSAERQRFLGISKGGSRVLRFLLVEAAHTALRKEADLKRFYQRLAQRHGRPKAKVAVSRKLLIRAYIMLRDEIDYAEFQRRAVAARPVLPAHGL

SEQ ID NO: 380443 - protein, 331 aa, unidentified
MEKSDFKYFVGVDISKKSFDIAIIEGDDTASFVFDNSQKGTRAFIRLLKNRGIPLENTLVCLEHTGIYGRLVIARLLEKQANFCVEMSLRIIRSLGIQRGKNDRLDAIRIARYAAKNHNEIELYRPVPEILEKVNALLKVRDQLVRFRADLCKHPNELKTFDPELGKLVQRHIKKTTKCLNDEIHRMEGEIEALVLSDERLNTTVRLATSVTGIGMFTALYFTIYTNFFTKYENPKQLACYCGVVPFEHTSGSSIQKRARVHHMANKTMKKQLHMCALAAVRHDPELKAYYERKAEEGKNKMLVLNNVRNKLVLRVCAVVKRQSPYQKSVA

SEQ ID NO: 380444 - protein, 349 aa, unidentified
MEQNEVILGVDTHLDVHVGAVVNDIGRLLGTRSVTTDTAGYLDLLTWANSFGHVCRAGVEGTGTYGAGLARMLRDHEIEVLEVNRPDRAMRRSKGKSDPTDAENAARAVLSGRATAIPKEQSGAAEAMRAVSVARRSAVKAKTQAINQLRALLVSAPQEIRDRLLKVKTAECIKGCIRLRSLGKSPMLQTLTTTLRLLAKRWMTLAEELKSLDTMLDDLTSRHAKRLRERFGVGPQTAAVLVAVAGDNPERLKSEAALAALCGTSPLQASSGKTVRHRLNRGGDRSANNALWTIAMVRMRSDPRTRAYVDRRTKEGMSNKEIHRCLKRYIVRELYPLILADLADSTRVV

SEQ ID NO: 380445 - protein, 368 aa, unidentified
MKRDFVGGNVGLLINHRQEAGKMLYAGLDLSRHRVDVHVLDEDGRTVEVTAVRPDADALRTLVSSVARHGHDVSAVIESMTGARFVHDQLELSGWNVEIADAARVKGLAPLAAKTDKIDAWVLAELARRDLVPAIWLPDPSVRAERERARFRLHLVRLRTALKNRIHATLTSFGHSVAVSDLFGVTGRELLSRLALPEPWLTTLATSLRIVDQLSAEIDACERDLRTLGREDRAVTLLCTMPGISWVLASTIASELGDIGRFATPKKLAGYTGLCPFVRQSGNRDLRGPLAKNGPKYLRWALIEASLGASRHPQYRDRYERTKRRLGRQRGAKVARIELARDLCTAIWHMLTKDQPFAPAGPAIHLVA

SEQ ID NO: 380446 - protein, 309 aa, unidentified
MFVGVDVSKATLDVAVRPSGDSWSVPNDEAGLTELVERLTAIGPTLVVVEATGGYEMALVTTVALARIPIAVVNPRQVRDFAKATGRLAKTDGIDAKVMAHFADAIRPEPRELPDEAAQELDALVRRRAQLVEMLTSERNRLIRSSKTTKPSIDIVIHTLKSQIKLLDTEIRNRVKESPVWREKDELLQSAAGIGPTTSAKLLTALPELGKVSHKEIAALVGVAPINRDSGKSFGARSCWGGRADVRAIIYMATLVAKRCNPIIKAFYERLVAAGKAKKVAIVACMRKLLVILNAMARDQKAWVTPELP

SEQ ID NO: 380447 - protein, 338 aa, unidentified
MACQYVGIDLHRRRSVIVRQTPDGQVVDTVRIDNDPVALSCAIAEAGPDPEVVIEATYGWYWAVDVLEACGANVHLAHPLGVKAFAYRRVKNDVRDAKDLADLLRMGRLPEAWIAPPYLRQLRELVRYRAKLVALRSGLKAQVHAVLAKEGVAVGMSDLFGKEGMALLADARLATCYRMRVDSLLELIDAFDGEVAWLSDAIAARLRHHPGYHAVQHIPGVGATFAAVFTVEIGDIRRFTRPAQLCCWAGLTPKHHESDDTVVRGHVTKQGSRLVRWAAVEAVQCLPHDWKLRADRDRIAARRGRNIGKVAAARRLLTLVFYGLRDGHIRCLDQPVAA

SEQ ID NO: 380448 - protein, 327 aa, unidentified
MAKRTTICAGIDTGKRKLDIALDGSSEQLQIDNTAEDYKVLLDWLRRHRVKRIGIEASGGYEQAVVAELRRQRFVVVVFQPAQVRAYAKFHLLRAKNDKIDAALIAVCTAAVKTIHAPPDARLLPFAEHLTMIDQIGEDIARIKNRLESCRNPRFQQTWKEDIVRLAKREKIELKALVAAIREHRDLAERLDLINSVDGIGLPTAVAILVRLPEIGRITREQAAALAGVAPYDDDSGEQVGIRHIDGGRERLRRALYTAALPASFRWNPQLIALYRRLIAAGKQHKRALIACARKLLIFANTVVARGTPWDHERPPIASISAVLQAG

SEQ ID NO: 380449 - protein, 334 aa, unidentified
MGAGKLVAESIVETKASTLLDFLHGQRGELHVTLEEGTWAAWLYDLLKPHVREVVVCNPRRNALLKEGSKSDKVDARKLAELLRSGMLRAVYHGENGLRALRELARTYQVVSKDLKRVMNRLKALYRSWGIPCTGTRVYSQRHREQWLKKIGEAGVRRRAELFYQQLDALQALRHTVRGELLAESRRHQTVKILRQIPFIGPLRAAQLVAVMQTPHRFRSKRQLWTYSGLAVETHDSSQYRFVDGQLQRSKKPQQVRGLNQNHNHAMKEIFKSAALSATRRAGPFQDFYEGLLAKGMKPELACLTLARKIAATTLTLWKKGECFDARYVKPQAA

SEQ ID NO: 380450 - protein, 343 aa, unidentified
MKNTVVGIDLAKNVFQIHGIDEWGKTSVKKQLKRDHVVSFFANLPPCLVGMEACGSAHHWVRKLGEFGHTVKLMSPQFVKPYVKTNKNDVADAEAICEAVARPNMRFVPIKSVEQQAVLSLHRVRQGFVKTRTAQANQIRGLLSEFGLTLPQGIWHLSKRIPALLEDACELPGVFRLLVQRLLDHLSELDREVSELEQQSQQWHRSNDASRKLAKIPGIGPLTASALVASVGDANSFRNGRQVASWLGLVPKQRSSGGKQTLLGISKRGDAYLRTLLIHGARSAILAAQRKAGESGWLHNLLQRRCPNIAAVALANKNVRIAWALLAHDREFEPDYSPVLAGA

SEQ ID NO: 380451 - protein, 376 aa, unidentified
MREKLRFLGLDVHAETIAVAVAEADGEVRSLGTIVNREESIRKFIRKLGPPEHLRACYEAGPTGFVLYWQADAAGSGVRCGGAVAVPKKPGDRVKTDRRDALKLARSHRSDDLTAVWVPDESSEALRDLVRAREAAKQDQLRARHRLTKFLLRTGQRPPLGVKAWTERYVEWVQQVRYTHPAREATLLDCLNEVQHMDERVKRLEESIVEVIQLAPAPMQEVVRGLQALRGIAHISAVTIAVELGNISSRFENARALMGYSGVFPSEDSSGERVRRGGITKSGNAHLRRIVVESAWSYRHRPAIGARLRKRQEGLPAEITEIAWKAQNRLHKRYMKLMARGKEQRKTMTAVARELLGFIWAIGIKAEAACRQQMAA

SEQ ID NO: 380452 - protein, 410 aa, unidentified
MNAVAVVQPLRFVGIDLHKDYVMLGAVDAQQTIVLAPRRCRLFEVEQWRAKYLLATDAVVLEATSNAWTLYDQLVPHVCSVTVAHPLLVKLITAARVKTDSQDTLKLARLLAAGLIPAVWVPPLGVRELRGLVAHRRRMVNLRTQARNRLHAILHRHSLPPPDGGLFAQNQRAWWDSQPLSATERLRARQDLALLDYLAPQLAELERELLRLSTTAPWAEQVPFLVQLPGVGVLTAMIFLAAIGEIERFPSAKQLVGYSGLGARVHASGQTFHTGGITKQGRRELRAALVEAAWMAVEHSEHWRTTFERLAARTGRQKAIVAIARKLLVVVWHVLSKQQVDRQADAEHVARKFLTWGTQERTATQQGLSRPAFVRQQLDRLGTAADLQTFVYNGQKVVLPPSALKPATVS

SEQ ID NO: 380453 - protein, 411 aa, unidentified
MEAAVITAVGIDVSKSKSTVAVRRPGGEIVLRPFEVHHTNSDLKKLASTLKKLGGDIRIVMEHTSTYWRPIALTLKEAGFFVSVVNAMLIHDFSDNTIRKLKTDRADALKIANYALTFWDTLPPFNSEEETRLLLKMQSRANERITATATALRNGLIALADQIFPRVNIAFDPNTKNANGHEKWVDFFLRYWHKDCVCQYSMEAFTESYRRWCKRKNYKFRTDTAHKIYLLAQEGVATLPKCESTKMLITQACKSLNAVCEAKQSTQLEMQRLAAMLPEYEVVMQMEGAGPITGPALMAEIGDVRRFKNKKALVAFAGIDAPPFQSGAFESKSRHVSKRGSPHLRRTIFIVSNIILTRSNPENAVYCFMDKKRSEGKHYYVYTVAGSAKFLQVYYARVTEFLRSQPSSDAC

SEQ ID NO: 380454 - protein, 454 aa, unidentified
MEKKKEEKKKEITHHVGKGLPVFNPHAAGIDIGDTEHFVAISDGDKGHIVTRYDAFTGDLRMIIKDLKKAGITTAAMEGTGVYWLALYLMLEEAGIEPYLVNAKHVKNVTGRKKDDTDAIWIQKLHTCGLLQKSFQPDTEFRVLREYVRHRKNLIRISSDSVRRMQKSLEFMNLKIHTVISDLLGKTGMKMVQAILNGERNPAILAELRDPRIKASEEEIIKSLEGIWKDEYLFTLQQAYDEYCFYQQQIKACEEKIREQLLKQVAIVKEGDISELTGNEKVKKKPKKNQFGFDLQAYLKSLIGVDLCKTDGLGEVTVLEVISETGVDMTKWKSCNHHAAWLNLTPNTKISAGKTISSRVMKKKNRAGQSLKMAASSLSKSKTPLGDYSRKMRAKFGGKGAALATAHKLSRIMYTMIRDQKEYDPNIMFDSREKAKQQKIKRLEKQLEKLKQVA

SEQ ID NO: 380455 - protein, 337 aa, unidentified
MDIKVIGVDIAKRYFQVHAIDGTGAIVMRRKVTRDLFLKLLTDIPRCIVGIEAGSGAHHWARELGKLGHDVRLMPPQFVRPYVKSNKNDAADAEACCEAVQRPGMRFVPTKTIEQQAAMALHRVRDHLVCRRTATINALRGHLAEYGIVAQVQRTGLKQLFDVVMDDQDDRIDVALKPILKMLVEEICVADARIAELDRQMKDTARNSEACRRLVEVPGIGPVIATSVVAAVCDEKRFSSGRHFAAWLGLTPKQHSSGGKDRLLGISKRGDAYMRRQFVNGGRSLVRIAEGRKGGIWDWINALLQRRSFNVVTVAVANKLARIAWAIQARGTRWQPA

SEQ ID NO: 380456 - protein, 356 aa, unidentified
MQTQFTKKIDYNGKPLFIGLDVHKKSWSVTIIVNGMEHRTFTQPPEPQLLVNYLQRMFPGGSYNSAYEAGFCGYGIHRELNSLGIRNIVINAADIPSSQKDQLDKRDPIDSRKIARGLEKGLLRPIHIFDRDIEELRSLNRTRFYLMRDYRRSKTRIKSFLQYYGEPIPQEFDNNQWTLKFVSWLKQVKMQTRSGQDAFSNLISSYEYHRSQLLTLSRQIRERIREYDRELYTLLKSVSGIGPLTASALITELGDINRFPHRDHLNSFVGMIPRVKQSGESSYSGGITFRCNEYLRTLLIESSWQAIRQDPALMQYYHEHLINNKGQKVIIKVARKLLNRIRYVMKNRKPYVTGVA

SEQ ID NO: 380457 - protein, 357 aa, unidentified
MKRQKQYILRNEEVFVGLEDSKKTWKLCVRSGGVIVHEASMPAQYEVLRNYFHNKFPGCQIRVIYEAGFRGFELHDRLIADGWGCVVTPPHTVMEEKCQRKKNDRTDCRRLAKNLENGDYHICFVPDRELREDRQISRTYGQVEEDIRRTCNRIRRMLEFHGLDEGFPPGRWTQAMYDLARQKLGRLDMSESLRFSFEVLFRELEYLRGLRRELLRQLRRLARSDRYREDVELLKSAPGIGALTAIRLVLEWGDVRRFARKGDFASFLGLVPSDYSSGEKERRGHITKQGNPRLRTWLVECSWVAIRVDPVLLEKFRRVVRACGSKKKAIVAVARKLALRLRRVLISREPYAIGVLE

SEQ ID NO: 380458 - protein, 452 aa, unidentified
MKHKRAGRGGAVPSLECIEPNAAGIDVGAREIYVAVPANRDPKPVRCFSTFTQDLQALAAWLLACRIRTVAMESTGVYWIPLFQILEAAGIEVCLVNSRHVKHVPGRKSDVLDCQWLQYLHSVGLLRASFRPEDVICQIRSLLRHRDGLVEMAAQHVQHMQKALSQMNLQLHHVLSDLTGQSGLAMLDAILAGERDPRVLAELRDGRVKASAETIVQALVGDYRREHLFTLHQSLQAYRYYHQLLAACDQEIEAYLRELDSKIDVAQNPLAPEPKPHRPRKNEFGFDLRSELYRILGVDLTAVPGLNALSVHTLLGEIGRDVSRFPSAAAFASWLGLCPQADKSGGKVLSAKTRRTKNRLNRSLRLAAQALHRSHSYLGDYYRRMRSRLGAPKAITATAHKLARIVFHLLRTGEAYNESIFAAEEQRCRVRTEHRLRRHARQLGYDLVPLPA

SEQ ID NO: 380459 - protein, 352 aa, unidentified
MKKIVVGIDISKEKIDVSAIDVRESQTGMVKLDYQVFENRPLGFRRMLVWARHLIKGIGLEDILFCCETTGGYDRCLCDYIYAKGLDIWRESALQIKRSMGVRKGKDDKADSLMIAEYAMRHMDKAVMYETPSETIRELKALFLYRHKLVQEKAEKKVRASHLDDTAAKSKSMRFILRDAKKSVKALEKSIKECEKQIMELIEGDEDLKRNYGHIVSIKGINIVNATAMIAYSNNFKGITTANKMASYYGVASFREQSGTSVDKKACVKYYSSSLLRATITQAAEWTIKENGIYHDYYLRLKADGKPYGIIINNVKNKLIHLAYSLVTNDIDYENNHEFLRAKRKCEQAESD

SEQ ID NO: 380460 - protein, 352 aa, unidentified
MQHFIGCDVHTRNQVVAWIEEETGEIKKRRLEHAGEEVGKFYAQFPRGTVVGIEATFPAYWFERLMGELGHELWVGDAARIRASEVRYQKTDPRDAEGILDLLRTGRFPRIWVPSLEERDLRQLLVHRMKQVRVRTQVKNQLHALAISQGVCRKGKLWSVKGRKELESLALLPWAARRRKELLESLDRLDEQVRELDRAVEEAGRARAEVALLRTHPGVGMVVSLAFVLTVGPIERFSNRRKRVSYWGLNPRENSSGGRQRLGSISKQGNTMMRWLLVEAAQTAARLDPQLRRTYQRLKKQKTSAVAKVAVARRLAVRLFWMLRTRHNYTQLVHMSGSPSSAVVPPTAEPNL

SEQ ID NO: 380461 - protein, 338 aa, unidentified
MLHIGVDFHKRFSRVVTLDDAGLVVDRLTLRHNDRKGMVEYFRSKSGNATVTAEAVRGWYWLNELLADLGVDMKLAHPRKVRLIAESTIKTDTVDAGTLAQLERTGFLPEAYVPSREVRDSRELLRYRLTLVRIRTGLKNRVHMVVDKLGIDHPFSDLFGSAGRKFLQSLELRPVYQQQLTSYLELLDEVDRRLKAVTLQIKASVQPDPRAELLMTIPGVAHITAYLLLCEIGDIGRFASAKKLCAYAGLVPVTRQSADHCWQGRITKEGNRYIRWGMVEAACMATRKDWGLAQYYRRVAGRRGSLKARVAVARKLLTAVWHILTDGQPYRLTKPDVT

SEQ ID NO: 380462 - protein, 474 aa, unidentified
MAAPAQRRAIEGERQYFTFRLTRRTVPMTFSMMFVQASERRSSGGSPSFVTVSISSSPSRSHGEVDSDRRSGRVRLRTPTLETAMQVTADRPEAPSAIRSDLGAIFVSLELSRSIWLITSLSSGSGEKMSKHSVPAGDICALMARFSELKQKALARTGKLFPIIVIQEAGLDGFWIHRMLQNEGIESHVVDPASIATSRRRRRAKTDRIDGEALLRTLLAYKRGEPRVCAMVKAPTPEEEDRRRLCRERKVLIAERVEHVNRIKGLLFSQGVSGYEPLRRNRRQRLDELKTGDGRVLPDHLKAQISRELDRFELLIEQIKAVEAERDALFAAAKAAAPTPAPVTMLLDIKGIGPEFAAVLWSEGLFRHFDNRRQVASYAGLAPTPWQSGSVDREQGVSKSGNPRLRTTLIQLAWLWLRHQPQSALAQWFEERVTRNGGRFKKTAIVALARKLLVALWKYVSAGVVIEGAVMKTA

SEQ ID NO: 380463 - protein, 348 aa, unidentified
MSISMIGLDIAKSVFQLHGIDASGMVRLKRKLRRSELIAFFEQQPRCIVVMEACGAAHHWARVLSGLGHEVKLIASEAVKPFVKRGKKNDAADAAAICAAALKPDAKFVAPKSLEQQGALTLHSARALLVKQQTMLVNAIRGLATEFGLVVPKGMSKLEELAALVEADTAIPQQARGAFSGLLEHWHATADRIKALEVEIVAHARQDDMARRLATVPGIGPITASLIAATVGDSVKSFKSARHFGAWLGLVPRQHSTGGKTRLGRITKTGNREIRKLLVLGATSMVRRAEQWNSAAGAWVRGLLVRRPVRSVTVALANKMARVAWALMARNEVYRAKGGIAAVAAATT

SEQ ID NO: 380464 - protein, 412 aa, unidentified
MNAVGIDVSKGKSTVTIRRPGDVVLMPPRDIPHTQSAINGLIGQIKELDGETKVCMEHTGRYYEPVAMWLSDAGIFVSAVNPILIRNFGDDSLRTPKTDKADSKKIARYTLDHWAKLKQYGIMDKTRNQLKTMNRQFGFYMAQKTAMKNNLIALLDQTYPGANDFFDSPARSDGSQKWVDFVHTYWHVDCVRSRSPEAFKKHYQNWCKRKGYNFSAQKAENIYHASSDLIAVFPKDDNTKMLIWQAVAMLNTASRTVESLRLEMDKAASALPEYPVVLAMDGVGPTLGPQLMSEIGDVTRFTHRGALTAFAGVDPGKDDSGQRIRKSVPTTKKGSPYLRKTLFQIMDGLIKRSPADDPVYAFMDKKRAQGKPYYVYMTAGANKFLRIYYGRVKEYLASLPQTSDTEAEKDGI

SEQ ID NO: 380465 - protein, 342 aa, unidentified
MKHYAGIDVSLECSSVCVVDASGKILREARVASEPEALIAWFRSSGFEFERIGLEAGPLSQWLFAGMKRARLAVELLETRHVRKAFEAMPVKSDRKDARGIAQLMRLGWFRPVHCKSISAQETRSLLTARKLVQSKLLDVENSLRGILRGFGLKVGKTTGQKFAGRIEELVAGHPHLQMIAKALLAVRAVLRTEFAAFEKQTRRMVRSDMQARLLTSVPAVGPIVALTYASAIDDPARFKSSKQAGAHFGLTPKKHQSGETDYTGRISKIGDASVRTALYEAANVMLTKPVKGCSQLKSWAMRIKRRAGMSKAKVALARRLAVIMHRMLADGTPFNAAAAAA

SEQ ID NO: 380466 - protein, 355 aa, unidentified
MSSEKYIGMDVHQATISVAVLDSQGKTLMECILETKASTLLEFVGGLRGTLYVTFEEGTWAAWLYDLLKPHVAKVVVCNPRKNALLKHGSKSDKIDAHKLADRLRLNDLKPVYHAESGVRMLRELARSYLTIVKDLTRVMSRVKAVYRSWGIPCGGREVYYTRHRQQWLNKIQEPGVRRRAERLYQQLDMLQLLRQQARRELLAESRKHTITAKLRTIPSIGPIRSALAVALIQTPNRFRTKRQLWTYSGLGLETRDSGEYHYVKGQVRRRKKQKFIRGLNRDYNHDLKALFKGAALRATILPGPFQDFYQRSLAKGIKPTMVRLTLARKIAAITLTVWKKGANFDVDKVKPQAA

SEQ ID NO: 380467 - protein, 340 aa, unidentified
MDTIGLDLHKRESQLCVLTEAGEIVERRIVTSRERFTAVLGSQPPARILVEASTESEWVARHLESLGHEVIVADPNFAPMYATRRRGVKTDRRDARTLAEACRLGAYRPVHRASAPQRHVRAQLAVRDALIRTRTRYVNVVKALARRDGLRLPPGNPVHTEAKLAALPLSAPLAGELAPLRALLDPLNQEIAGADERLAAVAAADPVVRRLQTAPGIGPVTAVAFVATLDDVTRFASAHHVAAYLGLTPREYSSGEQQHRGRISKTGNARMRYLLVEAAWRVLRTADPAAAALRVWADGIAQRRGRSVAAVALARRLAGVLYAMWRDGKDYLAPPPAAAL

SEQ ID NO: 380468 - protein, 435 aa, unidentified
MRAPRDPHVLVTCINGLIWEDSLTVFCGIDWAERHHDVALVDEAGTLLAKARITDDAAGYHKLLALLAEHSDSPEDPIPVAIETSHGLLVASLRTGSRQVFAINPLAAARYRDRHGVSRKKSDPGDALVLANILRTDMHARRSLPADSELAQAITVLARAQQDAVWARQQVANQVRSLLREYYPAALLAFQGKQGGLTRSDARVILTLAPTPAKAAKLTLTQLRAALKRSGRLRGCDAEAERLRTVFRAEYAHQLPSVEDAFGHQLLAVLKQLDATCEAADDLAEAATAAFHQHADSEILLSFPGLGPMLGARVLAELGDDRARFADARALKSYAGSAPITRASGKKRFVGRRFVKNNRLINAGFLWAFAALTASPGANAHYRRRRDHGDWHAAAQRHLLNRFLGQLHYCLKTRQHFDEQQAFAPLLSPRTAQAA

SEQ ID NO: 380469 - protein, 378 aa, unidentified
MSKIRFVGLDVHADTIAVAVAEQGGEVRPLGVIPNRLEVIRKLVARLGPAKNLKVCYEAGPTGYVLYWQLTALGVACEVIAPSLVPVKAGDRVKTDRRDAVKLARSYRAGDLTPVWVPDANHEALRDLVRAREDARQDQMRARHRLNKFLLRHGQRPPADVKKSWTQKYMTWIKEQVHFEQPALEATLLDYVHEVEHMAERIQRLEKAITEAIEKLPPAMRAVVEALQGLRGVAQITAVTVVAELGTLSRFPSPRQLMGYSGLTSSEYSSGNRIQRGSISKTGNAHLRRVIIESAWSYQHRPWVGGFLRKRQQGLEQEVKDIAWKAQWRLHTRYKKLAAANKKKPQIVAAVGRELLGFIWAIAVKTERKFPPCTARAA

SEQ ID NO: 380470 - protein, 351 aa, unidentified
MRIIGVDLHTRQQSVAMLDTDTGEVIEKTLEHEGDEVREFYSALPGPVLVGIEATGSMPWFLKLMEELKIECRVGHPAKVRAAEPRKQKHDRRDARLLLTLLAENRFPAIWMPSTEQRDLRTLLRHRHQRVRMRTRVQHTLQSLALANGLRRGATLWSQVGQHALQALPLAPFAGQRRAALVALYPVFQRAIDDLDQQVSEQALLHPQARRLMTHPGVGPVTALATEVFLGDPLRFVDGKAVASYIGLIPSERSSGRRQRLGKLSKEGNALVRYLWGEATIHAVRRDPELKHFYRRKLMQKGLGKAKTAAARKLGIRLWIMLRDRIDYKEFCRRGQLRQKSGDARAGMPGR

SEQ ID NO: 380471 - protein, 473 aa, unidentified
MLMAGFDAEFVVAASQVLDEGVPADHRRRRSVRAETAHRTEPRLEPPVIPLDPVVIRYDISDASIRCRVGFYDLVVGFGVFRRNEPGQAVVCGDLRGRVVTWPPQRLTRLRCERESVSVVFRPVSSSNRTERRVAVRSIGMDVHRSFAQIAVLEGGVCRDDGRIGVKPEDLRAWAATLEPDDEVALEATTNSDAIAMLLRPLVGKVVVSNPRKTRAIAEAKVKTDKVDARILAQLLAADFLPATWVADDRTRMLRRLVVRRMHLVKQRTRVKNQVHAILARNLVPTCPHADLFSGVGRRWLEQQDLPADEWRSVDALIRQLDFHGDELAEVDRDIAIEAIDDPVVARLMTVPGIDVTVAIAVVAAVGDFSRFESPDRLVSYLGLNPRVRQSGNGPAVHGRITKAGPAQARGMLVEAAFAASRAPGPLRAFYRRIKDRRGFQVATVAVARKILVWCWAMLRDGTRWRDPSPQTA

SEQ ID NO: 380472 - protein, 350 aa, unidentified
MLIVGCDYHPGFQQIAFVDTETGEFEERRLQHRGEAEKFYRDLAARGVKVRVGMEASGHARWFERLLAELQLELWIGDAAEIRAKRVRKQKTDRQDAQHILTLLVQDRFPRIWVADWENRDLRQLLWHRHRMVQTRTRIMNQLQAVALNEGLRCKKRLWGKKGRQQLEGLRLAPWATRRRRDLLELLDRLNPVIAELTHEIEQEVEKCPAAQRLMTHPGVGALTALAFVLVIGTAERFQCGKQIASYLGLVPAEDSSGERRRLGHISKQGSAILRFFLVEAAQVTVRSVPEWRSKFFHLAMRRGRKIAKVAMARRLAVHLFWMWRKQWDYQQLNEFGPYAGKPGTGVGAH

SEQ ID NO: 380473 - protein, 413 aa, unidentified
MVEVVYPRCCGVDVHKKTVVACLIVPGPQGRPVKEVRTFGTMTDDLLALVDWVVAAGCTHVAMESTGSYWKPLYNLLEGVLEVLVVNAARIKAVPGRKTDVRDCEWIADLLRHGLLQASFIPDRPQRELRELTRYRASLVHERAAQVNRVQKVLEGANIKLAAVATDIMGVSGRDMLAALIGGTADAATMAQFARGRMREKIPQLEKALAGTFGTHQRFLIAQQLAHIDFLDALIERVSAQIAERVRPFEEFIALLDTITGIGRYTAEVLVAEIGVDLRRFPSAAHLCSWAGVAPGNHESAGKRKSGKTRKGSPWLRAALVEAAHAAGRTKTTYLGAQYRRLVARKGKKRAAVAVAHSILTIVYHVLTDREPYADLGGDYFDRRDQQAVQRHLVHRLEALGYTVSLQPKEPAA

SEQ ID NO: 380474 - protein, 285 aa, unidentified
MSQSIVYVGIDVDDTRYHGCALNQRTGEVLDFKCRPTLKGLVGQLEKLREYFGTVQLRLCYEASYVGFSLQRDLKDQGYDCAVVAPSSIPRRAGKSVKTDRFDAADLAEFYANGLLTVVAAPDAQVEQDRDLLRSRQRLMQQGALRRHIQSLLRRNGLRYKAETQRKTHWQTHHYGWLERTIEGCSGDLKVNLSLLVRQLKSLDDILAAYGEEVEALAVAPRYREPVKALTCYKGIKHLFALTMITEIGDVKRFAHPRQLVSWIGMDIREYALGGKSHRFGITAG

SEQ ID NO: 380475 - protein, 313 aa, unidentified
MPTPLNFGIDVAKDTLQIAWAESPAELCLANRRRAIADWLAKLAPGSRIAMEATGRYHLLLAELAHAAGMIVYVLNPCDLLHYARAVGLRGKTDRVDARLIGRYIVREHAELHPYVPPTPVQREIDQLLRRRATVVETKTRLRLSLHGMVGLAADLRIALKRLDGLITKLDQRLRQLATHQAESLRRVESVLGVGPLLGVALTNTFERVPLRNGDAAVAFVGFDPRAKNSGQCIGRRRLSKRGPAELRRLLFNGARSASKTKLWRPLYERYRARGLSTIEATVVLARKLVRVAFSIYRHGTTFDPARFARGLT

SEQ ID NO: 380476 - protein, 328 aa, unidentified
MFYLGIDVAKAKLDCCLLLDPESTKRKSKVVANTKAGFATLLQWLSGKGVSFPQLHAVMEGTGVYHEQAALALADAGVTVSIVNPAQIRDFGRGLAVRTKTDGVDSFVLARYGALLKPAAWQPPAPETRVLRALLARREAIAQDLQRELNRQEKANETETPALIRQSIDGSIAFLRKQLVELQENIDHHIDRHPNLRRDMDLLTSIPAVGPQTASNLLAIVHLHRFDSAEQLAAYLGLVPVERQSGSSLLGRARLSKVGPPRIRAVLYMAAIVATKYNPHVKAVYDRLVAKGKAKKAALGAAMRKLVHLCFGVLNTRICYQADYVKNR

SEQ ID NO: 380477 - protein, 340 aa, unidentified
MVHVGVDLDKRSSQIAVLTDDGEIVQQRLANDAVRLTKFFSQLPPQTPIAIEASGTWWWLVDLLEQLGHQPVLSNPKQTKAIAAARLKNDRVDAERLALLLRGDLLPTVWIPSAALREARELIRHRIQLVWLRGVIRNRLHAMLARRNLQPTSGKSWLTQRGQRELRQLPLAETPSRIREDCGALLPTLDAQIRRLDADLVTRWGADPRVRRLTTIPGIGPFIAIVLVLELGDIARFASAKRVASYVGLTPRVRGSAGRVRAGHITKEGNRLLRWVLVLAATQAIRRPGPLRAWFHAVKKRRGKKVARVALARRLVEIVFHVWKQECDYFTVVRHGVVRG

SEQ ID NO: 380478 - protein, 347 aa, unidentified
MKHYAGIDVSLNSSSVCVVDESGKIVREVKVASEPVALIHCIQSFGVRVERIGLEAGPLSQWLYGALRECELPVELLETRHVKAALSAMPVKTDRNDARGLAQLMRLGWFRPVHCKSMAAQEVRALLTARKLVQSKLYDIEMSLRGILRGFGLKVGPTTSRSFAARINHLASGHPSLKMVAEALLSTHAAALCAFKNLEKNVRQISRADARVRLLMSAPGVGPLVALTYVSAIDDPKRFTSSKRVGAHFGLTPKKYQSGETDISGRISKIGDSSVRAVLYEAAHIILTRPIHGGALKSWAMRLAKRAGMKKAKVALARKLAVVLHRMWVSTSIFDFEKANGCMHAVA

SEQ ID NO: 380479 - protein, 355 aa, unidentified
MNDAKYIGMDVHQATISVAVRDSRGNLVMEAILETKADTIVEFIHGLRGSLSVTFEEGTWAAWLHDLLQPHVTRVVACDPRKNALLKVGNHNDRMDARKLSELLYLNKLSPVYHGEQGIRTLKELARSYITITRDLTRVMSRLKAIYRSWGIACAGQQVYAPRYRAEWLAKISEAGVRRRAELYYQQFDALAALRQGTRGELLAEARKHPAMRLLRQIPAIGPIRAALLIALIQTPNRFRTKRQLWAYCGLALRTYTSGEYRFVAGQLKRSKKVLAVRGLNINHNHDLKNIFKGAATRAAATAGPFQGFYQDCVARGMKPHLARLTLARKIAAITLLVWKKGDRFDAEHLKQQAA

SEQ ID NO: 380480 - protein, 428 aa, unidentified
MSQADRIRLEEFRQFKKEVRGSAEYLIVGIDVAKDKHHAFFGTATGETLFRGLVFGNDLEGFQRLLVQVESLKVQHGLRRVVFGLEPTANYHKPLGEHLIRCGHPVVFVSGVAVKENRKSLDGRWDKHDVKDAANVADLVSQGKCLFYEYPEMALRDLRDLLSLKRRLRRIEHGHRVRIRNHLVAEYFPELDRYYEQSQKVSLAVVRWCLDPSVIAGMEYGKFEQLVAPGRERLYQGRRLELIWKMAVDSVGCEVGEGAEFEAKVMVEGLRQIRESLRALDEKIQEICSGFAEYEFLLSIPGFGPDVSSKVLGAIGDPFRFQSGPQVLKLAGYDLSAERSGKSAEVAPAVISKKGKADLRYALYQAALIASVRDRHFMVYFSNRLRGREREPGIKTKMRVKLAAKLLIIAWTLMKKKEPFNPDYLKTA

SEQ ID NO: 380481 - protein, 347 aa, unidentified
MRIVPHSCAVYGVDLGKTTFHIAGADQHGRPTLRIKLRRDALLQFFATASPARVGMEACPGAHWLARKLIAFGHDVKLIPAQFVKPYLKSNKNDTLDAEAIAEAVTRPTMRFVPVKRHEQLDMQALHRVRAQFVHQRTALVSQFRCFLLEYGIAIHTGIGMFRRDATRILADDSNDLTPTMRQLLTDLWSDFLRIDERVTALSGQIEASAKHDDVVQRLTTIPGIGPLGASALCAAIGNGKQFRSGRDLAAWIGLVPRQHTTGGKPTLLGISKRGNTYLRRLLVLGAQSCLMHLDRSRDRLGRWLDTLESRMHHNKVVIALANKLARVAWVVLTRPGALYEKMDPRF

SEQ ID NO: 380482 - protein, 332 aa, unidentified
MVDKVTEAAVVGGVDTHKDLHVAAVVDQNNKVLGTQYFSTTRQGYRQMLAWMTSFGTLKRIGVECTGTYGSGLLRYFQSAGLEVLEVTAPDRMERRKRGKSDTIDAECAAHAAFSGIRTVTPKTRDGMIESLRVLKTCRKTAISARRVALQIIHSNIISAPDELREQLRNMTRMQLIRTLGSWRPDASEYRNVTNVYRISLKSLARRYLELHDEIADLDVMIAAIVDELAPELIKRNAIGYESASQLLITAGDNPQRLRSESGFAALCGVSPVPVSSGKTNRYRLNRGGDRAANSALHIIAIGRLRTDAKTKEYVARRVAEKDIQKWKRYAV

SEQ ID NO: 380483 - protein, 320 aa, unidentified
METEKVYVGIDVSKDTLDVAVHASEQRWRFANSDKGITEALSCLEELCPTLVVLEATGGMEYPLAAALAVAGRPVVVVNPRQVRDFARATGRLAKTDAIDARVLAHFAAAMHPQTRPLPDTQGQELKAILARRRQLIEMLTAERNRLQSARSKAVKANIQAHIAWLEKEMTHIDHDLGQSIRQSPVWQEKDDLLKSVPGVGPVLSTTLLADLPELGLLNRREVAALVGVAPFNRDSGHIRGQRAVWGGRAVVRSALYMSTLVATRYNPIIRDFYRHLLSAGKPKKLALTACMRKLLTILNAMLKHKKPWHYPISEILQTS

SEQ ID NO: 380484 - protein, 393 aa, unidentified
MICVGIDVAKDKHDCFILSSEGEALADVFTIQNNAEGFDRLLQTIRRCTRPEDKIKVGLEATGHYSYNILRFLLDKGLPTYVINPLHTNLYRKSLSLQKTKTDRVDARTIAAMLMSDVDLKSYTDTAYHNEELKSLTRYRFDKVRERAKLKQSVSRLVTILFSELEKLVSTLHMASVYALLSEFPGAKQVSEAHLTHLKAVLHDASKGRYGSDMATTLRDAARCSVGSVMSAKSLELRHTIRLIHELDAEIEDIEAAIQSMMGEIQSPITTIPGMGVRMGAMILAEIGDFSRFDSPDKILAYAGMSPSTYQSGQLSLSGAYSHMEKRDSRYLRYALYNATKYVCLWNPTFAAYLAKKRAEGKHYNVALSHATKKLVRLIYALEKSKRPYSTAA

SEQ ID NO: 380485 - protein, 345 aa, unidentified
MEQISRIGMDTSKHFFQLHGVNAAEKVVLRKKLRRKEMVVFFEALAPTVIGIEACGASHHWARILRSFGHEVKLIAPQLVKPYVKRGKNDTADAEALCEAMSRPTMRFVPVKTAEQQAALMMAGLRDRLIRNRTQLSNAIRGYAAEFGFTSARGMAHIDPLLDRIQADESVPVLARELFAAQAEEYAQLQAQIVEADAKLMAWHKADECSRRLANIPGIGPIGATLLLLKTPAPEMFRSGRQFAAWIGLTPKDHSTAGKVRLGVITRAGDEALRSVLVVGATAVIQHVRRGGRGSPWIVGLLKRKPPKLAAVALANKMARIAWKLMVTGNGYAAKSAPAALMGAA

SEQ ID NO: 380486 - protein, 373 aa, unidentified
MQENSKIFVGLDTSKMKISVALAEEGRQGEVRFLGDIDNTPDAIGRLVRKLTGKFRELLFCYEAGPTGYGLHRQITALGHACSVIAPSLIPKRPGEHVKTNRRDALTLARLHRAGELTTIWVPDPGHEAIRDLVRAREAAMEDLRKKRQQLQSFLLRHGRIYPGLRSWTLVHARWLSNLTFEHPAQYLVLREYRQAIEDAEARLERLTQQVADVVSTWSMAPVVEAYQAMRGVAFLTAVTFVAEIGDVRRFETPRQLMAYLGLVPSERSTGDQVRRGSITKAGNPRARRVLIEGAWTYRYPARLSRALQVRQERLPKTVRAIAWKAQMRLCARYRKLMAAGKRQTLVTTAIAREMAAFLWAIGHEVEPRSAAA

SEQ ID NO: 380487 - protein, 311 aa, unidentified
MYYIGIDVSKKDLSVFDGKDLKFANKEGLKSFKKYLKKKYNLSEIAIIFEPTGIYSLYLKEFCAENSIKAYIINPKKSHNFTRALGKRSKTDKIDARILYQFHKHIDLKDIQVPQIGQQAKTLASYLVSYEFALKQRISLSNHLESLRDKGLIALMKKDLKRAKMLEDKLFHDIKEYVSKNQNLREDYQRLLTISGVGEKTAIALLTLFKTYQGTNRAQITALAGLDPVRRESGTSVKDKAKISKNGKGIYRKIFYLPTVCATVHNQKIRVFYQRLLAHHKTKKLAVIASMRKMLLIAHDMYRDKTEYIAV

SEQ ID NO: 380488 - protein, 363 aa, unidentified
MKVPSNTKPSPKGGQLMNFYTQQHKYYCGIDLHARKMYVCILNQQGNVQLHKNIDTEQEVLIELISPFLDDIIIGVECVFCWYWLADLCAKHQIAFTLGHALYMRAIHGGKTKNDKIDSYKIAHLLKGGNFPVAYSYPSEWRATRDLLRRRMYIARKCGELVAHIQNTKTQYNLPGFNKKLTRKYNHDGVAEQFPDPEVRKSVEVDLELITSLNETLRKLEWHIEKSARQHDYHTLYLLRSIPGVGQILALVILYEVHDIKRFPRVQDFSSYARLIRPSKESDGKWAGTSNKKIGNHHLKWAIKEAAILMLKESSQAKQYVGKLEKKYNKGKALGIFTHKLGRAIYFMLKNKEAFDMKTFFDK

SEQ ID NO: 380489 - protein, 316 aa, unidentified
MEPIVAGIDVGKATLDVAVRPGTARRTVANDAAGWAEVVAWLRTAHVTHVVLEATGGYEVDVALACAGGGVTVSILNPRQVRRFAEALGLLEKTDRADAGALAEFALRIKPRATRLPDEGQRARMALVTRRRQLMDMITAEANRLHACRDVAVRKGINATLAFLRRQVKGLDGDIDRQVRKTPLWRDDVELYESIPGVGRVAATTLVAELPELKTLPAKKLAKLVGVAPLARDSGTSVRGKRPIYGGRASVRAKLYMAALVGVRFNAVLKAHYTQLLARGKEKKVALVACMHKLLTILSSIAKSRTPWREIALAAP

SEQ ID NO: 380490 - protein, 343 aa, unidentified
MNTVCRIGMDTAKNVFQVHALDANGGTVATRRLRRTQVLDWFARRDRSSDCLVGLEATGGSHYWARQLQRLGYRVRLLNPKAVKPYRQGQKTDARDAAAIAEAVAREVVSEAPVKSEEQQALLARQSYRRRLVEARTALGNQLRGFLAEFGITVPRGWKKLRERLADAAEDADNGLPADLRAVLAEGAEELRDLDRRIDAQDREVARQARADERSRRLMELDGIGPLTALRLVAICGDGAPWRNGRGFAVSLGVTPRQHSSGEHVRLGAITGHGDTELRTLLIHGSRSTLRRADQGVALDPWTERLRQRRPHNVAAVALAHKRARIAWAMLAHGTRYQAPMAA

SEQ ID NO: 380491 - protein, 341 aa, unidentified
MGHYIGIDLHKATSYVTTVDETGRILDQRNLRNEPETLRAYFGAQPADARLVVEATGHWMWLYELLEDRYPDLVLAHPLKTKAIASARIKTDKLDATVLAQLLRADLIPAAYIPPRAVRDTRELLRYRAALVTQRTVLKNRIAAIVTKTGLKLPTKTAVGVKSRRVLATAPVRPCYRAALDGWLRLLEALTTEIRQVTATIEAQAHADPQAQRLQTIPGIGPYSALLILSEIGDVHRFPDSRHLCSYAGLVPSVHASGGKTRLGRITKQGSKWLRWILVETAVHAVNGAPQFRSLYWRVRRKHGAHTARVAVARAVLKTIYAMLKTEQVFEARSRRVAVAG

SEQ ID NO: 380492 - protein, 433 aa, unidentified
MECCAGIDVGKREMTATILTGSAAVEPVQQTQTFGTTIQELNRCLGWLLMNHCSTVVMESTGSYWVPVWNVLHEHVAVIVANPEQVKGRRGEKTDPEDSRRLAERLRVGDVRGSFVPSEPILQLRDLTRRRKRLLFAANSERNRIQKLLEQGNVKIGNVVSDVFGISGQCILQALLQHPQQNPADLAQLARGRLRNKKQALIETLEDHRLNDHLRWMIQHSLDHLVFLEKQLSELSQKILENLQPLEREYELLQTIPGIAAETAAIILAETGGNMAQFPSPRHLTSWAGICPGNHRSAGKQKSTSIKRANKWLLAALVQSAWATVRKRGSIFRKRFYRQMQHRGRKRALIAAGRALLAVVWQVLQRMTPYCEPVNEVLQERERSKKVQHHLRRLQQLGVDISALELPPLSPAEAARPMTGSLRTLGALGIHAR

SEQ ID NO: 380493 - protein, 312 aa, unidentified
MIKTFCGVDTSKQHLDARIVPGEAFARFANDAAGIAKLAAFCAEHKADLVVMEATGGFERLAFTLLWEAGVACAIVNPRSVRQYAEAMGFLEKTDRIDAFVIAHFARNKDLKPTLPASKNQCRLKGLVVRLRQLTDDLVVNQQRRRQVEDDEIRATFDEIIALFKRQSRRLEGEIASLIDDDPLWAVLNETFRTVKGVADRTVARIMAELPEIGTYDNKAIAKLVGLAPLANDSGKKNGKRSIRGGRSGVRSILVLVAGTARRYDDSLADFHRRLTAAGKPKMVVRVALAHKLLVRLNAKARDARAQYANAT

SEQ ID NO: 380494 - protein, 383 aa, unidentified
MTTETTSRNEYNSFQRYLYMAFELGQSEWKLGFTIGYGQKPRLRTIKARDVVALQDEMRAAKKRFGLPEDAPVLSCYEAGRDGFWLHRYLDENGIQNLIVDSSSIEVNRKAKRAKTDRLDARKLLTMLMRYHYGEKKTWSVVNVPGSETEDHRHLHRELNTLKAERTKHINRIKGFLTGQGVCISIGKDFLSRLETIRLWDGSPLPPGLRSRLEREFARMLLVNEQIKILEAERRELLCNSTRPDVELVRQLMRLKGVGVGSAWLWVMEFFAWRQFRNRRQVGALSGLTPTPYQSGADSREQGISKEGNAYVRSIAIQIAWGWLRYQPESKLTRWYQERFGHGSKRLRKIGIVALARRLLIDCWYYLETGLVPEGVELNQVRS

SEQ ID NO: 380495 - protein, 354 aa, unidentified
MAEALKKSIAFVGIDIGKNSFHVVGLDKCGAIVLRQKWSRGQVEARFANMPPCLIGMEACVGAHHLSRKLQRLGHDARLMPARYVRPYSKGQKNDFRDAEAIAEAVQRPTMKFVATKTVDQLDLQAMHRVRERLVSQRTGIINQIRAFLLERGVAIRQGLRFLRAELPGILAGPTDALSPRMVRILEDLAGDWRRLDERIEGLSNEIEAIARQDAGCERLISVPGIGPIISSAMVAAIGAGDVFSKGRDFAAWLGLVPRQISTGDRTILGKISKRGNRYLRVLFVQAAWVVLIKPKSWERHGLKSWIEAAKKRLHRNVLAIALANKLARIAWSVLAHGRSFEASKLTAAVTQPA

SEQ ID NO: 380496 - protein, 365 aa, unidentified
MSKDIKKPAGETRRYVGIDLGDKKSRICILDERGEIVLQEWVVTTPEAFFKRFHGEAKMDIAMEVGTHSRWASDLLGRCGHKVVVADPRQLALITKNDAKSDKRDARTLAQLLRADPRLLSPIEHRAENLQTDLTVIRMRDNLIETRTRLVTSVRGVVKATGGRLPSSETSSFPQQVSDLIPQPLRPALAPVLEVIDRLNEAIYEYDCLLEHWARTRYQESSRLTQVKGAGTLTALTFMLTVGDKARFSRTRDIGPYLGLRPRLGQWGDNEPQLRITKAGDGLLRKTLVECAQYMVGPFGQDSDLRRWGLKMIEAGNGSKRARQRAVVGVARRLAVLLMSLWKSGQTYDPLRHSRAQESSAEVAA

SEQ ID NO: 380497 - protein, 359 aa, unidentified
MEADQGVTGPFIIGGVDTHKDLHVAAVVDQHDQVLGSRSFATTRHGYKLMLAWMRSFGELQRVGVEAAGTYGAGLLRYLQKAGVEVLEVTTPDRQDRRRRGKDDDLDAQNAAHAAFAGKRTVTPKSRDGMIEALRVLKACRKTAVAARRVALQMIHNTVVSAPDELRETLRELTRMQLIRTLAAWRPDMTDYRNVTSAYKITLRSLARRYLELHDEIADLDGLIIALVDELAPALVARNSIGHASAAQLLLTAGDNSERLHSEASFAALCGVSPVPASSGKTTRHRLNRGGDRAANSALHIIAIGRLRSDPRTQAYVAKRIAEGHSKLEAIRCVKRYIAREVFSLIRQRRREINQQIAA

SEQ ID NO: 380498 - protein, 351 aa, unidentified
MMIIGVDYHPSFQAIAFFVEETGECGERELNHSDGEAERFYRDLQQRGIRVRVGMEATGYSRWFERLLAELGFEVWMGDPAEIKAKRVKKQKYDREDARLLLRLMRENNFPQIWVPSPENRDLRQLLWHRHRLVQMRTRIMNQLQALAMNEGYRWKKKLFSTQGRALLEKLALGPWASRRRQELLELLDRMNPTIEELTATVEREARKRPEAMRLMTHPGVGPLTALAYVLIIGTPTRFERGKQIGTYVGMIPCEDSSAHKQRLGHISKQGSSLLRFLLVEAAQAAARIHPDWRRRYVHLAMRRHKSIAKVAMGRRMAIKLYWMWRNGCEYSQSVKCGSYAGQLGTGHGVN

SEQ ID NO: 380499 - protein, 456 aa, unidentified
MNFEKTDATLYNLKCELPDKVTTNQKIQEASYMKRTQNEKILQIKNETLVVGIDIGKDTHYARAFDFRGIELSKLLRFSNTNQGYETLENWMQGIMKEKGKTESTVGFEPTGHYWFTLGDHLQRKGHHLGIVNPFHVKCTRELDDNSQTKNDRKDPKTIAMLVKDGRFREVYIPEEVYQELREAVSERERLVEQMISLSNQVIRWLDIRFPEFNEVFKKWSGLAAILTLKHFPTPAKVFQTGVSGIVSTWGREMKKPSHKKAERLFKLASESIGRTAGSEAAEASLQNLLKQYEMVLQQIQETEKLMQELLLKVPNASKLVDIKGIGMVTAAVIVSEIGDIDRFKDPRQIQKMAGLSLRENSSGKHKGKTTISKRGRKRLREGLFKAIITMLATNQEFRMLHQRNLGREKNPLNKMESIIALCGKLIRVIFAILTKGNDYDANKMVEDMNRSMKAA

SEQ ID NO: 380500 - protein, 413 aa, unidentified
MALKIVYQVCCGIDVHKTFVVACIATTNKGVTTYKSHRFSTYTKGLQELSQWLCKNDCKDVCMESTGKYWIPVFNVLEDSCNIVLAHPKYVKAIRGKKTDKKDAKWIADLFKHDLVAGSFMPPLAIRQLRDLMRYRFKLTNFMSSEKNRLQNSLTVSNIQLGNVVSDTFGKSSMNIINKLLENPLDNNFDIEPLVHASMKEKLPELELAIDGFITPEQAEKLKVIKRHYKDLESRKADLEKIILSLSEPYTGQIDLILTVPSFKNIFSAIAVISEIGVNMDVFPTAKHLCSWAGLTPTNNESAGKKKSVRISRAGCYIKPLLVQCATAVVKSEKHPEIRNRYLRLKQRRGHKKAIIAIARMLLTAIYNILKKKESYNAELYRKADVLPVSREITVEQAIILARTQGYRIRAAS

SEQ ID NO: 380501 - protein, 379 aa, unidentified
MIAEFTISHEEEGFRAIQRRLLRLAPAGEILVGIETSYNVIVDFLLDAGFEVACIHPNQIHGDRKQVSSSGAKSDRSDALLIARHLINNEDGLRTFKPDSEETVALRQLVAERQAIVKEETSACNRLGSLLERYLPAALGLFSSYKSKIYRAFLRAFPNQEALEAASLEDFRAFLVEQRYCKKVVAEDILASKKNAPAGARGLLGEVGSTCILAEVDKIEALCSISKRLEKEMKKTLDAHADAEIFKSFPGADTVMASRLLVSFGDDRTRFPHAESMASLIGIVPVSKASGKSKTVHFRRACNREGRHTFHLFTNLTRASTPWAQDRYLALREGGKSHAHALRVLGRSWLRIIHACWKSRTLYDPGRTASRAPRKGALR

SEQ ID NO: 380502 - protein, 367 aa, unidentified
MENHNIAWIGMDTDTKNNQVAVYRGWDKEPAAEWTVAMNRKGIEKLIERLKKEGCEVRCVYEAGPCGYEMYRKLRKAGIHCDVIAPSMTPRKPGDRVKTNRRDARNLGRLYRAGELTSIEVPDEKQEALRDLVRAREDVREDLTRRQHRLSRFLFRQGLAYTEGTSWTMKHWRWIGKITFEDSNLQTVLEESIRSVQQSQEQLKAFDARIEETAGKPEYERKVARYKTLRGVRTVTAMTIVAESWDLRRYPTAPEYMGSTGLVPSEHSTGDHQRRGRITKAGNAHLRRVLVEAAWHYRHRSMAGPSIKKRRQGQSATVVQIAERADQRLNRKFRRLVDRYNKKPAVAVVAVARELAGFVWAVGQLQD

SEQ ID NO: 380503 - protein, 360 aa, unidentified
MYDATSTEQAKVTVGLDLGDRYCQICVLDEAGEVTEEGRVSTKPEALARRFSGTAPLRIVLEAGTHSPWVSRLLTELGHDVIVANPRKLRFIYQTDSKSDRVDADYLARVGRLDPALLAPITHRGADTQADLALVRSRTALVRARTRLISHARGCTKSLGSRLPTCASDIFARKAGPCVPEELAAALAPVLTIIQDLSEEIRALDQKIEDMARERYPETALLSQVPGVGTLTATVYVLTVEDPGRFPKSRAVGSYLGLRPRQASSGSLEPQLRITKAGDEHLRWLLVGAAHYILGPFGPDTDLRRWGLALAAQGGKRGKKRAVVAVARKLSVLLLRLWRTGEVYEPLRNARLRGEIVPIT

SEQ ID NO: 380504 - protein, 353 aa, unidentified
MSNIKYVGMDVHKSITVIVVLDALGQVESRSQVKTKAENIRDFFRGISGKVEVVFEEGTHSAWLYKLLKPLVASVTVCDPRHNKLIEDGNKSDDEDAETLARLLRLGAVKAVYKGDDQQQQLKEICRAYDNLVEDSTRVQNRLKALYRGRGIDCSGHALYRADQRSGWLAKLSEEAARFRAESLLEQLESISQLRKQAKQRLVAQARTHADYKILVKLPGFGPVRVAQLIAEVGTPHRFRTKRQFWPYCGYAVVTRSSADYQVVEGKIVKQRKKVSTRGLNRNHNPQLKQVFNGAALTALRHEAIKAYYQRLIDHGTRPELARLSVARKLSSIALTIWQRREEFDAKKAFAQD

SEQ ID NO: 380505 - protein, 354 aa, unidentified
MPKTASAEIAVIGIDIGKNSYHVVGHDSRGAIILRQKWSRGQIEARLANMLPCLIGMEACVGAHHLARKLTALGHNARLMPAKYVRPYAKGQKNDFNDAEAIAEAVQRPTMKFVATKTAEQLDLQALHRVRERLVSQRTGIINQIRAFMLERGIAVRQGIRFLRAELPIILASRTDVLSPRMLRVIEDLAGDWRRLDERVASLSREIDTIARQDAGCDRLMSVPGIGPIISSAVVAAIGSGDVFSKGRDFAAWLGLVPKQMSTGDRTILGKISKRGNRYLRVLFVQAAWVVLVKPQSWERHGLKPWIEAAKKRLHHNVLAIALANKLARIAWAVLAKGRGFEATRTVDGSTQPA

SEQ ID NO: 380506 - protein, 355 aa, unidentified
MEAVLECCCGLDVHRDTVVACILKGPLKGKPESMIKTFSAMPDGLKELRLWLESQSCRFAAMESTGVYWQPVYNELETAFDGSMVLLLVNARHMKNVPGRKTDIKDAEWIAQLLRAGLLKGSFIPAKPTRELKELTRYRKSLVEESSAQKNRIEKLLQGAGIKLSTFLSDVFGISGRNILEYLSLHGEFPAHLLKDFLKGRLKAKEDDVKRALQSKLSPHQQKLLQMQLRHLYQIEDNIGMLEAEIECKLRLFSEQLKLIASIPGINLNAAAAIIGEIGTDLSPFPDAEHFTSWAGLSPGNHESAGKKSPPVSPKAIAISKGSFVKLPGLSPECVKHLCPAGTGKSGSGEDHKKP

SEQ ID NO: 380507 - protein, 338 aa, unidentified
MPVMIGVDPHKASHTAAALDDQGRLLDQQRIPATVDGYQQLRQWADRWPQRCWAVEGAHGIGRALAQRLVSDGEQVLDVPAKLAARVRVLSVGHGRKSDPDDAVSVAVAARNAPQLRPVGVEDQATVLHLLTKRRQDLIAARTQTVNRLHRLLMDLVPGGARRNLTARRAALLLAAVTPAGAPAVTRWQLASELVADVCQLEQRIAQVEARIKTAVAEAKTTLMALFGVGPVLAGTFLGEVGDISRFPSKHHFATHTGTAPLEASSGQVIRHRLSRAGDRKLNHALYMMAMVQVRRPSAGQAYYRTQAGRGQVPQGSPALFEAAAVGRRLPLPVGRSA

SEQ ID NO: 380508 - protein, 422 aa, unidentified
MEAFNVSDFAALIGTDWADRKHDICEINRDTNTQHLSVISSEPKSINAWALELKQRYNGRSVAVACELKKGPLIYALSKFKHIVLFVINPSSVAKYRAAFTHSGAKDDPTDAIIQVEILQLHMDKLTVIRPDSEDVRCLAQLVEYRRKLVQDRVNLTNKIATTLKNYYPHVIDWFKEKDTQIFCDFLLRWPSLAHAKKARKQTLLDFFNQHNSRYPLVNEKRIKEIKDAEILTEDMAVITPNLLLIECLVPQLKQLMLAITRFDDEIKTLYKQHTDRAIFDSLPGAGPQLAPRLLAAMGSNRDRYKCAADIQKYAGIAPVTERSGKKEWIHWRYSCTKFLRQTFVEWAGLSVRYSFWAKAYYRQQEAKGKPHNTIIRSLAFKWIRILFRCWKTHTPYDESTYLTALKSKGSPLLKFAVESEL

SEQ ID NO: 380509 - protein, 416 aa, unidentified
MTEPQISSPFERYLALDAHKRYVVVGGLNARLEIVLPAHRMDMERYPQWVKENLNQQDCLVIEASTNTWDLYDITATVAGKVVVAHPLAVKLIANARVKTDKQDVFRLARLLAGGLIPEVWVPPVPVRELRGLIAHRRRLIRMRTMTRNRLHSLAHRHNLILPEGGAFTDKNQDWWKSLSLSPVEKLRLHQDLALLEFLAPEVKAVDAELARLSCCDPWKEAVPYLIQLPGFGLIITLTILSAIGDIQRFPTSKQLVGYSGLGASLHQSGETNYSGHMTKQGRRELRFALVEAAWTAISSSPYWREQYQKLSHRMPANKAIVTIARRLLVAAWHVLTERATDRRADPDNVAAKLMVWSWKLNDLQRGGLTSRQFVRYGLMRLKIGQEIAHIKHKGNRPIASVEEVLDRLPELNLNI

SEQ ID NO: 380510 - protein, 346 aa, unidentified
MKHYVGMDVSLKLTAICVVDQTGSVIREGVVDSDPEMIAEFVRSNAPSVVRIGLESGPTATWLWTELKQLGLPVICIDARHAKAVLKMQINKSDRNDAAGIARIMQTGWFREVRVKDLDSHSVRALLASRALLVKIKRDLENQVRGLLKNLGLVIGRAKLNVFAVRAEELIEGRPELMAAVRPLLAARHAIERQVDDLDHKVMRLARNNAQVRRFMTAPGIGPITALCFLATIDDPTRFKRSRSVGAYVGLTTRRYASGEIDWTGRISKCGDKMLRSYLYEAANVLLTRVAKWSTLKSWGVRLAKRSGLRKAKVAVARKLAVILHRMWIEGTEFKWSSKEVANQPA

SEQ ID NO: 380511 - protein, 336 aa, unidentified
MMILALDIGKSKSVACRYGAATGEHSFETIATRPQALYDLLEVDRPDRVVIEICSVAGWVGDMVRGLGINLQVANPNHDAWRWKNVKRKTDRDDALKLAQLSAMNQLPVVHLPEWDVRAWRSLIQFRQQLVSRRTAIKNHIRSIVDRQARTLRAGKSGWSEKSLKLLRAWANPPADEAPALWQFELSVELGQYESLAKAIKEVESKLDELAKSDHRVQRLRTIPGVGPRLAEIVVAVLDDPRRFKSGKQVGAYVGLTPRLYESGSMSRQGKISGQGHKHLRSMLVEVSWLGLRHNGWMLEVYERVRRGSSTRKKIAIVAVMRRPIDRPASSMTRND

SEQ ID NO: 380512 - protein, 403 aa, unidentified
MNSVGIDISKGRSTVAVMRPFGEVVISPFEVRHTGSELSELARRLKSLDGETRVVMEATGNYHAPVAKLLHDAGLYVSVVNAKLVHGYGNNDLRRVKTDRKDAVKLANYGLDRWLSLPKYVPEEDTRLLLKNCYRQYRQYSKVQTLLKNNLISLLDTVFPNANRLFSSPIRRDGSEKWVDFVAEFWHCKCVCERSERAFINKYQRWCRKHGYNFSETKAQTIHAVASGHIGVMPKSETTKLLVEQAVAQLRATSAALAALKHEMQTLASQLPEYPVVMDMFGVGPTLGPQLIAEIGDVRRFYSKKALVAYAGLDAPPNDSGDMTGRHKSMSKIGASSLRRTLFLVMSVYLQNAPLAEPVYQFMDKKRAEGKPYRVYMMASANKFLRIYYATVKAYLESLEHTA

SEQ ID NO: 380513 - protein, 343 aa, unidentified
MQTITTIGLDIAKSVFQAHGIDAEGKVVLRRQLKRRYVVAFFQKLPPCLIGMEACASSHHWSRALQALGHTVRLMPPAYVKPYVKRHKNDAADAEAICEAVTRPNMRFVATKTPEQQSCLTLHRTRHLFIRQQTSVINVIRAHLAEFGIVAPVGRNGVEQLLGVVADANDRRLPDVARACVAALGAQLQTLKARILQFDRLIMAWHRSNEASKRLDEIPGVGPVLATALVASVADPKMFRSGRDFSAWIGLVPKQNSSGGKDRLGHISKRGDRYLRSLFTNGALAVIRYAKIHGTRHRPWLTALLARRPTKVAAIALANKIARMAWAIMARGERYREPVALAA

SEQ ID NO: 380514 - protein, 417 aa, unidentified
MRIVRPICCGADIHKDLIVATIAATNQDGITEYIQSSFSSQNFDLVRLKAWLIEHHCFEIAMESTGKYWIPVFNVLEGEIKVFVVHPKYTKAIKGKKTDKKDSKWIADLFKHDLLKFSFIPPKEIRELRELSRYRIKLIAMRSSERNRYQNSMTISNIGLASILSDPFGKSSRAVMKEVVRSSSVTEEKISKLLERNAKKKVKEVLHSLEGSHIESDQRLKMNIASQHMDQIDSHVRRLETEMAIRCIPYATLINLLLDIPGISYLSAMTIIAEIGTDMSVFETSKQLSCWAGLAPANNESASKKKSVRISKAGSYLKPLLVQCALAAINSKSNPYYRIKYNRIKKRRGHKKAIIAIARMILVNIYHILSTGEVYSPCDMEQIINPKPVKKVMTIQNAIEFLQSQGFDTSKLISSSS

SEQ ID NO: 380515 - protein, 313 aa, unidentified
MHSIGIDMSKDTFHAAFDEELVRVFQNSVTGIGVFVRAMEEVGCTKDNTTLGTEATGVYHLLLCEQLRSQGWKVKVINPLITHRMFKSTLRHAKTDRNDAFAIRKTLLTGAGYTYTDTPDILALKTLVQEREALCRMRAETKQRIHAHDIKAKASGLDLHESFSGTVKLLTYEMKEIEKRMGEYAAETQELLRSIPGIGKVTAASLVAYIGDIRRFATPEKLVAYIGLDPRVHQSGTSIHGKGYLTKRGNRYLRYILFNAAFIARQKISELKCFHQKKMSEGKHYYSALCAVERKLVHLIHAVWTRGTPFVAR

SEQ ID NO: 380516 - protein, 334 aa, unidentified
MSEIIRIGVDTSKHVFQLHGVDAQEKTVLRRQLRRGQMEAFFASLPPAEIGLEACGASHHWARMLTALGHRVRLVPPQYVKPYVKRGKSDSLDAEAICEAMSRPSMSFVPIKTEEQQAGAMLLTVREGLVRQRTALINMIRGHAAEFGVTAAKGACQVKAILARAAAELPALAFRLLSLLGDQLAALEATLKALGAELMAWHRGNALSRRLAGIPGIGPIGAVALVLRVPDPAAFACARGFAAWTGLTPRLSGTAGRNRPGRVSKEGDETLRRLLVLGAMAVIRRAQEGKGSAWLLGLVARKPPKLAAVALANKTARIAFAMMRSGEAYRGAPA

SEQ ID NO: 380517 - protein, 424 aa, unidentified
MKHPIPQRFAALIGIDWANAKHDICLQASDSEAIEHSVVKHSPEAIDVWVRELRQRFGMQPIAIALELDKGPLVYALQKYDGFVLFPVNPTMLAKYRQAFVPSGAKDDPTDAELALQLLLRHPEALKGLKPQSAPMRSLVQLVQDRRRLVNDKVRITNRLTNALKNYFPQPLQWFRDKDTVLFCDFLSRWPTLKQLKRARRSVLEAFFHEHNVRRRTVIEERIQAIRSALPLTEDPAIIEPQSLLAMALIAQLRCALDAIERFNSAIEATTAQLPDYAIFSSLPGAGSTFAPRLLAAFGEDRERYQRCEELQKYSGIAPVTERSGQKSWVHWRYRAPTFLRQTFVEWAGETIPRSFWAKAFYEQQRNKGLSHQAALRTLAFKWIRILFRCWQNRTRYDEATYLLALQRSGSPLLQARAASMSSA

SEQ ID NO: 380518 - protein, 349 aa, unidentified
MSQNPNSAVAVIGIDIGKNSFHVVGLDTRGAIVLRQKWSRGQVEARLANMSPCLIGMEACVGAHHLSRKLKAFGHDARLMPAKCVRPYSKGQKNDFRDAEAIAEAVQRPTMKLVATKTADQLDLQALHRVRERLISQRTGIINQIRAILLERGVAVRQGLRFLRAELPRILATPPEVLSPRIVRVISDLAEDWRRLDDRIDQLSSEIAVLARQDAGCERLMSVPGIGPIISSAMVAAIGTGDAFSKGRDFAAWLGLVPKQMSTGDRTILGKISKRGNRYLRVLFVQAAWVVLIKPMSWDRHGLKRWIEAAKKRLHRNVLAIALANKLARIAWGVLAGGRTFEANKLQAA

SEQ ID NO: 380519 - protein, 349 aa, unidentified
MTIVEDARVITGGVDTHADLHVAAALDPVGGLLGVQEFPATAAGYASLLGWLGGFGTLALVGVEGTGSYGAGLARHLAAAGVRVVEVDRPDRQDRHRQGKSDPLDAVSAARAAQSGRASGAPKGRDGAVEAIRALMVAKRSARAERTQAINQARALIVTGPDELRARFAGHRPAQLVEAIAALRPRPGEVPGYATRVALRELGRRARFLDAQLARLDELTGPLVTARAPGLLALHGVGPDTAALLLIAAGDHPERLRSESSWAHLCGAAPIPASSGKVSRHRLNRGGNREASHALWRIVITRLGSRPGHPATRAYVERRTKEGLPEKEIIRCLKRYVAREVYRQLRAGA

SEQ ID NO: 380520 - protein, 341 aa, unidentified
MGEVSTVGIDLAKSVFQVHGSDPSGAVIFRKKLRRDQVLSFFSTLPRCVVAMEACASAHYWAREIAAVGHDTRLIPPAYVKPFVKRQKNDMADAEAICEAAQRPTMRFVQGKSAEAQASGVIFRTRDLLVRQRTQLINALRGHLTEFGYIVRQGVGHVAKLVDIVGDPASEIPVEARPVLAVIAESLQAMQAQIALLDREIASRAKADPVAKRLMTIPGVGPVIATALVALAPTASTFGRGRDFAAWLGLVPRQHSSGGKERLGRTTKMGERSLRRLLILGASSATKVAARDPDKAGAWLAGMLARKPRMLVTVALANKMARTVWALMAHGGSYRAPAAAV

SEQ ID NO: 380521 - protein, 346 aa, unidentified
MLYAGLDLSRKRLDVHLLDEAGGTVEVSAAPPDADGLHRLAAHVERFGEPVQAAIESMNGARFVHDRLEQAGWRVEIADAVRVKGLAPLACKTDRIDAWVLAELARRELVPAIWLPDPAVRAERERARFRLHLVRHRSSLKQRVHALLLAHGKPCPVSDLFGVSGRALLERLALPEPWADTLAASLRLIDELDEEIGACEAELRRLGAGHRYVPLLMSVPGIGFVLGYTIAAEIGAIERFASPGKLAGYSGLCPRVYQSGASDRRGALAKNGPRYLRWALVEAATVACRHPVYRERYQRTKHRLGRQRGAKVAQVELARRLTEAIWHMLTRNQPFAPAGATGPLTA

SEQ ID NO: 380522 - protein, 352 aa, unidentified
MLYTGIDYHKKYSVVSTVDATGIRIREARIDQNEPAAFAAYFQGLPEPSRVVVEACWNWGWLYDELGEIDAVEDVVLAHPFKTRLIADAQIKTDRLDARALATLLRGNLVATVHAPTPANRARKHVIRQRLFLVRVRTMVRNRVHTVVARQRHLDRPVFSDAFGKKGLHWLHTVALPAPDDTLLRQDLATLEQLGTVIKELETQIAAANTGDAAVRRLQTLPGVGPILAAVMAAEIDGIARFPRADKLCCYAGLVPTTHSSGGKTAHGRMLPFANRWLKWAFVEAAWVAVGCSPYFGGLYRRHRERGKKANTAITIIARRMCAIAWHLLHDGRDFAPNPPILSLSPVAPLKD

SEQ ID NO: 380523 - protein, 358 aa, unidentified
MAKTAGPVTGGVDTHADRHVAAVVDQVGRVLGTESFTADEAGYAGLLAWLRGHGELVAAGVEGTGSYGAGLARYLAAAGVPVLEVPRPDRQRRRRHGKSDAVDAVSAALAALRGEDCGTPKSADGAAESIRALRVARDGAIKARTQAASQLRDLITTAPAPLRAQLAGLSTPRRVRAAAAFTCGDTADPAEGGKAAMASVARRWQDLDTEITQLEGALEALVGRVAAPGYLARTGVGPLSAAALIAAAGDNPGRITSEAAFAALCGVSTVDCSSGKHERHRLNRGGDRQANSALWRIAVTRLRYDSRTQDYYARRIAAGKTRKEIIRELKRYLAREAYRQLIRPGFLQAAVISSAKAA

SEQ ID NO: 380524 - protein, 428 aa, unidentified
MKKSEYLSTLFVGIDVSARENVICALNFEQEKLLEFAAPNSQPGADEIADKLSVLLSSCNFTHVVIALESTSFYGIHIANFLSSCALLAPYNTYVYCLNPKMIANYKKSFIGMGKNDPIDAFVIADFARVGRITSEPWRGSQFLALQRLTRHRLHLVECLTREKTYMLSNVFLKFSEFATLTKGNHPFTNKYGATASAVLTDFLSNEQIAEASIEDLIAFVCEKGKNRFSNPQEVASILQAAARNSYRLDKCLYEPLTIAIASSLNCLKAFEAEIKSIDKAIEKTVSGLNPTEYLCLRSIPGIGPVFASGILAEIFSIQAFDSHSALAKYAGIVWTEKQSGDFQSDDTRMSKAGNKYLRYYLIEATGSVVRHLPEYNAFYQKKFDEVKTHQHKRALALTSRKFIRLVFGLLAKNQLFVPQGVDHTPNS

SEQ ID NO: 380525 - protein, 426 aa, unidentified
MKESTSIKLASNSVLIGLDWAKNKHDTCLLAEDGTLEYGSIEQDQIKLNHWLDYLCGRFKGRRIAICMEAGRDPLLWRLEGHEQVDLFVVNTTTAARYRKTFAPSGDKNDQRDSASLLDLICRHPEKVTPHRPASAEDRAMDQLTKARRQSVNQLTGVVCSLREVLELYYPVVSKLFEHLGTALVIDFLRKWPDPKQLLKAREATLVKFFHQHNSRSQKCIDKRLELIKQCVPVTEDPMLLEVAHLRIEEHLSEIESLNGSIKQYDDALERAFAIHEQRHLFEGLPGAAKALAPRLLAAFSINNPKDANEMQLICGIAPIRVQSGQSMCTFMRRQCPKFLRQSFHEFAGSSIQSSLWAKAFYDDQTKTKSSGSNAAKRALAYKWIRVLTACWLSNTPYNEMQYIAQLQKRKSPLAELIFQNKPCTD

SEQ ID NO: 380526 - protein, 355 aa, unidentified
MYGLKHQKEKRSMDHFAGLDVSVKETSVCIVDDTGKIVREVKVASEPEALLQVLKNPTYRFKRIGLEAGPLSQWLYTALAEAGLPVICVETRHMRAVLKAQINKTDRNDARGMAQMMRVGLYRPVHVKTLRSQKLRMLLTHRKLLQSKAIAIDNDLRGTLRNFGLKVGMVGTARFEARIKELIENLPDLAMLVEPLLIVRRVVREQLGILHRRLLAVVRDDDVCRRLMTVPGVGPVVALTYRATVDVPARFRKSKSVGAVFGLTCAKYQSGESERTGAISRCGDEMMRTMLYEAAQSMLFRSTKWSWLKAWAMKIARHRGMKKAIVALARRLAVIMHRIWIDGTEFRWTREAVTA

SEQ ID NO: 380527 - protein, 364 aa, unidentified
MDTHKKQHRVALVYPNDEQIIEFSVKNTPAEIRKMVRRIKRNAPGKVKFCYEAGVCGFTLQRRIEALGCKCSVIAPSLVPRKLGERKKTNRRDAKKLLGLFMADMLTEVYPPDEQQEAARELTRCREAAQENLKRIRHQLQKMLVRHGYVFIDGQHWTQKHLRWLEAVEFDRPLLQEVFDCYFTEMRHCLQRVKTLDRELEKLAQSEAYREVVGILRCFYGIETLTAISIIAEVFDFGRFASARAFMSYLGLTPSESSSGEKEHKGPITKTGNKRARRLLTEAAWHHRHAYTVSKAFSKRREGQPQWAIDIADRAGVRLRKRYHRLVNRGKLPCKATTAVARELAGFIWLALIEYEARKKRKVA

SEQ ID NO: 380528 - protein, 390 aa, unidentified
MIYVGIDVAKDKHDCCILGPDTEELFQVFTIRNNSDGYGELFHKIESVSKDKSQIKIGLEATGHYSYNILGSLLDHGYHTFVINPLHTNLYRKGQSLRKTKTDKVDARSIAEMLVTDKTLKPYTGTSYHSEELKSLTRYRFELVKERAKMKTSVSRLVNILFPELESLVPTLHMNSVYRLLQELPGAYFIASSNLTHLKALLADASKGRYGREKAIEIRETAKSSIGSLMPAKSMELRQTIHRIDTLTSDIKEVEQSIQKIMDECGSPITTIPGIKYRMGAMILAEIGDFTRFSNADQVLAYAGLSPSTYQSGKLISSYARMEKRGSKYLRYALFNAAIYVSGWDERFRLYLSKKRAEGKHYYVAISHVIKKLVRTIFRMEITHTSYQPL

SEQ ID NO: 380529 - protein, 376 aa, unidentified
MTAQHSNPVLYMAMELSNRTWKLRFGNGTTVHDKTVKAGDQKGLMEAVKRARGRLKIPSEAPVRSCYEAGRDGFWLHRFLQKHGIENLVVDPASIEVNRRQRRAKTDRLDAAKLLLMLLRYHLYGEKTVWKICRVPELESEDDRRLGRELNRLTRERTGHLNRIRALLVTQGVAGVRPRKVDFQTIRNWDGQALPSAMAAELEREQQRLRLVDEQIRQIEAARNQRLAEPRTESDRKAGKLLQLRAVGPVSSWMLAKELFGWRHFHNRREVAAVAGLTATPYDSGDSSRCQGISKAGSPWVRSVCIELAWSWLRFQPQSELSQWFHQRFGGGGGRMRRVGIVALARRLLVALWKYVEFDELPAGALLSAAPVQVSC

SEQ ID NO: 380530 - protein, 361 aa, unidentified
MNNSAQHLIAEIPRRQAKVERTIGIDLGDVWSHYCTLNQDGEVVDRDRFRTTPKAIEKWFTDVPSARVAMEAGTDSIWISAQLKELGHDVIVANVRELRAISHSDRKSDQVDAEKLERYARLDPNILRPISHRTVAQQEALTLIRARALLVRLRTAAVNAVRGLTKSCGYRMPASATTCFAQRCLAVMPPGLAQALGPVLQQTAEITVKIKQYDRQIQQLGQTEYPETQALLKVHGVGHITALTFVLTLGSKERFGRSRDVGCYLRLRPRRSQSGDHDPQLDITHAGNAYLRSLLIECSNHILRPHGRDSALRRWGLHLAARGGKQAKSKAVVAVAPQARRVAPSPLEHPRVVYAVYEQAA

SEQ ID NO: 380531 - protein, 354 aa, unidentified
MNSVRYVGMDVHRDTISVAVLDESGRLMMQSVLATRAGAVLDFIHGVRGRVHVTFEEGTHSAWLYDVLVRRVEKLVVCNPRKNALLKSGSKSDAIDARKLGELLRAGMLSGVYHGETSALEVQQMARSYSQLTEDTTRVMARLKAVFRGQAVSCVGKKLYGKRYRQEYLAQLSGGLRRRAEHLYQELDALQPLRHAVRRELLVECRKHAAAQWLQSVPFLGPIRAALLIGRVQTPHRFRSKRQFWSYCGLGLETRDSGEYRVVNGQVERRRRPALIRGLNWNHNHAMKNLFKSTATAASVREGVWREFYLQLLAKGMRPEMARLTLARKIAAITLKIWKKGEPFHAEHLKLQAA

SEQ ID NO: 380532 - protein, 361 aa, unidentified
MFTERTSVGLDVHARSVVAAAFDGDTGEVFKKRLTPGNDDVITWVRSLPGPSAVVYEAGPTGFGLARAFDTAGIRCEVAAPSKIQRPPGDRVKTDARDAMLLARLLRLDDIVPVSVPTVEREAARDLVRAREDVRGDLMRSRHRVSKLLLRQGIVYYGGTAWTGTHLRWLRKQHFDTPGLQLAFDAEHEAVLQAEARRDRLDAAIETMAADSEYTPVVHRLGCLRGIATLTAFGLAVEVGDWERLTGSSIGAYLGLVPTESSSGQSRSQGSITKTGNTHARRLLVEAAWQHLKPYRTPGATMRARWELAPAAARARGHAGNQRLHQRWLHFNDRKKDPVIANVAIARELAGWCWSLAVMDD

SEQ ID NO: 380533 - protein, 347 aa, unidentified
MKHYVGLDVSLKEVSICVVDADGIVAAEGKVSTEPVLILSWIGERIGTVARIVHESGPLSIWLTRELAGLGAPVVCIDARAAHKVLSARMNKSDRADAEGLAQLARTGWYREVHIKSESSDRLRLLLGARGRMIDIRRDIEAQARGVLKTYGIRLGSVTRGRNRAGFRDQLRAATSGDPILETVAASLIAVHEVACAETATIEDELLVIARDSELARRLMTVPGVGPIVALNFIATVDDAGRFARATDVGAYLGLTPRRYQSGEIDYSGRISKRGNSAMRTLLFEAANVLITRVHRFSPLKAWAVRLAARKGFKKAAVAAARKIAVVMLRLWRDGTTFAWTKEALPA

SEQ ID NO: 380534 - protein, 410 aa, unidentified
MRYYLGVDWADQTHAVWVVEEDGTKIAARTVPHTAEGLSEWGRELDEWRAQGIERWAAIERREGRVVDFLLDHGVVVDPVNPKALDRARDRFRQSGAKSDPFDARVLADFLRTDHAHLQALQPSSEAAQELKLLTEDYQRQIRQQTRLVNQLTHTLKAYYPRALEIAELTTALTRESLHAYPTPQAVTALTPRQWQRWARAHHLSEARTRDLWTVLQSPQLPVPAHVVRAKARLMLTLVAQLMPVVAAVRHYREAIEDFFARMPEAQWARTLPIGNHGITAPTLWARLGDAPGRWESFRHLPAHAGTVPVTKRSGKQQRVVHFRFACDKSLRYVVDQVAVLSLLSSDWARAYYDQQRARGHAHHQALRALGAKWLKIIFVMWQRQVPYDEQYHLATMTRQQLRQRQERIA

SEQ ID NO: 380535 - protein, 464 aa, unidentified
MTDKKLWRNRKERKEWARRLQSEDPGLEVVHPHAAGIDVGNGVHYVAVRPDRDPQPVRRFECFTADLHRLADWLRSCGVKTVAMQSTGVYWIPIYEILEERGIQVYLVNARHTKNLPGRKSDVQESQWLLKLHTYGLLNNSFQPPSEIRVLRTYWRQRGEHVRGAATCVQRMQKALTQMNVQLANVISDVSGLTGQTIVRSIVAGEHDPRKLAELSDPRIQASHEEVAKSLEGNWRPELLFVLQQEIAMYDTYQQRIAECDQQLQKHLASFANTIPLQPTEEEPQRKKTKPAKNAPRFELRSELQRITGIDLTRIDGIDVMVAQTLVSEVGLDMSRWKTEAHFSSWLGLCPDNRTSGDKVLARGTRRVVNRAATALRMAAVTLMRSRTYLGAQYRRLRTKLGAPKAITAMAHRLARLVYRMLKYGQRYIDKGAEYYEHRYRQQQIEFLRKKAAKLGLQITLAQT

SEQ ID NO: 380536 - protein, 410 aa, unidentified
MRYYLGVDWADKTHAVWVVDEQGAKVASRAVPHTAAGLSEWGRELDEWRAQGIELWAAIERPEGRVVDFLLDHGVVVYPVNPKALDRARDRFRPSAAKSDPFDARVLAEFLRTDHRHLQALQPSSEAAQELKYLTEDYRRHVRQQTRLVNQLTATLKAYYPRALEVSELTTALARQFLQAYPTPVAVAALTEKRWQRWASAHRLSDARTQELWGILQRPQLPVPDHVVRAKARLMLTLVEELTAVVAAVGQYREAIDAFFAGLPEAQWIRTLPIGDHGVTAPTLWALLGDAPLRWESWQHLQGHAGAVPVTIRSGQQRVVRFRFACDKALRYVVDQVAFLSLGKSEWARAYYDQQRARGHDHRPALRALGAKWLKIIFVMWDRQIPYDEQHHLATMTRQQLRQRGQKKVA

SEQ ID NO: 380537 - protein, 360 aa, unidentified
MTVVIGVDPHKQTHTAVAVRSGTGEVVAELTATARAAGHEDLLGWAQSLSANRLWALEDVRSVSRGLERLLVARGERVVRVPPKLMAGARRGARSFGKSDSIDALAIARAALAHPHLPVALEDHEAREIKLLVDHRETLVRQRTEAQDRLRWLLHAVDPEMSVPPGALDRKVWLDRVEQRLARAAQSVEVRIAQDLVSRCRALTIDANELEREVALRVAAYAPQLLDLKGCGALIAGKLIGETGGIGRFRTDAQLARLAGVAPLDASSGQQRRHRLNRHGNRQLNTALHKLAVVQGRWDPRARAYLERRQAEGKTRLEALRCLKRLLARLVFRLLRQTPTRCPERVVKIRGGKVRVAALA

SEQ ID NO: 380538 - protein, 342 aa, unidentified
MKITTVGLDLAKNVFHAVCFDEHSKEVKKRMLRRNQLRIFFTQLPPCKVGMEACASSHYWGRELKALGHEVKLIPAQHVKPYLLGNKNDFNDARAIAEALTRPQIRGVAIKTTEQQDIQATHRMRSQCLRDRTALCNSVRGLLGEYGIVLSKGVHILRKSIHGLLEDAENGLSLVFRNLLARRYEQLVELDGHIDFFTHELEIQSRQDDACQRLQEIPGYGPIIASAFYSTVGNGEGYSRGRDVAASIGLVPGQHSTGGKNVLLGISKRGDGYLRGLLIHGARAVVIHASKKKDRLSQWINRIVAERGKNKAAVAVANKMARIGWAILRHNAHYQATLKATC

SEQ ID NO: 380539 - protein, 308 aa, unidentified
MIAQNYVGCDISKQWLDFFDETSGRLRRIDNQADAIAAYVAGLDPSRDFVVMEATGVHDRLLRHALAKAGVPFSRHNPAHTHHYSKSTRRRAKTDPLDARMLSDYGRRYSPEAEPAPSEEVERLQSLAGHRDHLVNMRAALKKHLAEAFEEVVIADLEETIAFLDTRIKAFESQIAEVIRQNQDTARDHALMVSVPGVSKVGALSLLALLPELGQRSPKAIAALVGLAPFDNKSGKLNRRSQIQGGRSRVRRALYMAALTAIRTCDRFKSFYTALAARSGSKKLAIIAVARKLLVVLNAIIRDKTAFA

SEQ ID NO: 380540 - protein, 388 aa, unidentified
MPQQRKPNDLSRSLMTLNVDTTLIAVVELSLSSWLVAGIVPGVERQPLKKLKTDENALLALLNRWRDEAVRSGYKISRIAVAFEAGRDGFWLARWLRAREIEAHVIHASSIAVSREHRRAKTDRLDTELLKRAFVGWLRGERDHCKTAAIPSLREEDAKRPSRERESLVGEQSRLVNRMKATLIRLGIRGFNPKLRHAEQRVATLRTPEGEPIPPSTLAELKRDMQRRRFICDQIRSIEQERLERLERAPDTKPHAMVRLLARVTGIGIETADLLVHELLLRNMRDRRAVARYGGLTGSPDRSGGTNREKGLARSGNARVRRGMIQLAWRFLLFQKDSALAQWYRRRTEHAPKARKTMIVALARKLLIALWRLVREGVVPEGVAMRPA

SEQ ID NO: 380541 - protein, 360 aa, unidentified
MQGSYVIALDTHCSFTEVGVLTPGGRWMPRGRCPTTIPDLAAEVERVRNPREVVLEEGPLADWIARGLKVHAQGLTVCDPRRNHLIAKESDKDDPIDAEKLARLYRGGYVKEVHHAESFDRVAFKRHVGLYHDAVKQRVRMANRISGEFRQYGLFVSEGAFAETESQGERAALLAKLPNHALVRGDVGLLYEAYDAAREREDAMRRRLVRRARQEEAIVRFTALPGVKWVRASTFFVYVDTPWRFASKQALWKYLGIGLERRHSGGGMEHLRVSRQVNRSLKSSVLGAAQSAIRCGENPFAEQYERWIHAGLTPRIARRNVARSQAAVMWGMWKNGSVYRPEDVGRTATDRGVAPSMMSR

SEQ ID NO: 380542 - protein, 366 aa, unidentified
MSAISKTPERVVIAIDPHKASWTAAVVDASSQPVATIRVPVSRDGYRALRRFAGRWPDPTWAIEGASGLGAPLTARLRADGIDVVDVPAKLAARVRMLSTGHGRKNDDADAVSVGIAARSARRLNSAAVDDTVTALRAIVEHRDDLVKTRTQTVNRLHVVLTNLIPAGAQRDLTAEQAAELLRGIRPRDTAGKTLRGLAADLVSEIRQLDRRIAKAATDIQTAVTASGTTLTELCGIGALTAGKILGRVGTIDRFRSAAAFATYTGAAPIDVSSGDVVRHRLSRAGDRQLNLCLHVMALTQIRQDTAGRAYYLRKRTEGKSHKEAMRCLKRRLSDVVYRQLRRDANRLEAGPGGHSGAALSSSAAS

SEQ ID NO: 380543 - protein, 436 aa, unidentified
MFVGHRFRTDPDELDTLWARLPKDAERIEVVMEPTRNAWVALAAWFRRHGATVVMVPPEQSADLRDYYNKHTKTDRLDSKVLARLPLLHPEGLHREDSLGPGDELKRAVKIRSGLVHRRTACMARLDALLEILGPAWIAALGSDMTLTALRFLARYANPVQVKRLGKARLAAFFRRCSRQAWADERADAVIEAAATTLRLWGADGGELDFDALAADIAAQARLALTLTDEINGFDKRIGALYDKADPAGIVRSVPGAGRVCAPQILGRLGDPTRFANLAAVRSFAGLVPAADSSGQADGHRGPTKAGDSCLREALFIAADHARKVDPTLAVRYQRLMLAGKHHDSAVCTLAAVLLTRIAACLRAGTHYLLRDTDGRVITEAQGRAIVAERYTVPPEVRAARRKVTPHRHPRRNERNERAKTGVATRSKASPVPQPA

SEQ ID NO: 380544 - protein, 341 aa, unidentified
MSESALIGIDLGKHTFHLHGQDKSGREVFRKKCSRAQMMQFFGNVPSCVVVMEACAGSHFVARQLMAMGHTAKLISPQFVKPFVKGNKNDFVDAEAICEAASRPSMRFVTPKTESQQTLSVLHRMRESLVHDRTKTANQMHGFLLEFGISLPKGLAIMKRLASVLAEHELPVRLTVLLQRLHDHFVYLDEQIKELDKELAGQLANDDLGSRLLSMPCVGPITASLLAVEMGDGKQYRCGRDFAASVGLVPRQYSTGGKANLLGISKRGDKHLRQLLVQCSRVYMQRLDHQKGALADWVKTLLSRRHSNVVACALANKLARIAWAIAARHTQYEAGPDALNA

SEQ ID NO: 380545 - protein, 403 aa, unidentified
MQERTAGLDLASEEHRLLVVEPDGNRLDERRVAHSEDGIAALVRRLRELRVARVAIEQPNGLIVDRLLDAGIAVVAIHPNQLAAARDRYRAGGGKSDGFDAYVLAELARTDMHRFRLLEPDSDETKALRALTRAREDLVDQRVALANQLRAQLDAFWPGAKIFADVDSPIGLAFLERYPSPADARGLGAKRLAGFLARNGYCGRKTPDELLTRLRSAPAGRAGEAEQEARRAVVLALVATLKPLVEQIRLLTSQIAGALRAHNDGAIFLSLFRDPNTVITAAELLAEIGDNRHRHPSSASLEAIAGQAPITVQSGKKNVACFRWACNKNLRAATSVLADTSRHHNPWAADIYQRARARGHDHPHAIRILGRAWLRVIWRMWQDHAPYDHTRHRHLNPPLTTEG

SEQ ID NO: 380546 - protein, 357 aa, unidentified
MSRCIPTDAQSITLGVDTHKDVHVAVALDGIGRHRGTLSVPANLAGYKRLVDWAEEFGPLKHAGVEGTGSFGAGLTRFLKGRGIKVSEVIRPKRRDQYRAGKSDPIDAEAARAVLAGTATGQPKSADGEVEMIRTLRITRRSAVKARVGAANQLQNLLITAPEGLKSELCGLSTTRLVAIASRFRPGPNPSDVEAATKFALRSVARRYQRLSEEISELDEQLDRLVTEAAPELVAVEGVGTDTAASLLIAAGDNPERLENEAAFAHLCGAAPIPASSGKHVRHRLNRHGNRDANRALYVIAVCRMNRDERTRSYVAKRTAEGKSKKEIIRCLKRYIAREIYRVLSSISLHKPSISVP

SEQ ID NO: 380547 - protein, 338 aa, unidentified
MKYFVGMDLHSSNTVLGIIDENGNRVYKAKVANFLPLILNELELFRRGIVGVVVESTFNWYWLVDGLMEAGYKLHLANPSAIKQYEGLKHTADYHDAFHLANLLRLGILAEGHIYPKQERAIRDLLRKRLMLVRHRTAHILSFQSLYNREKGCRIGGDDVKKLGEEDIDELFDQDYVVLSAKANISTIGFLKKKIEEIEKIALGTMKLLPEFQKLKTVTGIGDILGLTISLETGDIRRFAKVGNYSSYCRCVGSQRLSNEKKKGEGNRKNGNKYLAWAFVEAANYTKRYCSYARRFYQRKTAKTNKIVAIKALAHKLARASYFVMRDRVDYDPQRAFG

SEQ ID NO: 380548 - protein, 352 aa, unidentified
MIWVGLDLHKRYITACALDDGGAMVAEHRRLPADAEALVTWLTGLGGAVTVAMEATLYWAWLHDQLSASGIAAVAAHPYQVKLIWQARAKTDPIDARKLADLLRANLLPTVWVPSPELRAHRKLLRGRAYLVRLRTSVKNRIHGHLMAENCRTEVTDLYGKAGRAWLAMVELTEMGRVQVDLLLELVDLLEVRVKRLDQRVQRLVKADPQAQLLQTWPGIGPFGAALLLAEIGDIGRFGTSHELAAYAGLTPSTQSSGDKTTHGGVGRSGSPWLKWILIEIVQSLKLAPGPVGAQYQRLLRSKGKAKATVAAARKLSCYLYWCLKEGWSYEAWLRQHDKLEVRPVQALGSAA

SEQ ID NO: 380549 - protein, 347 aa, unidentified
MKIIGCDFHPSFQQIAMVDTETGEQSERRLDRSAAIMFYRGLEGRVVVGMEACGNTLWFERLLAEHGHELRLGDAAKIRAMEVRKQKTDRRDAELLLKLLLENRFPQVWIPSPEQRDVRQLLLHRHKLVNLRRAVKNQLQHLALNQGIQQKWRLWTEKGRTLLEELPLTGWTAQRRQDDLKLLDELNGSIAKLDVAVEQEAKNHPIARLLQTHPGVGPITSLAFVLTLGQIERFPHSKNVVSYVGLNPAEHSSGGRQHLGSISKQGNPMLRSLLVEAGQSAARGDTELGRAYQRLKHKKHSGVAKVMVARKLAVRLYWMWRTQQPYAATRMQGSPSHPVVAAKDRRA

SEQ ID NO: 380550 - protein, 412 aa, unidentified
MEVVYPCCCGLDVHKKSITACVLWAEAKGKSRKEKRRFGTFTHDLLQLADWLGECGVTHVAMESTGVYWKPVWNILAEQFEVLLVNAQHIKAVPGRKTDQKDSEWIADLLQHGLLRGSFVPPRPTRELRDLTRYRVSLAQEINRIANRIQKVLEDANIKLASVATDALGASGRAILEAMLAGEQDPARLAEMSKGLLRNKIPELQLALEGRMTEHHRFLLRQLFDHLHFTESKLSKIEQEIDRRTRPFEDQVTRLRTIPGVDRVTAWGLLAEIGLDMNQFPSAEHLSSWACLCPGSFESAGKRLSGKMRKGNVSLRRCLSQAAWAISMTKNNYLSALYRRIAARRGAKRAIMAVAHALLVIAYHMLKRKEDYRELGADHFDRIDVNRTRRSLVRRLERLGHKVTLEPLAQTA

SEQ ID NO: 380551 - protein, 461 aa, unidentified
MNRKRSKPKIDRTMPMVHPNAAAIDVGATMHMAAVRADRTPEPVRSFGTFTTDLHRLVNWFKECGVETVVMESTSVYWIPIFELLDARGFTVFLVNARDAKHVPGRKTDVSDAQWLQRLHSYGLLRASFRPKGQIAELRAYVRQRERLLEYAASHIQHMQKALTEMNLQLHHVIADITAATGMRVIRAILAGERNPEALARLRDYRCHSSAETIEKALTGSYRAEHLFALEQALALYEAYHEKVSACDVRIEAVLKELSIDRGRRSGSLPSSRRRTDQANGLAFDVRAALFALLGKDITQIDGLGPYLSLKLIAECGDDLSAWPSAKHFTSWLCLAPSNKISGGKVLSSRTRRGGSRAAALLRLAAVTVGRTDTALGAFYRRLSARIGKAKAVTATARKIAVLFYNAVRHGMEYVDPGASFYETRYRTRVINNLHRRAKAFGFALQPIEAIPEAIPGGAVS

SEQ ID NO: 380552 - protein, 346 aa, unidentified
MEINRIGVDLAKNVFQLHGTDCSGKAVWKRQLSRSKWIRVLCKTAEPGTEIGMEACSGAHHWARLLTQRGYEVKIIPPQFVKPFVKSNKNDANDAQAICEAMSRPNMYPVRVKTVEQQDLQAIHRIREEIKSHRIAKGNQIRGLVSEYGLVAPQQLPALRKAIPDWLEDADNGLTPLFRQLLQGLWGDLCVLDKRMGELDHQIGVIAQQDPVAKRLQQLRGVGPLIATALVATVGDASQYRKGRDMAAAIGLTPRQHSSGGKDKLLGISKRGDAYLRCLLVHGARSAVRTAKDKDDRLSRWVASLQTRRHTNVVAVAMANKIARMAWAMMTKGVDYNPEFNPVIAK

SEQ ID NO: 380553 - protein, 348 aa, unidentified
MTVYIGVDFHARQQTISYLTTEDGEIHQLVLDHEKPDEVRAFYAQFQGQQVIVGFESSGYAAWFEELLEELGCEIWIGHAAEIRRFARRRQKNDRRDADLILDLLLRGDFPRIHRYSWESRQMLQQLRYRQKLVKMRTMVVNGLLYMASSRGVTLRSQLQSKRGQARMRELALPAPLAQQRDELCQLLLELSSKIDKVQSWLEDKAEQDVRVQRLRTHYGIGPLTGLCLVHTLECVDRFANPRKVTGYVGFDPVEDSSAERRRIGSISKQGSRLLRFYLVEAGQVAVRQDQELARVYKRVLVRRGHATAKVAIGRRLLVRAFIMLRDEIDYAEFQRRGVAARSSRGTA

SEQ ID NO: 380554 - protein, 345 aa, unidentified
MEEHTTIAVDLSKNVFEVAVSRESGRVCERRRLSRSQLTRFFSQRPPATVLLEACGSSHHWARQIEGLGHRVLLLPPHHTRRYVLRDKTDRADATALLEAHRNEQIAPVPVKTLHQQTLAALHRLRSGWLATRTARLNAIRAVLRELGVVIPQGARHVLPGLTVALSQPAGPVPDHLHGILLTAASEIRELEERIRAVERQLESMAASLPAVKNLRTVPGIGLLTSTALVAFVGDPARFRSGRRFASYLGLVPRERSSGLQRHLGAITKRGDAYLRTLLIHGARSALYAAKRSHQPDRLRRWAITVQQRRGHNRAAVALANKLARIAWAVWCRDTVFHPATAQAS

SEQ ID NO: 380555 - protein, 343 aa, unidentified
MTQQTIIGIDLAKHVFQVCMVTPTGTLKTNTAVARGKLLALIARQPAALIFMEACGGAHDWARRFCAMGHEVRLLAPQYVTPFRRGQKNDPNDALALTEAGQRPNIPTVPIKTVAQQDLQALHRVRERLVKHRTAVVNQVRGLLLEYGIVIPQGIARLRKRLPRVLEEADNGLSFLMRDLLQSLQRELSALDTRMTDITGQLARLSHELEACQRLQEMEGIGPLSATALVAALGHGHHFHDGRQVAAWLGLVPRQHSSGGTTRLGGITKGGNSYVRRLLIHGARSVIRHVRDKPDVKRAWMRQLVTRIGVNKACVAVANKMARVAWALLHTGEQYRKPVAPSI

SEQ ID NO: 380556 - protein, 401 aa, unidentified
MNAVGIDVSKGKSMVCVMRPFGEVVLEPFEVLHTAQNLNDLAGKLKALDGETRVVMEATGNYHKPVAFVLHDAGLFVSVVNPVLIHDYDNNSLRRVKTDRKDAVKIANYTLDKWTRLRQYLPEDDTRLALKNCYRQYQQAVAVRTMLKNNLISSLDLTFPDANKLFSSPAKSNGCEKWVDFIGDFWHSECVSSLSSDAFAKKYLKWCQKHGYNFTRSKSDTIYACAVNAASLPKSPTSKLLIQQQVAQLKAVSQSVAAFQQEMLRLSQQLPEFDTVMEMYGVGPSLGPQLMAEIGDIRRFSSKKLLIAFAGIEPQPNDSGKIAGNDSGISKVGSAVLRRTLFLIMTVILKTQPQDEPVFQFMNKKRSEGKPYKVYMMASANKFLRIYYARVKAVMDSKHSK

SEQ ID NO: 380557 - protein, 324 aa, unidentified
MLLPALGLDIAKLKFNVCLLNLNGKLKHKVFPNTEAGFQQLSAWLVKHQMEHVRACMEATGAYGEALALYLHKAGHQVSVINPAAIKAFAASRLSRTKTDRVDAELIARFCQAQQPPAWTPPVSEVRELQALVRRLEALAEMRVAEENRLEAIITVEVVRSSVEEHIGYLNRQIEHTKESIRQHINSHPGLRRHSELLDSIPGIGETTAATLLAEITDITQYRSARQVAAYAGLVPRQRHSGSSVRGRTRLSKIGNARLRKALYFPAITALRCSSFFQAWAEGLRERGKCKMSVIGAVMRKLIHLAYGVLKTGKPFDPEWAKSA

SEQ ID NO: 380558 - protein, 425 aa, unidentified
MFCVRSPLPRLEVDMETTYNVAGIDVHKKMLAVVVANARETELQFECRRFGTTVSEVQALSAWLKARDVQEAAMESTAQYWRPVWLGLEGQCRLHLAQARSNRGPRGRKTDFRDAKRVVSRLLSGDLILSFVPEAEQRCWRTLTRTKYQLTRDRVRLQSQLESLLEECQIKLSSVVSDLLGASGRRILRAMAKGETDPVRLADLGDKRLRASEGLLVDALSGSVGPLHRRVLSLYLDRLDLIESQVAKLEKMIADGMKAQEDAIVRLAELPGLGVDSAQQIIAEIGPTAAAFPSAAQLASWVGVCPGRQESAGESRSDRSAKGNRSMRRLLDQLAHAAVRKEGTQMQIVFRRLSARMGYNKAIWAIAHRLCRLIWKVLHDKVHYVEHGLAPTPIALKRRRQRLVTQLHKMGYQVLLTPLTPAATT

SEQ ID NO: 380559 - protein, 316 aa, unidentified
MKIHTNQNINVGVDTGKFQLDIYIRPLEIYFTVANDEKGIKEAVKTIQKYVPERITIEATGRLEMPFIMACAKANLPFVITNPVHIKRFAGAIGQRAKTDKLDAQLIAHYGEAIKPKLSTLKPDVIQDMSDLVARRNQLLVMQTMEKNRLQILPKSLAMTIKPVLTLFKHQIKNIEDKLVKLIESCPDYQAKNTILQSMKGIGKIAAASIISNLPELGYISSKQASALVGVAPMNRESGRYKGVRKIQGGRHQVRTVLYMAMMSAIQSNPVFKAHYQKLVAAGKPKKVAIIACIRKMVVILNSMLRDGVLWEAPKV

SEQ ID NO: 380560 - protein, 397 aa, unidentified
MIAVGIDISKAKSTVAVIDSDGTVLASPFAMAHTQPEMEAFVTYLKGLGEPTTILMEYTGHYHYPVLKKLQDEGFPVCIVNPYQMKKYGDVEIHKAKTDKKDALRIAAYALEKSYKLVPYSSMEQKYEDLKFLSRQYSQRITYVAKLKVQLIALLDQTMPGITRILPLNSRNPEKCALLLFIKRFKSFDEIQRIGKARFLASYNVLAKKASERSASSKGLSIYELAVDSITTRGEDPYIWLSQNQCVDLLSATQNAADEIISQMRNIAETIPEYKVLRAMHGVGDRLGPIILAEIGDVHRFHSGKALNSYAGNDAPPYQSGQFESRNRHISKRGSSTLRKACYEVMQALKLTKPQDDPVYLFMLKKEQEGKPFNVAKMAGVNKFLRIYYARAMELYK

SEQ ID NO: 380561 - protein, 395 aa, unidentified
MKNIYIGIDVSKEQSSAQGLDEKGGKVFYIEFSMNARGFAELQKTIDKNCKKQTKLMAAMESTACYHITLFSYLTSKGITSFIITPLLISNFVKLSLRKTKTDKKDALAIARFLLLHKDSLEQQRLTPDMLNMRDLARQRESLVDQTRAVKMDMKRLLNITFPELEKVCGLYTKSMLRFLTHYPSAHAVKKAESSEIADVLIPGSWGHQTLEDVKRIKDTSETSIGINSFTKEIIIKQKASLLIQLNEHLDEITSVLIDHCQSLMQEDMEILNSIKGMGDKITTNFLVEIGGDISNYANHKKLIAMAGIDPAVYQSGMHEGRGKITKRGNKHLRRVIWLMASSVIQCNEFFKTYYLKRREDGLPYKKAVMATAHKLIRIIFAMLTNRTLFNVKAN

SEQ ID NO: 380562 - protein, 348 aa, unidentified
MVEITRIGMDTSKSVFQLHGVDAAERVVLRKKLRRREVLAFFAELPPCRVGMEACGGSHYWARELQALGHRVELIPPQYVKPYVPRGKHDAADAEGICEAMSRPKVRQRLVPIKSAEAQAALMLVGLRERLVRQRTQLINAIRGYAAEFGLVAAKGKAKIAALLRRIADDPAVPEPAWPLFAELAAEHARLEARIKEADAKLMAWHRQDEQSRRLAEIPSIGPIGASLLVLKAPDPQRFRSGRDFAAWIGLTPKNHSTAGKQRLGVITRAGDETLRSQLVVGATSVIRQVRCGTSRSAPPWLLALLARKPPKLAAVALANKVARIAWKLMVSGERYDPARLAALPATT

SEQ ID NO: 380563 - protein, 312 aa, unidentified
MHELFVGIDVSKDKLDVHVRPSGEYITLGTAPAGLHDLVARVQAWGPALIVLEATGGYEVVVAAALASAALPVAVVNPRQIRDFARATGQLAKTDALDAAVIARFAEAVRPPVRPLAPPAAQALGELVTRRRQLLEMLGAERNRQAQARDRQGQRQLGTHVRWLTKALADLDHDINDTIRSSPVWRAPDDLLKSVPAVDQVTAHTLIAQVPELGQLGRRQIAALIGVAPLNRDSGPLRGRRMIGGGRASVRQVLYMAALVGVRYNPRLAAFYSRLTGAGRPKKVALVATMRKLLTILNAIVRDQRPWQPQNA

SEQ ID NO: 380564 - protein, 412 aa, unidentified
MKVVHEICCGIDVHAKMLVACLLLADGEKEIRTFSTMTDDLLRLRDWLVAAHCTQVAIESTGVYWKPVFNILEDALTVILINPEHAHALRGRKTDVKDAEWLADLLRHGLLKASFIPPLEIRELRELTRYRESLVRERSAVANRVQKVIESGNIKLGQVASDALGASGRAMLWALARGETDPVKLASLAKRQLKEKVPQLRRALQGRMTVNQRFVLGELLQRWEQLEQADGRVTREIDKYLQARPKLARAREIVDGIPGIGPRVAQVVVAEIGVQMEAVFESDAHLASWAGICPGNKATGGKRLSGRTRKGNTYLRAALVQAAWGATMKKNCYLSSQYYRLVKRLGRKKALVAVAHSLLVIIYHVLQRDQTYTELGGDYFDRHHVEQQRDYYIRRLQMLGLKINVEELLKAA

SEQ ID NO: 380565 - protein, 427 aa, unidentified
MTISPVAGIDVSKEYSDFCILTPDRTVFSRGKVFHHPTSMDKLIKQLEDVENAFDMKPVCIMESTAYYHRILYRYLTKHKYKVIVINALQSKAASNFNIRSAKTDKIDAYKLATMYGMTNLKPSIMPSKTIQELRDLCRNHNALEEQLVVSEERLRAYVEQTLPGFVKVFSRLGSKSSLTLLSYFASKEEFNEAGFEKIAEIITKVSRSGRNWSESKAQMILTSINNGQEYISTPSHSAIIKSIAITIMGIKEAITENDNALELLFELNETLNEDRTLLMTIPGVGKQTAAVLIGETGNFDGFRNYRQLAAYYGLDPNVNKSGTVRKKHLGISKKGSSLVRKMLRMAVQNSVYRTIKGDAANPVLVKYFDSKKETKPPKVAEIAAMRKLTAIIFAVMRDRQPFELRLPEEHIAIMGIDSDKKKKISA

SEQ ID NO: 380566 - protein, 351 aa, unidentified
MDKISTLAANGNGENTPVVIGIDLAKNVFALHAINCHGKPVLVNPQVRRDQLLELLAQLPPCIVGMEACSGAHHWARAMTTLGHTPKLMAPKFVIPYRIQGKRGKNDANDAAAICEAVTRPHMRFVPIKSVDAQSILTLHRVRQGFVEERTATINRIRGLMSEFGVVLPQRAEVVRKQAQLVAERLPGWAASAVYDLLAHMVTLDRRVAEYDGHLKQMANRDERCRRLMALTGIAHITATALVASIGNGHDFRSGRQLAAWLGLVPGQYSSGGKIKLGHITKAGDRYIRTLLILGARAMLANAARKDDRISRWAIALQARAGYGKALVAIAAKNARIAWALLAKGEAFKPA

SEQ ID NO: 380567 - protein, 369 aa, unidentified
MSQSVKYVGLDVHKDTIAVAVAEDGKRSEVREHGEIANTPAAVAKLLGRLGGAGVELHICYEAGPCGYGVQRQVTAAGHSCAVVAPSLIPRRPGDRIKTDRRDAVKLARLHRAGELTSVWVPDAAHEAMRDLVRARLAAVRSLRHARQQLSGFLLRHGHHYHRPAWTQMHRRWLSGLRFAEDAHHIVLEDCIATVDAAKERRDRLTAQIEQRLADWALAPVVEAMQALRGMALVAAATIVAELGDISRFSKAEQFMSYLGLVPSEDSSGKRRRQGGITKAGNGAARRMLIEAAWSYRFPTRISREQLLRQEQLAAPIRAIAWKAQERLCLQYRKLSLAGKPITTVTTAIARQLAGFVWAIAHEVSVPTA

SEQ ID NO: 380568 - protein, 400 aa, unidentified
MSGLKGSFDGFVGIDVSKDKFDTCGITGDEAKLFQFSATMDRKGFEKLKGHLAAVSISSVLIGMESTASYHVNLFSYLVSEGYKVLLIIPLLISNYVKMQLRKTKTDKKDAVVIAQFLLTNGATLVQRATPSLISDLRDLSRQRESLVDEMTSLKIEIKQLLNITFPELEHVAGIFTKSILKLLQQYPSAFALRDADLGQLSQTLIADSYGHKRETFAAGLIKAAHSSIGSKSPAKDMILKQKIALLRHLEDALQEITGMLIEMSRKLMEEDINIMTSLKGIGEKAAANFLIEMGGDINQFERSGKIIAMAGLDPAVYQSGKHEGKGRITKRGNRHLRRIIWLMTTKVIQYTDIFNVYYLKRRKEGLPYKMDVLATAHKLIRVIYAMLTQRTTFCPQVNS

SEQ ID NO: 380569 - protein, 358 aa, unidentified
MKIIGVDLHARQQTIAMLDTDTGEVLETTLEHESEKVTKFYAALPGPVLVGIEATGSMQWFLKLMEELGIDCRVGHPAKIRKAETRKQKHDRRDARLLMQLLVENRFPSIWMPSTEQRDLRTLLRHRHQWVQMRTRVQNTLQAMALSHGLRRGPSLWSQLGQQAIGSLALPPHGAHRRTELQALYHRLEDEVSKLDERVTDQAFQRPGAKRLLTHPGVGPITALATDVFLGDPARFADGKALASYVGMIPSEHSSGGRQRLGALSKQGNALLRFLWCEAAMHAVRRDPELKRFYRRKLVQKGLGKARIAAARKLGIRLWILLRDQIDYKEFCRRGQMRRKSCGARAGMPAYNNGSALQ

SEQ ID NO: 380570 - protein, 440 aa, unidentified
MAMRKREDEVFPNAAAVDVGASSHWAAVPAHSTDAPVREVGAMTADLHALADWLLACGVEVVALESTGVYWIPVYEVLEQRGLKVWLVDARQVKYVPGRKSDVQDCQWLQRLMSYGLLRPAFRPGAEVCVIRAVARQREVLLTQQASWVQRMQKALIQMNLQLTEVISDVMGQTGQAIIRDIVAGERDAKALARHRHSRIKASAQDIVKALTGNWREEHLFVLGQALGMYDDIAAHLRACDAKLGTLLAERSAASVDLGKAPRQGSKARAEYDVRQQLANWAGADLTRINGLGLDSVMKILSEIGTDLSQFANVKHFCSWLGLCPATKISGGKVLSARTKRSANRVRQALKMAAMSLSHSDSALGAFYRRLCARMDKPRANTATAHKLARLVYFMLTRGQAYVDEGQQRYEEQQRQRSVAALRRRAAALGFQLNPMGTAA

SEQ ID NO: 380571 - protein, 345 aa, unidentified
MKIVGCDLHTRYQQIAMLDRETGELTERRLEHESGQARAFYAGLEGAVRVGIEATGHTRWFERMLAEMGHELWIGDGAQIRAAMVRKQKTDTRDAAHLLDLLLSERFPRIWRPTMGERDLRQLVWHRQKLVWMRNAVGNQLHALAMGEGVCRKKKLFSKKGRAELESLRLDCWAKYRRQELLVMIDQLDASLKTLDQAVAEQAEQNPAAVLLMTHPGVGPVTSLAFVLTLGPVQRFARSKQLVSYLGLNPREHSSGGRQRLGAISKQGNPMMRSLLVEAGHSAARLDAELRRDYQRLKLRRGSGVAKVAIARKLAVRMYWMLRAQASYAQLVRMQDSPWATLVKR

SEQ ID NO: 380572 - protein, 318 aa, unidentified
MKTQQATEFVGVDVASDHLDVAVHGQTTVRRFANTAHGIAQLLRALPPASVLGLESTGRYHAQLALAAHAAGLRVYVLNPLDARRYAQSVGQRGKTDRMDALVLARYICHEHAQLQRWQPPTACQAELRELLAHRATLVRQRSALSQAGRHSKCLAHLDEPVLKALQQAIEHIDEQLAKAVQADPPSRQAFDHITSVPGLGLVCGSLLVMLFGRMQACSADAVIAFTGLDPRPNDSGKKTGQRRLSKRGWPEIRRLMYAAAMSAARTKTWNGYYRAQRDKGLSTTAALVVLARKLLRVAFSLFKKQVKFDARQVAVSA

SEQ ID NO: 380573 - protein, 343 aa, unidentified
MVTIGIDPHKRSLTAAALDPHSRLLGQLRVPASSLAATHLLAWAAAWPQRRWAVEGASGLGRGIAQLLVAAGEPVLDVPAKLAARARLLGSSSARKSDLADACSVAAAALHHRQLRPVVLEDQTMVLRLLSDRRDDLVAERTRTLSRLHVLLADLQPGGANRELTATRAAALLRQIHPITAVDVERKRIARQLLADVRRLDRQVKTASQAIRQAVREHGTTLTQVFGVGPVLAAKLLGHAGDLTRFPSRDHFASYSGTAPIEASSGDVRRHRLNRGGNRQLNTALHLIAVCQIRDPSPGQAYYRRKLAQAKTPAEARRSLKRHLSNVVYSHLVTDHRHRTRGC

SEQ ID NO: 380574 - protein, 339 aa, unidentified
MNITTVGLDLAKNVFHVVCLNEHNKEVKKRMLRRNQVRQFFAQLPACTVAMEACATSHYWGRELIALGHHVKLIPPQHVKPMVQGNKNDYNDACAIAETVNRPKITFVAVKTIEEHDMQAIHRMRAQCIRDRTALSNSTRGLLGEYGLSFSKGLAPLRRKIPELLEDAENGLSMRFRHLLARRYEQLVELDGHIAFYTKELELLRQQDEACQRLQTIPGFGPIVASAFRSTLGDGSAYPRGRNAAASLGLVPRQYSSGGKNVLLGISKRGDRYLRKLLVHGARTVVLHAANRDDPLSRWINRIRERRGYNRAAVAMANKMARMGWAILRNNTSYGPTLV

SEQ ID NO: 380575 - protein, 383 aa, unidentified
MRIERTFVGLDVHARSVTGHALDGLTGEVWQRKLTPDPSDIHRWVSGLPGPVHVGYEAGPTGYGLYRYLVDRGVQCSVGAPSKLQRPHGDRVKTDLKDAELLARLLLVDQFVEVVVPSMEQEAARDLVRAREDARGDLMRARHRVSKMLLRNGIVYSGGEAWTKVHDSWLRSQRFDQPGRQLAYESAYETMVLTVDRRDRLDAAIEAMAADCRYTPVVRRLGCLRGISTLTGFGLAVEIGDWTRFSGSSIGAFVGLVPTENSSGQSRSQGSITKAGNTHARRLLVEAAWHHAGPTGCPGRRCGTGGSSPRPRRGSAVTKATVGCTNVGRRSTPARNAQPSPTSPWPASSPAGPGRWPCSTSGAHKTSPPVTLPRLPREERPAT

SEQ ID NO: 380576 - protein, 339 aa, unidentified
MALYAGMDLHSRDTYLGVLDHKFKRVFHKRLNNDLSLILSTLEPFREELQGIVVESTFNWYWLVDGLMDAGYRDLHLANPCAVKQYEGLKYSDDRHDAFWLAHLLVLGILPEGYIYPKKDRPVRDLLRKRSFLVRQRTSLILSLQSMIVRHKAERLSGREIKGLKISDLKELFKEEHLVLSAEASVSTISFLSHQINQIHKAVKKKVKLSKSFEYLRTVPGIGEILALTIMLEVGDISRFKKVGHFASYARCVPTERLSAGKRKGKGNRKNGNRYLCWAFVEASNFSRRYNEKFRRYHQKKSARTNNIIATKAICNKLARICYYIMRDQVPFDEEAIFC

SEQ ID NO: 380577 - protein, 566 aa, unidentified
MIVVLGQVAVDGGLKVDDRSEDTTPDALASEFREKAFNGIEPGAGLRGEVEDPTWMPGEPGFDLGMFVGAVIVEDGMDQFPGRDRALDGIEKADELLMGMALHTAAEDDAIERVESGKQGGCAVALVDAMGRAARACDLGAATTAGRCPMRQANDLSRSLAAFDQATTLIAVIEMSQSSWLVAGIVPGLERHPLKKLAVDEGSLLRLLQRWRDQAIRAGCRIERITVAFEAGRDGFWLARWLRAHDIEGYVIHPTSVAVSREHRRAKTDRLDTELLKRAFLGWLRGEADHCNMAAIPTIEEEDGRRPHRERESLVAERTRIVNRMKGCLARLGIRGFKPTLQRAPKLLSTLRTPEGTPLPPNALAEMGRDLARLHFVEGQISEIETARLERLEQAPTEKSHAMVRLLARVIGVGIETADMLVREILSRNLRDRRALARYAGLTGAPDESGSKRREKGLARAGNARVRRGMIQLAWRFLMFQKESALAQWYRSRTVDARQGTRKSLIVAMARKLLIELWRLVTTGETLLGSKCDRLEPARSTTLSEPRHRKCRWHSMTIRGGGDPNP

SEQ ID NO: 380578 - protein, 349 aa, unidentified
MTEQRRSYAGECVYVGVDVHKETYTVTCVCHKQIVKTATVQAEPASLAASLRRWFPGATLASAYEAGFSAFVLHRALTTGGITNIVVNPASIAVAANDKVKTDRRDSKRLAVDLADGRLRGIYVPTEEEELARLLPRTRAQLVEHRATLARQIKAKLHQFGLIAPSSRRMLSHRYLREIESWTLPPELRASLKLLAEQWRFVTRQLIEMRRLLREQATAQAVIDKVYRSVPGIGEVVARTLATELGDMTRFANERALFSYTGLTPSEYSSGASVQRGHISRQGSSRVRHLLVETAWRALPYDAVLQTMFERIAATRGKKRAIVAIARRLIGRIRACFRQGTMYAVGTLA

SEQ ID NO: 380579 - protein, 338 aa, unidentified
MYYTGIDLHKKTSYITTVDETGRIVAKANLVNHEDTIIKYFKELKEKTKIVIESMSSWYWLYDLLMENGFEVVISNPLKTKAIASAKIKNDKLDSHMLAQLLRSGLISTVHVSSLETRKLKELLRHRNRLVRDATRVKNRIHVLLRKNNFQVPFSDLFSAQGLKYLLGVALPDYQRAQVDTYLTLYGHLVQSIEPLTESIHALAKRDPTARLLMTIPGIGPIVAMFIIAEVEDISRFPSYRNLASYAGLVPSLDSSAGKDKRGRITKQGSVYLRTALIEAAQVIPRMKNCRLNLFFRKRIVRAGYQKAIVATAHKILQYAFYVLKNETSYQEEYPICA

SEQ ID NO: 380580 - protein, 321 aa, unidentified
MNYVGIDVSKATFVVAYSSAKGSETKTFENTTKGVHNFIQTITPEDTHCVMEATGNYSMLLVYLLSKAGITVSMENPLKIKNFARVMLSVVKTDKIDARMIAMYGEKMNPAPFKLRSDSLMVLKQKRTVLRQLKKQLNANTNLQESMEALPFIDSVCKKILDKTVKFLRKQIQEMEEELYSLANIEYKKQMDLLTSIKGIGVTLATALIVATGGFTYFDNAKQLTRYLGLSPTYQQSGTSVNLKGHINRNGDSYLRSQLYVAAFSSLRCNTECKACFDRLRANGKPGKVAVVAVANKLVRQAFAVVTQGKEYVDGFISAKK

SEQ ID NO: 380581 - protein, 479 aa, unidentified
MDGSTKTFGQRAGFVFFNEHSDAVWCDTARLCYKAFAENNVAAHRKDIPMAEETVSIWLGIDWADRKHRWAMRVDGHTRIMQGELEHTPEAVEEFISSLALKYPGQRIAVALEQSRGALMFMLGKYAHLVLYPIHPNTLDHYRKSVYPSGAKSDPRDAVLILEFLCTHTEHLRPFRPDTVETRTLQLLVEARREAVDDKTRYVNRLTAQLKMYFPQVLEWFSTPDTAVVGQLLKKWPTLEQLQQAPAKQVARLLQTNHISESRIKELAQLIQQAVSAVTDRAVIESRILIIRRIVEQLEVLREAIAQHDQSISKLAHSPPDYAIFASLPGAGPVMAPRLIAAFGTQRDRYAPASALQCYAGVAPVTESSGKQRLVHWRWSCPKFLRQTFHEWAWMSTKKSKWARGFYDRLRERDKAHHAAVRALSFKWLRIVFRCWKDRLPYDETRYALALQKHTISQKPVEIHVKNISGFTKIVGFSC

SEQ ID NO: 380582 - protein, 481 aa, unidentified
MGEKKSAPRGKSGHGGKRRGRGVQKTLQVVNPDAAGIDIGAESHYVSVPEDRSEEPVRQFGCYTPQLEEMAGWLIECGIKTVVMEATGVYWIPVFRVLESRGLEVLLVNPKHVKHVPGRKSDVADCQWLRQLHTFGLLRGAFVPPQDVAAMRTYWRQRRTLVEAASREILHMQKALTQMNLHLHVVLSDVTGVSGMKILRAIVAGEHDPVQLAGLAGTQVRASREEIAQALSGHYTGEHLFVLGQALELFDVFQAKIRDCDGQLAIHLSRFEGKAGAGAPPSNPKRSRRVSRRKNEPYFDLRAELWRLTGVDFNRIDGIDSLTAFTVLSETGFDVSAFATEHHYASWMGLCPNNSITGGRVKRRHTRRVINRAADALRIAAQSLWRSKSYLGAYYRRLAARMGAPKAITATAHKLACIMYRAVKYGQQYVDKGEQYLEEQHRKRNLKSLVHRAKDLGYMLVHSETGECLSLTNQPLTRCVS

SEQ ID NO: 380583 - protein, 343 aa, unidentified
MKLSRVGIDLAKNVYQLHGVDRSGKTILKRRLKRHQWLKVLLDKTEPGCEIGMEACASAHHWGRELQSRGYTVKLIPPQFVKPYVKSNKNDARDAEAICEAMSRPNMRFVTVKTVAQQDIQATHRIREELKVRRTAKGNQIRGLVAEYGLVAPKHMSSLRAAIPCWLEDAENGLTHYFRSLLHGLWDDLLILDDRMCEMDKTIKRLAKDNEDCVRLQKLRGVGPMTSTAMVATVGDARQYRKSRQMAAGIGLTPRQNSSGDKHRLLGISKRGDVYLRTLMIHGARSVVTGAKHKDDSLSRWVTEIAQRRHPNVAAVALANKNARMAWAILRHKTDYNPDFAMS

SEQ ID NO: 380584 - protein, 372 aa, unidentified
MTSIIYVGMDVHTTNYTLCCYSMEDDRFFVEVQVEPDAKNILKYLARIEKQQSRDCRIVCGYEAGCLGYSLYHQLHAHGIDCVILAPTTMMTKPGKRIKTERRDARLISKCLAFHTYSPVYIPTEVDDAVKEYIRMRDDANSALTRVKQQIIAFCIRHGKIHDGKSYWTNKHLEWLSSLDLGNKILSEVLQEYLIRYYQLREQVDMYDMRINELAQAEPYRQKVEKLGCFRGIAAHTALSFCVEVGDFRRFATAQQFASYLGLVPGECSSGDKQQYTGITKAGNSHLRKLLVETAQVFGRSATKSGKSVALKERQAKCDSLTVAYADKANARLKKKYFKIAMRSKVNIAKTAVAREMACFIWGMMTDNISCA

SEQ ID NO: 380585 - protein, 351 aa, unidentified
MSAEGEAIRSNDYRKDTTVKAPSTRPAAVLGLDVGKSSHWACLIDRDGEVLASAPVRNREAELDALFASAPAGTLVVVDQFRNIGSLAVRRARAAGLGVAHLPGLAASRAAGLFAGEAKTDERDAAVIARTALGVPDSLSGVPGRGEALEAARALSSQRDHVVACATRDKNRLRAVLLESCPALEAAVDLSDRRWLELLAGFGGAWGIARSGAGALEAETAALLEGDETYACLLTVPGIGPRTAAQLAVSVDIGRFPDHDHLASYCGIAPRVRSSGTSVRSVRASRRGDARLKSLLIFSCNSLVRSSGRYGEYYRACRARGMGHGRALKAVARKRLRAIYAVMRDRVPYRE

SEQ ID NO: 380586 - protein, 395 aa, unidentified
MRSTRLPARIESPHPPNRYAVGPLPCNSKAAGSAITAGAVADGIPHPSGVIKPGGELGHPSVIPSSPDSRLGRVASPVLQGREQMERFVGIDVSKAALDVHVVPDGVAFQVARNASGIDELVHRLAEYKPHLVALEATGGFETVVAAGLAAARLPVAVVNPAQVRAFAQALGKRAKTDLIDAVVIARFAEATKPEPRALADAQTQQLADLVARRRQIVQMMTAERNRQKHASRRTAKSCARLIAALERELADINEEIDDAVRGSPAWRETEDLLRSVPGVGPVVARTLLADLPELGTLDRRRIAALCGLAPWTRQSGQWRGKSFIGGGRSSVRSALFMAALVAAKRSPPFAAFYQRLIARGKAKMAAVIAVARKLLVVLNAVVRTATKWDEAKHV

SEQ ID NO: 380587 - protein, 390 aa, unidentified
MIYVGIDIAKLNHFASAISSNGTELMKPFKFTNDSDGFQLLNSRLVELSYEDDSIIIGLESTAHYGDNLVRYLVACNYNVCVLNPIKTSVMRKDNIRKTKTDKVDTLIIAKTLMMQDSYRFISFFDLDLMDLKQLGRFRQKTIKQRTRLKIQLTSYVDQVFPELQYFFKSGLHQKAVYALLKEAPTPRDIASMHMTHLSSLLVKSSHGHFTKEQAKELRVLARKSVGANDSALSIQITHSIAQIELLDSQLNSVEAEMTEIMKFNDSVIMTIPGIGYINGGMILGEVGDIHRFQSPSKLLAFAGLDPSVYQSGNYSAKCTRMSKRGSRVLRYALVNAAHNVVKNNATFKAYYDKKMAEGRTHYNALGHCAGKLVRIIWKMLTDEVEFNLD

SEQ ID NO: 380588 - protein, 446 aa, unidentified
MKQKIEMTVKNFNAAGIDIGSKSHFVAIGQNADEIKEFGVYHSDHVAIVKYLKDNNIKTIAMESTGSYWQGLYVVLVESDFEVLLVPGSQTKGFRKTDVKDARQLQQLHSIGLLSSCFLPDDFTYRVRELSRHRKSMVRDGAKYSNRMQKCLRMMNLRLDVVISDITGVSGLRIIKAILSGERDGRVLASLADCRVKNSKEKIEDALQGNFHVELLYELKDNLELYETIQTKIINLDNQITKLISETQDVKNSDVNMDEVQLTKKHVRGKKQTKIPIQKLSYLLYHTDLSAIKGVSLNTILTTVSELGTSTDKFRNSKAFVSWLRLAPNNKISGGKVLSSRTPKASNPLTIAFRDAANVIGNQRSGELTNFFKRIAFKKGRCAAITATARKLATIIFNMIKNKEPYNPKKDEVIKIKIEQKKVSNAKKILEMKGFIIIDNQGVMVS

SEQ ID NO: 380589 - protein, 414 aa, unidentified
MEKQKNIVCGADIHKKFIMATILSRDGNKIIERFGMTLDEILRFKNWVISNNCESVAIESTGIYWISIYTVLEGNIEVILANAYKVKHTPGRKTDKRDSKWLAELCLNGMIEPSRIFPKEDRDLRALTRAREKLVNNSTQMKNRIHKELESACIKISSVLSDIFGISGMKIINGLIEGKNIDEILKMITSKKILKKEKELRDAVKNSLDPARILMIRTYLELIEKIESEIEVLNNEIMCRMQRFKEDLEIAMSMTGMGFASASTILAEIGNYKDFETAEHLASWCGLTPKVSQSADKLVTGNITKQGSKHVRRMLVQVAHAISRSRNSRLKIFFLRLLTKKGKKKAIVALARKVLCILHHLLMNREKYQDDKILKPKKVKLNWDSSPVQMTEEDMINVLVGAGYTVQKMKESIY

SEQ ID NO: 380590 - protein, 364 aa, unidentified
MYYVGLDVHASRSSLCILDPCGKVVKRLEVKGSWPKLMEQVASQVPRPFAVCFEASCGYGYLHERLSALAQRVAVAHPGKLRLIFRAKRKNDRVDAEKQAKLLYLDQVPQVHVPSADVRAWRGLIELRRKLVGRRTAVKAQLRALLRALLRALLRGAGACDAPAGKALWSKKGLRWLASAPLCEADALRRDLLRRDLLLEELGEADARVARVTKELDRRADAHPGVALLRTIPGVGPRTAEAFVAYVAYVDDVRRFARTRQVGCYLGLVPCQDSSAGRDRLGHSTGEGPATVRMLLCEAAWQAVRRSPSMKAFFERVTHGEPGRKKIALVAAAHKLARAMAAMLRTGEAWREDENEEQEQEQGA

SEQ ID NO: 380591 - protein, 338 aa, unidentified
MTIETLGVDIAKNVFQLHGVNRNGRSVLKRRVMRDELLKVIAQIDRCTIVVEACTGAFYWARKFEALGHQVKLISPQYVKPFVRRQKNDGNDAEAICTAACQPHIPFVPKKTVEQQDIQALHRARQRMVNHRTAVVSQIRGLLLDRGFAFAKSITRARREIPGILANMDNELTRMARAVIGELYDLFQDLDRRIASFDKKIDAVFRNNEACQRIAKIKGVGPKTATAVVAAIGDGSEFKNGRHLAAWVGLVPRQFSSGDRKVLMGISKRGSQHLRSLLVHGARAVVRTAPNKTDPASQWVNELRRRRGFNRATVAVANKNARIIWAVLKTGEAYRAAG

SEQ ID NO: 380592 - protein, 350 aa, unidentified
MSECTTAVIGCDLGDKQSTLCILRADGRVERPKPIKTVGEAFRTFFLARPPAHVVIEVGAHSRWVSVLLEELGHRVTVANARRVKLISQNDSKSDQVDAELLARLGKADVELLAPIHHRGMEAQADLAVPKARDALVGCRTKLINTCRGLVKSFGERLPQCSGESFHRQAREYVPAALKPALEPVFQALERIDEAIRKEDKLVARLAKKYPDVEVIAQPNGVGILTALVFLLTLEDKNRFKSSRQVGGFVGLRPRKNQSGEDDPQLRITKAGDPFLRRLLVQCANYMLGPFGRDSDLRRWGLELARRGGKNARKRACVAVARKTGVLMHRLWVTGEVYEPLGYSAKRLAA

SEQ ID NO: 380593 - protein, 349 aa, unidentified
MVADELDYVVGVDTHQDEHTLALVEAATGAVLAQQTVASNGRGYAQALRFAQQQVDAARVWAVEGAGHYGAGLARYLSERGETVLEVGRSPRGERRLSGKDDQLDAVRAARAALRSEPLPRPRSGERREALRLLLVARRSAVDVRREALVQLRSVIVTAPERLRQELRGLPVQRLLDRCSRLRRSTTPTPDQVAARVVLRTLARRIEAATVEADELEREILVHVRALAPELLDEAGVGPIVAAQLIVAWSHRGRLRSEAAFARLAGVAPLPASSGQTVRHRLSRGGDRQLNRALHTIVLHRRQHDPATRDYIARRIAEGKSRRDATRLLKRYLASHLYRLLQNQEPLLA

SEQ ID NO: 380594 - protein, 442 aa, unidentified
MEILYPYVGAVDVHKRQVTVTARTPHPGDGARWETTRTFRTFYGELLAMARWLVVERGVTHVAMESTGPYWWPVHSALREVGGPGLVIEVVNAAHVKAVPGRKTDVRDAQWLAQLMEVGLLRGSFLPPEEVRRLRDFTRYQTKLTEERSREKQRLLKVLEAAGIKLDNVASDTFGVSGRSMLEALVAGERDPVVLAGLARGVLRTKTSDLRLALAGRFTAHHGHLVALHLARIDHLDQMLTQVKQTIGRVGPDPTGGLAGTFAAQIDLLMSIPGIGERAAIAVISEIGVDMARFPTAKHLAAWAGLCPGNHESAGKRRSGRRRKGNAHVCSILVEAAFAASRTRSRIGARYHRLHRRFGGRANPGAARKAAFAVAHTLIKVIWSVLASGQPYTDLGADFYTHRVDPQAHTRKLIAQLEALSGKRIVFCDPADDPGGGQHHAA

SEQ ID NO: 380595 - protein, 328 aa, unidentified
MQDILTCAMGLDIHRDVIVACLAKGELGTDPEIEIRSFSTLIPEMRKLRDWVLEAECRYVAMESTGIYWQPIYEMLEPCFDGQINILVVNARHMKNVPGRKTDMRDAQWIATLLRAGLLKGSFIPDKTFRELRHLTRYRKSIVRDITAQKNRIDKFLQSSGFRFTAFLSDAFGASGRNIIRHLMEYGNISREALDRCLKTQTRKRIDEILIALNGSLSEHQRGFLRMIFGHLEALEQHRHTVEDAITKEITKHEEALSLLCSIPGIDVTAAAAIIAEIGTDMSAFPDSQHICSWAGLSPGNNESAGKRKSAHINNCLLYTSPSPRDTR

SEQ ID NO: 380596 - protein, 355 aa, unidentified
MSTYYIGADVHSNSTELAIEKTGKIVVRYTVPTSIPAIVNVLDSIQGKKYLAVEEGPMSGWLYRNLNKKLDQFISSDPRRNKLIASEGDKDDKIDSAKLASLLRGGFLREVYHSDDDERAELKHWVSLYHDRVRDAVRSINKIRARCRMHGVTISRATLRDPASRLKWLLKTKHNALANQLKMLWIGYDATVQQVKFARHQLNVLSKKYDIIQQWSLLPGIGLVRATTIFAFLDTPWRFKKKNKLWKYCGVGLQRSASGTDKKGRPKPARLQLPWAVNRTLKNAVLGAALSAINQKDNVFKDYYERMLKDGIITSNARHAVARKMLTVMWAMWKTNSSFDEKVVCELNMPTVQVL

SEQ ID NO: 380597 - protein, 418 aa, unidentified
MKVVYPICCGVDVHKSFLVATIIKTEGITPHYSKKRFSTFNNSILQFKQWLVENDCYDICMESTGKYWYPIYNLLEDSIHLTVATPKWVKAVKGNKDDTKDSKWIGDLFRLGLVPGSYIPEKPIRILREYTRYRFKLVSCKSSEKNRFQNAFTVCNVALDSVVSDMFGKSAALITDYLINTDEFDPQHCSSLLQKSLKKKSEAVNESIAGYEITSEQKYRMIMVRSHLEYIEDAIRKLDEKLDKLVVPYESTIDLLCTIPGIDRASAITIISEIGVDMAQFSCSKRLCCWAGLTPGNNESAGKKKSVRITRAGVYLKPALVQVAHAAVKSEKSPYYKTKYERISKRRGKKRAIIAIARMILTAIYHMFSTGEVWNPCDLFKIDMPQALQNKQKDKAIKQAIKLLVSQGLLDPNNIPAA

SEQ ID NO: 380598 - protein, 412 aa, unidentified
MVVAPKLHVAVDVGCRRHSVAIGLSSGERLEEFDIDHRPEGFQDFFSRIERHYRRFSSAAPTVAMEGYNGHARPLDSLVCERGWRLLNVNNLKLARFKEMFPAAAKSDPIDARRMLDLMQLGEHMRQARRALQEVHAPTPENAKLKRLMRRRRALVDEKSRLLARMQGDLRAVCPGLLDITGDAENRWFLNLLTHGDDLEKLARLREKTLLAIPAIGAKYAARIRQWQRQAQFSHEVAYAGPMIIEDARRILALGEAIKALERQCEALAEASDIARLIDTLPGFALVCSCELAGEIGTLDRFAGEASLAVYLGMANLDNSSGTRQGARAPGQVNKRAKAAMMTGVDRHRKQVPESQRYYEKKRAEGKTHNQAIRALGRHLCRVLYRMLKRGEAYCIREPQEPSTNAEQRLAA

SEQ ID NO: 380599 - protein, 316 aa, unidentified
MEEALRYAGIDVAQDWVDVAIHGVGQPWRVTSDERGVQDLIHALQEHGVALVMVEATGGLEIPLAVALDVAGIPVALVNPRQVRDFARSLGKLAKTDRLDAQVLAHFGAATRPVPRPLPDEQARELAALVARRRQVLQMHAAELQRRHRALHVVRHRIDRVLAVLEQEVQELDTELRDRLQASPLWREQEDLLQSVPGVGPALTFSLLANLPELGTLSSKQVAALVGVAPMNRDSGHWRGKRVVWGGRANVRAALYMPTVVAVRWNPVLREFYQRLVEAGKPKKVALVASMRKLLVILNAMLKHRTLWQPNYALTS

SEQ ID NO: 380600 - protein, 325 aa, unidentified
MDQLFVGLDVAKNHLDGHVRPSGEAFVVSHDEAGLIQLVARLQALRPTLVVLEATGGYEATVAATLASAHLPVAVVNPRQIRDFARATGTLAKTDTLDAHVIARFAEAVRPAVRPLPTEDAQHLGELVARRRQLVEMLGAEANRRRLIRNRALQRRIDAHITWLEQALRDLETDLHDTIRSSPAWRETENLLRSVPGVGPITASTLIAELPELGHLDRRQIAALVGVAPFNRDSGTLRGRRMIQGGRRPVRRVLYMATITATRHNPVLIAFYQRLRTTGHPTKVALVAALRKLLTILNAILRDRRVSEQWDTNGRRGKPRRFDNE

SEQ ID NO: 380601 - protein, 395 aa, unidentified
MVFVGIDVSKDYSSAQGLDREGKKLFYLDFPSNGEGFSRFLDRVKMHVEDLSQVVVAMESTGCYHINLFAFLCSEGMVCVVINPLLISNFARLSLRKTKTDKKDALTIAQFLLAHHRTLSQVSYSQSSQDLKDLARERESLAVMIAGLKNDVRRLLQMTFPELEHRCKLFTETMLRFLMKFPSARAIHSAKAKEIAKALIHVEGKRKRVWISAQEIIAMAKSSVAAESVAKEWILSDKIETLLYLEGKKKRITEVLVEACRSTRVEDLDIITSVDGISTITGSTFLAELGDIKTFSSSKHVIAFAGLDPSIRQSGQYEGISRISKRGNRHLRRVVFLMTLCAVRSQNVFREYFLKRKEEGLPPKKAILATAHKLLRVLFAMLTTKSHFRKEVVEV

SEQ ID NO: 380602 - protein, 314 aa, unidentified
MTTQTPIIGIDVAKDSLSLYRADLDQYCTLDNDARSIRAWLKTLPGDCALAVEATSTYHVQLVDLAHARGHRLYVIDGYRLSNYRKGIGGRIKTDASDARLLARYLAHEQAQLRVWQPAGKAYRLLQSLLRRRATLIRSATALRQSFGHDTQFKVSMKAALSSLKRLEQRLDQDIAQALKDAGLAEQAKRCRAIEGIGPLTAAALNMAFQRGPFRNSDAFIAFLGLDVRAKESGRYSGRRKLSKQGDPEVRRLLHNAAMAASRTKAWQKLYLGYLERGLKKTEALTILARKLARIAFALMKTQQPYRSPTCTAG

SEQ ID NO: 380603 - protein, 338 aa, unidentified
MCDDGTKDLPEAAAVGSFFLPPMATYIGLDVSQHVFDAHLPQGVVRYPQTPAGYAQLLAALPAEAIVVLEATGPYGLRLLAALHLAQQAVSVVNPLAVRRFAQSQLRRTKTDRSDAQLLTAFGSAIKPPLTEAKARDVTQLQQRQALLELLRRQLLALRNHQHALQLSPWPDPVSEAALEEEISQLEKRIQELEQGLDQAVAARPEAQRLRAIPGLGPRTVAALVLLGPGLGAFASWRQAVAYAGLCPRHYESGTSVRSRPRLSKLGDGRLRRLLYLGAWSAARFNPACKALYERLLAKGKAKQQALCAVAARLLRQAWALVKLDRKFDPTYHLKPGN

SEQ ID NO: 380604 - protein, 341 aa, unidentified
MKNLFIGVDFSKEKVDVAIIFADGLTETAARVFNEFKTTVSGYKQLVKWVEQNSYGIDSSLWLFCGENTGDYSKGLCNFLYGKGYDMWLENAKSIKDASGLRRLKSDRADASMIAEYAMRNYDKAVMYEPLSESLAQLRELFLYRQMVVRHRCSFQVRRGEKRLTMEKSPIKTMISQSGRHIVSELNKEVEKIDKRIAELIKSDEELTEVFTVVTSVPGIGTQNAVCLMVYTDNFRRFNYDSRKIACYYGIAPFGKDSGTSVHSDPHVHYMANRQIKAMLTQAALAAVNFNPIMARYYMRLVERGKKKQVALNNVKNKLVHLITAMVRNRQLFSPEYKISA

SEQ ID NO: 380605 - protein, 350 aa, unidentified
MTSMTSTRAVVTVGVDTHSDTHHAAVIDEVGRPLADAGFPTTPAGYRRLLEWAREHGQITAFGVEGTGAYGAALARHLRAAGETVIEVDRPDRRTRRQRGKSDPIDAYAAAAAVLSGTASGIPKTRDGLVEAIRTLRVARRSAIKARTQAINQLKAVLLTGPAELRQALAGQSTRQLLATCRRLRSSERPTDAADPVIAAAKLTLRRLARRIAALTEEVDELDAELRPLVAQASPALMEVYGVGTQVAGQLLVTAGDNPDRLHSDAAFAQLCGTAPLPASSGRTTRHRLNRGGDRHANNALHTIALVRLSSHPPTKAYAARRRTEGLSNLEILRCLKRYIAREIHHVLVA

SEQ ID NO: 380606 - protein, 421 aa, unidentified
MVQQKISRKLAQVKKGTLHVGVDLGLENNVAIVINEGAERLDRFRFPNDRGGYDYFHRRIKKHQQQSSASEVLVAMEPTNYLWKLLASDLEQKGIGYRLVNAYTVKKHREGDQLDRSKDDPRDAFTIADLSRTGKCTETQLQHGSYAELRQSISLYYRLKRQIRREKQHIWHAAGQLFPELTRIFKNITGETAKAMLITQASAVEIRKISQEEFITKVRVGFDGNRLYVSRLRAAHHLATSSVGVKYGVQALQLALKLHVESLNRLQDQEKQILSALEVCFLSLPEATPLLSVKGIGILSGATILAEIGDPKRFRHAGQLVKLAGIQPTPNRSGRKQRSATPMSHQGRPRLRSALYFTCLRLIQVDQRFSQRYQDLQNREKNPLTKMQAVGVLMNKLLHILWALMKQQSQYKPLDTGLTGS

SEQ ID NO: 380607 - protein, 370 aa, unidentified
MTNDNIVVGLDVHKKTVVSAELHPGMDQVSERRTLENTPEEIEKLVRRVTARGKAVFCYEAGPCGYTIYRQLTKMGVDCVVIAPSLTPRRPGDRVKTDRRDAEKLARLFRAGELTVIHIPTQDEEAVRDLVRVREDTLGDRLRARNRLSKFLLRQGRLFQETKSWGTAFREWLQSQHFEFPALQTTFETCVRHVEEAEECLADLDKHVDALAQTPPYRTRVQYLRCLKGIDTLSALTLIAEIQDFERFGKAPSFMAYTGMVCSEHSSGSRIFRGGITKVGNAHVRRVLIEAAWHARRPHTLSHALADRRRGCPREVVSIAHKAQSRLHRKYWRLMHRGKSPQVTVVACARELAGFVWAISRHFPQRPLTV

SEQ ID NO: 380608 - protein, 347 aa, unidentified
MRFYNQQHNYYCGIDQHARILYVCILDSFGNKVLHKKIDADPDALLEILTPYQDNIIVGVECMHCWYWVSDLCLDYALDFVLGHALYMKAIHGGKTKNDRIDSYKIASLLRGGNFPVAYVYPKAMRATRDLLRRRTKIMRHGADLKAHVSNTFSQYNLQSPNVQLRYPCAREQVRNQFDESAINRNIDMDLNVIAFYTKELASVEHFIEQTAKQHNAQDYQLIQTVPGIGRILALTILYEIGNIERFPSVQNFASYSRLIKCKAESAGKQKGTNGNKIGNAYLKWAFSEAAVLYLRGNEPAKKYIQRLQKRMSKAKALSALAHKLGRCVYFMLRNKTVFDAKRFLPE

SEQ ID NO: 380609 - protein, 406 aa, unidentified
MLNAVGIDVSKGRSTVTVLQPGGIVIHKPFDVKHTSTELHQLTTYLGSLEGDTRVVMESTGRYHEPILKALTKAGLFVSAVNPHLIRNYGNNTIRKVKTDPADAKKIARYTLDNWAELREYTGMDTTRTQLKTLNSQFNFFMKQKVAAKSNLIALLDQTYPGVNKLFTSPTRSDGTEKWVDFAYSFWHVDCVRKSGIKAFTERYERFCRHHGYNYQPDMPQRIYDASRDLIAVLPKESIYKELIQDSIQELNLAARHVEELRSKMNELASMLPEYSTVMAMNGVGKTFGPQLIAEIGDVSRFNHREALTAYAGVDPGRDDSGQHNSTSVNASKCGSPRLRKTLFLIMTVILQNGETDDPVSKFLFKKRSEGKPYLVYMTAGANKFLRVYYGKVKECLRNQEQTTTE

SEQ ID NO: 380610 - protein, 356 aa, unidentified
MSSIVSEQYEFVIGVDTHAASHTFAVVAAATGAVLGHAVFPASAAGLSRAQGWLTERAGHAAALVVIEGTGSFGAILTAQLQAAGREVVEAAKMSASDRRGAGKSDELDAVRIARAVLGLPIPALRAPRALSTGQARVAMRVLVVAREQMTGERTRAINALTALVRTIDLGIEARKPLTASQISTIAAWRGRDEDATTATCRHEAVRLARRIRTLGEDLASNRADITSLIEQDTPQLLKLSGVGAVVAASVLIAWSHSGRVRSEAAMASLAGTCPIPASSGNTIRHRLNRGGDRRLNRALTTITIVRMRIDPATRAYVARRRAEGRTTKEIMRSLKRYITRQLFRTLTAAHPSSAT

SEQ ID NO: 380611 - protein, 338 aa, unidentified
MKAYAGIDLHSSNSFIGVIDGQDRRLYKKRLPNDLDTILSALAPFKKDLVGVVVESTFNWYWLVDGLQEDGYKVHLANPSAIKQYEGLKHTDDDWDSFWFAHMRRLNLLPEGYIYPKEYRPVRDLLRRRLLFVKHRTAHILSLQSMISRNLGSRMSVRAIKKLKESDADDLFDSPNLMFAARKNIVVISHLAKIVKGIEKQVMSQVKLRKEFKVLLTIPGIGDILGLTIMLEVGDIKRFPKVGNYSSYCRCVKSERLSNGKKKDENNRKNGNKYLSWAYVEAANFARRYCPKAQRFYQRKKAKTNGIVAIKALSNKLARASYYVMRDQIPYDASKLFD

SEQ ID NO: 380612 - protein, 339 aa, unidentified
MTQILYAGIDVSKDKLDLAIASERDKILASSTFDNSLSSINGFKQLVKWVKKYFKKFKKVHFCIESTGIYHEEIAEFLQEKGFIVSVINPFQSKSFACSKLCRTKNDKVDAAILANYCLIHQPEESIKLPEDIKTLRNLRRNMDKLINTRAEYKTKLQNCKDSNVAHVLKGTVFSLSGSIAQIEKLIKDHIQKFPELKVNIELLKTIPGIGDKTAYAIISEIHIEDGKSLTVKAQVAHAGLAPREYKSGSSINGKTRICKTGNANLRKALYMPAMCAIKNNPILFGFYHRLLSRGKPKMVALVAVMRKLLAICIGVLRNNQPFQVDWAKKQKEKFALST

SEQ ID NO: 380613 - protein, 339 aa, unidentified
MNNSVIGLDIAKNIFHTYTFDEEKSKPIKKKLKRVELLAFFANYPASLIGIEACGGAHHWARELTKLGHEVVLLNARYVKSFVIGNKNDFNDAAAIFDAVTWPNKRTVSVKTIEQQDIQLVHKIREGLVGKRTALVNQVRGLLSERGIIIPQGIKKVRVELPLILEDAENDLTALSREMFAEQYEKLVVLDEEVKNQDRRISRLSNSNPLSKRFLDVPGIGPITATIVASDIGGGKGYQSSRDYAASLGIVPRQHSSGDKQVYLGISKRGNRYIRTLLIHGARSVLKYCSGKEDKLSLWLQALIERRGFNKAAVALANKNARILWAMASQDKEYDAALV

SEQ ID NO: 380614 - protein, 341 aa, unidentified
MLRVDTDSGELQERPLAHREEAEKFYGALAAAGQQVRVGREASGHARWFERLLGELNFELWIGEAAEIRAKRVRKHKTDRQDAQHILGLLLENRLPRIWVPSGENRDLRQLLWHRHRMVQARTRVMNQLQAIALNEGQRCQKGLWRERGRQQLEAIQLAAWASRRRRDLVELLDRLNPTIAELSQAIEQEVEKCREAQRLMTHPGVGPLTALAFVLIIGKVEGFPSGKQVASYLGLVPVEQSSGDRRRLGHITKQGSSMLRFLLVEAAQVTVRSIPEWRSHYVHLMMRGGRKIAKVAMARRLAIALYWMWRKGWSYEQSKSSVRTRASSEQAMVCSTTPRH

SEQ ID NO: 380615 - protein, 361 aa, unidentified
MNKRLSKKQMWFKQFNPTKDDKMYVGIDVHKESCSVAIWLNDAPAIDFVTPADNKHLTQALQKLSPAVKLIAYEAGPTGYSLARELQKAKLPVQVVAPSKTPRQSARDSKTDRLDCRKLAEYAAKGLLRPIAIPTKQQEADRQISRLREQLVDKQKRAKLQVKSFLLQHGLPQPPGLKSWSHAAIEALQKIQLSNQLRFCLDTLLAELHFLTSQIKTTEQKQNEILNHPRHAAAVKILKTHPGVGPVISAQFRLEIFNPKRFESCTEVAKYVGLSPMVTQSGQSQRDGPILKTGRPQLRSNLIQGAWIWVAKDPHAHRVFGRILHNTGERNKAITAMARKLAIHLWKMACDNKPYRQPLTN

SEQ ID NO: 380616 - protein, 413 aa, unidentified
MEVMYPRCAGLDVHKETVVACVRLAAGSDTSHVVRTFATTTADLIELSEWLEENGCTHVAMEATGVYWKPVWQVLADSSCFELILANAAQVKNVPGRKTDVNDATWLAELLAHGLVRASFVPEPAIQELRGLLRTRKQLVREKASHVQRVQKTLEEANIKLESVLSDVMGRSGRAIIQALIDGETDPAKLAALAHWKVRASTETLSEALRGRIKRNHRFLLRLHLQQIQALDAGIAEIDREVDDGLACFRDAVDRLSTIPGISQLSAQVIVSEIGTDMSRFATDAHLRSWAGLCPRNDESAGKRRSTRLRKGAPWLKSMLVQCAWAAIRSKGTYLHAQYVRLRGRRGPKKAICAVAASILTAAYHMLKDGTFYNDLGPTHFDRRRPETQARRLIKRLAELGFSVELKSMATAS

SEQ ID NO: 380617 - protein, 356 aa, unidentified
MSRDIKYIGMDVHKEATVIAVLNGSGKLIMESIVETKASSILQFIHGLRGELHVTWEEGTWAAWLYDLLQPQATQVLVCDPRRNALLKEGHKSDKIDARKLADLLRTGMLRPVYHGEHGLRTLRELGRSYQTLSQDLNRVMNRIKALYRGWSIPCAGTQVYAPRYQEEWLGKIEHAGVRRRAELLYQQLDGLQALRRTLRPELLTESRKHKASKLLRQIPCIGPIRAARLLALMQTPHRFRSKRQLWTYSGLGIETRDSAQYRFVRGQLQRAKKPQQIRGLNRNHNHEMKDIFKGAATRASCGVGPLRDFYVALLAKGMKPEMARLTLARKIAAIALILWKKEEHFDAEQLKLQAA

SEQ ID NO: 380618 - protein, 347 aa, unidentified
MEHYAGIDVSLECSSVCVVDASGKIVREGKVASEPEALISWFGSLGFDLARIGLEAGPLSQWLYAAMRGAGFAVELLETRHVRKAFEAMPVKSDRNDARGIAQLMRLGWFRPVHCKSMAAQEMRALLTARKLVQSKLFDVEMSLRGILRGFGLKVGPTTPKRFAGRIRELAAGHATLEVVAAALLAAHEVLLREFGGFEKRVRAMARTDTRARLLMSAPGVGAIVALTYVSAIDDPARFKSSKTVGAHFGLTPKKYQSGETDYTGRISKIGDGSVRTALYEAAHIILTRPVKGSGLKSWAMRLAKRAGMKKAKVALARKLAVILHRMWVDGESFAFTTPRTVAAVAA

SEQ ID NO: 380619 - protein, 476 aa, unidentified
MARKQEAKTEAKPNRKQRREQHRRIWTDNPGLDVVHPDAAGIDIGNSEHYVAIAPSKNEEPVRKFGCFTSDLRELARYLKAHGIRSVAMQSTGVYWIPLYDVLEEEEFEVYLVNARDTKNLPGRKSDVQESQWLLKLHTYGLLRNSFRPSSEIRVLRSYWRQRGEHVQTAGECVQRMQKSLTQMNLQLANVISDIMGVTGQKILRAILAGERDAEKLAEMRHERIQASREEIVASLTGNWRPELLFALKQEMDRYDFCQRQIAECDQRIEPHMGTLPTRPKETDSPGQSSPPQKKKRAGGNSPTFALDQELVRITGVDFTRIEGINVMTAQTILSEVGLDMSKWKTEAHFASWLGLCPNNSVTGGKVLRRGTRKIVNRAATAFRIAASTLRRSDSYLGAQFRRFRTRLGAPKAITAMAHKLAVLFYRMLRFGQEYLDRGQQFYQDKYLQQQIAFLKRQAAQLGLVVTPASSPAASA

SEQ ID NO: 380620 - protein, 361 aa, unidentified
MKKVSKPTQRMEATHGKPLMTMGLDMGDRFSHYCLLNEEGDVVEEGRTQSTEAALRRHFASEPRMRIALECGTHSPWVSRLLSGLGHQVIVANARKIPAITGSESKNDHNDAEKLARFAAYDPRLLSPLEHRRPERQLDLNLIHARSTLVRARTMIVNALRGLVKSAGGRLPACSTESLPARALAAIPPALIAVATPLVEQIALLNAQIGGMDKQVEKLAVKYPEIGLLRTAPGVGPIVAAAYVLTLDRPEAASNRAAGAFLGLRPAQSQSGDSDPEKRISKTGDRCLRSLLVQSAQYVLGRFGPDSALRRWGLKLAASGGKRGKKRAIVAVARKLAVILHSMWRSGQPFQPFPQPALAAA

SEQ ID NO: 380621 - protein, 410 aa, unidentified
METIVKRAAALDVHKAQVTACVRVPGRGRERAQEVAEFQTTVRGLLTLRDWLKAHRVTQVAMEATGVYWKPVWAILEDEFDCLLVNARHVKQVPGRKTDVADAAWLCQLLEAGLLQRSFVPPKPIRALRNLTRYRKAQIGERQREANRLHKILEDAGIKLDCVASDILGASGRAMLDALVQGTTDPDVLAELAKGKLRAKIPALREALVGRFDRQHALIVSAILAHLDFLDEQIQLLSDEITEQLVPFAAAVELLCTIPGVQRRTAEVIVAEIGVDMSRFPTDRHLASWAGQCPGNDRSAGKRRSGKTRHGSKWLDSALTEAAMAATRTNDVYLAAQYQRLRPRRGHGRALGAVKHSIITGCWHMLTTGELYRETGGDYFTRRDPERATRRLVSQLERLGHRVTLEAAAA

SEQ ID NO: 380622 - protein, 418 aa, unidentified
MKKKSWCTAKVDRVGEPRQGNGHCRLQRDVKELMAELVSKLSQKLELPGEQASDGRDPQEGVPGPNRGRLTVGVDLCDRWSSYCILGLDGETLAEGQLGTTPEDFAEFFQSMAAARVVMEVGTHSAWASDVVASCGHEALVANPRQMEGLKRRKRKNDRIDAHKLARAGRMDPQSLFTIKHRSAEVRRDLVAVRARDAVVTMRRDVINTLRGLVKGMGARLPRCSSASFSKKIGGALPAEVSETLEPLVGLVETLSVCIKAYDDRIEKLATERYPQTDLLRQVKVVGPLTALTYVLTLEDPKRFAKSRDVGAYLGLVPKQEDSGDSQPQLRITKMGDMMLRRLLVGSAHYILGPFRPDTDLRRYGLRLSAQGGKNAKKRAVVAVARKLSVMLHRLWVSKEVYAPLRHALAPATEPEAA

SEQ ID NO: 380623 - protein, 385 aa, unidentified
MRRSGQADPLEPERHQRARVEVSSNHSRDRRSTMNITTYGLDLAKRVFQVHWAEPETGEVKRKALARADVGAFFARRARGVVAMEACGSAHHWGRLLGSLGHEVRLIAAQFVRPFVKTNKTDAADAEAIWEAVQRPGMRFVALRSQEQQAVLSLHRMRSQIVKIRTMQAHQVRSLLYEFGLVVPKGWRALIAQAGPLLADTRCEVPELVGRELVTQLDGLRALTDRITELERQIASWQRQETECQRLASIPGVGLLTATAVVATVTDARGFRSGREFAAFLGLVPQQSGTGGRVKLLGISKRGDPYLRTLPIHGARTVLATQSRADRELDPWLKGLLSRRPKNVAIVALANKMSRTIWALMAHGRTFDRNWRRAAMIPVTAVCPN

SEQ ID NO: 380624 - protein, 369 aa, unidentified
MGEYSEAFVAFDTSKVKHAVAIADSGRAGEVRFLGDVASSPATVTRLIRKLASRYAKLHFCYEAGPTGYGLCRQIHELGHDCIVVAPSLIPKKPGERVKTNRRDAVTLARLLRAGELTAVWVPDATHEAVRDLVRAREAAAQDLRRKRQQLLSFLLRHGRIFDGRKHWTMAHRRWLAGQKFDHPAQQIVFQDGIDAIEDAIVRLRRLEEQLVAIVPSWSMAPVVEAYQAMRGASFLVAVTFAAEIGDVRRFDNPRQLMGFLGLVPRERSTGETVRRTGLTLAGNRRARRVLVEAAWSYRHPARVSQTLQDRLDGLPKAVREIAWKAQIRLCGRYRRLSASGKKLPVVIAAVAREMAAFLWAIGRQVAPA

SEQ ID NO: 380625 - protein, 414 aa, unidentified
MKVEYERCAGLDVHKRGVVASVILPKEQHTRSFGTTTPDLLELRDWLSGLGVTHVAMESTGSYWKPIYNILEGGFELLVVNSSHMKGIPGCKTDVKDAFWIADLLRHGLLRASFIPDQGQRELRELTRHRSSVVQKRAQVVNELQKALESANIKLQSVVSDITGVSATAMLKELVDKEQPDPVQLAQMAKCRLRNKIPELEKALVGTLRPHHKIILRQLQADMELFEAQIAELDLNILDRVKQQQEHIKRIDDIPGINQRVAEIIVAEIGTQMDRFPTAAHLASWVGLCPGNNESAGKRQTGRTRHGNNYLRSALVEAAQAAVRKKNSFFAGLYRRLMAKRGKKKALIAVAHRLIKLIHLMFSTGQTYKETGANYHDQINAIHVINRLTKRIQNLGYQVILQPVNNPPQTPMPA

SEQ ID NO: 380626 - protein, 347 aa, unidentified
MQQQVHTVAIDLAKKVFHLVGADTTGNMLWRKRLTRAALLPFLAQLPPVLIGLEACGGAHYWARRFREQGHEVRLMAPQFVKPFVKSNKNDMRDAEALAEAVTRPTMRFVPIKNVDQQDIQALHRVRERLMGARTALINEVHGLMHEYGIVIPQGVAQFRQAVVEKLASAKDTLTALSQEMCGKLVEEFVAVEEQRRYYEHKLESLAQTHPECQRLMTIPGSGPITATALIAAVSSVDVFKNGRQCAAWFGLVPQQHSTGGQTRLFGISKRGDSYRRKLLIHGARATRRWAKLKTDGRSQWIRGLLARRGWNRTAVAVANTNARIVWALLSRGGSYGDNAPASGRQE

SEQ ID NO: 380627 - protein, 336 aa, unidentified
MVYVGVDLHRKRSHVAALDQDGTQVLSRRISSTPEEFLRVFGELGPAELEVAFEATYGWGWFADLLTDVGIPAHMAHPLGTKAISSARVKNDSVDARTLAHLLRTNLLPEAWIAPPEVREARRAARARTALVRMRSRLKCQTVAIVADHGFIPEVSDLFGKRGRALLARFDLPSVSRSRVDANLRVIDQITQEIEIADRELRQLFRGDDRIRRLTAIPGIGFTTAAVVTAEVWDVSRFPSPDKLCSWAGLTPLERSSSETLRRGHISKQGSRWLRWVLVEAAASGPHDPTLRSFFGQIARRRGVKIARVAVARRLLTLCFYALRDETGCRAFPVTG

SEQ ID NO: 380628 - protein, 459 aa, unidentified
MGNRKEKQEAPKIDWKALDVVHRDAAGIDIGGKEHWVAISPERDKQPVRCFDCFTSDLEQMADWLAARGVRSVAMQSTGVYWMPVFEILQPRGIEVYLVNARHTKNLPGRKSDIAECQWLLKLHTFGLLNNSFQPTDAVRAMRTLWRHRGGLVAQASSAIQRMQKALVEMNIQLRNVLSDLSGASGMAILQAILAGERDPRKLAALADPQVKASKEAIPKSLQGNWRPELLFVLGQEMEIYRGCQDKMAACDRQLQKQLRDMESKVDLRKQPISPRPKRKRGGRGNSPKFDLRTELYRLTGVDWSQVDGIDVQVAQSVIAEVGVNMQAFPSEKHFANWLGLCPTNETSGGKVLKRRTPKVVNRAKVAFRQAASTLIRSQSYLGAQYRRLRTRLGAPKAITAMARKLACLFYRLLTKGQQYVDRGAAYYEDRHREQQIRSVLKRAQQLGLQVIQSERQAA

SEQ ID NO: 380629 - protein, 359 aa, unidentified
MWPMKDYSKYVGVDAHKKFCFITTMDKTGEIMARHKVSSNRIELESYFDQYGEDSIAVLESTYNWIYVYDSMEGRFGDIKLAHPKKVKAIAEASIKNDKVDSETLAHLLRSKLIPEAYISTKEERSLKDLYRYRYAYIKTRTSFKNRTLSLISRFIHEYPYTDMFGKSGILYMRSMDIAQQTKKIVSSYLDMIEELTRQIKKIEIKIKQQVKETKEMQLIKTIPGIGDISALLILAEIGNIRRFKHPKKLVSYSGLSPRVSSSGGKVSYGRLTKDRNKYLCYTFMECAIPALRRSPILLSKYTRIKRNKHHNKAKATIARKLAEAVWKVLTYQQAYREGVTIQRINKSSIKKSVPSATG

SEQ ID NO: 380630 - protein, 338 aa, unidentified
MEFKRIAIDTSKHVFTVHGVDQQEHPILRRELRRAQVEAFFGKLAPTEVVLEACCGSHHWGRALSRLGHRIKLIPPQYVKPFVKRTKNDRKDAEAISEAAARPSMRSVPVKTVEQQAETMLVKHREMLVAQQTQAINALRGHAAEFGVIAAKGSQNVGALLTVLAADTAIPAAAQAMFAHMAQHIAELDAKLEMLDRQLMERQRANPVSRLLAEIPGVGPITAITMAMTVDPNNFESGRHFAAWLGLTPREHSTGGKQRLGKISKAGNERLRQLLVVGATAVIRYAKPGSRSASGWLLQLLERKPRKLAAVALANKMARIIWAMMARGEAYRRQPTTA

SEQ ID NO: 380631 - protein, 339 aa, unidentified
MSKLTQPRQAMVFCGIDVSAATLAVAVQQENQRFEERVFDNTASGHKALIGWLRKDKVPARVSLEATGIYSLDLALALDQAEGIEVAVLNPKLMHRFAQTLRRSKTDSADAQVLAEYSCRMPFTPWSAPELSGLRLRTISRHIQSLVVEQTRQNNRLHNAEKSATTPRCVVNDLKRSMASLKLRIVRLRREALELVRSDEAMRKRFDLLILIPGIAAISALQLLGELAPLSPEMSVRQWVAHSGLDPSHQVSGTSVHKPSRISRAGNRHLRHALYMPALVAVRRDPHLKAFYETLLNRHKAKLQALIAVARKLLHAIYGILRTQTAYDGSKLFPLMEMT

SEQ ID NO: 380632 - protein, 403 aa, unidentified
MNAVGIDVSKGKSTVAVLRPFGEIVVSPFDVFHNPKELGELVTLLKSLYGETKVVMEYTGNYYLPIAQFLQNNGFFVSVINAILIHDYGNKSLRKAKTDKKDALKLASYALDRWLDLPTFSLSSDTRNLLKTYNRQYNQYNKLKVMLKNNLISLLDQTFPNANSLFTSPARKDNGHEKWIDFVLKYPHAECISKKSLYSFSKSYLAWCRKNGYNFSERKAQEIYEFACYCSPSLPLDESSALLISNAISQLNCIAETLATLANEMNLLASSLPEYNVVMSMFGVGSVLGSQLIAEIGDISRFHNKRALVAFAGLDAPPFQSGNFNAKSRSISKRGSTSLRKTLFQIMFAILQHAPVDNAVFQFMDKKRFEGKHFYVYMTAAANKFLRIYYARVTEYLNSLQVA

SEQ ID NO: 380633 - protein, 419 aa, unidentified
MNKQLHEPGLFIGIDWADQKHDCYVIDRDGKGFHQELKQSPEDIDTWVSEMLRRADGKPIAIMLEQSRGPLVHALMFRENVLLFPINPKQFARYRESYPGGGKDDPTDALYLARMLRERIATLRAWQPDDENTRLLAHLSRQRRKLVDGQTKLRLQLLAQLKSYFPVVLELFGKQWQLPLLLSVLGRWADPRQLRRADRRLIRRVLSDHAIRNEKQQNEIVERIRSAQLLTRDDALITPAAMAVKLLAHQIQQARKTISQFDAKIAEAMKQHPNAHLFTSLRGAGPALAPRLLCAFGSQKDRWEDADSLAAFSGIAPVTRKSGKQCQVHRRYACPKFLRQTFHEFADSARIYCPWTKARYRMLRDRGMKHHAAIRKLARSWIRILFRVWQTGTPFDCDRYIAQLKKRCPEITQYLAQEN

SEQ ID NO: 380634 - protein, 352 aa, unidentified
MNHYTGDDAHKKYSVFVTVNENGRAGSPERVPHEKELYRKYLATLPPASPIAIESVGNWYWMIEAMEQAGHKPILVHPRKAKLLMGLINKTDKLDAKGLAMLNLNGSLPAVWIPPAELRDQRELSRMRMSMVGVRTQFKNRIHATLAKYAIVIDEVSDTFGKTGRILLSEAIKELPPETLNSVKEQLVLLDQVSGQIEKIEKHISEVVKETPMMQLIKSLPGVGDILAIVIALEIGDVERFASAEHLASYAGTVPRVSSSGGKTHYGRVRPDVNHYLKWAYIEAASCIALQQKRNSGRHVVELMQRIQKQKGYPKAAVAVGRHLAEATYCMLKRNEPYHEPNLRKTVLSSQG

SEQ ID NO: 380635 - protein, 319 aa, unidentified
MAQNEVVVVGIDVAKDKVDACIRAFKLRQTWPSTAQGHRKLVAWLRKYQVNKAVMEASGGYERAWARVLREAGIEVRIVDPKRVRSFALSAGRLAKNDAIDAEMIAWFAETFSEAPSQPHDAAREELQTLVKARLDLIDFRMRLVSRSEHAAPGLVQKAHAHILKSLASEIAKLEAAISAKIKSTPDFAERAEIIESVPGFAQTSSANLVAGMPELGQVSDEIAAALIGVAPYDDDSGKRRGERHIKGGRRWVRNAIYMPCVGAATQNNPVLKAYYQRLLAKGKEPKVAIIACMRKLIVILNTMIARRQKWDPSRYVLS

SEQ ID NO: 380636 - protein, 428 aa, unidentified
MNNEETIRREQFCQIKDEIRRSDAYLIVGIDVAKDKHHTFMGNATGKSLLRKLVFENNLEGFRKLLERSDAVKTQNALSKIVFGMEPTGNYHKPLGAYLIRCGRHVVLVTGKAVKNNRELLDGRWDKNDDKDAANVADLVSRAKCLYYDYPSSSINDLRQLLSLRRRLKKEEHSLRMRIRNNLLAQYFPELDRFYSACESESLAIVRWCLDPGRIAGMELDEFFSMVTRTKRGVAQKLRLQKIHRLAVESIGCPLGPAAELEATLLVQKLKEVRGQLKQVADQMEDICLQFAEYNWLLSIPGFGPYVAARVLASISNPWRFDSSNQVLKMAGYDLGANRSGKRSDDAVPVISKRGNSELRYALYQAAHVASTRNRDFIGYFTRILRGRERERGIKTKMKVKLAAKMLKIAWTLMRKQEVFDPDHLIIE

SEQ ID NO: 380637 - protein, 402 aa, unidentified
MFDTEDVGVFLGLDVGKTAHHGHGLTPAGKKVFDKPLPNSETKLRAVFDKLTAKFGTVLVVVDQPASIGALPLTVARDAGCQVAYLPGLAMRRIADLYPGEAKTDAKDAAVIADAARTMPHTLRSLELTDEITAELTVLAGFDQDLAAEATRTSNRIRGLLTQFHPSLERVLGPRLDHQAVTWLLERYGSPAALRKAGRRRLVELIRPKAPRMAARLIDDIFDALDEQTVVVPGTGTLDVVIPSLARSLTAVHEQRRALETQIKTLLEAHPLSPVLTSMPGVAVRTAAVLLVTVGDGTSFPTAAHLASYAGLAPATKSSGTSIHGEHAPRSGNRQLKRAMFLSAFAALHDHASRTYYDKCRARGKTHTQALLRLARHRISVLFAMLRDGTFYEPRTPETTPA

SEQ ID NO: 380638 - protein, 361 aa, unidentified
MKRGHFIGIDTHCDFCEVAVVNSAGQVVQRHRCETSIVALREILEAVPRPRALVIEEGPLAGWLWRELHAAVERMVVSEPRRNRLISEDGDKDDDIDGEKLAQLLRGGFVKEVHQVKSLARAVFKQQVSVYHFRVRQRVRESLRLSSLFKQHGVMIREKAYVASEDRPALLGRLPADRTLREAVQLLWSAYDELVAQEETWRKRLFHLAQQEEVVQRFAALPGISWIRGATLYAYLDTPWRFRSKSALWKYLGIGLERERSGNGPEHVGVPLLTHRLLKSTILGAAQSAAALGDNPFADLHRRWRAQGLSARLARRNVARAVSATLWGLWKNGSAYRPEWVGVAAAAQRGDAGVSARTMAD

SEQ ID NO: 380639 - protein, 510 aa, unidentified
MDTVSWNAALAKTDEAMVRSRPRFSVVLGHVGDTGEAARAAIPFERVSTTTYPNRRGIPILMMEEAMAVRKKVAFELAHPNAAGIDIGSASHYVAVPPDRDEEPVREFKSFTEDMEALADWLAACGVDTVAMESTGVYWIPLFELLDARGFTVFLVNARHVKNVSGRKSDVLDCQWLQQLMSFGLLSGAFRPKDEICALRAVSRQRDMLLSYQARHVQHMQKALTQMNVQLANVISDIVGETGQKIVRAIIAGERDGEKLAKLKNGRIRASEADIAKALRGNWREEHLFALKQAMALFDAYAERLAECDRQLEAMLGALHRDGAGQPGKARRRGRAKNAPGFDVRSHLFAMCGVDLTRIDGIDTTTALKVLAEVGPDLSRFKSAKHFASWLGLCPGTRISGGKLLSGATKRTANRAAQALRLAAAALRSSHSALGAYFRRMASRLDRSKAITATAHKLARLIYTMLTKGTEYADQGQDYYEERYRERVMHHLTKRAKQLGFQLTPIPEAV

SEQ ID NO: 380640 - protein, 345 aa, unidentified
MELHTIGIDLGKTIFHLVGLNAGGEVMVRKKFSRAQLLRFTANRRVHLIGMEACGGAHFLGRALREQGHEVRLIPAQYVKPFVKTNKSDFIDAEAIAEAVGRPTMRFVPIKSDDQLDLQSLHRVRERWVMRRTAVINQIRGLLLERGMTVRKGRRHLEAALPEIMADAAGKLSATLRLLLAQLKLELDQLATRLEEAEALIQLTAQESEACRRLDAIPGIGPVTATALIAAIGNGAAFGKGREFAAWLGLVPREHSTGGKQKLLGISKRGNAYLRRLFVQGARAVLQQSSKQSSGLSAWLKQLTVRAHRNVVCVALANKLARIAWAVLATGQAYRPAAVPMAEAT

SEQ ID NO: 380641 - protein, 438 aa, unidentified
MSNKVIFNLDDLFISVGIDVGADFSWMSIALPNQQFVGKPYKILHNSIDSLTTAVSKIKEAEELYSLESRIFLESTGIYHYPLFCYLRDKGFNCSVINPIITKNSTNINIRKVHNDRFDSKKAALVGLKPDLKVSLIPSDLALNCRNLCREYYDLMDNRSAYVNKLQGELRMAFPQYLGIFSKVTINTSLTLLETYASPSAFLEADKQEIIDIIRSTARFGLTYAQNKYNAIIQAATDANQFGYIINSNIKRIRLYISFIRKYDEEINSILESLHELVDANEDADFVKQIHLIETIKGAGFLSAVSIMGEIGDFSAFSKPKQLFAYFGLDPAVKQSGKFEGTKVQMSKRGSAIARRVIHTLTLQSISISRNGEAKNSVLREYYLKKCDSKPKLVAMGAVSHKVCNMIFAILRDNKPFKIIAPQEHIKQYNAAKCDIAA

SEQ ID NO: 380642 - protein, 282 aa, unidentified
MLEGKIDHVIGVDTHRDSHTAAILDPNGGLVAELTVTSNQAGSEALLGVVAQRAPGRRCWALEGTGSYGAGLASFLADQGEWVTEIDRPKRPRGRNGAKSDPLDAIRAGREALGRDHLASPRQRGHREALRVLQLTRSGAVKVAADSRRQLKALLVTAPEPLRAALCGGTWLAQARACAVLTAEASDPVEYRATVRALRLTAERALAAHPEAKQLAEELRMLVAVMAPALLAQPGVGPITGAQVLISWSHPGRLRSEAAFAMLAGVAPIPASSGRVVRHRLM

SEQ ID NO: 380643 - protein, 370 aa, unidentified
MQQMTCGGTSPAQEQSRSGRRPSFLRVLEEVLMGMVGGLDLHRGQVTFDVVDTESGQALRGRIAPVHRETFRGWLARFDGQPVELAVEGCTGWRFVVEECQRAGVRVRLAEPADTARLRGRRQHAKTDRLDARHLRELLEAGRLPESWIPPTVVLETRAKVRLYKDLLDERTGWQQRIHAVLFHHGAPREDGLLHGDRDRLTRCDGLSPSARQTITVALQVIDALDEQLQRLKAELVGFARRQPGCRELQHEYGIGPLNSVVVWSELGDTRRFHSSDNAVRHTGLDVSVYSSDGKRSRGHLTRQGPPLLRWALFEAARCAGRSSSPDHAYYQQVKNRLGSKRAMLSVARKLTRRCHHRPRALGDEAFAAV

SEQ ID NO: 380644 - protein, 373 aa, unidentified
MTMIGNEERYSRASSDTVVEVVLGVDTHLDVHVAVALDQLGRRLDTFSVPTTKKGYEDLLAWAEGFGAVRCAGVEGTSSYGAGLARYLRVVGIEVMEVERPKRRHRRRNGKSDTREAEPAARAVLAGETAGEPKGGDGRVEMIRVLRSTRRSAVKARSQVANQLQGFLVTAPEELRERLRELTTKELVAVAARLRPSKDLDNVETATKFALRSVARRYQLLSKEIAELDTQLDRLVSETAPELISLPAIGTDHAATLLLTVGDNPERLRSEASFASLCGVSPVEASSGKVVRHRLNRGANRDANRALHLICVVRMRVDERTRRYVARRSAEGKSKQEIMRCLKRYVAREVYRVVVSAASPSPSGSCRRDAPLT

SEQ ID NO: 380645 - protein, 346 aa, unidentified
MHATTVAVDLAKTVFELALADAQWQVTGRQRLNRQQFTQFLMTTPATHVVMEACGTAHYWGRLAQRHGHTVTLVSPAYVRPYVRRNKTDRADATAILEAVRSGEVPRVAVKRVEQQALVALHRVREQWKRTRTARINTLRGILREHGLLLPAGPRAAVQAVPGILEDADAPLPMHLRHVLASVQEEIREIEGRMQALERQLEALAAADPVVTQLRTVPGIGLLTATALVGSVGHIGGFRRSRQFASWLGLTPREHSSGQRRHLGAISKQGDRYLRCLLTHGARAVLISAARQRAAEQPLSRLHHWALTVRDRRGHNKATIAVANKLGRLVWAVWAKDVPYTMPAAA

SEQ ID NO: 380646 - protein, 404 aa, unidentified
MIIVGLDWSRCKHDFVMMNLQGEILERGTIAHNTNALEELATRIEHRVDSAKQVRVGLELNDGALLAWLVTKGYTIFCIQPKSAQRARDIYRPSGSKDDSIGAFVLAEFVRVNADRLRPCSAPSEITLQLRELLRWLEGLVQQRTAANQRLGALLSEWSPQLAELCDNLDCIWQLDLLSEFPPETRLCQAHGNRIRSFVLNHHMRAKKQQKIEDIRQSVPMPVPAGRVQVVERQTIFLLEPTRMLTAEIKHIEEDLQQLTAQHPDVNVFKSLPVQGIVTIAGLMAIFGDNHKRTTSTDELASLCGVAPVTIASGKTKRVRQRRACDHTFHQALVHFAFNTAFCDGCWAGPFYQRKRSEGATHYAALRCLAKRWLKILHRIWKDHATYDEQLHQANQKRNRNHAA

SEQ ID NO: 380647 - protein, 329 aa, unidentified
MKQLVIVGVDVSKSTLDIFVKPLGQAVKINNDVPGFKKWLKELRPLCSPDVSILIIMEHTGQYSFRFESFLRSKSINYCKIGALQIKRSLGMIRGKNDKIDAQRIADYGWLRRDILVADKPVTQEIKKLQELLSLRQKLVRVRSGYICRLKEMMASGTCKASDDLAKIQQHLIVVLTSKIQMIEKQIRSLIASHSALQKTCELLVSIKGIGLIIAAYMIGCTDNFRRFANARKFNCYAGLAPFKHESGSSLKSRDRISHFANKDAKVLLNLGASCAIQFDQELKAYYQKRVAEGKRKMSCLNIIRAKLVARMFAVVKRQTPYQPIFAAA

SEQ ID NO: 380648 - protein, 329 aa, unidentified
MSALVCGLDVHKDSTYATILNSEGKIVDQTRMENEKVAAYLSRFDVGKVAMESSTAVAPMYRQLKKEGFDAVVSHPKKTKLIAEAKIKSDRVDSKAIAQLLRMDWLPLSYVPDEESAALREKVRRRAFLVRERVRLRVKIKSYLTYQGLKWSEEYGLWTKKGLVWLDGLGLAPVESYLRLIDVFNEEIKILSKELRYLAKTDEDVTLLMSIPGVGYYSALLINSEIGDIGRFPFGEKLCSYAGLVPSTYQSGGVVRHGGITKEGSRWLRWIMIQCVSAHVRVCDSWISRSYNCLAGRRGKNTARVAAARKLLMVCYSVLRNKRPFYDQP

SEQ ID NO: 380649 - protein, 343 aa, unidentified
MQAVKTIGLDIAKSVFQVHGVDSDGQVVIRRKLKRRYVLAFFAKVPPCLIGMEACATSHHWSRELQALGHRVRLMPPAYVRPYVKRQKNDAADAEAICEAVTRTNMRFVETKTVEQQSCLVLHRTRHLFIRQQTSVINAIRAHLAEFGIVAPVGRKGVEQLLDVVADAKDKRIPEVARACVAALGAQLRALKVQILEFDRQIMLWHRLHETSKRLDEVPGVGPALATALVASIADPKAFRSGRDFSAWIGLVPKQHSSGGKDKLGSISKQGDRYLRSLFVAGALAVIRYAKIYGSKHRPWLTALLSRRPTKVAAIALANKLARMVWAMMARGEHYKEPVALAA

SEQ ID NO: 380650 - protein, 410 aa, unidentified
MNPLYVGIDVSSKSNVVYFMKPDGTKHSNFPVANSLDGAKQLSKRILSALTSESLTDLVIGLEATSVYGDNLVCFLREDSSLAKYNRKIHVLNPKQVKKFKEAYPDLPKNDYVDSYIIADCLRFGRINKEVYLGDYRYKALQNLTRARFLAVQNLTREKQRFLNYLFMKYSSMAQEKVFSDTFGTTALAVYEEFESSDSLAYMDLQELTDFIKEKGKNRFPDPDAVAKAIQKAARSSYRLPKTVNDSVNQVLSISISSIRALESQIKEFDKAITAQIDLIPNTLQSVKGIGPVYSAGIIAEIGDINRFPNQAALAKYAGLAWTQHQSGEFEAQTTRLIKSGNRFLKYYLGEAALSLVRCDTEYSNFYHLKYKEVNKYQHKRALALTARKFARLVFRLLKDNRLYIPSEQR

SEQ ID NO: 380651 - protein, 348 aa, unidentified
MSTYYIGADVHSNSTELAIEKRGKIVARYSVPTSIPAIANVLDSLQGKKYFAVEEGPMSGWLYRNLNGKLDQFISSDPRRNKLITSDGDKDDKIDAGKLASLLRGGFLRAVYHSDDDSRAELKHWVSLYHDRVRDAVRSINKIRARCRMHGVTISRSILRDPASRINWFLKTDHSPLANQLKMLWIGYDATAQQVVFARRQLSTLSKKYDIIQHWSQLPGIGPIRATTIFAYLDTPWRFKKKNKLWKYCGVGLQRTTSGTDKKGKPKPARLKLPWAVNRTLKNAVLGAALSAINQKDNVFKDYYERMVQNGMITSNARHAVARKILTVMWEMWKTNSQFNENSVFLSN

SEQ ID NO: 380652 - protein, 416 aa, unidentified
MRVHRNCCGLDVHKQTIAACLISENEDGTSSRQKRIFGTMTQQLRELAQWLAEAKVTAVAMEATGIYWVPVWNVLEPHGFELLLINPEHYKAVRGKKTDLKDGERIAELLQDGRLAGSYVPPVAIRVLRDLTRYRTKLVQYQSSIANRIQRLLEQCNIKLASVASDVLGVSGQAMLRALAAGETNPGRMADLAKKQLRKKIPQLQLALEGCLLPHHRFLLADMLEELDHIGSKIARMEQAIAEQMRPYQKAVDAWMTVPGVKHRLAWNLVAEVGPTVDAFPSAADLVSWAGICPGNNETAGKRKSGTTRKGNRWARKALCEAAWAASKTKATYLQAQFRRLAAIRGSKRAIIAVASTILTIGYHMLKEETTYRELGGNYFDKRNLLRTTRRLVKRLEALGHRVILAPTRSPFQSSD

SEQ ID NO: 380653 - protein, 346 aa, unidentified
MQYYTERHRHTCGVDLHGRNLYLCVLDSDREIVLHRRVDCDEKKLLRMLAPYREDLVIGVKCMFKWYWLSDICEEHGIPFVLGHALEMKAIHGRKSGNDKLDAERIARLLGSGMFPVAYVYPKGMRSTRDLMRRRSFLVNQRSALINHIQVTNLQYNLPELGRISNPDNREGIVERFEDPAVRETIAADMSVIEILDVVIRRLERVIVKAARGHDHHAFALLKSVHGIGDVIGLTLLYEIHDIRRFDSLGGFLSYSRLIRCDKTSDGKKKGTGGRRQGNHHLKWAFSEAAALFLRANPEGQKLHSRLLKKHCKAKALGILAAKLARSVYYMLHRSTPFDMERFVRT

SEQ ID NO: 380654 - protein, 337 aa, unidentified
MELKRIAIDTSKHVFTLHGVDERERPILQRNLKREQVEAFFAKQPPTEVVMEACGGAHHWGRFLGQLGHRVRLIPAQYVKPFVKRAKNDRADAEAISEAASRPTMPSVPVKSAQQQADAMILKHREMLTGQRTQAINALRGHATEFGVIAAKGIAQVDALLDKLASEKAIPEAARAMFARMAEHIAALDDRIAALNKDLASLHAKDPVSQRLAKVPGIGPVTAVTLSLTVSAEHFESGRHFAAWLGLTPKEHSTGGKPRLGRISKAGHERLRSLLVVGATAVIRHVRPDRPAAWAWLVKLLERKPRKLTAVALANKMARIVWAMMARGEDYRLPATA

SEQ ID NO: 380655 - protein, 406 aa, unidentified
MLFVAEDWAEDHHDVEVQDETGRRLAKARLPEGISGIARLHGLVGRFLPEDGDAAEVKIGIETDRGPWVAALVASGYQVYAINPLQSARARQGNGVSGAKSDAGDAHVLADLVRTHCHQLRTVAGDSAQAGAVKVLTRMHQSLIWDRTRQVLRLRSSLRGFFPSALVAYQDLASTDVLELLAKAPEPSRAARLTHAQISAALKRAGRRDRETKTTAIMASLAAEHLTQPPLIAAAYGATVRALAAMITTSNEQITALEGQVEACFGQHPDVEIYLSQPGLGPILGARVLAEFGDDPTRYDGARARKNYAGTSPITRASGKKKVVLARYVRNNRLADALHQQAFSALSGSPGAHAYYDALRDRDISYNAALRQLGNRLVGILHGCLKTHTPYDEAIAWNQHTQQEAA

SEQ ID NO: 380656 - protein, 339 aa, unidentified
MPFSGGENISLIGVDIHKKYCLGIIEGNNTETKLRFPNTRNGWKAFLKNEENIDKVIIEAGSVSEKTLRFLEDLNVPVKMANPKKARLIAEATIKTDELDAKRLIDLEKVGLLPEAWIPSREIRDIRHLCRYRYFLVQIRTKIKNRIHYELDREDINVKTLTYKYLETVKEKTIMIDQLYRLLKEINEKIREVEKEIEREYSNNEYSRIIDTIPGISKYGSLLLSMEIGDINRFSNSKKLASYAGLVPREYQSGTREWKGHITKEGNKWIRWILDECLAIHINVCPESPISIYYKSLVPIKGNGKAKIAAERRLLSVIYVMLKEKITFDQYIKMMNRAI

SEQ ID NO: 380657 - protein, 433 aa, unidentified
MIKINYMSTLFVGIDVSSKSNVVCAMDFEQNRYISSSFRNNQPGADELAETVVRCMEKHPDLNTIVAVLESTSVYSIHIANFLATSELLMPYKPYVYCVNPKMTANYRKSYIGMDKTDPLDAYLIADFARVGRTKKLEPWRGSQFIALKRLTRHRLHLAECITREKTYMVSNLYLKFSELQILEGEEQPFSNIYGATASAVLTEFMTLQDIVDAKEEDLLAFLAEKSRNRITDIQKTSELLKKAARDSYRLDKCMYEPLNVSLASSFNCIQAYQKEIRLIDQAIEKCINGMNPNAFTILRSIPGIGPVWAAGILSEIGDIAVFHSSDALAKYAGLTWKRNDSGDFVSEDNYVTKADNVYLRYYLGEGANSVRRYIPEYRDFYNKKYAEVTKHQHKRALALISRKFVRLVFGLLARNQLYTGEKLDVESNIESN

SEQ ID NO: 380658 - protein, 399 aa, unidentified
MNAVGIDVSKGKSMVAIMRPFGEIVVSPFEIKHTSSDINSLIELIHSVDGESRIVMEHTGRYYEALAHELSAANLFVSAINPKLIKDFDNDSLRKVKSDKADSVKIARYALDKWQNLKQYSVMDELRIQLKTMNRQFGFYMKHKTAMKNNLIGILDQTYPGLNAYFDSPARSDGSQKWVDFAATYWHVDCVRKMSLYAFTCHYQKWCKRKKYNFSQSKAEEIYGKAKELVPVLPKDEITKQAVEQLNNASATVEELRALMNETASKLPEYSIVMNMKGVGPSLGPQLMAEIGDVSRFTHKGAITAFAGVDPGVNESGTYEQRSVPTSKRGSSNLRKTLFQVMDVLIKTMPQDDPVYQFLDKKRAQGKPYYVYMTAGANKFLRIYYGRVKEYLATLPESN

SEQ ID NO: 380659 - protein, 343 aa, unidentified
MQTITTIGLDIAKSVFQVHGVDAGGQVVILRQLKRRNVLTFFQKVPPCLVGIEACASSHHWSRELKALGHNVRLIPPAYVKPYVKRQKNDAADAEAICEAVTRANMRFVETKTLEQQSGMVLHRTRHLCMRQQISVINAIRAHLAEFGIVAAVGRNGVEELLDIVADPSDNRVPEIARTCLAVLGTQLRRLKEQILEFDRMIRAWHRSSEMSMRLDQAPGIGPVLATALVATVADPNAFRSGRNFSAWIGLVPKQHSSGGKNRLGSISKQGDRYLRGLFVIGALAVIRYAKIHGTKHRPWLTALLARKPAKVAAIALANKIARMVWAMMARGERYKEPVALAA

SEQ ID NO: 380660 - protein, 373 aa, unidentified
MKQYHKDIGLDVHKERNAVAIAESGGEVRLYGSISNDLHSLEKLVYKLRGDGVVLHFVYEAGPCGFVIQRRLQQLGEECVVVAPALIPRQSGDRVKTDRRDATMLARLHRAGELTGIHIPDPRDEAIRDLVRARTDTVTDRRDNRHRLQAFLLRHGYKYAGKSAWTPAHLRYLRELVLADHAHKVVLEEYLLSITQATKRIERLETHLATLAASWRMKPVVDALQGLRGIQLLTAVALAAELGDRSRFRHPRQLLAFRGLVASEYSSGGTRRQGAITKAGNSHARWFLVEAAQHYRLPPKVSKELAPRQANLPARLKAISWKAQVRLHKKYWSMTLRGKRVQTIQVAVARELVGFIWATARHVLPSLAEARNN

SEQ ID NO: 380661 - protein, 337 aa, unidentified
MKVTTISIDLAKSVFQVCGTNQGGTEVFNRQVRRNKLLETVIQFPDADVVMEACSGSNYWGRLFIKHGLTVKLIPPQHVKPFVRGNKNDRNDAFAISEASRRPNLTFTQPRSVAATDMAVLHRIRDRRQGSLTRLTNQIRGLLNEYGIVIPQGIEHLRRYIPLILEDADNELSQLMRSELHSLFDEWSMMESLIKQHDRAIEQFARADEQTTLLMTARGIGSITATALMSVMGSPANYRNGRHFASSLGLTPSEHSSGGKQKLGRITKRGNRYVRKLLVQCAMSHVRHLESRTDNLSLWLKKLKDRRGVQVAAIALANKLARISWAMLHKQQEFKLN

SEQ ID NO: 380662 - protein, 464 aa, unidentified
MKDHRRPSTKARTSPAALERLHPHAAGIDCGSAAHFVAVPPDRDTTPVRSFATFTGDLHRLAAWLTACRITHVAMEATGVYWIPIFEILESRGFHVILVNARHVKNLPGRKSDVSDCEWLRDLHILGLLRGSFRPSAAIVGLRAYLRHRATLIESAGALIQRMQKALVQMNVQLSLVVSDITGVTGLRILRDIVAGERDPQQLAQHRDCRCRASTAEIVAALTGNYRAEHLFVLQQNLELFDAHQRQLAACDTAIEAHLTRLAATTPGPTTPLPPARPRQKPRQNDPRFEIRTALHQLTGADLSQLDGIGPYNALRLLSEIGTDMSRWPTEKHFTSWLTLAPHNKVSGGRLLSSRTPPSANRAAAILRLAAMTLARSQTALGAFYRRVAFRIGKAKAITATARKLAILVYRTLKDHLVYADPGADVYDAQHRTHVLRRLRQRANNLGFGLINLSTGEIVEVTVS

SEQ ID NO: 380663 - protein, 349 aa, unidentified
MEAYDGPQIVGMDLHRRRSVLVRMTPDGQKLETTRIDNDPAELRKQIARAGERPQVVLEAAYGWYWAADALAAAGAEVHLAHPLGVKGFAYRRVKNDAKDAADLADLLRMGRLPEAWIAPPEIRELRELTRYRIKLVQIRTSCKDQVHAVLAKLGVTVSCTDIFGAWGSTWLDELALPQPYAGKVASLRKLAAELTAEITLLGKVIADLLEHHQAYHALQQLPGIGEVLAAVIVAEIGDISRFHHPGQLCAWAGLTPRHRESDTKIARGHITKQGSRVLRWAMVEAIQRLPADTPVREVKDRIIARRGTEARNIAKVAAARQLLTCVFYAMRDGQVRSLAARAAAKEAA

SEQ ID NO: 380664 - protein, 434 aa, unidentified
MAAVIGLETFVRGGERWKRARCLHFPSTQRGLDKFQHYLDHFSSAPQTFLGVCEPTGGCYGATVYQYLLDRAYPTWMIENALTRHMREKIMGGIPKTDETDARVMARICYLHEAIGEEFKLRPLKLAKQEESNLLAMCRDSWKLSQMIVRGKNQFTQLMAVVFPELKTFFTKSVSTISPVTLMAAYPTPADLAAATAEDVKAVLWKVGAYRHAHRVGELRELARHSSGLLPDPGRAWRLGWLTNFLQSNLKAQAELEKQVEARVTQHPGYQWIEAVPYAGPATLGVILAVTGNVNRFSNYRKYVAYTGYFAGLEKSQTIDRTKMSRRGNRNLKRAYFQIAAPLVWFDRGGNQYQTLFESKVVEGRPWYKAMPFVCAALARHIYHCLKYEDPYDVEKAFGASVSSPAPEAAETDLEADLDERFEVMEAHLDPEEG

SEQ ID NO: 380665 - protein, 339 aa, unidentified
MGRYVGVDLHKRSFQVCYWSRGKAEQREFHVSKAGIKLFQGSLRKPDKVGIEATGNARYLAGEIEKNVKEVKLINPWQFKVISRSVKKTDERDAETIAKYMSKGLIPEVRMKSKEQQQVSSLITTRDKLVKLRSTLKNKIHGILNANGYVTKREIFASKKGLERVFELGLDEAYEFELRIIVDQIKSLTVSIDQITEELTNRGKKMKGFDNLKSITGIGDVSATIMLSVIGNVEDFEDADKVASYLGIVPRVHNSADMIRHGRITKMGNKIARTALVQSTLIAIRYNGYLRQFYERLKAKKGSGKAIIATSRKLLTIIYRTLKYDLRFEDFNQYKFAVT

SEQ ID NO: 380666 - protein, 348 aa, unidentified
MDIRTVGIDLGKSVFHLVGVNAAGEVVVRKKFSRERLLQFTANLRVERIGMEACPGAHFLGRALHAQGHDVRIMPAQYVKPYVMTNKNDYIDAEAIAEAVWRPKTRFVPIKTDDQLDMQSLHRAREGWVRRRTSLVNQIRGLLLERGITIRKGRRYAEEALPGILEDPGTNLSGPLRTLLAQLQGELKHLQHQIDDADVVIFKAASEHEACKRLMAIPGIGPVVATAIVAAIGYGGNFQKGRGFAAWLGLVPRQYSTGGKQTLLGISKRGNRYLRHLFVHGARAVLRYKEKQSSGLSDWLGKLSSRTHHNVAAVALANKLARMAWAVLAKGETYRPPLLAAAEPVSLS

SEQ ID NO: 380667 - protein, 373 aa, unidentified
MKEERKIDRFHGIDRHKQFSTISVLNREGQEITFLSVCLDLKKYIENLGSSDAMILEASTGTFWWADQIEAQGALCYILDPHKFKIIKDSWNKTDKHDARNMAKALWVYLITGEFGIPTVYKPQAVVRELRRLFTQYALLNRQICMHKNNIQAILSDNGVHLLVIEKERLLNAEKGCLILKDLDIAASSRISIQMSQELLWKLEENKELLGREIILAGEPFQNEVKLLMTIKGITPLTALAFLSDIGDIRRFKSLRKMYAYLGLVPKSKDSGGKSRPGHINRESRKLTRTILTQSVFHISNSSPYLNNYYSDLTKKRGAGRARIALIRKICGIMRRMLLTGKEFRWVDKKLYEKKFNQYVKTLQKLQEERKSA

SEQ ID NO: 380668 - protein, 356 aa, unidentified
MATIEAARSGHVVIGVDTHKHIHVAAVMDSIGGILATLTIATDAAGYKQLLDWASGFGKIMAFGIEGTGSYGAALTSFLRRHDHKVIEVARPDRRLRRLNGKSDTLDAENAARAVLAGFATAVPKSADGAVEMIRQLKVAHDTAVKDRTGAMVTLKAMLVHASEDLRRETAGKTQKMIARHCALLRPRGLNTPEDANRHVLRSIAKRWIALNDEITELEAMIKDLVAQRAPHLLDRFGIGVDTAAEILIVVGDNPERIKSEAAFAKLAGISPIPAGSGMTCGKHRINRGGHRQLNAAIYRTVIVRMRFHEPTIAYVARRTAEGKSKRDIIRCLKRYVIREVYHLVKTDPHTGEIRS

SEQ ID NO: 380669 - protein, 452 aa, unidentified
MDQQLGKSNGLSLERIEPNAAGIDVGATEIFVAVPPDRDRQPVRSFKTFTDDLRQMAAWLVQCRITTVAMESTGVYWIPPHEILEEAGIGVCLVNSKHVKHVPGRKSDVSDCQWLQYLHSVGLLRASFRPESEIRAIRALSRHRSSLIEIASVHVQHMHKALTQMNLQIHHVLSDITGLSGMAIIEAIVAGERSPVRLAALCNQRVRSDQETVIKSLVGNYRSEHLFTLKQSLNAYKHYQELIADCDREIERLMRLLNGKIDPPPSSPATPTDPRFQKRSKNQFRFDMASELTRVFGVDLTTIPGISGLTAHTLLAEIGPDLSRFANVAAFASWLALCPANKKSGGKVLSSRTRQTNSRASHALRIAAQTLARSKSHLGNFYRRMRARLGGPQAITATAHKLARIVYHLITTGQHYDETVFVREDQKQAQRQEKRLRKQAKSLGFQLIPIAA

SEQ ID NO: 380670 - protein, 350 aa, unidentified
MINVGLDYHTKSSYASVMDRDGDEVWHGELDSQNELRQFLEELPDSRVLFEAGYGWPRLVKILEGSGVELVMCHPEANRRIATDRRKSDRRDAKNLAVFLKTGTYRKAYMPDAEVRDERQFMRGRTYMVRKITRLKNQIHSLLAYAGIPKEGMNIFAKKNCEYLETVDVPELTRENLDANVEALALHTDLLKRMNTRVAELNRHDPRARLLKTMPGVGDITARVLLSEIGDIDRFRTAKSLACYVGLTPKQHQSGNSMRTMGITKEGSAHVRWVMVQAAWIAIRMDPALRQFFKKLEAQKGSSIAICAVARKMVVAAWHILKKETPYRARKPETKDKPDVARGTAGLKSC

SEQ ID NO: 380671 - protein, 399 aa, unidentified
MIGVGIDISKNKSTVSAIDDTGEIIMKPQEFKHSQNELNKLIQWIKDQEDTVLVVMESTGHYHYPVLKKLYEEGIYVSVVNAYLMKKYGDIEIRKAKTDRKDAIRIAKYAIEKRFSLKKYEGEDEKYNDLKFLSRQYNQIVSIRVKAKIQFNNLLDEIMPGINKILTRTTGNSSKILYDFVEKYEHFDNIKRKGEQKFIKEYSAWSKKKGYRNGAIKALKIYELAQNSITTRSANNSTYIALRNCIKILRETEESSNSILTQMQTIAYTLPEYKIVRELKGVGDKLAPRLIAEIGDVRKFTSAKALNAYAGNDAPPHQSGQFEGTKRHISKRGSSSLRKVGYEIMMALKVTKPTEDNAVYEFMIKKESEGKAKNVAKMAALNKFLRIYYTRVMNLYKTL

SEQ ID NO: 380672 - protein, 352 aa, unidentified
MTMTTIARGITGGVDTHLDTHVAAALDERGALLGVQSFAATGAGYKELQLWLEGFGTIELVGIEGTGSYGAGLTRHLLGHQVSVVEVDRPNRQRRRRTGKSDPEDAVAAARAAQGGDATGSAKTRDGNVEAMRVLRVARSSARRSRTQAINQMRSLISTAPEELRAELRDLSVYKVLTVSSAYRHTGRTDVAGVPKITLRTLARRAISLEEEVKEIDRMLKTLVAETAPELSAIDGVGTDVVSALLVAAGDNPERLKSESTFAKLCGVSPLDASSGKQQRHRLNRSGDRQANAALWHIVFTRMVKDPRTKHYIERRMKDGQTKKEAMRCLKRYVAREVFAALPRSEFALDSP

SEQ ID NO: 380673 - protein, 361 aa, unidentified
MAMNTRLSKKQMFFNKVKLTKDDDLYIGIDVHKESYGVALWLNDTPAIDFIMPADTEKLLKLLEKVRIALKRIVYEAGPTGYSLARTLQKANLPTAVVAPSKTPRQSARDSKTDQLDTKTLARYAAKGLLRAIAIPTRRQEADRQLTRTRDQLISKQSEVKLQIKSFLLQHGIEQPPPIRAWSANAIRALDALKLPKKLRFCLDLLVQELQFLQSQLTTMEEQLKQTFDNDRHARAVALLKTHPGVGPVIARQYTAELFNPKRFKHTTEVAKYVGLAPTIIQSGQSLRDGPITKTGRPQFRSNLIQGAWVWVTKDPKAHITFLRILHNTGSKNKAITAMARRLAVHLWKMLCDNKPFTNIA

SEQ ID NO: 380674 - protein, 343 aa, unidentified
MQAITTIGLDIAKSVFQVHGVDAAGNVVLRRQLKRHYVLTFFQKLPPCLVGIEACGSSHHWSRQLQALGHTVRLMPPAYVKPYVKRQKNDAADAEAICEAVTRPNMRFVATKTPEQQSCLTLHRTRHLLMRQQTSVINAIRSHLAEFGIVAPVGRHGVEQLLDVVADSNDKRLPEIARACVAALGAQLRVLKAHILESDRMIRAWHRSSAGSRQLDEIPGVGPVLATALVASVADPRAFRSGRDFSAWIGLVPKQNSSGGKERLGNISKRGDRYLRSLFTIGALAVIGYAKIHGTKHRPWLTALLARRPAKVAAVALANKIARMAWAMMAKSERYKEPVALAA

SEQ ID NO: 380675 - protein, 475 aa, unidentified
MNIKGTKKKNQVVTANIFEQQELLKKAEVIKENLTASTWRELETNGKFDKNKKLSFISDDMLILGCDVGSETHYVRAIDTRGRELSKSAYSFNNDYEGFQSAKEWAVKIAAEHDKSQIVLGLEPTGHYWFCLATWMIANGISVVQVNPYAVKQTKEVEDNSQLKDDRKDPKLIANLVKDGNFGMPYLPEKIYAELRRLSMFRDQLNEDRIRTINRMHREMKIYFPEYKEALGKVDGAFSLELLKEAPFPDELIALGEEGIRQIWHAAKLRGRGYSRAREILQYAKASVGIKDGSIASKAAVKWFVQKIMELDVELAVIENQINQKCQEIPHTGNVLEISGIGENTLSGILAEMGDISRFDDVKEIQKLSGLGLVACSSGKHKGETKISHRGRKRLRYWLFQAAKSAVAHAEEFKELHMYYTTRADNPLKKMQSLIVIACKLLRIIYTILNTGTKYAPKKMLMDIRRPENKEAIVA

SEQ ID NO: 380676 - protein, 355 aa, unidentified
MTSTKYIGMDVHKESISIAVRNSVGKVVMESVIETKASMILQFIDGLRGDLQVTFEEGTSAAWLYDLLKPHVTKLVVCDPRKNKSMREGNQNDKIDACRLAELLRVDHLAPVYHGEHGLRTLKELVRSYLTIAKDLARVKSRVKAIYRSWAIPCTGKQVYAARHRAEWLGKINEPGVHRRAEFYYQQLDALRVLRQEVRRDLLAESKKQKAWKRLCEIPSIGPIRAAVLLGILQTPHRFRTKRPLWNYGGLAIEMHSSADHRRVHGQLERSTKNILVRGLNRNCNHDLKNLFKGAAVVASSKPGPFQEFYTALVAKGMRPEMARLTLARKIATIVLMVWKKGVDFDAQHLKPQTA

SEQ ID NO: 380677 - protein, 343 aa, unidentified
MHAITIGLDLAKSVFQVHGEDAKGKIVFQKKLRRAQLEAFFSKQPRCAVGMEACGSAHYWGRTLRALGHEVRLIPAAYVKPFVRRNKTDARDAAAICAAMGRADMRYVAIKSVEQQAMRAVERGRELLVKQRTQLSNCFRGLLAEMGIIAAQGRLGFAELRELVRAGDGRAPGPLKTTLEALGRQIDSLAKDIDGLEAQIMAAAKENPDMRRLCAIPGIGGVTAHAIVAAIGDGKRFDSARDFAAWAGLTPRERSSGGKTTKLGISRQGERRLRSLLALGASTIMRGARANTGRATEWQRGILARRPVKVAVLAQAAKTARIAWAVLTSGEAYRRPQAQAKAA

SEQ ID NO: 380678 - protein, 338 aa, unidentified
MTILFVGIDLAKSVFALHGVDEHGKAVLVAPKVARDKLVGVVAALPPCTIGMEACSGAHHWARVFAGFGHTVRLMAPKFVAPYRMSGRRGKNDAADAAAICEAVQRPNMRFVPVKSLEQQGRLTVHRMRQAFIEQRTGMINRIRGLLSEFGIVLPLKAATVRRQAGACLEDLPGWANLAIGDALSELHRLDERIEQYDRHIAQMAREDARAQQLMKLCGVGETTATAMVAMIGNGHEFDCGRQFAAWLGLTPGQYSSGGKSRLGRITKAGDSYLRSLLVLGARAVLAAAGNKNDPISRWAKSVAERRGYWRAVIAIAAKNARMAWAVLKRGEAFELPA

SEQ ID NO: 380679 - protein, 326 aa, unidentified
MEHELHYIGIDTAKEKLDVDVLRPDGRHRTKKFANTTKGHDELVSWLKGHKFDHAHICIEATGTYMEPVAECLYDAGYIVSVINPALGKAFAHSEGLRNKTDTVDARMLAEFCRQKRPATWEAPHPLERALRALVVRHQALTDMHTQELNRTETAREVQRPSIDAHLLWLEAELKRLEKQIKDLTDDDPDMKHRRKLLESIPGIGEKTSAVLLAYIGLKDRFAHARQFAAFAGLTPRRYESGSSVIGASRLSKAGHVSLRRALYMPAMVATSKTEWGRAFRDRLAANGKKGKVILGAMMRKLAQVAYGVLKSGVPFDVSRHNPVAA

SEQ ID NO: 380680 - protein, 403 aa, unidentified
MNSVGIDISKGRSTIAVMRPFGEVVISPFEVRHTGSELSKLAKQLKSLDGETRVVMEATGNYHASVAKLLHNAGLYVSVINAKLVHGYGNNELRRVKTDRKDAVKLANYGLDRWLTLPRYIPEEDTRLLLKNCYRQYRQYSKVQTVLKNNLISLLDMVFPNVNRLFSSPIRGDGSEKWVDFVAEFWHCRCVSEKSQKAFTNKYQRWCRKHGYNFSEAKAHTIHAEACGHIDVIPKSETTKLLVEQAVAQLRATSAALAALKHEMQALASMLPEYPVVMDMFGVGPTLGPQLMAEIGDVRRFYSKKALVAYAGLDAPPNDSGDVTGRHKSMSKVGASSLRRTLFLVMSVYLQNAPLDESVYQFMDKKRAEGKPYRVYMMASANKFLRIYYATVKAYLESLEHTA

SEQ ID NO: 380681 - protein, 322 aa, unidentified
MTPPAELIHVGIDVSKAKLDVCLLPSGHAAVFDNDSAGIAQLVDLLRSQQPQPIARCLLEATGRYGRRCAADLMEAGFSVAVVNPRQARDFARCLGRLAKTDTIDARTLAEFAQLGLMRLSEKTPENRVVLDDLITRRRQLTQMLAAEKTRREGLEHKLALASVDKVVRLLAQQREDLDRAIAKLIESDDDWTNRRELLASVPGIGNVTASQLVVDLPELGKLNRQQIAALVGVAPLNRDSGTMRGRRSIFGGRADVRTGLYMATVTAMRCNPIIRAFAQRLIVAGKAFKVAMIACMRKLVTILNLMVKRNEHWRAPVLQNP

SEQ ID NO: 380682 - protein, 357 aa, unidentified
MKRVHYIGLDVHCKETEMAVITSGGRLVKRARVPSTVPALVEAVSSIPRPRHVVLEEGTLADWVIRSLTSHADEIVACDPRRNHLIAKDSDKDDPIDAEKQAQLYRGGYVKAVHHAETFDRAVFKQHVGLYHDRVRNRVRQANRIMAQLRRHGLMVHENAFAEPKTRSELLGRLPDNRTLRAQLACLWSGYDVAVKQVETMRRLLIRLARQEAQIRRFVEIPGIRWVRASTFFAYVDTPWRFRNKSALWKYLGIGLERRTSGGGPVQLHVVRQVNRCLKTTILGAAISAVASRDNPFADQYRRWVCDGLSPRIARRNVARSQATVMWGMWKNGNAYRPEWVGVAAAGSSEIPLKKAR

SEQ ID NO: 380683 - protein, 416 aa, unidentified
MSLKIVHKICCGIDVHARFVVACIATTDDKGVTTYKRRRSSTFTAGLRELLQWLLDNNCRDVCMESTGKYWIPVFNILETECNVVLAHPKYVKAIKGKKTDTKDAKWIADLFKHDLLQGSFMPPKDIRDLRDLVRYRYKLTCFSASEKNRLQNSLTVSNIQIANVVSDTFGKSAQNILAKILEDPTDTSFDIEPLIHASMKKKLPQLELAIDGFINPTQAGKIKVIKNHYEDLQACKNDIEQIILELAKPHQLYIDLILSMPSIKDPFTAITIISEIGTDMSKFPTAKNLCSWAGLTPTNNESAGKKKSVRISKAGCYIKPLLVQCALAVVKSEKHPEFRNRYLRIKKRRGHKKAIIAICRMILTAIYHMFQTGELYNAEHYRKAEVLPVERDITIEQAILIARSKGYRIREQVVS

SEQ ID NO: 380684 - protein, 338 aa, unidentified
MTIVTVGLDIAKQIFQVHGVDRAGKVVLRKRLRRVEVAPFFAGVGPCLIGLEASGGAHYWFRVLSRLGHTVRLIAPQFVKPYVKSQKNDANDAEAICEAVDRPSMRFVPAKSVEQQDLQCLHRVRSRLIGCRTQLVNQIRGLLAEYGIVLPQHVAQLRRHLPALLEDEGNELTRSTRCLFHSLYQELIELETRIAAADERIDRAFRENAECQRIAAVEGIGPVTATAVVAAISDGRAFRNGRQFAAWLGLVPRQHSSGGKARLLGISKRGDPYLRTLLVHGARSVVYRAKLKTDRRSCWINDKQQRLGTARACVAVANKNARILWSLMAKQQIYRPAV

SEQ ID NO: 380685 - protein, 343 aa, unidentified
MQGVTTIGLDIAKSVFQVHGIDAEGKAIIRRQLKRRYVLAFFEKLQPCLVGIEACATSHHWSRQLTALGHTVRLMPPAYVKPYVKRQKNDAADAEAICEAVTRANMRFVETKTPEQQSCLMLHRTRQLFIRQQTSVINAIRAHMAEFGIVAPVGRKGVVALLEVVANVGDQRVPELARACLAALGAQLRMLKVQILEFDRQIMAWHHSNEISRRLDAIPGIGPALATALVASVADPKAFRSGRNFSAWIGLVPKQHSSGGKDKLGSISKQGDRYLRSLFTAGALAVIRYAKLHGCQHRPWLTALLARRPTKVAAIALANKIARMAWAMMARGERYKEPVALAA

SEQ ID NO: 380686 - protein, 345 aa, unidentified
MNKIFIGIDFSKEKFDATVITAEGVDEQCDRQHGVFSNDVSGFRRFERWCRASSGGTDLERWLFCGEDTGGYSRPLASWLYGRGYSVWLENALRIKGCNALRRLKDDRTDSAMIAEYAMRHADRADLWAPLGESLSQLRELFLYRHRLVRHRCSLEVRSSEKRLTLEKSPAKKFMRHSSDRIIAQIGREIAACERMIRELVASDDELRRSYTVITSMPGIGMVNAVCLIVYTENFRRFGFNARKIATYYGVAPFGRYSGTSVNTGPHVSPFANRTIKALLSQAAMAAIRFNPVISQYYQGLIGRGKDKNLARNNVKCKLIRIITAMVRQGTCFNPEYSWKEGVCA

SEQ ID NO: 380687 - protein, 339 aa, unidentified
MTHTIVGVDIAKSVMQVHWVDPETGEIVNRPVKRAAFLEYFANRRPCLVGMESCSGSQHWARRLIEMGHRVKLMPAKFIKAFNIRNKNDAADARAIWMATQMDSKEVAVKTETQQAVLALHRMRQQLVKFRTMQINSLRGLLTEYGEVMGVGRAALDKAVGGVLERLSGRLPSILIDTLREQWTGLDNLDRQICEIERRLHEWMKDDRSAKAIAAIPGVGLLTATAAVATMGHAKAFKSGREFAAWLGLVPAQTGSGGKIELQGISKRGDTYLRTLLVHGARSIIYRVKEPGPWVTQMKQRRPLNVVIVAMANKLARIIWAMLAHQRPYRNDYESMKQG

SEQ ID NO: 380688 - protein, 338 aa, unidentified
MQTYAGIDLHSSNCYLAVIDEQQRRLYSKRLPNSLDHILTALQPFKEGLSGVVVESTYNWYWLVDGLQEQGYRMHLANPSAIRQYEGLKHTDDKWDAFWLAQLLMLGILPQGYIYPKAERPSRDLLRRRLLFVRHRTAHILSLQSMVQRCCGRGISGNAIKKLTPPEAAALFSDPQLGLTARFQVETIGFLTQQIRSIEKAVLPQVKLRPEFEILLTMPGIGKILALTIMLEVGDIRRFAKAGNYASYCRCVKSQKLSNTKKKGEGNRKNGNRYLSWAYVEAANYAVRYSPRAKAFHQRKCAKTKKVVAIKALANKLARASFYILRDQSAFDEKRLYG

SEQ ID NO: 380689 - protein, 375 aa, unidentified
MKQAPPASSKLALSSQALRLKGGAMKRIYIGVDFHARQQTICYLTTESGELVFHELKHQSKAEVRAFYAQFAGQVIVGLEASGYSPWFERLLEELGCEVWLGNATEIRRRARWRHKNDRRDAELILELMLHDEFPRLYLPPFQSREVLRMLRYRQKLVKIRTMGKNSLQALALQSGLAKGSHLFSKVGLQELCTVPMSPAMRWQRDQWLQLLEPLDQRLLETMQWLKLQSIEDSRIALLRTHPGIGLLTALCLVHSLAPVTRFRNTRKVAAYAGFDPLERSSAERQRFLGISKAGSRVLRYLLVEAAHTTIRHDEDLQRFYKRLVARRGSPKAKTAVARKLLIRAFIMLRDEIDYAEFQRRAVAARHARQISSTP

SEQ ID NO: 380690 - protein, 415 aa, unidentified
MALKIVYKICCGIDVHKTFVVACIASTNDKGITSYESHRFSTYTSGLKTLLQWLLDRNCKDVCMESTGKYWIPVYNILESDCSIVLAHPKYVKAIRGKKTDKKDAKWIADLFKHDLVAGSFMPPADIRQLRDLMRYHFKLTCFKSSEKNRLQNCLTVSNIQLGNVVSDTFGKSAQAILDKLLENPADTSFDLEPLVYKSLKKKLPELRDAIDGYITPEQAGKLKVIKAHYENLESRKAELEELILALAAPYQQELAILQTAPGIRSDFTAIGIISEIGTNMEAFPSAKHLCSWAGLTPTNNESAGKKKSVRVSKAGCYIKPLLVQCANAVVKSTKHPEMRNRYLRLKKRRGHKKAIIAIARMLLTALYHMLKNGENYNAELYQKSDLLPVDREITVEQALMIARNQGYKIKSATA

SEQ ID NO: 380691 - protein, 392 aa, unidentified
MISVGIDVSKDKHDCFIVNSEGEVLADVFTIHNTMDGFNFLLQRIRECTMPQDKIKVGLEATGHYSYNLIGFLLDNGLATYVLNPLRTNIYRKSLSLRKTKTDRVDARTIAHMLLSDAGLKPYTDTAYHNEELKSLTRYRFDKVKERAKLKSSIARLVCILFPELEKLVPSLHIASVYALLEEFPGAKQIAAAHLTRLKALLETASKGRYKRDMALEIRDSARNSIGARIPAKSLELQHTIRLIRELDAEIAEIEERIQSIMNDLHSPITTIPGMGVRMAAMILAEVGDFTRFVSPDKLLAYAGMSPSTYQSGQLKNCYPHMEKRGSRYLRYALYNATKCVCHWNPNFAAYLAKKRAEGKHYNVALSHATKKLVRLIFAMEKSKQPYSQLAA

SEQ ID NO: 380692 - protein, 347 aa, unidentified
MRFYNQQHRYYCGIDLHARKMYVCIIDQKGKTKVHENIKTDPEIFFELVFPYIDDVVVGAECVFCWYWLADFCNEHKIPFILGHALYMKAIHGGKTKNDKIDSFKIASLMRGGNFPIAYSYPAEMRATRDLLRRRMYLSRRCSELVAHIQNTNTQYNLPAFEKKISRRYNREGVAERFEDSAVRKSVEVDLAAIDALNEILKKLEWSIEKTARQHDYHTLYLLRSIPGVGQILALVILYEIQDVKRFQSVQNFSSYARLVKPVKESDGKWAGHTNKKIGNHHLKWAIKESAILMLRDSEQAKQYVASLERKYNKGKALGIFTHKLGRTIYFMLKNREAFNMERFFKN

SEQ ID NO: 380693 - protein, 343 aa, unidentified
MKLTRVGVDLAKQVFQVHGVDRAERPAWCKRLKRSRWIADLERDVEPGCEIGMEACGGAHHWARVLQSKGYRVKLIAPQFVKPYVKTNKTDANDAEAICEAMSRPSMRFVAVKTVEQQDLQAVHRVRSSLIRERTAKANQLRGLVYEYGLVAPREIKSLRRAVPQWLEDAENGLTPRFRALLSGLYGDLRLLDERVRELDREVASITREHEPVRRLMQIRGVGPLIASALYSLVGDARQYRNGRELAVALGLTPRQHSSGGKEKLLGISKRGDKYVRTLLIHGARSALRTAPGRTDRISRWALALAERSHPNVAVTALANKTARVAWAMLRHGANYEPERLAA

SEQ ID NO: 380694 - protein, 349 aa, unidentified
MTDQRPTYSGRIVYVGIDVHKDTYAVTCICDKKIVKTATVQADPAGLAASLQRWFPEATLSAVYEAGFSAFVLHRALLKAGITNMVVNPASVAVAANDKVKTDRRDSKKLAMDLADGRLHGIYVPTEAEELARLLPRTRAQIVEHRATITRQIKAKLHQFGLIAPSSRRRMSNRYLREIAAWSLPAELSVSLTFLAEQWRFATRQLIEMRRVLREQAHAQPTLETVYRSVPGIGEVVARTLATELGDMTRFANERALFSYTGLTPSEHSSGASVRRGHISRQGSSRIRQLLVETAWRALPRDPVLQERFDRIAAPRGKKRAIVAIARRLTGRIRACFRQGTTYAVGTYA

SEQ ID NO: 380695 - protein, 364 aa, unidentified
MNATAALPVVGVDLSKSVFQLAVADGSWRVVESHRLTRTQFERWFVNRAVRLVVMEACGSAHHWARWLNGLGIEVRLLPAAYIRAYVKRNKTDAADACALLEAARCAEIVPVRVKSIEQQALQGLHRTRSLWMGTRTSRINALRGFCREFGIVIAQGSRLGVEQIGRVLADPRSAVPTLIRGTMTLLIEEIRLLEVRIAQLERELTALARHSHACTTLLSIPGVGLLTATAMVAATSGEVSHFRDARHFASWFGLTPTEHSSGGTRHLGRISKRGDRYLRMLLTHGARSVLRAASVAVRAGKTVDGLRQWALAVQHRANHNKAACALANKLARICYATLRDDEPYGQPHRLTKKIARTAFALPI

SEQ ID NO: 380696 - protein, 432 aa, unidentified
MMTIMKTINTSEFAATIGLDWADRKHDLWICPEGQAKAEHLRLDQTPEALHHWVAKLRERFPNRRVAIAVETSRGPVISALMAYDFIVLFPVNPKGLKDYRGAFCVSGAKDDRTDAMRLEELVRLHRDKLHALEPDTELTRKLAGLVENRRHLVDERTRLVNQQHSTLKTYFPLALDLLEDQMNTLLAAEFLTRWPSLAALQKEKPKVLRAFFYQHNSRNAQRIEQRIQAVPAAQPLTTDAAIIEPACALVSARAGMLRPLLKAIAHLDEAIQEAMDQHPDAPIFRSFPGAGPALAPRILVAFGTNRDRFASADEVAQFYGIAPVVEQSGNSKTVHVRYRCPKFGRQSFHENAACAFKKEPWARAYYDQHKKKHDDKHHPACRALAFKLIRIYFACWRDKRAYQSDLYVQALRKNGSPLHKTLKTQRAPSCE

SEQ ID NO: 380697 - protein, 322 aa, unidentified
MRTVFGIDVSKASSEVAILVNGERVHSYTMPNDIIGFSHLLKDLKTVSNPEIIFEATGVYSRRLQAFLEENSYDYTRLNPLEAKKQLDSLRVRKTDKIDAEKLASSQFVLNRKPTYVQEEVYQNLHDLSRFYQNLTEDIVRTKNRLHKVLQVAFPEIENLLSTPTGEQYWNLVSIFPTKHWVLELSEVELKETIRNSTSKRISENRVGNLAEKLVGLAKQSYSAISKTSPMIEEVKYNAQELIRLTNRREQVLQQLIALAEPLPEYEILLSIPGIAETTATSIIGELGDIRRFKSANQINAFIGIDLKHYESGDFPSSRAYH

SEQ ID NO: 380698 - protein, 343 aa, unidentified
MDEYDGRQFVGIDLHRQRSVIVRQSESGQLLSAVRIVNDPVALGLQLEQAGSDPEVVLEATYGWYWAVDVLHECGAHVHLAHPLGVKGFRYRRVKNDVRDAADLADLLRMGRLPEAWIAPPATRELRELVRYRAKLVAIRSGLTAQIHAVLAKAGILIAASDLFGVTGRQRLAKVPLGAAYAQRISSLLELIDILDGHEARFTAMIAERLRAHRGYQAIQQLPGVGPVLAAVFVAEIGDVHRFADPTHLCSWAGLTPTHRESDKVVRRGHITKQGSKLVRWAAVEAIQRQPDTAKITLDRKRIEARRGRNIAKIAAARKLLTLVYYGLRDGHIRALAHRQVAA

SEQ ID NO: 380699 - protein, 346 aa, unidentified
MEHYVGLDVSLKLTAICIVDRTGKIEREGVVASDPETIAAFIKSHAPHVARVGLEAGATSTWLWTELNKLGLPVICIDARHAKAALKLQINKSDRNDAVGIARIMQCGWYKEVRVKDLDSHAIKALLVSRALLVKIKRDIENQVRGLLKNLGLVIGQAKMNVFAVRAAELAGARPELAGAVEPLLKAREAVGRQIADLDRKVMRLARNVAQVRQFMTAPGIGPITALCFLATIDDPTRFRRSRSVGAYVGLTTRRYASGETDWTGRISKCGDKMLRTYLYEAANVLLTRVAKWSALKAWGIRLAKRSGLRKAKVAVARKLAVILHRMWIEGSEFKWSSKEAANQPG

SEQ ID NO: 380700 - protein, 343 aa, unidentified
MDQYVALDVSLKETSVCVLDANGVVAFEGRIPSEPASLVQLIRSKAPQAIKIGLETGATSVWLWHALKSEGLPVVCMDARHAHAALSVRPVKSDRSDARGLAEMVRMGWYREVQIKSLAAHERRALLAARHRLVLIRLELDAQIRGMLKPFGLIVGPGNSDAFIRRAEELAQPHPVLAPLLACLAEVRRHVATQIGKLDREIGRIVRTDTTLRRFMTVPGVGPVTALAFLSTIDDPSRFRRARDVGPYLGLTPKRYQSGETDRQGSISKCGDTFTRTCLYEAANVLLTKVQRWSPLKAWGVRLAKRIGAQKARVAIARKLAVILRCIWMDGTQFWWTKEDGIA

SEQ ID NO: 380701 - protein, 347 aa, unidentified
MEKVSRAEVQVFAGIDVSASELSVAVQCAIKEGIAITTFSNKAAGHKALLAYLLRANRRARVCLEASGNYSLDLALTLQAHPQVEISVVNPRRARRFAESLGERSKTDPVDARVLCEYARRMRWVPWVPPSLAALRLRSITRALEDLVAMQTQEKNRQHSLLASDALPALLIREVERHLRYLKLRITRLRREALRLIARNPELNRRFHLMLTTPGLGENSSLQILGELAVLPHTLDARQWVAFSGLDPKQFTSGASVEKKPRISRGGNRHLRRALYMPALVAMRHEPFLRSFYQRLLRRGKTPLQAVVAVMRKLLHALFAMFRLDEAYDGSKLCPAGLARDMAAVCA

SEQ ID NO: 380702 - protein, 412 aa, unidentified
MLFVGDDWVEDHHDVEIVDDSGQVLARRRLPEGLDGVTRLHALIGEHTPIEWADLEPGRAAAMVKVGIETDRGPWVAALAATGYEVFAINPMSVARYRERHSTSGAKSDAADAHLLAEIVRVDRAHHRPLAGDTAEGDAIKLTARAHQSLVWDRTRHVLRLRSTLRDFFPAALKAFSDLDAPDTLELLARAPGPDQAARLTKSRIIAALSRAHRRHVETKATELAAILGEDQLRQPPAIQSAYAAVVSSEVAIIAALNTQIDQLGTVVAAHFGQHPDAEIYTSQPGLGTILAARVLGEFGDDPHRYRDAKARKNYASTSPITQASGTRKVVLARYARNRRLADALQQWAFSAIRASPGARSYYQQLRARNIGHQAALRQLANRLVGILHGCLKTHTRYDEHTAWAHLTTAAA

SEQ ID NO: 380703 - protein, 315 aa, unidentified
MQITTIGLDLAKNWFQIHGVDAAGKVVVKRRLRRAEVVEFFKTLEPCLVGIEACATAHHWARELVALGHEVKLMPPAYVKAYVKRNKNDAADAEAICEAVTRPSMRFVPVKDADQQSVLMMHRARNLLVRQRTMLVNALRAHLAELGVIAPQGLRHVEQLIAAIETESTVLPELARSILRLIVTQLNDTQAKIQQVEAKLAQWHRNSRLSKLLATIPGVGIMGASAIAATVCDPNLFRSGREFAGWLGMTPRQNSSGGKERLGRTSKRGDKYIRCLLVAGAVAILLHFDQKTQNAPGLAPEVQMRFLWPLLVTLP

SEQ ID NO: 380704 - protein, 337 aa, unidentified
MTAYVGIDVSKKKLDVGFYSDKLGKNGQRKKKTKAFKNDRQAFSQLESWLTQQTQHDAQDIAIGIEATGIYHEALIYALHEQGFKLFIANPGRAKKYFESLGVTHKTDKSDSLLLARFTEDKAHNGDIVWWEPESPEARHLKLLLRRLKALQKDALREKNRLEACANTDTSPRVVKSIEDMIAVLNEEIKALLKEIDDHIDGHPQLKKNRELLESIDGVGPTVSRELTSLFSVKRFSSAKEAAAYLGLIPRLQESGSHKGMTRLSKIGPSAIRALLYLPAVVAGRRNPDIAYQKQRLLAQGKTKMQAIGAAMRKLVQICFGVIKHQKEYRPQTSFSV

SEQ ID NO: 380705 - protein, 417 aa, unidentified
MSEYAALVAIDWADQKHAVSLYDQSTGLREQTIVKHTPQALQEWALGLRQRFAGQPIAVCLEQSRGPLIYFLLQYEFFVLFPINPATLAKYRQAFSTAGGKDDPSDADYLLDLLQHHRDRLRVWRPDDEKTRTLSLLMEQRRRLVNDRTRLSNRLTALLKGYFPQVLDWFEDIRTTLVCDFLARWPQLSLLQRARPATINQFLRSHHSTSKATNARRLAEIKSALPLTNDAAVITSSVLNVKVLVAQMKIVIAAISEYDRHIEALCLTHEDYQLFAALPGAGLIHAARLTAALGSDRSRWQSANELLCFSGIAPIIERSGKQFRVRWRYFCPKFFRQTFHEFAAQSIQDSFWARAYYYQQRAKGKEHHAAVRALAFKWIRIIWKCWHTRTPYNEVIYLESLRKKGSSLLKFVADYQQ

SEQ ID NO: 380706 - protein, 407 aa, unidentified
MEVLYARCCGLDVHRNMVVACLSIIEAGQRRKEIRTFGTVTKELLAMKQWLLSEGCSHVGMESTGVLWRPVYDRLAGYFELVLVNAAHMRQVPGHKTDVQDADWLADLLQHGLLTPSFVPDQPQQDLRDLTRLRVRLIQDRTQLINRILKVLQQAGIKLSGVLSDVVGVSGRAILAALCAGEHDPEQLALLVHKSVAHKHAQLVEALTGDLRSHHQFLLSELLSLLAGVERSIKHVEVEIQQRLAPEEERLVRMEKITGVSRHTLHLLCAEVGLDLSRFPDAAHLASWAGICPGHKESAGKRQSRRTRPANAYVKTALVQAAHTTVRTQTYLGEQYRRLRKRRGAKRAAVAVGHSILVIFYHMMTTGEPYHEKGVEYFHTRAPDKVERQLVKRLTHLGYQVTAPLPV

SEQ ID NO: 380707 - protein, 433 aa, unidentified
MEEAADEPLFCERAAGIDIGKKTVMVTIRVPSETRKGGRAQETREFGTTRRQLLELADWLRCWGVERAGMEATSDYWKPVFFLLEQQGLDCVLYQASQVKALPGRPKTDKLDSAWLAKVTERGSLAGSFVPPEDIRRLRACTRYRRRLTQARTAEKQRCEKLLEDAHLKLSSVISDIHGVSGRDMLRAIIAGERNPGVLAEMARRRMRSKIPRLQEALDCSFFTPEHAFVLAMMLDNIDHYTAQIAVLDEKIAALCEPYQRQVAQLDAIPGFGVTTAQDLIAEIGVDMTVFPTAGHLCSWARVAPRPRESGGKRKGGSATGKGNPYAGAALGEAAVSAGRTQTFLGAKLRRLCRHMPKKKAQGAVMRSQLVIAYGLLSDPAAEYLELGPSYYEERAGTQRQARSHIRSLERLGYKVTIEPVDPETGELTAKAG

SEQ ID NO: 380708 - protein, 409 aa, unidentified
MLLVGDDWAEDHHDVELMDEAGRTLARARLPEGAAGMARLHAMIGEQLGDNAEAAEVRAGIETDRGLWVMALAAAGYVVYGVNPLQVARYRERHGVSGAKSDTADAHILADMVRTDAHQLRPVAADSPGSQAVKVVARAHKTLIWERARQVQRLRHQLRDFFPAALEAFEDLDAPDALELLARAPDPASAARLTTAQVSAALKRARRRDIKEKTTAIRAALRGSQLAQPPEVTAACAAVVRALAAVITALSEQIHAMEVQVQAHFRRHPDAEIILSQPGLGPILGARVLGEFGDDPLRYANARGRKNYAATSPITRQSGKRKTVMARYVHNDRLRDALDRQAFAALTASPGARAYYDQLRARGTGHRAALRQLANRLVGILHGCLKTRTLYNEATAWPQPASNDIKTAA

SEQ ID NO: 380709 - protein, 327 aa, unidentified
MSISVLGIDIAKATFALAALREGKLRHRSFDNTPSGFTQLLAWLDKQGIEKPLVAMEATGIYYEALATFLHEHGLTVFVVNPAQIKHFADAKLVRGKTDRADAAVIARFLHAHFADLQRWHPLPAAQRLLRDLTRRLTALQDLLHQESNRLESAGDDIVRLSIEAVMKALNEQIKAIEARIRQHIDDDPDLRREAALLHSIPAVGTKTSTLFIAEFRLARFKNAREAAAFAGLSPAQYESGSSVRGRTRISKTGASRLRAALYFPAIVAAHHNPILMAFYQRLLASGPAKKAAICAVMRKLIHIAFGILKSGKPFNPQFLQNEFKNA

SEQ ID NO: 380710 - protein, 413 aa, unidentified
MLSGLSRSRIVSRDSHLLTEREGISAAMMVIGVDPHKSTHTATAVDPQTNQPVASVRIQATLSDYRRMLTWARQFEQRRWAVENAEGLGRHLSSWLLSRGEQVVDVPSTATARVRQLSRGGGRKNDQIDAAAAACVAALQGDGRPLEAEGITDALALLDEARMNLAQSRVRLVNQLHALLRELLAGGAPRDLSASTAAALLRRIRPAGDVERVRKQIAADLVTQIRSVDALLKFNAKQISELVTASGSTLTGTVGIGAITAGRVIGRTGRAGRFPTSASFANYAGAAPIKVASADKARHRLSRGGDRQLNAALHTVAITQIRTPGSRGHTYYNAKIAQGKTAREARRCLKRRLADHIWRTMITDERRSAASPRGQAGATLRSSAAGLTPTTSSSDKSLPGPANRDDTTPQPAP

SEQ ID NO: 380711 - protein, 383 aa, unidentified
MTTLPTVPPDLTKTLVVAVEISKSAWLTAAHIPGLPTVKAKQQVQAAGDALAATIARLTRRAAAAGASIERTVVCYEAGHAGFWLARFLQQRGVEALVVQPVSVPVDRRARRAKTDAIDVDLLLRTCLAHLRGEPRVCSMVPIPEEADEDARQPGREREELVAERVTITNRIGAILATLGVDDYDPLKRNRRERLGELRTPLGASVPENARARIVRQLDRLELVLRQLAEVEGMRDAVLARPEAADEAESMIRTLAGLRGIGAQTASVLVREGFVRHFRSAKALGSYAGLTGTPFASGSTAREQGISRAGNRRLRTAVVELAWLWLRYQPGSTLARWFSERLGRAGGRMRKVLIVALARKLLIALWRFTVDGVLPEDAVGKPA

SEQ ID NO: 380712 - protein, 440 aa, unidentified
MEWTGRAPSALRLKKSRIVSICCVVRRCHLQPTLLSRGAPLRRQAFAFGSPLRGDGLDCSRLPRSRLFVLRMPTNVPPRQPFRHLEDTIMIAINTDIIIANIGVDIGKNAFHICAMNAKGTIVLRERLTRAALPKRLANIPPCLIGMEACAGAHHIGRKLASLGHDVRLMPAKYVKPFLKGHKNDYRDAEAIAEAVQRPTMRFVPFKSDEQLDLQALHRVRSRLVGQRTAVINQIRAFLLEHGVPVRQGPGALRQALPSILAQRTDTLSSRIIRLIEGLIDDWRRFDQRIADVTSEIEQLAKQSENCKGLMSVPGIGPMTASAMVAAIGDGSAFSRGRDFAAWLGLVPKQISTGDRTILGGISRRGNSYLRTLFIQGARSVLQRFEGWEKKSFGRWLIAASKRLHKNVLAVALANKLARIAWSVLYHARGYDAAPTPKAA

SEQ ID NO: 380713 - protein, 414 aa, unidentified
MESEYRLMVGIDWTTEAHQVCVLNRQGRLLEQRRVEHRAEAIAAMIQRLIELAGGDPASIAVAIEVPRGAVVEALVERGLHVFAINPKQLDRFRDRHTVSGAKDDRRDAFVLADSLRTDLSAFHRVHLDDAWTIQIRELTRIEENLNTEITRLANQLRDLLLRFYPQLLSLCPAADQPWLWALLKLAPTPAKAQRLRRSSIQRLLRQYRIRKWTADQVRTELRTAPLSVAPGVTEATCAHIALLLPRMELLMAQYKLCSKAVQTALDERVSAEEQRREHRDVEILLSLPGVGRVVAATMLAEASQLLAQRNYHALRTLGGVAPVTRQSGKRFAVRRRYGCNHRLSNAFYHWARVSSQRDPRAKHHYQTLRQIGHSHGRALRGVADRLLALLVAMLRDQTLYDTTGAHAPNPIAA

SEQ ID NO: 380714 - protein, 404 aa, unidentified
MMNTNPVTAGPVAGVDTHSETHTLAVLTAQGAVEFTEEFTTDRRGHAALLTRLHEVEGLAAVGVEGTNSYGAELARTLLAQGFSVLEVLRPTRQVRRMDGKSDPIDAIAAARQVLTGDGTSIPKHTGSPVEALRYLLVARRNLIGAASRMITVIKSLLVTAPETVREPLRSLTTPTLIDTLAASRPGTMMTDPAAAAKHTMRLLARDYQRLHAEADQLEDQMTQLVTAINPGMLEVYGSGTVTSAQLLVTAGDNSDRITTEAKFAHLCGASPIPASSGKTHRYRLNRGGDRQANSALHRIALVRMRHDPRTRAYVERRRAENLSKKDILRCLKRAIAREIHHVLLHRTTPERTDLRALRTQKQITLTDAAEALKTKPARLSEIERRTRPQPALTTRYEKWLTAA

SEQ ID NO: 380715 - protein, 334 aa, unidentified
MIYYAAIDLHCNQCTLVMIDDEDRQVMRERLPNNLEMILYQLSPYAGQLYGLAVESTFNWYWLVDGLNEAGYRVELVQTSQVKKYEGLKEQNDWTEALWLAHLLRLGILPTGYIYPRETRGLRDILRKRLRLVSQRTAHILSLEGLYNRCCGRQISAREVRHLPEGAFGDPDWDLMASTSQRLLTGLDAEIRRLEKRADEALASHGYYRILQTIPGVGKILGATISLETGDIKRFKRVGNYASYCRCVESKKTSNQKKKGEGNRKNGNSYLGLAWMEAAQGALVWQEKARRFYQRKKARKSVWVARKALAHKLCRAGYFMMRDQREYCSSLLFG

SEQ ID NO: 380716 - protein, 374 aa, unidentified
MTDSTLTPGSFQAVRPQRILAIDLGKFKSVACDYDPATGTHAFTTIPTRPQDFHDLLTERTPDRLVIEIGSSAGWVKDLAEALGIDVQIANPNHEAWRWKNVKRKTDKDDALKLAQLSAMDQLPTIQLPCAKVRQWRSLITYRWTLVGRRTAIKNSIRAVLDRQGLTHHSGKKGWTKESLLGLGLMAYPLDEVDAEELWRGQLDIELQALEQIEGLVKQVEVKLEALAKSNERVALLQTIPGVGPRLSEVVVAMIDDPMRFKSAKQVGAYAGLVPKLYESGTMSRQGRITGQGNKLLRALLVEVGWLMRRYNPTLNAIFDRVCGGSKARRKIAVVATARRLLVMCWAMLRDGTAWNPPPPEGSPEGAQALASPA

SEQ ID NO: 380717 - protein, 367 aa, unidentified
MKKVSTVAAKQSRKTSEQKLTVGLDLGDRSSWYCVVDESGAVVLEQRLSTTPKAINEVFGGMPSSRIALETGMHSPWVSRLLSKLGHEVIVAHARNVRLIGESRRKDDRLDAQTLARLARIDPQLLCPVKHRSAKAQADLTVIRARAGLVRARTALVNTARGLAKSYGERLRGCNVRNMNPEKAEGLSPELQAALQPLLAGIESLSEQIRKSNERIERLAQESYPQVALMKQIKGVGTLIALTFLLTLEDPHRFRKSRDVGCYLGLQPGRRNSGQSEPQMHITREGDPYLRTLLVQGAHHILGPFGVDCDLRRWGLKLAERGGRNGKKRAIVATARKLAVLLHHLWVSGDVYEPLHNSKRSAMETAA

SEQ ID NO: 380718 - protein, 365 aa, unidentified
MLYLAIDQHRKQLTVNLRDDSGEILVRRQVSTRWDRVREFFEWLQKEAVEQGGFVTILEVCGFNQWLLEMLDEYNCQETVLIQPTERSRQKTDHRDANALGELLWINRHRLFGGQKPQGIRRILPPNPEDSENRQVTELRRRLGAMQTKSVNKIRHILRKHNLEQECPTKGIDTKAAKKWLAEMPLPTIDRLEMDQLLDQWRLWEAQLEEVNVTIKGRQEKHATACLVATMPGAGAYTSLALASRIGPIDRFPTPGSLANYWGLTPGCRNSGESERMGSITKRGSAMARFLLGQMVLHALRKDAYMKNWYKKIKKRRGSKVARVAVMRRLTTILWHMLKHNQPYVCGGPPEVKRVQTLYSYSQSP

SEQ ID NO: 380719 - protein, 405 aa, unidentified
MTKPNAEVNILPQVEKACGLDMHKDKIVCFISNKDGTVQHMEEFGTFSEHLFKVRDLIVRYGVDRCLMESTGVYWISLYGILTESGINTIVANPQHIKQIPKRKTDRKDARWLCTLALYGLARQSFVPGPTQQGLRDLCRSRLFYKQGQTRIKSRMIKILERSNIKIRSVVSDISTKSAIEIIRLLAAGNTDIDRLAACCRGRLKAKKEQMKQALVGTLSKDNRMMLHMLMADLDHYQNQVDQLEKQINNLTDQHYKDVAIRLRSITGIGEHCAHIILSEIGDNMDLFPTADNLTSWCGLAPGNNESAGKRRGTAVKKGNKYLRIAMITVAWGAVRTKDSYWKALFEKLRKRMKAQKAIVVVARRLLIVIYKTIKKETLYVEKGFNHFLDIQEKNLNRQKSKLAI

SEQ ID NO: 380720 - protein, 367 aa, unidentified
MMGWMAPLRHLSAKLLSDRNSSEWEPSMGEVTTIGLDLAKHVFQVHGVDAEGATVLRKQLRRAQVLAFFSRLPPCLVGLEACATAHYWARELRALGHEARLMPAQYVKAYIKRNKHDAADAEAICEAIGRPTMRFVPVKTADQQAAVLLHRGRERLVRQRTGLVNALRGHLAEFGVIAPQGLRNVGKLIAIVRDEGDARLPDLARQVLQVLAAQIEQLEAAVAAIEKQLMAWHKSNPVSQRLASVPGIGPIIATALAATVVEPSGFRSGREFAAWLGLVPRQNSTGGKHRLGGISKRGNPYLRRLLINGASANLLRSKATNADPWVIGLRRRRPPLVVAVALANKTARIAWAVMHRHENYQRVAAAA

SEQ ID NO: 380721 - protein, 389 aa, unidentified
MKIFVGIDIAKLNHFAAAISSDGEILIEPFKFTNDADGFQLLVSKLESFDKNSLIIGLESTAHYGDNLVRYLVAEFYQVCVLNPIKTCQMRKNNVRKTKTDKVDTFVIAKTLMMQDNLRFVSFFDLDMMDLKALGRFRQKTIKQRTRLKIQLTTYVDQVFPEIQYFFKSGLHQNAVYALLKEAPSPKEIASMHMTHLANLLKVNSHGHFTKEQAKELRVLAQKSVGANDSAISIQITQTIQQIELLDSQLDKIEAEMTDIMKFNDSVIMTIPGIGYINGGMILGEIGDIHRFSNPNKLLAFAGLDPSVYQSGNFQAKTTRMSKRGSRVLRYALVNAAWNVVRNNATFKAYYDAKRAEGRSHYNALGHCAGKLVRVIWKMLTDEVEFNLE

SEQ ID NO: 380722 - protein, 427 aa, unidentified
MPYRIAGIDVHKKMLAVVIADVAVEGEYQFVRRLVGTSPSELRGLADWFVAQEVEEAVMESTAQYWRPVWDALERSWQPRRRQRAGAGPVSGTLHLAQAQSNQGPRGRKKDFPDAERLVKRLVAQELTLSFVPDAEQRLWRTVMRRKYQVTRNRVQVQNRLECLLEEAHLKVSSLVSDLLGLSARRMLQAIADGETDAAKVTALADYRLRATPAQLGDALGACVDLHPVYRRLIKMALEDVRVIDEQIDALDREMAGLLRPHQEAVQRLAAVPGLGVDCGQQIIAEVGPTAATFPSPKHLASWVGACPGDDESAGVSYSHRSPKGNRQMRRLLNQAANAAVKTKGSIFELVYRRLVPRLGHAQAIGAIAHRLCRLIWKILHQGVSYEERGPAVTRHRAQRRAAKMIRELRSLGYHVERGPSPSSSPA

SEQ ID NO: 380723 - protein, 320 aa, unidentified
MNIEMNQNINVGVDTGKFQLDIYIRPLDIYFTVTNDDKGINEAIKEIKKHKPERIVIEATGRLEMPFIIACAKANLPFVIANPNPIHIKRFAGAIGQRAKTDKLDAQLIAHYGEAVKPKLSTLKPDIMQSMSDLVARRNQLLVMQTMEKNRMQILPQHLAMTIKPVLIVFKNQIEKIENKIVSLIESCSDYQAKNIILQSMKGIGKIASASIFSNLPELGYISSKQASALVGVAPMNRESGRYKGHRKIQGGRHQVRTVLYMAMMSAIQSNPVFKETYQRLVAAGKPKKVAIIACIRKMVVILNSMLRDGVMWEAPKAIN

SEQ ID NO: 380724 - protein, 338 aa, unidentified
MKAYAGIDLHSSNSYIGIIDEQNQRQFGKRLPNSLSQILVALAPFKENLEAVVVESTYNWYWLVDGLEQEGYKVNLANPSAMKQYEGLKHTDDKWDAFWLAHMKRLNILPEGYIYPKEERPVRDLLRRRLLFVKQRTSQILSLQSAIERNLSLRMSGNAIKKLKEEDVEDLFDSPYLVLTAKSNIEVIQFLTKTIRTIENAVKSKAKLQKEFQLLKTITGIGDILSLTIMLEVGDIGRFPKVGNYSSYCRCVKSEKLSNGKKKGANNRKNGNKYLSWAYVEAANFAIRFSPEAQKFYQRKMAKTNGIVAIKALSNKLARASYYVMRDQVPYDAGKLFG

SEQ ID NO: 380725 - protein, 342 aa, unidentified
MSEITTVGLDLAKNVFQVHGADATGRMVLRKKLRRNQVLAFFGQLPACVVAMEACGGAHFWGREIGKLGHEVRLIPPAYVKPFVKRQKNDAADAEAICEAAQRPTMRFVPVKSEETQGAAMVFRIRELLIRQRTQAINALRGHLCEFGQIVPQGAGNASRLIAIIEDPHSGLPADAIATLEVLITALRHLETEIKKLDVEIKRRAGENDLARRLMTIPGIGPLIATAIATLAPPPETFRKGRDFAAWLGLTPRQHSTGGKQRLGATTKMGERSLRRLLIIGANSVIIKRHVHASARPGTWLGAMLTRKPPMLVRVALANKMARIVWALMAHGSVYKAPDAAA

SEQ ID NO: 380726 - protein, 404 aa, unidentified
MKGPIVSIDVSKGKSDYQAFKNLNVKYTGSRSIKHTKEGFDEIVSLVREMEKKLETEVCVVYEATGVYHRVLKKVLEDNNIKQFIINPLLSAKTRKNDSLRSPKTDKLDPKSIAKTYYSHSLHNSHKPETIYHELRELSRYYEDILVHLRKDKVAFRAQLDVVFPGYDTLYDDLYGPVALAVIEKYPHPEMLQKKKINTVSKVIQNKTCHRQAVSDTMADKAIEYSKTIYSGCDKDDIEVLILQRFIKKLKEDMAEAERTIGEMIKLAQELPDFSIIKSIPGIGDNLAARIIAEIGDMTRFKKKNELVAFAGLDPRISESGQNDGDHMHITKKGNKRLRCLLYLAVTCSIRLKRDDNSIKDFYIKKKQQSNPMCSKAAKTACASKLVRIIYSMCKTGELYQYNK

SEQ ID NO: 380727 - protein, 339 aa, unidentified
MNEVTLIGIDLGKHSFHLHAQDAAGRMVFRKKLSRQQLLRTLAKVPSCRVVMEACAGSHWLARQLAGMGHEPRLISPQFVRPFVAGNKNDFGDAQAICEAACRPSMRFVSPRNEAQQTVSAMHRLRERLVRERTATVNQIHGFLLEFGISLPRGAALMSRLPTVLDHETLPPRLVGLVVRLRAQVHYLEEQLRQVVQDLKAALREDDKSRRLLEIPGIGPITASALAVELGDARQFANARQFAASIGLVPRQYSTGGKPTLLGISKRGDRNLRRLLVQCARAVMQHTASRTDALSLWVKTLSTRRHSNVVACALANKLARIAWAVLARGTHYQARALTT

SEQ ID NO: 380728 - protein, 333 aa, unidentified
MSSILRTVGIDISKDWLDAFAAPEGRASRFPNDSAGFRKLIAWIGSGIDRIAYEPTGAFHRDFEDTLLKAGLPLYAINPFQVRSFARSIGRRAKTDAVDARMLAIMASAIEDLRPTEARSEGQRELAELQLIRDALVRDRTATTNRGRNLRTPVGKRVTRQRLRQIDRQLKLIDAEIRQRIGEEKEMERRAEILTSIPGISDITAAGLIVHLPELGMLTRSRAASLAGLAPVTRESGNWKGRSFIQGGRHRVRRLLFMPALVAAQHNPDLKRKYEALLAKGKPPKVALTAVMRKLLVLANALVQQDRTWTAQPPREYSCPAFPAPSPAGSVHG

SEQ ID NO: 380729 - protein, 344 aa, unidentified
MKALKSHVAGIDVHKEMLAITVLIGELDGEPKEYQFESSTFTDDLMALGLKLKEMGVTDVAMESSGIYWKPVFNVFNPLGLKVVVANAAHIKNVPGRKTDMNDSRWIAELHRFGLIRASFIPDGEFQRMRLLSRHRTNLTEDLARVKNRIQKVLEDGNIKLSIVVSDIFGVSGLKVLKQIAGGYTHPNILITEVTTKIKRMEEMKKALTNCLTTEHCFVINVLMKQYEELKNRIEEGENELCKKVEPYAHLVEELDKIPGIDAILAMGIIAEASANMSSFKDERAFAAWSGVASGNNESAGKKKRAKCRKGNPALRKMLIQAAQKATTARNPFIALNTTNSAFA

SEQ ID NO: 380730 - protein, 334 aa, unidentified
MKTPNDLSWLAFDIGAKQHAWASDINGRRESGTVDNDPTKLRAFLKARLKRSGALRVLAEATGVYYLDVMLIAHELGAEVMVINPRTAHHFAQALSQRNKTDKLDAQMLLECLLRLPFQAWEPPSKTWRQLRSYGRFLVQLTDEGAADRNRLHALLNTPDSPALLRTELKRKIASNDKRIERLRAEAIALIRSDEYLWERFKALDTIQGVGEVSAVSLLSELITLPQTLSSRACVCHAGLDPRVHESGTSVHKAPRISRHGNKYLRRALFYPALAACQSDPGAKAFKARLVGRGKKKMQANVAVMRKMLTVAWAIMKDPEPYDSARLYADLEKA

SEQ ID NO: 380731 - protein, 321 aa, unidentified
MSKNVEFEPFAERCCGLDVHKKEIVATVEGEGIARETKTFESTTRSLTELKEWLLELGVTHVAMESTGVYWKPVMNVLEPGGFSIMVVNARHIKYVPGHKTDKKDSAWICKLLRAGLLKGSFIPSREQRDLRDLTRYRRKLVQQQAAEHNRMIRVFEDANLKLSSVFSNIRGKTCTAVIDAVIAGETDPQKLSEMCTHWRLKSTQEEIALAVEGNFTEHHMFMIRMIRDSIADIERHIADLDAEIDRRMAPIDGIIERLCGIPSMDRTSVKELIAEIGVDMEVFPTADHLASWAGMSPGNNESAGKKKVRTRTTGTRPRRR

SEQ ID NO: 380732 - protein, 456 aa, unidentified
MAKKQMTLEVVNPNAAGIDVGSRSHWIAVGQNAEDVKEFGVYSEDHHSLCEWLKKHKVITIAMESTGTYWQNLFSSLVAYGFEVILVNGRQTKNIKGKKTDIKDCQWIQKLHTLGLLSSSFLPDSTTAIIRTYSRHRQNILKQSASTVLKMQKYLRLMNMRLDVVVNDIVGLTGIKIITSFINGEKSGKELAKHRHYNCKKPETEIAKALQYNGREDYYFALQHEWNTYLHLQKQIDEVDAQIKKHLTGVIDKDDNKKQHIASKKPYKRKNKNTIRGTDMNQLSYQYFEGIDLMAIEGVNDATIMAIISEIGLKGIKKFETAKQFTSWLRLAPNNKISGGKVLSHHLPKGSNRLKIALRQAANSIGNLKEGHLSDFFRRINYKRGRATAVSATARKLAVIIWNMLVKGMPYNPPTEYLFLDQKRKMKLISRIKKNITKFELKPEDVGFNKVLNVST

SEQ ID NO: 380733 - protein, 346 aa, unidentified
MNKLDVGGIEVSAEQLLAELQREGAARLRREFPNTPEGHEALRRWLVLPGHRVRVVMESTGLYGLDLALRLEGEPRVELMVANPRAVRHFAHALMKRSKNDPIDVEVLREFAARMPFRRWVRPSPAALHLHALARRLESLTQMQAAEKNRLQAAPLSEALPQAVERDLQRSLRGLERALNRLTRQAVAVIAQDPDLNLRYQLLLSTCGIGPTSAVQILAQLAVLSPDLDVRQWVAYAGLDPRQYTSGSSVHKKTRISKTGNRHLRRALYMPALVAIVHQPHVRAFYQHLLDRGKSKMQALVAVMRKLLHAVYGMFKHQQPFDGAKRYRLPDEITVPQLAFSTAEVA

SEQ ID NO: 380734 - protein, 373 aa, unidentified
MSDYSAFVGLDVHKDTIAVAVADAGRTGEVRFWGEIANTPDAVASMLRKLGGRHPRMHFVYEAGPCGYGIHRQIMATEHHCEVVSPAHTPRKPGDRIKTDRRDAIILARLSRADELTPVWVPDTIHEAMRDLIRLRQAMVKDLRAARQRTKSFLLRHGRVFKGTSWKRSHRIWLGNQSFAHPAQQIAFQSYLNAVDQAQARRDEVDVQIRHFTADWSMAPVVEALQALRGVAFITAVTVVCEVGDIRRFAKPRQLMAFLGLVPGERSSGETRRQGGITKAGNVLARAVLIEAAWSYRTPAKIGAQMMLRQEDIPQAAKDIGWKAQVRLCGRYRRLMARGKKSALAVTAVARELVGFIWAIAQITEPTGAEGVA

SEQ ID NO: 380735 - protein, 347 aa, unidentified
MRFYTRQHRHYCGVDLHARSMYVCVLDRDGNVLVSKNIASAPEPFLELIAPYREDLAVAAECMFTWYWLADLCAREGVVFVLGHALYMRAIHGGKAKNDRIDAHKIAGLLRGGMLPQAYVYPQAMRATRDLMRRRNYLMRQRAELLAHITNTNHQYNLPALGVRPARPAERSGLLEHFAEPQVRRSVAVDLSFVEHYDRELPALERYLESNAQAHNPVALAIVRTIHGMGKVLGLSILYEIQDIGRFARVQQFLSYGRLVKPTKESGGKILGHSGRKIGNAHLKWAFSEAAVCFLRANKPAQALRARLMAKHGKGKSLAIIAAKLARAVYFMLKRGEPFDAERFFAH

SEQ ID NO: 380736 - protein, 472 aa, unidentified
MGYRSTIKRNKERRAEPKRYTVGELETMPLLYPDLAGIDIGSREHYVSVPGNRSEHPVRTFGCTTPDLLEMVNWLKVCGITHVVMESTGVYWVPVATVLEEAGFEVALVDARESHRLSARKTDVHDCQWIRQLYACGLLRNAFRPRSQILLLRSYWRQRHELVSMCATSLHHMQKALELMNVQLHKVISDISGVTGIRILRAIVAGQRDPEGFARMVHPNCKSSSTEFVHALTGHYAPEQVFALAQALRRYDLYQEQIAELDGKLHRCLGDLPSGENWEPEAPTAGPKTLDGKRRKNQSHFDLAGEVHRIAGVDLTRIEGIDALTAFTVVTEQGIDMSAFPTEKHFASHLGLCPNNQITGGRVRNKRTRRVHSRAAHALRIAAQSLARSKTALGAFYRRMRARHGAAKANVATAHKLAKIFYRMLKHGEQYVARGLEDYEKRYRERLLKNLKRQAKILGCEVLVLDTGQLLS

SEQ ID NO: 380737 - protein, 409 aa, unidentified
MNVVHASCAGIDIGKRSVTICAITTGPRGDPVKETRTFGTVTRDLLALADWLDGIGVRAVAMEATGSYWKPIHNLLEDRFELLVANAAHLKAVPGRKTDVRDAEWIADLFRHGLIRASFIPSRQERELRELVRYRTSLIRERASELNRIAKVLEGANIKLSSVSTNIGGVSGRAILAALVADTTDPEVLAELARGRLRNKHDALVAALTGRVGTHQRFLLAAQLRHLADLDELIEGLDAEIMERLTPAEPVIELLATIPGVGRRTAEVLLAEIGQDMGRFGSSRQLASWAGMCPGNHESAGTHHGGKTRRGSPWLRSALVSSARSASRTRTYLGAQYRSLAARRGAKRAFVAVGHTILGIAYAVLTRGEPFHDLGATYFDRRDADHVKRRLTRRLEQLGYAVTLQPQVV

SEQ ID NO: 380738 - protein, 354 aa, unidentified
MASMPPQLDPVSRVVVAGIDTHKDLHVAAVVDTDGVVLGTESFSTTRAGYRAMVRWMRTFGDVRKVGVEGTGSYGAGITRHLGEAGIEVLEVDRPDRADRRRRGKSDTLDAEAAALAALAGRRTSIPKRKDGLVESLRVLRLTRATAIRSRTKALQLLRMHVISAPEELRDQVRNLTRMQLLRTCACWRPDTIGFRDPVVATRIALKSLARRILELNDEIATLDELINPLVAELAPRLLARPCIGVEIAGQILVTLGDNPARIRTEAGFAMLCGVAPLPASSGKTQRHRLNRGGDRQANRALHMAAISRMRTDDKTKAYVARKTAEGHSKLEIIRCLIGGLSRSRLVGRAVASR

SEQ ID NO: 380739 - protein, 412 aa, unidentified
MKDLLEISCGLDVHKEKIVACILTSPLGKTTRSEIREFSTLIPDMIALRNWIVSKNCHHVAMESTGIYWMPIYEILEDAFSGDITLLVVNARHMKNVPGKKTDMRDSEWISTLLRAGLLNGSFIPEKRIREFRDLNRYRKSVIRDITSQKNRIEKFLQSSGFRLSSFISDIFGASGRNIILHLIEHGQIDKTALDSCLKTKTRNRIDEILMSVNGTLSEHQKAFLRILMTHYDSLKKHLAEIETSLEEDMAPFALQIEQLNSIYGISTTASCAIIAEIGIDMKPFKTAEHICSWAGLCPGNNESAGKRKSTSVTKGNPYIKSMLCEIAWVIAGKRNTYLSAWYWRIKQKKGAKKAIVALARKLLVIIYTMLKQGTLFDESCFETRRKHCEQKQLSRYIRELEKHGYHVEAQS

SEQ ID NO: 380740 - protein, 340 aa, unidentified
MGEVRTIGLDLAKHVFQVHGVDAEGATVLRKQLRRAQVLAFFSRLPRCLVGMEACGTAHYWARELRALGHEVRLMPAQYVKAYVKRNKNDAADAAAICEAVVRPTMRFVAVKTVEQQAAVLLHRGRERLVRQRTGLVNALRAHLAEFGIIAPQGLRHVGRLTAIVRDEGDARLPDLARQVLQVLAAQIEQLEAAVAAIEKQLMAWHKSNPVSQRLATIPGIGPIIATAIAATVTEPSGFRSGREFAAWLGLVPRQNSTGGKVRLGGISKRGNRYLRRLLINGASANLLRSKATKADPWVIGLRRRRPSLVVAVALANKTARMAWAVMQRQENYQRMASAA

SEQ ID NO: 380741 - protein, 346 aa, unidentified
MKYIGLDVHSDHINCVVINEKGNLIHHDCFKTSLKNLINLSEKLKHPLSLVFEEGELADWLYQGLRSHFEKITVADPIENRMIYGGDQKSDSIDPLKLATLLRGGFINPVHHTWDHHRSQFKQLVFAYHDMARQLTRIKNKIKAYYRKQGIIIKTSSVYHPLHRQEFITQCRHPEIIRKYYQFLDLFQLEKNRFEKKLRKESRKYPVIKRFLKIPGVGIVTATTFFTIVDDPNRFDHKQKLWAYAHLGKAVHQSGSYEVTRHQRKGNRLLKYVIKIAVGDAVRQKTNDFTRAYIHMVNIQQKDSKLAYRILARKLATIMWTMWKNNQPYIPRNSDMMPKDTAYEIS

SEQ ID NO: 380742 - protein, 412 aa, unidentified
MPDDQSLPNLSNLSWEVYVAFKIFRKNCCGLDVHKTWIYACMGITDTNGRTEYKQARFSSFTKGLQKLADWLAKYDCNDVCMESTGKFWIPVFNILEKTCWVTLAYPKYTKPQKGNKTDHKDAKWICDLYMCDMVNPSFIPPPDIRQLRDLMRYRSKLTNIMTSEKNRALNCLTVSNLKLDDVFSDVFGKSSRSIIRYILEHPGETFQVAPFIDRRCKHPVEEIQAVIDGTISHQQAVKLRECLQHLDELEVHKTNVEKEILCLVQQYPYQLELLQTVPGFSGNIMTAIALISEIGADMSVFPSAKHLVSWAGCCPRNDQSSKKVKSTRISRAGVYLKPLLVQVAIQPFTANADKLSAAGALEIRCQICDGRFLSMWAALFIFLGCPLPPCPKDLHVHNGRIVILASVAWIF

SEQ ID NO: 380743 - protein, 403 aa, unidentified
MRTFAGIDWAAEKADVCVQGPDGRVLTERTFALDEAGIAGLCQTLTCHRVCRVAIERPDGLLVERLLDAGLTVLAIHPNQVKAARPRFTAAGGKSDRFDAFVLCELARTDSHRFRVLAADRDDTKALRALTRARDELVDARTALANQLREQLLAFWPGATRIFADLDSPIALAFIERYPSPLDARGLGPRRLQAFLDRHAYPGRQTPEQILAKLRAAATGRAGELETDARRATTLGLIAALRPIVEQIRQLTSQIHGAVREHPDGAIFLPLFRDNATAICPATLIAELGDQRSRYPTSAAMIADAGHSPVAVESGKRKIACFRRACDKRLRNAVATLADSTRHWHPWARQTYTNARARGHNHQRAIRTLGAAWLRVLWRCWHDHTPYNPNRHGALTRQLAAAG

SEQ ID NO: 380744 - protein, 334 aa, unidentified
MKEITTVGLDLAKNVVQVHAVDAVGTVVVRRQVRRAQLVIFFSRLKPCLIGMEACAGAPHWGRELAKIGHEVRLIPPSYVKPVVKRGKTDAADAEAVCTAVVQPAMRFVPVKTEAQQAVLMSHRARDFLVRQLTQLANAIRAHLGEFGLVVPKGVHNMGRLVAEAETADLPAEARMPLELLVGQFNDTKARIDTITADLRRAAEADEAARRLQTMPGIGPITASVLAATLPDVSAFRSARDLSAWLGLTPKPHSSGGKERLGAISKMGNRYIRRLLYLGAMGVISARRKADLGEDWLGRMLGKTPLKVVAIALANRMARPVWAMLRTGEAWRAA

SEQ ID NO: 380745 - protein, 391 aa, unidentified
MFLLGIDIAKLNHVASCIDSSTNEIVFSNFKFKNDFKGFSTLLDKIKTFDTKNLIIGLESTSHYGENLINFLFKQHFKVALINPLQTSHLRKANIRDAKNDNLDSLNIAKSLIFAKLNFISEKNINCFYLKKLTRFRSSLIKQRSKAKIQLTSLLDLLFPELQYLFKSKIHSKAIYSLLKKYPSTEEIAALKDDEISNLLYASSKGHFKKEKSIELKSLAKTTVGIKDTSISLHVIQLIELIELYDKQIKDIVTKIADTVDKLDTKLLSVPGISIIACAIILGETNNFNNFSDSTKLLAFAGLDPKIRQSGNFNASSCRMSKKGSPYLRYALIFTAWNIVRHSEKFNKYYCLKRSQGKSHYNSLGHVAHKLVRVIFTLIKKNIVYQEENLE

SEQ ID NO: 380746 - protein, 429 aa, unidentified
MIMGFTKPIEHFNPQRKKVITMNTLYVGIDVSSKSNVIYLMLPNGDKHSNFSVANSHEGSTQLVKRILSALTSHSLDTVLIGLEATSVYSDNLVYFLREDATLAPFNRKIHVLNPKQVKKFHDSYNDLPKNDYVDSFVIADCLRFGRINKEVYLGDYRYKALQNLTRARYFAVQNLTKEKQRFINVLFKKYSTMTQEKVFSNAFSTTALAVYDEFESAEALANMDLQELTDFIIEKGKNRFPDPDAVAKAIQKAARSSYRLPKTVNDSVNQVLSISITSMKALESQIKEFDKAIKAQMELLPNVLISIPGIGPVYSAGIMAEIGDINRFDNQAALAKYAGLAWKQHQSGGFESEVTRLIPSGNRFLKYYLCEATFSLVRCDKEYSDFYHLKYKEVNRCQHKRALALTARKFVRLVFRLLKDNRLYCPAK

SEQ ID NO: 380747 - protein, 350 aa, unidentified
MSDATRWVGIDLHRRRSHIAIVDEHGELTVSRRIVNDRDTFLALLGDPGDGQTHVALEATYGWEWLAELLQEAGHDLHLAHPLRTRAIAATRVKTDAIDARTLAQLLRGGLLPEAYVAPREIRDLRELLRHRATLTRMRSAVKNRVHAILAKHAITSEHPDLFGKGGREFLADLELRQAPRRRLDSLIALIDDFDREINHTTKEIEQRAKADDRVDVLTQIRGVGRYTAMLIIAEVGDITRFPTARHLCSWAGLTPTVRSSDGKARLGHISRQGSPALRWALVEAAQKITTGSGPLREMFERIAKRRGRKIAKVAIARQILTLSYYGLRDGEIRCLARRSRASAKAKLAA

SEQ ID NO: 380748 - protein, 361 aa, unidentified
MEQISRVGMDTSKNFFQLHGVNAAELVVLRRKFRRREMIHFFEKLSPTVIGIEACGASHHWARLLRSFGHEVKLIAPQLAKPYVKRGKNDAADAEALCEAMSRPTMRFVPVKTAEQQAALMLIGVRDRLIRNRTQLSNAIRGYAAEFGLTAAKGNAQLEPLLEAIQVDESVPTAALELFAVQATEYVQLQGQLDEIEARLIAWQKTDECSRRLTKIPGIGPVGAALLTMKTPAPELFRTGRHFAAWLGLTPKDHSTAGKVRLGVITRAGDEALRSALVCGATAVIRHAQRSGKVSPWLADLLKRKPPKVAAVALANKMARIAWKLMVTGQSYTTNRAPAVSASAPRDRPDTASNLTATVLR

SEQ ID NO: 380749 - protein, 346 aa, unidentified
MTYSTTVGVDLAKNVIQISVVSSRGKELCNRSLTRKKFAEFLGKQKPSLVAFESCASAHYWARAAQRHGHEARIIPAKAVAPFRQGHKTDGNDALAVAEAARRPNIKESPMKTVEQQGLQAIHRSRELLNQECTALSNHLRGLLMEFGIVIPKGFASLLKAVPEILEDGENELPDLYRPTLHRMYSRLLELREDIGAMTKEVERLAKGHPICSKLMALEGIGPIGALLLYATMGSGAAFSGSREFAAYLGLAPKQYSSGGKTNIVGLSKKIGNSRLRSVLILGARAYVYKFKEPKSSKDKWLKAIIERNGESRAAIALANKNVRTAWAMVTQGTEYQRRPQLEMAA

SEQ ID NO: 380750 - protein, 402 aa, unidentified
MNAVGIDVSKGKSMVAIMRPFGEIVSAPFEIKHTASDINSLVELINSVEGESRIVMEHTGRYYEVLAHQLSEANLFVSAINPKLIKDFDNDSLRKVKSDKADAVKIARYALDKWQNLKQYSVMDELRNQLKTMNRQFGFYMKHRTAMKNNLIGILDQTYPGVNTYFDSPARSDGRQKWVDFASTYWHVDCVRKMSRNAFIGHYQNWCKRKKYNFSQLKAEEIYGKAKELVPVLPKDDITKIIIKQAVDQLNSASTTVESLRTLMNEIAAKLPEYSIVMAMKGVGTSLGPQLMAEIGDVSRFTHKGAITAFAGVDPGVNESGTYVQKSVSTSKRGSSSLRKTLFQVMDVLIKTHPQDDPVYQFLDKKRAQGKPYYVYMTAGANKFLRIYYGRVKEYLASLPES

SEQ ID NO: 380751 - protein, 427 aa, unidentified
MSVAQNEKIRQVTETTMVIGVDIARDTHWARAFDWRGLELSKAVKFENSAEGFHYFLCWASELAAEQKKGRIMVGLEPTGHYWFTLAAYLQGGSMKLVLVNPYHVKCSKELDDGHPSKSDKKDPKTIAKLVLEGRYVLPYIPQGLYAELRVAMNCRWRVQKELTSVQNQIQRWLKIYFPEHKTVFGEFEGIGSMALLHAAPLPSNLVALGVDGINQIWRQMKLRCAGLKRAQRAFEAAQNSVGCTTGIEAARMELQILLEDYDAKLQQYERIMKVVESLCRQIPEVEELLKIKGIGLITVAGIFAEVGDLRRFSSPRQLQKLAGLAITENSSGKHKGQTEISRRGRAHLRAILFRAVMPLVARNEEFQKLHHYLTTRAENPLKKMQSIIAICCKLLRVFYAVATKGCAYSAEKMLADIRRNQPLKAA

SEQ ID NO: 380752 - protein, 457 aa, unidentified
MGRKGKRMAGIEEAHPFTGMSQVNPNAAGVDIGAVEIVVCVSGDENTQIVRAFGNYTVDLQAIGRWLKEYQVETVAMESTGVYWIPLFEELERQGFECLLISSRSLRRVAGRKSDIIDAQWIQTLHGYGLLESSFRPEAELIGLRTLLRHRSQLVEHRSPHILHMQKALLQMNVQLSQAVSDVTGVTGQTIIRAILAGERDPQELASLREPGCKKSAEEIGKALTGTWREEHLFVLKQSMEMYVFYTGQMRACDEEIERVYGLTRPDWEAGEVQPLSERKRNSHSKNKPQNPEGIRKHLKRISGVDLSVLDGFGVSLAQTVIMEVGTDMSKFPSEKHFCSWLGLAPKHEISGGKVLKNKTLKTKNRAGQAFRMAAQSVKQADCVFGVMYRRLKARLGPAQATVATAHAIARVAYRMLKYKVEYETISVEEYEKKYKDQQFKYMRKKAAKLGYQLVPA

SEQ ID NO: 380753 - protein, 421 aa, unidentified
MSDDRCRLGSDDVVIGLDLASAEHQAVVVTAAGKRLTRFRMPHTRAGLEELLRRTTPAALGRPGGARVFAFEATGHLWEAVAYVLRARGEPYVVVNPLATFRVREARQLSREKTDLTDAEQIAELCRTGLVTRTQLEARPYLALRRAWGEYARLREERARLKVLVAHQLYGLFPEFLRVWADLLQPGALAVLRTGLTPAAMAALSLTEFVTQVRAHRAGHRLWRFKLAQVHRYAEQTMACPDGLDVLAREVQRAVARIDMLTAHMTAVAAEIDSMLAELEEVPSLRPIPGLGWTSVAGLLAPVGAITKYHHGRQLIKLAGTNPSRRDSGQTVGHGQRMSHRGRAGLREVLYLATISCLQHNPRIRAHDDRLIQRPDRPLPKMQALGACMNKLLLYAFAVMHRREAFQLDHDWPRTTMARVA

SEQ ID NO: 380754 - protein, 402 aa, unidentified
MFAIKRTAAFAHASPRYNLAAGLTPVNGMVRPCSCPTSNSMLGRGAKDEKHAMSQKLESAIAVIGIDIGKNSFHVVGHGERGAIVLRQKWSRGQVEARFANMPPCLVGMEACVGAHHLSRKLDSLSHDARLMLAKYVRPYSKGQKNDFRDAEAIAEAVRRPTMKFVATKTADQLDLQALHRVRERLVSQRTGIINQIRAFLLERGIPVRQGLRFLRQQLPELLAKRTDVLSPRMIRIIEDLSGDWRHLDGRIEQVTEEIEVLARGTEGCRQLMTVPGVGPIIASAMMAAIGNGAAFAKGRDFAAWLGLVSKQMSTGDRTILGRISKRGNRYLRMLFMQGARVILLRPENWQKHSFGAWLTTAAKRLHHNVLATALANKLARITWTVLAQGRSYEARVEPRTA

SEQ ID NO: 380755 - protein, 394 aa, unidentified
MKLVGIDVGKNSHHFCVMDKETGELNVTPSSFPNNKEGFDFLINSLKPYSKKSILLGMEDTGHYHVALLKFLLSNGYTVALINPKTTDLTRKMEGGITKNDKLDTITICDVLDTPERKKQYRITKVDRFDLYEQRQLTRHHHNLKEELNVYCNRLQKSIDLVFPEFNTLFSSKYGIVYMNLLKTFGSAEAIASTDIRTIRKCFEVKGRGGRISLTPEKLKECAKNSIGISSEVETIQIKHLVRQITLIKEQIAEIDKKIEEFSITNNSPILSIPGISHFSGTSILAELGDIGNYSKPSQIIKFAGVAPYHYESSQYNAQHTAITKKGSKYLRKTLYQIILPVINNNPVFKKYYRLKISQGKGHRCAQGHCIRKLLRIIYHLLETGQSFDPALLR

SEQ ID NO: 380756 - protein, 353 aa, unidentified
MDNGSRYVGLDVHRDTISVAVCDSRGKLLLERVIPTSAAAVLELLELLRGKLHVAFEEGTSAQWLAGLLQPRVAQVLVCDPRKNDRRGSKNDRIDARELADLLRCGRLSPVFHQDCGLTALQQLARTYLVLTKDQTRVMNRIKALYRSWAISCAGQSCYSPKQRKAFLSQLPHVAIRGRAQIYYQQMDSLVTLRQQVRQQLLHEGRKQPALCLLRQIPYIGPLRATMLVVFIQSPHRFRTKRQLWAYCGLGIETHDSGEYRFRQGQLERKRQPTVMGLNRNHHHLLKYVLKSVAARCCSGSGPLRDFAQTLLDQGMRPEMVRLTVARKIAAIVLVLWKKGVSFDAHYLKSQAA

SEQ ID NO: 380757 - protein, 345 aa, unidentified
MEPMYYIGLDIHKRKISYCVKDGSGQLHAEGSIPASRHDLDCWMKTLPQPWSAAMEATLFTGWIYDHLQPHAAALKVAHPLMLRAIAAAKRKNDRIDANKICDCLRCDFLPECYVAPTAIRERRRILRYRNLLVRQMVQMKIKTGSLLMEAGVSYNKERLHKAAYFRELLATHPDIDESLRSLLRQCRETVLRLSKTENALIRSLQRDRLLAERVERLMSIPAIGPITALTWALEVGDVRRFSSNKKAVSYCGLCGAEKSSGNTVRRMPLSKQRNKHLQTTLIEAAKMAPRFSPTLALLYDREKKKGNANRATLAVARKLVAYLVAVDRGQTHFLVLDRESSIAA

SEQ ID NO: 380758 - protein, 444 aa, unidentified
MTRRCFGLDVHREFAQVAIWQDGLVRQAGQIAMTPEALRVFADSLAPSDEVALEATGNTHAIVRALQGRVARVVVANPQKTRAIAEAKVKTDKVDAEILAQLLAADYLPAVWVADEDTQARRRQVARRAHIVRQRTRLKNQVQSILHRNLIPRCPAADLFGIKGRRWLAEQELPADERQAVRALLRQLDFHGQELRLIDSELARVALRCADTKRLMTIPGVDVAVAMSITAAVGDFSRFSSPNKLVRYLGLNPRVKQSGDQPAAHGRIAKQGRAHARGMLVEAAWVAVKTPGPLRAFYERVRSRRGMQIAVVATARKLAVLCWHMITRGEDYAFARPSLTAKKLRALELKAGMPARRGQKGTASGYSLKDVRTREKALAEQAERAYTQMVADWQAKAPANRNVGVAAANGARLSRPSDGATAARQDTAPDPALRSGVDHAHSAA

SEQ ID NO: 380759 - protein, 323 aa, unidentified
MTVYLGINIASKKFDVAELCDGNYRCKAFENTSAGFLALYKWLGQSTMPDIHACLEATGNYGISLATFLYENKIKVSVVNPARIKGFGASELSRTKTDKADSKLIARFCKAAVPDGWKPTPAPVRKLQALVRRISALNGMLRMECNRRENADANIQASLDRIISLLKTEIEIVRQEIKDHVRSDDELKKQDALIQSVPGIGEVSSNLILSFMSGKGFRKAKEVTAYLGLNPRHHQSGSSVRGKTRMSKMGDARLRSALYMPALVALRYNPDIKAFGQRLLLAGKPRMLVVGAVMRKLIHIVFGVLKSGTAFSSRIAVHSVVTS

SEQ ID NO: 380760 - protein, 350 aa, unidentified
MEKRSMKHYAGLDVSVKETSVCIIDEAGKICREVKVPSHPEDLVDVLKDPAWRLERIGLEAGPLSQWLFSGLVEGGLPAVCIETRHTKAFLKAQVNKSDRNDARGIAQMMRVNLFRPVHVKTLTSQKRRALLTARKILQDKAVAIENDIRGLLRNFGLKVGAVGVAKFDERIRELVEGMAELVEIMEPLLAARQKLREMFTALHRKLLSIVRDDGVCRRLMTIPGVGPVISLAFCATIDVPARFRNSKAVGPSLGLTPVLNQSGESLRVGRVSLCGDDMMRALLYEAAQVMMTRVQKWSWLKAWAMNVAKRRGLKKAVVALARRLAVIMHRIWVDGTVFRWTKEAAPATA

SEQ ID NO: 380761 - protein, 429 aa, unidentified
MKKSRAYQSVRVNKVDWNRTNRFEEQQAVHVGVDIGKFELMSVLRWPDGSFERPWQAKNPGEIGSLVDLLFRVHESHQLTVALEPTGTYGDAVRQALDDAGLCVHRVSPKASHDYAEIFDGVPSQHDGKDAAVIAELSALGKSGSWRYESPSLIDQEMSYWVDWMDAHRRQKAMWVGRLESLLARHWPEATRLLKLSSSTLIRVLEHYGGPAALGNDKEAINQVKAWGGPRLMLSKVGQFVWEAQTTMGVRQGTIDVQRMQQYARQARAAGNEIKTSQQHLKRLSKGNKVLEAQGAAIGIPTACVLWVHLGDPSNYHCGSAYRKAMGLNLKERSSGTWKGKLAISKRGSAQIRNWLFFAALRLIRGQPVKEWYDLKKAKDNDGATRALVGVMRRLAMALYQIGACGQSFDAGKLFPGGQLVYENNIQGR

SEQ ID NO: 380762 - protein, 430 aa, unidentified
MKSNTQNAKIEAITEKTLVLGIDVGSETHYARAFDYRGIEYSKKPFKFSNTEAGFATFKEWILDLKERHEKDKVVPGMEPTGHYWFNLGKFLQDNEMKPVLVNPHHVKKSKELDDNNPTKNDRKDPKVIAGLVREGRYMIPYLPDGVYADLRTASNIRFQLQAELTRIQNRISRWFNIYFPEYKTVYGKPDAKSGMLILKAAPLPEDILTLGIDGVNQIWRDAKLRAVGKARAKTLIEAAEHSVGSKEGAVSARMEIRMLLEDYESRNIRLQEVMALIEGLVKQIPMAEKLLEIKGVGIKTVSGFLAEVGDISRFNTPKELQKLAGLALVESSSGKHKGETTISRRGRKRLRYLLFEVAMSLVAKNPEFRELHNYYTTRRLNPLKKMQSLMAIAAKLIRVFYAMLTKGVDYDPKKMVSDIKRPAVYLQAA

SEQ ID NO: 380763 - protein, 334 aa, unidentified
MKSDTVHIGVDVSKEKLDIYVPAKKEGSRPLTKEVDNNINGFRELRDLARKAKATVCVEPTGGYELDLIAFMHKFDVPVAYTDALRVRQFARAEGNLSKNDTIDAALISRFADKIGVRVLEAQEVEAVELKRKAKFRQTMVDSRTAMINRLETEIDPEMKALLKEQIRLAGRIIDKAERLCLDTVKKNDRMNSLRERFTAIGGVGDLTAISILSSLPEIGTLSDGKLNRLVGIAPEEKQSGTKEWQRRIWGGRKDVRNALYMAAVASIKWNAILGGYYHKKRAEGHPHKWAIVPTMRKLLSLLNRIARDPGFTPMPEPESTKQNANVGRRKKAA

SEQ ID NO: 380764 - protein, 350 aa, unidentified
MLIIGCDYHPGFEQIALMDSDSGEFQEQRLSHREEAEKFYRNLAAQGAKVRVGMEASGHARWFERLLAELNIELWIGDAAKIRAKRVRKKKTDREDARHILKLMLKDDFPKIWVPSWDNRDLRQLLWHRHRMVQMRTRIMNQLQAVALNEGLRCKKRLWRKHGRPQLESIRLAPWASRRRRDLLELLDRLNPTITELTQLVEQEVEKYPIAQRLMTHPGVGALTALAFVLIIGEAERFACGKQIAAYLGLVPEEDSSGESRRLGHISKQGSALMRFFLVEAAQVTVRSEAEWRNKFFHLAMRRGRKIAKVAMARRLAVRLYWMWRKQWDYAQWKKFGPHAGQPGPGVGVQ

SEQ ID NO: 380765 - protein, 411 aa, unidentified
MQIVHERCCGLDIHKKTVVACVLITQADGTLQREIRTYATMTADLLMLRDWLESLDVRHVAMESTGVFWHPIYNILEDEERTILLVNAQHMKAVPGRKTDVKDSEWLADLLRHGLLKASFIPPAPIRELRELTRYRKTVVQERASEINRLQKVLESANLKLAAVATDILGKSGRDMLDALVDGQEDPEVLAALARGRLRPKIPELQRALEGRVKAHHRFLIEQILSHIDFLDQAIARVYQEVERCLTPFSEAVTLLQTIPCINAVAAAIIVAEVGTDMTRFPSAKHLASWAGVCPGNRQSGGKRLSGTATKGDVWLRAVLGEIAVSIARSRGTYLHAQYHRIARRRGKPKAVWAVAHSIMIIVYHILRTKQPYQDLGEHYFEQLEAPRLERHHVRKLEQLGYTVTLTPQVA

SEQ ID NO: 380766 - protein, 369 aa, unidentified
MGLDVHVETIAVAVAEPDGEVRSLGTIANREDSVRKFIRKLGSPEQLRACYEAGPTGFVLYWQLAQLGVECAVVAPSLVPKKPGDRVKTDRRDALKLARSHRSGDLTAVWVPDEDSEALRDLVRQREAAKQDQLRARHRLTKFLLPTGRRPPLGLKPWTERYMRWLAQIRYTLPAQEVTLRDCMNEFEHMSARVKRLEEAILEVVKLAPQPMQEVIRSLQALRGVAHISAVTIAAELGSISSRFEGARKLMGYCGVFPSEDSSGKRIRRGGITKAGNAHLRRIVVESAWCYRHWPRVGEKLRKRQQGIPAEIAEIAWKAQNRLHKRYMKLTMAGKEQKKIITAVGHELLGFIRAIGVRAEAACTQKMAA

SEQ ID NO: 380767 - protein, 358 aa, unidentified
MNTRRVQDFVVKGKEVFVGLEDSKTTWKIAVRCDKMLIHQAAMEATYPVLKRYLDNKLPQCGIHLMYEAGFKGFNLYDRLTEDGIDCTVIPPHLVTEPKVNKVKTDKRDARRLALVLQNHDFRDACHVPDKERREDRQITRTLIAVQKDIIRTRNRTRKFLDFHGIEVPFAEEGRWGRKEFMALKELPVREPLKISLNVLLTILEQLWNQMTTLRASLRELCRKERYRKAFEIARSLPGIGWYTAIRLVLELGEDMTRFGSGKKIAAFVGLTPGEHSSGETTWKGRITGMGSGFIRSVLIENSWIAIRKDPALMAKFMRVRKSSGSKKKAIVAVARVLIVRLRACMVSGEPYATGVIR

SEQ ID NO: 380768 - protein, 313 aa, unidentified
MAFLHQQPQICLGFDIAKDTVTVADGTTTSTILNQRRAVRAFLKSYKHIDLVVCEPTGGHESLLLEECLRAGIACHRADTLKVKSYIRSFGTHGKSDAIDAAMLRAYGRERWAKLSLWQAPDPDETRLRALVRRRQELIAIKIAEKNRAKAPGGRKLATSFEAVVKVVERQLQIIDVEIRELIANSSALKHRAAICTAMDSLGPIVAAKLLAILPELGSMTRRKAAALAGLAPHPNDSGQKQGYRKIRGGRPDVRTALFMPALRAAAGKGEFATFYKRLVTNGKKPMLAIAAVMRKIVVTLNARLRDAAISQS

SEQ ID NO: 380769 - protein, 368 aa, unidentified
MTSILYIGMDVHTTNYTLCAYTMEMQKAFGRMQVEPDYKNILKYIEKMKENWGEDTEIVCGYEAGCLGYSLYHSLTDHGVNCVILAPSTMASVPNERKTDIRDAEKIAKCLAYGTYSPVYVPTERDEAVKEYIRMRDAHKANLKRIKQQIIALCYRYGKQYTKQSHWTQAHLAWLKSLRFNDPILQETFEEYLIQYHQAAEKLERFDKRILELSRKEEYAEKVHKLVCFNGIREHTALSAIVEIGDFYRFPSADHFAAYLGLVPGEHSSSTTVRRTGITKKGNSHLRTLLTESAQCYSRGQIGRKSMALKARQEGNEPSVIAYADKANERLKRKFKRIAFSRPHNVAATAVARELACFIWGMMTGHIN

SEQ ID NO: 380770 - protein, 433 aa, unidentified
MQDVRDEPLFAERVAGLDIAKAEVEAAIRVPSDTAPGRRQQEARTFGTTRAELESLGDWLRSWGVTKVGMEATGDYWKPVFFLLESRGFDCELYNAAQVKALPGRPKTDRAYSIWLARITERGMICSSFVPPEPIRRLRTHTRYRRHLTQARTAEKQRAEKLLEDGHLKLSSVISDIHGVSGRDMLDALVAGQRDPRALAQLARGTMRGKIRRLEEALECSFFTDQHAAVLAMMLTTIDHYTTQIEQLTARIEMLIEPYLHQAGQLDEIDGIGAICAQDIIAEIGTDMTVFPTAAHLVSWARWSPQVKQSAGKRKGSNATGRGNPYLGAALGEAAASAGRTQSFLGARYRRLTRRMPKKKALVATGNSMLTIMHALLSDPGARYTDLGADYYETRMHARSQARNHVRSLERLGYQVTIQAPGLPAGQPLTATA

SEQ ID NO: 380771 - protein, 317 aa, unidentified
MAEVTFPQLIQRACGIDVHLKVVVATIDGVGIQRDTRSFKTFTSSLNELKEWLLSNGVTHVAMESTGVYWKPVYKVLEDSIPNVWIVNARHIKNVPGHKTDKMDSEWICKLLLAGLLNPSYIPPKEQRQLRDLTRYRNKLIQQIASEKNRMMRILEDCNIKLSSVVSNTSGTTATSLIDMLCEGKVLTLDDIKSVYHGKLSASPEELLEACTGFVEDHHIYLLQMIRKDIDQTQALVDDLSERIKRLLSKYDNVLELLREIPGFSTKVVEDLVSEIGLDMSHFPSEKHLSSWAGLSPGNNESAGKKKAHESLTETNR

SEQ ID NO: 380772 - protein, 350 aa, unidentified
MRIIGCDLHTRQETMAMLDTETGEVLEKTLQHEGEKVREFYSALPRPVQVGIEATGSMLWFLNLMEELGIDSQVGHPAKIRAAEPRKQKHDRRDADLLLKLLMENRSKELRDLRALLWHRHQWVRTRTRVQNALQAMALTNGLRRGKSLWSQEGQHAIASLPLGPHVAHRRTALQALYRELDADINALDKRVLEQALERPEARRLMTHPGVGPVTALATDVFLGDPVRFENAKALASYVGMIPSEYSSAGRQRLGGLSKQGNPLLRFLWCEAAIHAVRRDPLLQRFYRRKLVQKGMGKARVAVARKLGIRLYIMLRDQIDYEEFCRRGQMRQKNGAARAGIPEVGYGPSL

SEQ ID NO: 380773 - protein, 312 aa, unidentified
MDATVIGIDVAKDRLDVCVRPSGESFVVARTGAGIEDLAERLKKIAPRVVAVEATGGFETVVAAGLAAAGVPLLIVNPAQVRAFAQALGKRAKTDPIDAAVIAHFVEATKAQPRPLPDETTRLLADLVTRRRQIIDMMIAEGQRDRRLANKRLKSSIARLRRALEKELAEIDSELDDHVRGSPAWAAKEDLLASVPGVGPIIARTLIAELPELGSLDRRKIAALVGLAPWTRQSGQWRGKSFIGGGRKSVRTALFMAAMVAARHNPVLKTFRDKLVAAGKPKLVALIAVARKLLTILNALLRDNQRWQPKTA

SEQ ID NO: 380774 - protein, 321 aa, unidentified
METVEFEQVVKRGCGLDVHKKTVVATIDGEGLKRSTREFGTFTSSLTELKDWLLENGITHVAMESTGVYWKPVYHVLEPTGIKVWIVNARHVKNVPGHKTDKKDSAWLCKLLLAGLLKPSYIPPKGQRELRDLTRYRKKLIQQVASNKNRVIRVLEDCNVKLSSVLSSTSGVTATKLINKLCEGQAITMQDIDEVYHKRIEASKEDLWEACNGLVEAHHVFLLRTIQEDTRHLEGLIAKLDRKIRQALEPYDNAVELLKEIPGLSDKSAEDLIAEIGLDMDVFPSEKHLCSWVGVSPGNNESAGKKKAVEPRAAINRPSQP

SEQ ID NO: 380775 - protein, 450 aa, unidentified
MWRKRKIKKTGTPTFQCMNPNAAGVDVGAMEIYIAVPTDRDPQPVRCFSTFTEDLHAAADWLKASKIETVAMESTGVYWIPLFQILEERGFTVLLVNARHVKNVPGRKSDVSDCQWLQYLHSVGLLRGSFRPDQQVCMVRSILRHRDSLVQMAATHVQHMQKALDQMNLQLHHVIADITGFTGLAIIEAILAGERDPQVLAALRDGRIKASADTIAKSLVGDYRREHLFTLGQSLKTFRHYQELIGGCDREIEKSLQTFESKVDPENPLPKSLTDVKRLKGDPRFELRTHLYRVFGVDLTQIPGVNVLTAQTLLAEIGPDLSRFASAPTFTSWLGLCPDNRVSGGKVLSVKTRKVKNRAATALRIAATGLYRSQSYLGHYFRRMRAKLGAPKAITAAAHKIGRIVYHMLTTRRPYEETIWVKNEAANRVRLEARIRKQARDLGFQLVAAS

SEQ ID NO: 380776 - protein, 457 aa, unidentified
MRTIGIDLAVAAAHRAIVAGPDGKFLTPVLKFHTRREEIEGLVARARAGATPDDPLRAVMEPTGMAWFPTSVALSQLGVTPYLVNPRRVHDLRKFYKRHSSSDRISARVLAKLPLVDEESLYPLEIPSAMQFACQRGCKEMDRLQTEITAIKNRLRDTDRFAWPGLEGVFKDIYSPAARLFRQTWYDPFKVVAAGVNEAQCTFSALSDQQDGLDWVKDLVQLASAVCQLYGPTAIDYTLLQQEVTREQDLLAYLEERAEQVWQDTVRPLYRQLHPSRDLESLYGVGEQGAVVLSSFIGRAGRFPDGRHFRGWHGLVPDSRQSGDSEGKGLHVSQAGPDLVKKFAFLGGDVARRYDPQIAAIYYDQMVNKGKHHNQAVCACATHLMDRVYVVLREGRPYELRDTDGTPVTPAQARAIIAEHYKVPEEVRKRNNRQARKERAERRMERQHKQRESRRSR

SEQ ID NO: 380777 - protein, 411 aa, unidentified
MQVIYDRCCGLDVHKRTITACVLKWLGGEWHKEIGQFGSMTKDLLALSDWLASEGCTHVAMESTGVYWKPVYNILEGQFELLVVNAQHLKAVPGRKTDVRDAEWIAELLAHGLLRGSFVPPASVRELRELTRYRSSLVGDRARTINRLQKVLEAANIKLANVVTDIDGVSARLMLERLVAGERDTQQLANLAKGRLKEKREQLIEALSGRLKPHQSFLIAEHLAQIDYLEGTIERLSQQIEERLRPFEQEMLWLDTIPGVNRRTAEVLWAETGGDMSRFPSARHLASWAGMCPGNNESAGKRRTGRTRKGSPWLRHCLVEAAHGAARTKNKYLSSQYHRLGARRGKKKALVAVGHSILVIAYHLLTRKQAYCDLGANYFDERDRQAVIKRCLNRVQKLGYKVSLEKLPLAA

SEQ ID NO: 380778 - protein, 375 aa, unidentified
MKKTVRFLGLDVHAETIAVAVAEPDGSVRSLGTIANRAESIRKLVKKLGPVEQLKACYEAGPTGYVLYWQLAELGVACEVIAPTLVPMKAGDRVKTDRRDAERLARSYRSGDLTAVWVPDEGSEALRDLVRARESAKQDQLRARHRLSKFLLRAGQRPAVGMKAWTLQYMAWVRQLRFSQVAQESTRLDYLHEVEHMAERVIRLEQAITEAVKLASPEIQEVVKGLQALRGVAQISAVTIAAELGNITRFESARQLMGYSGAVPSEDSSGKRTQRGSITKTGNAHLRRIVVEAAWSYRLRPGVGPGLRKRQEGVPEEIKEIAWKAQVRLSKRYARLAAAGKDQRKIITAVGRELLGFVWAIGIKAEQAAKQQMAA

SEQ ID NO: 380779 - protein, 309 aa, unidentified
MARVIVAVDPHKKSVTIEAIDEQERKLGTGRFGTGTRDYKAMRRHVRQQWPDHRWAIEGAHGVGRPLAQRLLADGETVVDVPAKLAARVRVFDTGNARKTDAIDAHAIAGAALRTPDLQVLEFDEQLVALRLLVDRRDELLARRVQTVNRLHRLLTELIPGGAGRDLSATKAKRLLATVRPRTLVGKTTRRMAVEEVADLVATDAKLKPRTKELAAAVRARGSHLMDLRGIGPAGAARILADVGDVARFPDRNHFASWTGIAPLDASSGDQIRHRLSRAGNRLLNHVLHMAAIAQIRLGTEGRSYTCAS

SEQ ID NO: 380780 - protein, 287 aa, unidentified
MLHAGMDLHKKFSVVSVIDDDCELLIRGKRLENSETEIREFLSGFDSEVRVVLEAGPNWNWMCDLLDEMGLENKLAHPYRTKAIGSAKIKTDTLDSLVLARLLRSDFIAEAYKADHATRQLRELVRMRAYLVRSRAGYKNKVHAVLTRMNIPNPFSDLFSKKGMCYLKGLELAPAYRDSVDAYLGMIEALGVQIDRADGLVHEKFCERADAQLLATVPGIGEFLALMIAGEIGDISRFSSAKGLASYSGLVPSTSQSGNTTRRFVPAYCASLRSTDRCLKALRLDMP

SEQ ID NO: 380781 - protein, 350 aa, unidentified
MTISHYIGFDVHKKSVSYCVKTADGRIVEEGRLRATREALRQWASQRSEPWHGAMEATLFSGWIYDTLKPFAAKLQMGHPAQMKAIFASKKKNDKLDARKISDLVRVDLLPACYVGPAEMRELRRMLRYRNLVVGQAVQMKNRMSGMLMEVGAEYSKQRLHGKEYFSELLDRLEEVPESVKDLLRLSRGALEMFETVQRQLLGRLQKEPLLRQRVALLRSIRGVGEVTALSWALEICDPQRFASIGDAVSYCGLTSALVESADKQQRGPISKQRNAHLQTVLIEAAKLAPRWNPQLAALHERALQHGHRNRATLEVARKLVAYLLAVDKSGQPFEVRTAPATETEAQQVA

SEQ ID NO: 380782 - protein, 391 aa, unidentified
MVCVGIDVAKDKHDCCILDSDGMVRADCFTIPNNMDGFKQLLQTIRNCTQKSDKIKVGLEATGHYSYNILGFLLDNDLAVYVMNPLHTNLYRKSLSLRKTKTDRVDARTIATMLLSDVDLKSYTDTAYHNEELKSLTRYRFDKVRERAKLKQSVSRLVTILFPELEKLVPSLHIASVYALLSEYPGAKQISEIHLTKLTNLLATASKGRYGKDKAIQIRDAARTSIGSVMPAKFLELKHTIKLIRELTSEIDEIEDSIQQIMDELHPPILSIPGVGIQSAAMILAEIGDFSNFESPDKILAYAGCSPSTYQSGKLTNCYAHMEKRGSRYLRYALYNATKYVCHWNPVFAEYLAKKRAEGKHYNVALSHATKKLVRLIYALQKSGKAYLVAA

SEQ ID NO: 380783 - protein, 351 aa, unidentified
MATMPQLERRVTVGIDSHKEVHVAAAVDQVGRILATTQAPTTLRGYAQLERWACELGRVERFGVEGTGSYAAGLARWLTGRGWQVVEVNRPNRHKRRRRGKSDPVDAEAAARAALAGDDTTTPKAATGAVEMLRALRVARRSAVKARSQAANQLDSLVVTAPDQLRAQLRQLPAARLVETAAALRPGELDSPVAAVKLALRELARRHQALSAEIDRLDAHIGRLAGKTAPGLLARRGVGAQVATAPLVAAGDNPTRLASEAAFAALCGTSPIEASSGQTVRHRLNRGGDRQANNALWTIVITRMACDQRTRRYVERRTSEGKSKKEIIRCLKRYVAREVYHDVRATALLTT

SEQ ID NO: 380784 - protein, 355 aa, unidentified
MIIVGCDYHPSFQQIAFVDTETGELNEQRLEHRESAESFYRELASRGEKVRVGMEASGHSRWFERLLAELGIELWLGDAAVIRAKRGRRKPKTDRQDAQHILHLLRKDDFPKIWVPSWENRDLRQLLWHRHRMVQARTRIMNQLQAVALNEGLRCKKRLWREKGRKQLEAIHLAPWASRRRENLLQLLDGLNPTIAELSAAIDREVDKSAEARRLMTHPGVGPLTSLAFVLIIGSAERFQCGKQVAAYVGLVPLEDSSGERRRLGHITKQGNSLLRFLLVESAQVAARSIPQWRNQYFHLAMRRGRKIAKVALARKLAIRLFWMMRQGWDYEQMKKFGSHAGQPGNRDGVQQSIE

SEQ ID NO: 380785 - protein, 404 aa, unidentified
MFYCGIDIAKYKHEATVIDEAGTALPDSISFANSKEGCEKLLALFERLGVSNDGLLIGMEATGHYWLSVYGYLLEQGFEIKVINPIQSEAFRKMYIRQTKNDRKDSFIIAQIMRFGQFSATNLSEETIVALRQLSRYRLALVDTCGDCKRRVIALLDQVFPEYDALFSDTFGVTSKEVLSQYPTPEDLLTVSTRKLSNLLEKTSHGRLGKEKAEQLKAAAANSFGVSFARDAFAFQIRQLVEQMEFLERQVTELEAQISSLLKQTGSYITTIPGIGDTLGAIILSEIGDIHRFNAPNKLVAFAGLDVRVTQSGEFTGTRQKISKRGSPYLRRAIWLAASRAAFCDPILSEYYQSLRARGKHHLTAIGAVSRKLCNIIFAILSEDRPYEAIPPKEIRHHSADFTM

SEQ ID NO: 380786 - protein, 355 aa, unidentified
MTTITIGVDLAKNLFSVCSVNATGRVLDRQEFRREKFAAWLAQRPAGTAVAMEACSGAHHWARVCVELGLQPLLMAAQFVKPFRKSAGSKNDRNDAEAIATAARQGNMRFVPLKSLDQQVRLSWHRVREGYKAEGLAIGNRIRGLLAEFGVVIAPSDAALRRWLADLDAVSLPSELIELIRDLAAHWEAVVKRVITCDRRIEAHARADERCVRVRSVIGIGALTADALVATIGSGIEFKNGRQLAAWLGLVPRQHSSGGHARLGGITCRGDAYLRTLLIQGARSSLQRAKAVSVEKATPEQRWIRSLTQRLPFGKLLVAIANKHARQLWVMLARKVDYDAHALYHHPMHCTEATA

SEQ ID NO: 380787 - protein, 341 aa, unidentified
MEYAAIDLHTAQCQIRIVGEDGQVIEDRRGPTTRERLAIVFAQRDRLRVLVEASTESEWVAEHLETLGHEVIVADPNYVLMYARRSRRIKTDKRDVAALAEACRLGIYRPAHRRSREHRRLRRQLRVRDHLIRVRTKTINFLRAQLRAEGVRLRPGEAETISLRTSQADLPPDLRVDLEPLLAFLMNLTDTIKSTEAPLIRRSHATPIANRLMTTPGVGPMTALTFIAVVDTPERFPASKALSSYLGLVPLEHSSGECQRKGRISRSGDSQMRGLLVQAAWVVMRSRHPAATPLKRWMEQVASRRGRGVAIVGLARRLARILFALWRDETVFDSAHLIQAA

SEQ ID NO: 380788 - protein, 466 aa, unidentified
MKKTMNQRKPTKRGVPRALEAIRPMVAGIDIASREHWVCGPAREDDEPNVRVFGTTTGQLEELVNWLAEQGVESVAMESTSVYWIPLYELLESRGIEAVLANARQTSNVPGRKTDFHDCQWIQLLHSCGLLRGSFRPGPAITAMRALHRQLANLVEERGRCVQWMQKALDQMNVQVHRAVADLSGTTGLAIVRAIVAGERDPGRLSALRDPRCQKSAEEISRYLTGTWRDEHLFNLDCALQLYDKADALIAVYETKLLNAMVCLQSEQRKDAPVPKHPNRAKQKAMVTRGDEPVRAALWRAAGVDLTRIDGISVGAAKTIATEVGLDLSAFPAEAHFVSWLRLCPCRPISGGKLLKPKRNGLGAHRVANALRMAAVSLHYSKTALGAAYRRIARHKGAGVAVFAMARKLAQLVYRMLRYGQDYADVGEATYESRFQARRLAGLKESAKSMGYCLTPAPALTAASAG

SEQ ID NO: 380789 - protein, 347 aa, unidentified
MEYFAGLDVSLDTVNVCIVNAAGDILLEKKIAAEPAAIVNLLKSFGSPFKRIGLEAGPTSSWLYGELRAAGYGAICLECRHVKAGLSAMRNKTDRNDARGIAQLVRLGWFRQVHVKSEEAQRTRMLLVNRQQLLTKALDIENSVRGSLKVFGLRVGVVARRGFEARVLELLADDPILLAVTEPMLRVRQALLEEFERLDRLCQQLARRDPVCRRLMTVPGVGVVVALTYRTGVDAPERFSRSRDVGAHFGLTPKRYSSGQTDYDGRISRCGDEMVRTALYQAANVLLHHGRWSSLRSWAMRIAKRGSVKGAKVALARRLAVVMHRMWTDGTDFRWSDTRRMTVSTAA

SEQ ID NO: 380790 - protein, 343 aa, unidentified
MKITTVGIDLAKNVLQVHGVDARGKAVLKKQLKRGQVLAFFANLPPCLIGMEACGSAHYWARQLQALGHTVKLIAPQFVKPYVKTNKHDAADAEAICEAVGRPNMRFVPIKTVEQQAILSVHRARHGLGKARTAQANQIRGLLSEFGIVIPKGMAHIAKRLPEILEDGENGLPGVFRHLLQRLGEHLKELEHQVAALEGEIQYWHRDNEASRRLAAIPGIGVLTASATVATAGDGKSFTRGRQLSAWLGIVPKQHSTGGKPTLLGISKRGDSYLRTLYIHGARAVIAQVERHPERADDWLKRLLARRPKNVVVVALANKNARIAWALLAHGCDYQPRGTPLAR

SEQ ID NO: 380791 - protein, 341 aa, unidentified
MTLVMGMDQHRAQISAEWIDTVTGEISTARIAPADRVAVRRFLTRFEGSDLEVALEATTGWRFLVEELQRVGADAHLAEPAETSGLKGKKRRAKTDWADARHLRELLLIGRLPESWIAPAHLLDLRARVRCRHTLVEQRTEWQQRMHAVLYHHGVPHSRKLLTLPNRERIAALKLPAAAREQLTIALEMIDAIELQVGPVDLALRAYARKQPGCRTLIDQIYGVGPLTSVAILAELGDTRRFQNSRDAVRYAGLDITVYQSDTRRAAGHLSRQGPPALRWALYEAAQAARRPSSPERPYYDQLAERIGGNRACIAVARKLLKRGYHLLRNLGDQALEPVIA

SEQ ID NO: 380792 - protein, 317 aa, unidentified
MTEVTFPQLVQRACGIDVHLKVVVATIDGVGLQRETRSFKTFTSSLNELKEWLLSNGVTHVAMESTGVYWKPVYKVLEGSIPNVWIVNARHIKNVPGHKTDKMDSEWICKLLLAGLLKPSYIPPKEQRQLRDLTRYRNKLIQQIASEKNRMMRILEDCNIKLSSVVSSISGATATSLIDMLCEGKKLTLDDIKSVYHGKLSASPEELLEACTGFVEEHHVYLFQMIRKDIDQTQILVDELSQRIKALLSKYENVLELLKEIPGFSTKVVEDLVSEIGLDMSHFPSEKHLSSWAGLSPGNNESAGKKKAQESLTETNR

SEQ ID NO: 380793 - protein, 486 aa, unidentified
MHASGASRREIAKLRLMNTSAPHTLSRHCERSEAIHLPFFTRQDGLLRCARNDGECCRFHGVMSVHPLGLGFAHSNPRRRRMQAPTVSTPITDHISTIFVAIELSQKTWLVTMHSPDKDKISRHKVPGGDHASLLALIDRVRDRAARTLGAVPAVASCYEAGYDGFWLHRLLMAAGITNYVIDPSSIAVDQRARRVKTDRIDGEKMLRTLMAYLRGEPRVVRIVRVPTPEQEDARRATRERDRLVKEQTAHTNRIKALLRLHGFAVGNPRRRDWLTWLAKQRDWQGQGVPPRVLSEIENEHGRLMLVRKQLDALERAPAAVDPTPAAAEMARRSELLQRLKSLGPAFATTLTQEVFYKDFRNRREVASYFGLAPSPWQSGGIDRDQGISKAGNPRAAAPRSSCPGCGCGISRAASSPSGTGNARSRPASASSASPSWPWRASWWWRFGATSQPVLCPQGRCSRRRGRNDLTNASASRHLPRSARDG

SEQ ID NO: 380794 - protein, 454 aa, unidentified
MCLEDRPILEQNAAGADIGAREIFVAVPPDRDENPVRVFATFTEDLQELADWLVRCGVTTVAMECTGVYWIPLYDILERHQIRPCLVNARHMKNVPGRRTDWHECQWLQFLHSVGLLRPAFRPQAEICAVRTLIRHRDELVGAASQHTQHMHKALTQMNLQIHHVISDLTGVTGLAIVDAILAGERDPVTLAQHRDSRIKASEETIRKSLVGNWCREHLFTLRQSLELYRIYQQQIVSCDQEIESLLRQFAPRVDPIEKPLPPDRKRNRAAKKRRKKTGNPDATFDLRTEAYKLFGVDVTQIPGVETAALPLFSEVGRDFSKWPTAAHFASWLALCPDNDISGGQVLWRGMRKVNNRAGRLFRLAAYSLHHSQTPMGNYLRRMKSKIGPAAATTATAHKIAVVFYTMVKHQVEYDETIWATRDAERQKRFEAKLKRQAKQLGYELVPIVEKPAA

SEQ ID NO: 380795 - protein, 421 aa, unidentified
MLKVMHHVCCGVDVHKKFVIATIVSTTKTGIAKYKTKRFGTFNDELNQLKDWLLENNCIELCMESTGKYWIPVYNVLEDKINITLANPKYIKAIKGKKTDKKDSIWIADLHRHGLAPGSFIPPHAVRKLRDICRYRTKLVSNKSSEKNRVQNSLTMCNLAISHVLSDTFGKTAQRIIEYVLTCDTFDPEYCKTLIDGRVKADHDEIIRSIVGYQLSVDQVAKIRFANDHLKFLDEIMSNVDMKINEFAKPFRHQIRLLSTIPGVTSDSATRIISEIGVDMEVFHSDKHLCSWAGLVPQNNESAGKKKSVKISRAGVYLKPLLVQCANAAIRSNENPYFKIKFHNIKKRRGHKKAIIAIARMILTCAYHMILNNQPFEPSDFNITSPHRPKKLSVEQQLQSAIAFLQANGFAISNPDSISVQ

SEQ ID NO: 380796 - protein, 410 aa, unidentified
MHPMVDRCAGLDVHQATVMATIRVPDGEGGRLAVTETFGTTTAALVTLRDWLQAYGVTHVAMESTGVYWKPIYFLLEDAFTLLLVNAQHLKQVPGRKSDVRDSAWIAQLLEWGLLRSSLVLPAPMRDLRELTRYRKHQIRDRAREVNRLHRVLEDAGLKLSTVATDVMGVSGRAMLDALLHGTTDPMVLADLAKGKLRKKLPALREALAGRFRAHHRVLITQILAKVDFLDEAIATLTEEIDHLVVPFEAMLANLDTIPGIDRKAAITIVAETGGEMHRFPTAGHLCSWAGMCPGQNESAGKRRSGKTRRANRYLRGILIESGLAVTRAKGTALQARYYRVKRNRGHKKAVVATGHQILEIAFYIMRDGVTYHELGADYFDRHHRERAIRRHVRQLEALGYSVTLNDTAA

SEQ ID NO: 380797 - protein, 354 aa, unidentified
MNSVRYIGMDVHRDTISVAVLDESGRVTMQSVLATRAAAVLDFVHGVRGALHVTFEEGTHSAWLYDVLVRRVERLVVCDPRKNALLKSGSKSDAIDARKLAELLRAGLLSAVYHGETSALEVQQMARSYTQMTEDTTRVMARLKAVFRGRAVSCAGKKLYGKRHREEYLAQLSGGLRRRAEHLYQELDALQPLRHGVRRELIVECRKHAAAQWLQSVPFLGPIRAALLIGRVQTPHRFRTKRQFWSYCGLGLETRDSGEYRMGNGQVERRRRPTLIRGLNWNHNHEMKNLFKSTATAASIREGVWREFYLGLLDKGMRPEMARLTLARKIAAITLKIWKKGERFQAEHLKLQAA

SEQ ID NO: 380798 - protein, 391 aa, unidentified
MPEDAPRLTRAAIRTDLGAIFVSLELSRKAWLITSLSPGGGEKMSKYSVPGGDVSGLLRRFAELRRKAAARTGQDFPIIVIQETGLDGFWIHRVLQSEGIESHVVDAASILTSRRRRRAKTDRIDGETLVRTLMAFKRGEPRVCSMARAPTPQEEDRRRVCRERRTLVGERVRHVNRLKGLLFAQGVFGYEPLRKGRRERLEDLRTGDGRPLPMHLKAQIIRELDRLEIVLEQLKTVEAERDALLKPTTGEAASPAAMLAQLKGIGPETAAVLWSEGLFRQFDNRRQLAAYAGLAPTPWQSGSIAHEQGVSKAGNPRLRATMVELAWLWLRNQPTSALSLWFHERVRRLGGRMRKTTVVALARKLLIALWRYTIAGVVIEGAVMKPATTTI

SEQ ID NO: 380799 - protein, 378 aa, unidentified
MNRIIKIGMDVHTTNYTLCIFEPSFEHDGTVHCITQVKPEIKKIIHVIETFKKKHENEELNIVCGYEAGCLGYSLYHELKEKGVECVILAPTTMKTEKGGRKLKNDYRDAKMIAECLAYGGYSAVHVPTELDNSVKEFIRMRDDIKENLKSIKQQIIAFLTRNGKQFEGKSYWTRKHIDWINTVSFSEPLLQDTLKEYMIEYNHLSDRVETLDRQIEEISLKEEYVEKVQQLQCLIGIKTHTALSLIVETSDFNRFKKGNMYSAYLGLIPGDDSSGGHEKKLGITKAGNNHLRRLLVEAAQGYTRGRVGFKSKDLKSRQEKCSSEVVAYADKANERLRRKYYRMILRGKKYNVAKTAIARELACFIWGIMTDHIALCS

SEQ ID NO: 380800 - protein, 333 aa, unidentified
MTYIGIDVHKRQSQVAVVEDDGSTQRESRVDNAELGEFVAEYEDAQAVIEATSNYYAIYDALEQHLEVSVAHPTKLAWIAKSRQKTYEADASKLAELLRLDAVPESYVPPEEIRECRALARGRKKLVEKRTDAKNEVHAILDQNGIRIDSPFTDEGREQLAALEVEGSDQVMLEQWLGTIDDLDARIKDVDREIVEMSKSISDVDLLMTIPGVASYSGLMIYGEIGEIERFDRAKELVSYAGLDPTVRESADSRTEGPISKEGSEYLRHTLVQCANIAVHNCDDPYLSEFYERLRRRGKPHQVAIVATARKLLVSIFHILTKEEVYDPPPVRE

SEQ ID NO: 380801 - protein, 386 aa, unidentified
MHHATTLAVPEETCIRGDCATLFVSLELSRSTWVATSLAPGSRKMSKHTLVGGDGRKLLDLLARLKTRAEQRIAAPVKVVTIHEVGLDGFWIHRLLEANRVESHVVDPASIAVPRRHRRAKTDAIDGETLLRTLMAWQRGEPRVCAMTVPPSPSEEDRRRVSRERATLLRERIQHTNRIRGLLFGQGITNYNPLHKNRRECLEELRTGDGRSLPAHLKAEVLREIDRLELVLRQISEVEAERDEMLRPAKASSPAALLMRLKGIGAEFAAVLYLEGLFRHFQNRRQLAAYAGLAPSSWKSGSIDHEQGISKAGNPRLRTTMVELAWMWVRYQPDSALSGWFRQRVGSERGRTRRISIVALARKLLIALSRYVTRGEIPAGAVVKAV

SEQ ID NO: 380802 - protein, 319 aa, unidentified
MAQDDLVVVGIDVAKDKVDACIRRFKLRQTFPNTLQGRRKLTVWLRKCQVGKAVMEASGGYERKWRDVLHSAGIAVRIVDPRRVRNFALSAGRLAKNDPIDAEMIAWFAETFSQAPGQVPDAAREDLAALAKARKALVDVKIRLQAQNEHAAPEPARKAHARILKSLAAEIDKLEAAISAKVKATPEFAERAEIIQSVPGLAQTTSAILIAGMPELGQVSDEVAAALIGLAPYDDDSGKQRGERHIKGGRRWVRNAIYMPCLGAATQNNPVLKAFYQRLIAKGKEPKVALVACMRKLIIILNTMLARRQKWNPGCHALA

SEQ ID NO: 380803 - protein, 262 aa, unidentified
MSEITTIGLDLAKNVFQVHGIDEAGNVLMRKRLRRSQVLGFFSGLSRCLIGMEACATAHHWARELVGLGHEVRLMPPHYVKAYVKRNKNDAADAEAICEAVKRPTMRFVAVKTVEQQSALMMHRARDLLVRQRTMLANALRGHMAEFGLVSAQGLHNVTGLVAIVRNCADERIPEVARQVLSVLAAQIYEVGENISVLEAQILAWHRNNPVSQRLATIPGIGPIIATAIAATVPDPSVFRNGREFAAWLGLVPKQNSTGGKA

SEQ ID NO: 380804 - protein, 369 aa, unidentified
MFDYTKTVVGLDVHKESIVAAVLPPDSDRVALTTKFENTPAALKTFVERLRSRGALTFIYEAGPCGYQVHRDLTMQGQECVVIAPGLIPTRPGDKVKTDRRDAEKLAQLHRAGQLTAVNVPTRADEADRDLVRAREDVLSERLRARHRLGKFLLRHGLVWRETKAWGVKHRAWLKALRFELASQTRTFESYLRGLEEVEARMEGLDREVLALAENGTWNKLVANLRCLKGVDTMSAVTLAVEIRDFRRFASAREFMGYTGLVSREYSSGENVKRTRITKVGNAHVRRVLVESAWSYRQSDRTGKTLLERRVGGSAEAVATARRAQERLCRKFRKMLGRGKPTQKAVIAAARELAGFVWHIGRLSQEVRG

SEQ ID NO: 380805 - protein, 403 aa, unidentified
MNAVGIDVSKGKSMVTILRPFGEIVSSPFEIKHTSSDILSLIKLIHSIEGESRIVMEHTGHYYEVLAQQFSAAGLFVSAVNPKLVKNFNNDSLRKVKSDKADSIKIARYALDKWQNLKPYSIVDELRTQLKAMNRQFHFYVKQKTAMKNNLINLIDQTYPNANTYFNSPPRSDGSQKWVDFVYTYWHVDCVRKMSLNSFVKHYQNWCKQKKYIFNKSKAEEIYTKATELVPVFPKNEITKRIIRQAIAQLNSTSATVETIRILMNETASKLPEYPIVMQFKGIGPSLGPQLMAEISDITRFTHKGALTAFAGVDPGVNESGSYAQKSVPTSKRGSSNLRKTLFQVMDVLIKTMPQDDPVYQFMDRKRAQGKPYYVYMTAGANKFLRIYYGRVKEYLCILSESS

SEQ ID NO: 380806 - protein, 455 aa, unidentified
MKKKKKTVSYKKHQERKRAIAGIKVIGIDPAKEKHQVTVLDEHGIQMGNSFSINVSHKGFNEDLWKKLGKILGRFSKEEVIFAIESSCNLWRVFAEYLQKRGYRVVLVSPLITYKTRSTINNDFSKTDPKDAYLVAENAQGGKYNEYMSYTPEINKLHSLCIAHDKLTKDRNRIILRLRALMEEIFPEYLKCVHVEIKTSLYLLGKYFLPEHFQKLDVDEEEWNIRRISNGKHNADTLKKIKEHAHRSIGAGKTGEEDGVRITLDAWISQLRLINENMKTIGGKMIELAKETEFFEILVSVPGISDLSTARLIGECRDLKLFEHYKQIEKMAGSNIRLCDSGKYAGTRRINRLGNKRLLKLIYVMTTQTARYMPEVRIKFLRRQIKKKSYRKNIFAASSILMRILMVLIKEKRNYEIREDNVKEMERLELKYNPEKKDKKKSRKKNKKKTLKKAA

SEQ ID NO: 380807 - protein, 363 aa, unidentified
MKIIGCDYHPSFQQIAMVDTETGEMTERRLSHADGEAKRFYESLTGPVLVGVESSGNMRWFQRLLARLGHELRIGDATAIRASNPRRQKTDKRDAQHLLQLLLEKRFPAIWIPSMEQLDLRQLLKHRHTLVQMRTRVKNQLQHIAMNEGFQKKRKLWTQEGMEFLRNLELPLWTRRRRDDLLKLLAEFNGHIQQLSQAVETEAEKGTLVRLLMTHPGVGPILALAVVLTLGNIQRFALGKKVASYVGLIPSEDSSGTRRRMGAISKQGNSFMRFLLVQAGMAAARKDPELGRFYKRLANKKHHGVAKVAVARKLLVRLYWMLRTNTPYPEVVVRMQGSSSHPVAKKAKADRLSERPASRSNKK

SEQ ID NO: 380808 - protein, 326 aa, unidentified
MKTIESSQTFQHFVGVDVGKETLVAQHFATRQLIEFPNTSDGIANFLQGHAAWLKNGYFVVDTTGGWERPLIGDLIAAGVTVHRADGRRVKSFARSLGKMAKTDAIDASVLARYGHDRHAELFQCQLANESLFLLKNLVTRRGQLARYAKEERQRLSGPLPNKVRFLVEQNLDALCEQMTIIEQEISLCLENDTTLKRKAEILQSVPGVGPQTAAFLLAEMPELGQLNRKQIASIAGLAPHAYDSGKMSGRRTTYGGRRHVKAALFFAALNAARSKNNPLGDFYTRLVNAGKPKRCALIAVARKIITIINARLQNHHCIQPEFMSR

SEQ ID NO: 380809 - protein, 372 aa, unidentified
MEQPSRLFIGLDVSKLKISVAVADGERGGEVRFLGDIASDPASVSSIVQRLAKRGAKLHFCYEAGPTGYELYRQLTEMGHDCTVVAPALIPKRPGDRVKTNRRDAVSLARLHRAGELTAVWVPDRGHEAMRDLVRAREAAQEAQKRARQQLQSFLLRHGRVYSGRSSWSLAHRRWLSTLTFEHPAHFIVLQEYCQAIEDAEVRLKRLTDLISETVRSWTMAHVVEAYQALRGVSLMAAVVFVAEIGDIRRFENPRQLMAFLGLVPSESSTGEHVKRGGITKAGNSRARRMLVEGAWAYRFPARVSRSKQAQLEGLPRTVREIAWKGQLRLCSRYRNMILAGKHKAIAITAIAREMAAFLWAIGQEVQPAHHA

SEQ ID NO: 380810 - protein, 345 aa, unidentified
MEQCNVIAIDLAKDIFQVCIMTTNGEIIFNKAMSIAKLKEWLPKQKLSLVAMESCAGAHYWARFAQSVGHNVMVIPPKQVKPFRTGQKTDANDAIAIAVASRAANIKPARILSIEQQGLQSIEKMRSMIDKHKLQLSNQIRGLLLEFGIVIDKGSKSFKERIPEILEDGDNDLSFPMRKVLLQMRTLYSRLEEDFDVINNELLQLTAQDTDCQRLMKLEGVGPITAVRLKIQLGNGGHFNSGRQVAACIGLTPKQHSSGGKVKLGSVGKSSCDKPLRSCIFLGARAVVSKLKNRPAKTEKERWLKALIERRGVNCASMALANKTARTAYALLKNNTDYNPVLIAA

SEQ ID NO: 380811 - protein, 523 aa, unidentified
MATKFKSRNRRPRRFLTIAKPSGSLHPRVQKAGPEHFGIVAVDCAKARSKWMLADFYGRILVPPTVVEHTKQGFDAAIAEIHRAIERHTLRDVIVAIERTGIYHLPVKRAFVSKNFEPRIVHPLTTRQYRLPADPGNKTDDTDLFAIHRATTNGFGLIEAQLDEIHGPLRLLTRFRRSLVRQNASLRNQMHALLDVLLPGYSSLFDDVFDNQAALAIARTVTSASQVRALGTEGLAQVLKPLGVRYQRRTLAKILAWANGIEGAAEYSFMYNTILVSLDDERCARLQQIAKREQEMAGFLVRTPYVVLLSIPGIGIVTAAEFAAEMGPIANYASDQAITGRAGIYPSRYQSDKVDRCDGPLVRRANRTLRAAIMMIAENLLNCNRFFQTLKERWEAAGMDQRAMCVRAAKRFCRIAYQMVAGGQVFRHPSCQKRDAILHKLTCFHVDHGTSMAQVMADLQAATENIPKSEHATEAKSLFEAMQPSNRRQQCGPRRLGEILPVVLAKLGVTAVELSLKGENDLT

SEQ ID NO: 380812 - protein, 327 aa, unidentified
MSEELVHTAILGIDISKERFDVALLRGGKYKHKKFRNARKGFEELSGWLGKLGVETLHACMESTGIYGEELAEYLYDQGFSVSMVNPARIKGFAQSELRRSKTDKLDASLIARFCAAMKPSLWTPDPVEIRELRSLVRRVDALSGMRQQEQNRLEVSNKVLRKSIRKLIRYIDKEIEALKGEINNRIDQDPELGDKRKLLESIPAVGEATIHVILSHFASIEKFKNAKSLASFLGIAPRHYQSGSSVTRRARMSKVGRSSLRKAFYMPAVVALRFNPVLVDLRERLERAGKSSMLIIGAAMRKLVHIVYGVLKNKTPFDPNYSLKAA

SEQ ID NO: 380813 - protein, 458 aa, unidentified
MNRKRSKPKIDRTMPMVHPNAAAIDVGATMHMAAVRADRTPEPVRSFGTFTTDLHRLLNWFKECGVETVVMESTSVYWIPIFELLDARGFTVFLVNARDAKHVPGRKTDVSDAQWLQRLHSYGLLRASFRPKGQIAELRAYVRQRERLLEYAASHIQHMQKALTEMNLQLHHVVADITGATGLRIIRAILAGEHDPKVLARLRDYRCHASAETIEKALTGSYRAEHLFALEQALALYDAYHEKVSACDTRIEAVLKELSIGRGRRSDSLLSPRRPRTDQVNGLGFDVRAALFALLGKDITQIDGLGPYLSLKLIAECGDDLSAWASAKHFTSWLGLAPSNKISGGKVLSSRTRRCGSRAAALLRLAAVTVGRTNTALGAFYRRLSARIGKAKAVTAAARKIAVLFYNALRHGMKYVDPGASFYETRYRTRVIDNLHRRAKAFGFVLQPMEPTPGVAVS

SEQ ID NO: 380814 - protein, 318 aa, unidentified
MSDSVFVGIDVSSQTLEVASSSQAKTWQVSNDTAGLDPLVSRLLDVKPALVVLEATGGYEFEAACALQAAGLAVAVVNPRTARDFARAMGALAKTDALDARMLAAFARVLHQHPERERFVKPLADAELQRLQALVLRRRQLVQMITAERQRMRVSHVAARPSIERVIEFLKAELADSDAEVAAHIERHHADLGAALASVPGIGAASVAVLLAELPELGKLDRRRVAALVGVAPLNRDSGQMRGQRSIWGGRADVRRTLYMATLTAVRHNTVLKAHYEHLLAAGKRKKVALVACMRKLLTMLNAMAKHGSTWDPSLHTA

SEQ ID NO: 380815 - protein, 377 aa, unidentified
MAWLNRGVLTDFPKSGCPPRRFPARLVEGTSPSVITIGIDPHKSSLTAVALDQTGRQLAARRITINAAAYKTLINWAARWPHRRFAVEGAAGLGRGIAQLLAAASEHVVDVPATLAARARLLDTGGSRKTDAADAASVAHAAMRHQRLRQVIAEDQHTRLRLLAERRDDLARERVRLLNRLHVLLRDLIPGGAALDLTADKAAALLRGIRPATATDSCRRDLARDLIADLRYLDRRLTTNQVHTRQVHAETHSTITHIHGVGHITAAKILGHVGDITRFPTADHFASYAGTAPLEASSGERRRHRLNPTGNRQLNTALHTIALCQARDPGPGRLYYQRKISEGKTPAEARRALKRRLTNVLYRHLLHDQRKHLPATG

SEQ ID NO: 380816 - protein, 344 aa, unidentified
MYHYAGIDVSLECSSVCLVDGTGKILREARVASEPEALITWLRSLGLVLERIGLEAGPLSQWLYAAMRDAGLAVELLETRHVRDAFKAMPVKSDRNDARGIAQLMRLGWFRPVHCKSIEAQETRAVLTARKLLQSKLRDIENSLRGVLRGFGLKVGTTTERTFAERIRELVAGHPGLEIVAQALLEAHAVLRREFNGLDKHTQKLARSHPQARLLMTTPSVGPIVALTYASAVDDPKRFRSSKATGAHFGLTPKKYQSGETDYTGRISKIGDASVREALYQAAHVMLTKPVRNCSALKGWAMRIARRAGLRKAKVALARKLAVVLHRMLADAKPFNPMAKASAT

SEQ ID NO: 380817 - protein, 316 aa, unidentified
MSDAPVFVGIDVAKAQLDVAFRPTAEVWAVPNDEAGIATLVVRVQAVHPTLIVLEATGGLEMPVTAALAAAGLPVVVVNPRQARDFAKATGRLAKTDALDAHGLAHFAEAVRPAPRPLPDTETQALRALVARRRQLLEMLTAEHNRLGSAPRQIRGDIQAHITWLERRVTDLDHDISAAIRASPVWREHDALLQSTPGVGPVLSRTLLADLPELGTLSRQEIAALVGVAPLNRDSGTLRGKRTVWGGRAQVRAVLYMSTLVAVRYNPVLKAFYTRLGRAGKAPKVALTACMRKLLTILNAMLKHRTPWQQNHGLSS

SEQ ID NO: 380818 - protein, 294 aa, unidentified
MENVTSSVFVGIDVAKSWLDVCIRSLSGSESAKSKFANDAAGISEICAFLAGFKPKLIVFEATGGYEALLAAGLATDGLPFVIANPRQIRDFARAIGRLAKTDAIDASVIALFAERIRPELRPFPEEKARALTELVSRRRQVLGMMVMEGNRRFAAQDKRVSATINATLEFLKCQVAQLDKEINQLVQSSTSWRETEDLLTSVPGIGPITARTLIAELPELGRVDRRKVAALVGVAPVNQDSGLQRGYRAIAGGRTSVRNALYMATLVAVRHNQVLKAHYLALVARGRPKKLPS

SEQ ID NO: 380819 - protein, 424 aa, unidentified
MNLTQNDRLKQVTSDTLIVGVDVGSQTHFCRAFDWRGFELSRRVFKFSNTGMGFLTFLRWTEELMNKTEMKKVIVGCEPTGCYWLTFQKFLQDHAIQLVTVNPFTVNRSMELDDNSPEKSDLKDPKTIALLVKDGRYSTSYLPSGVYAEIREASVCRDQIMKQHVRLSNQIQVWLQKFFPEYFECYAEWDSTSGLMLLKEAPLPQDILKIGAGGINQIWRDAKVRAAGIKRAQTLVEAAQNSVGLEAGEAARLKIWVLVNDYILKAEQLKRLDEYLEEKVKEVPNVEKLLAIKGVGMSTVIGFIAEVGDIGRFTDPKQIQKLAGLEIVKKSSGKKKGQPRISKRGRRKLRRTMYESARALMTWNPAFQDVFLYYRNRTRKSLGSMQAKIAVACKAIRVFYVVLQTGCDFDEEKFRRDIIRPEAA

SEQ ID NO: 380820 - protein, 346 aa, unidentified
MLHAGLDLSRRRLDFHLLDESGETVELGAAPPDADGLRSLAERVGRHGQPLRAAIESMNGARFVHDQLELYGWEVEIADAQRVRGLAPLACKTDRIDARVLAELSRLELVPTIWLPTERVRAERERARFRLHLVRHRSSLKQRVHAILLAHGRPCPVADLFGLSGRALLARLTLPEPWSAHVEASLRLVDELDAEIDACERELRRLGREHEYVPLLCTCPGIAWVLAATIAAEIGDISRFASPAKLVGYSGLCPRVYQSGEHDRRGRLAKHGPKYLRWALVEAATHACRHPAYAERYQRTKRRLGKQRGPKVAQIDVARRLAEAIWHMLTRKQPFAPAGATAPVAA

SEQ ID NO: 380821 - protein, 406 aa, unidentified
MQEFNAAVQPIETAAALAAVGAGGLPGGHAAYIGLDVHKETIAIAVAEPGRGEPSYRGEIANTPKKVEKLIAKLSEAYGGGLLLFCYEAGPCGYVLYRQLIASGHDCQVVAPSRIPKAAGERIKTDRRDALKLARLLRSGDLSAVWVPDREQERMRDLSRARDDLKAQERKARQQLNAFLLRHGYHWPKGKSRWTPAHENWLAGLKMDDPWQQVALQTYIDAERASGERVAQLTDQLMRALPEWSLAPVVDSLVALRGIDKLAAIVLLAELGDISRFDSPKQLMAFLGLVPSEHSSGGRRRQGAITLTGNTHARRMLVESAWSYRFPARQTKHLKAKASNASPAAQQIAWKAQVRLCGRYRTLTRAGKDTKLVCVAIARELAGFLWDIVRQEMPQLAQAQAAPQGI

SEQ ID NO: 380822 - protein, 406 aa, unidentified
MEGPIITVDVSKGSCHYQPFIENGHPMRKPKQLSATIDGFQKLGQTIKDLEAKTEREDIPVIFEATGVYHRPLQKYLEDHKIRYYIISPLLSATYRKTDLHSNKTDALDCAHIAKAYYCEKELRQYQAQPQEYKRLYQLSRIYESELVHLRKRKVSLRSMLDIIYPRIDKTFKGNQNLYDPIPMEILKRYPHPSLLLSHREDTIVKAVGHRTGHLKGYTERIVHKIYEKAKECYSGCDIDDIEVVKLPSLIENVQEQKKKCDSLLKEMIEIARTCPYFASVVSIVGIGENLAARIIAELGDVNRFDNRAAIVAYAGLNPKIQQSGDIDGLHLKISKKGNKHLRCLLYLGAQCNYRLRKEDPLYEFTKKKRQQTQCPLSSKAAYTASAHKLLVIIYSLCKNGTLYHS

SEQ ID NO: 380823 - protein, 395 aa, unidentified
MEVLYPRCCGLDVHKSSVSACALVREGARTHKKYARFGAMTRDLEELAGWLHELGVTHVALESTGVYWKPVWNVLESQFHLLLVNAQHVKNVPGRKTDVKDSEWIAELLQHGLLRPSFVPEARIRDLRDLTRARASLSEEASRVVSRIQKVLEDANVKLAGVATNTVGKSGQAMLDALVLGEDNPEKLAELALGHLRAKIPQLRLALEGKVRDHHRFLLQRLLIQWRFVIEEIAVLDQRLEQIGAQEPSLLAAVARWVTVPGIDRVAAWSLVAEIGVNMAQFPSAAHLASWAGVCPGNHESAGKRLGGRMRKGSPWLRRMVCQSAWAAARTKNTYLSAQFRRLASKRGKHRAIMAVAHTILIISYYMQKNQCDYQDLGTDYFDRLHADGLKTLPR

SEQ ID NO: 380824 - protein, 435 aa, unidentified
MIRYVGIDLHKHLIVGHIVDPAGKVVDTFRYDSVDAASLAHIARKRLRPDDHVVMEATTHCWAVVRALQSHAARVVVSNPMATKAIAKAKVKTDKVDAAVLSHLLRLGYLPEVWQPDAATRDLREWTARRSRLVGQRTAVVNRIRSTLAQRLLDCPYDMTTPAARDWIAIQKVDDDASWLLDSDLRLLTAVEAEIDAIDAHLAKRGYVDERVKLLMTLPGVSQLTAQSLLAAIGDIARFPNADKLAAYLGLVPSTRQSANHCYHGPITKQGRGHTRWMLIQSAHAVRLHPGPLGHFFRRLKARKCHNVAVVAVAHKLALLAWHLLKTGEPYRYALPRATEDKLRKLRIAAGGEKRRGGLGEGIDPRTARASGEKGRTQRSLPQVLASEGVPSASPAPAGERRHVTELKLDEFADGLQQPKVIPRRRRKDAPDERS

SEQ ID NO: 380825 - protein, 307 aa, unidentified
MFVGIDVAKSELHVHVRPSGDAFAVARDSEGIEALLARLRTLAPQLVVLEATGGFETVVAAALAAAGLPLAVVNPRRIRDFAKSCGRLAKTDPIDAAVIAHFAAAVRPEPRAIADDAARGLGELVARRRQIVAMMVAERNRRRQLTQPRLLRSVDRVLVTLQEQLAEIERDIDAAVRGTPAWRERDEVLRSAPGIGPKIARTCLAELPELGRLTRRQIAALVGVAPFNRDSGSRRGARAIAGGRSGVRAALYMAVMVIIRRKLPLVAFYDRLRAAGKPAKVAMVATMRKLLGMLNAMLRDGTQWRTA

SEQ ID NO: 380826 - protein, 423 aa, unidentified
MEVMHERVAGLDVHKAMIVACVRIMSAGKIKRECRTFETSTAGLEALLDWLTASGCTHVAMEATGIYWKPVWKILSDGAFELIVANAAHIKNVPGRKTDVNDATWIADLVACGLIKASFVPDEAIQQLRSLLRARKQLSREQTSHIQRIQKTLEEANIKLDSVISDIMGVSGRRMIEAMIAGVRNPHKLAAMADRRIKASPKVLYDALHGRLTDHHRFMLELYLGQHDTLSQAIAKIDDAVDAATARMDEEVEAGQATFRSLILLLCSVPGINVLGATIILAEIGRDMSRFPTAGHLLAWSGMCPGQNESAGKRKSSRLRKGAPWLKTILVQCAWAATRKKDSYYGAQFKRLRAKRGPKKAICAVAASMLTAIYHMLNDGTQHQDLGADHFDRRSNAVKASHHVAQLARLGFRVELQPVAQAA

SEQ ID NO: 380827 - protein, 367 aa, unidentified
MMGWMAPLRHLSAKLLSDRNSSEWEPSMGEVTTIGLDLAKHVFQVHGVDAEGATVLRKQLRRAQVLAFFSRLPPCLVGLEACATAHYWARELRALGHEVRLMPAQYVKAYIKRNKHDAADAEAICEAVGRPTMRFVPVKTADQQAAVLLHRGRERLVRQRTGLVNALRGHLAEFGVIAPQGLRNVGKLIAIIRDEGDARLPDLARQVLQVLAAQIEQLEAAVAAIEKQLMAWHKSNPVSQRLASVPGIGPIIATALAATVVEPSGFRSGREFAAWLGLVPRQNSTGGKHRLGGISKRGNQYLRRLLINGASANLLRSKATKADPWVIGLRRRRPPLVVAVALANKTARIAWAVMHRHENYQRVAAAA

SEQ ID NO: 380828 - protein, 368 aa, unidentified
MRDCTYIGLDVHKDSIHVAIGETSPTYEVRHYGTIGGDLASLDRVVRRLRSKKTELKFVYEAGPCGYGIWRHLHQQGLACIVVAPSKTPKKPGERVKTDRRDAITLARLHRAGELEAIYVPLPEDEAMRDLTRAREDAKIAEKKAKQRLNAFLLRHGRSYSGSSKWSLAHRRWLSDQSFPHPAQQIAFQEYIDSIEQCEARVKRLTEQIETLSPEWRLYPVVEAFQAMRGVSLLNAVTLVAELGDIRRFDNPRELMGYLGLVPSEHSSGLSTRRGGITKAGNGHARRALIQGAWTYRHPAKVGRRLRDRRARLPEAVSQIGWNAQLRLCQRYRRMRARGKPSQVVITAIAREMAGFLWDIARQVPMAA

SEQ ID NO: 380829 - protein, 328 aa, unidentified
MGRSRCVGIDVSADEIVVAIEGKAERLTLANDLKGHARLVRLLTRGQARARVCLEATGIYHLDLALALHRAPRIEVSVLNPAGVRDFGRALMERSKTDRVDAGVLLAYAERMPFVPWQPPAPEILDLRAIVRRMGALTVARTQERNRLHAAGRCAELTEAIAWDIEAHLEHLAQSLKRLEQQALAIVNARPELARRFARMVSVRGIATSSALAILAELAVLPADMTARQWVAHAGLDPRRVESGTSLHKPTRISKTGNRHLRAALYMPAMVASQREPHIRGFYKHRIARGLKPIQALVAIERKLLHAIHGMWASNTDFDGSKFFVMVA

SEQ ID NO: 380830 - protein, 349 aa, unidentified
METVIKQTAGIDCGSKELVVSFGQLYINGNFYCRNTKAFANTPKGFDELVQWIITMHNEDMPVHYVMEATGVYHERLAYHLIANGYYVSIVLPNKVNAFAKTCSSKKQDDCQASKVLAEFGCIKQLDAWQPPHVLYVSLKQLTREKQQLQQELTLIHNQLHAEETKAITSLSSIKRMNARSKLLEKQILEVEKEITVLINKEESIKERIDNVCTIPGVGLQTVVTVIAETNGFNLVRNSRQLVSYAGLDIIQKVSGTSVRGRAHISKRGNPHLRHCLYFPAFTAVKYNLPLQNLHNRIVEKQAIKMKGYVAVQRKLLMLIYTLWKKNEPYELPIKFLEQPVEAALTELD

SEQ ID NO: 380831 - protein, 398 aa, unidentified
MTESSDYESVQVFIGVDVGKDTHHAVAINRSGKRLFDKALPNDENKLRSLISDLKQHGQILLVVDQPATIGALPVAVARSEGVLVGYLPGLAMRRIADLHAGEAKTDARDAAIIAEAARTLPHALRTLKLADEQIAELSMLCGFDDDLAAQTTQASNRIRGLLTQIHPALERVLGPRLDHPAVLDLLQRYPSPEKLASLGEKKLAAQLCKLAPRLGKRLAADIAQALAEQTVVVPGTNAAAVVLPRLALQLITLRKQRDEVALAVEQRVLAHTLYPVLTSMPGVGVRTAARLLTEVACRAFASVAHLAAYAGLAPVTRRSGSSIRGEHPSRRGNKALKRALFLSAFAALRDPLSRAYYTRKMSQGKRHNQALIALARRRCDVLFAMMRDGTFYTPQAS

SEQ ID NO: 380832 - protein, 387 aa, unidentified
MSQTAAALIPAPVAYASTLVLAIEVSNKSWVLAAQVPGLPHTKAKRTIHPEAGALLAAIAGYRARAAATGHTIERVIAVYEAGWSGFWLARWLIRHGVEVYVVQPSSVPVDRRMRRAKSDGIDAELLLRTLLAWLRGEPRVCSMVPVPDEADEDARRCVRERTELISERVGLTNRIGAVLATLGVTDYNPLLRSRCRRLAELRTGLGEPLPANAHAKIKRLLARLELVLTQIAELERERDAVVETEASDKAGKMIQQLISLRGIGVQSATVLVREAFVRRFPNGKALGSYAGLASSPYNSGGINREQGIGKGGNRRVRTVMVELAWLWTRYQPSAAQVCWFRERIGPTGRRVRKIMVVALARKLLIALWRFVIDGVVPEGAVLKPAA

SEQ ID NO: 380833 - protein, 403 aa, unidentified
MTAVMIGVDPHKATHTAVVIGAAEEPLGELRVRASAGQAEKLVAWAADWPERTWAVEGAAGLGRLLAQQLVAAGERVLDVQPKLASRVRLLQAGDTNKNDPNDALSVAVAALRSKAARPVMAEDYPAVLKVWSKRHRDLARLRNQAACRLHAVLCDLVPGGHPKEISAAQAARILEQASPSGAVDQARAELAAEFLEDMRHLDAQLRGTRKKLAAAVRASGTTLTEVFGVGPVIAGTIIGDIADVSRFPGRDHFAAYNGTAPVEVSSGNRKIHRLSLRGNRRINHAIHMAAITQLRHKHSEGRAYYDKKAAEGKTHKEALRSLKRKVSDAIFARLQADARQARESGPGGQPGNGSDSSAASSHPERQLFGPATPGPDTTIRPGTTAGTPSPSKPALKKTRPAT

SEQ ID NO: 380834 - protein, 403 aa, unidentified
MNAVGIDVSKGKSMVSIMRPFGEIVSKPFEVKHTSNEINSLIEQIKSIEGESRVVMEYTGRYYEGIAQSLSAANIFVSVVNPKLIKDFDNESLRKVKSDKADSIKIARYALDKWNYLPEYNSMDIIRNQLKTMNRQFCFASKHKTAMKNNLIGLLDQTYPGVNTYFDSPVRSDGSQKWVDFAYTYWHVDCVRKMSQNAFVNHYQNWCQKHKYNFNKDKAIEIYQKSKDLVPVLTKDSVTKMIVHQSIDLLNETSKTVEYLRSLMNETASKLPEYSIVLQMKGVGPSLGPQLMAEIGDVTRFEHKGALTAFAGVDPGVNESGTYAQKSVPTTKRGSSALRKTLFQIMDILLKTMPCDDPVYQFLDKKRAQGKPYYVYMTAGANKFLRIYYGRIKEYLSTLPDEQ

SEQ ID NO: 380835 - protein, 342 aa, unidentified
MNKVAIAAIDLGKKSFHLHTQDDRGHELYRKKLTRAALIQHLANLEPCTVVMEACGGAHFMAQQAAKFGHTAKLIAPHLVRPYVKSNKNDFADAEAICEAATRPTMRFVPVKTQAQQALAMLNSTRDSFIKDRTATVNRIHAALLEFGISLPAGFKSINELTAQLEASSLPDPIRKLLTRMHDHFDYLHEQIRSLDKELECQAAEDDLAARLMTIPCVGPITSSALAAELGDGKQFKCGRGYSASIGLVPKQHSTGGKTVLLGISKRGDRNQRRLLIQCARVYLMHLDRQKGVLAEWVRHLIATHHHSNHVVCALANKFARIAWAIAAHHTEFDAGPSAMNA

SEQ ID NO: 380836 - protein, 428 aa, unidentified
MKYNTQNAKIKSITEKTLIVGIDVGSETHFARAFDWRNYEYSKKPLEFSNTEAGFMTLKAWMADFAEKYGKNVVIPGMEPTGHYWFNLGAYLQDNGMKPVHVNPHHVKKSKELDDNNPNKNDRKDPKTIAALVNEGRFSYPYIPTGIYAEIRSLSNLRLQTQEEITRIKNRIARWFSIYFPEIKDVYRNPDSVSGLMILKEAPWPQDIVKLGVDGINKIWRDAKLRAAGLKRAKTLVTAAEHSIGSQEAPDSARIELKNLLNDYEIYKNREEDLMSLTEEKLSEIPHIDKLLEIKGVGLKTVSGFVAEVGDITRFDNPKQLQKLAGYAIVECSSGKHKGESHISYRGRKRLRYVLYEAAISLIARNEEFKEVHRYYRTRKENPLKKMQSVIAVACKVLRIFYTILTKGVTYDGAKMMQDIKRPQMLAA

SEQ ID NO: 380837 - protein, 433 aa, unidentified
MPRVKRKVETCMGLGNLPDPNEKVGNAMYFAGVDIAKRRHELCVIDDSGDILLQLPVENTKRGFEKLLTAFRTKQLTNQNVRFCLEATGHYWIALYCQLKEHGFSVDVVNPIQSDALRNLYIRKTKTDQKDSFILADLLRLGRATSTQLASETVLKLQTLSRMRFEFVSQIGGLKNKVIGILDRIFPEYPGCFSDVFIKTSRELLKQYSSPEELAEVDLTELSDFLREHSRGRIGMDRAERIQNLARGTFGISIAIDAFTLELRLLLQQIEFIEEQIKEIEDAIDQVMEEMRPSDETPYRHVIETIPGIGPVLAAAIIGEVGDITRFKNAKALVAFAGIDATIRASGQFEGTRNRMSKRGSPVLRHSLWLAAVSARRFNPKFKEYYDTKRAQGKHPNVVTGAIARKLAHLIFALWTDNRPFDPNYKWTAGSTN

SEQ ID NO: 380838 - protein, 360 aa, unidentified
MSTKTITKYVGMDVHKSTISIAMLNADGKLVMQSVIETRKAAILEFLEGLRGTVHVTFEEGNYSAWLYPLLRPLVAKVIVCNPRKNALLKSGNKSDQIDAHKLAELLWMNRLSHVYHVDHGLETLKELWRVYATLTQDSTRVMSRLKAVYRGQAIPAKGRTLYTRRRRNQWLEQLPPQRPGLRYRVERLFEELDGLQKLRRQARAELLRESRKQPASQILPSIPFLGPIRTALLIARVQTPHRFRSKRQFWAYCGLGLETRSSADYGVVQGGLQRRKKPVFIRGLNFDHNHELKSIFKSTATTASARPGPFHEFYQALLAKHMEPEMARLTLARKIAVIVLTLWKKGARFDPQYLKTQAA

SEQ ID NO: 380839 - protein, 341 aa, unidentified
MDVSVLGIDLGKNSCSVVGLDATGKVVVRRRMRRETVIAYAATLPACVVAMEACCGAHHMGRALARRGHSVRLMSPEYVRPYVKAQKNDDRDAEAIAEAATRPTMRFVELKTEEQLDMQTLHRIRDQLVGDRTSLMNQIRSLLLERGHIVPQGRAKLAVRLGEMLDGDEPVLGHRIHRLVSDMRLRWIALDERIADLDAEFIEAARADERTRRLLTIPGIGALNATALVAAVGDARTFGRGRDLAAWLGLVPRQATTGGKPRLLGITKRGSRYLRKNLIQGARASLPTMSKSDTRLGAWLRGLLARSHPNTVVVALAAKMARIVWALLRHERTYETVAQAA

SEQ ID NO: 380840 - protein, 352 aa, unidentified
MMEMIAMLDHQPLFAALDVSLEKTTVCVMSLDGAITKEAVVATDPEAIATCLSDDLGRLERVGVEAGPMSEWLVRGLADLGVSVVLMETRQVRAALSAMIVKTDRKDARGMAHLLRTGWFRPVHLKTVDAREQRAMLSARTTLVARLKDIENSVRGLLRGFGLRLPKALRGRWDAGVREAVAGHPTLLQILEPLLVARGALREQLILLDKRVRDAAKADRVCRRLMTAPGVGAIVAMTFRAAVDQPDRFRSSKQIGACFGLTPRKYQSGETDRAGAISRAGDASVRVALFEAAHVIMTRSAKWSKIKAWAMNVAKRRGAKRAKVALARKLGVVLHRMWVDETDFRFGQPAQA

SEQ ID NO: 380841 - protein, 294 aa, unidentified
MNTTQVFEKRKIAVAIGIDLAKDHCDVVAYNADNKICFTKANWAYPHLMEWLANAQPAVVLMESCKGCHVRARDIADLGHDTRLVKGADVKALRNVCQKNAIRDADYIARLLYVPGTKFVFVKNQRQQSLQFLQNEYKSIQELRIQVGNQIHAGLEEFGCPGPKSKKIIQSRMMAHLEKNAELIPDEVMSSFLRRREMWLNLFEQEEEAKKRMEEITKTDDDAQRIMTVPGVGAQTAVGMLVHIRGDIGRFKNSGQFAASIGLVPKQNSTGGNTTLNGITKCGPKRLRANLVQC

SEQ ID NO: 380842 - protein, 376 aa, unidentified
MGTPSAQTLDDVGVREIFQELEEVPLMTMVGGLDVHRAQITFDYVDDDGLVHWGQIRPATRKTLRGWLAEHCPDGDAEFALEGCTGWRYVSEELAGAGVGVHLGDPAEIAVLRGPKKRAKTDRADARLLRTLLLQGRFPESWIAPAHVLEIRTLGRLYCTLMDERRAWQQRIHAQLFHQGCPPVRALLSVTGRAALAGAELSAVGGQYVDTALGRIDELSTEIEPLRAQLVNFARHQTGCQALQRHYGIGWLCAAIIWAEIGDARRFSSPDQLVRFAGLDVTVYSSDGKRSPGHLSRQGSPELRWAAFEAAKCAARRGSPDYGYYRKLAAKRDGHNGKNPTLAVERKILRRCHHTLRELGDAAVALPVAEPQEVAA

SEQ ID NO: 380843 - protein, 433 aa, unidentified
MGLIVPTVMQPERADQPPSYDGFVGIDWGSQQQQVSVLDRDRRRIGERVVDHDGASLAQFVAWLWGLSAGQPQRVAVAIEVPRGALVEGLVERGFHVFAMNPKQLDRFRDRHSVAGAKDDRRDAFVLADALRTDQPSFRRLRLDDPQLLVLRELSRAEETLLEAFRRSANQLRDQLHRFYPQMLQLCSAADAPWLWDLIDLAPTPAHAALLREEQVQGGLKAHRRRRLKAHEVLACLQTPALPVAPGAVQAAQAHCRFLLPCLRVLAEHLQACGQQVGALLHTLAEMPGEGEGPSDVAIVQSLPGVGRKMTAWLFAEAAQPLAERDYQVLRTHGGVAPVTKQSGKRRVVVMRRGCNPRLRHALYHMARVARQRDAHFNSVYAALRAKGQRHGQALRSIGNRLLRILMAMLRHRTCYDASRIHCEPVVQMGETI

SEQ ID NO: 380844 - protein, 410 aa, unidentified
MLKIVYPVCCGIDVHKTFIYCCIATTDNKGITTYKSNRFSTFTNQLKRCATWLKENDCKDVCMESTGKYWIPVYNILELSCNIVLTHPKYVKAIKGKKTDKRDAKWIADLFKHDLINGSFIPPADIHQLRDLTRYRNKLTNFIAGEKNRAQNCLTVSNIKLDYVFTYVFGKASSSIINTLLLNPSEKITDVSKFRTRGMKSTDEEILAAIDGNICNEQAEKLKIIRSHMDSIEECKANLESVILNLAEKYLPKLNLILSVLGIKSFSAVSIILEIGVDMSVFPTSKHLCSWAGLTPQNNESAGKKKTTRISRGGAYIKPLLVQCALAAVKSNKHPKIRNRYLALKKRRGHKKAIIAIARTLLTAIYNILKKNEPYNPDLYKKSDLPPQHKTVSFDEAVFILQRQGYIITS

SEQ ID NO: 380845 - protein, 338 aa, unidentified
MNLSRIGLDLAKQVFQVHGVDRHEHVVCRRQLKRAQVRDFFRQLPPCLVAMEACGSAHYWARELRELGHTVRLIAPQFVKPYVKGDKHDAHDAEAICEAASRPSMRYVPVKSAEQQAVQSMHRVRSRLVRARTALCNEVRGLLGEFGLIATRRGRAATMALLETVTATEPAPLPAPMGELLRELKDELQTLEARIARLERQIQAHVRGDARIQRLLAVEGIGPISASAVAASAGDARQFRTGRQFAAWLGLVPRQHSTGGQQRLGNISKRGDTYLRTLLIHGARAVVRCCANKTDARSRWLQGLLQRRPANVVAVALANKNARILWALLSRETCYRPG

SEQ ID NO: 380846 - protein, 461 aa, unidentified
MAKRRSPAPRRSNTPSSPNPQPALTVTNPRAAGIDVHDAVHWVAVPPDCDPQPVRRFGTFTADLEALADWLTACGVDTVAMESTGVYWIPLFELLERRGFRVFLVDARAVAKVDGRPKTDIHDCQWIQRLHSYGLLEKAFRPQDDIVVLRGFVRQRQNLISYASQHIQHMQKALVEMNLKLTLVVSDIVGKTGMAIIKAILAGRRDPVELAKLRDERCKHTEEEIAKALVGNWREEHLLALRQAVELYEFYHCKITECDQAIDDYLSRLPNRTGGKPLESPPPKRKNKDNEPMFDAQKRLYEMLGVDLTAIDGIGVGVALIIASEIGHDVSAFRNEKAFSNWLALAPNHKITGGKVKSRKTRPGANRIATALRMAAASLLRTPTALGAFGRRLRSRVGSPKAITAIAHKLAKLVYRMLKYGEDYVKQGAEEYEAQYQERRIAGLRRTAAALGFRLQPQTAQ

SEQ ID NO: 380847 - protein, 476 aa, unidentified
MVVPNQEPKKPSKPKKPAKPNESRARSLPVPVPASSEALNVINPDAAGIDVHSDMHMVCVPADRDANPVRQFGANTADLQEIVAWLKECRVKTIALESTGVYWIPLFELLESEGFAVNLVEPGQLSRCGARPKTDVLDAQWIQRLHSYGLLRGSFRPPDSVLALRAYWRQRQMQVRYAAYHVQHMQKAMEQMNVKLTEVVSDITGLTGMSIIGAILNGERDPIKLAKLRDERCHHSEDQIALALEGTWRPEHLFELRQAHELYRFHHQQITECDQQVQAELAKFSNRAGEKTRTAKSRTRGRKSNDVRFEATGPLFQALGVDLTLIEGIDVGTALVILAEIGVDVSRFPTEKHFASWLRLCPPQDESNNTKRRRGHRKATNRVTIALRMAARSVGKTMTPLGLFYRRIRSRIGGLGAVKATAHKLACLVYRMLKYGQEYVTQSMEEYEARIKANMLKTLKRKAAAMGFQLSPLPIE

SEQ ID NO: 380848 - protein, 447 aa, unidentified
MRIVYQRCCGMDVHKDSVTACLLVINQSGALQTEKRQFGTMTRDLRQLASWLASEGVQAIAMEARGVYWKPVWNILDAEKKFELLLVNAQHIKCVPGRKTDPKDSEWIADLLQHGLWRASFVPPVEIRRLRDLTRMRTKIRQTLASFANRIQKVLEDANIKLGSVASDVLGVSGRHMLKALLAGEQDPQKLANLAQGHLRKKLVPLQRALEGHFTEHHRLQLKFLLEFVEFGEKQLSNLDSEIQLLLTPVQAEPSVPQGDGTLGESKGSPPHATSRLQTAVELWDSIPGIDQLAATTLVAEIGANMDQFPSARHLAAWAGLCPGNDESAGKRRSGKTRKGSVWLRRALFCQAAWAASRTKNTYLAAQYRRLIVRRGKKRTIVAVAHSRLIVAYCLLKRQCVYQDLGANYFDRVDERALTHRLVRKLIGLGYQVTLKPGGAEAAPETA

SEQ ID NO: 380849 - protein, 416 aa, unidentified
MNAVGIDVSSRKSTVAVLRPLGEVVCLPFDVTHDIAGLASLVEKLKAIDGETRVVMEHTGRYYEAVEKALHEAGLFVCAVNPLLIKEYGANSLRRVKTDKADAIKIARYALDNWADLRDFTPMDAIRYDLKTLNRQFQLASKQRTASANNLIALLEQSFPGIRKCFDSPVRSDGTQKWVDFAHSFWHVDCVRKQPFPAFCERYRKWCKLHAYFFKLRNAEKVYALAKSAIVLTPKSKVVKVLVQEAANQLISISRSVEVYRAEMDRLAAMLPEYPVVMAMYGVGKSYGPQLMAEIGDVRRFERKQALVAFAGIDPMPNQSGDKNVRSNKSSKRGSPYLRKTLFNVIRTYLQCAPQDEPVFQFLNRKQAEGKPFYVYMLAAANKFLRRYYAKLRDYFASLDTLQSVDPIPATLKASL

SEQ ID NO: 380850 - protein, 413 aa, unidentified
MASTSKLWVGIDWSTELHQVCVLRENGAKLCERAVRHAPESLAEMCAWLAQLGCEESASVHVAIEVPHGPVVEVLLERGFAVYSINPKQVDRFRDRFSPSGAKDDRRDALVLADSLRTDMRAFRAIKPDSPWIIELREYSRMHEDLVHERTRITNRLREQLRRYYPAFLACFSDPGESVALDLLKVVPTPELARKARTAKIASILTARRIRRIGPEEVLAKLREASFVVAPGTVEAAVAHVQLLVQRLELISSQVALVKHELERCLESAGSSGPDAEVEQRDVEIMLSMPGVGTIVGAALLADAWRLLRARDYHGLRALCGIAPVTKCSGKKHIVSMRKSCHLGLRNAIYHLARVASQRDPASAERYSAMRARGHGHARALRTIGDRCLNVLCAMLRDGTTWRPRDPDAATAA

SEQ ID NO: 380851 - protein, 368 aa, unidentified
MFEHTFIGLDVHAVNVVGHALNPDTGEIRDHSMAADPAVVLEWVHRFDPPVKVVYESGPTGFVLARYLRAAGIDCVVAAASKLLRAPGDRVKTDRRDARVLAEMLAVGAVTEVRIPDPEEEALRDLSRLRSGTAKDLAHARQHVNAILLRHGIRYPKDTRWTKEHRLWLHRQRFEEPALQFTFEADVEQAELLTGQLARIDQQVTVTAASCRYTPVIEALMCLRGIQITTAFGLAVEIGDWTRFTGSSIGSYLGLVPSEESSGQSRHQGPITKAGNTYARKLLIEAAWQHRRPYARPGERLLRQLNRVAPATRIRALEGNHRLHRKWEHFDERHKMSVKANTAIARELAGWCWSLAAPLQQGEHMAAA

SEQ ID NO: 380852 - protein, 358 aa, unidentified
MINVGIDVGKRFCQAALKAEDGRLLDELRFENTSQGVHELLTRIKAHGEARAVLESTANYWIRIHDMLEDHAIDTILANPRKTKLIAEAKIKSDKLDARTLATLLQGNLVFESYVPPKAKRENRILVRHRAGLVKTRTEIRNRIHAILAKHELHHNYSDLYGKQGLQWLEGLELKGADQTVLKTNLALLKTLDEQIKTVTVEIAKTACNQEDIRILITLPGIDFYSAMVIASEIGDVKRFPTQWKLVAYAGLAPTQHQSGEYEQRGGITKEGSKWLRWILVQAAQHARQHDPRFKTYYDRVAKRRGPQKAIVAVAKEMLVVIWFMLTRREAYRGQNEQLVERKLKRMNTLVEPGLQTA

SEQ ID NO: 380853 - protein, 332 aa, unidentified
MVNWQYFIGIDVASATFTASVGQRPWQVVAKPQEFENTQDGFHAFISWLAEHKIIEKKSVACMEATGVYGEELAYFLAAQRIAVAVEPPLKVKRAFKPQGPKTDAVDSQQIAEYACRFADQLHLWQPDREILEQIQVLLTTREQFVRQRTAHKNALAALQRKVVKTPAANQAHKQIITSLGREIQTIESEIARLIDNDPDLRQKLALLLTIPGVGLLLGSHMLLLTRRSQNPRQLAAHLGVAPHPHQSGSSVYRKTHSRHFGPSTPRKLLYLAACSVRTHHQGFATYFKRKTAEGKAPKLVLNNIQNRLLKIICAVLRDQQPYIPNYRSVHP

SEQ ID NO: 380854 - protein, 357 aa, unidentified
MQSSNVKYIGLDVHKEATTVAVRNAAGKLVMESIVETKARTLIDLLDGLRGELHVTLEEGTWAAWLYDVLKPHVKEIVVCNPRRNALLKEGSKDDRVDARKLSELLRAGMLRAVYHGENGLRTLRELTRSYQVVGKDLMRVMNRIKALYRSWGIPCTGTQVYTRRHRELWLNKIQEAGVRRRAELFYQELDGLQSLRRIVRREVLAESRKLPAVKLLRQIPFIGPLRAAQLVALMQTPHRFRSKRQLWTYSGLAVVTHDSAQYRYVDGQLQRSKKPQQVRGLNQNHNHMMKEIFKSAALSSALHPGPFQDFYLGLLAKGMKPEMARLTLARKIAAITLTLWKKGACFDVSYVKSQAA

SEQ ID NO: 380855 - protein, 427 aa, unidentified
MNLTQNEKIRQVQEDTIIIGVDISSEVHYARAFDWRGIELGRVFSFENSEEGFERFLRWINELKVKHGKTAVLTGAEPTGHYWFSLAVYLKKRGMKIVLVNPYHVKQSKEMDDNHPSKTDRKDPKVIAKLVIEGRFSEPYIPEGVYAELRVAMTCRWRILKELTSAKNQIRRWLKIYFPEYGKVFGSFDCISSMIILREAPLPADLAALGADGINALWRKAKLRAAGTKRAGRLYEAAKHTVGSSEGGEAVRMELQFLLDDYDNKQKQYDEVMAMVARLLEEIPEAARLMEIKGVGVVTAAGFLSEAGDVRRFQSPRQIQKLAGHAIRENSSGKHKGQTAISKRGRARLRAILFCASIALAAKNPEFKAIHHYYTTRDRNPLKKKQSIVALSCKLIRVFYAILTKGTAYDPEKLLGDIKRQPSAVAA

SEQ ID NO: 380856 - protein, 417 aa, unidentified
MDTIYSKVAGLDVHLKSIKCAVRCGQTTGKLFQEVRSFGTMTRDLRAMADYLQSLGVTHVALEATGVLWKPVWNILDGRFTLLLVNPRHLKKVPGRKSDVTDAEWIAQLLQHGLLRGSFVPPRAVRELRDLTRHRAQLAAEQTRVANRIHKVLEDCNIKLGAVASDVLGKSGRAMLRALLRGEQNAEQMAELALGVLRKKLPELRLALEGNCTPHHRFLLERLLSHLNYLEEQTERFSAQIALRLPPLLSAEDQQRLDAIPGVNRTTIENVIAEIGPDMTVFADEHHLCSWTGICPGNEESAGKRLRSRTRKGNRWLRRALAESAWAASHTKDTYLATQYRRLAARRGKKRALIAVGHSILVIVYHVLKYHVQYQDLGADYFDRLEPERLRRYLVRRLQHLGYEVALTTKETEQAAA

SEQ ID NO: 380857 - protein, 425 aa, unidentified
MEVIHRRCSGLDVHKQTVVACVRLVLDDKITREVRTFETTTSGLLLLLAWLTELGCTHVAMEATGVYWKPVWNILSDGDFELVLANAAHIKNVPGRKTDVSDAAWIADLLAHGLIRSSFVPEQEFQELRELLRTRKQLGRQQSSHIRRLQKTLECANVKLDSVITDLVGKSGRAMLQALIAGETDPVKLAALADRRIKASAQELREALRGRVTDHHRFLLHLHLQHIDFADSAIQDIDRNVTALITRMDQEVEAGQTRATFQSLILLLMTIPGIDVLSARIILSEIGRDMSRFPTAGHLLSWAGLCPRNDESAGKRRSTRLRKGDPWLKTLLVQCAWAARRKKGSYFNAQFLRLRGRRGPKKAACAVAASLLTTIYHMLKDGTQFQDLGADHFDRRSKDVRAKRLVAQLANLGFNAKLTPLAQAA

SEQ ID NO: 380858 - protein, 457 aa, unidentified
MYRELHSLRQALQPELKDTLPPLTGVEPDKVLETYLNQLTGYVGLDVADQTVTLLAINANQEELGHLLEVPNAPPGYARIGDWLERLRVQHHLRIIAVACEATGVFYWSLWDYLAQRPNVARVLYNPRTTEHMGAVLSKRVRTELVDARLLAEQLRLGSTPEVVLTEDADLLSARLCSRAARDEAQSINRKKNQLRALIRGYNPAVSRVFPGAKFHHPAVYALLQQWVFPEEVVAAGVEALTTILTKHSRSAFGADQAQTLVDQCRDLVSRPIRCEVVHQRVNALIAAIGLTRQHQKALLKTGYALVKERPEAKLLKASTGAGISNTLALVSEVGDIRRFPDGEHLASFLGLTTSKHISGTTIYQSKHITKQGSPNGRYAAVNLAWHLSLRVPKYQTRYQSIKARKPPRKGHRTALVAIARDFVTDVLYDMWHDQRPFFVHVEDYRQYRREHPRAKS

SEQ ID NO: 380859 - protein, 330 aa, unidentified
MTDASREQTPPAMLDFVGVDMAKQAFVWSLHGVRGTSSASNDEAGFEALLGALKGRRIGLIVIEATGGLERALARFLLQHGLPVAVVNPRAARDFARAMGHLAKTDAIDAVALAQYAQTLAAKADQAGVLFAPASAQLEALQAMVSRRVQLLGMRTAEKNRLGGAIRVLQKSIEAVIKTLDKQLATLDKDIDAHLDLHFKEQTKRFEAIKGIGVTTCATVLAFMPELGQVACARAAKLAGLAPLNQDSGKARGKRKVWGGRSIVRSALYMATLSAVRYNPVIKAFYDRLLAAGKPKKVALTACSHKMLRILNAMARTGQPWNDEFHAVNP

SEQ ID NO: 380860 - protein, 372 aa, unidentified
MKKSSTTLFVGLDVHKESIAVAYAPQGPGSEVVALGNIGTRQCDIDKLLKQLQGKGCLLQVVYEAGPCGFWLQRYLSQHGVSCRIVAPSLIPRRSGDRVKTDRRDAVQLARLHRAGELAPIHAPDIEDEAMRDLSRGREDALRDLKAAKYRLKAFLLRQDIRYEGLARWTPAHLRWLARVVCPTPAQQIVFQEYLRTINEQSERIARIEDALREQAQSWRLRPVLEAIQALRGVQFTTAVTVIAELGDLTRFDHPRQLMSFLGLTPSEYSSGAHRQQGGITKSGNTHARRVLVESAWAYRHPAKLSAHLQRRIEHQPKVLQDLSWKAQVRLCKRFRQLSARGKHVNEVVVAIARELSGFLWAIARSVPLPSH

SEQ ID NO: 380861 - protein, 340 aa, unidentified
MARIICGVDVASRTLQASIRPGGAQAVFPNHPEGIRHLAAFCQQHQVELAAMEATGGYEQQAFALLSAQSIPVAILNPRAVRQFAQSMGSMEKTDAIDAALIAHFAEVKRSKPTPPPAPDQQHRRALVTRLRQLTQVRTAQLNQRRLITDPIVLASFEELLALLQQQIQSLEQQIAALIQKDPLWQHLDRDFRSIKGVAGRTVARLMAEMPEIGTLSHKTISKLAGVAPLANDSGKHQGRRVVRGGRAPVREILFIVASVVGRYEPDFIAFQQRLRAAGKPPKVVRIALAHKLLVRLNAKARDVRRQLHALQTQASHPNPATIPALSPASISATYAQTTA

SEQ ID NO: 380862 - protein, 428 aa, unidentified
MTAQGKCSGEVARVAIDVAKAWNAVLMETAAGKRQRFRVANNRSDHDRLVQLLRDQNVRCQIALEPTGNYHRPLAHRLLCEGFEVYLVSSVAAARFREAMFNSWDKNDPKDAAVILELLQQGKVQHYHDPTVEGIQDLQEISKTYVQVTRARTQLQHSILTHYLPLYWPEFGRYWHSSRADWFIRFLLRFPIPEAARRLDREEFIAEAGPLVGRKVNKRAKLEEIYELAGESIALPMDPEGLAVRTFRLQLQRYLELNGIRKQLEQWAEKALEANEDARLLRSIPGIGPVLALVILAEAGDLRRFSHHRQFLKFCGLDLAKSQSGASRGREKLSKRGNARLRYAFWMAGGVAIRMRENSFREKYQRYTRSDPTDPDLKRKAFTAVMAKMARVAYAVVKTETPYRTYFETAVPSGSIPLSRAVEAARTS

SEQ ID NO: 380863 - protein, 347 aa, unidentified
MAAVMIGIDPHKGSHTAVAIGADEGPLGELRVRASAGQARRLLAWAVAWPERTWAIEGAAGLGHLLAQQLLAAGERVLDVQPKLGARVRLLAAGAVNKNDPNDARSVAVAALRSASRREVAADDHAAVLKVWAKRHRDLGRARTQVACRLHAVLCELIPGGVSKRISAALAGQLLEGITPSGAVEAARCELAAAFLDDLRRIDAQMRDAKNKLTAAVQASGTTVTEVFGAGPIVAATVIGEVRDVSRFASQDHFAAYNGTAPIEVSSGRRKIYRLSRRGNRRLNHAIHMAAVTQVSHRHSPGRAYYDRKLAEGQTPKEALRSLKRRLSDVIFARLQADAHRAAAGPR

SEQ ID NO: 380864 - protein, 248 aa, unidentified
MNTNTLQNINVGVDTGKSQLDIYIRPLDIYFTVPNTDKGITDAINTIKKHKPQRVVIEATGRLEMPFILACDKAKLPYVVANPLRIKRFAEAIGQRAKNDRLDAALIAHYAERVQPELTKLKSENIRLMSDLVTRRNQLLTMQTMERNRLQILPKNISSAITPILTALKNQLEKVEAKIARLIERSPEYQAKSTILQSMPGVGKVLAASLISNVPELGIITNKQASSLVGVAPVTRESGRFRGLRSNR

SEQ ID NO: 380865 - protein, 434 aa, unidentified
MSFKILKNNCCGLDVHKTWIFACIGITDSHRRTEYKHARFSSFTKGLQELCDWLAKYNCTDVCMESTGKYWIPVFNVLEKNNIWVTLSHPKYTKPQKGNKTDRKDAKWVCDLYMCGMVKPSFIPPADIRQLRDLVRYRFKLTCMITSEKNRAHNCLTISNFKLDEVFSDIFGKSSRSITEQILQHPGETFDVAQFVDGRCKTPIEEIQAAVDGRCKTPIEEIQAAVDGALSTEQAVKLRQCLNHIDELEKHQAEIEREIFRLSDKYEEVLNLIRTVPGFDKNPMTAIQVLSEIGGDMSVFPTAKNLVSWAGCCPRNDQSNQKIKSTRISRAGSYFKPVLVQVANALIKSKKHPEFTTRYRRIKARRGHKKAIIAICRMILTAIWHILTDLKPYTTEGFLESRPVNDSKILTTSQALNLLKQRGYVIKDDIVSVP

SEQ ID NO: 380866 - protein, 311 aa, unidentified
METKQPAYVAIDIAKDSLQIQTDHAAWSVPHTAAGHRQLLERLQPLGSVQVVCEASGGYEQPLLLFLHQQGVPVSLVNPARVRAFARSEGQRAKTDPLDAAILLRFAHEKHPVPPPPPAQQAALAAWLDRRTQLSEQLAREKNRLQKSPAVLHPTIRAMIGFIEDQLADVDRQLHSVVQADATLRDRAAVLQSVTGIGAVTTWSLLAYLSEIAAADWHRNQLVALAGLAPWNRDSGKWKGKRSISGGRGKVRHCLYMAAQSAAQHNPVIREYVQRLIAHGKPYKCAIVAAMRKLLIHLQSLLKHHQNALAS

SEQ ID NO: 380867 - protein, 475 aa, unidentified
MNIKGTKKKNQVVTVNIFEQQELLKKAEVIRENLTASTWRELETNGKFGKNEKLSFVSDDMLILGCDVGSDTHYVRAIDTRGRELSKSAFPFSNTLEGFQSLMDWATKIAASNDKKQIILGLEPTGHYWFCLATWLIGNGISVVQVNPYAVKQTKEVEDNSQLKDDRKDPKLIANLVKDGNFGMPYLPEKLYADIRRLSMLRDQINEDRIRDLNRLHREMKIYFPEYKDAFGKIDGTFCLEVLRVAPFPEELVTLGVEGIRQIWHEAKLRGRGYVNATSIFENAKKSIGIQDGAESGKLAVKWFVHRMMESNEQLAEIESRLHQMCMEIPYAENILEISGIGENTLSGILAEMGDISRFDDVKEIQKLSGLGLVACSSGKHKGETKISHRGRKRLRYWLFQAAKSAVAHANEFKELHAYYTTRKDNPLKKKQSLVVIACKILRVIFAILTKGTPYDPKKMLGDIVRPNEQSVQVA

SEQ ID NO: 380868 - protein, 341 aa, unidentified
MNTSKTVVGIDVAKRVFQLHWLDAETGKTVSVQIKRERFLEHFADRAPCLIGMEACGGAQHWARQRVAMGHEVKLMPAKVVRRFVGGNKSDVHDARAIWTAVQQPDVRAVAIKTEGQQAILALHRMRQQLVKFRTAQINGLRGLLAEYGEVMPRGEGGIKAGIAEALQRLADRLPAMVIDTLRDQWGRIGQLDAQIGEIERRLRAWQQEDRACRRIARIPGVGLLIATAAVAMMGDPRAFRSGREFAAWLGLVPRQTGTGGRVRLLGISKRGDTYPRTLLIHGARSALTHAKEPDPWIAALRQRRPLNVAVVALANKMARTIWALLAHERTYQKGFASRAA

SEQ ID NO: 380869 - protein, 363 aa, unidentified
MTVYIGVDFHPYEQSVAYASDEDGEIGYRRFLHSDKQSIRAFYRKCGADAVIGVEATGCLWWFEKMLASGGHKLKIGDPRMIRRAALSRHKNDFRDAETILDLLMRGAFPSIVPRSEESREVLDLLHYRQTLVQKRTSIANQLQAFARGKGLARFRMPAVKGRRKLVDAPVTEIETLLVTSRLVLFDELTAQMKALESRLEKLAAADERARLLMTHPGIGVINALALVHTLGEVRRFRRKEEVVAFVGLDPLEKSSGQTKRIGQISKHGSRLVRHLLGQAAQACRDHRIRKFYLEVSRRRGRPKAKVAAARKLLINCYVMLRDGIGYEEFQRRGEVGLCEGSGEVRAKASVSGGLRARPAISS

SEQ ID NO: 380870 - protein, 349 aa, unidentified
MSRKQSNPTVIGIDIGKNNFHLIGLDDAGEIVMRRKLSRRQLAERLVNLPTCLIGMEACVGAHHLCRRLLALGHDARIMPAQYVKPYLRGQKNDYRDAEAIAEAVQRPRMRFVTLKSVEQLDLQSMHRVRSRRVRHRTSIINQIRTFLLERGIPVRQGARFLIAALPEILAQHSDLLSPRMEQILMDLCDELHRLDGRLKSITEEIEAIAEANEACQRLMTVPGVGPVISSAMVAAVGDGAAFDRGRDFAAFLGLVPKQMSTGGETILGRISKRGNTYLRTLFIRGAKIILMHSKNWPKHRFGPWLEAASKRMHKNVLAVVLANKLARIAWSVLRHGDDYDPKGAFPAA

SEQ ID NO: 380871 - protein, 323 aa, unidentified
MSSSSQAQTGCYVGIDISAERLEVQVLPTEQRQSVVSDHTGVTQLVGFLQPLKPTLIVVEATGKLEIPWVAALAAAELPVVVVNPRQIRDFARALGVLAKTDRMDAWVLARFAESVQPPPRPLPSEQQQAMQELVSRQRQLVEIRGAESNRLRRTRTTAVRHNLQIHLAWLDKQIQQIDRQIRQLITESPWWSQKDQLLQSVPGVGPKLSSVLVAHLPELGQLNRREIASLVGLAPFNHDSGQWRGKRFIGGGRSKVRCTLYMSSLVAAYHNPVIRALRCRLQGSGKPFKVVLTACMRKLLTILNAMVKNGTPWNSALCRTFS

SEQ ID NO: 380872 - protein, 393 aa, unidentified
MICVGIDVAKDKHDCFILSSEGEVLADVFTIPNNAEGFDTLLQTIRRCARPEDKIKVGLEATGHYSYNILGFLLNEGLDTYVINPLHTNLYRKSLSLRKTKTDRVDARTIAAMLMSDVDLKSYTDTAYHNEELKSLTRYRFDKVRERAKLKQSVSRLVTILFPELEKLVSTLHMASVYALLSEFPGAKQVSEAHLTHLKAVLYDASKGRYGSDMATTLRDAARCSVGSVMPAKSLELRHTIRLIHELDAEIEDIEAAIQSMMDEIQSPITTIPGMGVRTGAMILAEIGDFSRFDSPDKILAYAGMSPSTYQSGQLSLSGAYSHMEKRGSRYLRYALYNATKYVCLWDPVFAAYLAKKRTEGKHYNVALSHAAKKLVRLIYAMEKSRQSYRNAA

SEQ ID NO: 380873 - protein, 319 aa, unidentified
MSKSILGIDIAKRTIDVALIFGAKILTKQFNNSPKGFKLLNAWLKSLHLKQVHVCLEATGSYGDAVAHFLHEAGHVVSVVNPFRVKGYAVAKLQRNKTDKADARLIADFCLTQNPGQWFPPTPQVAELQALTRRIEMLEEMLQMEKNRLSVSPAKTKPSIKRIIKTFAKEIENLKANIKEHINQNPDLKEQDTLLQTIPGIGEKTSHLLLAEIEFSRYDSARQIAAYAGVTPRKGESGTSLDQTHLSKQGNGRIRKGLFFPAIVATRHNKIINQFASRLEKNGKTPMQIVCASMRKLLHIAFGVLKHKSPFNPNLAFTS

SEQ ID NO: 380874 - protein, 433 aa, unidentified
MNTPHPFDLVIGLDRSDRKADLHLLNTRSGQADKQIINTSPEALHDWLAQLRQQHPEGRVALCLEQPAASLILFLETYSWITLYAINPITLQKFREAFVTSRAKDDGKDAQYLAELLLTHHHKLKAWQPDDPQTRQLQQLVRHRRAVVDERTGLSNRLKALLKQYFPQALELCGEDLWRPLATAFLRKWPTLQSLQKAKPASVKQFYYRHGSRSQKLIEQRLELIEKAVPLTEELAVLQSHTLRVQLICRELDLLHQTLEQFDQQITEVFGQHADREIFRNLPGAGPVLAPRLLASLGSERERFAQAKNLQSFSGIAPVTKQSGGKCYVHRRYLCPKFFKQSFHEYAKESIRHSRWAAAHYWQQRQKGCGHHTAVRSLAYKWQRIIWRCWQSRTIYQEEIYEAALKKSGSSLVALLDQIELGKSPIKTLAKKS

SEQ ID NO: 380875 - protein, 373 aa, unidentified
MPKYSTAFGMDVHLRSTTVCALDADTGEAVTRRFPGNPWGEIAGWMDGFPGPSLAAYESGYLGFAPQRELAGLGVECVVAAVSKIPRSAADSASKNDRNDAARMAKAILAHDISPVWIPSPEVEGIRDLAGAYDGATARLATAKQRLLAFLARRGFVYGGTTPAGNPRKYWTYDFLRWLDKVRPEDDGGVRTLAALRNEVEAAAEARADLLSEYGAAVDASPIAAEVAALQSIKGCAFALAAAFSAEVGDFTRFRSGRQVTAYFGLAPSQRSSGDSVRLGGISGAGNALVRKLAVEGSWCYAAARHQPKLMPRDTGVPLEIRMHGRKGSERLLRRREEMLARGVPAAKANAATAAELVRWLWALGMMCREGAE

SEQ ID NO: 380876 - protein, 345 aa, unidentified
MDQYAGIDVSLELSSVCIVDAQGKIVKEAKVASEPEALVTFFETLGFAVKRIGLEAGPLSQWLHAGLKRAGFEAILLETRHVKAALSAMTVKTDRKDARGIAQLIRMGWFRPVHAKSMGSQEVRALLVARKQLLGRLIDVELSIRGILRGFGLKVGPVTRKNFEARIRELVTGQATLERIATAMLSARAALKAEYAKLHKAVLTIVRDDAVCRRLMTVPSVGPLVAITYKSAIDDPHRIAKSKAAGALFGLTPKKYQSGEKDVTGGITLAGDEMVRTALYEAANVLLSRITRFSKLKRWGMDVAKRRGSKRAKVALARKLAVILHRMWVDGTTYRWAEAAEPIAA

SEQ ID NO: 380877 - protein, 419 aa, unidentified
MTSWQELVHFGGFDWAKDHHWVVIVNSQGQIVAELEFEHSAEGWKSFEEKTAAWPHLAMTIETSHGAAVDQLLQRGYRVYPVHPVAAQRYRQRKAPTGTKTDHLDAWALADALRMDGQGWKALTPADPLTEQLRLLCRDEVSLIEQRTALVNQLQQALSEYNPAALEAFDDWTQRYSWEFVLAFPTPKRLVEAGQRRWEKFLHTHRLWRPETVEKRLAIFARADEFKASEPIVQAKSHLAVAICKLLCTLDQQLKVYRKQIEQLFNQHPQHELFGSLPGAKKVLAPRLLAAVGNDAQRYGTQEVLQAFAGTAPVSYQSGNINKVRVRWCCDKFLRHTIHLWADCFRRASAWGQTYYQQKRDRGMSHACALRCLGQRLMKILFRMISNRTPYNAELHARNQQKHGSWVLALLNKPAPQTV

SEQ ID NO: 380878 - protein, 396 aa, unidentified
MTTIGIDIGGRIHVAARCRDGQARADREILRVSQDRAGFTALDAWLLRQPEPVTLVTMESSGHYWMPLASHLCRRDVPVAVVNPLAAKYFARSRLGRTKSDPADARSLAEMAMRDTPDARDPLAGVELRQAARFAMTLVTEQAKVCQRLVRLVELGFPELGELFDDPTCRTAREVLRIAPTARAATRRRTTTLANANGSPGHRRLGQAKAERLQAAAAGTIAVPELDAEVAFEVGLLLDQYDLLERQITDADHRVAGLLDGELARRLQTIPGVGPSIAATLVSEIGKIERFDDLDQLLAYAGVHPAERSSGRKGANPETSWHMSKAGNSHLRAAAYRMAVVGVQHNPVIAAHYARKRAAGKSKMNALGHCMRKALAIVWGVWRNGQDFDPNWGVEA

SEQ ID NO: 380879 - protein, 432 aa, unidentified
MKKKNIYVNQSQELLTLFEEAGNSAKIMCVPIDYAKKDHVVMFCNGHGDILRKPFSVKNNPEGVKYITEQVSRSCRHHKINQNHVFFGGEDVGYYAENFASTLRSGGWLVAGVNAHDAKKQRANLQASTDRLDLMGIATMLLNRRANCSPAQSGIYRNLRTLVRHRRRLVVMTTEVRNRIHAIADRLFPGFLDERKSGITPFSKSSLYLMENRFSASQIRRRRRSTLIEALRGLGTPKPDCAVAKLEEYAQQVLKTPDEYVSTLQLSMAQHVKHYRCLQENIEQLERETALWLAQTQGAFLTSVRGIGIVLAAGVTAEIGDPFEQKPLNNLVSYSGIIPRVIQTGGPEGEIYTGKVAKRSNRILKDYVVQSASHLGLHGPEDLMIDHKRRDAAGQHADFGIARRYLRMAMCLMRTSQVYLPPRLRKPGIKPE

SEQ ID NO: 380880 - protein, 418 aa, unidentified
MSWAGELVRLFVGDDWAEDHHDVELMDAAGRVLAKKRLPEGVAGMARLHELIGEQLGEDADDAEVAVGIETDRGPWVLALVAAGYTVYGVNPLQASRYRERHGVSGAKSDSGDAHMLTDMVRTDSHQLRAVAGDSADAEGIKVLARTHKTLIWERARQVQRLRHQLREYYPAALEAFDDLDAPDTLELLGKAPDPARARKLTRAQVSAALKRARRRNITDKATAILAALRSEQLGQPPAVTAAYASTVRSLIAVITVLNEQVKTLQGQVEADFGRHPDAEIYRSQPGLGAVLGARVLAEFGDDPHRYADGKARRNYAGTSPLTRASGKKKVVAARFIHNDRLVDALNAQAFASLKASPGARALYDDLRARGIEHNDALRRLANRLVGILHGCLKTRTLYNEATAWSHRQNLPQSSVAA

SEQ ID NO: 380881 - protein, 371 aa, unidentified
MDEVSAFIGLDVHKETVSVAVAEAGRNGEIRHLGNFRNTPDAIGKLARRLGRLHGAVEFVYEAGSCGYAIQRQLSGLGFVCRICAPSMTPRRPGDRIKNDRRDSIALARLLRAGELTYVWVPDLLHEAIRDLVRARHAASKDVRRARIRIQAFLLRNDLRFVGKAWSHRHRMWLCNRGFAHPAQQIAFQTYLNALEYEERRKLELEAQIKEAIELSPWSRLVRALQALKGVGPIVAATIVTEVGDFSRFTHPRQLVAYFGLAPGEHSSGSSIRPRGITKAGNTTARSILCEAAWNYRTTPKVGQWMKQHRPEVPQEIIEIAWKAQLRLHKTYRRLTSRGKGQSLRQRRSRVSCCASCGRLGEPCQQTADPR

SEQ ID NO: 380882 - protein, 355 aa, unidentified
MNSSKYIAMDVHTATISVAVRDAAGKLIMESVIETKTSTILQFIQGLRGDLHVTFEEGTWAAWLYDLLKPYVTNVVVCNPRRNALLKEGSRNDRIDARKLAELLRTNLLRPVYHGEKGLRTLKELARAYLTISKDLTRVMNRVKAIYRSWGIPCGGQSVYNPRHRKEWLSKITQASVRRRAELYYEQLDALVLLRKQARQELLAEGKKHQAWKWLRSIPALGPIRAAVLMAIVQTPHRFRTKRLLWKYSGFGVVTHSSADHRYVKGQLERSKKPVSVRGLDRDHNHQLKDLFKGAAIQASTRKGPFREFYEALVAKGMRPEMARLTLARKIAVIALTVWKKGGAFDAKYLKPQTA

SEQ ID NO: 380883 - protein, 344 aa, unidentified
MQTMYYIGLDVHKRTISYCVKDGSGTIEAEGTIPATRFDLDRWTKTLPQPWSAAMEATVFTGWIYDHLQPHAAALKVAHPLMLRAIAAAKKKNDRIDASKICDCLRCDFLPECYMASTAIRERRRTLRYRNLLVRQMVQMKNKISGLLMEAGVNYNKQRLHKAGYFRELLATNPDISEGLCSLLRLCRETVVRVGKTESALVRSLERDSLLMERVERLMTIPAVGPITALTWALEVGDPKRFSSIKKAISYCGLCGAEKSSANTVQRTPLSKQRNKHLQTTLIEAAKMAPRNSPELAMLYDQEKQKGNANRATLAVARKLVAYLMAVDRGQRNFEMVETNCIAA

SEQ ID NO: 380884 - protein, 342 aa, unidentified
MEHYAGIDVSLECASVCVVDASGKIVREGKVASEPEALIGWLRTVGLRLVRIGLEAGPLSQWLYAGMTQAGLAMELLETRHVRTALATMPVKSDRNDARGIAQLMRLGWFRPVHCKSVAAQEMRAVLTARKLVQSKLLDVENSLRGILRGFGLKVGKTTKRTFAGRVQDLVINHVGLQMIAEALLSVHAVLLRELKAFEKQVRSMARTDAKAKLLMSVPAVGPIVALTYASAIDDPGRFKSSKRVGAHFGLTPKKYQSGETDYTGRISKIGDASVRTALYEAAHIMLIKPIKGCAQLKSWAMRIARRSGMKKAKVALARKLAVILHRMLANGTPFNATAAAA

SEQ ID NO: 380885 - protein, 412 aa, unidentified
MEGETVIAGVDTHKDVHVLCLLDGLGRKIWSGSFGADPEGYDRLAEAIGDPGSCMVVGVEGTASYGAGLTRRLVELGYNVVEVLRPKRDKVRPGEGKSDPLDAERAARKAASGKGCSVPKSQDGWVEAVRQLYVARRLAVATSTSCVACAKSMLTTAPSALRERFRGRERPKDLMPLLARGRKAGGALEESVLASLRSVAAVWKEARSQVESLDERIRALLEANAPALLGVEGCGTTTAAALVVAAGDNPGRLKGEAAFSMMCGASPIPASSGKTDRHRLNRGGNRQANWALYEIAIKRMAYDERTRRYVARRTSEGKSRREAVRCLKRYIAREVYHVLMDPNPDGAAPEGPELAKMRKAMRVTQKKAAAELGLSAATLGHLERGKRRSTKLERRYYELLCELERTLPQTAS

SEQ ID NO: 380886 - protein, 427 aa, unidentified
MNCTQNQKIDQVTEQTLVVGIDIAKRTHYACFVDDRGRVLRKSFPIFQSKKGFRQLNEAIQEARQAFGKSQVIVAVEPTGHYWLNLACFLEENGIPLVMVNPAHVCRSKELDDNLPTKHDAKDALVIARLAKDGRFLVPRLLHEIEADLRVGSTLKEKLRKEQTAVKNAIIRWTDRYFPEFWTVFRDLGKTALSVLEWTPFSADVAGRTAEELIEVHRQSEGLKCPQKAKIQALIDAAKDSIGVTEGTTMARFEIAALVRQYRPFEAEIAALDAELKALVQTTMEDQGLKTVDGLGDATIIDLLAEIGSFSHYRDPRQLVKLAGLTLKENSSGQRKGQKRISKRGRKRLRSVLFRAVIPLIRHNEAFRALHEYDATRPVNPLTGKQSIVALCRKRLNVLFAICTKKQAFDAERMRQDVLSQVPHRAA

SEQ ID NO: 380887 - protein, 332 aa, unidentified
MKTFLETVGIDVSKSTIDVTLHCGNAHSKFDNNEKGFKSMIKWTKKNTTMKLNQVLFCFEHTGLYSVSLSCFFTEKGMSFALVPAIEIKRSMGLVRGKDDKVDSKRIAEYAYLRKDTLKPTEIPSKNLSELSRLINLRERLVVERAGHKGTSRELKQTIGQTTAKEIINVHEKMIEHLTTEIKKLEKTISKVIEADPEISKVFNLTTSVKGVGSVVACHIIVATNCFQSFDDPRKFSCYCGIAPFPYSSGSSIRGASRISHYANKKLKALIDRSALSAIVHDKELREYYERKIGQGKKPRVVINAVRNKIIHRIFAVVKREEPLVEKFINVA

SEQ ID NO: 380888 - protein, 396 aa, unidentified
MKTVCGLDVHKSMILMCILKENGSKVIQEFSTLTRDVESMRDLMKEHRVEEVGMESTGVFWIPIWRILQGHFDLKLINPYFIKQLPGRKTDVKDSEWIATVVQKELVRGSYVPGRCIQELRQYERRYVRLCEQSTRIEQEIDRQLHRCNIQITNYATKIGSMSVINVVKAIIAGETDPVQLEKHVHGRIKNKHKDEIAAALTGFISSTDRFIFGQNIRDYDMIQAQQEECLKEMRQYCEKYFQNELLLLCTIPGIQTLSAMIIIAELGVDLKAFVTAAALTGWAGLRPRNDESAKKIRSHKITKGNKYLRRILVQCAWGASRQKNGWLRTKYEQLCVRKSNKKALVAIARKLLVIIWNVLSKQETYHEFIPKIDPEQRLKKINYYHKKLQELTVEI

SEQ ID NO: 380889 - protein, 376 aa, unidentified
MITCFIGIDAHTTNYTLSTAIDAEDKPFNTCKYAPKLTYILKYANALCKKYNLKKEDILLGYEAGCLGFKLQRDLNENGFNCVVMAPSTIPGTAINRRKKTKNDIRDAEAIAKALRNDDYSSVATPDEEDEAIREFIRAREDVRMELKRCKQHIMAFCNRHGQHYEETGWTQKHMKWLNNLAFSQPVLKETLNSLLLEYEYLTEKLEEKDRRIEEFAQMDKYRESVHKLTCFKGIKTLTALAVIVEIGDFARFMKPKNFVAYLGLSVGEQSSGNDHNQTGITKQGNRFIRKLLTEAAQCFSRATSKKSKELKKRQEGNVEEVIAYADKANERLRKRYHHLVIHNMKSPNKAKCAITRELACFIWGMMTDNIHTVLV

SEQ ID NO: 380890 - protein, 602 aa, unidentified
MSTASPLQCIGVGIDTARYGHRVSFMRPDRQPAAKPLTVVENHAGYQALRERLEQLHQKHPQAQFHVRIDAAGQYAANLEAFLRGLQLPMVISIGEPKRNKDYQKAHFPKRTTDDTESQAMARFAVVEQPAPTPAAAPSFALLREVAGRLQAHVKQTTQATNRLHNLLARVFPELAVLVEDISARWVLHLLDKYPSAERIGQARLISLQKIPYLPAEKAETLHQTAQQSVGSLRGTVAETLVRDLVAQLRHCEQTEQKMRQLLIAAYHDLPAGGHHQLVTIPGIGEATAAVLTAKIIDIDRFVTPEALVGYFGVFPDEQTSGVDKAGNPLPAGTLRMSQKGNDLVRHYLWNAARSAMLHNPAVRALYRRLRAKGKRGDVAIGHCMRKLLHLVFAVWKTNQPFDAKHFAWESVSDTQVPTPTSTPTAAPTTDIQMSPPPASAPSTHATPATANKTAAGHKRDIPAQQVVTTATGSLAPAPPPVNPPAPGAPRADRPRVDYAFLRQQVTLEQALRHLGVFEQLRGAGPQRRGPCPIHAQSTDRAHTFSAHLGKNVFRCFHANCAVQGNVLDFWAVVHRLSLYDAALHLAATFHLPRNREEEPVQ

SEQ ID NO: 380891 - protein, 321 aa, unidentified
MTKYKEIYGVDISKDVFDVFGSLSGHRQFKNTEEGFKAFAKALPKKVLVVMEATGYYHYRLAQFLDKNSIVVSVVNPLSVKRFIQMKLAKVKTDKSDSKAICEYAQMNDVPLYSALTGVQAECLQLFRLLDSYLKKRTATKNKLHGEEVLGIPSVFVYRSLKRDLKHLKKEVEAIESRLLKLVKEDQQEQLTLLKSIPGMGEKTALFLIVSTDGFSKFERAAQLCSYVGITPTIRESGSSVRGRSRISKVGNKKLRNLLFLCAFSACKYNRACRELYDRIVAKGKSKKLALIAVANKLLKQAFAIVKSGRPYDESYRSKLA

SEQ ID NO: 380892 - protein, 425 aa, unidentified
MNYKQNEKINQVKESTLVVGIDIGSTTQYARAFDWRGIELGKVFTFSNSREGFEAFKAWMQRLQDKYRKSDVIVGIEPTGHYWFDLGAYLEDEGILLVMVNPYAVKQTKELDDNSQSKNDRKDPKVIAKLVTEGRYSAPYTPDGVYADLRIMVTNRKRLIREMTQIKNRFARWFAIYFPEYTDVFGDYEAQSSMLLLKKVCTPEAIVELGAEKINQIWRDAKLRAVGMKRATTLCETAKRSIGLKKGSSAAQYEMKLLLEDYEYKKAQLDAVIEEIEKLCRKIPESEQMLAIKGIGVITVAGFLAEVGDVRRFESPRQIQKLAGLSLRENSSGKHKGQTTISKRGRSKLRAVLFNAAIPLIAKNPEFKSLHEYYTTRANNPLKKKQSVIAISCKLIRVFYAILANGVTYDAQKMLSDIHRQPQAA

SEQ ID NO: 380893 - protein, 350 aa, unidentified
MKQHSENREVKVMGIDLAKNSLHIYGVDAQGHKVVGKKFSRQKLKEYLATLPACTIAMEACASAHYWARLLKSYGHEVKLIAPQFVKPYVKSNKNDAADAEAICEAAQRPNMRFVPIKAIEQQDMQSIHRMRSLVVARRTALINQTRGLLLEYGIAVPKGRSKLLKRLPEILEDAENGLTELFREELFGLYEELHHLNERITHYEEKIKQMAQADERAKRLQTIPGIGPMIATALLAAIGDIQAFKNGRELAAWLGLVPRQHSTGGKPTLLGISKRGDVYLRQLIIHGARSIVRWADRKTDRNSQWAAAVQQRRHTNIAVVAMANKMVRIAYALLKNGQRYRADAMPAGA

SEQ ID NO: 380894 - protein, 361 aa, unidentified
MFSERTSVGLDVHARSVVACGLDTVTGVLHRQRLIPAFESVMAWLATLPAPVAVVYEAGPTGYGLARQLTAVGLRCVVAAPSKLQRPPGDRVKTDARDAEHLARLLRMDQVTGVRVPCLAEEAARDLVRAREDTRGDLMRARHRLSKLLLRQGIVWSGGAAWTGKHELWLRTQKFDLTGLQVAFDTGFETVLMTQQRRDRLDEAIEKMAGNSAYTPVVRRLACLRGVSTLTAFGLAVEIGDWYRFTGSTIGAYVGLVPTERSSGGTRSQGSITKTGNTHARRLLVEAAWHHSRPYRTPGLTMQARWALATPAATARGHQGNRRLADRWNLYHSRKKKPVIANVAIARELAGWCWSLATLTG

SEQ ID NO: 380895 - protein, 353 aa, unidentified
MEKIIRVGVDLAKNVMQIHAVDSTEHVLVRKAVRREHFLNWFANLQPCLVAMEACSAAHYWARRLRALGHQVRLIPPQFVAPYRKGGARVKNDAQDAEAVCEAAGRPNMRFVPVKSPAQQSVLVLHRMRTGFVEERTALVNRLRGLLGEFGVFLPQGIHQLRKHLVEHIEDGGNELNGPARQALMRGWAQWQALDDEIAWLDRQIGDHANHDPQAQRCMQLCGVGLLTASAAVATIVDAAQFRNGRQMAAWLGIVPKQNSSGGKQRLGRITRQGNDYLRTLLFQGARSAVLTAPRRDDRLSRWIVQLHARVGYYRTLVAVANKHARILWAVLAKGERFDPSHAPARHGGAAGA

SEQ ID NO: 380896 - protein, 349 aa, unidentified
MVGLDLGDKSSRYCVLDSEGSVQLERGVATTAQGLSQAFAKMPRSRIALEVGTHSPWVSRLLEKLGHEVIVANARRVRLISESSRKDDRIDARTLARLARVDAALLYPIRHRGEQAQQHLAMIRARAELVDQRTALVNTARGLTKPFGERIGKCDADQMGVEKIHKLAPGIQAFLQPLLVVVETMTEQIQKYDQELAKIARKDYPETALLEQITGVGPLIALTFLLTLDDKERFRNSRDVGCFLGLRPKRRESGQSQPQLGITKEGDVYLRRLLVQGAHCILSKRGPDTDLKRWGLKLAGSGDKRAKKRAVVAVARKLAVLLHHLWVSGEVYEPLRHSQAGAAESAPAA

SEQ ID NO: 380897 - protein, 343 aa, unidentified
MHRRQITFDWVDRDSGEAHRGRIAPATRAGMRVWLGELPGAEGAFAVEGCTGWRFVAEELQAAGFLAHLAEPAETSSLRGPKRRAKTDRSDARLLRELLEQGRLPGSWIPPAWILDLRTTVRLRKTLVDQRTAWQQRIHAALFHHGLPRPNQELLSRATRGWLEGVALPPASRQALAVALGQIDGLDAELDPIDRWLGALARRQPGCRALMTHHYGIGAITAPTILAELGDARRFTGGDQVVRATGLDVTVYASDGKRSPGHLSRQGPEVLRWALFEAAKAAARPRSPDYAYYTQVKTRQGGNRATLAVARKLVRRVRHTLVALGDAALAPVEGLALALPEVA

SEQ ID NO: 380898 - protein, 409 aa, unidentified
MKLFVGLDVSSQDAKICFLNGEGDCLQSFTITNDLPGALILKKKILDTASKSNCKIIKIGLESTSIYSYHPAMFLHNDKELRTYGSQVFMINPKQISNFKKSYPEMDKTDTIDAFVIADYVRFGRHTMSIVKEEQYMALQQLTRSRYQLVHALTKEKQHFLQHLGLKCSQFTQDVESSVFGNAMMELFLERFSLEEMAQMPLQELVFFLQEKGKKRFGNPEDVAKSIQKAVKGSYRLSKVVEDSIDLLLSTSIQIMRTYQAQIKEIEKGIESLMSTLPQTLDSIPGVGPVFAAGIVAEIGQIDRFADETRIAKYAGLFWKKYQSGRFTAENTSLTKSGNPYLRYYLVEAANSVRRHVPEYRDYYTKKSAEVPKHKHKRALVLTARKFVRLVDALLRNNQIYAPGRGVDR

SEQ ID NO: 380899 - protein, 466 aa, unidentified
MKPFYLGIDVSKGYADFMIINSKKQQVVQPFQLDDTFDGHRTLYNALSAFMAKHEDATLFAGMESTGGYENNWYNSLIQFQGSLNIQTTRLNPLGVMHNSKAELKKNTTDKISAQNIAEYLVAHPEKANYQQEDHLAGLRKQWGFIRLLTKQCTQLLNQLNSLLYLAYPELLSFCQDGVPNWVLKLLVKYPSAANLKNAHAKTVAKIPYISMEKAQELIAKAKQSVASSTDLTIQQLVVATVQQILHLRKTIAGQTDLMLQECSIPEIELLKTFPGISDVSALGLILEIQTAKRFASAKKLASFFGVHPVYKTSGDGTGGYKMSKQGRIEPRRILYMIALSAIRCNPLIKEIYEKHKRQGMHSRAAMGVCMHKILRIIYGMLKHGQPFNPHIDLANRLRSVPMQNDSSLNKTSRRLQSYDRSAPVSRRQRIKRLERERSHNVNDTKSGITAPAPLADIIAEMLPQL

SEQ ID NO: 380900 - protein, 321 aa, unidentified
MTNPTTCAAGIDVSKHSLDFAIHGQPIRLTVENRLPGWRRLAAELSRAGVNRVGLEATGGYERGVVAFLRVAGFTVLVLQPLQVKAYARLHLRRAKNDPLDAALIAACTAAIDAAPEPPDPRLAPLADALTFVEQIEEELVRLQTRLEHIELPRFRHMVMADIRRLEGRRRAELRRIVEALAGHDDLRRRLHLVQSIRGIGERTAIALVVRLPELGRLTREQIAALVGLAPFDDDSGLHRGQRHIGGGRKRVRRSLYMAALPAATLWNPACIALYKRLMAKGKCHKAALVACARKLLIFANTVVQRGTPWTDRTASAAAAG

SEQ ID NO: 380901 - protein, 351 aa, unidentified
MNEITTVGVDLAKELIVVCAGDAVGRTLFFRQFGCAGFAGWMANLPPCTVGMEACSSAHHWARVLAGHGHRPKLMAAEFVKPFRKSQGAKNDRNDAQAILSAVREPNMRFVSVKSLEQQSILACHRMREGWHAERTALLNRTRGLLAEFGIWLARSSAALYRALPRLSQEEAVPARVRALLGQAHEHLRQIDAQISHCEAQIRLHAKQSECAQRLTAITGIGPITASAVVATVANARDFRNGRQMAAWTGLVPRQSSSGGKERLGSITRRGDTYLRALLTQGARSALQAALMRAPERRSRLEHWMVELRQRVGYHKTLVAIANKHARICWAILAKGEEYDPQAWQRHALAA

SEQ ID NO: 380902 - protein, 310 aa, unidentified
MEPIFVGIDVAKDRLDVHIQPAGEAFSVPRDDVGLAELVRRLQPLGVTLIALEATGGYEVVVAATLATAAFPVAVINPRQIRDFARATGRLAKTDALDAQAIAGFAAAVRPAAQAVADAQARLLGELVTRRRQLVDMLGAEHNRRRLIAQPALRRRLDAHIRWLERAVREVEGDIDTTVRSSPLWRATEDLLRSVPGIGPITAYTLIADLPELGHLDRRKIAALVGVAPINRDSGILRGRRMIAGGRAPVRHVLYMATLAAIRHNPVIAAFYQRFVTAGRPGKLALTAAMRKLLVILNAILRDQRPWQPA

SEQ ID NO: 380903 - protein, 342 aa, unidentified
MDVHLKSWTVCIMTEHLEHKMFTQPPQAEALYKYLTRNFPGATYHSVYESGFCGFWAHRRLKALGINSIVTNAADVPTGQKERIQKDDSVDSRKLARSLRSGDLEAIYVPEESTLEERSLLRMQSTLVKDMTRFKQRIKSFLYFFGIPYPERFSKSKSHWSKNFLNWLKEEVLLCEESGNQTLNLMIKEVEEQRELLLLVLRQIKQLTDKDKYSSNVKLLKTVPGIGLLTAMHILTEMETVERFENTDHFAAYVGLVPNRHNSGDVKNDGEMTFRGQAMLKKCIVESSWIAARKDPALSFAYNVYVARMNPNKAIVRIARKLLNRIYFVLKNKKEYVVCIVK

SEQ ID NO: 380904 - protein, 387 aa, unidentified
MSHKVAVLIPASVDYEKTLVLAIEVSNESWVLAAQVPGQPHTKAKRKINPDAESLKTAIAGYRTRAAATGSSIERIIAVYEAGWSGFWLARWLMSHGVEAYVIQPSSVPIDRRMRRAKSDGIDAELLLRTLLAWLRGEPRVCSMVPVPDEADEDARRCIRERTELISERVGLTNRIGAVLATLGVSDYNPLLQSRRRRLAELRTGLGEPLPPNALAKIERLLARLELLLAHIAELERERDAVMETEAPDKASKMIQQLASLRGIGVQSATVLVREAFIRRFANGKALGSYAGLASSPYSSGGIDREQGIAKAGNRRVRTVMVELAWLWTRYQPGAAQVCWFRERVKSTGRRVRKIMVVALARKLLIALWKFVTDGVVPEGAVLKPAV

SEQ ID NO: 380905 - protein, 411 aa, unidentified
MQVIYERCCGLDVHKRTITACRLKWLGSDWQKESRQFGTMTKDLLALSDWLVREGCTHVAMESTGVYWKPVYNILEGQFELLVVNAQHLKAVPGRKTDVRDAEWIAQLLAHGLLRGSFVPPPSVRELRELTRYRTSLVRDRARTINRLQKVLEAANIKLASVVSDIDGVSARLMLEALVAGQRDTQQLASLAKGRLKEKHAQLVEALSCRLQPHQSFLIAEHLAQIDYLEGAIERLSREIEERVRPFEQEIGWLDTIPGVNRRTAEVLWAETGGDMGRFASARHLASWAGMCPGNNESAGKRRTGRTRKGSPWLRHCLVEAAHGAAHSKNKYLSSQYHRLAARRGKKKAQVAVGHSILVIAYHLLTRKQAYSDLGANYFDERDRQAVTKRCLNRLQRLGYKVTLEKLQMAA

SEQ ID NO: 380906 - protein, 410 aa, unidentified
MEVLYRRCCGLDVHKETVVACLRVVSGDEVIREVRTFETTTASLMALSEWLAKNGCTHVAMEATGVYWKPVWHILDDGDFQLILANAAHVKNVPGRKTDVNDATWLADLLAHGLIRASFVPDTQTQELRTLLRTRKQLVREKSSHILRVQKMLEDANIKLDSVITDVMGMSGRAMIEALIAGESNPAKLARLANYRLRASQEKLREALRGRVTKHHRFLLRLHLNQIDALDASIVMIDEQVEAGIAPFRAAVGQVMTIPGIRDIGAQVIVSEIGTDMSRFPSEGHLISWAGLCPRNDESAGKRRSNRLRKGAPWLKTTLVQCAWAAVRKKGSYLQAQFLRLKARRGPKKAIMAVAASILTAIYHMLKDGTLYQDLGSNHFQNRSKGQQTKRLVKRLADLGYKVALTPLAG

SEQ ID NO: 380907 - protein, 412 aa, unidentified
MKQIRDRVAGLDVHRDTVVACCRVVGPDRSVEVTKQSFTTTAHGLGELATWLSEATVTTVAMEATGVYWKPVYYALEGLFDEVWLCNAQHVKNVPGRKTDLSDAEWLADVAAHGMVRPSFVPPAEIRELRELTRYRKTQVDNRAREIQRLEKVLQDAGIKLTSVASAVWSASSRQMIEAMVAGERDPKVLAQMAKTRLRAKIPELEEAFSGTFGTHHAVVCRQIIDHIDYLDGAIAALTAEITTRLAPFEAAVTILCSITGVSRTTAEVMIAEMGTDMTRFPTSGHLCAWAGVAPASHESAGKRRPAGTRHGSTWLQRALIEAARAAARTKGSYFSAHYARIARRRGPNKASVAVAHSILAVAWHLLTNGALYDDPGAGYFERRNDPDHEAKRLQRRIEALGYQVTLTEKAA

SEQ ID NO: 380908 - protein, 464 aa, unidentified
MEKKSKVVFEELRRNVAGIDLASRADHYVCGPRLEDGECEVKAFGTTTGELYRMLEWLKERQVESVAMESTSVYWIPLADLLEASGIEVVLVDTRAVRMVPGRKSDVQDCQWLQKLHSCGLLRGAFRPPEAVAAVRSIIREKDNLTAMRIQAIQQMQKSLDQMNIRVHHAVSDIDGKTGTAIIKAIVEGERDPAKLAELRDRRCKKSEQEIAEHLTGTWREEHLFNLGQAFKTLQFLDERIGEYDEKVSQMFASLVAAAGTADNQMAPPAQPEEKPASKKEQADTKETIILQQFMGIDLTSIPGIGHRTAALIASEIGTIFDRFPDERHFVSYIGLAPCLGKSAGKNVCQKRFKNTSRVGQALRIAASTLYRSQTELGAFLQNVARRTDKKTAIKATARRMAQMIYRGVRYGKEYIDKGAQAYEERLRERTVRTVNRLIKTYNISTSELAGEAASLAAVATSAS

SEQ ID NO: 380909 - protein, 432 aa, unidentified
MDHSKAHIGIDFGQTGVHCALIDGDGRLLVKHRRFDNSIFGLAELKQWFLEIGQGYGFSELNVSGEATSYYWLPMYLGLEEDIELRQAGLKLYLHNPRWVKKYTQSFSHQNKSDKQDPFFIADYTRTHHTYVWQSQRDWLPLRWYTRTRYRFNRELTRLKNTFLIHLFIRCSGYSLQQPFSDPFGQTSCQVLSRMDELEDWAEMPEEDLAAKLVEWSHNHLPDPMANAERLQAAARSSFRLDPALNYSLDHVLQLLLENIRFMHQQIEKVDALLTQQATQHPQVACLDTIPGIGLVFATGLAAEIGDLQRYFEGERWDPRHQCPRPKNLRDVEDEIAKAACLWWPSNSSGSFEAEERHMPRDGNPYLRYYLVAAADRIRLSIPAYATYYQRKYDEVPKHKHRRALALTARKAVGLFVGLLHRQEAFDPKEVA

SEQ ID NO: 380910 - protein, 371 aa, unidentified
MGAYYVGLDVHSQFTTFVIQDDAGTIAARGTVPTTPEGFARLHQTHALPAETPVALETGTSSFYVARLLADLGLRPVVIDAHEVRLKAHRPAQKSDRRDAFELCDGLRRGIYRSIVHVPQPAISRLRTTLSRRRHFIRIQTAEVNATKRLLRGAGWRAGTQASLRSAGSWERLLEALSVAPELQGHIRLHRAVWQQAGEQVRALDHLLGELARDWRDDMHRLEAVPGVGPIVALTAIAVFADVHRFASAKRVASYAGLVPSTYQSGAADRHGHITKRGAAELRTMLCEAAHHARRPAHPLNPYFAKLCARRGYKIAIVAVAHRLCRLLYALLRDGAEFQPARLGVEEGPFTQTITRRFRLTPKSAGRLTSV

SEQ ID NO: 380911 - protein, 368 aa, unidentified
MKKRITFVGLDTHKNSIEVALADDGRNTEVRLYGSIGGDLASLDKMIRKLQATGTELRFVYEAGPCGYQIYRHLRAQGLQCDVVAPSMVPKRSGDRIKTDRRDACNLARLYRAGELTAIYVPQEDDEAMRDLVRGRQDAINAQRKVRQQLGGFLLRHGFRYPGKCVWTLAHRRWLAGVRMPHPAQQIMLQEYIHSVEECTQRVHRLTEQILQLMPDWRMRPLVGALQALRGVAPVVAATAVAEIGPMGRFEKPRQLMAYLGLVPSESSSGGSVRRGAITKTGNGHARRALIEAAQAYRHPARISRVILKRQEAVPEPIRQIAWKAQLRLCARFRKLIARGKSRNRVVTAIARELSGFMWAIAKQVPVP

SEQ ID NO: 380912 - protein, 424 aa, unidentified
MQKRKTKTMKNWKDLTHYAGFDWAKDHHAVVIVDREGRIVADFELAHSLEGWKSFAEKTSTWPNLAVAIETSQGAAVDQLLQRDYTVYPVHPVSAQSYRERKAPSGTKTDHLDAWGLADALRTDGHGWKTLQPMDPLTQQLRLLCRDEVSLIEQRTALVNQLQQALAEYYPAALEAFDDWTMAATWEFVLAFPTPRALVGAGKRRWEKFLHTHKLWRSETVDKRLKLFAQADQFKASAPIVQAKSQLALSLCKLLCTLGQQLKLYRKQIEKLFQDHPDHDLFGSLPGAKKVLAPRLLGAVGNDPERYGTQEVLQAIAGTAPVSYQSGKISRVRVRWACDKFLRHTVHLWANSFRKASAWGKTYYQKKRDRGMSHACALRCLGQRLLKILFRMLQDRRPYDAELHARNQQKHGSWVLKLLDQSAA

SEQ ID NO: 380913 - protein, 428 aa, unidentified
MNEKNCIRLEEFRQLQKEIRGSKDYLIVGIDVAKERHRAFFGTATGKTLFRRLVFGNDREGFERLLLQAEAMRVQHGLKKVVFGLEPTANYHKPLGEYLIRCGHRVVLVSAKSVKRNRELLDGRWDKHDTKDSANVADLISQGKCLYYEYPEPRLRELRSLLMLKRRLKKQEHGFRVRIRNHLIAQYFPEFDRYFGRSESEGLAIVRWCLEPSVIEGLSYEEFVRLVAPGRRSIRQQERLRAIWQEACVSIGCEVGEAVRFEAKVMVEGLKQIREALRATEAKITEICRGFPEYEYLLSIPGFGPDVSSKVLGAIGDPFRFTRGTQVLRMAGLDLVAARSGKRSNGVVPVISKNGKADLRYALYQAAMIASSRNREFIMWFTNRLRGRQREKGIKVRMRVKLSAKLLVIAWTVMNKREPFDPDCLRIA

SEQ ID NO: 380914 - protein, 412 aa, unidentified
MDESEVGQIASWVGLDVGKEDHHATVVSAVGERLFELAVRNDEAAIERLLDRALEAGPCALVIDQPGSIGSLAVCVARRRGVPVAYVPGLVMRRASELYPGEAKTDRRDSFVLADTARTHARRLHWLEVSDETLERLRVLGGYDDDLAHDVNRTANRLRDMLLAISPALERVLGPRLDHPVARALLQRYPTPTALRAAGRRRLTPLAKRHAPRMGAGLVDEIQAALAAQTVTVPAEETSGRVIRELAEELDRLADRRDRLGAEIEQTFTSHPSAPVLMSIPGIGARTGARILTEIGDINRFPTPGHLAAYAGLAPVTRQSGRSLNGETRSRRGNHRLKNAMWLSAFCSLHHDRSRAYYARKRSEGKLHNAAITCLARRRCDVIHAMLRSGLSYGELPGPARPAPEPEIALAA

SEQ ID NO: 380915 - protein, 340 aa, unidentified
MSKIKGMLSKRTINPANFSGLIMENISQWVGIDISKATLDVYLRPLSKAMKVANTKEDISKLVETLKSYTVNLIVLEATGGLETELVIQLQEADLPVALINPRQGRDFAKATGKLAKTDAIDAQILAHFGEAMQPQILAVESEESRQLGDLISRRRQLVEMRTAEKNRRERARGKALVDIEAHLEYLDNCLEKLNQEIEELTQANQQWLEKVNLLKTVPGIGQVISTTLVSDLPELGQLTAKQISRLVGVAPINHDSGQHKGKRMIQGGRAQIRATLYMGAVVAMRHNPVIKTFYERLVGRGKSKKLALTACVRKILVILNAMVRQNQPWQLADNLPPCS

SEQ ID NO: 380916 - protein, 413 aa, unidentified
MDVLHARCCGLDVHKSSISACILLREAGRVQKHQRRFGAMTQDLRELAEWLRQLGVTQVAMESSGVYWKPVWNILERQFAVVLANAQHIKNVPGRKTDQKDAEWIAQLLQYGLLRPSYIPCEIIRDLRDLTRMRASLSQEASRISSRIQKVLEDANIKLASVATNALGKSGRAMLEDIISGEDDPEHLASLALGHLRVKIPQLRLALEGNIRSHHRFLLRRLLDQMQFVEHEIALLEERLEDIGRQRPELLQAVARWDTIPGIDRVAAWALLAEVGDNMAQFPTGEHLASWAALCPGNHESAGKRLRGATRQGSPWLRRMACQCAWAAARTKNTYLSSQFRRLAARRGKKRAIIAVAHTLIVIGYHLQKNQSNYDDLGGNYFDRIHSDGLKRYLVKRLQQLGHKVTLEPIEAA

SEQ ID NO: 380917 - protein, 427 aa, unidentified
MSYRIAGIDVHKKMLAVVVADVEIEGEYQFEQRWFGTSPDHLRLLAEWLIEQKVEEAVMESTAQYWKPPWQALERYWKPACQKREGAGPMSGALHLAQAFSNRGRQGRKKDFRDAKRLVKRLVAQELTLSFVPDAEQRLWRTVTRKKYQLTRDHTRLQNRLESLLEETHIKLSSLVSDLLGASARRMLKALSEGETKPAALAALADKKLRATQAQLCDALGACTDLNAVYRRLLKMALEELQLLEQQIVQLDQEMASLLRPHHDAVQRLAEVPGLGVDSAQQIIAEVGAQAATFPSEKHLSSWVGACPGDQESAGVNYSHRSPKGNRHMRRILNQCANAAVKHKGSIFETMYRRLVSRLGHNQTIGAIAHRHCRLIWLILHKGVRYEERGPAVSERSRKRRTTKMIRELRLLGYRVVPGTSQPANPA

SEQ ID NO: 380918 - protein, 338 aa, unidentified
MTDYRLTLGLDIAKSVFQVHGVDSTTGEVIAKRLRRSQLLAFFGKMEPGLVGMESCSSAHHWARALQRLGHAVKLLPPSYVKPYVKRGKNDAVDAEAIFEALQRPSMRFVPVKSCEQQGALVAHKVRAQLVGQRTRLVNVLRAHMAEFGLIAPQGIWRIAELRSIVQDEGDGRLAAMARLALKEIIAQLDGLKSQIARLDRIVLEHCRSSEVSRRLCAIPGVGPITASAFAASIADARNFKSGRHMAAFLGLTPKQNASGLKNRVGRISRMGNCYLRTLLVLGATAVLRKARQGGGPSLAARLLAKKKPARLVSIAIANKMARIIWVLMARNEVYRPA

SEQ ID NO: 380919 - protein, 387 aa, unidentified
MPQPNDLSRSLVALDQNSTIIAVVELSQSSWLVGGMLPGIERQPCKKLEPSPEQLLAVLHRWRDEAVRAGRTITRIAVAFEAGRDGFWLARWLEARGVEAHVIHPSSVAVSREHRRAKTDRLDTELLKRGFLGWLRGERGHCSMVRVPTIAEEDAKRPNRERECLVAERTRIVNRMKSTLARLGIRSFKPTLRKAADRLATLHTPEGMPLPPNVLAELQRDMARLGFVVSQIREIEEARQKRLDQQPEIGPHAMVRQLVRVVGVGIETADMLVHEVLSRPMRDRKAVARYAGLTGSPDESGAKRREQGLARAGNARVRRGMIQLAWRFLLFQKESALALWYRARTADSRLGTRKTMIVALARKLMIALWRFVTTGETLEGVILRPAG

SEQ ID NO: 380920 - protein, 373 aa, unidentified
MPRYSTAFGMDVHLRSTTVCALDAETGEAVTRRFRGNPWGEVAEWMSGFPGPSLAAYESGYLGFAPQRELSGLGVDCVVAAVSKVPRSAADLSSKNDRNDAARMAKAILSHDVTPVWVPSPEIEGLRDLAAAHDAATARLAAAKQRLLAFLARRGYVYGGTTPAGNPRKYWTYGFLRWLDGIHPADDGGIRALAALRNEVEAADETREALLAEYRAAVAAGPLSAEVEALQSIKGCGFALAAAFASEVGDFSRFRSGRQVTAYFGLAPKQRSSADSVRLGGISGAGNALVRKLAVEGSWCYAQAGHQPKLMPKGSGVPLEIRMHGRKGSERLLRRREEMIARGMPQAKANAATAAELVRWLWALGAMCREGAE

SEQ ID NO: 380921 - protein, 307 aa, unidentified
MAHRKFANSRKGICSCLHWVEKRHGIRLDDVIFCAEDMGSYISEMAVCASDRTLNFNFSLISPLVIKYSMGIARGKTDRVDARRIAEYAITHYRKIALYLPAEKELCQLRTWLILRAHLAKQRVAKLVLLEKLDYKEKFADVSIQRSMLQEEIAYAETHMKTIEREMKELITADSNICRNYKLLTSIKGVGPITAIVMLCSTLNFTKITDHRKFACYCGLAPFEHSSGTSVRGGCHTSSMANRDIKVQLNRSALIAIRCDPQLKAYYERKVAEGKHKFSVLNAVRAKIAARCFAVVRRGTPYVALQI

SEQ ID NO: 380922 - protein, 357 aa, unidentified
MAALSIADVPANVTVGVDTHKHSHIARAKDGLGRHLGQLEIETDPRGYARLLAWAQGFGPVVTFGIEGTSSYGAGLTRFLRAQGQAVIEVLRPVRRDRRFGGKSDPIDADAAAGAVLSGRATAVPKAGDAGVEMVRALKIAKQTAIKARTQAVNAVKGLYVMAPDPIREQLRNLKTPALVRTCSAYRVDGASDPTSAIKLSLRSMCRRYVVLDQEVRSLEKELDALTVRLVPQLRQLFGVGQDVAATLVLAAGDSGDRLRSEASFSMLCGASPIPASSGMVQHHRLNRGGDRQANAALHHIVIVRLRHDQATKAYFAKRKAEGKSKKEIFRCLKRYVAREVYRTLVGPREEVIHSAA

SEQ ID NO: 380923 - protein, 383 aa, unidentified
MKKTQETLRIKDSIKEAVLYIAFELSNSKWKLAFSDGSKIRYKTITAGNLDQLQVEIDLAKRKFQMIEDVRVLSCYEAGRDGFWIHRYLESQGIENLVVDSASLEVNRRKRRAKTDRIDAGKLLRMLLRYWGGEKQVWSVVRVPSEQDEDARHLHRSLDSLKSERTRHRNRIKGLLIQQGIKVSNPSQKKFLEVLEKVRTWNGQAVPPGLNAQVVREYERLQIVEGQIKALEKEKQERLKNPDTVSLQKVAKLATLYGIGSVSSWTFVMEFFGWRQFQNRKEVGALAGLTPTPYDSGKSLREQGISKAGNQRIRALAVEVAWAWLRFQPQSNLSQWYMKRYANGGKRMRRIGIVAVARKLLIDLWRYLEYDKIPEGARLKSAT

SEQ ID NO: 380924 - protein, 409 aa, unidentified
MLKIVYPNCCGIDVHKTFVVAVIAITNNQGITEYHRKHFSTFTNGLTQLRDWLEYYSCFDVCMESTGKYWIPVFNILEEQTNVCLAHPKYVKAIRGKKTDKKDAQWIADLFKHDLVASSFIPPLKIRQLRDLFRYRMKLTQLQVGEKNRYQNCLTWSNLQIASVVSDVFGKSAQAIIKSILDNPQDKPNIEQLVHKRMKNKVQDLEIAMEGALTPEQAEKIRVIKAHYDALAICKEDLEQMIRELGQDYQHQVKLIQTVPGFKEDLSALRIISEIGCDMTVFDSAAKLCSWAGLVPANNESAGKKFSTRISKGGKYLKPFLVQVANAVVKSDKHPELRNKYLKLKKRQGHRKAISAICRRLLVSVYQVLRKQEDYNPVLQGLTEIRNPDKTMSVQDAVRFAQQHGFNVA

SEQ ID NO: 380925 - protein, 343 aa, unidentified
MDYFAGLDVSVKDTSVCIVDDTGRIRREVKVASEPDALLTVLRNPAYRFKRIGLEAGPLSQWLFSALAEADLPVICVETRHMRAVLKAQINKTDRNDARGIAQMMRVGLYRPVHVKTLRSQKLRMLLTHRKLLQAKAIAVENDLRATLRNFGLKVGAVGTVKFEARIKELIDNCPDLVALVEPLLVVRRVLREQVSILHRRVLAAVRNDEVCRRLMTVPGVGPVVALTYRATVDVPARFRKSKSVGAVFGLTPARDQSGQSDRPGAISRCGDEMMRTTLYEAAQVMLLRSAKWSWLKAWAMKIARHRGMKKAIVALARRLAVIMHRIWIDGTEFRWTREAAAA

SEQ ID NO: 380926 - protein, 357 aa, unidentified
MKITKKKVIGKAYVGIDVHKTSWKVCVLSSGGFKKEFSCNPQVEALVASLENMLPDFEFQCAYEAGFSGFWLADGLNETEGFNCIVVNPADIPTSDKERAQKEDKRDARKIASQLKAESLEGIYIPSAEDIAFRELQRLRSTITKDLVRSKARIKSFLFRSGINITSQEFPDSKQHWSARFIKRLNELPIENSALRFTLTQLVQTLINLREQQKTVLLELRTQIRNSKKEKMHEASCKITGIGEITSATIISEVIDINRFSSYEKYHSFIGLVPSTNSSADIEVVRGITNRANKRLRKVFVESAWIAIRKDAELHHLYHSLKMRMKPNKAIIRVAKKLANRVRFTLLELENEMLITT

SEQ ID NO: 380927 - protein, 438 aa, unidentified
MSNKVIFNLDELFISVGIDVGADFSWMSIALPNQQFVGKPYKILHNSIDSLTTAVSKIKEAEELYSLESRIFLESTGIYHYPLFCYLRDKGFNCSVINPIITKNSTNINIRKVHNDRFDSKKAALVGLKPDLKVSLMPSDLALNCRNLCREYYDLMDNRSAYVNKLQGELRMAFPQYLGIFSKVTINTSLTLLETYTSPSAFLKADKQEIIDIIKSTARFGLTYAQNKYNAIIQAATDANQFGYIIDSNIKRIRLYISFIRKYDEEINNILESLHELVDANEDADFVKQIHLIETFKGAGFLSAVSIMGEIGDFSAFSKPKQLFAYFGLDPAVKQSGKFEGTKVQISKRGSAIARRVIHTLTLQSISISRNGEAKNPVLREYYLKKCDSKPKLVAMGAVSHKVCNMIFAILRDNKPFKIIAPQEHIKQYNAAKCDIAA

SEQ ID NO: 380928 - protein, 342 aa, unidentified
MKITTVGIDLAKNVFQVHGVNEHGKTVLKKQIKRDQMAAFFANLPPCLIGMEACGGAHYWARKLQGFGHTVKLMAPQFVKPYVKTNKNDAADAEAICEAVARPNMRFVPLKNIEQQAVLSLHRVRQGFVGARTALANQVRGLLAEFGLVVPQGLSHVCGKVPELIEDASNELPGTFRLLIDRLLDHLKELDRQVSELEAQIKTSHRNSEASRKLEKIPGIGPITASALVATIGDAKSFKNGRQLAAWMGLVPAQSSSGGKTNLLGISKRGDTYLRTLLIHGARSAVRAFQGKQDQSANPWLQKLLGRRNLNIAAVALANKNARIVWALLAQDREFKADYVAA

SEQ ID NO: 380929 - protein, 370 aa, unidentified
MSHVTEAFQSFVGVDLHKCTVTLSALDTGGEITRLKISTKSTGKIEDWLRSRRAPVWMAVEACPFVEWFIDRFRDCVARIDIADATELSNRRGKRRKTDWNDSLDIAERLSRDECPLGFIADEQLMQLRKRGRHWRSMSRLLSRSKHSMKSMLNAANIRGPKFDSASAQRWFLAHGDLLKPVQQQMFSDFIDVLMLVERHRERLRREIIFATRSKRFADTVSLLMSVPGVGEIWGAIIAAEIGPFDRFPNADTLEFWAGLTADLKESAGRTQSGNITKAGSVTLRWALCQAALTMCLSDAKQEATRQRLIRRIGRPKANVAMGRRLLRILYAMIRDGKPYEGGPPRDRTRAANAAKRKRRTRKEAVSMAT

SEQ ID NO: 380930 - protein, 430 aa, unidentified
METKEGLKRALMQEAEAGVLKLLEHLPTLKEGDLKGLEQQVMETIFEIGRGWMESILSEAAPEEQAPGQRVGSCGHQQQLDHDLRQLGVAPARILIGLEATSRYHENLYQFLKEQGYALCLLHPGQTHQFAQQRGLRAKTDRLDASTIARVLRSFEARAGYVPDELIATYRELERLHSQLADESARYQNEIQALLVVLFPEFTQVFADPCRPTALALLKRYPSAQAIIAAGVEALTTTLRELAPRHYGRPTAQELVRLATQSAASGRAMGARSLSLQVLCDQLEHTLTNLAQVARDLDQLLARDPGAAGLNSIPEFGCKTVTVLRAELGDVMRFERIDQVVAYVGLDLQVKQSGKWKGQVKLSKRGSGRVRRVLYLAALRSLLLPASAFGAYYRRLVARSFKAREALIAVMRKMLIVAYHLLRSNETYDP

SEQ ID NO: 380931 - protein, 322 aa, unidentified
MSGAVVGIDIAKRKFDVALFLKGKFKHKACMNNKQGFEDLSRWLKKQGVEHVRVCMEATGTYGDELATYLYDAGHLVSIVNPVRIKGFAQSELLRTKNDKVDAGLIARFCVAMNPGTWTPPPPEIRRLQSLVRRADALIDMRTQEQNRLGTTHETIEPSIKEHIGYLDQEIEKLKRQIAEVIDHDPNLRGKRDLLDSIPGLGETTIAVILSALHVFEGVKCVQKTVAFIGLAPKETLSGSSLKGKSRICKIGHARLRKALFMPALVAMRYNPVMIDFYRRLKEKGKNGKVILCAIMRKLVHLIYGILKLGKPFDQNYKQNFA

SEQ ID NO: 380932 - protein, 424 aa, unidentified
MRKRIYRAVDVKALNLDELREVIKNQKIVLGVDVAKEDFVAALMNEKREVLSTIKWKHPMETGMLLDVMLHKLPWSFLDVAMEPSGTYGDAVRALFLGNGIKVYRVSPKRCHDAAEVYDGVPSLHDSKAAAIIGRLHLDGASVEWWPLPEKAQRELRAAIKTMEIYDDAYYRNINRLESFLARHWPEVTQHLKLTSATLLELLITFGGPDRVAAEPEKAAELMRRVGRSNLLVEKIDKVVESAQQSMGVPCIEEERRHLIELCREARRLQQEARAAQERVERLTRDTESINAMVDVIGKKTAAVLHSELGDVSRYDNAGSYVKSMGLNLKEHSSGKHKGKLKITKRGSGTVRMYLFMAVLRLIQKNFIVQAWYQCKIERDGGTKMKAVVAVMRKLARALWHVGQGKRFDAAKLFDVSRLGLVPV

SEQ ID NO: 380933 - protein, 340 aa, unidentified
MEKVSTIGLDVAKHVFQVHGVDAQGAVVVRRKLRRDDVVAFFTSLPACLIGIEACATSHHWARVLTALGHEVRLMPASYVKPYVKRQKNDASDAEAICEAVTRPTMRFVPTKSEEQRSVLMLHRVRELLIRQRTMLVNALRGHLAELGIITRQGATGLSMLVTLVEDEGHDLIPPLARSALFLLVQQLREVHEKVGELDRQIHIWHRSHELSRRLETIPGIGPITASAIVATVTDASLFKSGRQLAAWLGLVPRQNSSGGKDRLGRISKQGDPYIRRLLVVGAHAVLRFCRKGKAAPTRWAAELLAKKPYNVVAVALANKMARIVWALMTTGKRFADSPA

SEQ ID NO: 380934 - protein, 346 aa, unidentified
MDHYAGIDVSLECSSVCVVDANGKIVREAKVASEPEALIGWFRSLGFDLARMGLEAGPLSQWLYAAMKKAGLAVELLETRHASDAFKAMPVKSDRNDARNIAQLMRLGWFRPVHCKSMSAQEIRAMLTARKLIQAKLQDIENSLRGILRGFGLKVGKTTKRSFATRIGELVAGHPALEAIAAAMLAAHMVLLREFNGFEKRVRAMSLLDAKARLLMSTPAVGPIISLTYASAIDDPTRFTSSKRAGPLFGLTPKKHQSGETDYSGRISKNGDASVREALYEAAHIILTKPIKGCAQLKSWAMRIARRAGMSKAKVALARKLAVIMLRMLKDNVPFNSAAKAIAAVT

SEQ ID NO: 380935 - protein, 419 aa, unidentified
MEECVNDQQRWYGGVDWASESHYVWLADKDGRRLGERSFRHAGDGLAEMVGWLLKTSGAAEPVQIDLAIEVPHGPVVETLIERGFNVWALNPKQMDRFRDRYSVAGAKDDSRDAQVMASALRTDPHCFRRLTISDPIIVELREWSRIAADLTAERTALVNRLRQQLWRYFPAFLELEADLSAPWTIELWQAVPTPEAARRVRKTSIETILKRHRIRRLSADQVLEILRQRPLTVAPGTIQAARAHSATLIARLKLINRQVADAHHQLDTLTASFGAADQAEPGQNKQRDVVILASLPGIGRINLATLLAEASDALQRRDYHALRTLTGVAPVTIRSGRSCRIVRRHACHSRLANAVYHWARTAVQHDAISRAKYAVLRARGHTHGRALRSVADRLLNVACSMLKAGTTFNSSLPIQNAA

SEQ ID NO: 380936 - protein, 438 aa, unidentified
MSNKVIFNLDELFISVGIDVGADFSWMSIALPNQQFVGKPYKILHNSIDSLTTAVSKIKEAEELYSLESRIFLESTGIYHYPLFCYLRDKGFNCSVINPIITKNSTNINIRKVHNDRFDSKKAALIGLKPDLKVSLMPSDLALNCRNLCREYYDLMDNRSAYVNKLQGELRMAFPQYLGIFSKVTINTSLTLLETYTSPSAFLEADKQEIIDIIRSTARFGLTYAQNKYNAIIQAATDANQFGYIINSNIKRIRLYISFIRKYDEEINSILESLHELVDANEDADFVKQIHLIETFKGAGFLSAVSIMGEIGDFSVFSKPKQLFAYFGLDPAVKQSGKFEGTKVQMSKRGSAIARRVIHMLTIQSISISRNGEAKNPVLREYYLKKCDSKPKLVAMGAVSHKVCNMIFAILRDNKPFKIIAPQEHIKQYNAAKCDMAA

SEQ ID NO: 380937 - protein, 425 aa, unidentified
MNTHNDWTKHSHFAALDWASDHHDVVIVDRSGAIAAEFRFAHTAAGWAEFTEKMQPYVGAPLALETSSGPAVDQLLQRGWTLYPVNPKAAERYRERKVPSGTKTDRHDGWSLADALRTDGHGWRPLLPQDEATATLRALCRDEIALIEQRTALVNQLLAALREYYPVALEIFDDWTQSFTWALIQQFPTPLALQSAGQRQWEKFLHTHRLWRTDTAPARLELFARANALPASAAVRNAKSLLATSLVKVLQTLETQLQEYRRRITETFAQHPDHDVFGSLPGAAEKIAPRLLGELGAVRAVYPDADALCCQAGVSPVSFQSGKLDHARIRWACDVVLRHTVHLWADCSRKKSAWAQAYYQGKRQQGHNHASALRCLGKRWLKVLWRLWQDGRPYDATRHEQSLKAHGSWAQAHLDAPLQATPATP

SEQ ID NO: 380938 - protein, 377 aa, unidentified
MHRLKFVGLDVHADTIAVAVAEQDGEVRSHGTIPNREDSIRKLVRKLGPVEHLRFCYEAGPTGYALYWQLTRMDAHCVVVAPTLVPVKAGDRVKTDRRDGLKLARHHRAGELTAVWVPDAAHEALRDLVRARESAKKDQLRARHRLSKFLLRHGRRPPVGINSWTVKYLEWVQREVHFTERAQEITLLDYLHEVQHAAARIVRLEQAIDEAAQSAPPQMRAVIEALQALRGIAKISAVTVVAELGDITRFTGARQLMAYGGIVACEDSSGGRVWRGSITKTGNAHLRRVVVEAAWAYRHRPGIGAALRQRQEPVSEKVKEISWKAQQRLHARYMTLLLKGKNKGVVITAIARELLGFLWAIGTQAEAEYQESLSRVA

SEQ ID NO: 380939 - protein, 353 aa, unidentified
MDVHKETIQIASLTSNTKDLVKEQQIKHEEVQIKKFIQKLKLEKSEIHCCYEAGVTGYPLYRYLKTLGVNCTIVAPGKIPRQSSDKIKTDKRDAIKLARLLRSGELESIHVPSEEDEAVRDYLRSRDSLRLDLGRNRQRLMKFLLRKGIKYSTTKYWTTSHYKWLNNLHFENEILQTTFNDYYSRVRVQEENLKAMDKKIQEIAESEPYREKVGILRCFRGLTAMFLLSEVNDFKRFKTAGSFMSFLGLVPGEYSSGSKRKQTGITKTGSPRLRRILTEAAWQHRFSGTGSKVVVARRVGQSALVVSLAEKASLRLHKKFKNLQLRGKSPQVMITAVSRELSGFLWAAMNLVV

SEQ ID NO: 380940 - protein, 379 aa, unidentified
MAKDKFDYCVLDIDLNVLCTGSNCRNTNEEFLKFSDLLREMKALKTTLNIGMESTGIYHLPLYSYLRDAGFHLRILNGLEVRGMKKARVRKTSNDAIDAHSIARYLMVTETKESHDYPDEIKNLREFITAYDALLCKTRTTKNNIIRVLDMLFPGLSNIIDIERNLNAMELYSTPEDYLSAGVGDLSEHMTRRKAERIVRAAENSPAPGVIRHSLEIEKGSLIRILKILDEEKKLIEKHLTEEMSSHDHVIKSIPGVGPITGSIILGKIGDISRFENAEKLVAFAGIDPVIKESGKHRSQRAISKRGDPLLRNAIYMSTLSAVRSNPAISDFYKRKVDGGMPKQKALVAASRKQCHVIWSVWYNNRPFQVPEKFRSNME

SEQ ID NO: 380941 - protein, 416 aa, unidentified
MAKKENTIEFEQVVERGCGIDVHKKVIVATIKGKGLKETTKTFSGFTESIEEMRDWLIKEKITHAAMESTGVYWKPIYNILESDLDIILVNARHIKNVPGRKTDKKDSKWIAKLLLSGLLRGSFIPPKPIRELRDLTRYKRKIIGQISSEKNRIQKILEDANIKLSSVVSDMSGATATKIIDAMIGGEDNINELLKFRHGKMQATREELASSLKGYLTEHHKFMLQTIKESMIDKERIIEKLDKQIDVKLKENELELDAELLSTIPGVGKDGAAYILAETGNDMKQFPNEQHLASWAGMSPGNNESAGKKKSSRTTHGNIYLKTLLVQCGWAATRTKNTYLRSKYDSLVGRRGKKRALIAVGHKILIAAYFILKDKVAYKELGAEFLQDKNKDKRIKRYLKLLTELGAEVEIKKVA

SEQ ID NO: 380942 - protein, 349 aa, unidentified
MLIIGCDFHSRFQQIAMVDTETGELIERRLEHGNGEAKKFYAELQKPGRVGMEATGCAQWFEGMLAKLGHELWVGDAAEIRAAMVRKQKTDSRDAVHILDLLLTNRFPRIWIPSPEERDVRQLLRHRHKLVGLRTSLRNQLQALAMGQGVCRKKKLWASRGRAELEALGLDPWARRRRQELLEILDRVDPSLAELDRAVAQEAEHRPAARYLMQQPGVGPVTALLFVLTIGPIERFQRSKQVVSYLGLNPRESSSGGRQRLGAISKQGNSLARFLLVEAAQTASRYDEGLRRDYQRLKFRRGSAVAKVAIARKLAVRLYWKLREYSSPAPSTRTQGSPETPVVGASLSS

SEQ ID NO: 380943 - protein, 420 aa, unidentified
MKSFVPVAGVDVSKRFSDLCVLSPDNNVLLRQKIYHDMVSMKLAEKKLHEIELEYGTRPVVVMESTSHYHLILFQFFTDAGFEVVVVNPIQSGALKNINVRKVKNDRVDAYRIAMLYRLKVLRPSQIPTSSLRGLRLLTRQRSELKGDVARFKNRMTAYLDQIFPGYGEVFSDVGGSASRAVLHMCPTPEKLLNADGSLLAKVICEAGNKGPKFGAEKAAKLREAAGSAQVIGVRSASNASLIKNVLDIIEGLLAAIQRIEREIKELVTQDTRLDEDVKLLCSIPGIGFSSAVVIVAEMGNISLFRKPKQLAAYFGLDPGERQSGTFKGRKNKLSKRGSPQVRAALHMAAVSSVSRNRDGTYRNPVLAEYYERKCAEKPCKVARVAVMRKLSNIIYAVLRDRRPFELRTPQEHMALLAAA

SEQ ID NO: 380944 - protein, 319 aa, unidentified
MAQNDLVVAGIDVAKDKVDVCIRSLSLRRTFASTAEGRRELATWLRRKKVAKAVMEASGGYEREWAKALRNAGIEVRIVDPKRVRSFAQSAGRLAKNDTIDAEMIAWFAETFDEARGQAYDATREQLHQMVHARQALKDMQSKLASQGEHAVPAAVQRIHARISKTIAVELVKIEAEITALIQATPHFAELAEIIESVPGLARTTSAALIADMPELGQVNNKIVASLLGVAPYDDDSGRRRGERHIKGGRRRTRNIFYMACLGAATRHNPVLKAFYDRLVAKGKLKKVALTACMRKLISILNIMIERRQKWDTQRYAVS

SEQ ID NO: 380945 - protein, 461 aa, unidentified
MPQLWAGIDAGKTEHHCVVIDGDGAKLLSRRFKNREAEILTLMGDVARLPGGTEVAWATDLNHGGTGLLQSLLGSHKQLLHYIPGRAIHHASLTYAGEAKTDAKDAVVIADQARIRRDVHLMRQPDEVTVELRLLSARREDLVHDRTRAVNRLRALMAHYFPSLEAAFNYATTRGPLVLLTKYQTPGAIRRMGERRLATWLKGQDCWKSAAVAATAIQAANEQTTVVTGEAAAARIIAGFARDLLRIRDELAEVEAGIDTALKGNPLAMPLMTVPGFGPRLAADFLAAIGVDPAAFESPDRLASFAGLAPVPRDSGKISGNHHRPRRYDRRLLNACFQAAFIAARTCSVSRTFYDRKRREGKSHKQALIALARRRINVIWAIFRDHTTYHPPTTMTNLSSIKTIGSGGPRSEVPTRTTGTSSSAAPECMSGVVRLALNALPAAALDGGQPIGHSLDLSSRR

SEQ ID NO: 380946 - protein, 455 aa, unidentified
MPKATTGDRPELKPVNVGAAAIDIGSKMHMAAVNPNCTDLPVRAFGTFTQDLHDLADWFKACGVTSVAMESTGVYWIPAYEILEQRGFEVILVNARYAKNVPGRKTDVSDAAWLRQLHSYGLLRGSFRPDAEIATLRAYLRQRERLVEYAAAHIQHMQKALMEMNLQLHHVVSDITGATGMRIIRAIVAGERSPDVLATYRDVRCHSSIETIRAALVGNDRDEHIFALTQSLELYDTYQAKMLDCDRKLESLIATLTEKGAKPVGKLSKPRVKTKQVNTPSFDVRAALYGVLGFDLTEIHGLGPSLALKLIGECGKDLKAWPTAKHFTSWLCLAPGNKISGGKVLSSRTRRSSSRAAALLRLAATTIGRSDTALGAFYRRLSSRAGKAKAVTATARKIAVLFYNTVRHGMTYRDPGADQYEEQYRSRVLANLKRRAKSLGFVLQAVPCDAELAVS

SEQ ID NO: 380947 - protein, 367 aa, unidentified
MKKVSTVAVKASRKISPSKLTVGLDLGDRSSWYCVLDEAGRVLLEQRVSTTPKALREVFGGMPGSRIALETGMHSPWVSRLLSEVGHEVIVAHARKVRLIGESRKKDDRLDAQTLARLARIDPELLCPVKHRTAKAQADLTVIRARAGLVRARTALVNTARGLAKSYGERLRGCNVRNMNPEKAEGLSPELQAALQPLLGALESLSEHITEYNERIEKLAKESYPQVALLKQVKGVGTLIGLTFLLTLEDPRRFRKSRDVGCYLGLQPGRRNSGQSEPQMHISKEGDPYLRTLLVQGAQHILGPFGMDCDLRRWGLKLAERGGKGGKKRAIIAVARKLAVLLHRLWVSGEVYEPLHNSRQSAMPAAA

SEQ ID NO: 380948 - protein, 440 aa, unidentified
MRTVNPHAAGIDVGSEKLYVATVNGPVQVFDTFTESLYALRDSLRAAGVTSVAMEATGVYWLAVYEVLEAAGLEVCVVNGAHVKSLPGRKSDLQDCQWLAELHSCGLLRSGFLPSQIIRRLRDYQRLRQDHIRMASAHIQHMQKALDRMNLKIHEVLSDLTGVSGLRLVRAIVQGVRDRTMLLELCDQQILRHKRDRMLKALRGHWKPEHLFALRQALEGWEFYQQQLAGCDEQIARVLQELASPSGGPPPAGDIASAPHKRLQHNAPQIDDLHHLLVRVTGGQDLSVLPALSDYSVLQLLGEVGTDMTRWPTEKHFTAWLGLAPSSRRSGKRRRREKRFRGRAGQLFCVVARTLARSKYLALGGFYRRLRATRGPEVANIAAARKIAVLFYNTLRYGLQYVEQGLVRYEAAYRQQCLRRLQRNAREMGFTLVQTSGANA

SEQ ID NO: 380949 - protein, 484 aa, unidentified
MTLTYQESERQLRKSLKKLPAKAPVLEGDKAPKKRRGKRQRPQDPTEGLSVLHPNAAAIDIGGAEHWVAIPPGRAECSVRKFGCCTADLNALADWLQAHRIDTVVMEATGNYWVILYDILEARGLNPVVVNARYAKNMTGRKGDIPDCQWMQKLHTFGLFNNSFRPTEPIRVLRAYMRQRETLVVLAAQTIQHMQKALVEMNIQLANTISDISGETGLQIIDAILSGERDPESLALKKNARIRASIPQLARSLEGHWKEEQLFILEQARLSYTHYQEQLLQCQDRIEAQMRGLQSSAGNPQGQEPAATKPKRAGKPTPKFDLSAELRRIIGVDLTAIDGIGPVTAQVVLSEVGTDMSRWPTEKHFSSWLGLCPDHRISGGKILGRSTRPVVSRARNALRLAAYSLEHSLSWLGAKYRRLKRKLGAPKAIIAMAHHLARLIYLMIKHGQEYVDKGMKVYEERYRAQRLKWLEKQAADLKMKLVEA

SEQ ID NO: 380950 - protein, 472 aa, unidentified
MAHAIRRAGRGQQQKRRVRRVRAAQLEQLNLNAAGIDVGATEHWVAVPADRDAQPVQRFGAFTADLYALAEWLRQCQIETVVMESTGVYWIALFEVLEERGFDVKLVDAHQARQVPGRKTDVKDCQWLQELHTYGLLRGAFRPEDEVGVLRSYLRQRSMLVAMASRAVQHIQKALEQMNLKLTEVVSDITGKTGMTIIRAILAGERDPQRLATFRDRRCKHDHATIAKALTGHWRAEHLFALQQAVDQYDFLAQQLRACDGHIEECLQAFVPDVETDTPPSPPARTWRSSRSNPLSFEVQAYLAAMTGVDLTQIDGIDSLTALKVISEIGLDMTRWPTSKHFAAWLGLCPGNKVSGGKRYRIRSKPSANRAATALRLAAQGVANSHSALGAYYRRMRARLGAPKAITATAHKLARLVYSMLRYGTAYVDAGQQAYEQKYRDRMLTNLQRKAKAFGYQLVHVEDLDGGVASTP

SEQ ID NO: 380951 - protein, 411 aa, unidentified
MQRVIGMDIHRTFAEVVFWEAGRLRPSGRIDMTRSGLEGFGRSLSKEDEVVVEATGNAMAVVRVLSPYVGRVIVANPLQVKAIAHAHVKTDKIDAGVLASLRAAGFLPEVWLPDADTERRRRLVARRNQVVRHRTRIKNEVHSILQAHLIPPCPHADLFGRLGRSWLGRQELPVDEWAAIERHLREFDRLGEDLALLDREIAERVIDDPSVKRLLTITGVNINVAAGLVAAIGDIRRFSSPQKLVSYVGLNPRVRQSGLGLAQHGRISKRGRSHARAMLVEAAWAAAKAPGPLRSFFLRIRARRGHQVAAVAVARKLAVLCWHLLTKEADYQWARPALVAHKIRAMQLQAGQPEKKGNKRGAAYAYNIKELRDREIDVARHAEHAYEQFVSRWQPRGPGKRRTGAANEERR

SEQ ID NO: 380952 - protein, 322 aa, unidentified
MKEELTQPGPMRPCYVGIDVAKAWLDVAVRPSGVQWRVANAEADLPALVEQMERLTPQLIVLEATGGYERGVAAVLAAARLPVVVINPRQVRDFAKATGRLAKTDVLDAQVLAHFAEAVHPEPRPLADAATQRLAALLERRSQLVGMLTAEKNRRQQALSSVRPLIETPIAWLEQALDQLTQDLDQTLHASPVWREREDVLRSVPGVGPILALTLLADLPELGTLAPKQLAALVGVAPLNRDSGSSRGKRLIWGGRARVRSALYMSTLSAVRYNPVLRAFWTRLREQGKPPKVALVACMHKLLTILNAMLKRQTPWQPALVA

SEQ ID NO: 380953 - protein, 343 aa, unidentified
MKKKSDCTIGIDLGDRKHQVCVLDRDGEVVEGKAIGSDRDALRTLARRFPGARVIIECGMQSPWTSRFLLDLGMEVIVANPRKVRAIWQAERKSDKRDAEMLARIGRMDPRLLKPIRHGSAEAQQELLSIKMRDALVRQRVNIISAIRFTLKSLGHRVSNPGTARFHKVVLEQVPAECVALIEPMVGVLAEMGEQIKRFDGLIKRAAEAHPVARHLQQIVGIGPITALYFVHKIEDPGRFPKARDVGAYLGLCPRRDQSGDCDKQLRISKTGDAFLRRLLVSAAQYILGHFGKDCALREFGLRLSERGGPRAKKKAVVAVARKLGVLMLSLWKSGEDYQARMA

SEQ ID NO: 380954 - protein, 410 aa, unidentified
MEIVHERCAGLDVHKKTVVACVVTPEHKEVRTFGTMTRELMGMADWFSSLAVTHVAMESTGVYWRAVFNLLEGGDFDLLVANPRYMRAVPGRKTDVKDAEWIADLLRHGLLRASFVPDKGQRELRDLVRYRKVIGQERARMVVRIEKVLESANIKLTSVASHVLSMSSRAMLDELIAGNRDTEAMAELARSNMRSKRAQLQEALVGNFGPHQKFMLESHLRLIDQLDHEIETLNQQIEERMRPFQVQIDLLDQIPGIGRRGAEQILAEIGVDMSRFRSASHLASWARLCPGMNESGGKRRNAAIGAGNLWVRSTLVEVALASVRSGRRQPNFFSARYHRLAARRGGKRAAIAVAHSVLLAIYRMLKDGTHFEDLGPTYLDAKRRHAIALRSVKRLEELGFKVTIEEPAAA

SEQ ID NO: 380955 - protein, 339 aa, unidentified
MSAIVTIGIDLAKNVFAVHGVDATGKPALVRPSVPRAKLLELIVSLPPCLIGVEACSGAHHWAREFEKFGHTVRLMAPKFVIPYRLSGRRGKNDAADAAAICEAVTRPNMRFVPIKSIEQQGQLMVHRARQGFVEQRTATFNRIRGLLSELGIVLPLKAAVVRREAMARLEDLPGWANTVIGDLLSEVTHLDERIAQYDRHIALMARQSIEAQRLMQLCGVGETTATALLSTIGNGRDFKCGRQLCAWLGLVPGQYSSGGKQRLGRITKAGDPYLRSLLVLGARAVPAAAKTKSDPISRWAVSLEQRRGYWKAIVAIAAKNARMCWAVLSRGEAFRLPA

SEQ ID NO: 380956 - protein, 361 aa, unidentified
MEEIIDRNNALYVGIDVHRYEHTAVCADRFEEEKGSLSFANTTIGIQQFINWLSAIGEPNLTKIIGVEGSNGNGRFLTESLSQDYSQIYEINPIRTKQRRNFGTRGDKSDAVDARLIIEVLTRKLDELPRITIQDRSKTMTTLEQLVIFHEDLIFQIARLKNQLHLLFHEIEPEYQSHRGSSFSVRILDVWLKKCGKKVILSDPKHIKYFMILEKIRQLRRLKRTSKRVDGEMKLLINQIKPNLLTFPGVGIVTAGKIITAVKGIDRFRLDTFIKYAGIAPVEKQSGRNKKHKQNKCGNRQLNNAIYTVALTQLRGHSKAKAYFQKKIAEGKTKKHAIRCLMKRVACIIYGLLRSRENYRG

SEQ ID NO: 380957 - protein, 464 aa, unidentified
MRSIGIDIHRDFMEVAIAEGGEIRSGSRVAMDPESLGLFAASLDRGDQVALEVSGNAWEVVRILRPHVGRLVAASPTDTGMRQARAKTDRLDARALARLLASGQLETVWVPDEATQAMRRRLQRRSQLVRTRSAAKNEIHAALMRRLVPKPGFSDLFGRAGRRWLAELELPVAERESVDSAMRQIEFCEFEIAAIEKLVASEALASAEIRRLMSVPGVGAITAAAFMAAVGDIRRFPSAKKLVGYLGLDPIVRQSGSSEASYGRISKQGSAAGRYALVEASWSVVKAPGPLRAFYERTKGRRGASVAIVATARKLACLFWTLLVRGEDYAYTQPSLTTKKLRRLELTAGARKGPGRRGRLEGKRGGPRRRAQDGRAGRGRLPANRRRVQARRGTAGEAAQGGREGTGRAGRRGRRRDIGARILKSPSRGQQRGGPMPRAPLFSSSSTGARPRLCHRRSDRASHP

SEQ ID NO: 380958 - protein, 411 aa, unidentified
MLFIGDDWAEDHHDIAVLDDAGRLLARRRLNEGVSGLEALHALLGGYLPENAAAAEVLVGIETDRGPWVQGLLASGYTVYAINPAQSARYRQRTGAAGAKSDKGDALVLARIVAVDRELHRAIAADSGVAEEVKVLARAHQSLIWARQRQANVLRSNLREYYPAALAAFGQDLHGRDAMAVLGAAPGPKAGARLTPARVQALLRHAGRQRYLAARVGEIVEALHAPQLPARPGIEAAYTATTAALVAVIRELNTQIGVLQGQVEESFGRHPDAEIYLSQPGLGPVLGARVPGEFGDAADRYADARSRRNYAGTSPVTRASGTKRSVLARHARNRRLADALDRQAFAALSVSPGARAYYDARRSRGATHHQALRALANRLVGVLHGCLRHHTTYNEDTAWHTTTQNVELRAA

SEQ ID NO: 380959 - protein, 350 aa, unidentified
MTIVENHLLTVTGGIDTHLDFHVAAAIDSNGGVLGVETFDTTTGGYRQLVAWLAGFGTISLIGVEGTGSYGAGLTRHLTDKGIRVVEVDRPNRQARHRAGKTDAIDAIAAARAALTGTATGIPKSRTGNIEAIRVLTIARRSAANEWISVVNQIRHVTFTAPDEIRARFIGLSPITLVRTTAALKPRRTDPDVVRYTTLSTLRELGRRALFLREQKMRLNTDMRPLIREVAPSLLEVHGVGFDVAAKLLIAAGDNPHRIRSEAAWAHLCGVAPIPASSGKIQRHRLNRGGNRQANSALYRIVLVRMASDQRTKTYVAKRTADGKTMGEVTRILKRYVAREIYPHLPSTMD

SEQ ID NO: 380960 - protein, 420 aa, unidentified
MHETQSWFAGVDWASQKHDLWLADANGKRLGKRTFEHSGEGLAQMCDWLVATSGGRPEDIHVAIEVPHGAVVETLLDRGFKVYAINPRQLDRFRDRFSPAGAKDDSRDAETLSSSLRTDCRAFHQVSLADPAIIELREWSRMADDIRGGKIRHANRLREQLQRYYPQMLQFDSDLAEEWILKLWEAAPTPAKAARLRQAEVEKLLKRHRIRRIGAAEVLAILKQTALTVAPGVTEAAVAHIRVLIESIRLCAKQLKEAHRQLDRLCKLLAEPIAGEDGKSAPEQEQAQRAVAILKSLPGAGRIVLAVLLAEAFDTLQRGDYAILRILCGVAPVTRRSGKSRAVTRRLACNPRLRNAIHYLADAARRCDEKSKAKYLALKARGCSHARALRTIGDRLLYVACTMLKNGTLFDPSFESQKCA

SEQ ID NO: 380961 - protein, 461 aa, unidentified
MRNNRKSGDRPGSTRTIAGLPIVRAKVAGIDIGSERHWVCAPGLEGSGREVAEFGATTPELVRMAEWLKERKIESVAMESTGVYWIAPHEVLEKDFEVLLVDTRQLARVPGRNKKTDPSDCEWIQRLHSCGLLNGSFRPQEQVCMLRTLVRDKANLVAESADWVRRMQKSLDQMNVRVHRAVSDLNGVTGMAIVRAIAAGERDAQKLAQLRDRRCRQSEQEIAEQLSGHWREDHLFSLRQSLQMYDAIAERITAYEQEILRKLATMEIGEYPGGVVPPVKNLEKGKAIKKRGQEPKRQALYRMSGVDVTQIDAIGVETVEVVLSEYGPDLSRFPTEKQFVSHATLAPRVPKSGGKPLKHKKRNSASTRVAAALRMAALSLRHSATALGAYYRRLARRIGGDVAVFATARKLATLIYRLLRWGQPYVDEGAEAFEQRYRQQHIKGLALRAKELGYQLMPTTT

SEQ ID NO: 380962 - protein, 320 aa, unidentified
MLSFGGIDVSKDRLDVMVLPEEQCSSVSNDAAGWDKLIEQLRGSSIAAIGIEASGGYERGVMRALLAADLPVRQVNPFKLRQFARASGVLAKNDPLDARMIASFVAIMPTRPAQRQAPAAQRLTEMLAVRRQLSAEKVAAENASRLLEDAMLQRLSRRRIVRLAADIDLLDQHMVEIIATDAALAHRYHLLSSMPGVGPVLACTLIALLPELGRMNRKQVAPLVGVAPCAFESSTLKGRCCIWGGRAPVRQVLYMAAMSASNWNPGLKAFHDRLKAAGKLPKVAIVAVMRKMITTLNAMVRDDVVWADRLTGRHSVPTAR

SEQ ID NO: 380963 - protein, 423 aa, unidentified
MGWTQPGFNGLIVSQRWQSGHRKELREGPSVRVTRIGLDIAKQIFELHGVDRRGRVAVHKTLRRERVLEYFSQLPACEVALEACGGAHYWHRELSKLGHTARLLSTHKVKPYLDGNKNNAHDAAAICEASSRPSMRWVEPKTIAQQDLPSLHRVRQVTVRQCTLLANHIRGLLLEYGIAVARGAAALQRALAQLLERDEQRLSPLLKQLIAGQWRMLKLHEQQVKVHDCRIANIARHDASCRALLKVEGIGPLTATALVATAGNGRQFKNGRHLSAYLGLVPGHSNTGNKTVMLPITKRGNRYLRTLLVHGARSTLYHARRKTDPRSLWLQRLQAKRGHNVAAVALANKNARIAWALLRFGQAYRPDLAHAPIAVRGATPAASAPGRRAGLTLKLHGAAAANTATGMFPSRPQRVKGGPETCS

SEQ ID NO: 380964 - protein, 391 aa, unidentified
MDRVWVGIDVGKEFHWAHVLDASGTELLSRRVENDEADVSKLIDEALSLAGEVIWTVDQPGGSAALLLGLLWERDQRVLYVPGLTVNRASDAYRGESKTDARDARVIADQARMRSDLGDLEPGEEEVAELRILLGRRRDLLVEQNRTITRLGEALLSLSPALERALDLNRRGPLTLLTRYQSPRRLRRAGHKRIAAYLRARGVKGFDGVAGKALAAAKSQSISLPAEPLAARIVAELAAEVLALKDRIELVDEEIERRFFERPEAEILASLPGMGPLLGAEFLVAVGNLSAFESADHLAAYAGLVPAANDSGKRVGNNRRMRGGNKNLKRVFYQAAFASLRSSPESRAFYDRKRAEGKRHIQALIALARRRVNVIWAMMRDGTTFESRSAA

SEQ ID NO: 380965 - protein, 346 aa, unidentified
MPIVGGLDIHRKQITFDYVDTATGEVQRGQIAPADRVHLAGWLARRFPGGQDADFALEGCTGWRYVAEELAAAGIGAHVGEPAETAALRGPKKRAKTDRADSRHMRQLLADGRLPECWIPPSCILECRALLELYHDLRTAHTAWVQRIHAVLFHQGARQLGEGHLRTEEDLAQLRAIAAAQLSPAGQLQVATALDMLTALEDHRDAVRRRLLEAARHLAGAKVLQQRLYGVGPITALALTCWLGGAGRFSSARKAVRFAGLDVTVYSSAGKRSPGHLSRQGPEVLRWCVYEAGKAHARASAPDHAYYAAVKDRIDGKRAAISEARKIIRRACHILAELGDDALTMT

SEQ ID NO: 380966 - protein, 349 aa, unidentified
MRLYQPQPQTRFYCGVDLHAGSMYTHVLDHTGKTLLDRDLPADPHAFLDAVKPYRDGLVVGAECMFAWYWLADLCEDQHIAFVLGHALYMKMIHGGKAKTDKIDAAKLAALLKGGLFPLAYVYPRAKRQTRDLLRRRSHFVRQRGQLIAHIQNTNSQFNLPPFAKKLTYKGNRTDDLADRFADPSTKLSVSANLALIGNYDEQIRTIETHLVKSAKVDDAVTFQLLRTIPGIGPILGLVLLYEVDRIDRFPEAGNFLSYSRLVRCTHESAGKKKGSGNPKIGNAHLKWAFSEAACLMVRSVPAVKMWLARREKKHGKRKALAVLEAKIGRCVYHLWRKQQPFDAKKFLA

SEQ ID NO: 380967 - protein, 309 aa, unidentified
MRCIGIDVAKDTLAVFIPDKEYLNVKNNLVGFRKILRKLKEDDVIGVESTSNYHHHLAKFFLEKEFIVKELNPILTKQMIRATIRKKKTDKTDSKIISLLLKQGEGHLLTLEGLSSKVRKVSRARRKLIQMRTSLKLQLSSLEKGIVVVKELEKSIKSLIKKYDKEIEKLEKEILKQETKETKILESIPGISAQLARAIISEIGDVKRFSSKRKIVAFAGYDPKLSESGTSINRSGKLTKRGSPHLRCSLYYAAFVNTRFNNTFSNYYQKKRKEGKHFIQAVVATSRKILEVSYALLKKGECYQEQFTS

SEQ ID NO: 380968 - protein, 412 aa, unidentified
MSRVVIGMDPHKRSAGDDRPGSRPTIEVLDDREHVLATGRYSTDRDGYRAMLKEGRRWPERVWAVEGCNGVGRHLAQRLVADGEPVVDVPAKLSARARVFSTGQGRKTDATDAHSVAVVALRTPALREVVVDDVTVALRLLVDRRDELGAARTLTVNRLHRLLTELVPGGAKKALSAAQARALLATVRPRDVVGKTRRQLAADVVGELEVLDRKMKTASKQLTEMVEATGSGLLELNGIGPSGAARLLGDVGDVARFPTKGHFASWNGTAPIDASSGDQHRHRLSRAGNRRINRVLHIMAIVQLRHDTAGREYYRRKRAAGKSPMEAMRCLKRRLSDVVYRQLVADQKPLRAEPGAGPGGHPGATTTSSAAGFHPDTGTSDKSLPGPTTSDATPAGSARPDPTTPPVQALSA

SEQ ID NO: 380969 - protein, 421 aa, unidentified
MRGLRSNRVTAVKEGTLMVTVDVGMASNTGYCSTVDGRDTKPFKFDNTREGFDKLWSLVVVNKNRFKCNEVIVGYESTGPYAEPLLHYLRNKPVTIVQVNPMHTKRMKEVNDNSPLKTDDKDPRVIADILRIGHALSVVVPEGDAAYLRRLNNARERHIRERTALLNQLQQLVFLIFPEFKTVIKNIKVKTARHILKTYTTPEKIGCLNKDELGEAIRKQSRGKFGIGHADLLISLARDTIGIKEGMAGLAMDIRHILMQLETIDGFAAKIESEMEVTLIRIPCSTRILSIKGLGTVTVAGLIGEVGDFSKFRTRSEIMKLAGLDLYEISSGKRKGQRRISKRGRSLLRKILYYAAIQMIRKNGIMYDYYTRLTNRGMLRLKALVAVARKLLGIIHAIVRDNRDYAGAYHAPKRRMIQKAA

SEQ ID NO: 380970 - protein, 337 aa, unidentified
MDVAFVGIDLAKNVFQLHGEDADGTPVLQRRVRRDRLMAEVEALPPCTIAVEACTGAFYWQRRFEGAGHRVRIIAPQYVKPFAKHQKNDRNDAAAICRASRQPHMKFVPGKTLEQQDIQALHRGRQRLVNHRTALVSQMRGLLLDRGIAFAQSITRARREIRTLLEEGAPELSELFRSMLDQLYACFVALDQQIAWFDRQIEKVFQASETCQRLAKIRGVGPKTATAIVAAVGNGAEFNNGRHLAAWMGLVPRQHSSGNRQRLFGISKRGDRHLRTLLIHGARAVVRTSARRDDAQSAWIRDLQARRGAAKTIVAVANKNARIIIAMLKNETEFRAA

SEQ ID NO: 380971 - protein, 418 aa, unidentified
MNEDGDTRGTRRYVALDIHKHYCVVAGVDREGRVLSQPVRVEHADLEGWLKKKLRASDQVVIESTTNAWHVYDLLSPLVERVVVANPIQVKQIATARVKTDIRDTLILARLLAANLVPEVWVPPAHVRQLRQLLSQRRQLVETHTQIVNRMHSVAHRHHLNHARGKRFNEKTTGWQKDKRLSTLEQFQLELEMENRAYMEKQISRIGKEVAKMSHQKPWAESMTYLMQLPGFGVITGMTVLAAIGEIQRFDSARHLASYSGLTPGLEQSGTKNRGKGMTKEGRRELRWALVEVAQRAVKSDPVWKTRFQELQKRMHRNQAIVAVARRLLELVWYVLTRRQPYRHFSQERIAYKYLTWAWQMDDEARDGLTRQQFARYYLMRLGIGHDLTRIALDPKHPRKIASEAELLALRPELNHLE

SEQ ID NO: 380972 - protein, 342 aa, unidentified
MQVTTIGLDIAKNVFQVHGIDAKERVVVRKQLRRSQVIAFFSALPPCLIGMEACATAHYWARELRKLGHEVRLMPAKDVKAYLKRNKNDAADAEAICEAVRRPTMRFVQIKSAEQQGQLMQHRTRDVLIRQRTQIINALRAHLAELGIVAAQGDAGVNELCAIVADDRDERLPIDARASVIVLAAQLEALQRLIGSIEKRIKMQHRSNETSQRVETIPGIGVLGASAIVATVADPTIFRSGRDFAAWIGLVPRQDSTGGKQKLGPISKQGDRYLRRILIVGAIAVLRRAQGNPGKYPWLTQLLARRPFKVVAVALANKMARTAWALMAYGGTYRAPELAEAA

SEQ ID NO: 380973 - protein, 352 aa, unidentified
MVVLVGIDVHKNTHCAVAVDELGRALGKPLTVRATDAGHLQLLRWAARSFDGAVVQFAVEDCRHVSTRLERALLAAAATVIRVPPKLMAGARASARTRGKSDPIDALAIARAALREPDLPRAEHTHASRELKLLIDHREDLVGMRTAMQNRLRWHLHELDPECDPAVRGLDRAVELDRVQHRLEDLPATVVARIALELVTDIRALTGRINTLEKELAGLVRAQAPQLLELPGCGVLTAAKLLGETANPARFRSEACFAMHAGVAPIPASSGKTDRHRLARGGNRQLNVALHRIAVTQIRLDGLGRSYYQRRRAQGDTTMEALRALKRRLARVVFQLLKPTDTAAGACLPAAA

SEQ ID NO: 380974 - protein, 351 aa, unidentified
MTVQHYIGFDVHKKTVRYCAKTADGGIVDEATLPATRKALLGWAESRSAPWHGAMEATLFSGWIYDLLQPFAAQLQMGHPAMMKAIGASKKKSDSLDARKIADLVRCNLLPTCYVAPPKIRELRRLLRYRNLVVAQATRMKNKMSGLLMEVGAEYNQQQLHGKQYFTTLLDELEEVPESVKSMLRLSRSALEMFETTQQQILRCLRGDPKLAQRVGVLQSIRGVGEVTALTWALEVGDPCRLGSVARAVSYCGLTSALRSSADKQPRGPLSKQRNAHLQTVLIEAAKLAPRWNPPLAALHTRELERGNRNRATLAVARKLVAYLLAVDKSGQPFQVRDPALAVTQEVQHAA

SEQ ID NO: 380975 - protein, 430 aa, unidentified
MKYNTQNAKIASITEETLVLGIDVGSATHYVRAFDWRNYEFSDKPLAFRNDEAGFLTFMAWVEDIKEKAGKTAVIPGMEPTGHYWFNLGKFLQDSGMRPVHVNPHHVKKSKEMDDNNPDKNDRKDPKTIAALVNEGRFSYPYIPTGVYAEIRSLSNLRFQTQEEITRIRNRIARWISIYFPEYKDVYGKLDAVSGMMVLKEAPLPVQIKELGAEGINQIWRDAKLRGAGMKRAKTLLSAAEHSVGSQEAPEAASMEIWNLLEDYEKYSSRMDDLMARIEEKIKEVPYVDKLFEIKGIGLKTVCGFIAEVGDLSRFDDPKQLQKLAGYAIVKNSSGKHAGESHISYRGRKRLRYVLYEAAISVIGKNGEFREIHRYYQTREKNPLKKMQSVVAIACKVLRVFYAILTKGVDYDGEKMLGDIRRPAMSVQAA

SEQ ID NO: 380976 - protein, 391 aa, unidentified
MTRISAGVDVSKNRSTVCIIDQDGKVIMRPFLVWHSTEELDFLADTLKRLNGEVRVIMESTSVYQYPIALQLKERGLFISIVNAYKVKKFANTDFRGGKTDKKDSRTIASYGISYWDKLVEWQIPKDTYFNLDLLNRTYMNAKKHRQIILQELQHYIDCAMPGMDKELHSLNLSTKKDFMLDFVEKFWHRDEIVNMTEAEFTEVFTAWAKKKGYRPVEGKAAKIYAIAKSCIPYYPANPTVKTILQCIVDKLSGVNRTLVTIVTQMIEEAKKLPEYQIVREMPGVGDPLAARFFGSAGDIRRFKNSKALVAYAGIDSPPDESGDFSSTHRHITKKGSKVFRDTGYEIMMALRAQKRTWEKVRKNPDVYDYMLRKEAEGKPPPKLNELARFN

SEQ ID NO: 380977 - protein, 366 aa, unidentified
MIIIGCDFHPSFQQLAMLDTETGELKEKRLSVSEAEGFYRSLKGQTVRVGVETSGNMLWWERLLAECGYEMWVGDAAKIRATNPQRQKTDRKDARHVLDLLIQNRFPRLWVPTLAERDLRQLLVHRHKLVRMRAQVKNQLQHLALNQGVQWRRKLWTGEGREKLESLELDRWTKLRRDSLLRRLDAFDQEVAELDGFVKQEAESNPRACLLMTHPGVGPVISLAMVLTLGDVSRFRNGKKVASYLGLVPREQSSGSRRRLGSITKQGNSFLRHLLVEGGHSAVVAEEKWSRSYLHLARKKQRTGEAKVMVARKLAVRLYWMLRLEKRYPEIVGHAGQLESSCGRKMTEALNEHPASRSQRGLKRGA

SEQ ID NO: 380978 - protein, 412 aa, unidentified
MEVVYGRCAGLDVHKATVVGCVRVPDERPGERREETQTFATTTRGLLGLADWLTAHRVTHAAMESTGVYWRPVYAVLEGTMELLLVNARHVKMVPGRKTDLRDCAWLAQLLECGLLRGSFVPPPAVRDLRDLTRGRKALIRERGRQINRVAKTLELAQIKLACVVTDLMGKTGRAILDALIAGGEDPDALAALAQGSLQKKRGALREAVVGRLTPHYAFLLQQHLALIDTLGAQIEQFDARIEAAMGPLAEAYTCIQTMPGVGARAGQAILAETGVDMTRFPTPAHFASWARVCPGTHESAGTRKPTPTGHGPTWLRATLQEAAWAAVRTKKSYYRALYHRLKARRGSQKAIVAVQHAMLVALWHMLRDRVPHQDLGAEHFDRRQTARIRRHHVRRLQQLGYQVLLVEEPAA

SEQ ID NO: 380979 - protein, 418 aa, unidentified
MRSGYMVAGIDVHKKMLAVVIGRVGATGDGLSFEHRRFTTTASGLQELKLWLSECNTDEVVMESTAQYWRPVWLTLEGTFKLHLAQARSNAGPAGRKNDFRDAERAVRRLLSGDLRLSYVPDAEQRLWRLLSRTKRQLGCDRVRLHSQIESLLEEAQIKLSSVITDLLGVSGRRILRALVNGERDPEQLAALGHERLHASKQQLQDALTGSMHRLQGIVLGQYLDRVETIERQIAELDAELMAVLEPHQDVIRRLCAVPGIGISAAQQLIAEIGPTAAVFPSGAQLSSWVGVCPGREESAGVSASDRSPKGNRVLRGLLTQVAHAAIAAKGSYFQERYRRMVSRLGPGKAIWAIAHRILRLVWKILHQGVEYVEHGARSGDPRATLIRGQRMLAALRRMGYNLQVLASPNTQNPAPTV

SEQ ID NO: 380980 - protein, 338 aa, unidentified
MPLYGGIDLHANNSVVVVLDDQEQVMYQKRLPNDLPSILQQLSPSQASLHGVVVESTYNWYWLVDGLMERGFVVHLANTAAIQQYAGLKYTDDHSDARWLAHLLRLGVLPTGHIYPKEERAVRDLLRKRTQLVQHKTTHILSIQNLCTRNTGGAISSNRIKQLTAEEVDALLPEPALALAVKSNLAVMRCLETQIAAITQTVTQRVKLRAEFQDLLTVSGIGQILALTIMLETGDIRRFPAVGNFASYCRCVGSQKLSHGKRKGTGNTKNGNKYLAWAFVEAAHFAVRYNPCIKRFYQRKHAKTNAVVATKAVAHTWARACFYILRDQVAFDVSKALQ

SEQ ID NO: 380981 - protein, 326 aa, unidentified
MDQAITIGLDIAKSVFQVHGVDRSGTVVVRRQVRRAQLLPFFAKLPACLIGIEACATAHHWARELIKLGHQVRLMPPSYVKPYVKRQKNDAADAEAICEAVTRPTMRFVEVKSVDQQGILVLHRVRLMLMRQRVQLSNAIRGHMAEFGLAAPIGREGLGALIRLIADKDERVPAEAQMCLGMLAAQLALINDQILETDRRIRTNARATEIGRRLMGVPGVGPLLASALVATIPDPKAFRSGRNLAAWIGLVPRQNSSGGKERLGGITKQGDRYLRQLLVVGALAVVRSRSGTERGGHGWSNCWPGERQRSRPSPWPTKRPGWSGRS

SEQ ID NO: 380982 - protein, 415 aa, unidentified
MWNKVTRVKCPVDSASNNHIGGIIMICVGIDVAKDKHDCFILSSEGAVLADAFTIPNNAEGFDTLLQTIRRCARPADKIKVGLEATGHYSYNILGFLLDCGLPTYVINPLHTNLYRKSLSLRKTKTDRVDARTIATMLMSDVGLKSYTDTAYHNEELKSLTRYRFDKVRERAKLKTSISRLVCILFPELEKLVPTLHMASVYALLSEFPGAKQIASAHLTRLTNLLHEASKGRYGREKAVEIRDAARNSIGSDMPAKSLELKHTIRLVGELDAEIDEIEKEINFIMDEIHSPITTIPGIGSRMAAMILAEVGDFSNFDSPDKILAYAGLSPSTYQSGQLTNCYSHMEKRGSRYLRYAIFNATKFVCNWDPNFAAYLARKRAEGKHYNVAISHAAKKLVRLIYAMEKSRQPYRPAA

SEQ ID NO: 380983 - protein, 408 aa, unidentified
MVVEAARVTSSTVVVAVDVGKTEFAFSVSDGARVSLLKPRTGCPMTGPSLAQVVADIARVLPGGAGVKVGIEAAGHYHRPLLRAPWPVDWEVLELNPGHVTEQRRVLGKRTIKTDVIDLQAMTELMLAGRGQPVRDRSLVLGGLAAWSAHRTGRVSLRTATKNQLLGQLDRTFPGLTLALPDVLATKVGRLVAAEFADPAGLAALGSSRFIRFGATRGLQIRRPVADRLVQAARDALPTADAAVARAVLAADLALLSDLDAQVDQATDQLARLLPSSPFAPLLTVPGWGQVRAGNYGGALGDPARFDNHRQIYRTAGLNPIQYESAGKRRDSVISREGSVELRRSLIDLGVGLWHCDPAAKVYGTQLRARGKKGLVIACAMANRANRIAFAMVRDQCPYDPTRWLQGA

SEQ ID NO: 380984 - protein, 332 aa, unidentified
MNNKIYIGIDLHKRLQTWVALGENGNKLLTKTYPVTPEDINKAVDEFKQLGANQYDVLIEPVCGWIWVVRQLRELGMEVFISNPRKIRMIAESLNKTDENDAYVLARLLKTGEVALSYECSPETRKHRSLSRERCYLVNVRSGLKCRLESIVTRDGNHTFINQAKNRTQIIIANNEVKIHQNAIASIDIIIKQVEEEIKNTIQISPDIKRLMTIPGVGMVTASTICAEVGDFKNFIKPERLAAFAGLVPRERSSGGKQKLGSITHAGSPYLRYVLIETAMRVRNSKSTLSLYAFYERIKTKSGTMKARVALARKLLVIMWHMMNRQQDYVSS

SEQ ID NO: 380985 - protein, 413 aa, unidentified
MITPSSPTRFVALDLHRKYLVVGAVDSQQQIVLTPRRFGFEAFSDWATTHLAPSDAVVLEATANAWLFYDQLEPLVASVTVAHPLAVKLIAAARVKTDSRDTIKLARLLAANLVPAVWVPPVQVRELRALVTHRKRLVNQRTQVRNRLHAVLHRHNLTLPPGKPFAAHQQEWWLALDLSSSEKLRVQQDLSLLHSLEELVEAVEAELGRLSTCDPWVKQVPFLVQLPGLGVLSVMSILAAIGDITRFPSAKKLVGYAGLGASVHDSGETHQGGHITKEGRRDLRGVMVEAAWVAVEHHPHWQAQFERLTRRIGKQKAIVAIARKLLVAVWHVLTEQEADTNAQAQAVARKLMNWITHHGVIPGQHRDRLLLLYQHLDELGLSDELEEIHYYGTTYRLSVRQKLLREAQKSKRS

SEQ ID NO: 380986 - protein, 348 aa, unidentified
MIVIGIDSHKHTHTAVAVDGTGRKLAEKTLPATSAGHLELVRWARRLEDRTWALEDCRHLSRRLSTDLLVAGEGVVRVPPKLMAGARRSSREPGKSDPIDALAVARAALREDLPVATLDGPDREVRLLVDHREDLVAERTRAENRLRWHLHELDPGSEPPLRSLNRTVVLAALERDLAAAPGIVGRIARELVLRIRDLTATINGIEREVARLVADLVPSLLTLTGCGPLTAAKLVGETAGIGRFRSRAAFARHNGSAPLPVWSGNTERHRLSRTGNRQLNVALHRIAITQLQREGPGRTYLEHRRAQGNTKTEAIRALRRRISDEVFRRMRNDEAARAASPSGLAAAA

SEQ ID NO: 380987 - protein, 349 aa, unidentified
MSTIVQQVAGIDVAKDELVVSFSQKTADGIIEHVSSKVFKNHPKGFQELLLWSGKLFDAALPVSFVMEATGVYHEALAYFLDEACCKVCIILPNKISNYFKTLEIKTINDKTSAQTIARFALERKLEYWVKPSPVFRTLKQLCREREQLVAQRSLIKNQLHAEKTQGFPNEASIRRMKERIGLFNKQEQQIKHELMQLIAADPVLKQQIENICSIRGVGILTAITVLAETNGFELIRNKKQLVSYCGLDVQEKQSGTSVKGKPKLSKKGNRNLRKAMHFPALTAIRHDERMKAVFIRLVSRHGIKMKAIAAVQRKLLELIYIIWKTGRKYDPEYLQKPAAVQLELEQPL

SEQ ID NO: 380988 - protein, 346 aa, unidentified
MRFYNGQHRYYCGVDLHTKRMYMCILDQEGNTRLHRNVRAKPHDFLSAIADFRDDLVVGAECMFTWYWLADLCLEEKIKFLLGHALYMKAIHGGKKKDDKLDSEKIARLMRGGTFPLSYVYPREMRATRDLVRRRMFLVRRRSELLAHVQMTNQQYNYDPFEKMLQYASNRDVLDRFEQPSVRLSVEADLKTVNHYDELLTQLEKDLVRQATLHDPRACRLLRTIPGIGKILSLVMLYEIHTIDRFPSVGDFLSYARLVTPKQTSDGKVTGHGGAKIGNVHLKWAFSDAVLWMLRYSEDAKSFLKRKEKKYGKCRAMTLLARKIARAVYQMLKRNESFDAVKFFAC

SEQ ID NO: 380989 - protein, 395 aa, unidentified
MFIVGIDVAKRSHEVCMITSDGQTVQRPFSIRNNCTGYNLMLEKIRKHTNIKSQIVFAMESTAHYWLALFTRLRKDGYHVILLNPIQTSAMRDMFIRKIKTDAKDSFIIAELIRFGRYAESNVAQDRLLALKELCRNRFYLVDMARDLKRKLIELIDRVFPGYEAQFDTIFCKSSVALLKKYPTPQKLSNAHLDKLTELLWNSSNGHFGEWKARELKELARNSFGAEDCDGAYSTLILLMLDQIQSLSGKADALEKEIFRLFQSFDTTVTTIPGVGPIIGAVILSEVGDISRFSSADKLAAYIGVDPSVNQSGEFQAAHAHMSKRGSPYLRRCIWMASQVAVQRDPMFRAYYEKKAAEGLKYMTIIGHVTRKMTAVIFAILRDHKVYEPILPTAA

SEQ ID NO: 380990 - protein, 333 aa, unidentified
MVEGTEGSHHKEGSTKMRNHNMVCAGIDTGKRKLDVALVEGRQRLQADNNPDGHAALSAWLRKHRVKRVGIEASGGYEQTLVGKLRLDGFVVIVFQPAQVRAYATFHLQRAKNDKIDAALIADCTAQTRKIHAPPDARLAPFAEHLTLIEQLTEDVARVKTRRETCREQRIRRYWDAEIVRLKKLLSVELKTLIAAIRQHRDLSTRLDLIASVGGLGLKTAVAILVRMPEIGRVSREQAAALAGLAPYDDDSGDQLGARHIEGGRERLRKALYAAALAAAFHWNPQIKIIYRRLIAAGKPHKVALVACARKLLIYANAVVERGTPWTQRPAVV

SEQ ID NO: 380991 - protein, 316 aa, unidentified
MSDAQVLVGIDVSKAQLDVALRPTDDCWHVSHDALGIAGLVERLRTVQPTLVVLEATGGLEVPVTGALAEAGRPVVVVNPRHARDVAQATGRLAKTDTLEARGLAHVAEAVRPTPRPLPEAQAQALSALLTRRRQLVQRLTAERRRLQTAPQPIRADIQAHITWLACRLARTDDDVAAAIRSSPLWRAKDEIVPSTPGVGPILSRTLVAEVPELGVLNRQEIAALIGVAPFNRDRGTLRGKRAVWGGRAHVRAVLYMSTLAAVRHNPVLKAFYERLRSVGKAPKVALTACMRQLLTILHAMLKHRTPWQENYAHHS

SEQ ID NO: 380992 - protein, 313 aa, unidentified
MQDLLEICCGLDVHKETVVACLLKGSVNDDKPQKTIRTFSTLLPGLEELKAWLESENCCHVAMESTGVYWQPVYNIFESALDGTMVVIVTNARHMKNVPGKKTDMKDAEWIATLLRAGLLSGSFIPPQTIRELRDLTRYRKSIIEELSSQKNRIEKHLQSCGFKLSNFLTDIFGVSGRAIINHIAEHGSITAEEVENYVKTRTRNKLQEIKLSVNGRMNRHQREFLRLLLKHLDETYEHLSEIEGNINSELEKFKRQIEQLDSIPGIDKTAAAVIIAEIGIDMSKFKTAEHICSWAGLSPGNNESAGKKSPLE

SEQ ID NO: 380993 - protein, 356 aa, unidentified
MKKDAKVISYVGKEVFIGIDVHKKTYAVVAKVEGEVVKKWTTAASPQTLSLQLIKYFDGATIHTAYEAGFSGFVLHRELKKHGIQNLVVNASWVEVSVNDRVKTDKRDALKLSTLLEVRRLKGIRIPSEVEEAHRLLSRTRQQLVEDRTAVKNKIRMKFHQFGLIDDDETRQMTHILVDELLENAPSKELTIAINAYWSVWRNLDEEIKKIEEELKHQAKEDPNEKTYRSAPGVGPLSARILSNELGNMCQFKNERQLFSFTGLTPSEHSSGETIRRGHISRQGNSRVRGILIEIAWRAIGKDKTLADFFERLYPRTGKTKAIVAVARKLIGRIRAAFQKREHYQKEFLVAETPAA

SEQ ID NO: 380994 - protein, 325 aa, unidentified
MKSLQLAAGVDVSKDTLDVYYNDSSGKEHYLKIANQTTGYSLLIEKLGVQRTFVMEMSGPYYLRFAFYLSNAGADVRVENPLVIKRFIQMQLERNKNDRKDARWLYRYAIQREAPAWALPDNKQLQCIQILSSTDLFTRQLTQLHNQLHAIDQSPVVCKQAAKAINIAIVALNKQLLILESKLNELLSQWHGEQLKNISSIPGLGKKAVALLIVYTNGFKKINNHKQLIALAGLAPKEYSSGSSVRAKTCICKMGNGHLRNVLYMCAMSAIKYNGACKSLYHRLKEKGKNGKLALIAVCNKLLKQAFAIATKGQVYNHDYCRSIN

SEQ ID NO: 380995 - protein, 428 aa, unidentified
MKGNKTENRRRVNISEASIGIDIGKYRHVAVAQNWDWQRLKPVIFDNNIVGFNSLLVTKEKVKEYFGVTNIRFALEPTGQYWLALAEWLEMRNEEVRIVQPAHTHKAKELEDNSPNKHDIKDGGVIADLDRQGKSLRLIRPGGVFAELRHLTACRQGLVQEVNREKNRLHGVLDILFPELIKLFKNHIGKGLIGLLKETACPDKIAGLGEEVIGGLLRRKSKGKLGAVRAGLIVQTARISIGVKEGQRVLEMEIKQIIDRLEFVRHQLKEVERNMKAVLKGVPNIEILLSIPAIGEISLAAILGEIGDIQHYNSAEEIIKLAGLNLYEISSGQHQGVRRISKRGRPLLRQILYMASLRLIKAKSGFYVFYQRLTTKGKHKIQAIVAVMCKLVRVLFTMARNKQKYDDNKVGQKNPVNCKSKGVKLVLN

SEQ ID NO: 380996 - protein, 391 aa, unidentified
MGNLIKHVVGIDIAKEKFDVCLMSLDNQLTSKIKGSRKFTNSLVGFNEFVLWLKKNCNKDIPVQFLMEATGVYYEKLAIYLTDSNYNVFVVVPNKARRYLQSLGIKSKNDKIDAKGLALMCLQHKFDPWKPISKFYYELRLLTRHHQNTTEMKTALLNQLHALEYSGYSSKEVEKQIKKVVALLDKQLIEGKNEIDAHIKKDKEVEGKVKMIQRIKGLSILSIATIIAETNGFELFSNMRQLVSYAGYDVVENQSGTHFGRTKISKKGNSRIRRILHMPSLIVVRCKEPVFENLYTRVFERTKCKMKGYVAVQKKLLELIYTLWKKDKAYDRTINVSLASGNGDSRALFLVSRSEIDEDKILKVVPLKSSTTQDKHRYNESSEALFLVKQN

SEQ ID NO: 380997 - protein, 452 aa, unidentified
MAKDPEQKKSGEVQPLHELQPNAAGIDIGATEIYVAVPAGRSTKSVRRFLTFTDDLHEAARWLKECGIESIAMESTGVYWIPVFQILDAYGFEVSLVNARHVKNVPGRKTDVKDCQWLQYLHSVGLLRSSFRPGQDVCVVRSLLRHRANLVKAAASHVQHIHKSLTQMNLQIHNVISDITGVTGMAIMDAIIAGERNPEILAEHKDPRIKADKQTIVKSLTGDYRLEHLFTLKQALQTWRHYQQMIRECDAEIENHLKEFDSRIDPNENPLPPPTKNQRKPKGNGPDFDIRAHMYRILGTDLTQIDGVSSLTANVIFTEIGPDLSDFQNAGHFCSWLGLCPNNNISGGKILSSHTRPGSNRAAAALRLSANALWNSKSYLGDYFRRMRSRQGAPKAITATAHKLARIIYHLIKNKTNFNASVFVEEENKHQQRLKKRLINQAKSLGLQLVPA

SEQ ID NO: 380998 - protein, 347 aa, unidentified
MSVSMIGLDTAKSVFQIHGVNEAGKVELKRKLRRSELIPFFEKQQRCTVVMEACGAAHHWARILSGLGHTVKLVAAETVRPFVKKGKKNDAADAAAICEAASRPDVKFVATKSVEQQGILALHAARSLLVKQQTMLANAMRGLATEFGLTVPKGIRKLPELMELVAADEAIAKQARQAITGLYDRCQELAEGIETFEAEIVAHARHDETARRLATIPGIGPITASLIAATVGDISLFKTARQFAAWLGLVPAQNSTGGKTRLGRITKTGNREIRRLLVLGATSMVQRADGWDSAVGTWLRNILQRRPVRLVSVALANKMARIAWAVMTRKEVYRPKGGVIVVAQAAA

SEQ ID NO: 380999 - protein, 514 aa, unidentified
MQAPLAVAAGERLLEGQHVEKNLESLASCVKVQISRKSQLHIKGRQDMEEIFEDCHDVEVVYQRCCGLDVHKKMIVACLIIVAADGKRRKQIRTFGTTTAALLELLDWLKAAGCTIVGMEATGVYWKPVYNLLEGHFELVVANARHIKAVPGHKTDVKDAQWIASLLQHGLLKASFVPSSEQRELRELTRYRTTLVEERARIVNRLQKTLEDTNLKLGDVVSDITGKSSQAILRGLLAGETDPAVLADLARGRLKAKRADLQAALVGTIKPHHHFLLTEHLDHLHRLDQSIERVGAEIEARMGPLLPPEPEKDSSKQPQAVQAPSDEQPQAEPTASDEPCEPATKAPLSLAQAVVLLCSIPGISQRAAEGILAEIGTNMDRFASAKHLASWAGMCPGNHESAGKRSSGKTTKGSPWLRKLLVQAALAAGRTKNTYLSAQYGRLAARRGKKRASIAVGHTILVIIFHVLREQKPYQELGGNFFDERERQAVQKRLVQRLEKLGYDVTLEPVAHAA

SEQ ID NO: 381000 - protein, 315 aa, unidentified
MTSTQVFVGIDISKAQLDLALRPEGQFSAPNNEAGFAQVLERLNAVHPTLVVLEATGGLEIPLTGVLAAAGVPVVVVNPRQVRDFAKATGRLAKTDALDAQTLAHFAEVMRPEPRPLPDEQTQALAAILARRRQLVEMLTAEKNRLGTASKPVRKSLRTHIAWLERELSHTDRGLAQAIRESPVWREKEALLRSAPGVGPVVTTTLLATLPELGTLTGKQIAALVGVAPLNRDSGTLRGKRTVWGGRAQIRAVLYMAALVAARFNPVIRAFYQRLRAAGKAKKVVLTACMRKLLIILNAMLKHRTAWRAELVQCA

SEQ ID NO: 381001 - protein, 421 aa, unidentified
MRAVALDVHRDFCEVAIVAEGRLRSAGRIATRPDALELFAQSLDPRDLVALEVTGNAWAIARILEPHVARVIVVSPSDTGIRQARAKTDRLDARALAKLLWAGQLDGVWSPDERIRAMRRRLARRSQLVRARSRAKNEVHAVLMRCLKDRPPASDLFGVKGRAWLAEQQLALTERETVDSAVRQVEFLDSEIAQVERLIAAEALSWPEVKRLMSVPGVNVIVAATFMAAVGDIRRFPDRRKLTGYLGLDPRVRQSGAGPANHGHISKQGSSSARHALVEACWSTVRQPGPIAGFYQRVRARRGHSIAIVASARKLACLFWCLLTRGEDYAFAQPSLTTKKMRRLELTAGAPRRQGGQGVWATNDAMRHAERELALQAQRAYERTVKDWQQKKGASATPGRASSGSSKEQVARQTPRPKSAL

SEQ ID NO: 381002 - protein, 328 aa, unidentified
MNLYVGIDIAKHDFASALELADGSLKRSTKKLGNNTRGWNTLKSWVSREKSACQAERVHLGIEATGGYEMPMVEWLRSHSDFEITILNPIQVKRFIQSQLIRTKNDPVDARMIAHYMAVLQPDPTPAPLEGSRELKELTRHLNHLVRKRADEKTYLETVRDPGIKSLVKQMIKSYDQQIRTVKTQINDHLDQHPGLKKNKDLLMSIPGIGAITAGILLSEINESLDAKQQVAHAGLAPQERQSGLFGGKSQLCKTGSRRLRTALFLPALAAIRFNPIIRRFYLKLISKGKPKMVAVAACMRKLLHIAIGVLKNQINFDPDHEQLSLVS

SEQ ID NO: 381003 - protein, 449 aa, unidentified
MTVPPTGTRRPERTDRRETNVQPGDIDVWLGLDVGKSSHHACALDHDGNTILDTPVDQDEKQLRRTIVKLQRRGTVLVIVDQPNTIGSLPLTVARDMGARTAYPPGDAMRKAAQLLPGGSKTDRRDARIIASTALRMPETLRDCEPDDETMAALRLLSGWDEDTAHELTRTVNRLRGLLLHLHPALERALAGDRIKSDTALGLLEHHKGPDGLRRAGAARIREYARRHGLKGTAITDAVADAIGEQTVTVPGTRAAESLIPQLVSDLRRLRDRRTDISRQVEELLADAPLLTVLTSMPGIAARTASQILLAIGGDIGRFKDAAHLAAYAGIAPVTRQSGTSIHGERPARGGNKRLKNALFQTAFAAIRLDPGSRAYYDRKRAEGKRRNAAVMCLARRRCNVIYSMLRNGTLYQPGGTHTTTTTPPRTETTPAHAPRPRQDTTHPGTRRT

SEQ ID NO: 381004 - protein, 413 aa, unidentified
MKYYTSTTQYNCGIDLHARQMYVCVMDREGKKLVHCNVKDNDFKFFLKLVEPYKHDLTVCCECMFGWYWLADACQDAGLKFVLAHALYVKAIHGGKNKNDRVDSEKLTHLLRSNLIPPSYVYPTQQRPLRALLRQRIYYVWRRAELLARIYSHQLAHNRTPAKQTRRTRDAWEERLLAAENHPQRQFALRNDLAMIRSFDRQISVIEVELQHLTKHLPLSRDYTLLQSVPGIGESLGLTILYEVGDINRFPTVKDFVSYCRLVKGTVASAGKIKGLRGAKLGNPYLRWAFGEAAVIAKRDHYLVGPLSQRLEVQMGGNKFKANTVVAIKLARAVYFMLKNQTVFDPERLVGSLQKCFRPGRSQPAGLTGRAKKAMPSSVAESVSCASSTPPCVGQASTPAPSIGSCGQVPVAN

SEQ ID NO: 381005 - protein, 350 aa, unidentified
MSNLSNVKNFIGVDISKDTLDICVLNYKLAKQSKANLDQTTNANLDQTQSKEQKQFFKIPNNPNSIKAFFVNFNPNQTAVTFEATNNYGVNLAKTLSELKIPFQELNAYKSSLFLKHLSYIKTDITDSYGLAYYCANFSNIFIQSKFNPNFKLIKSYQTTLNMLSKMQTQMKNLEKSQIGVNDEYLKQAINSFKLTIKSLFTKLEDFTYEILSQEIPQTKEIIENNKGFGKSLAIAIFPIMQYNKDKNYKQIISFLGLSPRVFQSGTSVLKSPHIDKKGPSKARKALFLSALSCIRYNEYFKAKFDRLLANGKPKMVAIIAVMCQMIKYLKLRYFSDDLNKVDLKAVQGS

SEQ ID NO: 381006 - protein, 347 aa, unidentified
MVTLGSDSHKRTHTVVAVDEHGRQLGARMVAATAAGHIEVLGWARQWPERRWAMENCRHLSRGLERDLLSAGEAVVQVSPTLMADSRRSGRELGKSDPIDALAAARAALREVRLPVAQLDGPSREVKLLVAHREDLVGERTRIQNRLRWHLHELEQGYEVTPRGLDRQVVLSAVAAWLKERQGVVAEIARELTARLGELTQRINALERRIAQLVRKLAPTLLALPGCGSLSAAKLVAETADVNRFHSAAAFAMHNGTAPIPVWSGNNVRHRLNRGGNRQLNTALHRIAITQIRLGTAAADYVARRKAMGNTKTEAIRALRRRLSDEVFRRLRIDHPSRQTAPVALAA

SEQ ID NO: 381007 - protein, 322 aa, unidentified
MKFVGIDVSKDNLDVAVTGESKTTRFAQTDEGREQLAAFVTGLQPRLVVLEATGGYEMAAVAVLLTSKIEVAVINARRVRDFARALGREAKTDPIDAAVLAEFAEKMVDRIRPSTPPDADTSALRDLLLRRRQLVTQLASEKTRQKQFVAPRNNKRVVASVKRSIDFLEKEIASLDDDMSTHIKNSALWKQKDELLQSVPGVGPTTSRTVLSVLPELGKLTNKQVAALVGVAPFNNDSGAPRKGRPRHIRGGRAEVRNVLYMAVVTAIRFNPTIREFHQRLVAAGKNGLVAIVACIRKLVVILNSIVRKNVPWSEAKALSAS

SEQ ID NO: 381008 - protein, 432 aa, unidentified
MERIRENAAGIDIGARKVFVSVGGKEVKCFFTFTEDFEKLRDYLLENAIETVAMEATGVYWNILYEILEEAGLDVWLVDGSQTKQVPGRKTDVKDCQWIQQLHSYGLLNRCFVADSDIKELRIYQRLREDHIRSASMHINHMQKALTEMNIRLTEVLNQIHGASGLAIIEAILKGERDKGKLLNLCHIKIIKNKKEEVLKSLNGRYTKSGLFALKQALDSYYFYQNQINQCDAMLEEVLKRISKGKSDQIISSHRKPIRHNKPDIDNLGSIMLKIFDGKDATTLSGITDYTWMQLLSETGTDLSRWESEKHYTSWLGLAPGQHTSGKMKKNKRKLGRPKAGQIFRQIAQSLLTSKHIALGAFGRRLSSRKGSPLAIKAVARKLATLYWRIMVKGMDFVEKGIQQYEEQLKAQKQRSLIRLAKELNMQITNNG

SEQ ID NO: 381009 - protein, 390 aa, unidentified
MIYAGIDISKHKHDCFITNDFGDVLREVFSFKNNAEGFRELHKHLEAVKNPEEEIRIGFEATGNYAINLKVFLEKMGYDYMESNPLLVKEHMKSKSLRRTTTDKLSAKGIASYLRETQYLPHPTAFYPKFALKQLTRFRSSLMKNRTRYMIQLTNVLDCIFPEFKPLFDNKFTVTSLYILQNYQSPEAISNMNSRSYEILRKKSRGHFTLDMFVRLKALAKNTVGVFDECYRIELLDLLELYYQVDAKINELDDKITVIIKELNPPTLSIKGVGEVSAAIIISEVGDFSRFKNSNKLLAFAGLEPGNFQSGTVEHDGKMVKRGSSHLRAALMNCARSISLHNEVFAVYFRKKLDEGKEYNVAANHVAKKLVRLIFTLETKGEMFNPEKLR

SEQ ID NO: 381010 - protein, 380 aa, unidentified
MIAVGIDVSKSKSTVAILNGDGSIRAKPFDVHHVADELQALVDYIKRTSEPPTILMEPTSHYHYPLLKAFTEAELPVCLINPYQMKKYGDTELRKAKTDKRDSLRIAQYALEKSYSLIPYTPQDQKYEDLRFLSRQYSQRISTLTVAKVQLLSLLDETMPGITTILPLKSRDPDNCVLLRFIKRFKSFDVIRKMGKTRFLDSYQVLVKKTKDRFAGSKGLAIYELVLNSVTTRGENPLSAMTQDQCVDLVSTSQKAADEINLQMRIIAETMPEYKVLRSMAGVGDRLGPIILGEIGDIRRFHSGKALNAYAGNDAPPYQSGQFESRNRHISKRGNPALRKACFEVMQALKLTKPQDDPVYLFLLKKEQDCLLYTSPSPRD

SEQ ID NO: 381011 - protein, 339 aa, unidentified
MTIVMGLDQHRGQITGEWIDTDTGELQRARVMPADRAGVRRFVERFRGRELEVALEATTGWRFVVEELRRVGAVVHLAEPAETAGLKGPKKRAKGDRADARHLRELLMVKRLPESWIPPDHILDLRARVRLRHTLSEQRCEWQQRIQAVLYHHGCPQRRELMVGDGREWLAAQPLSASAREQITVALAMIDALEAQIVPLGKELRAYARRQVGCKALMAHYGIGELTAVTILAELGDCTRFSSSRQVVRYAGLDITVYQSDQHRAPGHISRQGPPALRWALYEAAQVARSRERSPDREYYLDAKERIGGNRACLSVARKLLKRSYHTMRELGEEALAPV

SEQ ID NO: 381012 - protein, 337 aa, unidentified
MKYTGIDLHSNNSVISVINETDKVVAEKRLPNDLARILEFLEPHKADMAGVVVESTYNWYWLVDGLQEAGYTVHLANTTAIKKYDGLKHSGDETDARHLAHLLRLGILPTGTILPPAHREVRDLARKRMQLIQNRTAQILSIETILSRSTGKRLTSNQIKRLTLEDVPAMGLSECVTLALQTHVAVIEVLQQQIQGLEERLQQEISNQDDFKHLMTVPGIGVVLATVIYLETGPIERFAEPGNYASYARCVGSEHTSNGKKKGQGNTKNGNKYLAWAFVEAAVYSTRFCPQAKRFYERKKAKANTALAVKALAHKLARACYHILKQREPFDMERCFA

SEQ ID NO: 381013 - protein, 437 aa, unidentified
MEIKKVDYAAWIGMDWGSYQHAICLQAAGSSLVERYTLQQKPEALHAWFMNLHAHFGGGKVAIAIEQTRGAVIHFLLGFDFVHVFTIHPKSLKNYREALHPSGAKDDPTDAELLLQFAMVHQDKIKPWVPAQPEIRLLLRLSEFRRKIVGKRVRLTNELTQILKEYFPGALDWAGALDTVMACDFLSKWPTLEKLQKSKPETIRRFYREHGSRCARLTEERLSQIRSALPLTTDQPVIESSALAAKAIVPPLRSAIEAIAEFDGRIEEVFQKHPDSDIFSSLPGAGSALAPRLLAVMGSDRSRFNSSEEVAKYSGIAPVTERSGKAKWVHRRFACSRFVKQSFHEFASHSILQCDWARAYYDRKRAEGKGHHVAIRALAYRWIRIIYRCWKDRIPYNAQTYMESLRRKRPSWLTCLDGSEFQNAQSRPRRSKNHVSS

SEQ ID NO: 381014 - protein, 441 aa, unidentified
MQDSSPVLVSSSSSLQSPQDFGQLTHFVGFDWARNSHQATAVDRLGKIALDLEFEDTAAGWALLREKLGGLVGFASFARLGVCIETSRGGAVERLLEMGLTVYPVNPKSAERYRDRKCPSGIKSDSLDAWCFADALRLDGQDWRQLQPVDPLTLELRLLCRDEIGLIEQRTALVNQLQAALHEYFPTMLRAFEDWTLAMSWRFVIAFPTPSQLTVAGKRKWEKCLHASKLYNPGAMQTRLELFAQPQLFANPNPAVVAAKSFLAVNLAEQLLVLGGQIDKYRKRIEQLFNDHPDHDLFGSLPNAGKKLAPRLLGEIGQNREVFDSAEGLACYAGTAPVTRQSGKSRSVSFRRACNKTLRATLHLWANVSRSDCAWAQAYYTRKKEQGMSHAAALRCLAQRWIKILWKMWQDHTPYDEARHTQNQLKHGSWVLRLLPENTAA

SEQ ID NO: 381015 - protein, 336 aa, unidentified
MLIIGCDFHTRFQRIAMLDTQTGELVERRLEHENGEARGFYAALRAPARVGMEATGYSQWFETMLAEQGHQLWVGDAAEIRAAVVRKQKTDSRDADHLLDLLLKDKFPRIWIASPRERDVRQLLRHRHKLVCWRTSVRNQLHALAMGQGICRKQKLWTAAGRKELEGLALGPWASRRRQELLQMLDWLEAPISALDEAVIQEVERHPAARRLMEQRGVGPVTALAFVATIGPVERFRNSKQVVSYLGLNPRESSSGGKQRLGRISKQGNSMLRFLLVEAAQTASRGDPELRRDYLRLKFRRGSAVAKVAIARKLAVRLYWKLREAGQPRAAGPYAG

SEQ ID NO: 381016 - protein, 341 aa, unidentified
MSKVSEAVGATVFAGIDVSAATLAAAVQREGQDGFRQKGFANSLFGHRQLIAWLLKGGDRVRVSLEATGTYSLDVALALDATEGIEVALLNPKTMNRFAQTLRRSKTDAADAAALAEYSRRMEFVPWQRPSRSGLELRTLSRHIATLTEDHTRWGNRLHAAEASRTTPRCVLHDLKRARAAIAKRILKLRKEAVAMVGRDAQLMRKFEQLKRIKGIGETSAVQLLGELAGLDPEMTVRQWVAHSGLDPVHQVSGSSVRKQTRISRHGNSHLRRALYIPALVGARHDPHMRAFYELLQTRHKTKLQALVAVARKLLHAIFGIFKTGTDYDGAKLFPHLIPTS

SEQ ID NO: 381017 - protein, 417 aa, unidentified
MAEEIAWFVGIDWASQSHQVCLVDARGECLGERAVAHGGAGIEELCDWLIARTGATPEVIGVAIEMTQGPVVEALLERGFCVYGINPKQLDRFRDRFTVAGAKDDRRDAHVLGDSLRTDRHAFRRLSNDEPVIVKLREWSRMTDDLQQERTRLASRMREQLWRYYPQMLELADDLAADWFLDLWNQAPTPAKAARLRQTTIERFIKAHRLRRWQAPEVLRILKQKPLSVAPGVVEAASDHIRTLTVRIRLVNQQLKAAHRKLDELCAQLIPSEENEPGQQCEQRDVVILRSMPGLGRIILAVLLAEVWQPLRRRDYHALRSLSGVAPVTRRSGKTSVVVRRYACNKRLANALYHWARLATQHDALSRRRYAALRQRGHSHGRALRTVADRLLSVTCTLLEQQTLFDPTYEVRDAAGA

SEQ ID NO: 381018 - protein, 325 aa, unidentified
MIDGILGIDVSKNTLDASMSSCNNRVRARSFANSSDGWRHLLNWLTSQKIRRVHACMESTGRYSLGIACALYEVGHIVSIVNPAQIRDFARTKLGRNKTDGVDAAHIREYCELFKPQPWAPPSEAHRRLGELQTIRSGIVAGLTEWKNRKSSGMVDAVAQSLADVTISHFTSQLGAVDEAIAQTIDNDSGLRRKRDLLLSVSGVGETLAGVVLAELPGPDVLRSSAEVVAYAGLNPRQHQSGTSIDRLTRISKIGNAALRAALYMPALSAMRYNRAIVALVARLKSRGRLKPKQIVVAAMRKLLVLCFGVLKTGKPFDPALAMGC

SEQ ID NO: 381019 - protein, 288 aa, unidentified
MRFYTKQHRYYCGIDLHARRMYICILDADGQIRVHRNGPATPEHLLATIAPYREDLAVAVECIFTWYWVADLCAREGLAFVLGHALYMKAIHGGKAKNDKIDAHKIAVLLRGGMLPMAYVYPRAMRATRDLLRRRCHFMRKRAELLTHIQNTATQYLLPPFGKKIAHKSNRTDVAAQFTAPEVRKSIETNVALLDHYDRLLTDLELYLARTAKVHDVHTFSRLRSVPGIGQILALVLLYEIHDIRRFPSVQDFVSYCRLVKCGKESDGKALRVLRRQDRQRASQVGLL

SEQ ID NO: 381020 - protein, 392 aa, unidentified
MDVAHTHVCGIDVHKKSVSVCLLIGVFDTNRPKKLQKPFDTTVAGLKQLAEWLDDHEIELTVMESTGQYWRPVWTVLAQHSSTTLRLVNPQHIKSIPGRKTDIKDAQWIAELSRCGLIRPSYVPDIKTIELRESTRLKKRITQHQTVVKNEIHNILERSNIKLASFINDIFGVAGSKFIELLMNGEVVTMEKVQSIMSKRMKASSEEIYESLQGILSMNDRMLISIQYHLYEVYQEEIASLEAQIQHQMIVDQELHDRLMEIPGIGAGTAAVILAEIGNNVDSFESEMALASWTGLCPGSYESGGKTYGSRTTRGNPHIKSALAQSAITAKKCKDTYLSAWCYRLQSRTSKAKANIALAHKLLRIIYQMIKTGDHFDERKLKGWRFQRNHPA

SEQ ID NO: 381021 - protein, 343 aa, unidentified
MQAIKTIGLDIAKSIFQVHGVDADGQVVIRRKLKRRYVLAFFAKVPPCLIGMEACATSHHWSRELQALGHRVRLMPPAYVRPYVKRQKNDATDAEAICEAVSRANMRFVETKTTEQQSCLVLHRTRHLFIRQQTSVINAIRAHLAEFGMVAPVGRKGLEQLLEAVANARDQRIPVLARACIAALGAQLRALKAQILEFDRQIMLWHRSHETSKRLDGIPGVGPALATALVASIADPKAFRSGRDFSAWIGLVPRQHSSGGKEKLGSISKQGDRYLRSLFMTGALAVIRYAKIYGSRHRPWLTALLARRPTKVAAIALANKLARMVWAMMSRGERYKEPVALAA

SEQ ID NO: 381022 - protein, 416 aa, unidentified
MNAVGIDVSSRKSTVAVLRPLGEVVCLPFDVSHDADGLASLAEKLKALDGETRVVMEHTGRYYEAVEKALHEAGFFVCAVNPLLIKEYGANSLRRVKTDKADAVKIARYALDNWADLRDFTPMDAIRYDLKTLNRQFQLASKQRTASANNLIALLEQSFPGIRKCFDSPVRSDGTQKWVDFAHSFWHVDCVRKQPFPAFCERYRKWCKRHAYLFKLSNAEEVYALAKRAVVLTPKSKVVKVLVQEAANQLSSISRSVEVYRAEMDRLAAMLPEYPVVMAMYGVGKSYGPQLMAEIGDVRRFERKQALVAFAGIDPMPNQSGDKNVRSNKSSKRGSPYLRKTLFNVIRTYLQCAPQDEPVFQFLNRKRAEGKPFYVYMLAAANKFLRRYYAKLRDYFASLDTLQPVAPIPTILKATL

SEQ ID NO: 381023 - protein, 384 aa, unidentified
MNKHNILFIGLDTHKVSTEVAYIEDDRGALPIHHGKIPSTKSAIKKLIRRFESKYPKATLHFAYEAGPCGYWIYRFITSLGHCCYVIAPSLIPKKPGDKIKTDKRDALRLAKLLKTEELTPIYVPEPEDESVRDLSRARETAMNDLNDARFQLKAMLLRNNITYKGTANWSKKHLRWLSELILPHPAQQIVLQEYLQTVNERIKRLARLVNELQHHVQNWRYYPVVKALQAMRGVRLLVAAGVIAELGDLTRFDHPRKLMSYLGLVPGEHSSGERRRLGAITKCGNIRARRLLIEGAHSYRYAANISTDLQKRQESLPKEIIDIAWKAQLRLCRRYQQLMHKGKHYNLVVTAIAREMVAYIWAIAREVVLSQVNPKLRISRVPA

SEQ ID NO: 381024 - protein, 360 aa, unidentified
MLAELIDAVVGVDTHRDTHEVELALPTGTAIGTRKISNDNSGFAELLAWIGDHAPGPRVVVSIEGTRSFGVGLARAVAAAGLTVIECEQPNHKARRGKGKSDPIDAHLAVLAALRLDADRLPVPRADGDREALRILLGTRHELTVVTTAQTNRLRALLLGGQDTERDLARATLTDPVLLALVRRREPPQASREQTVRHGEIRRLAHAIRAGRHALAANRAQLQTIVDQMAPGLTERRGIGAVTAAQAIVSFSHPGRCRSDAAFAALSGTSPLQASSGKTVRHRLNRGGDRALNSAIHTIAITCIRCCPTTKNYVARRTAEGKSSREIQRCLKRYIARQLYRALNTSTTLTAQISAAPAAA

SEQ ID NO: 381025 - protein, 361 aa, unidentified
MHDSTTWIGMDVHKESIVVAAVNGAGGTAARWETPNTAKGKERLAKRLSEFGTIRCAYEAGPCGYDLRRFLEAKGIPCDVIAPSLIPKKPGDRVKTDKKDAEKIARMHRMGELTAICVPTPTQEALRDLLRAREDANEDLVRRRHRLQKFLLRQGRRHEGKNWTRDHWRWIRAQKFEDRNSETVLSEYTAAIDQEIERIGRLDAQIEQESKNPEIAPSIARLMTLRGVKTLTAMTILSELIDLSRFPSARKLMDFVGLVPGEYSSGQKQWRGSITKSGNSHVRRVLVEAAWHYRHSPRSTGAAIKKRREGQPPEVIETARKAELRLYKKFTRMVMRGKKTTVAATAVARELAGFVWAIGRI

SEQ ID NO: 381026 - protein, 354 aa, unidentified
MSQNSKTTFPRTIGMDLGVRSTSFCAVDQVGTILDEGVLKTTKEEMGAFLKKEPTSRVVIEASGPSRWVAALAAEHGHGVIVANPREFKLISHSHRKTDRNDARVLADFGQFRPNLLKPVQLRGVKCQMARATLAARSHVVRQRTLLISLIRSQVRNMGESLPSGGAPAFFKKAKDLIPAALVPALDPLFHVLEAMMETIKTYDLEIERLCKDEFQETKVLRQVNGVGPNTALAFIATVEDPSRFAKSRDVGAYVGLVSKSRSSGSKDPQLRISKRGDKVLRRLLVTSATYICGPRSKDSDLKRFGERLQGRGGQSSKAKARIAVARKLSVLLHRLLVTGEVYEPLRNSESLAA

SEQ ID NO: 381027 - protein, 386 aa, unidentified
MMVIGIDPHKSTHTATAVDPRTNRSVASLRIEASLADYRRMLAWARQFEQRRWAVENAEGLGRHLSSWLLARGEQVVDVPTTATARVRQLSRGGGRKNDQIDAAAAASVAALQGESRPLEPEGITDALALFDESPMNLTQSRVRLVNQLHALLRELLAGGAPSDLSASTAAALLRRVRPAGDVERVRKQIAAGLITQIRSVDALLKSNAQQINERVAASGSTLPSTVGIGAITAGRLIGRTGRAGRFPSSASFANYAGAAPIEIASADKARHRLSRGGDRQLNAALHTVAIPQIRTPSSRGHTYYNAKIAQGKTAREARRCLKRRLADHIWRTMITDERRGAANPGGHPGTTLQSSAAGSTPTTSSSDKSLPGPASSHSTTPRPAT

SEQ ID NO: 381028 - protein, 349 aa, unidentified
MKIIGCDFHPSYQQIAMLDPVTGEIVEKALSHERKEEVRVFYAGLEGPVRVGIEASGQSQWFERMLAELGHEVWIGDAAKIRASCERKQKTDRRDAELLLRLLAEDRFPRIWVPTAAERDNRQLLLHRHKLVRMRTQVKNQLQAQALNQGVQRKRKLWSEAGRKQLESLPLLPWASRRRAELLQLLDHLEASISELDRAVAEQASALPAARRLMTHPGVGPVTALAFTLTMGPAERFQRGKQVASYLGLIPSEHSSGGHQQRLGHISKQGNPFLRGLLVEAAHSAVRYEPEMRRAYQRLAQRKCRAMAKVAMARKLAVRLYWMLRLQVNYAQLIQGSHAGQPGTFCGRG

SEQ ID NO: 381029 - protein, 392 aa, unidentified
MLFVGIDVAKAKHDCCIIDSDGVIHTDSLRISNSKKGFETLYSSILSALGSKSIQNVKIGLESTGHYSTNITNYLYSKGFQVTILNPLATNLFRKAQTLRKTKTDKTDAKVIATMLFTDESKSYSPVSYQIQELKSLTRHRHRMISYRSRLKLSVTRLIDIIFPELPSLLWSIHQNSSYALLLELPTPNSICNCHLTKLTSLIRTASKGKYSKEKAIALKELATNSIGSSNRSTAFELQQTIRLIQSIQMEIDALDKQIKIVVDELDTPLITIPGIGYTLAAIILAEIGDVKRFSNPAKLLAFAGMDPSTYQSGTYNASKTPMVKRGSTYLRWAIMQASRLVAMRDKTFADYMAKKRSEGKHFNVARCHVGKKLIRVIYYLLKNNTAFVPQI

SEQ ID NO: 381030 - protein, 374 aa, unidentified
MKRTSLPLLGWMAPLRHLSAKLLSDRNSSEWEPSMGEVTTIGLDLAKHVFQVHGVDAEGATVLRKQLRRAQLLAFFSRLPPCLVGLEACATAHYWGRELRALGHEVRLMPAQYVKAYIKRNKHDAADAEAICEAVGRPTMRFVPVKTADQQAAVLLHRGRERLVRQRTGLVNALRGHLAEFGVIAPQGLRNVGKLIAIVRDEGDARLPDLARQVLQVLAAQIEQLEASVAAIEKQLMAWHKSNPVSQRLASVPGIGPIIATALAATVVEPSGFRSGREFAAWLGLVPRQHSTGGKHRLGGISKRGNQYLRRLLINGASANLLRSKATNADPWVIGLRRRRPPLVVAVALANKTARIAWAVMNRHENYQRVAAAA

SEQ ID NO: 381031 - protein, 350 aa, unidentified
MKIVGCDFHPSYQQIAVLDTETGEVWEKKLSHGNGEAAKFYRALQGAALIGMEATGNARWFELEVEKLGHELWIGDAAKIRASYVRKQKTDKRDAAHILKLLVEKRFPRLWVPDVRQRDMRQLLTHRHKLVRVRTRLKTELQHLALNQGIQKKRQLWNEKGRALLASLPLQGWAQQRRKDLLQLLGLVEPQIEQLDKAVEQAAKADPQAVLLMSQPGVGPITALAFSVTIGDVSRFERSKQVSSYLGLIPTEHSSGSKRRLGSISKQGNVFLRALLVEAAQSVVRHDPGFRKEYQHRCHHKEKGIAKVAAARKLAVRLYWMLKSNKSYTELVLNGGSPRHPVAAKAKPLS

SEQ ID NO: 381032 - protein, 323 aa, unidentified
MSPVVGIDVAKHSFDLAIDLANGKYRTKAKLPNDPKGFQTLRTWLQTHAQADSWIVMEATGTYHEALAEFVHALGYQVCVLNPAQMALYARSQLTRVKTDRSDAKLIASYGLRHVSQLRPWQPDPPALKHLKALVRRRDDLLQMLQMERNRLDVAAPVVRDSLLETIGQLQANIAQIERAIDDQIDQDPTLRGRRELLVSIDGIADRSAALLLAELGDVERFSQASAVTAFAGLNPRLQESGKRKGQVCISRTGSPRLRAGLFLPALVAMTHNPVVRALKQRLRERGKANKQIICAAMRKLLHIAYGVLKSRTPFDPHKALAW

SEQ ID NO: 381033 - protein, 323 aa, unidentified
MNKYRETFGIDISKDVFDCYGSVQGHLQFNNTETGFKNFQAILSKGSLVVMEATGYYHYRFAQFLYHKKVYVSVVNPLSVKRFIQMKLAKVKTDKSDAKAICEYGLTQEVPLYNALTNVQSECLQLFRLMDSFLKKRTATKNKIHGEEVLGVPSNWVYRSLQRDKKHLDKELKGIEQKLLSLVKQDQQQQLSLLQSIPGIGLKTALFLIVVTDGFKKFETSSQLCSYVGITPTIRESGSSVRGRARISKVGNRKLRNLLFLCSFTACKHNKGCKELFQRITNKGKSKKLALIAVSNKLLKQAFAIAKSGHPYDPSFASVFEVK

SEQ ID NO: 381034 - protein, 466 aa, unidentified
MGKDSRKRSGKPGRRAGGRRGGALGRIRKDAAGIDIGSQAHYVAVPPERATPAVRRFGCLTPELHAMAKWLKACSVATVAMESTGVYWIPVAQVLERYGIEVVLADATHVKHVPGRKTDVSDCQWIQQLHACGLLRGAFRPARAVQVLRTYWRHREGLVDGCAQQIHLMHKALEQMNLQLHKVLSDVSGVSGMRIIRAILEGEHDGETLAGLCHGTVKARPETIAKALTGDYRADHLFTLRQAVELYDIYQEKMAACDREIQRQMATFAPKADPKALSPRKGSRGRKRRKNQPHFDLRSEMYRMTGVDLTQVDGIDTLTAQTALCECGHDLEAFPSEKHFTSWLGLSPNNRITGGKVRRTRTRRVQNRLANALRVAAQSLHHSKSALGAFYRRMKARLGPAKAITATARKLACQIYRLLRYGQAYVDQGARAYEQRYREQHLRLLKRRARTFGLELVAVGTGEIVS

SEQ ID NO: 381035 - protein, 331 aa, unidentified
MHFSQFIGVDISKDTLDAAIYPAKDKKMDFLHFDNTTRGLNEMLKWLKSRGIKPSEMVICAEHTGVYTNPLIDFTEKKGLSLSLNSPLDIKHSMGITRGKNDAIDAGRIAEYAHDHKDKLRLYQKPSEAIVKLKYLLTERHQYVRQRTAMLSFNKIMGKYETPEARSRNGSDIHHCETLILKVERQMLDIIKENPELKRNYDLVSSVKGVGLINAINIVVFTNNFKSFETPRQYACYIGVAPFGYTSGTSVKGKTQVSKICRTQQKAELSMAARSAIIYDPGLKRYYQRKMKEKGEGKDAHGVVLNAVKFKLILRMFAVVKSGQPYKILNY

SEQ ID NO: 381036 - protein, 345 aa, unidentified
MEQISRIGMDTSKHIFQLHGVNTAEEPVLRKKLRRKEMFAFLEKLAPTVIAIEACGASHHCARLLQSFGHSVKLIAPQLVKPYIKRGKNDAADAEALCEAMSRPTMRFVPVKTAEQQAVLMLVGVRDRLIRNRTQLTNAIRGYAGEFGLTAAKGKAHLDPLLERIHVDDSLPALAREMFAAQAKEYAQLQAQIDDVDARLMAWHRADECSQRLTKIPGVGPIGAVLLKMKTPEPELFRSGRQFAAWIGLTPKDHSTAGKVRLGVITRAGDEGLRAVLVVGATSVIQHVQRGGRPSPWLTELLKRKSPKLAAVALANKMARIAWKLMVTGNNYAAKSAPATQPGAA

SEQ ID NO: 381037 - protein, 312 aa, unidentified
MTDQNQTHYVGIDVSKLTLDYALSGTVEGQVSNTAEGYRRLLEQLRPLCGARVICESTGGYERGLVAALWAAGVEVCVVQPGRARAFAQSEGQLAKTDRIDAQSLRRFGHSVALHLTQPTPAEVEVLRDLLDRRRDVVERLVALGNQLELARPTMKALMRPEQHFLEKHRDALDRKIAAHIQQHASLQAKAARIRELPGAGPVLAATLLAYLPELGHLPAKTLSALVGVAPHARDSGQSHQPRQIRGGRATLRHVLYMCAVSAIQFNPILRDFYERLRAHGKAAKVCLVAVMRKMLVVLNRLLADPTFCLVS

SEQ ID NO: 381038 - protein, 419 aa, unidentified
MTQGQDNAAIAIIHPVCGGLDIHKEKISACLTTMDDQGQEVSEIREFTTFTDDLIALRVWLQERDCPIVAMESTGVYWRPVHNVLEHHVEVVLVNARHIKNVPGRKTDIADSRWLASLLKHGLLRGSFVPPKDIRQWRELTRQRRRVTESLSDYKNRVHKLFETANIKIASVVSDLFGKTGRRLIEQLCAESAGGFTEEAVAEIACGRLRAKIPELYRSIQGYFEEHHRFQLHSLMRIITTLENEIGIITERVQLLMEQHEEVLERVAAVPGVGPHSAQVIISEVGYRLDSFANAACFASWAGLCPGNNESAGKRRTGRTAVQKHPFKTIMVEVAWAAVKTKGSYFKKKYHRLKARRGAKKAIVAIAHRLAKALFHIIKYGERYREIGEDYLKARNRGSLNMLRKRAKALGFQLVEATA

SEQ ID NO: 381039 - protein, 426 aa, unidentified
MDVMHRCCAGLDVHKESVTACVRTLGDVGKVSVEVREFSTMTGGILAMRDWLVDAGVSHVAMEATGVYWKPIWNLLEDGFELMLCNARHVRNVPGRKTDVNDSQWLAQLLQHGLLSPSFVPPRPQRDLRDMTRHRTQLTGEKTRVANRLQKVLEDANIKLASVASDILGKSGRRMLTAMANGENDPAKLADLALRKLRAKLADLEQAFEGGLSPHHRYMLDKLLRHLEFIEQEIEDLDQRIEAQIGSEELNAHVDEDNALPFDQAVELLCTAPGIDRTTAYAIVAEIGTDMDQFPTAANLASWTGLCPGNNESAGKRKSGRTTHGNRWLKRALSQSAWAASHTKNTHLSVRYRQLSKRRGRKRAVVALAHSLCTSIHAMLRTHAPYFELGPDHRDTIAPERRAKYLKKQLQKLGYKVEIEPVQEAA

SEQ ID NO: 381040 - protein, 347 aa, unidentified
MQILSLDLGKNKTVGCDYERESGKHRFKTAFSTRAGLTQLVREVKPDRVVIEVCSIAGWVCDLLGEMGIEVQVANTSDDAWRWRKVKKKNDRCDALKAAQLSAVNQIREVHIPTIDVRQWRALIAFRQQLVQRRTRVKNHVRDLLLREGQILPRGGKCWTQLGVGELEAMAQPLSEVGMNELWRGELAIELRQLRAVQAEIEVAEEKLDAIGAADPRVRLLRTIPGVGPRLAEAIVALLDRPERFRKASEVSAYIGMVPKELDSGETQRRGKITRHGSRLVRSLLVEVAWAGLRHNPWVRETYQRISGGKKSRKKIAIVAVGRRLLVRCWAMLRDGTSWQWPAAKVT

SEQ ID NO: 381041 - protein, 456 aa, unidentified
MQAALSAVRDIALAGSGMILIREVADAPVIMGISKPAGLKSPCEEVKIVNPLFVGIDVSSKNYVAYLMKPDGSKHSSFSVQNNLGGAKLLSEKIVSALGSMQLNDVVIGLEATSIYGNSLVYTLREDGSLGRFQRKIHVLNPKQVRKFKDAYPDLPKNDWVDAFVIADHLRFGRIAKEVYMDDYRYQALRTLTRARFDIIQNLTREKQRFANYLFLKCSGIAQAKDIQNTSATTLALMEHFETVDDLANADLNELTAFISEAGRGRFADPDATAKAVQAAARGSYRLPKTVNDTVNQAMAVSIASMRALKEQVKVLDKAIEQQFEIIPNTLTSIPGIGKVYSAGIIAEIGDIHRFNSQASVAKFAGLVWHRNQSGDFEAEHSQMIKSGNRYLRYYLLEAANSVRRCDSEFRRYYDLKFKEVNKYQHKRALALTARKLVRLVFRLLKDNRLYIPPVG

SEQ ID NO: 381042 - protein, 454 aa, unidentified
MKILALDLGKFNSVCCFFNAKTRKAKFLTTSTQREQIAAIFKDAKADLVVMEACGPSGWINDLAQEHGLKTLVCSTNEEAWRWANVKRKTDKDDALKLARMAAMGELKGVHTPTLRHREFRSLVKYRKTLDGRINKTKNAIRAWFVNHGIEIATGEKAWHTGRERINSFRKPLADCGPDELWKGELDIELTILDSLTEQLNGVVKKLEAIGKNDERVRRIQTIPGVGPRTAEILVACLDDPHRFENGRQVSAYFGLVPRQYQSGETDRNGRITKRGNPLARTILVECAWASLRYNPWAKGVYERICGKQKTRKKKAAIALARKLAVIAWAMLRDEKDWDPKQMIRVTESFGRMPKALKESLENMKPKENADQRKSRLRKEARDAREAAQRRASKTAEPAPAKRTATRPAKSATSKRKPTESPATRSRRSTSQPNAKRQTKTSKPRRARKPVSRA

SEQ ID NO: 381043 - protein, 409 aa, unidentified
MRLFVGLDVSSFDIKTCILNGEGEKLDSFSVNNDLSGAIALKERLLQRIANQKVEIFKIGLESTSVYSFHPSMFLHYDKELQSFGAKVFLMNPKQITNFKKSYSDMDKTDEIDAFVIADYLRFGRNQMSIVKESQYVALQQLTRSRYQLVRMLTKEKQHFLQHLSYKCNTFSQEVDSSIFGNAMMELFLEKFSLEELANMPLNELAEFLQAKGKNRFGDPKCVASTIQKAVRSSYRLDKVVEDSIDVLLGTSIAVIRTYQQQIKEIEKSIKQIMSGLPQTLESIPGIGPVFAAGIIAEIGQIERFDDETKIAKYAGLYWRKHQSGRFTAENTSLSRNGNHYLRYYLVETANSVRKYVSDYQEYYVKKYNEVPKHQHKRALVLTARKFVRLVDALLRNHQLFTPERCVKV

SEQ ID NO: 381044 - protein, 338 aa, unidentified
MPSPALIVGIDIAATTLAVVFAPAAATPAPATTLPNEAAGWQTLMQTLDEQGATPATTLLVMEATGAYWQGLATALHTAGGLVSVVSPASVRAFAHARLRRAKTDAIDAAVIADFGHRMTPDRWTPPPAEVEAMRLLLRQRDDLVALRTQTRNRQHALAQLPVLPAAVQIPLREVLRVVEEQIVALDAAIKQQAAASVTLATEITRLTTITGVGVLTAAVVLTETRPLRGSATPAEVVAFAGLDPAPKRSGTSVRGAEHISKTGNARVRQAVYMAAVTAARCNPVFQPFYTRLLARGKGKKVALVAVARKLLVLMVTLLMHERDFDPDWATRPMWPTG

SEQ ID NO: 381045 - protein, 373 aa, unidentified
MFHFTTLFIGMDVHKESFSLCYYDMMANQFKHSTKVGPNVSYIVNYVNELRHLYGQDAEVLCGYEAGCLGFTLYHQLQAHGIPCIVMAPTTVMKEGSKRVKTDKKDAAQLAKALAFRSYRPVHIPTVEDEQVKEYIRMRTDHKVALKKIKQQILAFCLRHDFRYTEGSSNWTQKHVRWLRSLNPDGLYAEILTEYLLTYEKLVDQIERYDARIEQLGQSDSYQEKVSRLSCFIGIKTLTALSIVTEIGDFNRFATAQHFASYLGLTPSENSSGDKERRGAITKAGNSHVRRLLIEAAQSLAKGTIGYKSKELKRRQSGNRVEVIAYADKANERLRRRYRTLVLGKNKKQNVAKTAIARELSGFIWGMMTGRIA

SEQ ID NO: 381046 - protein, 335 aa, unidentified
MRYVGLDVHYRSSTYCVLEENGREVQCETIRGHWPKLLDRLRTVEGPWTICFEATCGYGYLYRELSRMAARVVVAHPGQLRLIFRSKRKNDRVDARKLAKLLYLGEVPEAYVPGEDVQSWRELIEHRRRMVDRQTTCKNAIRSLLRSHGKIASKGLWTRKGLAWLRQEEMPTAAASLKRDLLLDELTDAKRRVRTVTGALNEIGRAHPAVILLRTIPGVGIRTAETVAAYMDNARRFARSSQVGAYFGLVPCQDASAGVNRLGHITRQGPSTARKYLVEAAWQGVYRSATIRAYFERVLHGRPERRKIALVATAHYLLRCMHAMLISGRPWHEAA

SEQ ID NO: 381047 - protein, 343 aa, unidentified
MYYIGLDVHKKTISYCVKDAAGCVHQEGKIGSTRRELDAWVRTLPQPRMIAMEATIFTGWIYDHLLPHAEAVKVAHPLMLRAIAAAKRKNDRIDAAKIADCLRCDFLPECHMASTAIRNRRRILRYRHLVLRQAVQMKNRVSGLLMETGVSYDKLRLHRMGYFADLMSSSEEISDSIRPLLKLCREHIDRSARLDTALLRSLERDPLLADRLQRLRTVPGVGPITALTWALEVGDTSRFRSIKQAISYCGLCSAEKSSADKVMRTPISKQRNKHIQQVLVEAARLAPRYSDELALLYERERQRGNSNRATLAVARKMVAHMLAVERRNTDFVPGGEFQRTAAA

SEQ ID NO: 381048 - protein, 350 aa, unidentified
MLIIGVDFHSRFQQIAMVDMETGELVERRLDHRDGEAQKFYAGLQKSVRVGMEATGYAQWFERMLAKLGHELWIGDAAEIRAAMVRKQKTDARDALHILDLLLANRFPRIWIPSPGERDLRQLLRHRHKMVGLRTSVRNQLHALAMGQGVYRKRKLWTAGGRRELEALALDPWASRRRQELLEILDRLDPSLAELDRAVAREAEQRPAARCLMEQPGVGPVTALMWVLTIGPVERFRRSKQVVSYLGLNPRESSSGGRQRLGAISKQGNSMARFLLVEAAQTAARYDKELRRDYQRLKFRRGTAVAKVAIARKLAVRLYWKLRKLSSPAPPARMQSSPEHPVVGASLSRN

SEQ ID NO: 381049 - protein, 320 aa, unidentified
MKQMIYVGVDVSKKQLDVAIRPLGQAFGVSNDRRGISQLVKRLKKLQPVCIAIDATGGLEKELAYALAAENLPVAVVNPRQVSNFAKSTGQRAKTDAIDAAVLAHFAEVMKPEVRPLPDAASRELSALVTRHRQLVEMMTAESNRRDLASKSVRKLINSLLRSLKDQLAVVDREIHKAIAASETWRHKAELLRSVPGVGKVTTATLLAGLPELGELDRRQIAALVGVAPFNRESGTWKGKRMIAGGRGWIRSVLYMSTVVAVRRNPILKEFYERLRARGKPAKQALTACMRKLLVILNAMLRRQTHWSVPTPLLSLSVAG

SEQ ID NO: 381050 - protein, 362 aa, unidentified
MTQSTTIIAFDQHTATTVAAVLLPTQRTPALHPLTSESATIARFVERLRRDGPVQCCYEAGPCGFELQRALTAREIPCEVIAPALIPRRAGDRIKTDRRDAGQLAVLYRAGALTAIHIPTEQEEAVRDLLRCREDIHTDLLRARHRLSKFLLRHGRRFTGTKKAWSQGHELWLRAQTWPLQALAQTHTAYLRAVDEAIARLRAVEDDLRALLTLEPLRQRVERLRCFRGIDDLTALTIAAELGDPRRFASAPRAMAFVGLVPSEHSSGTKQARGAITKTGNAHLRRVLVEAAWHYRHRPFVGAALRRRQHSAPAPIITQAWTAQNRLYRRYHRLHGRGKPNQQVITAVARELTGFVWAALIQ

SEQ ID NO: 381051 - protein, 415 aa, unidentified
MKRYIGIDAGNTWADACFRTDPNTIIHECRFRMTVREGKRFARRLTAQDKVVLEATTNAWWLYDILRESGAEVLVSNPKQTKAIAQAKVKTDKVDARVLSQLLATGFVATVWVPPKHIRQARSLVAHYEHVSRQVTRLKNKIHALLTRHQIVPPAADIFTPKFRPWLESLALEGTEAFELQSSLRLLDLAMNEREQTRKQLAALAYDNPVVHLLLQLPGVGTITAVVLWAEIGDIERFPTPEKLCGYSGLVPSVHQSGNTAYMGPITKEGRKRIRWILVEAAYPAAQADPELRRFFRRIQRKKGTNKAKVAVARKLLRIVWAVWHGQVEYARMEPITYQRKLVRLARQTPKSARTSTTRELLERVMARWGKPALTDPHTGEALTITELMTGGRAVRVHRAHSTSKRVRASGEQPA

SEQ ID NO: 381052 - protein, 333 aa, unidentified
MRFACKAGSTKMKQDSARTAGIDTAKGKLDVAIDGSPEFLTVSNDAAGWGTLSGWLGGHGVKRVGIEATGGYERGVVVHLRGAGFEVLVLQPLQVKAWAKLHRRRAKNDRIDARLIAAVTAALEPPEIAPDERLTALAERLTYVEQIELDVVRLKVRLEHLTDARLRRQVLGDLARIEKRKTAELKRLEADLKGHDDLRARFELVLSVPGIGPRTALAIVILLPELGRVDREEAAALAGLAPFDVDSGQHKGERHIAGGRARLRRSLYAAAGPACRWWNPALKAFFAGLVARGKAYKAAVTACARKLVVYANAVVARGTPWIDKAPSAARSPA

SEQ ID NO: 381053 - protein, 442 aa, unidentified
MRLLNANANEHPLRIKLSAHIRTGIIMEPQRNKVCGIDVHKRFLIATILSRDGKKDTQRFSVTLEDLLKFRDWVIENGCEQVALESTGIYWHPVHAVLEGKMDLIVANAYKIKHTPGRKTDVSDSEWIAELCLNGMIEPSRIFPKDDRELRRLTRAREGYVKQMTQEKNKIHQSLDSACIKLASVISDIFGKSGMYLLNCVLEGRDIDEIIEGIPSGRLKKKADQIKESIKSRLEISQVILIRGSLSLMRSIQERIDELDGEISSRIQYRKNDLAIAMSIPGTGFISATAILAEIGNCADFKKPEQLAAWCGLVPSLYQSAEKTILGRITKQGSKHIRRMLIQVAYAISRTKDSKLKKFFLRIQAKKGSKVAAVALARKVLCILHHLLMNQEMYIENRDKKNMRRKYLTPPSPIEMPIKEMIDYIVRAGYVVTKSDSIGGFG

SEQ ID NO: 381054 - protein, 364 aa, unidentified
MDLPPAGRDGPAGVMVTLGSDSHKRTHTLVAVDDNGQQQAQKTVPATTAGHLDAMQWALRWPERRWALEDCRHVSRRLEADLLVAGQLVVRVPPKLTVVARRVARTSGKSDPIDALAVARAALREPDLPVAKLDGPSRNVRLLLDHRDDLVGERTRTQNRLRWHLHELDPETEIPARRLSRFRTLTELEQRLQGVRGVVAEIALELIVRIREMTARINQLEVEIERRVRRLAPTLLELDGCGALCAAKVVGETAGIGRFRSRAAFAMNNGTAPVPVSSGNQRRHRLNRGGNRQLNVALHRIAITQLKGPGRARDYVTRRIAAGNTKTEAIRALRRRISDEVYRRLLHDERSRIDAVSNCSAAAA

SEQ ID NO: 381055 - protein, 342 aa, unidentified
MYYIGLDVHKKTISYCVKEANGHIYAEGKVGATRWELDDWMKTLPRPWTVAMEATIFTGWIYDHLLPHAAQVKVAHPVMLRAIAAAKKKNDRIDAGKIADCLRCDFLPECHMVSTEIRDRRRTLRYRHLLVHQIVQMKNRISGLLMETGVSHNKQKLHKVGYFRELLSNKDEVHESIRPLLRLSRETIVRFEKTEYALVSSLQRDPLLAERIKRLRTVPGVGPITALTWALEIGDVTRFRSIKQAISYCGLSSDEKSSADKVMRTPLSKQRNKHIQRALVEAAKLAPRQDHQLAVVYEKEKEKGHANRATLAVARKMVAYLVAVDRAKRDFVAKEDLNQAIA

SEQ ID NO: 381056 - protein, 371 aa, unidentified
MADYKEAFIGIDVAKLKNAIAIAESGREGEVRFWGEVDASDTSMRRIIQRIAAKFDRVHFCYEAGPTGYGLHRLIRSLGHECVVVAPSLIPRRPGDRVKTNRRDALALARLLRAGELTAVWVPDEGHEAMRDLVRARAAAVETLRVHRQQISAFMLKHSRIYPRKKGWTMRYLRWLQEQQFDHPAHQIALQEMVEAVRVSKERVERLEKVIEEFVPTWSLAPVIRALQTLRGVDLIVAVTFATEVGDVSRFESPRQLMGYLGLVPGERSTGETVRRGGITKAGNGRVRHMLVESAWTYRHPPKVGTRKLYLMEQAPSKVREIAWKAQSRLTSRYRMLATRGKRTTVVCTAIARELTGFMWAVAREAQAIKS

SEQ ID NO: 381057 - protein, 424 aa, unidentified
MKVTYQTCCGVDVHKSFLVATIVKTTGGIEPSYQKKRFSTFNNSILEFKQWLLDNDCHDICMESTGKYWVPVFNLLEDEINVVIANPKWVKAVKGNKDDAKDSKWIGDLFRLGLVKGSYIPCKKVRILREYTRYRYKLVSCRSSEKNRYQNALTVCNVALDSVVSDIFGKSSTSIIDYLLEQSGTSINHEEIASKLLRSLKSKEDAVIESIEGYQMTDAQKYRMRLIRAHMDYITAEINDVDKMIENMISSNPDFENAVQFLCTIPGVKRDSAITIISEIGTDMSQFGGSKRLCCWAGLTPGSNESAGKKKSVRITRAGVYLKPALVQCAHAAVKSDKSPYYKKKYESLVKRRGKKRAIIAIARMILTAIYQMLSTGEQWNPSDLYKIDMPIALVEKQKAKAIKQAKKLLQREGLLPPDEPLAS

SEQ ID NO: 381058 - protein, 353 aa, unidentified
MSDDKYIAFDVHQVTTVISVLNAAGREVKTAILPTQAQPLIAFLEGLRGTLHLTLEEGTYAAWLYDLLQGRVGKLIVCDPRHNALLKEGNKTDAGDARKLAELLRAGMLRAVYHGSRSLRGLHELAHAYEALREDTTRVMNRIKAFYRSRGIGCAGRGVYRKGQRASWLERLPAGASRLRAQLLHEELDQVGSLRRKARSALLAEARKHTVAARLRQIPGMGPLRVALLMAHVQTPHRFRSRTSFWTYVGLGVVYRGSSEYRLAAGRAVRRPQALQPRGLNPNHRPELKEIFKSAALTAIRRPGPFKNYYDLRLQQGVDPAILRVTVARKLAALTLSLWKKGGHYRVPGPQQA

SEQ ID NO: 381059 - protein, 402 aa, unidentified
MNAVGIDVSKGKSMVAIMRPFGEIVSTPFEIKHTASDINSLVELINSVEGESRIVMEHTGRYYEVLAHQLSAANLFVSAINPKLIKDFDNDSLRKVKSDKADAVKIARYALDKWQNLKQYSVMDELRNQLKTMNRQFGFYMKHKTAMKNNLIGILDQTYPGVNTYFDSPARSDGSQKWVDFASTYWHVDCVRKMSLNAFIDHYQNWCKRKKYNFSQSKAEEIYGKAKELVPVLPKDAITKLIIKQAVDQLNSASTTVESLRTLMNETASKLPEYPVIMAMKGVGTSLGPQLMAEIGDVSRFTHKSAITAFAGVDPGVNESGTYEQKSVPTSKRGSADLRKTLFQVMDVLIKTHPEDDPVYQFLDKKRAQGKPYYVYMTAGANKFLRIYYGRVKEYLSSLPES

SEQ ID NO: 381060 - protein, 431 aa, unidentified
MNDELEFYVGIDLGSENHRACLLNRAGKVLAEIVFEHSGSGMADLIRFLAKTPGVSAARVGIALETPRGPVVECVLERGYAVFSIHPKQLDRFRDRHTVAGAKDDRRDAFVLADSMRTDLALFRSLGAESAAIVRLRELSRLEDDLIQDHNRLINQLREQWHRYFPQLLELSSAADDAFVWDLFEMAPKPELAAQLGRSRIERVLQRHRIRRLSVDEVIAALRTPALTLSIGSADAASEHALLLLPRLRLVRQQQVDVAGRMEALLKDLARVPSETVSEEVDQPTDVAVLRSLPGVGRVMAATLLAEAAQAIRDRDYGALRSYTGVAPVTRQSGTKKVVVMRRGCNNRLRNALYHWSRVTTMCDERSRTQYAKLRQKGHSHGTALRALADRWLAVLVAMLRARQLFHPQKWNRCVVDAIGGAGDQPILRRH

SEQ ID NO: 381061 - protein, 349 aa, unidentified
MKDCTGKKVFLGIDVHKKTYSVTAICEGVVVKKATIEASPDGLVTFCKKYFFGAEIESCYEAGFSGFHLHRILIKNGINNRVVHAAGIEVASGDRVKTDKRDSLKMAGLLSVGRLRGIHVPSEEREGKRAVTRLRNTIVEHRTSVANQIKALLHQHGLVSARSKQKMSVKMIRNLKALSLQLDIKYALSHLIAIWEEHTARIKEIDAQLGLQAMEDNDLETIYRSVPGIGPIGARVLANELEDMAYFENERQLFSYTGLTPSEHSSGGHIRKGHISRQGKAMVRKILVLAAWKAIQKNQTLKQAFERMAIKAGVKKAIVGIARRLIGHVRACFRKGCLYRQDPPVSVAA

SEQ ID NO: 381062 - protein, 317 aa, unidentified
METNSGAFIGIDVSKAMLDVSLGVNGEQFMVENNDAGLKKLIERLEAVRPSLIVVESTGGLEKLAVAELCAHALPVALVNPGRVREFAKSTGQLAKTDKLDARILAHFAEAIHPPVVILPTEEEQYLSALMTRRRQVVDLLTTEKNHLLSTPAKVRPLVEQSITALQAQLDELNQMIDQFIDHNDAFHQKEDLLRSVPGIGPITAAILLSDLPEMGSLNRKKIAALVGIAPYNDDSGHHSGRRRVKGGRESVRHVLYMAALAATRFNPIIKKYYQHLVERGKLFKVALVACMHKLLTILNAMLKNLSPWQPKSALDI

SEQ ID NO: 381063 - protein, 359 aa, unidentified
MRIIGVDLHTRQQSVAMLDTDTGEVIEKTLAHEGDEVRKFYSELPDPVLVGIEATGSMLWFLELMEELKIECRVGHPAKIRAAEPRKQKHDRRDARLLLNLLAENRFPSIWMPSTEQRDLRTLLRHRHQFVRMRTRVQHTLQSMALAHGLRRGTTLWSQAGQHALQALPLAPHASERRAALLALCPGLQKSIDDLDHQVSEQALLHPQARRLMTHPGVGPVTALATEVFLGDPLRFPDGKAVASYIGIIPRERSSGGRRQRLGALSKQGNALVRYLWGEATMHAVRRDPELKRFYRRKLIQKGMGKARVAVARKLGIRLWIMLRDRIDYEEFCRRGRIRQKSGDARAGMPGPINGPAMQ

SEQ ID NO: 381064 - protein, 353 aa, unidentified
MPKWSSSKITRNGSHPWRRLQLDLAKNVFQVHGIDETDGVVLRKRLRRGQVLTFFTSLPACLVGMEACATAHYWARELRALGHEVRLMPPQYVKAYIKRNKSDLADAEAICEAVKRPSMRFVPVKTAEQQSALMMHRARDLLIRQRTMLVNALRGHLAELGIIQAQGLHRVAGLTVIVMDDTDERVPAMARQVLKVIAGQIDEIQGRIAALEAQILTWHKSNPVSRRLATIPGIGPIIATAIAATVPDPSVFHSGREFAAWLGLVPRQNSTGGKARLGGISKRGDGYLRRLLVSGAHTVLLRSKTAQADPWLISLLSRKPRLLAAVALANKTARVAWVIMNRQDTYRRTAAAA

SEQ ID NO: 381065 - protein, 372 aa, unidentified
MDEGIKVFVALDVHKDSIVIGAAEAGSRVPARQVGRTAHEVNKLLKALAKLGAPSEVHVVYEAGPTGYGLQRALAARGYRCQVIAPSLIPRRAGERIKTDGRDCLKLAESSRSGDLRAVWVPDPADEAIRDLSRARDDAVTARTQARHQLRSFLLRHDRRYPRKTAWTAAFHRWLATLNFGPDGAQTAFIEYQLAVQAADQRVERLTQALIGSIAGWRFEPVVQALQALRGVAAVSAIGLVAEIGDLARFEHPRKLMGYLGLVPSEHSSGERTARGSITKTGNAHARRLLVEAAWNYRFKPRIGVQAMRRQQTLTSDIQATAWKAQLRLSRRFAALDARGVQRNKVCVAVARELAGFVWAIGRQAMSTTPIH

SEQ ID NO: 381066 - protein, 362 aa, unidentified
MHYMGIDHHKQYSHMTIMDKEGKVVKAGKVWNVRSEVEEFLQGTYGDIEAVLEAGRSSYTMVELLEELGISVKIAHPKQVKAIAKAKIKTDKRDSKILAHLLRSDLIPEVYRRSSENRMAQRVLRQRVFYVASMTRVKNRIRALLAHQREGVRESVGQEKNLFGTKGMKALKGLELPKSEKQLLESLLKTYRHLEVRIKESNDLIEQLYKGSNEAQLISTVPGFGKFFSVLTAVEIAEVKRFDSPAQLHSYAGVIPSTHSSGEKSYHGKLIHEGNRWLRWAAVEAVWPAVKSDFDLELYYKKLARRKNTNAAKVATARRLLTIIYRILKENRRYIPFKRSYRENNNRLPSGNLNEPLRLRSG

SEQ ID NO: 381067 - protein, 311 aa, unidentified
MTDDTIGIDISKATLDIHRLSDGKMMSFSNCTAGFKALSKFCAQTVVTRVVYEATGAYHSGLERALGAHLPLVKVNPLQARRFAQAQGVRAKTDTVDAKMLAVMGNAFALEPDEPATKIQHYLRELRAFRSGLVKDRTRIMSRLKTQTLSITCRQSKARLGHVDKQISEIDAEIDRLINSSDTLAHSMKILCSIPGIGAVCAATILIEMPEIGSMDRKQVASLTGVAPMTRQSGQWRGKSFIQGGRKVVRNALYMPALVAMRFNPDLKAKYQAMIKAGKPPKVALTALMRKLIELANALIKADRNWVKKGA

SEQ ID NO: 381068 - protein, 348 aa, unidentified
MQYDAGIDVSLEQSSVCVVDAAGKIVKEAKVASDPCVLVTFFKGLGFPVTRIGLEAGPLSQWLYAGLTQAGFDVVLLETRHVKAALSAMVVKTDRKDARGIAQLIRMGWFRAVHAKSASSQEIRALLTARRLLLDKLRDVELSLRGVLRGFGLKLGKVTQKGFETRVRELVANHSMLQQITRSMLLARATLQREHNMLHKALLKIVRRDKVCRQFMTAPGVGPIVAITYKTAVDDPQRIKKSKGAGPLFGLTPKRYQSGETDVIGGISRIGDAMVRAMLYEAANSLLSRTMRFSALKRWGLAVAKRRGMKRAKVAVARKIAVILHRMWIDGTSFRWSNKEKVKAAAHA

SEQ ID NO: 381069 - protein, 388 aa, unidentified
MMIYYIGIDISKYKHDFCIISNTGEVIVENLFFENNKKGFQELLEKLKPYNKSDVPIAFEATGHYSKNLELFLIDQGYSFMKMNPLVIHQFLKARSLRRTKTDKADSLAIANYLMSVPYKPNSDLLYNIFTLKSLCRAREQLIKERSKYQVLLTNQLDLTFPELKQFLNNRISATLLFILEKYTNTNHISLMRDYDSIKNISRGKFSYAKFAKLKELAKNSIGHHDENNDLLISTYVSIIKTLNDKIDPIEKQISTIIKELNPRMLTIPGLGEISAATILAEYGDINNFSSPNKMLAFAGLEPSIIQSGTIENNGKMVKHGSGHLRYSIMNAAMIILRYSPTFYDYYLKKRSEGKCHRVALSHVCKKLLRVIYTLEKNNIDFDSSLLK

SEQ ID NO: 381070 - protein, 383 aa, unidentified
MKYVGVDLHKHLIVLCVVVLVAGRPRVVKRARLHCDDAQGIRAFFQELGRFQVVVEATAAYEWFFVLIENRADRLVLAHPKKLRVIAESTRKSDKIDAQVLAEFLARGMIPQAYRPPPRVRQHRVLVRHRCWLQRRITMLKCKVRNILGHYNADIAELFTRQGEEHLATVPLSSADRFVMHALRQQLALFQEQLRAADEQLAEFARSGPAIEQEARALLDTIPQVGTVTIDVVLSELGDWRRFHSQKAVAAYAGLNPGYRQSDKKRLQLHISKEGSPWLRWVMIQAAWRLTTSSSRWGQMLQRLQLNTGSKKKAIVGVARHLLCTMFAILHNGQPYKLLGVPNGNQRSPQPQARRKTSTQAQQKGCRPSAPAPSPRPRRCAVG

SEQ ID NO: 381071 - protein, 332 aa, unidentified
MDTIPIHVGVDYHQSAVQVSISDADGKQLGNRRCANVVEDVVRYVQQFGSVQSVTLEACAGAADFADELIAKTGWKVNLSHPGYAARMKLNPDKIDYTDARMQCELGRTGLVPKVWLAPLDVRELRLVVRYRQQLANQRRATKLRIGAVLRDQRCLNAPARAWSKPWLAWLTQDAALSSQGRFIVDLQLVQLQAIKEQLAFIEAHLTRITQEDALVKKLLEEPGIGPVTAWMLRAEIGRFDRFHNGKQLARFCGLSPRNASSGTRQADAGLIRAANGELRACLIETAHRLARTQPRWHEMNAALRARGKAGSVVAAAIANRWIRSMHHRLAA

SEQ ID NO: 381072 - protein, 378 aa, unidentified
MPSENIVHIAIELSFSSWLVAARLPGAEKPRLHRIAGGDTTGLLALIAELRARASAKQGQAVEVACCFGAGTDGVWLHRLLTAHGIAAYVLEPTSILVNRRARRAKTDRLDAEGMLRVLAAWLAGDGQVCSMVRVPTPEEEDAKRPHREREHLVQTKLRLENRIEALLFAQGIRGRPSLRSWEREMTELRTGDGRALPPLLRTELNRLRRQLVLILELIRELEAERAAAIEAAADDARVQKIVGLQRIRGIGPNVAAVLVREVLYRSFANRRQLASYVGITPMPHQSGGMDRDRNISRAGNPRARTTLIQLAWLWLRYQPGSTLALWFRERVGALQGRTRRIAIVGMARKLLIALWRYVETGVIPDGVELRMPAAATA

SEQ ID NO: 381073 - protein, 443 aa, unidentified
MSKIKNHFELTHPNAAGIDIGASSHFVAVPPGRDEQPVREFLSFTADLYALADWLTACDVDTVAMESTGVYWIPLFELLESKGFTVYLVNARHVKNVSGRKSDVLDCQWLQQLMSFGLLSGAFRPQGDYCALRAVARLREMLLRNQAKHIQHIQKALLLMNLLLTEVISDVVGETGQKIIRAILAGERDGQVLAKYRNHHIKASEEEIAKALQGNWREEHLFALKQAVALYDAYAVQILECDRQLEKMLKDLARNDLKADKPKRRGGKSKNAPNFDARTLLMQMCGVDLTRIDGIDVTTAFKVVAETGADLSRFKDAKHFASWLGLCPGTKISGGKKISAATSRITNRAAQALKMAAVNLRASRSALGAYYRRLCGRMDKAKAVTACAHKLARLIYAMLTQGQEYVDQGQEYYEEKYRQRVIKNLTKRAEQIGFQLTPMPESV

SEQ ID NO: 381074 - protein, 361 aa, unidentified
MQQTMTVVGLDVHARSTQAAAIDLLSGELRRARFGGGAEQVVEWLSGLAAPVRCAYEAGPTGFGLARVAAAAGVDVMVVAPSKTPRARGDRVKNDRKDAELLARLLLAGQLKAVTVPPDWLEAIRHLARTREGVRRDLARARHRVSKLLLLEGRVYPGRTTWNREHHRWLAGQQFQFESTELAFIDLLASVDGLSARRQVLDERLSRLAQDDRLWPTVARLRAFKGIDTLTALCLHLELASDWGRFRSPRQLGSWLGLTPSLEQSGESLTQGGITKSGSGIARRLLVEAAWHYGRPPRIGVTLKNRQAGQADHVLAIAWRAQHRLHRTHQRMRSRGKHPNVATVAVSRELAGFLWAAATAP

SEQ ID NO: 381075 - protein, 383 aa, unidentified
MISIGIDVSKGKSTVCISKLHREILNKPFEVKHSLEELKKLADKIISFDEESKVILEATGHYHIPVVSYLQERGIFVCVVNPMLMKKYASISIRKGKTDKLDSKTISKFGLDNWYELSNYKIEEDTYYELKTLSRQYFQFMSLRIKLKVMLSNLLDETMPGIAGLLASNSTSFAKDKLSDFVQKYWHYDNIIKLSENKFTESYKKWAKKEGYQFSQNKAHEIYILAKNSITTMPSKMSSTKMIISETIKGIHSTGISLNLILSRMKELAKLLPEYDVVLNMNGVGERLAPRIIAEIGDVRKYYSAKALVAYSGIDAPPYQSGNFNGNNRKISKRGSRYLRKTGYEIMKSIKCRVPIKDTAVYDYIIKKESEGKAKKQAKIILK

SEQ ID NO: 381076 - protein, 423 aa, unidentified
MMKLKYSICCGLDVHKNVIVATIVTTNKDGISEYKQKSFSTINSDIQRFHNWLIENNCYHVCMESTGKYWIPIFNYLENDIDVCLTHPKYVKAIKGKKTDKKDSKWIADLYKFDLVRCSFIPPKDFRQLRELSRYRFKLVCMKSSEKNRIQNCMTVSNVGIASVLSDPFGKTATEIISYLLEHTADSMDEKAVRKLIKKGAKSKSDEIIEAIKGYTIETDQAKKLELARGHLEYLDDMITQTEVELYVRIKPYYEFVEFVSTMPGMTELSSTIVLTETGVDMDIFDDAKHLCSWCGLSPANNESAGKKKSVRIAKAGDYLKPMMVQCALAAIKSKKQPYFAIKYGRIKKRRGHKKAIIAIARMMMVCIYHMVSEKKPFTPTDYEELMNPQNHVERVVLNENNVFAYLESLGYDSSKLVKRNDN

SEQ ID NO: 381077 - protein, 344 aa, unidentified
MDHFGGLDVSVKETSICIADDTGRIVKEVKVASEPAALLKVLGNPTYRFKRIGLEAGPLSQWLFSALAESELPVICVETRHMQAVLKAQINKTDRNDARGIAQMIRVGLYRPVHVKTLRSQKLRMLLTHRKLLQSKAIAIENDLRGTLRNFGLKVGMVGKVRFEARIQELVENIPDLAVLVEPLLIVRRVLREQIVILHRRLLAIVREDEVCRRLMTTPGVGPVVALTYRATVDVPARFRKSRSVGAVFGLTCSRYQSGEIDWSGKISRCGDEMMRTMLYEAAQSMMHSKKWSWLKAWAMQIARRRGMKKAIVALARRLAVIMHRIWVDGTEFCWTREQATAAA

SEQ ID NO: 381078 - protein, 344 aa, unidentified
MNNSPSGFNPCGIEVSQHTLLVALRLGDHDEAPREFPNTREGHQAVLRFLERAGRPVRVVMESTGLYGLDLALTLHQARVAVMVANPRAVRHFAQALMRRSKTDPLDAEVLRQFAARMPFVAWRPPSAAALQLVAVARRLEALTEMLAAEKNRRHAASLSEALPAIIRRDIERSIQTHERAIQRLTLAAQEFVLSDPALARRFELLLSIPGVGATSALHVLAELALLPAGMDVRQWVAYAGLDPREYTSGTSVHKKVRISKAGNRHLRRGLYMPALVAVQHQPHLRAFYTHLLARGKTKMQALVATMRKLLHAIFGMFKHDQLFDGAKTYALAPLTAPLPQEVA

SEQ ID NO: 381079 - protein, 345 aa, unidentified
MKITTAGIDLAKAVFQVHGVDEHGKVGLRKQLKRKDVLSFFANLEPCLIGMEACGSAHYWARKLSALGHTVRLMAPQFVKPYVKTNKSDCNDAEAICEAVGRPNMRFVAVKTAPMQAVLALHRARQGFVKARTAQANQIRGLLAEFGIVIPKGIGHIAKRLPEILEDGENGLPGMMRELLQRLGANLKDMDKHVGELERQITLWHRDDEQSCKLEAIAGIGPITASAYVASVGDAKSFKNARQVPAWLGMVPRHEGTGGNVKLGGISKRGDVYLRTLLIHGARAVIAHSERKPDHADEWLKKLLARRNKNVATVALAAKNARIAWALLAHERSYQHDYVAIRKAA

SEQ ID NO: 381080 - protein, 340 aa, unidentified
MSLYGGIDLHANNSVIVLLNEQDEVIYRKRLPNTLPTILEQLAPYHTEIKGLVVESTYNWYWLVDGLMEAEYRVHLANPAAMQQYSGLKYTDDHSDARWLAHLLRLGVLPEGYIYPKAERAVRDLLRKRAHLVRQHTANVLSVQNIMARNTGARFSVKRIQELTKQELTTFLAEETQVLAVISSLTVLDCLRHQIKTLEQSVHKRLHHTPSYEQLLTVQGIGTILAQTITLETGAINRFPSVGHSAAYCRCVDSTKLSNGKRKGTGNVNNGHPYLAWAYMEAAQFALRFQPEAQRFYQRKLAKSRDNTVLARKAVAHKLARACYDLMRDLVPFDVTKAFG

SEQ ID NO: 381081 - protein, 416 aa, unidentified
MKKHNNSAMKSEPISKRAKSRGPVQRDTKEVLAELVGKLKEKLDPKKVAATSAGEKLPSGELRPNLDRLTVGVDLGDQWSHYCILGLEGETLAEGQLRTTQQHIAEFFQALNAARVVFEVGTHSPWVQEVICGCGHEVLVANPRLMEGSKRRKRKNDRIDANKLARLGRVDPQSLHPMRHRSKEVRQDLVVLRARDALVAARTEIINTTRGLVKSMGTRLPKCSSRSFAQKGEEAVAVEMREALLPLVRLAATLSADIKEYDKKIETLGQEKYGHTALLRQVKGVGPITALAYVLTLENPQRFAKSRDVGPYLGLVPKQEDSGESQPQLGISKAGDTMVRKLLVGSAQYILGPFGPDTDLRQYGLRLCERGGKNAKKRAAVAVARKLAVLLHRLWVSGEVYEPLHYAMSAPIAAAG

SEQ ID NO: 381082 - protein, 355 aa, unidentified
MNDSKYIGLDVHQATISVAVLDSAGTLVMEAILETKAETILQFIHGLRGSLHVTFEEGTCAAWLHDLLRPPVAQVVVCDPRKNALMKAGNKNDRADARKLAELLYLNKLNPVYHGETGIRALKELARSYLALTRDTTRVMNRVKALYRSWAIPCAGQRVYAPRYRSEWLGKITEAGVHRRAEISYQQLDALRSLREQVRRDLLAEGRKHGAMKLLRQIPSIGPIRAALLIALMQTPHRFRTKRQLWAYCGLALKTSTSGEYRIVQGRLKRSKKFLAIRGLNANHNHDLKNIFKGAATRAAAVAGPFQEFHAGLVARGMKPTMARLTLARKIAAITLIVWKKGVCFDAEHLKQQAA

SEQ ID NO: 381083 - protein, 392 aa, unidentified
MVVSVGIDVSKDKHDCFILSSEGEVLVDVFTIPNTMDGFNCLLQRIQDCTTPQGKMKVGLEATGHYSYNLLGFLLDNGLATYVLNPLRTNLYRKSLSLRKTKTDRVDARTIASMLLSDAGLKPYTDTAYHNEELKSLTRYRFDKVKERAKLKSSVSRLVCILFPEMEKLVSTLHTASVYTLLEEFPGAKQVARAHLTRLKSLLETASKGRYKRDMALEIREAARNSIGSRMPAKSLELQHTIRLIRELDTEIVEIEEQIQSLMDELASPITTIPGMGFRMAAMILAEVGDFTRFDSPDKLLAYAGMSPSTYQSGQLKNCYPHMEKRGSRYLRYALYNATKHVCRWDPTFAAYLAKKRAEGKHYNVALSHAAKKLVRLIFAMEKSRRPYCLAT

SEQ ID NO: 381084 - protein, 342 aa, unidentified
MDHYAGIDVSLECSSVCVVDANGKIVREGKVASEPEALIAWFGWFGASLGRIGLEAGPLSQWLYAAMKEAGLAVELLETRHVRNAFKTMAVKTDRKDARGIAELVRVGWFRPVHCKSMNAQETRAMLTARTLVQSKLHDIEASLRGILRGFGLKVGKITSNRFARRINELVVEHPTLQIIAEALLAAHEVLLRQFKGFEKRVRIMAREDAKARLLMTATGVGAIVSLTCSSAIDDPGRFKKSKTVGAHYGMAPKKYQSGETDYTGRISKTGDKSVRTALYQAAHIILTKPVKGSVLKSWAMRLAKRIGMKKAKVALARKLAVIMHRMLVDGKPFNPAAGAAA

SEQ ID NO: 381085 - protein, 404 aa, unidentified
MTFVGVDWSEAHHDVCVMDADGKVLAKGRVPEGVEGVSRLHEMVSAHVEDPSDVVVGIELDRGLLVGALVASGYAVHAVNPLSVDRYRDRHRTSGAKSDPGDAKVLADLVRTDRHLHREVAGDSELAEAVKVLARAHQGLIWSRQRHLNQLRNALREFYPAALEAFGTDLASSDALAVLEAAPTPTQGRSLSPARIAAALKRGGRRRGIAERAEEIEQALASPQLEGPKVLSRAYGDVVRSTVRIVAEMTTQVEALALELEASFEGHPDAEILRSLPGLGSVLGARVLAEFGDDPTRYADPKARKNYAGTSPITKASGRSKVALARFARNRRLVDALEMWAFCSLSCSPGARRYYDAHRARGHTHRRALRSLANRWVGILHGCLRHRERYSKERAWPTLTEAAA

SEQ ID NO: 381086 - protein, 338 aa, unidentified
MFYTGIDQHRASSVLTTLTADGDCLRQVTLPNDRGVLAAYFAQYPAPPRAVVEATGRWYWLRDLLVPQGIDLHLAHAKFLKAIAYAKVKTDAIDSNTLAQLLRTGLIPEAHMIAEAQRGPRDVLRARLRLVERRSRSKNSLDRLLEKFNVPAPAELPPLYRLQAELQLAQIALLTEQVHTLERAIQGELLETPAIQRLLWIPGVGRIVAFTLALEVDDIQRFPTVRHFWSYCRLVPGAADSGGRQRHRASKDGNRYLKLAFSHAAVRAIQYFPEVRQWYQRWKRKKPIRIARTLVAKELAKSVYVVLHDQVTFNQEFKGTPLTRQKQARWPRRASPSA

SEQ ID NO: 381087 - protein, 376 aa, unidentified
MKKVRFVGFDVHAQTIAAAVAEPNGEVRNLGTIANRSDAVRKLLKKLGTPRELRVCYEAGPTGYALYWQLTQLGVKCEVIAPTLMPLKPGDRVKTDRRDAERLARSYRAGDLTAVWVPDPAHEALRDLVRAREAAKKDQLRARHRLSKFLLRQGRRAAEGMTAWTGKYLKWVHEQRFEHGAHEATVNDYIHEVEHAAGRIELLERAIDTAIQSVPESMRAVIEALQALRGIAQLSAVSVVAEIGELSRFARPRQLMGYSGAVSSEHSSGERVRRYGITKTGNAHLRRIVVEAAWAYRHRPSCTGTLKERQKHLSEEVKEIAWKAQHRLHGRYARLLARGKNKQQAVTAVARELLGFIWSIGVQVERSQRSGQQRAA

SEQ ID NO: 381088 - protein, 353 aa, unidentified
MTSLSEIAEVVIGVDTHVATHSAAVVDARTGGVLGELTVEATPDGYQQLVDFADEHCGLRAWAVEGTGGHGAGLARLLARRYELVLELDRPERAKRRNGAKSDPLDAIRAAREALSRAKLGTPRSTGQRQALSVLLAARRSAVQSGTDAQRQMFSLVIAAPECLRQRFRGHKLPAMVRLAARLRISPHWDAETATTARVLRDLARRALELSGEAARHETDILAIVRSWRPDLLTQPGIGPIVAATVLCAWSHPGRLRSEAAFAMLAGTAPIPATSGQIATRHRLNRYGDRQLNRALHTTVLSRLRYDPATQAYAKRRTTEGKTPREIKRCLKRYLARDLYRLLETPPKPLDNP

SEQ ID NO: 381089 - protein, 427 aa, unidentified
MKTEDIRLEEFRNLKKEVRGSVGHLLVGIDIAKEKHNAFFGSATGKTFLKRFVFDNNREGFEKLLAETDALKQKYGLSQTVFGLEPTANYHKPLGEYLIYRDHEVVLVAGSAVRKNRELLDGRWDKHDVKDAANVADLIAQGKILYYENPGIEVRELRGLLSLKRKLKKQAQGLHLRIRNNLLAQYFPEMDQYYGTCEKDNLAMVSSCLSPAVIGGMEYNEFFKTVVSRKNGLRQHKHLYRIWQLAKGSIGCEAEEGAACEAGVLVALLKQTRQAIEQVEQEILKLCYTFSEYEFVISIPGFGPDVTAKVLAYIGDQYRFETARQVLKMAGFDLCAARSGKPSEKAVPVISKKGKADLRYALYQAAHVASIRSAHFKQYFAQKIRGREREKGIKTKMKVKLAAKMLVIAWTLMKNKEPFNPDYLTTN

SEQ ID NO: 381090 - protein, 367 aa, unidentified
MKDSITVVGLDVHKNSIEIVTADTDGSMEVRRFGRIGGTMDALDRAVRKLVSGGAILRFVYEAGPCGYEIYRHLTGKGFSCKVVAPSKTPKKSGDRIKNDRRDAEMLARLERAGELTSIYVPREEDEAMRDLTRAREDAVKSLKTARHQLNAFLLRYGKRYPGKGSWTPAHMRWMSDIALPHPCQQIVLQEYIMTVRVCTERTTRLTDQIMKLLPEWRWNPVVKALQALRGVAPIVAATTIAEIGDMSRFENPRQLMAYLGLVPSEDSSGESTHRGSITKTGNGHVRRALVEAAHAYGFPARVSRHLLKRQEGLPEPVLAIAWKAQIRLCGKFRRLMARGKLKNKIITAIARELSGFMWAIAREVKV

SEQ ID NO: 381091 - protein, 342 aa, unidentified
MTFVGCDLHTRMQQVAVLDTGTGEVSEQRLSHEGTAVEEFYTALARPVTVGIESTGYAVWFHAVMQRLGHTLLVGDAAKIRAMVVRKTKTDRRDALHILDLLHHDRFPAIWVPDPATRDLRALLTHRMRLVRIRTMVKNGLQAIALNARLTCGSKLLRQAGLVQLQALALPPHTTQRRDQSLALLAGLTTQIRVLDDAITTAALAHPDAPRLITHPGVGALTALATVVVLGPVARFPDSKHAVSYVGLAPAVHASADKAHLGRITKQGSPLLRFVLGQAAAHAARMDPDLKRTYRALVHRRGRPKAKVAVARKLLVRLFIMLRDQIDYDEFCRRGRAARAAA

SEQ ID NO: 381092 - protein, 375 aa, unidentified
MEKLIRIGMDTSKSVFQLHGVDSSEQPVLIKRLERRQVLRFFAKLEPVKVGMEACGGSHYWARKLMELGHEARLVAPQHSKAYVRRGKNDAADAEAICEAMSRPRTRFVPVKTSEQQAAQMLAGVRDQLIRRRTQLSNTIRGHAAEFGLIASTGLAKIEPLLIRIVTDDTVPMLAKELFEVLAADYRAVGLRIAKVDAELMAFHRQDEVSRRLAQVPAIGPIGATLLSIKVVDAKAFRSGRDFAAWIGLTPKNHSTAGKNRLGTITRAGDAMLRRVLVVGAMAVIQQHKRRKEPAPSWLGELLKRKSAMLAAVALANKTARIAWKLMVTGERYEPRLNQAIVAPCSTPSRPLRAADRGGQGPALTAPALRARLCR

SEQ ID NO: 381093 - protein, 332 aa, unidentified
MNMHPQGGVTNRDQRPNAGIDVCKQHLDVCLGAQDLRVANDANGWDGVVAKLKDANVDLVVLEATGGYERGLVFALQGAGITVARVNPRQARDFAKSMGVLAKTDQVDARTLRDFADVLARHKDRAKYITPIIDEQRLELAELMTRRRQLIDMRVAENNHLEHAGKRSVRSIKNVLKTLDKQLAAIDKEVDDHMERHFKQQRILLDSVKGVGPVTILTLTAALPELGTLGRRQIAKLVGIAPLADDSGPRKGKRRIWGGRANVRAVVYMAALSAIQHNPTIKVFHSRLIAAGKPKKVAIVACMRKLLTILNAMLRDQAAWNAAKHLQTPKTA

SEQ ID NO: 381094 - protein, 363 aa, unidentified
MNSVYHTELSSLEETRGQFNGGKADIKLGIDVHQDFYVVVMQEGGSNPKPPQRFQKQAFLLWAAKLKSRSAEVHAVYEACGFGFSLQRQLSQLSIHCYVSCPQKLDEHNKRVKTDSLDAKTLCLRLDRFVRGNREALAMVRVPSEEEERSRAIHRQREQLVKVRKMLEAQGRSLMVNHGIEPVKNWWKGNNFAALPLPAWIKELLQNSQPILIALQQKISALTLQLQVAAAFNQPRGLGAMTSVMIDREIGDWHRFNNRRQIASYTGLCPGEYSSGHTRLQSCVTKHGNPRLRAALVELAWRLVRFQPNYSAVRKWKERLAKGTLTTGAARKKAIVALARQLAIDLWRIRTGRLSAEALGLEI

SEQ ID NO: 381095 - protein, 411 aa, unidentified
MDQVVERCAGLDVHKDSVVATVRVPGEGKERHQELHTFGTTTRELLACRDWLKSHGITLVAMEATGVYWKPIYYVLEDDFECWLLNARHMKNVPGRKTDVADSAWIAQLVEHGLVRPSFVPPKPIRDLRDLTRYRKVQIQERSREAQRLDKMLQDAGLKLSSVATDILGVSGRAMLDALVSGTKDADVLAELARGRLRAKIPALREALEGKFRPHHALIVGEILAKLDYLDEVIGRLSAEVGRVVNPFVEKVELLRTIPGVDRRSAECILAEIGTDMSRFASPQHLASWAGMCPGNNESAGKHMSGKTRKGSKWLRGTLAESANAAARSKNTYLAARYGRLKGRRGHPKAIVAVGHSILVIAHHMLSSNEPYTDIGAAHYLERHGTEGYKRKLVANLQKLGYTVTLESTAA

SEQ ID NO: 381096 - protein, 326 aa, unidentified
MAMLSFCGIDVSKDRLDVMVLPEQHSFSVGNDAAGWADLIARLRGFTIAAIGLEASGGYERGAMRALLAAGLPACQVNPFKLRQFARASGVLAKNDPLDTRMIASFVAIMPTRPARPRSPALERLAEMLAVRRQLNADKVAAGNAARLLEDAMLQRLSQRRIARLAADIDMLDRHLVEIVETDAALAHRYRLLTSMPGVGLVVACTLIALLPELGTMSRKQVAALVGVAPYAFESGKFKGRRCIWGGRAPVREALYMAAMSAGNWNPVLRTFRKRLKGAGKMAKVVIVAVMRKMITMLNAMVRDDVVWADHLHGRHSVPTAWQPLR

SEQ ID NO: 381097 - protein, 369 aa, unidentified
MKHSITFVGLDVHKDSIDIALADEGRNGEVRLYGSIGGDMASLDKAIRKFRRAGVELRFVYEAGPCGYEIYRHLTAQGFHCDVIAPSMTPKKSGDRIKTDRRDAITLARLYRAGELTPVYVPREDDEAMRDLVRGREDAVIATRKARQHLSAFVLRHGFRYSGANAWSVAHLRWLADIKMPHPAQQITLQEYIHSVEESSERIDRLTEQIMKLVPAWRMAPVVVAFQALRGVAPIVATTMVVEIGDLRRFENPRQLMAYLGLVPSESSSGKTTKRGGITKTGNGHARRALVEAAQAYSYPARVSRVLRKRQEGLPREIKEISWKAQVRLCGRFRKLIARGKNRNRTITAIARELSGFMWAIAKEVPMPA

SEQ ID NO: 381098 - protein, 364 aa, unidentified
MKKVSKVVKQTESAKDRPAITVGLDLGDRYSHYCVLNEEGEVIEEGRMQSTETAFGRHFEGEPRQRIALECGTHSPWVSRLLKTLGHQVIVANARKIPAITASESKNDRNDAELLARFAAHDPKLLSPVQHRSLERQQDLNLIQARSTLVRARTMIVNALRGLVKSAGGRLPACSTESLPVRVRASIPPALRAIALPLLKQVALLNRQIGSMDRQIEKLAAKYPEIQVLRTAPGVGPVVAAAYVLTLDRPDAAGNRSAGAFLGLRPRQSQSGDSDPQRRISKTGDSYLRSLLVQSAQYILGRFGPDSALRLWGLKLAANGGKRGKKRAIVAVARKLAVMLHSMWRSGNCFQPFPQPATDAAAAA

SEQ ID NO: 381099 - protein, 310 aa, unidentified
MDAIYVGIDVSKDRLDVHVRPSGEAFAVTRDGKGLEELVERMRALAPTLIAVEATGGFETIVAAAVAGACLPLAVVNPAQVRHFARAIGKRAKTDPIDAAVIAHFAEAVKPEPRPIPDAAARLLGELVARRRQIIEMLVAERQREKRVDAVRVRKSLARHIAALEKELPVIDRDIDTMVRGSPVWREKENLLVSFPGVGGILARTFLAEMPELGSLRRRQVASLVGVAPYTRQSGRWRGKSMIGGGRAAARSAVYLAALSAIRCNPVLRVFYQRLLAAGKPKMVALIAVARKILTILNAMLRDKKPWQHA

SEQ ID NO: 381100 - protein, 323 aa, unidentified
MMDASELIFIGIDVSKDSLELALNDKGQTRYMDNDEDGIAQLLAIVKAAGGTVGAVVLEATGGFERSVAVALCRMGLPVMVVNPRQARDFAKAMRYLAKTDAIDARMLSHFALTLYQSERRERLLMTLPDANQEALQSLITRRGQLLQMHVAEANRLTLCSQLQRKSIKVVLKTLDKELARLDVDIDHQLKGHFAEKLALLKGFKGIVVGMQASLMAALPELGILNHQQISKLVGVAPLNADSGKHKGRRITWGGRSDVRSMLYMATLSAIRFNSVIKPFYERLIAKGKPKKVAIVACMHKMLTILNAIMKTNKPWDELHRCT

SEQ ID NO: 381101 - protein, 355 aa, unidentified
MNQEKYIGMDVHDATISAAVKNAQGKLLMECVLETKAATILEFIQGLRGTLALTFEEGTLAAWLHDLLKPHVSRLVVCDPRKNALLRDGNQNDRVDARNLAELLRTNQVKAVYHGKHEIRALRELGRSYLTLTQDSTRVMNRIKSVYRSWAIPCAGTSVYSRRHRAEWLAKLVEPGVRIRAQHLYQELDSLEPLRQAARRELLRESGKHAAVKLLRQIPSIGPIRSALLVALLQTPHRFRTKRQLWAYSGFAVQTYDSGEFRFVRGKLQRNRERITVRGLNRNHNHDLKNLLKGAAISAIQRPGPLQDFYAALVEKGMRPSMARLTLARKIAAITLTMWKKGVSFDPKQLQRQAA

SEQ ID NO: 381102 - protein, 413 aa, unidentified
MSNQSQRYVAFDVHKSYVMAAAVNAAQEVVLPPRRIPFSRFEQWIVKNLHPTDQVVLEATTNAWYVHDQLEPLVGRVVVAHPYRVKLIVAAAVKTDKKATLGLAGLLAANLIPEVWVPPLEVRELRAFISHRRRLVSQQTAAKNRLNSVLHRHNIVAPPGHLFNQDNQPWWQELELPSSEKLRVRQDLATLLHLKPQLGEVETELARLSTVEPWANQMTYLVQLPGIGLLTAMTVLGAIGDISRFSSAKKLVGYAGLGARIHASGQTHKGGGITKEGRRDLRSVLVEASWSAVRFDPHWQEQFERLAHRIGKQKAIVAIARKLLVVIWHVLTAAEADRRADADRVAGKLMAWGAKLAAQRPGKMSVGQFARFHLLKLGLGDDLFYIIRGGIKRLIPSAEKLQTDHPDLFTTDQ

SEQ ID NO: 381103 - protein, 422 aa, unidentified
MEVMYPRCAGLDVHKETVVACVRIVEGGEVSRSVRTFATTTASLIELGEWLEANGCTHVGMEATGVYWKPVWQVLADGTFELVLANAAHVKNVPGRKTDVNDATWLSELLAHGLVRASFVPEPEIQELRGLLRTRKQLVREKASHVQRLQKTLEEANIKLESVLSDVMGRSGRAMIQALIDGETDPAKLAALAHSKVRASAATLREALRGRIKHHHRFLLKLHLQQINALDAAIAEIDREVDAGLACFRDAVKQLSTIPGVSELSAQVILSEIGTDMSRFATAAHLRSWAGLCPRNDESPTGQARGLKAHGKRRSTRLRTGAPWLKATLVQCGWAAARTKATYFNAQFVRLRTRRGPKKAVCAVAASILTAAYHMLKDGTFYQDLGATHFDRRRPEAQARRLVKGLADPGFSVQLKPVTTVS

SEQ ID NO: 381104 - protein, 457 aa, unidentified
MSDVKTVEDPTPAAAPAPEFAARIGLDWADQKHFWTMLDEGGKKTRGQLDNTPEAIEVWAAELAQRWGGRPVALALEQSRGAVITVLTKYAHLVLFPVHPTSLANYRKSFSPSGAKCDPVDGDLILDYLVKHPEQLRCLRPDTVETRSLQFLTEERRKLVDAHTAALQSLIHWLKQVFPQILRWFDDPATPLVADLLMRWPTLQELQKSSPKTLRKFFHQHNCRSEDRTEERLEQLRQAVPATHDPALLRAGTLSIQNATRILASMRQGIAEFDRQIAVTYQAHPDRFITESLPGAGPALEPRLIAAVGSQRDRFPTAYNMNCCFGVAPVTERSGNSVWIHWRWACSTFVRQTFHEWAGCSIRTCDWARQYYDRQRAKGNGHHAAVRSLAFKWIRIFFRCWRDRVAYSDQRYEEALRKRATKPQPAPTPTQADAKITLEWKSCGGFSKLAKVLEVSS

SEQ ID NO: 381105 - protein, 347 aa, unidentified
MKFYTQQHRYYCGIDLHARTMYLCVLNQQGEILLHRNMPCSPDFFLKAIAPYREDMAVAVECIFTWYWLADLCAQENIVFVLGHALYMKAIHGGKAKNDKIDAHKIAALLRGGMLPMAYVYPALMRSTRDLLRRRMHLMHKRSELLTHIQNTNSQYCLPQFGKKIAYKKNRQGVAEHFADSSVRKSIEMDLSLIDHYDKLLTEVELYITQNAKIHDVNAFNRLRSVHGIGKILALVILYEIHEIDRFPTVQDFVSYARLVKCAKESAGKRHGSSGTKIGNVHLKWAFSEASVLFLRANPAGQRYADKLTSKHGKAKALSILAHKLGRAVYYMLKRDKAFDMNKFLNS

SEQ ID NO: 381106 - protein, 386 aa, unidentified
MVYCSTGVRKIQPQEYDVFLGMDVDKRSIVGRQVDHYGTEHGVRMPYDAATLLHYLEHHLAGQRVALVYEAGPTGFGLADTLLAAGFACMVVNPAQVPTERGKRLRTNRLDAQKLAYQLRGGGLKGILVPSEIYRHLREYVTLRKQQMTESARYKQRIKALFLRYGWAWPDPRDGAFWSKALLAQLRDYPCAPALQFKLGSLVESLMFARGQALKAQQDMRRFVEATPELAESVRYAMSLPGIGWIVATYAVARLGDWRELRSSHQTASFMGLVQTEDSTGESTKRGAITKAGDPVLRSLMIEAAWTTIRHDPELAACYERIKATHAKDKAARIAIVAVARKLATRLHCVLTERRVYQVHSGDGAMSGGSGSPEGERPRPGGRARR

SEQ ID NO: 381107 - protein, 343 aa, unidentified
MQAITTIGLDIAKSVFQVHGVDPDGHVVVRRQLKRRYVLAFFEKLAPCLIGIEACASSRHWSRQLQALGHDVRLMPPSYVKPYVKRQKNDATDAEAICEAVSRANMRFVPTKTPEQQSGLVLHRTRHLCIRQQTSVINAIRAHCAEFGIVAPVGRRGIEELLNVIANANDEQVPEIARACLSALGDQLHRIKAQILAFDRMIGAWHRSCAASKRLDEIPGVGPALATALVASIADPRTFRSGRDFAAWIGLVPKQSSSGGKPRLGSISKQGDRYLRGLFTAGALAVIRYAKIHRIGHRPWLTALLARRPTKVAAIALANKIARMAWAMMARGERYREPAALAA

SEQ ID NO: 381108 - protein, 426 aa, unidentified
MRDIALDVHIDFCEVAIAEEGEIRSAGRISTEPEELDLFAQSLGPDDRVALEVTGSAWAIKRILEPHVAEVIVVSPTDTGIRGARAKTDRLDARSLARLLAAGELDPVWMPNRETQVMRRRIGRRTQLVRARARAKNEIHATLMRCLVGRAPFREPFGPKGRRWLAGLGLPAEERESVDAALRQVDFLDSEIEAVERLICAEALRSPEIKRLMTVPGVNVIVAATFMAAIGEIARFRSPRKLAGYLGLDPRVIQSGSSPATHGRISKQGSVSARHALVEASWSVVRQPGPLHAFYQRVRARRGHSVAIVAAARKLACLFWCLLTRKEDYAYAQPSLTAKKLRLLEVRAGAPTRRGIPSGTWPTRQRMRAAEQELAARAESAYKRMVAEWQRTQAKRKGASATPGRASRGPSSGQAARQDKAPSPAL

SEQ ID NO: 381109 - protein, 350 aa, unidentified
MDIVGGLDVHRKQITFDYVQIETGESHRGEIRPADREHLRSWLERFAERFRDREAAFAVEATTGWRYVVEELERAGIEAHLAEPADTRALQGRKKRAKTDRIDARHLRELLLIERLPESWVPPEHIQQIRTLMRMRHSMVEERSAYLQRIHAQLFHNGCPRQEKELISAEGRERLGSLDLPVAARKVVEVCLKMIEHINEELAPIEEELRAYSRAQAGCRALMKHYGVGELTSVALLSELGDVRRFSSSRKAVRFAGLDVTVHSSDEKRAAGKLSRQGSPVLRWAAYEVAKGAYRKSSPDHEYYLQSRERVGTNRAALSIARKLLRRAHHTLRELGEEAMSEPVVGSGAL

SEQ ID NO: 381110 - protein, 360 aa, unidentified
MKVQRTSIGLDVHARSVVGCGLDGDTGEVFQRRLCPDHQEILEWIQGLPAPVAVTYEAGPTGFGLARALICAGVDCRVAAPSKLQRPSGDRVKTDARDAAHLARLLHLGQVVEVAIPSPAQEAARDLVRAREDCRGDLMGARHRISKLLLRQGIVYCGGQAWTGKHEMWLRAQQFDTAGLQLAYDAAFDAMVCCVHRRDRLDEAIVGLAADSEFTPVVRRLGCLRGVSTLTAFGLAVEIGDWSRLTGRSIGAYLGLVPTEYSSGNTRAQGGLTKTGNTHARRLLVEAAWHHRAPYRPSRDLRRRWEAACPAARARGHAANHRLHTRWVGFDTRKKRPVVANAAIARELAGWCWSLAVLDG

SEQ ID NO: 381111 - protein, 360 aa, unidentified
MAKARTLVGLDVHAAKIVAAVLDADTGELKTFSMKGDTLAAAGFCAGLPRPVRVAYEAGPTGYGLARELHKRRVGCLVAAPSKIPRASGDKVKTDARDAEHLARLLLAGKLHQVRVPGPEEEALRDLVRARETLRLDLMRARHRLSKLLLRHGVQFDDGRAWTERHRAWLKTLELDWPAAQTTLRDAQGSIEALCHRREHLEREIVAILPSSPWSREVGRLRCLRGVDTLTAVGLCAEIGDFERFARAEQLMSYVGLVPSESTTGNSRRLGSITKTGSAHARRLLVEAALHYRKAPALRKTLAERQKDQPPEAVAVAWTAQQRLFRTWARLEARKKRRTVIAVAAARELLGFCWAITQIE

SEQ ID NO: 381112 - protein, 342 aa, unidentified
MERVYVGLDLGSSSFQQVGLNEGGVIRVKREFQTSAANLIRAFVDLEGEVHVHLEAGELAPWAVSIITPLVHRVVCSHPQANAWIAKDADKCDRLDAFKLGDLLRLNRFKEVHYPPQQSRREFKTLVQHYDELTQQQARLKTKIKARLRMQGVIVRGEQPFSATGRKAVLAAVKSVAVRTAISQLYAVLDQSLESQTEARLLMRRAAQAFPEIRIFETAPALGPIGACRFSAYIHTPQRFSSTRKLWKYCRLSVSHRSSNGKPLRRPRLDHNGCGRLKDVSRKAFDAALRSKTDNAFKRAYQRALASTHDATHARLTVQRKIVSTLRAMWINQTPYREELMR

SEQ ID NO: 381113 - protein, 432 aa, unidentified
MEKIRENAAGIDIGAKKVFVAIEGQEVRYFFTFTEDFEKLRDYLLGYKIKTVAMEATGVYWNILYEILEEAGIDVWLVDGRQTKQVPGRKTDVKDCQWIQQLHSYGLLNRCFVAEADIKELRAYQRLREDHIRSASMHINHMQKALTEMNIRLTEVLSQIHGVSGMAIIGAILKGERNKETLLKMCDRKIIKHKKEDVLKSLNGRYTKHGIFALKQAFDSYMFYQHQIEQCDQMLSEVIEKIGKGKPDQYPQGPRKPIRHNKPDINNLGISLLKIFDGKDATALSGITDYSWMQLMSETGTNLSRWPSEKAYTSWLGLAPGQHTSGKMKRTKRKNGHPKAGQIFRQIAQSILTSKHIALGAFGRRLRARKGSQIAIKSVARKLAVLYWRIMVKGMAFVEEGIKKYEQQLLVQKHKSLERLAKDLNIQIAYNV

SEQ ID NO: 381114 - protein, 373 aa, unidentified
MPRYSTAFGMDVHLRSTTVCALDAETGEAVTRRFRGNPWGEVAEWMSGFPGPSLAAYESGYLGFAPQRELSGLGVDCVVAAVSRVPRSAADLSSKNDRNDAARMAKAILSHDISPVWVPSPEIEGLRDLAGAHDAATARLAAAKQRLLAFLARRGYAYGGTTPAGNPRRYWTYDFLRWLDKVRPADDGGIRALAALRSEVEAAAETRDDLLAEYRAAVAAGPLSAEVEALQSIKGCGFALAAAFASEVGDFSRFRSGRQVTSYFGLAPKQRSSADSVRLGGISGAGNALVRRLAVEGSWSYVQASHQPKLMPKGSGVPLEVRMHGRKGSERLLRRREEMLARGMPQAKANAATAAELVRWLWALGAMCREATE

SEQ ID NO: 381115 - protein, 393 aa, unidentified
MRYLGLDVHRDFCEVAICERGRARSVGRIASTRDALELFAASLAPDDRVVLESTGNALAIATILRGHIADVVLANPMQVRAISHAKVKNDRVDARTLAELLAADLLPRVWIADEPTRVLRRLTSRRTQLVRQRTRTKNEVSAVLVRNLIARPEVSDLFGKAGRHWMATLVLPVDERHTLDGCLRQIDFLGEELAVIDRAIAEHVLASSDMRRLLTIPGVDATTAATMMATIGRIQRFPTPRHLVGYVGLDARVRQSGNHPARHGRISKQGASAARHVLVQAAWAAIKTPGPLHAFYRRVKARRGAQIAIVAVARKLAILIWHLLTKQRDYAYQRPQLVARKLRRLELQTGAPPRRGQRASHPNTDRAALQRARLAEARYADLTSNWQTRPLRA

SEQ ID NO: 381116 - protein, 426 aa, unidentified
MPDTTTYAGWIGLDWSSKEHVFCIYNASTGQESIRIIADQADDLLAFFAELRQLFPNRPLLLGLEATRASILPILLQQDFLRIILINPKTAANFRGMFRLSGVKSDALDATYICRLIRTHPEEFRLCQAHDPQTRQLAALTEKRRGLVEWRVQIANRLRASVASAFPQILALLHCQLTVPIAAHFLNRWPTLQKAQAAGANKLRAFFYKNNVRTSQNLETRLTAFMQTKPLLNAPQDNFPFELEIQLLAKQLLQLHDAVQKFDQEIDRCYQTHPIAKILAAVPGAGPRLKPRLAACLGTHKERFATALDISTYTGIAPVHKSSGTKKTVVARHIRPLFLHQTWVEFANCSVRRPGWARAFYETKREAGFGHYEAIRAVAFKWTRVLFACWKADEPYEEARYIKILRAKNPGLIARLNPTPPPVNNA

SEQ ID NO: 381117 - protein, 343 aa, unidentified
MEITTYGLDLAKSVMQLHWVDMETGEIHRKQLKRRRLLEFFANRQPGVVAMEACGSAHYWARELLKLGHEVRLIAAQFVRPFVKTNKNDAADAAAIWETVQRPGMRFVAVKTEEQQSVLSLHRIREQLIKMRTMQVNQIRGLLYEFGADLPQGRQKGLKEVPDALANLEKSISPMLLDTVRQQLKRLEEMDKDIADIEKRLTLWKKDQEAVTRLLAIPGVGLLTATAIIATVGDMKSFRSGREFAAFLGLVPRQSGTGGKVRLLGISKRGDTYLRKLLTHGARAVVNCQVKNRNPWIDKLLSRRPHNVTVVALANKMARTIWALLVKNTEYMTSHTMSAASIS

SEQ ID NO: 381118 - protein, 352 aa, unidentified
MRRPKHQVTREEDLFIGIDLHKQRWHVTIRTVDLELFSASIPGTWEALQRVLARYASCQMQAVYEAGYFGFRLHDSLVAHGIPCLVTPPSLVPKEYGNRVKTDRRDSSKLAHLLAKGMLKRVWVPSEEELYHRQVIRRRRQLVRDRVRTQSRIKAELRFYGIHLEEPRGRWTQGYFETLRHFRFGNRWIQESFNRLLEQYEFLSAQIDKQTQLLKELSETALYRERVEILQSIPGIGIISAMELLLELQDVSRFRRAEQLAAYVGLTPSQYSSADKVRMGRITGIGKNTLRSLLVEASWTLIRKDQAMREKYDRIKIRSGGKRAIVAIARTLLLRMRRMLLDKQAYALPLAA

SEQ ID NO: 381119 - protein, 343 aa, unidentified
MGEVSTIGLDIAKSIFQIHGVDADGAVVIRKRISRAKLLEFFATLPACLVGIEACPTAHHWSRRLQALGHTVKLMPPSYVKAYLKRSKNDANDAAAICEAVTRPSMRFVATKSEQQQSGLMLHRGRQLLVCQRTMLSNAIRGHMAELGIISAKGRNGTAELLKIIADEHDDRIPAAARFSLDVLARQYAVVRAMIVALEKRIHAWHRSCEESRRLEEIPGVGPIVATALVAEVGDWKEFTSGRSLAAWIGLVPRQHSTGGKERLGRISKQGNRHLRWLLVAGAMAVIRYARQHGTKRPWLARLKDRRSIKVAAVALANKIARMAWAMMVRGERFKEPKLLPAA

SEQ ID NO: 381120 - protein, 331 aa, unidentified
MTSLPNRSNETPLTVGVDVAKATLEVGFSDRSARLTPANDEAGHAALLADLAALRAKGSEISLIVLEATGGLELDVATALQLAGYAVVIVNPRQSRDFARSMGVLAKTDRIDARVLAHMGQTLLRRDDLRKLIKPLPDEGQRMLQALVTRRRQLLTMRIAEQQRAGGPDRRMRRSLNIMLKALDRELARLDKDMQALIGEHHAELAALLNGVNGVGKATISTLLAEVPELGELNGREVSALVGVAPINRDSGAMRGKRTIFGGRPAVRKVLFMAALVASRHNPVIKAFYQRLLAAGKPKKLALTACARKLLTILNAMARTRNPFNAALHLG

SEQ ID NO: 381121 - protein, 417 aa, unidentified
MDPQISFNQVVSRGCGIDVHQKVVVATIGGEGLKKATREFGTFTRSLTELKDWLLENGVTHVAMESTGIYWKPVYHVLEPTSLKVWIVNARHIKYVPGHKTDKQDSAWICKLLLAGLLKPSYIPAKEQRELRDLTRFRTKMIQHVASEKNRIVRILEDCNIKLSSVLSTTQGVVATKLIDKLCEVGTITMSDIEEVYHKRLEASKEDLYEACQGLIDKHHIYLLGLIRQDIASTEAVIKNLNARIKEVLSGYDNVLEHLKAIPGLSTKTVEDLVAEIGLDMSVFPTEKHLASWAGMCPGNNESAGKKKSGRTTHGNKQVKAVITEAAWAATRTKNTFYSARYHRVVARRGKKRALIAVGHSILKSVYHVINGMEGYKELGADYVTQRVEKRRKLYLKKELEKLGYAVQLTPPVPQAG

SEQ ID NO: 381122 - protein, 402 aa, unidentified
MNAVGIDVSKGKSMVAIMRPFGEIVSSPFEIKHTTSDINSLVELINSVEGESRIVMEHTGRYYEVLAHQLSKANLFVSAINPKLIKDFDNDSLRKVKSEKADAVKIARYTLDKWQNLKQYNVIDELRNQLKTMNRQFGFYMKHKTAMKNNLIGIIDQTYPGVNTYFDSPARSNGSQKWVDFASTYWHVDCVRKMSKNAFIDHYKNWCKRKKYNFSKSKAEEIYEKAKELVPVLPKDNITKLIIKQAVDQLNSVSTTIESLRTLMNETASKLPEYPVVMAMKGVGTSLGSQLMAEIGDVSRFTHKGAITAFAGVDPGVNESGSYEQKSVPTSKRGSSVLRKTLFQVMDVLIKTHPQDDPVYQFIDKKRAQGKPYYVYMTAGANKFLRIYYGRVKEYPSSLPES

SEQ ID NO: 381123 - protein, 355 aa, unidentified
MNDAKYIGMDVHQATISVAVRDSRGNLVMEAILETKAETILEFIHGLRGSLSVTFEEGTWAAWLHDLLLPHVTRVVACDPRKNALLKVGNHNDRMDARKLSELLYLNKLSPVYHGEQGIRTLKELARSYITITRDLTRVMSRLKAIYRSWAIPCAGQQVYAPRYRAEWLAKISEAGVRRRAELYYQQFDALAALRQGTRRELLAEARKHPAMRLLRQIPAIGPIRAALLIALIQTPNRFRTKRQLWAYCGLALRTYTSGEYRFVAGQLKRSKKVLAVRGLNINHNHDLKNIFKGAATRAASTVGPFQDFYQACVARGLKPHLARLTLARKIAAITLLVWKKGVRFDAEHLKQQAA

SEQ ID NO: 381124 - protein, 401 aa, unidentified
MIDTGDIDVFLGLDVGKGEHHATAVTPAGKKAFDKRLPNTEPKLRELFAKLQAKHGTVLVVVDQPASIGALPLAVARDMGCPVAYLPGLTMRRIADLYPGEAKTDARDAFIIADAARAMPHTLRAIDGEDETIAELEMIVGFDDDLAGEATRVANRLHGLLTQIHPSLERVLGPRLQHPAVLTLLERFGSPAQIRKAGRRRLVTLLRPKAPRMAERLVEEIFAALDEQTVTVPGTDAAALIVPSLATSLTAVLDQRKLLAGRIEELLEDHPLSKVLTSMPGVGVRTGARILIEVGDGSTFPTAGHLAAYAGLAPATRSSGSSIRGEQPSRRGNKQLKRAFFLSAFAALGDPASRAYYDKKIAQGKHHTQALLCLARRRADVLFAMLRDGSFYEPQPSASVT

SEQ ID NO: 381125 - protein, 416 aa, unidentified
MSGKREIACGVDVHNKFIVATILSSDGLKLQDRFNTNLEELLKFKDWLKKNGCRKVALESTGNYWIPIYSILEGSVNFILANAYQIKHIPGRKTDTLDSEWIAEICLKNLISPSRIFTRDYRELRSFTRSRESLIKVRTKIKNRVTHELEASCIKLSSKLSDIFGKSGRYIVDGLLNGMDPEVILERIPLGRIRATKEEILGAIQSNLSPSQIFLIQSHLNIIDTLTKQIAEIDAKISGLISLRKEDLRIALSMPGMGIISASTILAEIGDFRDFSSPDKLAAYCGLVPSVYQSAGKLINGHITKHGSPHIRAMIIEVAHAIIRSKQNSRLKKFFLRIKARRGTKIGVVALGRKVLCILFHLIISQELYQDELLSKPRNSKHISTHSTTSMSLGEMIETIIKAGYEVRRNECLERG

SEQ ID NO: 381126 - protein, 394 aa, unidentified
MKLVGIDVGKNSHHFCVMDKETGEFNVTPTSFSNNKEGFDFLINSLKPYSKKSILLGMEDTGHYHVALLKFLLSNGYTVALINPKTTDLTRKMEGAITKNDKLDTITICDVLDTPERKKQYRITKVDRFDLYEQRQLTRHHHNLKEELNIYCNRLQKSIDLVFPEFNTLFGSKYGVVYMNLLKTFGSAEAIASTDIRTIRKCFEIKGRGGRISLTAEKLKECAKNSIGISSEVETIQIKHLVSQIMLIKEQIAEIDKKIEEFSITNNSPILSIPGISHFSGTSILAELGDIGNYSKPSQIIKFAGVAPYHYESSQYNAQHTGITKKGSKYLRKTLYQIILPVIKYNPVFKKYYLLKISQGKGHRCAQGHCIRKLLRIIYHLLETGQLFDPALLR

SEQ ID NO: 381127 - protein, 347 aa, unidentified
MRYVGIDVGKQRCRAAIMDRGGFIINEFNFNNNHEGIEDLASKLTMDDRVVIESTGSVWVNLYNRFDERHIPVVLANPLKTKAIASARIKSDKVDARILAHLLRADLIAESYVPPKELREVRALIRHRASIVKIRSIVKNKVHALIDRYGFRCEYSDPFGKGGTQWLKTLELPSLDRLMLDNHLQHIESLNQQIERVDEEIRSKASHDEDVKLLLSMTGIDIYTALLIRSEIGSIGRFPSYKKLVSWAGLAPSLHQSGSIEYHGRITKQGSRMLRWIMVEAARVAVNHDERMRAFYERVKHRRGDQKAIVAVANKMLKIVWFMLTRREPYESANQQRYERKLNSLVD

SEQ ID NO: 381128 - protein, 387 aa, unidentified
MRTVSGLDIHKDSIFMCILDEQGKKTEEKFGVTTREIKRLGSVMRSHFVSEVCMESTGIYWIPVWRLLENDFQLRLVNAQFLKQLPERKSDVKDAEWIATVLLKELVRDSFVPDGNIQSLRQYGRRINEINKDLVRCQQRIDMILQRCNIRLSNYVSNEDSKSYRKVVDALIKGESSSCELVKLVHGRTINRFSKSIIEDALEGDVKQSDRDLLEQYTQMLDLYQLQKQQCMDSMIQKCRELYPKAFSILLGICGIDKLSAAIIISEIGDNMKLFATAAALVSWAGLRPRNDESAGKIHSRKITHGNKYLRKTLIECAWGASRNIGSVFYCRFWHLKEMKKHHNAIIVAIARQLLTIIWTLLSKEEKFDNQYHLKKNIPSITSIKVG

SEQ ID NO: 381129 - protein, 362 aa, unidentified
MVVQRTSVGLDVHARSVVASVLDGVTGEITERRLTPAHDDVAAWISGLPKPIKVTYEAGPTGFGLARFLRAAGVDVEVAAPSKLLRPSGDRVKTDARDARHLARLLHAGQIVAVAVPDEATEAARDLVRAREDARSDLMSARHRVSKLLLRQGIIWSGGKAWTGVHDRWLRAQTFTSAPLQLTYDTAYETMLAAVERRDRLDRAIVLLAADSAFTPVVRRLGCLRGVSTLTAFGLAVEIGDWHRFTGRSIGAYLGLVPTESSSGASRSQGGITKTGNAHARRLLVEAAWHHRPAHRAPGVDLRRRWELASPAARDRGRRANRRLQTRWARFDARGKRSVVANAAIARELAGWCWSLAVLEDT

SEQ ID NO: 381130 - protein, 432 aa, unidentified
MKFNQSNKQNQRISRISETTLVIGTDIAKHNHVARAFNYRGIEFGKRCLFQNDENGLLNLLAWAESIQQEHGLTDVLLGVEPTGHYWFPLFHFLKQRGVEVVLVNPHHVRKSKELDDNSPTKNDIKDAKVVAKLVIDGRYTQPQLPEGVYADLRVLMNQRDRLCGDLNRVKGRIHNWLDRFFPEYRQVFKDWEGKASLITLQHFPLPQDVVGAGETTVMATWKKNGVQRAVGPKRAGLLYRKAQKSIGLTEGATAAKHELAMYLEQYAMLCRQIEQLMEHVAALVEQIPGASHMMSIPCIGLVTVAGFLAEVGDLSGYDHSQQIVRHAGLSLRENSSGLHKGETTISKRGRCRLRALLYRAALTMVAKNPEFRALHLYFTTRRDNPLKKKQSMIALCIKLIRVLFELGRKQKNYDSSKVLGPHREAQLQAAA

SEQ ID NO: 381131 - protein, 402 aa, unidentified
MNQTAPPKQPTNPPPTLGPSGRAVGLDIHPDTFAAAILDGRDPLQARVAQSLTRQPLEGLCAWAARHTRSEDLLILEASANSFAVAERLQGIGRQVYILESHRAGQIGKSYLANDKVDAAKIARIYLSGLAIKVWQPDAETRQRRELLSTYQRCVKDSTRAQQHLRSFLNEHALRLPKGFRLCRPEAISRLLTLKEWSPRQKLLLQEMHGGLIAARERRTRLRRMMALEIEEQPDFLRLYKLAGLNLVTTYALVAIIGDITRFATSKKLVSYLGLNPSVVESGQFEGGGALHGHGRGSLRALLIQASKRLLTTVNALQKWGLSVALRRGMNKAAVAVARKLTVAVWHVLQGHWNQALEESTTLLTKLTKLATDLGVATLHELGYASKVAFQEEKLQVLRTHP

SEQ ID NO: 381132 - protein, 345 aa, unidentified
MTIVSTRAITGGVDTHAGAHVAAALDPVGGLLGVREFPATAAGYGRLLGWLGGFGTVALVGIEGTGSYGAGLARHVTAAGIRVVEVDRSDRQDRRRQGKSDPLDAVSAARAAQSGRAAGGPKGRDGAVEAIRALMVAKRSARSERVQTINQARALVLTGPEDLRARFAAHTAASLVSGLASLRPRPGDVVGYATRTALRELGRRAEFLDAQLERLDELIAPLVAARAPGLLALHGVGPDTAALLLVAAGDHPERLRSEAAWAHLCAAAPLQASSGKVTRYRLNPGGDRQANHALWRIVLTRMSAHPPTLIYVERRTKEGLSKKQIIRCLKRYVAREVYRHLRAAG

SEQ ID NO: 381133 - protein, 400 aa, unidentified
MRAVFGIDVSKASSEVAILVNGEKVHGYTMSNDTIGFARLLGDLRTVHKPEIIFEATGVYSHRLQTFLEDNGYAYTRLNPLEAKKQLDSLRVRKTDQIDAEKLAQSQFVLNRKPTYVQEEVYQNLRALSRFYQNLTEDIVRAKNRLHKVLQVTFPELETILSTPSGQQYWNLVIDFPCKDFVLELSKDELSESIRQSTSKRISDKRVAYLVEKLTALANQSYCAVKKTSPIMEEVRYYGRELLRLSEQRQTVLDQMVELAQPLPEYDILLSIPGIAETTATSIIGELGDIRRFQSANQINAFIGIDLRHYESGNFLAKEHITKRGNPYARKILFKCIHNIASASHTNPCHIADFYEKRKRQSQTTSTKPHTIASIHRLIRTMYYLITHNKLYDYTSTQNR

SEQ ID NO: 381134 - protein, 364 aa, unidentified
MTSSADHHTTHVDTPEQIVLGVDTHNDVHVAAVITVMGVLLGTQAFPATADGYAALLEWARGHGHLRRAGVEGTSSRGTALNRYLRRHHLKVLEINRPDRARRRPRGKSDTVDAENAARAVLSQEATAIAKTGDGAVEMIRMLKVARDSAVKARTQAINQLRAVLVRADPGLRDALAGLGPIALIRSCADLPEAEHRTIDDAARTVLRMLARRILALTEESRAHERALVAIITDRAPKLLQRHGIGPDTAAALLITAGDNPDRLGSEAAFAALCGVNPIEASSGKTVRHRLNRGGDRRSNSALYTIVVTRLGRDARTRAYAERRTSEGKSKKEIIRCLKRYVAREIFPIITKALSPAEISSAAA

SEQ ID NO: 381135 - protein, 355 aa, unidentified
MISTEYIGMDVHKESISIAVRNAAGKIVMECVIETKASTILQFFDGLRGDVHVTFEEGTWAAWLYDLLKPRVTKLVVCDPRRNALLQEGNQNDRADARKLAELLHNNQLRSVYHGDHGLRTLKELVRSYLTITSDLSRVMTRVKAIYRSWAIPCTGKQVYAPRHRAEWLGKISEPGVRRRAEFYYQQLDALRSLRQQVRRELLAESKKHKAWKLLCQIPSIGPIRSAVLLGILQTPHRFRTKRQLWAYGGVGIETSSSADHHVVKGQLERNKKQVEIRGLNRNYNHDLKNLFKGAAIVAATKPGPFAEFYAELLAKGMRPEMARLTLARKIATIVLIVWKRGVCFDAQHLKPQTA

SEQ ID NO: 381136 - protein, 447 aa, unidentified
MTDLKTHGHAFAAYIGLDWADKKHNLTMQTADGRRSRGELKHTPEAIDAWAAELAQRFGGRPVAIALEQARGALVAMLSKYAHLHLFIVDPSRLDHYRKSVSPSGAKSDPVDGDLILDFLLKHPELIRCLAPDTVETRSLQFLTEQRRQLVNQHTSQVQVMQSWLKQVFPQILEWFGDVSTPLVGDLLKRWPELAKLQRARPETLLQFFHDHNCRSAELNQQRLEGIRTAVAATHDAALLKAAHLMIQTSIQMLESLRTAIEKFDGEIAAVYATHPDRFLIESLPGAGSALEPRLLAALGTDRSRFRSAGDMACCFGIAPVTASSGNSRWVHWRWACSKFVRQTLHEWAACTVREDGWARDHYERQRAKGKGHHAAVRSVAFKWIRILYRCWRDRVPYSEQRYLEALRAHGVAKSKPTTNTAVPSPGPLPVQWKNCGSFSKPSKLSS

SEQ ID NO: 381137 - protein, 372 aa, unidentified
MIVIGADTHKQSHTVAAVDATTGRLIDDNTVRARRRSFDDLLVWARGVDAERVWALEDCRHVSGALERFLLRRGEQVVRVAPKLAAGARTTARERGKSDVIDAVSIARAALREGLATLPIAQLAGPELEVRLLVDHRERLVAQRTQLINDLRGHLHDLWPELEIPARGLTTSRWQDRLAGRLARAEQSARVRIARDELRRIRELTRSIDTLQRELTELVGALAPQLLAERGCGVLTAAKLIGEIAGSGRFSSDAKLARLSGSAPIPASSGHTIRHRLDRGGNRQLNCALHRLAITKGRLDPDTAAYLARKQAEGKSRREALRCLKRHLARRIWRLLQPPANPDDPAPSPPPRRPPRTITVHCNTPYNRFALT

SEQ ID NO: 381138 - protein, 455 aa, unidentified
MKRKRSLKSVKKSADLEKLLIVNPCAAGIDIGSGEHWICVPKSCSERNIRQFGTYTSDLKDIADWLSECGTTTVIMESTGVYWIPLYEVLEARGFEVNICNAKHAKNVPGRTKTDRYDCQWLQKLHTYGLLASSFIPTGNIRELKVLMRHRDNLIKQSSRHIQHMQKALTHMNVLLHKVVTDITGDTGMNIIRAILSGETRSGELVKYRHKRVKKSEEEMLKALEGNYRYEQLFILKQAFESYDFVIKQIAEIDSTIDDLFSQMDKQEDNKKNPVSKTKKSHKVNYSQQVQLYEVTGVDLVHVPGLNPLSIQKLIGETGLDMSCWKTLKHFTSWLGLSPNREISGGKLLSNKTKKVQSRAAAIFRMSASTLRTSNTYLGCFLRKKRAQIGKAKALTATARKIAVIYYIMMRDKIPYQELGAEYFDQKYKQRAISRLKRQAKRFGFSLSELKVVGA

SEQ ID NO: 381139 - protein, 372 aa, unidentified
MDEGIKFFIGLDAHKDSTSVAACEAGREPARFAGTVGPDVRPLLKVLAKAGDPAQVSVVYEAGPTGYGLYRELRRRGYRCEIVAPSLIPRRPSDRVKNDRRDCTRLAELSRAGELKPIWVPDEAHEAMRNLWRAREDGLGMRLRARQQSKAFLLRHARRYPGKTSWTTRHERWIAEQCFDHEADRIALAEYQLAAQSADQRVQRLTFALTEATRGWRFEGVVAALRALRGIDTVSAIGLVCEIGDIGRFASARHLMGYLGLVPSEHSSGNSIHRGSITKTGNAHARRLLTEAAWNYRFPARLSGQLRERSKALPEPVRNHAWKAQLRLCKRFANLSSRGVQPNKVCVAVARELTGFVWAIAHQASPKASPVQ

SEQ ID NO: 381140 - protein, 435 aa, unidentified
MEEVEDEPLFCERVAGIDIGKKMIMVTIRVPSEARKGGRQQETREFGTTRKELLALADWLRCWQVERVGMESTSDYWKPVFFLLEREGFDCTLYQASQVKVLPGRPKTDKLDSVWLARITERGSLADSFVPPEEIRRLRTHTRYRRKLVQMRTAQKERCEKLLEDAHLKLSSVISDIHGVSGRDMLGAIAAGERNPKVLAAKARGVMRRKIRELEEALDCSFFTEEHAFILQMMLDSIDQLTAQITVLDEKIAQMCRPYEQQIEQLDDVPGFGITTAQDLIAEIGTDMSVFPTAGHLASWARQAPRVTESGGKRKGKNATGRGNPYIGGTLGEASISVGRTQTFLGAKYRRLCTHMPKKKAQVAIMRTQLVIAHALLSDPDARYEDLGPGYYERRADTRRRARNHARALERLGYKVTIQAIDTETGELLPVTASP

SEQ ID NO: 381141 - protein, 432 aa, unidentified
MMKSPATEAFAARIGIDWGDAKHDICLLPEGTTVGERCVLTHSPEAIDEWVRGLRNRFGARPIAVALELNKGPLVYALQKYDGFVLFPINPTTLARYRKAFTPSGAKDDPTDAELALDLLCRHPEQLKALCPQSAPMRALQQLVEQRRSLVADRVRLTNRVSNALKNYFPQPLQWFDEKGTVLFCDFLARWPTLKQVQRARRTSLRTFFFEHNVRREQLITQRIDAIRCATALTHDDAVIGPNALVVETLVAQLRCVIDAIDTFDCAIADTAAKITDYPLFEALPGAGPTLAPRLLVAFGEQRDRYHDAAQIQKYSGIAPVTERSGKSSWVHWRYAAPTFLRQTFVEWAAQTIPRSFWARAFYDQQRAKGSSHQAALRALAFKWIRIVFRCWRDRVPYDETTYLNALKRRGSSLLSSITTPKVLDGAPQGVS

SEQ ID NO: 381142 - protein, 372 aa, unidentified
MDYTTFVGMDVHKDTITVAVAKEGNTEPVLLGTIPNRPDSLLKLLKQLAVTGNRLLFCYEAGPCGYGIYRFLKEHNLSCIVVAPSLVPVRIGDRVKTDRRDAKKLARLLRSGELTPVWVPDEEHEALRDLVRAREDAYKDLQRKRHQLSKFLLRTGKRPPVGINPWTVKHRCWLDTVKYELHAQQLVLQEYRHAVDQAQERLKRLEQELIELGCKSVHAPVIAALRALRGIDYVSAITLVAEIGDFRRFDNAAKLMSYAGLVPCESSSGPRSRRGSITKTGNSHVRRIIVESAWHYLRAPNVGCTLRKRQEGVPESIKEISWRAQNRLNSKFRKLLARGKSRQTAVVAVARELLGFIWSVALQAKIEYEKAA

SEQ ID NO: 381143 - protein, 349 aa, unidentified
MKIIGCDFHPSYQQIAMLDSVSGEIVEKALSHERKEEVRTFYAGLEGSVRVGIEASGQSQWFERMLAELGHEVWIGDAAKIRASCERKQKTDRRDAELLLRLLVEDRFPRIWVPTAVERDARQLLLHRHKLVRLRTQVKNQLQAQALNQGVQRKRKLWSEAGRKQLESLPLLPWASRRRAELLQLLDQLEASISELDRAVAEQASARPAARRLMTHPGMGPVTALAFALTMGPTERFQRGKQVASYLGLIPSEHSSGGHQQRLGHISKQGNPFLRGLLVEAAQSAVRYEPEMRRAYQRLAQRKCRALAKVAMARKLAVRLYWMLRLQVNYAQLIQGSHAGQSGTFCGRS

SEQ ID NO: 381144 - protein, 350 aa, unidentified
MQFLGIDWGTRKAAWCALDAQATLNEGAISADAGGLARLVHQLGPEVHGCIEMMSGAAWVRDQLAMAGWTIELADARKVKAIAPLACKTDRVDARVLAELVRRDLVPTVWVPSLDDRAIRERLRRRSHLVRLRTSAINRTFGLLSQWGLRMNLTALRKPEALEQLSESGVPVVWRQSIATLLGVIDDLDRRLAPLERELRPHARADERAQLLMTIPGVAELLGLTLAAEIGDISRLATARKLVGYSGLTPTIKQSGQSSRTGRLSKAGPNTLRWAAVEAAQQAWRANNPWHALYARTKQRHGKSNPAKAAVARKVLIAAWHVLALQQPFKPSATGAANPVPASSSIRLAA

SEQ ID NO: 381145 - protein, 309 aa, unidentified
MKQSVVYIGVDVAKAHLDMAWEKRSRRFDNDKRGRAALVAWIKQSVTAVQLICEASGGYEQGLLKSLEQSERKVTLVQANRVRQYARAAGILSKTDKIDARVLSAFGAAMQPSPTRPHSAEQKRLREYEAQRRDLSALLEAEQNRLEQLGCAEVRVLSRRLLNKIKKQIATIDARIDSLIAQDQELCVKAQKLTSITGVGTRTAALLLAQMPELGQLNRRQVAALGGLAPFHHDSGTLRGKRTIFGGGRALRSGLYMAALAAARHNQILSNFYQRLRAKGKPHKLALTAVMRKLLLALNHLLKPTLAPA

SEQ ID NO: 381146 - protein, 401 aa, unidentified
MKNLPGGIDIGSEQHHVVIMNDKEEILYDREVAHKFSEFYEAIEEFKGIEAKEKMTITFAMEGKNGYGSPFDRILMENGFTLYNVDNLKLKRFKDVFGAEWRNDQRDARMLAKMLKIRDHVDNGKEKAFIEVGKSPVVNEKLKILSRHQQSLINEKIRIQNRLKKRLLEICPDIMEFGGTDSKKLLRLLIKHPDFTRYKKLTMGSLLKIKMIGKKQASLMLEGLRRIQCFEELAEIYKRIISSSARRVLELKEEIEMLDRQLEEIGQKSVEVKRLKSMSGVGTKLSSRLIGEIGDINRFEREGQLAVYCGVACIDDDSGKSKKTKIVYKANKICKATMIEIAGCTIRYISESKTYYDKKRAEGKKHNHAVRCLARQLIKVVFKMLKEDRDYVMKEEMKKAA

SEQ ID NO: 381147 - protein, 372 aa, unidentified
MPSVADRTEAPTTIRTDLAAIFISLELSRSIWLVTSVSPGSGEKMSKHSVRAGDVAALLARFSELKHKALARTGKSFAIVAIQEAGLDGFWLHRALEQEGIESHVVDPASIATSRRRRRAKTDRIDGEALLRALLAYKRGEPRVCTMVRAPTPEDEDRRRLCRERKTLIAERVEHVNRIKGLLFSQGISSYEPLRRDRRQRLEDLRTGDGRSLPTHLKTQISRELDRLELLLDQIKLAEAERDALLAEDQAAAPEPPGRMLLEFKGIGAEFAATLWLEGLFRRFDNRRQLASYAGLAPTPWQSGSVDREQGVSKAGNPRLRAILIELAWLWLRHQPQSALALWFKERVKRNGGRMKKTTIVALARKLLSRDS

SEQ ID NO: 381148 - protein, 353 aa, unidentified
MAGVNDLQDVIGGVDTHKDVHAAAALNAGGQLLGTALFPTTHAGYSQLLAWLTGHGALIRVGVEGTGSYGSGLIRHLRSAGISVVEVNRPNRQLRRQRGKSDTIDAEAAARAALSGTAAGTPKSQDGLVEAIRLLRLTRRSAMKARTQAGNQLHAVVQSAPTVLRDSLSGQSLVKLVPVMRRFRWRAPMTPLAAARFTLKSLADRWAGLEAEIRQLDQQLELMVAEAAPRLVGLVGVGTETGGALLVAIGDNPDRLHSEAAFAALCGVSPVEASSGRQKRHRLNRGGNRDANRALWVVVMCRMAKDATTRAYVERRTQQGLSKREIVRCLKRYVARQIYRTMLPTLQHATATA

SEQ ID NO: 381149 - protein, 412 aa, unidentified
MDPIFDSCAGLDVHKRSITACVRRLRPGRSIFQEIRTVGTMTRDILELADWLASEEVTHVVMESTGVYWKPIYNLLEDRFTVLLVNARHVKHVPGRKTDVQDCQWLAQLLQAGLLKGSFIPESPQRELRDLTRHRAQLVAEKTKVINRLHKVLEDTNIKIGAVASDLLGASGRDMLRALIAGQQTPQEMANLARGQLREKIPQLVLALEGKVTEHHRFVLAELLDHLEDLERRIERFSHRLEEVSGPFDQAIQALMQLPGIERRGAENIVAEIGATLEAFPSAAHLASWAGMCPGSNESAGKRKSGKTTKGSRWLRSALCQAAWAATRKKDSYFQAQYRRLAGRRGKKRALVAVGHSLLVVIYHILKDNLTFKDLGADHFEKLNVKRLIPKLVKRLENLGYEVNITPLKDAA

SEQ ID NO: 381150 - protein, 425 aa, unidentified
MRRDRSVEDLFTVYVGLDWGVEFHRACVLDSRGAVLRECRIDHSGQAITAFLRSLADTAGSENNRVAVAIEVPRGPVVEAFVEGGFAVFSINPKQLDRFRDRYTVAGAKDDSRDAYVLADSVRTDQHCFRRIDAHHPDVVRLRELSRTEESLGADLRRGVNQLYQLLLRYYPQLLQLNSVPDEPWIWALLELAPVPQRGARLTVARLRRLLSTYRIRRWTAEETRQVLTTQPLPLAAGSADAVSEHALLLLPQLRLLHAQRQEVRDRIEALLKQMTALGREYPDSQAHRDVGLLLSMPGLGCLIAANLFTEAFDPIAQRDYHALRAHSGVAPVTKQSGKSRQVVMRRGCSERLRNAMYHWARCSVQHDPFSKHHYRRLRQAGHNHGRSLRGVADRLVATLTGMLKTGQPYDPSRRHMQPLPANAA

SEQ ID NO: 381151 - protein, 411 aa, unidentified
MLHPKMAHVYVGIDVHRSTHTATIIDCFFEKLGSITISNTESGFKKLVTDIKKHQKDGITAILGLEDVHALGRELAVFLISHGITVKYVNPALSNSERKNQATFHKTDDFDSLCIARVLLTKLNELPEAKPDDLHWALSELVAKRSAVLKANTALKNQLRTYILHHYPRYTSFFTVFSSNTSLTFWEKYPSPVKLKETRVEELGEFLRLKTYGVHSIDKAKQIFKTVEEDNFKPNEYQEIRDFIVTTTANQIKDNLTTIDKLDAEIESILPKFGYKLETMKGISTTFAAGLIAHIGNIDRFSNASKLAKFAGISPVSYSTGKTSKHFSDRKGDKELRHIFFHLAVLVVSNYAGQRKPHNQYFFEYYNRKISEGKTKRQALKCVMRRLVNIIYRMMKDKSEYYEKPMQENKS

SEQ ID NO: 381152 - protein, 333 aa, unidentified
MCAQTASGEIAWRKRLKRRAFKQFMAATAPRCLVAFEACGGAHYWGRFLTALGFAVKMMAPRAVKAYRQGPHKNDWRDAEAAAEAGSRHPVRAVRVKSEAAQAVQVLVRLRALQIRQLVQTGNHLRGILNEFGIVLPKGHKRLREAIARLRQEDPASAALPASVRRTADRLCLQLAEQARRVTEATSELEAAIKDEEDCRQLRTVPGIGPINAAALSVALEAPQAFPNARAFAASLRLVPRQHQSADKQIMLGIGPLSANETRRHLVLAGQSLITMVRRFQQPPADKFLLWVYRLDRRKHRNVAAVAVAAKLARIAWALMAKDQIYQPRRATA

SEQ ID NO: 381153 - protein, 341 aa, unidentified
MDAGYDGRQIVGIDLHRRRSVIVRMAADTGERLGTVRIDNDSMALAAEIAKAGEHPEVVLEATYGWYWAVDVLRGEGAQVHLAHPLGVKGFAYRRVKNDERDAADLADLLRMGRLPEAWIAPPATRELRELVRHRAKLVALRSGLKAQIHAVLAKEGLREPMSDLFGAAGQSLLNEVRLGAAYAARVVSLRRLIDAFTFEIDTVGRRVTAQLAADPGYRAVQALDGVGPVLAAVFVAEIGDVTRFSGPAQLGAWAGMTPRHRESDTKVHRGRITKQGNRLVRWAAVEAVQRVHRGGIGAARARIGERRGANIAKVAAGRKLLTLVYYGLRDGHLRCLSRPA

SEQ ID NO: 381154 - protein, 343 aa, unidentified
MYYIGLDVHKKTISYCVKDAAGHVHREGKIGSTRRALDSWIQILPQPRMMAMEATIFTGWIYDYLLPHAEEVKVAHPLMLRAIAASKKKNDRIDASKIADCLRCDFLPECHMASTEIRDRRRTLRYRQLVIRQVVQMKNRISGLLMESGVSYDKQRLHKMGYFTELFSTNEEISDSIRPLLRLGREHILRGQRLDRELISSLERDPLLSERLRRLRTIPGVGAITALTWALEIGDYTRFPSVKQAISYCGLCGAEKSSADKVMRTPISKQRNKHIQHVLVEAAKLAPRYSHELALLRDKEIQRGNKNRATLAVARKLVAYMLAVDRRQQDFVPAEDLTAKAVA

SEQ ID NO: 381155 - protein, 450 aa, unidentified
MHPDAAGIDIGNESHYVAVPPSRDSQPVRRFGCTTAELKAMADWLKQCGIRTVAMQSTGVYWIAVYDILEQAGLEVYLVNARETKNLPGRKSDVQESQWLMKLHTYGLLRNSFRPSQEIRRMRTYWRQRNDLVRAAGRHIQRMQKALTQMNLQLANVLSDVSGVTGQAIIKAILAGERHAHKLAAFRDCRVKASEEEIARSLEGNWQEDLLFVLKQEQAGYEFCQKQMTECDRQIEQYLQQREDRSRGASLPEEKRKERLKKKKGNAPQFDLRAELFRISGTDLTRIDGIDVMTAMTILSEEGWDRSKWKTEHHFVSWLRLCPDNKVSGDKVIGKGRLPTNNRVTIALKMAASTLWASNTYLGAQFRRLKTKLGAAVATKAMAAKLARLVYRMLRYGMPYVDRGAEFYQAQHRQLQIKYLKWKAGNGYFAADLRRCVLCPCGESQQAERV

SEQ ID NO: 381156 - protein, 455 aa, unidentified
MSNGSRRRLSRGDRRRNEKLARLRAIITRETAVLAFDLASDKQVCALTDPDSRVLARRTARVKAWQLAQTLDWGLAAAAEAGFTSVVVACEPTGHRWRVLDQLAAERGVMLVCVQPLLVARAREAEDFTRNKNDDTDATIIARLVTELRCYLPERADPAWARLRHLGARRARLVVEVGAARQQVRDLLECAWPAVLDAAGKPLDSANWLTAVATGLDRIGATGELSELGQRGWEDFAAAVRAELAPTRWYSAIVRAVFDAATDPAAAAVGVVDQRAGALERVRFALADLAHLRARIAEVETRMTRVLDTLGVTELVTGIPGVSAVGAATILAEAGDPIRFSSARALVKHAGLCPRANESGKYTGTTSISGRGRPELRLAAWRAVFTALQHNPVLAARHAHLTGRAENPLTDTQARIAIAASLLRQLHAVIVTRTAWDPAIAAGLDRREDGAACAA

SEQ ID NO: 381157 - protein, 386 aa, unidentified
MHKLNDLSRSLTALEPDGTLIAVIEMSLSSWLVAGIVPGVERQPLKKLAVDESALLKLLHRWREEAEKAGRRIERIVVAFEAGRDGFWLARWLKARSIDAHVIHAASVAVSREHRRAKTDRLDSELLKRAFLGWLRGERDHCKMVAIPTAKDEDAKRPNRERESLVGEQNRIINRMKAALIRLGIRGFNPKLKKAAGRLKDLRTPEGEPIPPNTLAELCRDMERRRLVSNQIRQIEEARLERLEQAPRDGPHAMVRLLARVIGVGTETADMLVQEVLSRNMRDRRAVARYAGLTGSPDESGRKCREKGLARSGNARVRRGMIQLAWRLLMFQKNSALAQWFRARTENAGGTRKTMIVALARKLLIALWRLVREGVVPDGVVLRPAQ

SEQ ID NO: 381158 - protein, 358 aa, unidentified
MREAYFIGLDIAKNVFQIFTADDKGREISNKKLSRSAMIQYFAQLPEAVVGIEACGTAHHWTRTLTALGHTVKLINPQRTKAFLGSRNKTDAADAKAICEALMHPGTTFIRAKSLEEQDIDHLLARRELLVQNRTQLINQIRAFLCERGIVIPQGRHSFMKNLPQIIAEKWDEFSGKFQAVLTDSYTDYQDLESKIARLDKIILTEAANTESCKRLMQMNGVGPQTALALVAHVGNATHFKNGRQMSAYLGLTPREYSSGGKQRLLGITKRGNIRLRTLLLLGARAAILGIGRRRRGEDGQPGRLSYLDTWILGMVEKIGLFKAAVALANKMCRIAWALLARGEEFNPMRLCRFVKAA

SEQ ID NO: 381159 - protein, 451 aa, unidentified
MSRKRKSHQKTGAPVLLSLNPNAAGVDIGATEIYIAVPGDRDPQPVRCFSTFTEDLHAAADWLKACHIDTVAMESTGVYWIPLFQILEARGFQVFLVNAHHVKNVPGRKSDVSDCQWLQYLHSVGLLRASFRPEQAVCTVRSILRHRDGLVQMASSHVQHMQKALNQMNLQLHPVISDITGVTGIAILEAILAGERNPHTLAALRDRRIKASAEIIAKSLVGDYRREPLFTLGQSLAAFRHYQELIAACDREVAQYLEGFESKMDPPPASTSPSKDGSKPKASEPPFDLQTHLHRIFGVDLTQVPGINVLTAQTLLAEIGPDFSRFASGPELTSWLGLCPDNRVSGGKVLSVKTRKVKNRAATALRMAALSLYRSQSYLGHYFRRMRAKLGAPKAITATAHKLARIVYHMVDTRHAYDETICAHNEVQNRQRLEARLRKQARELGLQIVAI

SEQ ID NO: 381160 - protein, 310 aa, unidentified
MDAIVVGIDVSKDRLDVHVHPSGEAFGVARNAEGLDALNARLLSLAPQAVAVEATGGFESVVAASLGGAGLPVIVVNPAQVRAFANALGKRAKTDPIDAAVIARFVEATKPEIRPLPDADTRLLAELVARRRQIIQMIVAERQREKQITNRRLKKSVARLVLALTKELNVLDTGIDEAVRGSPAWREKDELLQSVPGVGPIVSHTLLAEMPELGELDRRQIASLAGLAPWTRQSGQWRGRSFTGGGRRSVRTVIFMAAMVGKRCNPVLKAFYERLITAGKPKMVAIIAVARKLLTILNAILRDKNPWQTA

SEQ ID NO: 381161 - protein, 366 aa, unidentified
MKKTSTVRVNGNMIFKGHKLTIGLDLGDRWSYYCVLDEAGEVLLEQKLATTPEAMKQTFSKIPRSLIALETGTHSPWVSRLLTELGHEIIVAHAQKVQLITKNNRKDDRHDARTLARLARIDPELLGPVRHRSAKAQIHLTVIRARAALVSTRTALVNAARGLVKSYGQRLPKCGTQQVSRELGAKLNAELREVLEPLLKEIESLNERIEEYDERMEKIAKESYPHVELLKQVKGVGTQIALTYVLTLDDPHRFPKSREVGCFLGLRPGRRDSGQSQPQMHISKEGDPYLRTMLVQGAHYILGPFGEDSDLRRWGLRLAERGGKNAKKRAVVAVARKLAVLLHRLWVSAEVYEPLRNSQKAMRAVA

SEQ ID NO: 381162 - protein, 419 aa, unidentified
MKYARVPRPGMPPGGLSAGIDWASADHAVCIVDAAGAVVSRFSVAHTAEGLRALASRLARAGAAEVAIERGDGPLVDALLAAGVTVVVITPRQVKNLRSRYGSAGNKDDRFDAYVLADVLRTDRARLRPLIPDSPATATLRQACRARQDLVRHRVAVGNQLRAHLLSVFPGAAGLFGKLHSAISLAFLARFDCQDRADWLSQKRLAAWLKAASYSGRTSPAELYQRLRSAPRGATGPHAAASASVTGALAAVLASLNTQIKALEAQIAAQLAAHPDGHIFASLPRAGTVRAARLLTEIGDCRARFPEPQALICLAGAAPSTRQSGKHKAVTFRWAARKQLRGAVCDFADGSRHASPWAAKIYNDAIARGKDHPHAIRILARAWLYVIWNCWHNGVAYDPARHRALQRQLAQATSPQQAA

SEQ ID NO: 381163 - protein, 320 aa, unidentified
MLSFCGIDVSKDRLDVLVLPEGHRSWVPNNVAGWAELVEQLRDCSIAAIGIEASGGYERGAMRALLAADLPVRQVNPFKLRQFARASGVLAKSDPLDARMIASFVATMPTRPAPRQAPAAERLTEMLAVRRQLSAEKVAAENASRLVEDAMLQRLSRRRIARLAADIDVLDQRLVEIVATDVALAHRYRLLTSMPGVGSVLACTLIALLPELDRLSRKQVAALVGVAPYAFDSGALKGRRCIWGGRANVRQVLYMAAMSASNWNPVLKAFHDRLAAAGKLPKVVIVAVMRKMITMLNAMVRDDVLWADRLSGRHIVPTTR

SEQ ID NO: 381164 - protein, 406 aa, unidentified
MDVVYTHVCGLDVHKKNVVACVITPETKEIRTFSTMTDDLILLVDWIKSNGCTHVAMESTASFWKPIYNLLELEDIQTLVVNAKNIKNVPGRKTDVKDAEWIASLLRHGLLQGSFIPNRDQRELRELIRYRRSLIDERAREVNRIQKVLEGANIKLSSVASDVLGKSGRAMIEAMIAGEENPELLSELAQRRLKNKKAELQRALNGLIGNHQKLMLAAQLRHIDYLDEEIGRLDEEIKRRMLPFEEDLELLDTIPGVARRTAETIAAEIGTNMDQFPSAAHLCSWAGLCPGQNESAGKRKSGKTRKGNKKLRSALVEAARAAGRTKNTYLSSQYHRIAARRGANRAAVAVAHSILMIAYYILKRRQPYIELGPTYYEERKRDTIIRQSIKKLESLGLKVTVESVVS

SEQ ID NO: 381165 - protein, 437 aa, unidentified
MHYVAVRPDRDPQLVRQFECFTADLHCLAEWLQRCGVKTVAMQSTGVYWIPIYEILEERGIQVYLVNARRTKNLPGRKSDVQESQWLLKLHTYGLLNNSFQPPSEIRVLRTCWRQRAEHVHGAATCVQRMQKALTQMNVQLANVISDVSGLTGQAIIRSIIAGEYDPRKLAELSDPRIHASREEVAKSLEGHWRPELLFVLQQEVVMYDTYQQRIAECDQRLQKHLASFADTIPLLPTEGELKRKKSKPAKNAPRFELRSELQRITGVDLTRIDGIDVMVAQTLISEVGLEMSRWKTEAHFSSWLGLCPDNRTSGDKVLARGTRRVVNRAATALRMAAVTLMRSRTYLGAQYRRLRTKLGAPKAITAMAHRLARLVYRMLKYGQHYVDKGAEYYEHRYRRQQIEFLRKKATKLGLQITLAPVKKSLERIEPNTQNLL

SEQ ID NO: 381166 - protein, 331 aa, unidentified
MKFKDVIGIDVGKLSNELRIHSNQKTLTFKNTPKNCKTMLKWIKVNINCNQTEVLFAFEHTGIYSTPLIEFLANNNLHFTLLSGLDIKRSLGIQRGKNDKIDAKRIALYSYRKLDEIKPYVLPSNNLIKLKRLLSLREKIVVQKAGYDKVIQESKIFFKKADNIVLFDVQEKIYKQLKKHIEKIEHEIDEIILQDQKIKEQYTLITSIKGVGRQTALYMIAYTNCFTLFDNWRKFASYAGTAPFPYQSGISINGRTKVSHLANKKFKSLLNMCATTSIKCNPEMKEYFERKKTEGKNGMCVINAVRNKILARIFAVIKRGTPYVDLNKFAA

SEQ ID NO: 381167 - protein, 402 aa, unidentified
MNAVGIDVSKGKSTVTIFQPGEKVILKPRDFYHTQSDINALINIIHNLDGETKACVEHTGRYYEPMATWLSNAGVFVSAVNPILVKKFSSDSLHEPKTDKADAKKIARYTLDHWAKLKQYSVMDEIRNQLKTMNRQFGFYMDQKNAMKNNLISLLDQTYPGANTFFTSPARSDGSQKWVDFVYTYWHVDCVRGKSLEAFTDHYRKWCKRKGYNFNAAKAENIYRESADYIAVFPKNAVTKMLVQQAVAALNLISATVETLRLKMDQTAATLPEYPIVIAMNGVGPTLGPQLMAEIGDVTRFTKRSAITAFAGVDPLKDDSGTRIRNSMPTSKRGSPHLRKTLFQIMDGLIQRSPEGDPVYDFMDKKRSQGKPYYVYMTAGANKFLRIYYGRVKEYLESLEEN

SEQ ID NO: 381168 - protein, 428 aa, unidentified
MDFTQNQRLKQITENTLIIGVDIAKQKHVARAIDDRGLDLAKRLMFHNSFEGFTNLLDWIESLSNKLNRTHVIIGMEPTGHYWLNLAYYLKDRGLQTVVVNPMKVKRSKELDDDSPTKNDTKDAKVIAQVVRDGRFHEPTLPEDVYAELREGMKLYDIIQEDLSSIKAQMHNLLDRYFPEFQQVFKSWTGKAAIQLLKQGYFPRDIIQSTEEELLNEINKAAKRAVGLKRVQELKQAAEQSVGLQIGLNMAKQELKYLVEQYELLTKRLQVHQEQLEVLIQHIPGAVEMTAIKGVSAMTVAGFFAEVGDLSNYSDPRQIIKLAGLNLTMNQSGLHKGRTSISKRGRRRLRSILFQVARPLSCHNEGFKQLHEYYRNRPNNPLTGKQSFVALSRKLIKIFFVLGTRECAFSESRMLADIPMLDNINQAA

SEQ ID NO: 381169 - protein, 340 aa, unidentified
MTHIAMDVHKKRSVSAYQTPAESEPQIVRYYTTRASIGELLGELPRPWIVCLEATRQSPAVVRWLQELGVDEIHLVDPKGLKAFLQGKPKTDARDAKAMLGLLQANHLPKAYLAPAAVQEVRALTRTRAFVRRGSTSVRNQLRALLNQHGLEVPARDLCGIIGQRQLTESLAHLGPQGQAAAHELNALLQATEATLDVLDAGVRAELAQQPVAQALMARPGIGPVMALAVVAELGEIDRFPDVPHLLSYAGLAPRAHDSDDHRGERHLPQRCSKRLRSLVIQSAQAACRSRQPSNARRTYERLRARGLHSNTAKIAAARELLKDLFYAWQQAEAPTGDAA

SEQ ID NO: 381170 - protein, 403 aa, unidentified
MIFVGIDWAEAHHDVCVLDEGGELLAKGRVPDGVEGVARLHEMVAAHAEEPAEVVVGIEIDRGLLVGALVAAGYRVYAVNPMAASRYRERHTTSRAKSDPGDAKVLADLVRTDRHNHREVAGDSQLAEAVKVLARGHQSLIWSRTRQTNALRNALREFYPATLRAFPELGTLETCAVLAAAPTPELGRRLSEARIARLLRAAGRQRNVGQRATEIREALRSPQLEAPAVVAAAYGEVVRSLAGIIQGLTREIERLQAELSARFEVHPDAEIILSQPGLGSILGARALGEFGDDPNRYVDAKARKCYAGTAPITKASGTRMIVLARVARNRRLVDACYLWAFAAISTSPGARRYYDAQRAKGKTHHQALRALANRLVGILDGCLRHRQLYREQIAWPTSVEAAA

SEQ ID NO: 381171 - protein, 481 aa, unidentified
MGEKKSAPRGKSGHGGKRRGRGVQKTLQVVNPDAAGIDIGAESHYVSVPEDRSEEPVRQFGCYTPQLEEMAGWLIECGIKTVVMEATGVYWIPVFRVLESRGLEVLLVNPKHVKHVPGRKSDVADCQWLRQLHTFGLLRGAFVPPQDVAAMRTYWRQRRTLVEAASREILHMQKALTQMNLHLHVVLSDVTGVSGMKILRAIVAGEHDPVQLAGLAGTQVRASREEIAQALSGHYTGEHLFVLGQALELFDVFQAKIRDCDGQLAIHLSRFEGKAGAGAPPSNPKRSRRVSRRKNEPYFDLRAELWRLTGVDFNRIDGIDSLTAFTVLSETGFDVSAFATEHHYASWMGLCPNNSITGGRVKRRHTRRVINRAADALRIAAQSLWRSKSYLGAYYRRLAARMGAPKAITATAHKLACIMYRAVKYGQQYVDKGEQYLEEQHRKRNLKSLVHRAKDLGYMLVHSETGECLPLTNQPLTRCVS

SEQ ID NO: 381172 - protein, 370 aa, unidentified
MKNKLLYIGLDVHKSTIDVAVATGRSNGKVRSYGKIDSTLDALNKLIKKLDGKDSQLRFVYEAGPCGYQIYRHLRSKNIDCAVIAPSMIPKRSGDRIKTDRRDAINLVRLHRAGELTSIYVPTVEDEAIRDLVRCRGDMVRLERKARQRLLSFLLRHGHLYPGKKNWTKGFFTWLGTVKFSQPAQQITLQEYIDSAKECSQRVKRTTDLIKTHVEQWRRAPFVKAYQALRGVSLIVACTVVAEIGDMNRFPNPKQLMAYLGLIPSEHSSGKSVRRGSITKTGNGHVRRVLVEAAWSYRMPARVSKVLLARQRGLPKSVCEISWKAQTRLCARYRRLVARGKTTQTVATAIARELGAFIWAIDRQMQEAAL

SEQ ID NO: 381173 - protein, 340 aa, unidentified
MQITTIGLDIAKNVFQVHGIDAAEKVVVRKQLRRGQVLKFFASLPPCLVGMEACATAHYWARELTKLGHEVRLMPAKDVKAYVKRSKNDAVDAEASCEAVRRPTMRFVTVKSAEQQGQLMQHRTRDLLMRQQTQVINALRAHLAELGIVAAQGREGLKQLLAIIADEKDERLPIDARASLIVLAAQLQALHTMIGSIEKRLTVQHRANEASKRLQSIHGIGVIGASAIAATVTDPKAFRSGRDFAAWIGLVPRQDSTGGKHKLGPISKQGDRYLRRILVVGAHSVLRRAKHNPQKYPWLTQLLARRPFKVVAIALANKMARIAWALLASGGHYRPRLAAA

SEQ ID NO: 381174 - protein, 314 aa, unidentified
MTERFVGIDVSKGALDLFADPAAAQLPLHCVYDEASLRALCDSLAAVAPTLVVMEASGGLEQRLAAELAARGVSLAVVNPRQVRHFARAAGELAKTDAIDARILCSFAKAIRPQARAPHDADTRELADLLSRRRQLVDMRVQELQRQHTASSRTMRKSLAEHVAWLDKRIERLDEDMGQRLRESEVWRAKDDLLRSIPGVGPVLSRTMLGLCPELGHLNRREIAKLVGLAPLANDSGKHRGRRRIWGGRADVRRVLYMATQVAIRHNPTIAAFAKRLQAASKLPKVVIVACMHKMLIIMNTMIKTGQPWQPAAN

SEQ ID NO: 381175 - protein, 345 aa, unidentified
MKITTVGIDLAKTCFQIHAVNEHGKTVQKKQLRREQMAVYFANLQPCLIGMEACGSAHYWARKLQGFGHTVKLMAPQFVKPYVKTNKNDAADAEAICEAVARPNMRFVSIKNVEQQSVLALHRVRQGFVKGRTAQANKIRGLLGEFGLIIPQGIASIASGVPELIEDASNELTGSFRLLVDRLMNHLKELDRQVKEIEAQINAWHRASDTSRKLERIPGIGPITASAMVATIGDAKDFDGGRQVAAWLGLVPRQHSSGGKPTLLGISKRGDTYLRTLLIHGARSVIYAAQRKALKSDDWLSRLLARRNLNVAAVALANKNARIVWALLANDREFRGDYAATTAAA

SEQ ID NO: 381176 - protein, 364 aa, unidentified
MKKSIKKPQAKETKPNRTMGIDIGDRWCHYCWLNEDGEAVETGKIRTREKDLREFFEGEKRMRIAMECGTHSPWISRLLEALGQEVIVANARKIEAITGSESKDDDHDAEQLAVFAHFDPRLLYPIQHRSAERQRDLSLIQARRTLVQARTMIINSARGLVKSMGGRLPQCSSESFGQKARAAVPANLVGLVTPLLEQVTLLNQQIKRMDQQIEELEKRYPEIIRLRSAPGVGPLVAAAYALTLNGSDSVTHSRQAGAFLGLRPRRKQSGDSDPQCGITKTGNNYLRALLVQSAQHILGRFGPDSALRRWGLKLAASGGKRGKKRAVVAVARKLAVILHRMWASGQNYQPFPPATAGTQTVTAK

SEQ ID NO: 381177 - protein, 337 aa, unidentified
MIVIGVDVHKRSLTAVAVDEVGRPLAEQTAVDGAGLLAWAGSLAAERLWALEDCRQLTRSLERDLLAVGERLVRVPPKLTAPQRRTGRTRGKSDPIDALAVARAALREPRLDHPRPGEAAFRELKLLVDHRDDVVDERRRAQQRLRWHLHELDPELAVPPGALDRAVWVDRLARRLARDEQTVLVQIARELLSRCRSLRRTILALDRELQARIKKTAPALLELPGCGPLIAAKLLGEIGPIERFDTDAQLARHAGVAPLEASSGKQRRHRLDRGGNRQLNCALHRIAITQARVHPPARAYLARKQAEGKSRREALRCLKRQLARTVYTNLKTEPLLT

SEQ ID NO: 381178 - protein, 419 aa, unidentified
MSFKIFKFNCCGLDVHKTWIYACIGITDSNNRTEYKQARFSSFSKGLHQLCVWLAKYNCNDVCMESTGKYWIPVFNILEQHKIRVTLSHPKYTKPMKGNKTDRKDAKWICDLYMCGMVKPSFIPPADIRELRDLVRYRFKLTCMITGEKNRAQNCLTVSNLKLDDVFSDVFGKSSRSITEQILQHPGEKFDVSPFVDSRCKTPIEEIQAAVDGNISKEQDVKLRQCLDHIDELQKHISEVEQEILRLSDKYEAALNLIRTVPGFDKNPMTAIQVLSEIGGDMSVFLTAKHLVSWAGCCPRNDKSDRKIKSTRISCAGSYFKPVLVQIANALIKSKKHFEFTTRYKRIKTRCGHKKAIIARCRMILTAIWHILTDLKPYTSDGFLESRPVKKEKVLTTSQALNLLRQRGYLIKDEPSPVS

SEQ ID NO: 381179 - protein, 326 aa, unidentified
MTATHSSDNSFIGIDVGGASFEVAWHRGNCAHYANRPDAIAALLAKLKAGPAISRIVVEPTGGYEKPLVKALRRAGLPVEIIHTSRFSAYRVMVGARAKSDSSDARLLAAYAAAPDDVRGRKPHHVELPEDAIREELAELASRRDQLKHMIHGETCRLTTVRSAKLRQAITAHLDVLKAEDVQTHQTMLTLVRARVDLKKAQGLLKTIKGFGDKSALACIALVPELGHVDNRAASALVGVAPFTRKSGTMTAPARIHGGRAAVRNILYMAAVSASRHNPVLQPFYQRLLARGKKVKVALIAVLRRLVVFANAVLRSGEPWKGATAS

SEQ ID NO: 381180 - protein, 346 aa, unidentified
MKILALDLGKFKTVGCEYEAESGRHRFATVLTTPKALHDLIVDREPQRVVIEICSIAGWVSDLVRSLGIELQVANTSDERWQWRKVKQKNDRRDALKAAQLSAVNQLCPVHVPELTMRQWRALIAYRYKLVQRRTKVKNHIRDLLLREGQLLPRGRAAWTQAGMATLAAIAQPFTTVDSDQLWRGELGIELAQLTQMQLQIQEVEAKLDELAAADVRVQLLRTIPGVGPRLAEAIVTMFDDVTRFTTAGQVGAYLGMVPKQFDSGERERSGRITRHGNRLVRSLLVEIAWASLRHNPWARQTFQRISGGKKSRRKIAIVAVGRKLLVRCWGMLRHQTPWDWQTSGA

SEQ ID NO: 381181 - protein, 473 aa, unidentified
MARSRKSNFERLNRRQRRNLKERLFSPDPGLQVVNANAAGIDVGNESHYVAVPGDRDAEPVREFGCWTAALKQMCQWLVSCGIDTVAMQATGVYWIALCDELEVAGIRVVVANGEHTKNMPGRKSDVQECQWLMKLHTFGLLRDSFRLDQQVLKIRGMWRLRARHIEEAGRAVQHMQKAMTTMNVQLANVISDISGVSGRAIIDAILDGERDPYQLADLCNKRIQASREEVARSLEGTWREDLVFELGQARESYDFAHKQIQDCDEKLQQYVAALPARVVNGVSAQSVPPSKSRRRAKPRGNAPAWDLKSELERITGVNLTSIEGIDVMTACTIVAELGPDLSAFADEHHFASWLGLTPNKRITGGKVIGRDRRHGRNRVAGALRMAASTLKQSRSWLGGFYRHKCRVLPSKCSAVKATAHYLAKLVYRLMSYGQAWVDRGVENFQKRREQLDLAALSKTAQARGYTLVPIKA

SEQ ID NO: 381182 - protein, 343 aa, unidentified
MVVIGVDAHKRTHTLVAVDELGRMLGERTVAATSDGHLQAVQWAARWPGARFALEDCRHLTRRLEGDLLRAGFAVVRVHTRLMAAARRGGRQRGKSDPIDALAVAHAALREPDLPVACLDGPARTVKLLSDHRQDLVAERTRLCNRLRWHLHELDPGLDVPSRGLRRYHVLDGLAARLAVMDGVVARIAAGLVARCRELTSQVNALERELGTLVRQLAPALLAIPGCGVLSAAVIIGETATASRFRSRDAYARFTGTAPIPVWSGNTVRVRLNRGGNRAVNCALHMIAVTQARGIGPGKDYIAKQLAAGKTTTEALRLLRRQLSDTVFRALLADEHRQAHRTA

SEQ ID NO: 381183 - protein, 338 aa, unidentified
MELSVIGMDIAKNVFQLHCVDRQTGEIERIKLRRNEVLPYFARRTPALVAMEACGGAHWWARQLQQLGHTVRLLPAKAVRPFVLRNKTDAADARAIWTAVQQPEMKTVAIKTEYQQSILALHRMRAQLLKFRHMQTNAIRGLLLEFGHPLPESDLALRKAFPTVMATLDKQLPGILIETLREQWARVQSLDNEIALIEGRLKRALAETPTCQMISDIPGVGLMTATAAVATMGDPASFKTGREFAAWLGLVPRQTGTGGRIRQLGISKRGDAYLRTLLMHGARAIIARRTYSDWVAGLIARRPYSVVIAAIANKLARTIWAVLATGKCYDGAAFAAAI

SEQ ID NO: 381184 - protein, 372 aa, unidentified
MMIIGCDLHTRYQQIAMLDTDTGELAERRLEHESGEAQAFLAGLSGEVRVGIEATGHTHWFEAMLAELGHGLWMGDAAKIRASVIRKQKTDVRDAEHLLNLLREGRFPQIWRPSPAERDLRQLVWHRQKLVWMRGAVKNQLHALAMGEGVCRKKKLFTAKGRKELEGLALGPWASYRRQELLRMFDELAAATAHLDAAVEQAAKDQPLAVRLMTHPGVGPVTSLAFVLIIGPVERFEHSKQVVSYLGLNPQEHSSGGKQRLGSISKQGNPMMRSLLVEAGHTAARFDPALKRMYQRLKFRRGASVAKVAVARKLAVRMYWMLRSTADYAQLVRMQGSPCHPGGKQSIAGLIGALPPRKVGESEQRIMVPETE

SEQ ID NO: 381185 - protein, 407 aa, unidentified
MIFVGDDWSEDHHDVHVMDEGGQRLASRRLPEGLEGIRGFHELVAEHADDPSGVVVGIETDRGLWVHALTAVGYRVYAINPLAVSRYRDRHNLAGAKSDPGDAKVLADLVRTDRHNHRPVAGDTPDVEAIKVLARAHQNLIWVRTRHVNQLRNALREYYPAALEAFEDLDDRDTLAVLERAPSPDVAARLTVAQIRAALERGGRQRNLDRRAREIQAALRSEQLAAPDPVAAAFAATTRATVGILKEVNRQLEELEATLADRFEQHPDAVIYLSIPGIGDVLGARALGEFGDDPNRYADAKSRKNYAGTSPITVASGKKKAVLARHVRNRRLYDAIDQWAFCSLQASPGCRQFYDQRREAGDLHHQALRALGNRLVGILHGCLKHQTVYDEHTAWAHRQNTSDQAAA

SEQ ID NO: 381186 - protein, 381 aa, unidentified
MKKDSIARLQVTKSQIRRMAAKQRLTVGLDLGDRSSRYCILDEAGEKASEDQLPTSKAGLDMLFAKMAPCRIALEVGTHSPWVSRHLAAMGHEVIVANPRKVRLITQSVKKNDRMDAEQLARLARVDPRLLAPIRHRGPEAQADLAVIRGRAELVEGRTKLINAARGLTKPMGERLKSCDADTVKESMADGLSEATQKVIRPLLKSVEVITQQIKGYDQQIQEIEKRYPETKLVKQVHGVGPLVSLAFILTLEDAERFEHSREVGPYLGLTRKQRESGESAPELGISKAGDELVRRLLVQAAHCILRQDAPDSDLKAWGLTKVGAGAGKKGSKSRKKKAVVAVARKLAVLLHHLWVTGEVYDPQYNRKAVEASKRSKKAAA

SEQ ID NO: 381187 - protein, 312 aa, unidentified
MTSETYVGIDVSKRWLEVRVHGEAESRKIGNDPDGFTSLIAELKAVQPQLIVFEATGGYESRAVKALSEAGFAVAVANPTRVRRFAEALGILAKTDKIDAQVIAHFASVVRPAANGRQTPLEEQLAAFVERRRQLLVELVAEKNRLSTCPDCVREGIEEHIAWIEAQVDNLEAKIQACILQNPEWRERAEIIDSAPGVGPVTASTLVAELPELGQLSHKKIAALVGVAPFNKDSGPKRGKRRIFGGRSGVRRTLYMAVLSATKHNPVIRAFYESLLKRGKEKKVALIACMRKLLVFINAMVRNGEAWRSSPA

SEQ ID NO: 381188 - protein, 473 aa, unidentified
MARKKGKDPAGTGGLELTGEPVEVSDEPAEVIARAAAIDVAKGSGMVCTRVPHESRPRRRVQRVWQVSARYSEIAALMAELAKLGIQRLVLESTSDYWRIWYYLAEAAGLEVWLVNARDAKHLPGRPKTDKLDCLWLCKLNERGMLRRSFVPPEAVRDLRALTRLRSRLAQDQARHQSRIEKILEDALLKISSVISDLMGASGRRFLAALVAGERAPDKLAALGDRRLKASPAQLEEALAGRFRDIHALEIGMLLELIDDITAKMARLDAEITARLARIPGIAPACAGCGEIGGGHAPSCPRPGAPVLSVIERLDELTGIGTGAAQVIVAELGTDKTTFPTPGHAAAWAKLASRTIQSGSTSKDGRTGKGNPYLRAVPGRAAMTAAKTDTYLGERYRRIARRRGKQKAIVAVSRTICEIAWMIITDPSVRFSELGPDYYARLDAGRQTRNKIRELERLNPGMKVTLTPAATAA

SEQ ID NO: 381189 - protein, 339 aa, unidentified
MKQMTVGAAIAKNVMQLHYIDAETGEIVNKPVKRAVFLEHFANRAPCLIGMEACGGSQYWARKLTAMGHKVKLMPGKFVKAFVMGNKNDAVDAKAIWLAVQHAERSVAVKTETQQAVLGLHRMREQLVKFRTMQINGLRGLLTEYGEVMGKGRAALDKAIPSVLERLVDRLPAILIDTLREQWNGLAELDKQIAGIERRLQMWMREDKACKAIAAIPGVGLLTATAAVATIGDAKTFRSGREFAAWIGLVPKQTGSGGKVQLLGISKRGDTYLRKLLIHGARAVLCLTKEPGPWAEGIRKRRPLNVAIVAQANRIARTIWAILAHDRPYEKGYVSVKPV

SEQ ID NO: 381190 - protein, 335 aa, unidentified
MKEITVLGIDLAKNSFQIHAVDAMGNVVMKKKLNRTQILKFASECPPCLVGMEACSSAHYWAREFSKFGHEAKLMAPQYVKPYVKTNKNDAADAEAICEAVGRKNMRFVPPKTIQAQDLQSLHRARKRLVQNVTGLINEVRGLLMEYGIVMPAKVSNFNKQLPLFLESESLTESFKKTLQELYEEYLYLKSKIKIYDQRLGQEYEAREICRNLGSIKGIGTITATALATVDPHVFKNGRQFAAWLGLTPRQFSTGGKDRLLGISKRGDRYLRQLLIHGARVFLHWSTKNKDQLSVWARELKARRGHNKACVGVANKLARIAWAIMTNNRVFEMSV

SEQ ID NO: 381191 - protein, 378 aa, unidentified
MLTRTLHVYGDSAPMGVLKVSDLNQFYGVRVMDVYIGFDISLQTTHICAVDKDGNIVKEGTATSEVYAIDDWLRRFGEEWNIKRIVFETGQLSTHFFHGLAKSWPVDCIDARHANGTLKAQRTKTDKNDARGLAQIARTGWCKVVHVKSNESQTLRALVGGRKQLVTMRMDIENHIRGVLKTFGIKLGIVTAAAFEMKVNHLLANHDAALHDTMSALLKARAGLIEQQKMLDRRCGAIARKNEVCKRLMTVPGVGVITALTFQAEIDNPLRFKKSRDVGVHVGLTPRRYASGEIDRPGRISKCGNTALRTLLFEASVTMLTRSGKWSRLKAWGVRLAKRNGFKAASTAVARKLAVIMHRMWVDETNFVYGEMPALEAA

SEQ ID NO: 381192 - protein, 409 aa, unidentified
MRYYVGVDWADQTHAVWVVDERGTKITARTVPHTAAGFSEWGRELDEWRAQGIERWAAIERPDGRVVDFLLDHGVVVYPVNPKALDRARDRFRQSGAKSDPFDARVLADFLRTDHSHLQALQPSSDAAQELKLLTEDCQRHIRQQTRLVNQLTATLKAYYPRALEVAELTTALAREFLQAYPTPEALTALTQRQWQRWTRGRRLSEARIGALWAVLQQPQLPVPAHVVRAKARLMQSLVEQLTPVVGAIAQYRTAIDDFFARMPAAQWARTLPIGKHGITAPTLWARLGDAPGRWESFRHLQAQAGAVPVTKRSGKQRVVHFRFACDKSLRHVVDQVAFLSLLSSDWARAYYDQQRVRGHSHYQALRALGAKWLKIIFVMWHRQVPYDEQYHLATMTRQQLRQRQKQIA

SEQ ID NO: 381193 - protein, 464 aa, unidentified
MRAGKQLWRNRKEKKEWARRLQSENPGLEVVHPHAAGIDVGNSTHYVAVRPDRDPEPVRRFECFTADLHRLADWLQSCGVKTVAMQSTGVYWIPLYEILEEHGLEVYLVNARHTKNLPGRKTDVQESQWLLKLHTYGLLNNSFQPVSEIRVLRTYWRQRGEHVRGAATCIQRMQKALTQMNVQLANVISDISGLTGQAIIRAIVAGERNPLKLAMLSDPRVHASHEEIAKSLEGNWRPELLFVLHQELDMYDTYQKRIAECDQRLQKHLASFTRPLPIQPPTQKLKTKKPAAKNAPRFDLSSELQRVTGVDLTRIDGIDVMVAQTLLSEVGLDMSRWTTESHFASWLGLCPDNRISGDKVLSRGTRRVVNRAATALRQAANTLMRSRSYLGAQYRRLRTKLGAPKAITAMAHRLARLVYRMLKYGQTYVDKGTEYYEERFRQQQIQLLRKRAAKLGLQVAEIHA

SEQ ID NO: 381194 - protein, 356 aa, unidentified
MSSNVKYIGLDVHKEAISIAVLNGAGKLVMESIIETKAVTLVQFLQGLRGELHVTLEEGAWAAWLYDVLKPRVHEVVVCNPRRNALLKEGSKSDRVDARKLAELLRAGLLRPVYHGEHGLRTLRELARSYQTISKDLRRVMNRLKALYRGWGIPCTGTQVYAPRYRERWLNKIAEAGVRRRAELFYQHLDGLQVLRRQVRAELLVESRKHKAVKLLRQIPCIGPIRAAQLLALMQTPHRFRSKRQPWTYSGLGVETHDSAQHCYVDGRLQRSKKPQQIRGLNQNHNHEMKEIFKSTAMSASRRAGPFGDVYAGLLAKGIKPEMARLTLARKIAAITLTLWKKGANFDAEYVKPQAA

SEQ ID NO: 381195 - protein, 337 aa, unidentified
MSKVTTVGIDLAKSVFQFHGIDASGEVMLRRQVRRAQMPQMLSQLAPCVVVMEACGGAHYWARLSRELGHTVKLLAPRYVKAFVRGAKNDRNDARAICEAGCQPGMPTVAVKSETQQGCLALHRVRALAKKQRTMVANQVRGLLAEQGIVLAKRIGTIRRELPGVLPRLEPHLRRALELQWQQLQALDRQIAVLDQELTELASGSATCQRLMRERGVGPVIATAITAEVPEPRVFRNGRHFAAFLGLVPGQDSTGGRAKLLGVTKRGDAYLRTQLVHGARSALRRAAHHDDELSRWAQAVAQRRGFNRAVVALANKLARRLWAILRYGEAFRATAAA

SEQ ID NO: 381196 - protein, 345 aa, unidentified
MKIVGCDLHTRYQQIAMLDKETGELVERRLEHESGEARSFYAGLEGPVRVGIEATGHTRWFERVLAELGHELWIGDAAQIRASVVRKQKTDVRDAAHLLDLLLSDRFPRIWRPSLEERDLRQLVWHRQKLVWMRNAVGNQLHALAMGEGVCRKKKLFTKKGRIELEGLKLGRWASYRRQELLTLIDQLDASMKELDQAVVQQAEQNQAAVLLMTHPGVGPVTSLAFVLTLGPVERFERSKQVVSYLGLNPREHSSGGRQRLGAISKQGNPMMRSLLVEAGHTAARLDSELRQDYQRLKIRRGSGVAKVAIARKLAVRMYWMLRSPASYAQLVRMQSSPRGTLVGQ

SEQ ID NO: 381197 - protein, 346 aa, unidentified
MRNSNTVGVDLAKNVIQVSVVTPANKERSNKELSRIKFAEFLAKQKPGLVAFEACATAHHWARLATTYGHQVKLIPAMAVAPFRQGHKTDKNDALAVAEAASRPNIKIAPMKSIDHQAMQSVQRSRELIIQERTATSNHIRGLLLEFGIAIPKGLVYLRRQVPLILEDAENGLPMSYRPTLHRMLMRFHATEEDLAFMDEQIKQIVKSNDGCQRLTALEGVGPIGAILLFATLGSGEAFKNGREFSAYIGLTPKQYSSGGKTNVIGISRHVANRRLRAVLIQGARAYVHRHKHVTSRKDEWLLALVARSGTGKAAVALANKNVRTAWAMLTQGTQYNCKPCLGNAA

SEQ ID NO: 381198 - protein, 347 aa, unidentified
MAHFVGLDVSVKETSVCVVDDAGKVILEQKVRTEPEDIIALLTSLGATFGRIGIEAGPLSQWLVNALTAAELPVICVETRHMKALTAQQINKTDRNDARGIAQMMRVGLFKPVHVKTLVAQEQRMLLTSRKLLQRKLLDVESDLRGTLRNFGLRVGVVSGSRYEARVRELVEGFPGLAAIAEPLLNVRRVMRQQFAVLHKMLLDTVRGDPVCRRLMTAPGVGAVVALTYRATVDQPQRFVHSRAVGAHVGLTPKRYQSGEIDYDGGVSKCGDALLRTMLYEAAHSLLTRSRKWSWLKAWGMRVAQRRGIRRAIVAVARRLAVVLHRMWVDGSEFRWSKDSAAVPMVA

SEQ ID NO: 381199 - protein, 341 aa, unidentified
MKEYSRIGVDLAKGFFQVHAIEREGSPAVTRKLSRAKFLSFFAGIAPCRIGMEACGSAHHWARELRSMGHEALLIAPVYVKAYLKRGKNDANDAAAICEAMSRPDMRFVPVKSADQQAVLMLHKTRELMVKQRTMSVNALRGHLSEFGLVAAKGIHRIKDLLALVEADERLPEAAREATMTLAAEICGLDARIDALEAKIAEASASNPVSRLLDEIPAFGALIASAMVAFNPDPSAFRSGSDFSASLGLTPSQHSSGGKERLGGITKKGNRYLRKMLVVGCTSVLRVAHKHKGALAEWIVAMRARKPERVVAVALANKLARIAWAMMSTGESFRKELYFKA

SEQ ID NO: 381200 - protein, 409 aa, unidentified
MKMAGIDVHKKVLMVVVMDTSTPQEKPVRRRFITLPNELHRLLTWLREQGVEEAVMESTAQYWRSVWLELEPHMRLHLAQAFSNRAPRGRKHDFKDAERLVRRLIADELILSFVPSGEQRIWRSMTRMKLQLTRDRVRLQNQIECLLEEMRIKLSIVVSNLLGASGLRILHALANGETDPTKLAQLGGERLQCTEEQLVDALTGRVQPVHGDMLALQLERLQLIDQQMERLNHMIAAAMKAHQDAVIRLAEVPGLGVDSAQQIIAEVGAQASTFASAAELTSWVGTCPGKDESAEQNHSSRSAKGNKYMRRVLNQAAHAAVCTKGSYFQALFRRLLPRLGYKSAIWAVAHRLCRLVWKILHEGVQFVEQGAEVAPREKKKRAQMLARALRKLGYEVTITPINQLTPKLV

SEQ ID NO: 381201 - protein, 317 aa, unidentified
MAQKGTIVGIDVAKGKIDAAIRFGAEASFANSAEGRRELLAWLKEHGVCKAVMEASGGYEKSWAALLRGAGVEVVIADPNRVRHFAKSAGQLAKNDPIDARMIAWFGEVFGHASGQPHDEERQELDQIVTARLGIVRLKEQIENWGEHEQPKAVQKAQQALLKAVAIQLAKLETIIAAKIDKTKRFAQRAEIIQSVPGLAGTAAAGLIAFLPELGLVDRQAAAALLGVAPFDADSGQRRGERHIQGGRHKLRKLLFMPVLSAATQHNPVLKACYQRLIAKGKKAKVALIACMRKLIGILNTMLARGEKWNPARHAIA

SEQ ID NO: 381202 - protein, 404 aa, unidentified
MWYVGLDWADTHHDVDVLDEAGKRVGARLFAHSHDGLNELKQFVLSIAASPDQLACIVETNHGLLITFLLEAGFPVYPVNPKTANQLRKAAGAKTDQIDAHLLAKIGRLDLAELRRLEPDSATVAELKTLTRDQDALIQTQTRLVNQLTACLKEYYPAALHLFAKVQQRSTLLFLQAYPTPQAAQAASVEEISATLRTGKHTRSTQVAPKIFEELHRPHLVGSPVIVRAKSRLMLSLVKQLLVVIEEIASYDEAISTLFLTHADQQMWRSLPRAGKRLAPRRLPEWGDDRSRYADATSIQTLAGTAPVPFQSGNYAKAHKRFACSKPLRNALHQFAWQSTRKEAWALAYYQRKRAEGKTHSMAVRALANVWVRIIYGMWEHKTCYQTATFEAAKLAHAPRQHVA

SEQ ID NO: 381203 - protein, 326 aa, unidentified
MTLSHLTDNTFIGIDVGGASLDVAWHRGDSAHYANRPDAIAALVERLRTGPEVTRIVVEPTGGYEKALVKALRQAQLPVEIIHTTRFNAYRALVGVKAKSDTSDARLLAAYAAASDDIRGRKTGHVELPEDAIREALSELASRRDQLKHMIHAETCRLGTVRMNELRQMIMTHLEALRAEDKQVHRMMLELVRQRADLRRDQRLLKTIKGIGEKSALALLASVPELGRIDNKAAAALIGVAPFVRKSGTMTAPARIHGGRAPVRSILYMASVTASMHNPVLSPFYERLIAKGKPPKVALIAVLRRLVVFANAVLKSGQPWRGATMA

SEQ ID NO: 381204 - protein, 346 aa, unidentified
MKKFFVGIDFSKRKMDVSIVEKDFPERAIAYKLFANNAEGAKEMCYWVERTTGTSTKHDGEVLFCCEHTGSYCLEVCDYLSENGNYIWLGNPLDIKRSMGLVRGKDDVIDSRRIATFAAEKHHKAVLYMRPEDSTRTLKYLLSIRNTFIEQKKALSCQIKENLPVLHDAALLCKIETELKRALDFIKAEIKKIEKMMLDIILSNKEYKNTFDILTSMKGVALINAAAIIVFTDNFKRFSFNSRKICTYWGITPFRNESGDSIRRGTHTSPIRNNWLKAILSEAVLCAIRYEKRMKEYYSRLMAKGKHRNVALNNTKNKLLKTLVAMVRDGKKFDENYVSIPQAYAV

SEQ ID NO: 381205 - protein, 368 aa, unidentified
MKEITTYVGVDAHKKDLFIAMLIGDAQTPVTWTVPNEPNAIRRLVRKLEREAPGPVRMCYEAGPCGYALQRQLTTPRVHCQVIAPALIPRKPGERIKTNRRDARKLAELLRAGLLTEVRPPTPEEEAVRDLCRARDDAREDLQRSRHRMGKLLLRRSLHFSGRNWTKAHRRWIDSLEWTQPAERVVVDDYLLAIDHLEARLIELDARLSEIALTEPYREPVGWLRCFRGIDTLTAILILAELHDFRRFQTPRALMAYVGLVPGEDSSGEKQRRGRITRTGNALVRRLLVETAWHYQHRPHIGPALTRRRKGQPRHVIAIADKAQQRLCRRFRRLMEQHKPAPKVAVAIARELAGFLWAALQPVSVPAK

SEQ ID NO: 381206 - protein, 345 aa, unidentified
MKREYIGVDLHSTQIIVHRIIINDDGTVERRAVCIEAGSGAHTLARILSARDARVFLVNPLQMAHIFLTAKKTDKVDARKLADALKRHLESNDPGDALPEVYVADAEAQRLRMLVAQYQRITADMTALKNNLYALFRQWLIPLEKGQVIDDLETCLAHPRVPPKLTMIARGEKERYGRLESIKAEYRAAIEKLGVIRFREPVSLLIGISGVSVFGAACIMSDIITIDRFKTCKQLASYLRAAPRVDASNQTVHIGRLNKAGRKMAFEILLQSVNHLIDGNPHLLAFTQRTVGKSRNKIRATVVARTIRQIFYILKNREPNRYLRIDCLRTKQKRMGKILQTQDCA

SEQ ID NO: 381207 - protein, 320 aa, unidentified
MDTVKLYGGIDISKARLDIAMSPTAECWSVPREEAGIAQLVSRLQALRPTLVVLEATGGLELLVVAALAAAGLPVVVVNPRQVRDFARATGKLAKTDRMDAMVLAHFGEAVRPQPRPLPDSQTQALEALLTRRRQVVGMLTAEKNRLHTTPPPVQQDIQRHIAWLEEGLAKLEADLEGALRQSPLWREKEGLLRSVPGVGPVLSLTLLAQLPELGTLDRRQVAALVGVAPLNRDSGTLRGRRTVWGGRAPLRAALYMATLVASRYNPVIRAFYQRLCAAGKPKKVALTACMRKLLTILNAMLKHRTPWRYNTPQILGPCA

SEQ ID NO: 381208 - protein, 405 aa, unidentified
MLLVTIDMGKVKHTGYYRFPNGTEGKPFEFFNSRNSFEEFWWQICQAKRSLNLAEVVVGFESTGPYAEPLLHFLRKRDVRLVQVNPFHTKRLKELQGNSPNKTDQKDPKVIADIIELGHALTVIIIPEGTVAELRRLTQARERSIQRMSMLMSQLQDLIFLIFPEFMTVMKDITIKSTQYILKNYPRPHDVVEAGVELLTQILKKVSRGKLGKERAEALYWVAKESIGLGEGQESIVLEIKETVSSIESIERFIKELKKHMSKHLKDVPYSRCILSMKGIGEITAAGLIGEMGDFRKYRTISEVIKHAGLDLFEISSGKHKGKRRISKMGRPLLRKLLFFASINVVRKGGILHTQYRHHLEKGMPKIKALIAISRKLLSIIFTLVRDHSVYIAQYSKTQQLKEAA

SEQ ID NO: 381209 - protein, 451 aa, unidentified
MNIVATVNNAITTGQPFAAIIGLDWADQKHVWSMRTADGHRQRGELVNSPEAVEIWAAELALRFAGQPVAIGIEQSRGAVISMLSKYSHFVLFPVLSTSVSNYRKSFTPSGAKSDAKDSDLILDLLIKHPEQLPPLRPDTVETRSLQFLTEERRKLVNLHTSQVQTLTNWLKQVFPQVLHWFEDVSTPLVHDLLLRWPTLPDLQKVSSKTLLNFFHRHNCRSQERNQQRLAEIPHAVPATHDPALLKAGVLCIQNTVRLLTQMRTGISALENQIAEVFRSHPDRAIVESFPGAGAVLEPRLIAAVGTQRDRFPSAQSLAAFVGIAPVTEASGNSLWIHWRWACPKFIRQTFHEWANCSIKSCAWAREFYDQLRARGKSHHAAIRALAFKWIRIFFRCWRDRVPYDEQRYLRSRQARNAETPAPVPPAHGKAQPRFLFKTCGDFQKIAEISY

SEQ ID NO: 381210 - protein, 385 aa, unidentified
MTHPAHDTTFIPRNYDIFGGLDIDKKSMAVTFRDHGTMRKSLKLPYSGTQLLNYTRKHFPGQRVAFVYEAGPTGFGLYDELRAANHPCLVVSPAMVPRAPGQRVKTNRLDSNKLSEGLRGGQLRSIHVPATSYRELRHLVQLRDTQVAQLRATKCRIKSLLLYEGIPFPAANGQWSGQVLRQLAALPCSRAVRFKLDQLIDALQFHFQSAARAQKEIRHYCQNDPELRQSISFLTSLPGVGSITAMHALARLGDWREISNVRQIAGFLGLVSSEHSTGDKENRGEITRSGDSRLRNKLIQCAWTAIRKDPELRAFYRRIYERQPKKVAARKAIVAVARKLTTRMYAVLKEQRPFVIRPDSSVTPLTAEETVGPRERLDTAQNEQP

SEQ ID NO: 381211 - protein, 352 aa, unidentified
MNQSQTTAVPKLFIGMDVHKKSWTVHFKTDLFDNKTITIPTDPDVLINYVEKHFESHQVSCCYEAGCCGYWIARSLLKHGWEVKVVNPADVPRNNKQDWQKTDKIDSRNLCKHLSNDNLKGIFIPDEQQEQLRSLFRRRIHLARQLRTIKNHIKSQLLYFGIKLPEEFDNPNWSRDMKTWIANIKWKYNSAAETIKSRLKQLEFMWYEELHISNELRAYCRKHYKKDYYLYKSIPGIGGITASGILSELGDIRRFNRLDELAAIVGLVPGIYQSSDNRVNLGLTKRSNHQLRSLLVEASWIAVRRDMALQQYYRKHAHKEPNKAIIKVAHKLLSRMRAVIISGIPYQEGIIK

SEQ ID NO: 381212 - protein, 362 aa, unidentified
MEWTQPADFGIMAIMRVHYFKEAIMSIATLGIDLAKNVFHVHGRDAAGRPVFQKRVSRAALVTFMANLTRCRARLEVCSGANHWSRTLQALGHDVRLISPQFVKPYVKSNKNDFNDAEAICEAVLRPTMRFVPPKTVAQQDLQNVHRVRRRLIGARTALVNQIRGLLAEYGIVVSQQVGRLRRALPGLLDDPTNTLTPLARMTFMSLHEELRGLDTRITAIDQELTRHCVGDERCRRLVAIEGIGTLTATAIIAAVADPHAFKNGRHLAAWLGLVPRQHSSGGKPRLLGMSKRGDRYVRTILIHGARAVVARAATKSDARSRWIADKRYQRGTNRACVAVANKNARIIWALLAQGTSYRHAA

SEQ ID NO: 381213 - protein, 364 aa, unidentified
MNKCHLNTELSSLEGTRCQFNGSRAIIKLGIDVHQDYYVVVKQEGGTNPKPAQRFRKEAFVHWAAKLKNQGGEIYAVYEACGFGFGLQRQLAALGIQCHVVCPQKLDERNKRVKTDGLDAKALCLKLDRFVQGNRDALALVRVPMEEEEQKRAIHRQREQLVKARKRLEAQGRSLMVNHGMEPLSNWWKARTFAQLQVPEWMKELLGNSQPILLLLQEKIRALSAQLQGAAIAKQPRGLGLLSSVVMDREVGNWDRFKNRRQVGSYTGLCPSEYSSGDTRVQSCVTKHGNPRLRAALVETAWRLLRFQPNYKPVRKWREVLAKGALATKAARKKAIVAVARQLAVDLWRIRTGRVAIEKLGLIN

SEQ ID NO: 381214 - protein, 355 aa, unidentified
MTSSKYIGMDVHKESISIAVRNAAGKIVMESVIQTKASMILQFMEGLRGEVHVTFEEGTWSAWLYDLLKPHVTKLVVCDPRRNALLKEGNQNDRVDARKLAELLQNNQLRPVYHGDHGLRALQELVRSYLTITKDLSRVMTRVKAIYRSWAIPCSGTQVYSARHRAEWLEKIREPGVRRRAETYYQELDGLRSLRQEVRKELLAESKKHEVWKRLGGIPSIGPIRAALLLGIMQTGHRFRTKRQLWAYSGFGVEGHSSADHQVVKGQLQRKKKPIEIRGLNKNCNHHLKNVFKSAAVVASTKPGPLQEFYAALVAKGMRPEMARLTLARKIATIVLIVWKKGVCFDANHLKPQTA

SEQ ID NO: 381215 - protein, 402 aa, unidentified
MNAVGIDVSKGKSMVAIMRPFGEIVSAPFEIKHTASGINSLVELINSVEGESRIVMEHTGRYYEVLAHQLSEANLFVSAINPKLIKDFDNDSLRKVKSDKADAVKIARYALDKWQNLKQYNVMDELRNQLKTMNRQFGFYIKHKTAMKNNLIGILDQTYPGVNTYFDSPARSDGSQKWVDFASTYWHVDCVRKMSLNSFIDHYQNWCKRKKYNFSQSKAEEIYGKAKELVPVLSKDAITKLIIKQAVNQLDNASTTVESLRTLMNETASKLPEYPVVMAMKGVGTSLGPQLMAEIGDVSRFTHKGAITAFAGVDPGVNESGSYEQKSVPTSKRGSSDLRKALFQVMDVLIKTHPQDDPVYQFLDKKRAQGKPYYVYMTAGANKFLRIYYGRVKEYLSSLPEV

SEQ ID NO: 381216 - protein, 316 aa, unidentified
MSKRKNNIGIDVSKQLLEVAVHESDFRYRCPNQVGTFAELLAELIALRPARIVLEATGGLEKPVVAALHAAHLPVVVINPRQVRAFAKAVGQLAKTDRLDAAVLAHFAAAIQPPLRPLKSKEEQELEALMGRRGQLVEMLVAEKNRRHSATSEAVRETIKEHIDWLQDRIAELDEQLQARLDSSEVWQTKDAILQSVPGIGPVVSFSLLADLPELGTLNRQRISKLVGVAPLNCDSGQQRGVRHIFGGRARVRTMLYMAALTALRFNPVIKEFYQRLVGKGKPHKVALTACMRKLLSIVNLMIRNQTIWKTDPVSA

SEQ ID NO: 381217 - protein, 341 aa, unidentified
MLIIACDYHPSVQQIAWTETGTGECGERRLTHCAEAEQFYRELKQHGASVRVGIEATGQSRWFERLLAELDFELWLGDPARIRAKHVRTQKNDRMDAAHILKLMLKDDFPRIWVPSPENRDVRQLVWHRHRMVQMRSRVMNQLQAIAMNEGVRRKRGLWSQKGRVQLESLALPPWTSRRRQELLELLDRFDPSIDDLTEAVEQEARRRPEVEQLQTHPGVGPVTALAYVLVLGTPDRFPCGKQVGSYLGLIPCEDSSADHWRLGHISKQGNSLVRYLLVQSALSAARVEDQWHRQYVHLAMHRNHAIAKIAMARKLAVRLFWMWRRGWDYEEWKKFGSNVG

SEQ ID NO: 381218 - protein, 444 aa, unidentified
MDIINSSAAGIDIGSRSHYVAVGQALEDVKEFGVYAEDLTDICLWLKSYDITSVAMESTGDYWQNLYTELIKHGFEVILVNGKFTKNAKGKKTDVKDCRWIQKLHALGLLTSSFLPDQTTETLRTYCRQRANWIDAASSTSRKMQKYLKFLNFRLDVVVKDVCGLTGLKIIEDICKGNLDPLELAKHRHYNCRKSEEEIAKALQGNNREDFLFGLKQEFDTYKFYQKKITACDKQIDRLIKDELKKYPSKKKLKTTNKPYKRINKNAPNIKNLNQIAFKYFDGVDLFAIEGLSHATILSIMSEIGPDGFKKFKTSKQFASWLRLAPNNKISGGKILSNRIPKGSNRLKIALRQAANSIGNLKDTHLSDFFKRVAYRKGRQSAVSATARKLAVIIWTMVTKKVPYSPPTQYLFLDQKRKLRMLNRIKKNIAKFDLNLEELKIATN

SEQ ID NO: 381219 - protein, 417 aa, unidentified
MKKNSKSPTKKEQTSKRTRSQRPVQRETKEVLAELVEKLRGKLELKATPASLGEAGQGPELRPNLDRLTVGVDLGDQWSHYCILGLVGETLSEGQLRTTQADVAEFFQAITPARVVIEVGTHSAWVQEIIAGCGHDVLVANPRLMEGSKRRKRKNDRIDANKLARLGRVDPQSLHPMQHRSREVRQDVVLLRARDALVAARTELINTTRGLVKSLGTRLPKCSSRSFAHKVGEAIPEEVRDALLPLVQLAEGLSACIQGYDRRIEELAGEKYGHTKLLLQVKGVGPLTALAYVLTLEKPERFAKSRDVGPYLGLVPKQEDSGEIQPQLGISKAGDTMLRKLLVGSAQYILGPFGPDTDLRRYGLRLCERGGKNAKKRAAVAVARKLAVLLHRLWVSGEVYEPLGYRVSGTIVQPAAA

SEQ ID NO: 381220 - protein, 417 aa, unidentified
MKCFVGLDVSSTKLDVCIMLSDTSTPVTASLSNDLSGATEIKNHILDLNHTYHFERIVIGMEATSLYSFHPAMFFHEDRQLKELHVEIMVEQPNKIKKYRDAFEENKNDTIDAFYIADYFRIERFSPSFLKEEKYMALQHLTRTRLQIIEQLTRTKQHFIENIYYKCNTLAYQFKKEELSTNLWSSTMMTLMTDEMTLDELANMPLQELDDWLQKLGKGHFKDSEKLAQTIQAAIRGSYRLSKLQQDSVNVILGLLAREIRNLEKMIKEIDKAIEDMVETIPEYQCLTSIPGVGKVYAAGIIAEIGQIERFKDHPQVAKFAGLNWREKQSGNSNSQHTSLVNRGNRYLRYYLVEAANSVRRYDDEYKDFYKKKYHEVPKHQHKRAILLTARKFVRLVDVLLRNHQLYTPPRRLMEDN

SEQ ID NO: 381221 - protein, 329 aa, unidentified
MFLCVLGSSGEPLLERNIKSRPEAFLKTIEPFRENLVVSAECIFTWYWLADLCRREKIDFVLGHALYMRLIHGAKAKNDKLDAMKIAMLLRGGTMPLAYAYPAEMRATRDLLRRRLHLVRKRAELLSHIQNTHHQYNLKPPTAKIAYKSNRAGVAEAFTEPDARKSMEVDFLLIEQHDQIIKNLELHLSRQAKLHDPDTYHRLRSVPGIGKVLALTILYEIHDINRFPRVQDFLSYSRLVKPEHSSAGKRVGSGGGKKGNAHLKWAFSEASSLFLRHCEEGEKMARRLQSKHGKSKGLSILAAKLGRSVYYMLSHEKSFSLNRFLTGQK

SEQ ID NO: 381222 - protein, 409 aa, unidentified
MMKQNIIFGIDVSSKSSTVCVVIDRIKQGETFKITNDSFGYQDLLDRLNQYLITPLVVFEATGVYSLSLQAFLEDYHIKYLKLNPLKAKKLMDNNLRHNKTDKVDAYRLALIQFNAPQKLRAPQPKEYHELQNASRYYEELTQALIINKNQLHCNLQSTFPQIESILSTSSGRVYWTIVSLFPHAQYVLNHNENQVFQSLLAISGIGRQRAHYLTTRLYALARQAYPYDNESSITIRAIQRNIANLLSLSAERDNVINYMEKLAMQANARSLTIYGSIPGIAKTTAVRLVAELGDLRRFDTSAQIDAFVGIDPGRYQSGEKDSHLGITKHGNHLARKILYRTIIQMETVKATQPCHITDYYDKKKRSSNSRGYKKIAIASVHKLIRTMFTLIKHDQLYDYNVATHNQRL

SEQ ID NO: 381223 - protein, 403 aa, unidentified
MNMNAVGIDVSKGKSMVAILRSYGEIISKPFEVKHTVSGIRSLIEQIQSIDGESRIVMEHTGRYYEPLVRELSKADLFVSAINPKLIKDFGDNSLRKVKSDKADAVKIARYTLDSWTELRQYSLMDEIRNQLKTMNRQFDFYMKHKTAMKNNLISILDQTYPGANTYFDSPAREDGSQKWVDFSATYWHVDCVRKLSLNAFIDHYQKWCKRRKYNVSRSKAVEIYEASKELVSILPKDDLTKLIIKQAVEQLNTASQTVEQLRTMMNEAASKLPEYPVVMAMKGVGKSLGPQLMAEIGDVSRFTHKGALTAFAGVDPGVNESGSYEQKSVPASKRGSSTLRKTLFQVMDVLIKTKPQDDPVYLFMDKKRAQGKPYYVYMTAGANKFLRIYYGRVKEYLSSLPE

SEQ ID NO: 381224 - protein, 341 aa, unidentified
MARHLGIDLHRNRFTVCTRGENGRNYHRTVELKYMERFVSSLRPDDELAVEMTTNTRFFVNRVREVVKRVVIVDPAKFKVVSESTKKTDKNDAELLAFFLSKDMLPELRMKDREREKLHSLCQTRDKLVKQRTQLKNKINNVFAGYGILLKREETASDKALARVLEYDIDPVVNLELGVLVEQIRSLNRSIRKLDEAIKKEGEKHPEHRILKSIKGIGDKGASILLSIIGDVNDFADEKKLASYFGIVPRVSNSNESRHSGRITKKGTKLGRTTLVQCGLIAKRYSPYLLNFHERVKRRRGGGKANIALARKLLSIVYKALKNRWVFTDFPSFRYVTQEAT

SEQ ID NO: 381225 - protein, 477 aa, unidentified
MNRKQGDNLQPPKAKPKRRRRNKGMCLEDRPVLEPNAAGIDVGAREMFVAVPPGRDEKPVRVFATFTEDLERLTDWLEQCGVTTVALESTGVYWIPLFEILEQRGIRPCLVNARHMKNVPGQRTDWHECQWLQYLHSVGLLRAAFRPGQDVCAVRTILRHRNELVAAASQHVQHMHKALTQMNLQIHHVISDITGSTGRAIVDAILAGQRDGAELAKLRDPHIKADTETIRKSLEGNWRPEPLFTLGQSRDLYRIYQQQIVNCDLEIEKMLQGFASRIDPGERPLPPDRKQNRAGSKRRRKNGHPHPEFDLRTEAYKLFGVDVSQIPGLEENALPLFSEVGRDMSRWPSAAHFVSWLALCPDNDISGGKLLWRGARRVKNRAGHLFRMAAYALHRSLTPLGYYLRRMKAKLGPQAATMATAHKIAVIFYTMIKNQVEYDEAIWNARDAEREKRLQAKLKRQAKQLGYDLVPVGPQAA

SEQ ID NO: 381226 - protein, 357 aa, unidentified
MDQKTFMMQIIKQNVGVDLAKKNFKACYMQQLETGKLRIKASKTFANTLAGIKSFVEWVRRHNKAGGPVRVTMEATGVYYEQLAYYLHETTDFYLSVILANKFKAFVKSLNVKSKTDKIDARILGQMGIERDLRQWRPVSAQMRQLKQLTRERVRVLEHKTRLTNQLHALNHSHAPLRGSMKRVKQQIKQLERHLDQIGLEIDQWLEKDPELKQKVENICKVKGLKWRTVATVLAETDGFQLFTNRGQLVSFAGYDVVHHESGTSVKGKTRISKKGNRFIRRALYLPAISAVRSEPSFKRFFERVLKRSGNKMVAYVAVQRKMLLLVYTLFKKNQPFDPDYPEKMGQPKNQLVAVLE

SEQ ID NO: 381227 - protein, 349 aa, unidentified
MRHIGVDLHKTNFVVCFLNEDESSHLETFPLSKAGIKRFCEQLKKDDAVAVEVTQNIYYFYDQIKAEVSRVVLVDTYRFSIIAKSKKKTDKADALALARFLKLDHLPEVPVPAERVRQLRHLLQARETLVGIRTKLKNLGHAALTRNGIALSRAAFATVVARERLLKRDDLQSADRIILETAIRQIGELDAEVERLEAEIVRLGKNLKGIRRLLGLHGMNLLSAISLLAEIGSIEQFETSKQLVAYSGLATSVRQSNETTRQGHITKQGRKRLRTVAIRAVLSMVSRTKTPLMDFYQRKKREKGSGKAICATARKLLTIIFVLLKKELDYWYLEERLYNRKLRLLNAAV

SEQ ID NO: 381228 - protein, 355 aa, unidentified
MNKINSNFEGQTIFVGMYVHKSSWNLGIHLNDLFVKNVHQKPNPTIMANYLKQHFPGANYIAAYEAGKFGFWIQRQLTALGIHCLVVNPADIPKSQKDSLQKTDPRDARNLGLRLQSGVLHGIHIPDEQQEADRVFFRHRKRIWKDLCRCKNRIKGLLAFSGIDIPEQYDNASWSHNFINWLKALDCKQQSRRRALDYMISQMEFLRKELLSISNAIRKMMREQRYKTNYYLLRSIPGIGPLTAASILVEIGDVKRFETFYHLNSFIGLLPMEHSSGQSENKLSLTVRKHRQLRSDLVESAWTARRTDPAMALYFQEQIKKKDSKIVIIKIARKLLNRIRFVLINQQPYEFGIVK

SEQ ID NO: 381229 - protein, 371 aa, unidentified
MKSILSVGMDVHKNSFSLCAYDGYTGEIVSESTFASDVKLVIKFIETLKSRYENDVEIKCGYEAGCLGYSLYKSLTARGVDCVILAPTTMQVSAKNKMVKNDRMDALNIAKNLASGSYKSVYVPDEEDVEIKEYIRMIHDFKKELKRVKQEICAFVLRHGYQYDGKSKWTIRYMNWIRELEMSEIQRETLNEYIAEMENLNDKIDRFMNRINEIYQSERYHEKVSKLRCFKGIETFAAMTIQVETADFERFPSAKAYASYTGLTTGEHSSGDKNNRIGITKQGNTVIRKTLVECAQSLVKGNVYAKKSQGLKSRQKGMDVNIIEYADKATERLKKKYQKLIERNVPRNKAIVAVARELACFIWGMETGNIH

SEQ ID NO: 381230 - protein, 351 aa, unidentified
MAAKKRSVVGGVDTHRDTHHAAVIESTGGLLADAEFPATTAGYADLLAWMRSFGRVTALGVEGTGSYGAGLARHLTSKKIAVVEVDRPDRRARRAQGKSDPIDAIAAARATLAGTAMGTPKARTGPVEAIRALRVARRGAVKARTAALNQMRGLVAAAPEPLRAHLTRVSAAVLVSRCTALTYDQAKLHEPEHATAAALAGLARRVTALTDEITTLDRQVAPIVQKAAPHTTALFGVGPDVAAQLLTTAGDNPGRLHSEAALAHLCGAAPIPASSGRVRRHRLHRGGDRGANHALHTIALCRMRYDQRTQAYVHRRITEGLSKQEILRCLKRYIVRDVYTALRADFTALTT

SEQ ID NO: 381231 - protein, 363 aa, unidentified
MEDAKRRYVGIDLAKRTMEVCFLREDGKSTRWSAKTDVEGRKRLVKQLHREDVVGVEACVFAFSLQRQLLKVVGCEVIVLNPGKLAIIHQSTNKTDRLDAYRIGLMISRFDRSELPEVTVPTEREEMMRTYVSAKQFFTDSRTRLINRLHALYVQAGITDVESRELKTHEERIRRGEDLEGFFKITAEALCREIDTTETNIGELEQELSAIVAKDELAPYLLSVPGVGPNVVTAFLAFIGNGDRFANAAQVANYAGLVPRVDCSGETERRGGITKSGNPILRRLMLQAAWSLTRSRDGGRLKVKYAYFLERKGKMRSVVALARKILELLWILAQRRTYYADCSEARLAAKLKRYGIVKTERAA

SEQ ID NO: 381232 - protein, 411 aa, unidentified
MRLFVGDDWAEDHHDVELMDAAGRVLAKKRLPEGVAGMARLHELIAQHAQDPDERGEDAEVVIGIETDRGPWVAALVAAGYTVYAVNPLQASRYRERHGVSGAKSDTGDAHMLTDMVRTDSHQLRAVAGDSPDAGAVKVVARTHKTLIWERTRQVQRLRHQLREYFPAALAAFEDLDAPDALELLGKAPDPARAARLTRAQVSAALKRARRRDIPGKATAILAALRSEQLGQPPAVTAAYAVTARSLIAVITTLNAQVKIMEEQVREHFGRHPDAEIYRSQPGMGAILGARVLGEFGDAPHRYADGKARRNYAATSPITRASGKKKVVAARFIHNDRLVDALNAQAFASLNASPGARAFYDGLRARGIEHNDGLRRLANRLVGILHGCLKTRTLYNEATAWSHRETSLNLR

SEQ ID NO: 381233 - protein, 306 aa, unidentified
MKGIGIDVGSQWLDVGVSDATTCWKFANDSEGIAALLEWLGTQGPVRVVMEATGGYEIDVLAACVAQGVWTCRVNGRQARHFAQGLGLLAKTDRVDARMLACLALAHPRLQQALPQAPWREELRAWTQRRGQVVASLQQHCQQRSRCRVPAVRVLIDATLAQLEHELATLTTHIATLIKPHVTPALRSIKGVGPTFTAALLAQLPELGHLDRKQIAKLVGVAPLNCDSGQRRGQRHIHGGRAGLRSVLYMATLTAIRWEPVIRDCFARLKARGKAGKVALVACMRKLLTILNARRRDELHAVPSTA

SEQ ID NO: 381234 - protein, 314 aa, unidentified
MEQQAEETFLGIDVSKTHLDLARWGQQEVRRYENNATGIAALVETLLAETSVTLIVAEASGGFEQTMVTELAAASLPIVVVNPTRVRNFARAKGQLAKSDPIDARGMADFAQAIRPEVRPVGADDQQFIKALVTRRRQLVDMQTAEKNRRSSINPGLLPRLEKHLAWLEAELAEIEQELNDWIDKNARWRDTRNRLESVPGVGSVTSFTLLAELPELGSLSRQKIAALVGLAPFNRDSGHFRGRRHIFGGRADVRSVLYMAALSGIRYNPVLKAFYDRLVAKGKLFKVAITACMRKLLTILNAIVRDGSTWQVT

SEQ ID NO: 381235 - protein, 409 aa, unidentified
MDVVYARCCGLDIHKKLVVACLITPGADGRAQKEVRTFGTMTDDLLALGDWLAEGGCTHVAMESTGVYWKPIYNLLESRFTLLLVNAQHSKAVPGRKTDVRDCEWIADLLRHGLLRASFVPDQPQRELRELTRYRTSLVQERSREASRLQKTLEGANIKLSSVATDILGKSGREILTQLVAGSTDAAALAELARGRMRAKIPELERALVGRFDAHQRFLVAEQLSHIDYLDEVITRLSAEIAERVRPFEDEITRLDAITGVGRATAEVLVAELGTDMDRFPTDRHVASWAALCPGNHESAGKRQSGKTRKGNRALRTALVEAAQAAGRSRDTYLGAQYRHLAARRGKKKAAVAVAHSILVICYHLLKDGTTFNDLGGDYFDRRDQAAIERRLVARLEALGNKVVIEKVA

SEQ ID NO: 381236 - protein, 394 aa, unidentified
MKLIGIDIGKNKHFFCVMDQQTGEIISQPVSFSNDKEGFDFLIQKIKSYPKDSILIGMEDTGHYHFALLKYLLDLQYTVALINPKTTDFNRKMQGGITKNDKLDTINICDVLDTPERKKQYRITKVNSFDLYEQKQLTRHHHNLKEEENVYKNRLQKCIDIVFPEFNKLFNSKYGIVYMNILKMFGSAENIANTDIRTIRKCFEIEGRGNRISLTPERLKECARSSIGISSSAEVIQIKHLTAQIELIEEQLTEIDKKIEEFSIQNNSPILSIPGISHFSGTSILAELGDISNYSKPSQIIKFAGVAPLHYESSQFNAQHTAITKKGSKYLRKTLYQIILPVIRHNPVFNKYYQLKISQGKGHRCAQGHCVRKLLRIIYHLLKTNQQFDPQLLR

SEQ ID NO: 381237 - protein, 394 aa, unidentified
MTYFVGIDNSSLDHKVCILNNEGNLYSQFTIENNLTGFNALGTELKNLDEVLIGFELPHGPLVDYLKTKNYTTYSLNPLKIKRFKETITVSGNKNDKIDAAAIAEYLRRNHNQCRPMIYSSSEVEKLKMLCIIHNRMTEEHSRYINKLHFAVRQYFYLHESFFSHFGCTVQLKMLIKYPTFDDLRQASDEELILFLKSNHYHNPKYITKLLGKIREHEQLISPDVVYAYLHEVNMLCEIMSSIERSLKDIEKEMIGILDNHHLGKIFRSIPGVGTILGSNLLALFGDNMSRFDNANQAQCLFGTAPKNYQSGSYHKVTMRKACNKYARTVLYRFAFETLIHSKWARAYYDMQKTKGKKHSVAIRALSNKWVKVIYRLWKDDVFYEEDKKLVAAA

SEQ ID NO: 381238 - protein, 467 aa, unidentified
MTLGPTDALLGCLSFDLSGLRGACREHAGQDGHDLIRSLAVPHQCLVCPPCRCVPHQLRVRRDTTILTESTLVVAGADTHLDTIHVAAISMTGALIGDREFPTTRAGYTAAIRFLTSLGQVQRIGVEGTASYGAGLTRALTAAGIEIVEVSRAVKSTRRLKGKSDPLDAYSAARTALAGDGLAIPKDDATAGLRALHIARRSAVKHRTAVINQLKAMLVSAPDAVREKYRGLTTLKLIEAIARCRPDAPSDPWAQSMLIAAKMLAQRVQFLETQAEELETQIDALVTDANPGLRAAYGVGADTAAQLLITAGANPHRLHSEAAFAALCGVAPVPASSGKTTRHRLSRGGDRAANNALHRIALVRLSHHQPTKDYAKRQLLGGHSKSKMEVLRKLKRAIAREIFKLLTHQIAVPEYADLRPARQAKNITVTAAANHFGLWPTVISRIERGLQRDDEFADTYRTWLKAA

SEQ ID NO: 381239 - protein, 403 aa, unidentified
MNSVGIDISKGRSTIAVMRPFGEVVISPFEVRHTGSELSKLAKQLKSLDGETRVVMEATGNYHASVAKLLHNAGLYVSVINAKLVHGYGNNELRRVKTDRKDAVKLANYGLDRWLTLPRYIPEEDTRLLLKNCYRQYRQYSKVQTVLKNNLISLLDTVFPNANRLFSSPIRGDGSEKWVDFVAEFWHCRCASEKSERAFTSKYLRWCRKHGYNFREAKAHTIYAEASGHIGVMPKSETTKLLVEQAVAQLRATSTALAALKHEMQSLASQLPEYPVVMDMFGVGPTLGPQLIAEIGDVRRFYSKKALVAYAGLDAPPNDSGDVTGRHKSMSKIGASSLRRTLFLVMSVYLQTAPLDEPVCQFMDRKRAEGKLYRVYMMASANKFLRIYYATVKAYLESLEHTA

SEQ ID NO: 381240 - protein, 487 aa, unidentified
MNRKTNTPKKQEENRAVAKSGKKSTRTLPPANPEALREQIEAVRVGLRAKTWRDLETNGKFSKNDKLSFISEDMLIVGCDVGSETHYVRAIDWRGRELSGKAFPFSNDESGFRMAKAWALDIAARNGKSQIVLGLEPTGHYWFALAVWMVSNGISVVQVNPHAVNKTKEVEDNSQAKNDKKDPKLIANLVKDGNYGMPYLPEDVYAEMRALSMMRDQLTEDKGRDMNRLHRELKIVFPEYREAFSKIDGDFTISLLKRGLLPSDLAELGEEGIRKIWKEDRLKGAGYPRAKGIVSFAGKSVGLTQGSEARRKAIMFFASQIEYLTSELEEVEAMLAEKCREIPFVENVLEIKGLGDEITSGIVAELGDISRFDDAKEIQKLSGLALVACSSGKHKGQTQISRRGRKRLRYWLFQGALSVVSHNEAFRRIHQYYTTRAVNPLKKMQSLIVIACKLLRIIFTILKKGVRFDPDRMLRDIVYPESAEAAA

SEQ ID NO: 381241 - protein, 387 aa, unidentified
MPQPNDLSRSLVALDQNSTIIAVVELSQSSWLVGGMLPGIERQPCKKLEPSPERLLAVLHRWRDEAVKADRIITRIALAFEAGRDGFWLARWLAARGIEAHVIHASSVAVSREHRRAKTDRLDTELLKRGFLGWLRGERGHCSMARVPTIAEEDAKRPNRERDCLVGERTRIVNRIKSTLARLGIRNFKPTLRKAAERLASVRTPEGIPVPPNTLAELQRDMARLGFVVSQIREIEEARQKRLEQQHETGSHAMVRRLARIVGVGVETADMLVHELLSRAMRDRRAVARYAGLTGSPDESGAQRREQGLARAGNARVRRGMIQLAWRFLMFQKESALALWYRARTADSRIGTRKTMIVALARKLVIALWRFVTTGEPLEGVVLRPVA

SEQ ID NO: 381242 - protein, 358 aa, unidentified
MDTRNNIGQTDYFIGIDQHKHYSMVAVINPGGAKLIEEKLYHSDIVGLTKFFSQFPSAATEIALEATGFWYWLYDLLESLHLKVKLAHPLKVKLIAESTIKTDKIDAYVLANLLRTGYLPTSYIPSKDIRNHRELLRHRIVLVYERTSLKNRIASVLSKLGINKEVCNLYSKEGKSWLRGLNLSDPYQLEINNYLELIEKLTDMAVGLDKQIKKYLIKDERAKYLMSIPGIGEYTAYLLLAEIGEIDRFNSAKKLASYAGLVPSVNQSGQHLYFGRITKQGDTYMRYGAVESSHVAVRFDEGFGQRYRLLKSKKGSAVAITAIARDLIEVVYYVLKEKRNYYYKYPKVKRPEPIKATE

SEQ ID NO: 381243 - protein, 345 aa, unidentified
MDQISRIGMDTSKHVFQLHGVNAAEAVVLRRKLRRKEMVSFFEKLAPTVIAIEACGASHHWARLLQSFGHMVKLIPPYLVKPYVKRGKNDAADAEALCEAMSRPTMRFVPVKTAEQQAALMLAGVRDRLIRHRTQLANAIRGYAAEFGLTAAKGMAHLVPLLERIQADESLPALARELFAAQAKDYEQLQSQIDEVDAQLMARHRADECSQRLAKIPGFGPVGAMLLTMKTPAPELFRSGRQFAAWIGLTPRDHSTPGKVRLGVITRAGDEGLRSVWVVGATAVIQHARRHGKASPWLGALLKRKSPKLAAVALANKMARIAWKLMLTGEAYTATPAPAAAAGAA

SEQ ID NO: 381244 - protein, 354 aa, unidentified
MDVGIPYKGFSQSNHFNKLKYKVMRIKQTIGIDISKLTFDVRIHSNQMFNVFENSKKGFKKLIKWVNSSNSFLKEETIFVFEHTGIYYYLLSVFLTEQQLSFALVPGLEIKRSLGIARGKDDKIDATKIALYGYRLRDEIKLYDMPCEDIINLKRLLSLRDRMVKQRAGYKSSLKELSRVLTLKNNKVLLETQEKMIKYLTKRIGVIEQNLDNIINSNDSLKNIFKLVTSVKCVGRQTALFIIAYTEAFTKFKTWRQFASYCGTAPFPNSSGTSLRGNTQVSHLANKKVKSLLDLCAKVAIQYNPEMKSFYKRRIAEGKNKMSTINIIRNKLLSRIFAVVDRETPYVDFMKYAA

SEQ ID NO: 381245 - protein, 343 aa, unidentified
MSEISMIGLDLAKNVFQVHGVDASGSVVLRRQLRRGAVEKFFAQLSPCTVGVEACGSAHHWARVIGRYGHQVRLMPPAYVKPYVKRNKNDGRDAEAICEAVSRPTMRFVPVKSVEQQATMAVHTTRALLVRQRTMVANSLRAALSELGIVAAQGLEGLRELMAKLEAPNEEVPETMRSALLLLANHWQTLDADERALERQIAKAARADREARRLMEVPCVGPIIASTVLAKVPDAKVFRSGRDFAAWIGLTGRDHGTGGKHRPGRISKQGDRMLRALLISGASAYLRHQKTRGVSDPWLQELLARRPYKVVMVALAAKTARILWAMLVKGEPYRERASAPAAA

SEQ ID NO: 381246 - protein, 323 aa, unidentified
MGSSSSKGKAASEPDDLVRWLAATGLTIARVGLEAGPLSPWLHAGMREAGLPAICIETRRMKGATAAMAVKTDRNDARAIAHAMRVGWFTAVHVKMVESQELRLLLNNRRTLLEKRVAIDNEIRGTLKAFGLKLGAVTVAAFEARVLELLAKRSRLLAMVRPMLTARAALRQQGEVLHRMVLKAVRASAVCRRLLSVPGVGPIVALTYATGVDDPSRFIHSRDLGPHFGLTPRKYASGEIDRSGSITKAGDGAVREVLVQAALTLLTRVHRWCALKAWGVAVAKRRGLRRAIIAVARKLAIIMHRMWADTTTFNWTRETVTLA

SEQ ID NO: 381247 - protein, 336 aa, unidentified
MSVYVGIDVHRKRSQVAVVAEDGKVQLNKNTVNGTEPILRLIGDLPPGTPVAFEAAFGWSWLAQLLEDYGFEAHMVHPLRCKAIASARLKNDKVDAATLAQLLRADLLPEAWIAPPAVRQIRALLRHRTGLVRLRTQLQNRIHAVVADFGYDRSGSYLSGPGRGWLAGLELPAVSREIVTDCLTFIDALAPEIDRIDGELRQHAKTDPRVKVLTTLPGVGQFTALVMLAEIGDITRFPSARKLASWAGLTPTVRGSDRTVRHGHISKQGSAWLRWVLNQAAQTAKRSPEFAATYASIAKRRGKKIATIAIARKLLTRAWHLLSDMQAAGPATPPRP

SEQ ID NO: 381248 - protein, 354 aa, unidentified
MIMIGADYHPAFQQIAFVDTETGELQERRLEQPEGAEKFYRELAAQGKRVRVGMEASGHARWFERLLAELNIELWIGDAAEIRRKREGKQKTDRQDAQHILRLLLKDDFPRIWVASWENRDLRQRLWHRHRMVQARTRMRNQLQAVALNEGLRCKKKLWREAGRKQLEAFRLAPWASRRRQDLLELLDRLNPTIAALSQAIEQEVEKCPEAQRLMTHPGVGPLTALAFVLIIERADRFQCGKQIASYLGLVPLEDSSGNRRRLGHITKQGNSLLRFLLVEAGQVTVRSLPEWRSKYVHLTMRRGRKIAKVAMARKLAVRLYWMMRQGWDYEQLKKFGSHSGQPGHRHGVKSNIE

SEQ ID NO: 381249 - protein, 441 aa, unidentified
MLKIVYPICCGMDVHKSFVVACIASTNDHGVTTYKSKRFSTFTGDLRRCAAWLAENNCKDVCMESTGKYWIPIYNILEHTCRIVLAHPKYVKAIRGKKTDKRDAKWIADIFKHDLVAGSFIPPADIRQLRDLVRYRWKLTNFTTGEKNRAQNCLTVSNFKLDDVFSDVFGKAASAITTRILENPTEKITDVSGFRTKGMKATNAQVLAAVDGEMCAEQAEKLRIIRSHMDSLELCKLNLESLILSTAEKYLPQLNLVMTVPGIQSFAAIGIISEIGVDMSVFPTSKHLCSWAGLTPQNNESAGKKKTTRIGRAGAYIKPLLVQCALNAIRAKKFPEIRNRYLTLKKRRGHKKAIIAIARMLLTAIYNILKKNELYSFPRTLPQRRPTSEEPRGFCGRSRLHPPTARLSGDCSSYRLDFKHNFVFCPLSGGLVLCALFRNFA

SEQ ID NO: 381250 - protein, 350 aa, unidentified
MSVKHYIGLDVHKKSVSYCVKRGDGQIVEEGKLPATRETLRQWALERNQPWQAAMEATLFSGWIYDTLQPYASQLQMGHPAMMKAIAASKKKNDRLDARKIADLVRCDLLPACYVAPTQIRELRRLLRYRNLVVRQAVRQKNKIAGLLMEVGASYNKRRLHGAKYFGELLEGLEEVPPSVKDLLRLSRGALQMFEVTQRQLLGRLRNDARLAQRVQLLSSIPGVGEVTALTWALEVGEPERFGSIAHAVSYCGLTSALRSSAERQQRTPLSKQRNVHLQTVLIEAAKLAPRWNTQLAAVHQRELERGHRNRATLVVARKLVAYLLAVDKSRQPFQMRSPAVEATPSDQAA

SEQ ID NO: 381251 - protein, 390 aa, unidentified
MTATRLTDSIQITSASLYLAFELGWNEWKLAFTTGLGQAPRMRSAPARDCQAVLAEIARAKERFGLPPDAPVHSCYEAGRDGFWLHRWLLAEGIDNLICDSASIEVNRRQRRAKNDRLDAAKLVTMLCRYHGGDTKVWSVVTAPTAAAEDLRQLHRELLSLKEERTAHVNRIKGLLASQGLAVVVIDADFPEVLPGLRLWDGSPLGPDLTARLVREFERWQFVDRQIRDLESDRRRRIRCDETPQVDKVRLLLGLRGVGLAGAWMLVMELFGTRANLNRKQLGALVGMTPTPYQSGATAREQGISKAGNRRLRTLMVELAWCWVRHQPDSDLTRWFHRRFGVGKRSRKVGIVALARKLLVAFGRYLDRGEVPKGAKLCSWRTKINGRTAA

SEQ ID NO: 381252 - protein, 355 aa, unidentified
MTSTKYIGMDVHKESISIAVMNASGKIVMECVIETKASMILQFFDGLRGDLQVTFEEGTSAAWLYDLLKPHVTKLVVCDPRKNASMREGNQSDKIDARRLAELLRLNHLNPVYHGEHGLRSLKELVRSYLTITKDLGRVMSRVKAIYRSWAIPCTGKQVYAPRHRAEWLGKIGEPGVRRRAEFYYQQLDALRTVRQEVRRELLAEGKKHKAWKRLCQIPSIGPIRSAVLLGILQTPHRFRTKRQLWTYSGFGIETQSSADHRSVDGQLQRVKKQSSIRGLNRNCNHDLKNLFKGAAIVASSKPGPFQEFYTALLTKGIRPEMARLTLARKIATIVLIVWKRGACFDAQHLKPQTA

SEQ ID NO: 381253 - protein, 407 aa, unidentified
MDVVHPKCAGLDVHQQTVVACARIGSGQAVTADVRTFGTTTQELLALSDWLTTHGCTHIAMESRGVSGKPIWPVLDGHFVLVLANAMHIRNIPGRQRDVNDATWIADLLAHGLIRGSFVPPEPVQELRDWTRTRKQLIRESAQHPLRIQKTLEHANLKLPAVLTDTLGVSGRAILQALVAGERNPERLADLAHERVKASRAELVAALHGRVTAHHRFMLKRHLTHIEALDAAVRAVEARVGEALAPVRAAIDRLITRPGISETAARVIVAEIGFDMTRFPTAGHLVSWAGLCPRLHESAGTRRSNRTRSSNPWLTTPLVQAAWSAARTRDSYLRAQVRRIKSRRGPKKTILAVAASMLTAAYPMLKDRVDYRDLGADPFDRRDKTKLAKRLIARLHDLGLTVEVRAA

SEQ ID NO: 381254 - protein, 350 aa, unidentified
MVMIGADSHKRTHTVVAVDDVGRRLGVKTVRTNSEGHFELVRWSAQFDEVTFALEDCRHLTRRLEADLLAAGCRVVRVPTKLMAGARRAARQPGKSDPIDAEAVALAALRHPDLPAAELDGPARAVKLLSDHRHDLVVQRTRIASQIRWHLHELDPDLQIPSRGLRRHCVVAEVTVELDRFDGLVARLARNLLARCDELNHQINALEAELRALVRGIAPTLLAIPGCGVLTAAVIIGETAGVHRFRDKDAFARFTGTAPVPVWSGASAGKVRLNRGGNRAMNCALHMIAVTQARGIGPGQAYLAKQKARGKDKTAALRLLRRRLSDTVFTALRADQQHDAQTTPQVAIAA

SEQ ID NO: 381255 - protein, 464 aa, unidentified
MPTAPTHRQRALDALACVHPDAAGLDIGSEEIVVAVPSDRDPQPVRAFPTFTTDLHALVAWLVACGIDTVAMESTGVFWIPIYELLESAGITPYLVNARYVKTVPGRKSDWSDAQWLQKLHALGLLQGSFRPDAEIRTLRTLARYRAELIERRAPHINHMIQALKHMNLQLNLVLTDITGVSGLAMLRAIISGERDPHQLAVFRQPGCKHSEAEIVKALTGTWDDAQIFILTQSVDVFDYYTTKIDACDRQLEQQYQAMESRWAPNAPLPDLPPAKGESKSKNAMTFNARAQIARVIGVDLVAVMGLSAITVQTIISEIGTDMERFPTVKHFCSWLGLAPHNDISGGKVLRSRTMKVHSRANQAFRQAAHSVTRSHSSIGAYYRAMRARLGPKQAIVATAHKIARIVYHLLKTGEPYREQSDVEYERKRQEREIKHLARRAHKLGYTLARVPVAAPESQSEGGG

SEQ ID NO: 381256 - protein, 371 aa, unidentified
MKSIIYIGMDVHKKTYSLCALLKETGEIIGETKIPADVSLIIKFIENAKKSVDSDDVQIKTGYEAGCLGYSLYWQLAAKDIECDILAPSTMHRSAKNKVVKNDRRDAKNIAANLANGTYKSVYVPTDEDVEIKEYIRMMHDFKIELKKVKQHINAFLLRFGHHYPGKSKWIPAHIKWLKELELSDMYREILDEYLSQLEILSEKIERFKHRLEELSQKETYNEKIGQLRCIKGIDTTAAMTMHAETSDFDRFPTANAFASYCGLTPGEDSSGESYHRLGITKQGNSMIRTTMVEAAQVLVRGTIGKKGKKVKSKQKDQDVKVIDYADKAVVRLQKKYHRMIFRGVKRNIAITAVARELACFVWGIETGHIS

SEQ ID NO: 381257 - protein, 343 aa, unidentified
MQIRSVGIDLGKTTFHLVALGDNGKVLLKKKFTQRQLITCTANLQTTLIGLEACSGAHFLGRALRGQGHDVKLIPAQFVKPFVKSNKNDFLDAEAIAEAVGRQNMRFVPIKTDDQLDLQALHRVRDRLITRRTSVINQLRAFLLERGLVFAKSPAKLRERMPEILENAEEDLTPRMRDLLALLWNEWKDLEQQVVDLNHEVELIASSDAACLRLRQIPGIGPLVATAIVASIGNGAAFHKGREFAAWMGLVPKQYSTGGKAKLYGISKRGNRYLRKILIHGARAMVLRCKRERIPMGAWMTALETRAPRNVLIVAAANKLARIAWAVLSSGQDYRAVQEPVAA

SEQ ID NO: 381258 - protein, 314 aa, unidentified
MSKLRFVGLDVHADTIVVAVAEAGGEVRSLGVIPNRLESIRKMMGKLAPLETLKCCYEAGGTGYVLYWQLTQLGVACEVIAPSLIPTKAGDRVKTDRRDAEKLARCYRAGEVWVPDANHEALRDLVRAREAAKKDQLRHRHRLGKFLLRHGKRPSDAGKAWTQKYLNWIRIHVHFEQPALEATLKHYREEVDHIAERIAKLEQAIDEAVKQASPEMRAVIEALQALRGVAQTTAATVVAELGSLSRFARPSQLMGYSGLVSSEYTTGNRVQRGAIIDRPIFRHFSVVMRSSCSATAKSRLSRRRSLCWILGSSR

SEQ ID NO: 381259 - protein, 331 aa, unidentified
MFEFFIGCDISKATLDFSYRTNFEDAMYSGVFENNTKGFKAFLKHHKKKTKSPLSKWIVVFENTGVYSKQLKYWLISKGIASVEENPLKIKRFAPFKRGKSDPADSKSICEYAFEKRHKLIPDKAPDDIIEKLKHLYSRRSLLTKQRTAQVTAAKEKSICMGQDVKDLFKVQSEQIIEIFDQQLRQIQENIETLISIKDELKQNYELIKSVIGVGPITAGLIICRTDNFKSINCPRKFASYIGIAPFPNSSGIRKGKNKVSSKANKELKGVISNCAITAMNYDPFLKQYKHRLEQKNKSKGVIYNNLKNKVVQRIFCVVKRKSPYVKLNFQ

SEQ ID NO: 381260 - protein, 342 aa, unidentified
MDHFAGLDVSVKGTSVCIVDDTGKIVREVKVASGPDALLAVLTNPAYCFKRIGLEAGPLSQWLYSALAEVGLPVICVETRHMRAALKAQINKTDRNDARGIAQMMRAGLYRPVHVKTLRSQTIRMLLTHRKLLQSKAIAIDNDLRGTLRNFGLKVGMVGTVKFEARIKELVENLPDLAVLVEPLLIVRRALREQLGILHRRLLAIVRDDEVCRRLMTVPGVGPVVALTYRATVDVPARFRNSKAVGAVFGLTPAKYQSGEINRTGAISRCGDDMMRVMLYEAAQSMLRTNKWSWLKAWAMKIARHRGMKKAIVALARRLAVIMHRIWVNGTEFRWTREVAAA

SEQ ID NO: 381261 - protein, 356 aa, unidentified
MQLAKLNSKYYCGVDLHDKNMYLCITNKAGKILLHERIRNDFETFKRVTKNYLKQMSVGVESTHNYYWFYDACRKEGIQFYLGHAYYIRAIRGKKKKDDKIDAKTLSDLMRTNFFPIGYPYPEEKRAVRDLLRRRCKMVQLRAGLYNHIHLIHSQQGMTELRLSELKSKEARTKLLKRFNNEEIILALQSDLNLINQLDEQIKQIENRIKEKVVIDDEQSYELLQSYPGIGEIISLTILYEIERIERFPTAQKFSSYCRVVKTQRESNGKRTDNKNQKIGNPYLKWAISQAAIYAIKLSPEIKKYYNGLSRKRGKKKARAILRHRIAVAIYYTLKNKEPFNLEKFLMSPKSKEKAA

SEQ ID NO: 381262 - protein, 368 aa, unidentified
MPSTARSPKGDGITTIAQRQRPRVTVGVDTHLDVHVAHAKDALGRRLATVSIPTTPAGYRDLLAWARGLGEVDAWGVEGTGCYGAALARFLVAHGQVVLEVNRPDRQARRRRGKSDPVDAEAAARAVQAGEVTAVPKTSSGYVEMLRSLRVARATAVKARTQAINALKALVVTAPQNLREQLRGRSATMLVREAAALRPGPLDDPTAAAKLALRTLARRHQALSAEITTLDTELDRLTAKAAPRLVARFGIGPDSAGALLVAAGDNPDRLRSDAAFSMLCGSSPIQASSGKTIRHRLNRGGDRQANAALHRIVVVRLRWHQPTKDYMARRLTEGKSKNEIIRCLKRYVAREVFAVLNQMDQDALTPAA

SEQ ID NO: 381263 - protein, 342 aa, unidentified
MDEYDVRQFVGIDLHRQRSVIVRQSESGDQLSAVRIANDPAALRLELERAGTDPEVVLEATYGWYWAVDVLRDCGAQVHLAHPLGVKGFRYRRVKNDVRDAGDLADLLRMGRLPEAWIAPPQTRELRELVRYRAKLVAIRSGLKAQVHAVLAKAGVLIAVSDLFGVGGRQRLAKVPLGAAYAERVRSLLELIDVLDGHEARFAGLIAKRLCNHRGYQALQQVPGIGPVLAAVFVAEIGDVHRFTSPAHLCSWAGLTPKHRESDTVVHRGHITKQGSKLVRWAAVEAIQRYPTTSKIALDRTRIESRRGKNIAKIAAARKLLTLVYYGLRDGHIRALDRPRAA

SEQ ID NO: 381264 - protein, 370 aa, unidentified
MGNRSMFVGLDVHKETIDVSIAEGQRDGEVRHYGVIASDLEPLDKVVRALRAPDRQLHFVYEAGPCGFGIYRHLTKRGEHCVVVSPSMTPKRSGDRVKTDRRDSLMLARLHRAGELRAIYVPDDTDEAMRDLVRAREDAVGVGTQAKYRLTAFLLRQGRRYPGREGWTLPYRRWLADLSFPSAAQHISLQEYRDAIDETERRIDRLTEQLRQLAPTWRWAPVVAALQALRGVSFVTAVALVAELGDLTRFRHPRELMAYLGLVPSEHSSGPSVRRGGMTKAGNPHVRRLLAEAAWAYQGIPRIGRQHAYRQEGLPKVVCDIAWKAQLRLTARFKRLVARGKAKPKVATAIARELTGFIWAIAREVAPAPR

SEQ ID NO: 381265 - protein, 337 aa, unidentified
MAGQYVGIDLHRRRSVVVHMDETGETVSTVSLPNDPLALAAEVAQAEPGVDVVLEATYGWYWAADLLEECGATVHLAHPLGIKMFDHQRVKNDRRDAANLADLLRMGRLPEAWIAPRELRELRELVRYRAKLVALRSGLKAQVHSVLAKEGVAVPYSDLFGVAGNQLLDRLELASAYHQRLVSLRELIEVVDGQIARFETESQTRLADNPGYHVIQAICGVGPVLAGVFIAEIGDVTRFARPQQLCCWAGLTPRHRESDQVIRRGHITKQGSKLVRWAAVEAATRQRGATKIQTDYRRLAERRGKPIARVAAARKLLTLVYYGLRDGHIRALPRKAA

SEQ ID NO: 381266 - protein, 346 aa, unidentified
MEQISRVGMDTSKHFFQLHGVNAAEEVVLRKKLRRKEMVEFFQALAPTVIGIEACGSSHHWARLLRSFGHEVKLIAPQLVKPYVKRGKNDGADAEALCEAMSRPTMRFVPVKTAEQQAALMLIGLRERLIGNCTQLSNAIRGYAAEFGFTAAKGMAHLDPLLERIQADESLPLAARELFAVQSKEYAQLRGQINEVEAKLKAWHKSDECSQRLIKIPGVGPIGAVLLKMKTPAPEQFRTGRQFAAWIGLTPQDHSTAGKVRHGGITRAGDEALRAVLVAGATAVIQQAVRYGGRASPWLDALLKRKPPKLAAVALANKMARVAWKLMVTGNSYSTKSAPAALASPV

SEQ ID NO: 381267 - protein, 353 aa, unidentified
MTLYIGVDLHPHQQTAAWCDTRTGETETVDLKHDIAKVREFYAGMSEPAIVGIEASSKMAWFENMLFDIGHKLFVGNPVLIRKRATSRHKNDRRDAELILELLMRDEFPAIWRRPSESNQVIEIMGLRKSLVRQRIQCYNRLQALAHSIGMPKSHMKTAKAQSVLKAAEMGEADSMRREHLFLLIEQLNGQILRLEEWLKKKAEDNSSVKLLQTQMGVGYLTALVTVHTLGDVSRFKRAYKEVVSFAGLDPREMSSAGRVRFGSITKAGSSLLRHHLGQAVMTATRYDTKLKAFYKRLAKKKPNAVAKTAASRKLLVKLAIMLRDGITAQEFDQRGRTVGNARRIARSEMTAA

SEQ ID NO: 381268 - protein, 388 aa, unidentified
MHIVTDRPHAPTAIRTDLGAIFISLELSRSTWLITSLSPGGGEKMSKHTVRSGDVAGLWARFSQLKDKVQVRTGQAVPIIVIQEAGLDGFWIHRLLQDKRIESYVVDPASIATSRRRRRAKTDKIDGEALVRALLAYKRGEPRVCAMVRAPTPQEEDRRRICRERKTLTAERVEHVNRIKGLLFAQGITDYEPLSRKRRERLEELRTGDGRPLPEHLKAQIGRELDRLELTLQQIKSVETERDAMLSPSDEGTRAPGAMLQNLKGIGAEFAGVLWSEGLFRSFSNRRQVAAYAGLAPTPWRSGSVAHEQGVSKAGNPRLRTTMIQLAWLWVRHQPRSILTLWFHQRVALNGGRARKVLIVALARKLLIAFWKYVTTGVVLEGAETTAS

SEQ ID NO: 381269 - protein, 366 aa, unidentified
MKKTSTVRVNGNMIFKGHKLTIGLDLGDRWSFYCVLDEAGQSILEQKLPTTPEAMKQTFGKIPRSLIALETGTHSPWVSRLLSELGHEVIVAHAQKVQLITKSNRKDDRHDARTLARLARIDPALLGPVRHRSAQAQLHLTVIRARAELVSARTALVNAARGLVKSYGQRLPKCGTYQVSRELAAALSTELRDVLEPLFKEIESLNERVKEYDERMEKIAKEVYPEVSLLKQVKGVGTQIALTYVLTIEDPHRFAKSREVGCFLGLRPGRRNSGESEPQKGISKEGDRYLRTMMVQGAHYILGPFGEDSDLRRWGQKLAERGGKNAKKRAVVAVARKLAVLLHRLWVGGEVYEPLRNSQKALREVA

SEQ ID NO: 381270 - protein, 342 aa, unidentified
MSRYLGVDLHRNCFTVCTQLENGRQYLATLKLDALPRFVSKLRPDDEVAVEVTGNTRLFRDAVAPHVARVVVVNPSQFHVIRKSVKKTDEHDARALALFLSKDMLPEVRMKDQEHAELASLSQTRDTLVKSRTALKNKVNNLLSARGVNLSKESLASEKGLQKVLGMYFGSTVDVELRVLVDQIRSLSQSIDELEKAISEQGPKLPGYENLKSIKGIGDVGASVLLSVIGDVNDFDDEGKLAAYFGIVPRVSNSNETQHSGRITKRGSKLGRTVLIQCALIAKRYSPYLHQYYERIKGRRGTGKAIVALARKFLGIIYQTLKNDWVFEDFPNFILVDQETSA

SEQ ID NO: 381271 - protein, 504 aa, unidentified
MALLLALALSLLIVEVDMPRRKTSAESPTAAVPKTRKPPRTTTAALLETLQPNAAGIDVGADELWVCLPEGTEWPRPPNHPDELPARVRRFGTFTADLHALVALLRQARVDTVALESTGVYWIALYDLLQAEGVQVTLVDPRQTQRAPGRPKTDVKDCMWIQRLHSLGLLSAAFRPDEPIRVLRSYQRHRQSLVEDASRHIQRMQKALEQMNLKLTEVLSDITGMTGMAIIRAIVHGERDRHQLAKLRDGRCKHPEPTIALALEGTWQTEHLFALKQSLEIYDYYQQQISSCDQAIETHLKTLALPDKPAPLAARLHQRKRRGNELHFDARQRLYEMIGVDLTAIEGIEANTALVILSEVGTDMSRWASEKAFGAWLGLAPNPQKSGGKLKSAATRPGRNRAAQALRLAARSLHRSHSALGAFFRRIAARRGVPKAITATAYKLARIIYAMLKHGMAYASKGMDEYEADYRARQLRLLKKKAKELGFELHEQSAAATEVGPAAV

SEQ ID NO: 381272 - protein, 340 aa, unidentified
MPLYVGLDLHSNNNFLAVMNKQGKRVGHKKLANDPEVILEVLRSHRSKIVGVVVESTYNWYWLVDALMEAGYPVHLANPSAMQQYSGLKHADDQHDAFWLAEMLRLGILPEGYIYPKEERPIRDLLRKRRHLVRLRTSLIISLQNIISRNCGVSCKVNEVKRLKEDRVSPLLESNEDLALAGQASKETIDYLTRQIRRIEATIVKRIELRDSYRYLLTLWGVGKILALTIMLETGSIDRFAKVGNYVSYCRKVPSQWTSNEKAKGKGNKKNGNKYLAWAFSEAAELARRYHAEARAYYNRKMHKTNFMVAHSALAHKLARAAYYIMKDQVPFMPEKLFSR

SEQ ID NO: 381273 - protein, 373 aa, unidentified
MEWSGRAPAPPASEAGKGQSQGARHVTQAQFWDRRNRYDIGKNSFHVVGHDKRGAIMLRQKWSRGQVETRLANLPPCLIGMEACVGAHHLSRKLQMLGHDARLMPAKYVRPYSKGQKNDFRDAEAIAEAVQRPTMTFVATKTAEQLDLQALHRVRERLVSQRTGIINQIRAFLLERGVAVRQGLRFLRAELPRVLATPCDVLSPRMVRVIEDLAGDWRRLDERIENLSSEIEVLARRDVGCERLMSVPGIGPIISSAMVAAIGTGDAFTKGRDFAAWLGLVPKQTSTGDRTILGKISKRGNRYLRVLFVQAAWVVLIKPRSWDRHGLKPWLEAAKKRLHHNVLAIALANKLARIAWSVLAHGRTFEASKTQAA

SEQ ID NO: 381274 - protein, 320 aa, unidentified
MNLVTLGIDIAKASFQVALLRHGKLRHHTFPNTDAGFAQLQTWLAKHSGEPLHACMEATAAYGDQLALFLHQAGHAVSIVNPLRIKGYAQSQLQRNKTDKLDATVIARFCLTQKPEIWTPSAPEIRHLQALMRRLQALAEMRQQESNRLEQAEQQPVIGESLKKIIATLDAEMARLRQLIKDHIDRHPHLKRDHELLLSIPGIGETTATWLLSEVQVQTYGSARQLAAHAGLTPRHHESGRRVGGRTPLSKTGNARLRRAMYLPAVVAKRYNPLIKAFCERLSQRGKRPMEIIGAAMRKLLHIVYGVLKSGKAFDPSFVS

SEQ ID NO: 381275 - protein, 420 aa, unidentified
MKSFVPVAGVDVSKRFSDLCVLSPDNNVLLRQKIYHDMVSMKLAEKKLHEIELECGARPVVVMESTSHYHLILFQFFTDAGFEVVVVNPIQSGALKNINVRKVKNDRVDAYRIAMLYRLKVLRPSQIPTSSLRGLRLLTRQRSELKGDVARFKNRMTAYLDQIFPGYGEVFSDVGGSASRAVLHMCPTPEKLLNADGSLLAKAICEAGNKGPKFGAEKAAKLREAAGSAQVIGVRSASNASLIKNVLDIIEGLLAAIQRIEREIKELVTQDTRLDEDVKLLCSIPGIGFSSAVVIAAEMGDISLFRKPKQLAAYFGLDPGERQSGTFKGRKNKLSKRGSPQVRAALHMAAVSSVSRNRDGTYRNPVLAEYYERKCAEKPCKVARVAVMRKLSNIIYAVLRDRRPFELRTPQEHMALLAAA

SEQ ID NO: 381276 - protein, 336 aa, unidentified
MNIIGCDFHTRFQQIAMLDAKTGEMVEWRLEHETGEARAFYAGLPGPSRVGMEATGYSRWFERMLGEQGHELWVGDAAAIRAAMVRKQKTDSRDALHILNLLLTDRFPRIWIPSPQEQDVRQLLRHRYKLVCFRTSVRNQLHAQAMGEGSCRKRKLWTAKGRRELEGLVLGSWASRRRQELLELLDRLDSSIEELDRAVLQEAQSRPMAVRLMEHPGVGPVTALAFVLTIGPVGRFGRSKQVVSYVGLNSKESSSGGKQRLGSISKQGNSMLRFLLVEAAQTASRFDPELQRDYQRLKFRRGPGVAKVAIARKLAVRLYWKLREAAPSSAAGSHAG

SEQ ID NO: 381277 - protein, 425 aa, unidentified
MNYKQNEKINQVKESTLVVGIDIGSTTQYARAFDWRGIELGKVFTFSNSREGFEAFKAWMQHLQDKYRKSDVIVGIEPTGHYWFDLGAYLEDEGILLVMVNPYAVKQTKELDDNSQSKNDRKDPKVIAKLVTEGRYSAPYTPDGVYADLRIMVANRKRLIREMTQIKNRFARWFAIYFPEYTDVFGDYEAQSSMLLLKKVCTPEAIVELGAEKINQIWRDAKLRAVGMKRATTLCETAKRSIGLKKGSSAARYEMKLLLEDYEYKKAQLDAVMEEIEKLCRKIPESEQMLAIKGIGVITVAGFLAEVGDVRRFESPRQIQKLAGLSLRENSSGKHKGQTTISKRGRSKLRAVLFNAAIPLIAKNPEFKSLHEYSTTRANNPLKKKQSVIAISCKLIRVFYAILAKGVTYDAQKLISDIHRQPQVA

SEQ ID NO: 381278 - protein, 349 aa, unidentified
MTMTIVEAARGVTGGVDTHLDVHVVAALDPLGGLLGTEHFETNSAGYKALLAWLESFGDVSKIGIEGTGSYGSGLTRYLRRVGVEVIEVDRPNREERRRSGKSDPLDAVEAARAALSGRAKNLPKSRDGAVEAIRVLVVAKRSARQARVKALIQMRHLGFSAPEQLRCRLKGLSVSALVAEGKGLRPTRSPDPVTAATKASLSSLAHRISALDDELAELDERIEALLEATVPELLGIFGVGPDTAAALVMAAGDNPERLHSEAAFAHLCGVSPIPTGSGKKSGKVRAHEGGDRQANSALWRIVMVRIAHDPRTQIYFERRVKEGLTKNEVIRILKRYVAREVYRYLPRG

SEQ ID NO: 381279 - protein, 360 aa, unidentified
MAKARTLVGLDVHATKIVAAVLDAETGELQCFTLSGDVNEAAGLCAGLPRPVRATYEAGPTGYGLARELTRRGVQCVVAAPSKIPRAAGDRVKTDRRDAEHLVRLLLAGKLHAVRVPGPEEEALRDLVRAREAVRADLMRCRHRLSKLLLRHGIRFDDGQAWTQRHRDWLAEVALDWPAAQATMLDAQGAIDALAHRRDALDREIVALLPASPWAGQVARLRCLRGIDTLTAVGLCAEIGDFERFAKAEQLMSYVGLVPSEATTGQKRRLGAITKTGSGHARRLLVEAAWHYRPRPRIGKSLADRHDGQPAEAIAVAWSAQQRLHRTWTRLEQRAKRRTIIAVAVARELTGFCWAVTRIE

SEQ ID NO: 381280 - protein, 388 aa, unidentified
MNRILKIGMDVHSTNYTLCAMEPTIGSEDRIFGEIQVAPDYKEVVCFIESLKMKLGLNDDYSIECGYEAGCLGYTLYHQLTGAGIKCVILAPTTMLTQQGQRIKTDKRDAHLIAQCLCYGGYHPVYIPTAEDDAVKEYLRMRDDHKLALKKLKQQINAFTLRHGHKYAGTKWTIKHISWLSKLELDPMYRETLDEYMASYEEQEAKIERYDKRIEEISAEARYQEKAKKLGCFLGIRTHTALSLIVETGDFKRFAKGNTYAAFLGLAPGEHSSSTTVNRLGISKAGNAHLRCLLIEAAKGICKGAIGHKSKELRSRQSGQSADVIAYADKANTRLRSKYYRMIRHGKKKNVVVAAVARELACFIWGMMTGNISVAGSTDTSAPAVSQG

SEQ ID NO: 381281 - protein, 346 aa, unidentified
MIYVGIDLHRKRSQIAALDEQGTELLSRRVANDPEALKAILTELGGELKVALEATYGWEWLADLLESEGHELHLSHPLRTKAIAAARVKTDAVDARTLAHLLRTDLLPEAYVAPRELRDLRDLLRHRVVLTRMRSALKNRVHALIARQGIQNAHADLFGQAGRRFLAELSLPEPARRRLDSLLALVGDFDREIELAKREIDALARHDPRVDVLSRLRGIGPYTAMLVIAEVGEIERFRTARHLCAWAGLTPTVRSSDGHARLGHISRQGSPHIRWALVEAAQKAATGGGPLRAAFERIAKRRGRKIAKVAIARRMLTLCYYGLRDGEIRCLQAPGPASARPVKAAS

SEQ ID NO: 381282 - protein, 413 aa, unidentified
MEQLIERCCGLDVHKATVSACVRVTQRPGGEVKQGVRTFATTSPELLALREWLSEQRGTHVAMEATGVYWKPIYYMLENDFELLLVNPAHFKQVPGRKTDVADCAWLAQLLEHGLLRSSFVPPAPIRELRDLTRYRKSLTEKRTRAANRLHKVLQDAGIKLSSVATDMLGVSGRSMLMALVAGNTDPALLADLACGQLRKKLPELRQALTGRFGPHHRFMVSRLLADIDYVEEAGAELRRRIEELLAPFAAAVERLITIPGVQRRTAEVMVAEIGADMSRFPSAAHLSSWAGMCPGNHESAGKRRSGKTRRGNRWIRTALVEAGGAAGRTKRTALGARYRRLRGHLGHGRAVLAVGRNILEIAYHLLSEQTIYRELGIDYFDRYRAERLKRRSLAQLQRLGYQVTLTPLPTAA

SEQ ID NO: 381283 - protein, 457 aa, unidentified
MSGRKTRRIPKPVPPQHLPVIDPHAAAVDVGAAEHWVAVPPGADPQPVRRFGAYTADLIALADWLKACGVTSVALESTGVYWIPLFELLETRGFAVRVVDPRQASRLKGRPKSDVHDCQWLQRLHACGLLAAAFRPEDQIIVLRGYLRQRQMLLTCASHHIQHMQKALELMNLKLTEVVSDITGKTGLAIIQAILDGQRDPACRARLRDPRCRHDEATIAKALQGNWRAEHLFALRQAVELYEFYHRQIDACDRQIEAYLATLPARGDGAALPQRARRARTRHANAPAFDARAALARACGVDLTAIEGIESRTAMVLYSEIGSDMSRWPTEKHFCSWLGLCPHHRISGGKVLSSRIRPGPNRAAQALRLAARSLHASQSALGAYFRRLKSRLGTAQAIVATAHKLARLVYSMLKHGTAYVQQGLDAYEQQYRQRSAAALGRRARELGYELVPATHAS

SEQ ID NO: 381284 - protein, 343 aa, unidentified
MKKLYCGIDLHATSMQVCVIDCKLERLLERSVPNDLPTVLSLLKPFRKRLSILVESTFNWYWLVDGLQDSGYEVHLAHTLGLFRITRAKVKTDRRDAYRLAKILHDGEAPLAYIYPKETRPIRDLVRQRTRLVAARAHAYSSLRLRLYQHGLVRHSRDAAKAWDAQDMEALLKEPAARFLAGQDLDSIAFLSEQVAAIEERIRKAASGQEGYARLMQIPGLGKALSAVVLYETGDVSRFSSARHYSSYCRLVPGTADSGGHSKPGRGAKQGNPHLKAAFTQAAQCAVRHYPGLRNFYERQANRHPGRGSRLIATDILGHRLAQAAYHILKEGTDYDEKKLFAS

SEQ ID NO: 381285 - protein, 356 aa, unidentified
MTRLAGTIDGVIGVDTHRDTLAAAATDPVGGVVAQTSVTADAAGYRRLLEFARAQLPGRRCWAVEGTGSYGAGLAAFLHAHGERVVEVGRPKRPPRRTGAKSDALDALRAAREALAHDHPLAPRRRGDREALRVLLATRHSACVAKVSATNQLKALIVGAPEELRAELRGLGTKRQITRCAGLRGRPSRSLEHRMTVRALRSTAQRIQLLAAEAAGLGVELERLVAAVAPWLLELPGVGPISAAQVLVSWSYAGRLRSEAAFAALAGANPIPASSRQVTRHRLNRSGDRQLNRALHTIVVARLRDDPETRAYATRRRAEGKSARDIRRCLKRAVARQLFKLLERYDRRGLGLLLMA

SEQ ID NO: 381286 - protein, 431 aa, unidentified
MNRVVIGVDPHKLSVTIEARDNREILRAVGQFATDGRSYRQLLEVARQWPERIWAVEGANGIGRPLTQRLLASGERVLDVPAKLAARARVFDTGQGRKTDATDAHAIVMVALRDKGLREVSSDPELVVLRMLCDRRDELSRARVQALNRMHRLFLGLLPGGAPVKKSVRQYQAMLATVRPRDPAGKTRRRMAAEELEDLHRLDAKLKALKAELKAAVLATGSHLMDIHGIGPAGAARILADVGDVARFPDRHHFASWTGTAPIDASSGQHLRHRLSRAGNRRLNHVLYIAGIVQLRHDTAGRAYYRRKLAAGKTSMEAMRCLRRRLSDAVYRQLAADARSQDEASPGGHPGASLISSAAGLSPDTGTSDQPLPGPADLTLPPPRPAPQPMAPAAAATRRRARGVNVERPTGRTTLTPTSAAAPSTAPGPCP

SEQ ID NO: 381287 - protein, 345 aa, unidentified
MQPVVVTPSLEMTLTSSLYHIKGSQMYSIGFDIAKSSIAVHIPIHSLDLEIENNLKSLKALYAKLKKLYKKEIDKVVWVFESTGSYSSLIYRFCADKGIKIFMPNPKQARGFAKAIAQRNKSDKIDAQVLAQSIIIAKEDEIKIPSIDPLVEAFKELIGYYRLLSKQASQLMNHKESLVAKGANKTIIKSIDKQIKTLKLQQQSLIDTMLQTVKEDKLLSDKFDAMVSITGIGTLTALVLLHLFLRYPDANQRQIVSLAGLDPIIRESGSSIRGKTKISKAGDKIYRAALFMPAMVIIRHDARFKTYYERLKANGKHTTVAQVAVMRKLLIVAHSIYKSGEWYRG

SEQ ID NO: 381288 - protein, 352 aa, unidentified
MRTITTIGIDLAKKVFQVHGVDAEGKVVVARKLRRKEVLAFFAKLAPCLVGMEACGSAHYWAREIAKLGHTVKLMPPKYVKAYVKRGKTDAGDAAAICEAVTRPSMSFVPVKGLEQQGLSMLHSARSQLIGQRTQLVNAVRGHLSELGIIAERGLLGLGELAAIVRDESDQRLPAAARAALMILVRQIEAVSAGIAALDSTLRKENKASELGPRLKTIPSVGPVIASALRARVTNAKLFENGRHLSAWIGLVPENDSTGGKVRQNGLSKKCDRYLRSLLVNGAMAVVQQAQKRPDKHPWVTKLLGRMSAKHAAIAIANKTVRIAWAIMVHGGVYEAGHRAPQYRAEACAAAG

SEQ ID NO: 381289 - protein, 373 aa, unidentified
MDEDTIFVGLDVHSASISVAIAEPGRGEVRTLGMIPNTSDAVVKLIKRLGPAPRLSFCYEAGPCGYGLHRHLTRLGAACMVVAPSLVPQKPGERIKTDRRDALNLARSLRRGDLTAVWVPDEAHEALRDLSRARSDARIDLLRHRNQLSKFLLRQTILPTKRLRRWGKMHRAWLQTLHLPHANHQVVLQDYLQTVEHAENRLANLEAELALAADQSPLAPLIAALQAFRGIALTTAIILVAELGDLRRFPSPRHLMGYTGLVSTEDSSGDRRHRGQITKTGNAYVRHVLVEAAWQYTRPPKVWGALKKRQLGLPPATLAISWKAQQRLYRRFRRLTHRGKLRHVAVVAIARELAGFLWAAARAVPVPVQKVAA

SEQ ID NO: 381290 - protein, 466 aa, unidentified
MKNNYILYVGMDVSKGKADAAILKVSDRRSVKPKFLRKKLSFKFVKSEVASFLETVRSYSDVNCISICFALEVTGIYSTNVYDYIKANLYENESIKFLNTDFVNQWRIAHNIAKSDPLDAQTISTIIGTDLDVQYVNDNVFENKNGYQDLKALVHRHYQIKKIYSQEINRLIAQCDCLFPELQYVFEPKSAAFIAVLSSYPTTHDIINASRVEVFDVVYEATKHRCSMDKVDKLFELCQDTLVPDDISSYGKSIILDLVENIKNIKGQLKSIERYIKDIASLNPAYKLLLTITGCGPITAATVIAETGNIRRFKNADCFVSYSGTSPRNKRSGTSVETMGKISKKGSRYLRHAIYMIAEFARRHNPVLKHQFERIKNGNKKRHKLANIAIANKIARYIYSIMKNKSSFVILHDHIMRLPKETRDTFFNSISLDFPKNTRKQIYQYSDINGELHRFVYIKTDEMIPA

SEQ ID NO: 381291 - protein, 394 aa, unidentified
MRFAGIDIASETHVLAIVAADGTVAVKPTAFAEDDLGYQNALTLLGTPGEVLVSMEATGHYWKNLFAVLVAAGHAVALLNPLRTHRFAGVDLERTKTDAIDALAIARFAAQKRPPTTPLPDALAEELRELVQLRQRLMQDFGDRVRQLHRLVDLGFPEFTRYVRTLDSELATAILRDYPTAAAFRGVSARRLAAVRYDGRHQVGPNLARTLIDAARRSVGQHHSATYRLQIRYACDDLDTLRGRLRTLDRDLDGKLRQHEVGRLLTSIDGIGPQTAARVIATVGNPAHFRSGTALAAYVGTIPALKQSGKRQSLRGGHTPIGNAQLRAALWMPTLSAVRCNPWLRAHYQRLIARGKLPKVALLACMRKLLLVIYSVAKHGQPFAPRLQPPQAAT

SEQ ID NO: 381292 - protein, 343 aa, unidentified
MQAVTTIGLDIAKSVFQVHGIDAEGNVIVRRQLKRRHILTFFRKLPLCLVGIEACASSHHWSREIKALGHTVRLMPPAYVKPYVKRQKNDATDAEAICEAVRRPTMRFVETKTPEQQSCLTLHRTRHLFIRQQTAVINAIRAHLAEFGIVASVGRQGVDKLLDIVADARDTRLPEVARACLAALGNQLRMLKAQILNFDRMITAWHRSNETSKRLDALPGVGPALATALVASVADPKAFRSGRDFSAWVGLVPKQNSSGGKQKLGSISKQGDRYLRSLFTAGALAVIRYAKIHGTGHRPWLTALLARRPTKIAAIALANKIARMAWAMMARGERYREPVALAA

SEQ ID NO: 381293 - protein, 355 aa, unidentified
MESQKYIGMDVHKESISIAVRNDAGKIVMECVIETKANMILQFIDGLRGDLQVTFEEGTSAAWLYDLLKPHVTKLVVCDPRKNASMREGNQSDKIDARRLAELLRLNHLNPVYHGEHGLRSLKELVRSYLTITKDLGRVMSRVKAIYRRWAITCTGKQVYAPRHRDEWLRKITEPGVRRRAEFYYQQLDALRTVRREVRRDLLAESKRHKAWKRLCQIPSIGPIRAAVLLGTLQTPHRFRTKRQLWTYSGFGIETHSSADHRSVGGQLERVKKQISIRGLNRNCNHDLKNLFKGAAIVASSKPGPFQEFYTALLTKGMRPEMARLTLARKIATIVLIVWKRGVCFDAQHLKPQTA

SEQ ID NO: 381294 - protein, 340 aa, unidentified
MKDTVIGVDLAKNIFQVHGASRAGEVMFRKKLRRQQFMQFMATQPPALVVLEACGSAHYWARELAGAGHEVRLIAPQYVKPFVKRQKNDAADAEAIVIAARQPEMRFVEPRTEAQQARGVLFRARQRLVHQRTELVNALRAVLYEFGLVVPQGIAHIRHIEAMLDEAVLPEAVKQECLDLLRQISEQSVRIDVRTKKIRMLAQESENTCRLQSMPGVGPLTALAIEAFAPDLQSFRRGRDFAAWLGLVPRQFSSGGKERLGKISKAGQADIRRLLIMGAMTQVNWASRKAPAPGSWLARMLARKPRMLVAIALANRMARAIWAMATKQEDYRDPALSLAA

SEQ ID NO: 381295 - protein, 346 aa, unidentified
MAKITRVGVDLAKNVFHIHAVDENEKTVWQGKYSRSNWIKAVVKRTPQTATIGMEACGSAHHWARELIKLGYDVKLVAAQFVKPYVKTNKNDKVDAEAICETINRPNMRFVSVKAVEQQDLQAMHRIREELISQRTSKANQIRGLTAEYGIFAPVGIHHLKKHIPVWLEDAENSLTPLFRELLQMMYDDLTLLGESIDSITNKIRSSLNSNPAAQRLMEITGVGPLVCSALLIDLGDGSAFKKGRDFAASLGLVPRQHSTGGRDRLLGISKRGNGYLRKLLAHGARAAFRHVKDKTDPLSLWIKKLSLTKHANVAIIALANKIARISWALVVKNEKYDDSLAAYKA

SEQ ID NO: 381296 - protein, 380 aa, unidentified
MRQVCGLDVHKDSVFVCIINDEGVVFQKKFGVLTSELNQLVAILCEHHVTEVCMESTSIYWMPVWRVLEPYFDLKLVNPYFIKQLPGKKSDVKDAEWIATCLLKHLIKGSYVPNDCIQQLRQYDRRIFDLNKDIVYKLTKLDAALQRCNIRISNYVSTTNGKSYQNVVQLISEGMTDPEELIKVIHGRTVNRIGIEIIKGSLTGIITEVDIDIIRQLRDEVALANRHKDGCQSRMDELCGKWFPRQLANLKTIPGVRDRSATAIIAELGIDMSSFEDAAHLVSWCGLKPRNEESAGKIKSRKITHGNKYLRKTLIECAWAASKTQNCFYNKFSYHQTVVRRKNKMKVKVAIARKMLTAIWFILQYNVPYRDFTPDITPAG

SEQ ID NO: 381297 - protein, 349 aa, unidentified
MTMIGGLDVHRQQITFDYVDSDGLVRWGQVRPATRKTLRGWLAEHCPDGDAEFALEGCTGWRYVVEELRAAGVGAHLGDPAEIAVLRGPKKRAKTDRADARLLRSLLLEGRFPESWIPPAHVLEMRTLGRLYCTLMDERRAWQQRIHAQLFHQGCPPITALLSTAGRDALTRAELSAAGRQYVDTVLRRIDELSAEIEPLRAQLINFARRQRGCQALQARHYGVGWLCAVIIWAEIGDVRRFSSSDQLVRFAGLDITVYSSAGKCSPGHLSRQGSPELRWAAFEAAKCAARRGSPDYAYYHRVAARPGHGKDPTLAVERKILRRCYHTLRELGDAALALPVPEPEEVAA

SEQ ID NO: 381298 - protein, 414 aa, unidentified
MGSGYRLMVGIDWATEAHQVCVLDSQGRLLEQRRVEHRAEAIAAMIDRLIGLAGGDPAAIAVAIEVPRGAMVEALVERGLHVFAINPKQLDRFRDRHTVAGAKDDRRDAFVLADSLRTDLAAFRRIHLDDAWTIKIREMTRIEENLNTEITRLANQLRDLLLRFYPRLLRLCPAADQPWLLALLKLAPTPAKAQRLRRSSIERVLHQYRIRKWTADQVRSELRTAPLTVAPGVTEATSAHIALLVPRMELLIAQLKLCSKAVQSALDEKIAEEEQRREHRDVEILLSLPGVGRVVAATMLAEASQLLAQRNYHALRTLGGVAPVTRQSGKRLAVRRRYGCNHRLSIALYHWARTSSQCDPKAKHHYQTLRRLGHSHGRALRGVADRLLALLVAMLRDQTLYDSTRAHLPDPIAA

SEQ ID NO: 381299 - protein, 414 aa, unidentified
MGRNTIEFDQVIEKGCGIDVHKETAVVTVRGKGVKTETRTYSTFTSSLKKMKEWLRSIGITHIAMESTGVYWKPVFNILEDAFEILLVNARHLKNVPGRKTDKADSRWISKLLLGGLLRGSFVPPENIRELRDLSRYKTKLTGQIAAEKNRMQRILEDANIKLSSVVSDTSGVVATRLIDGLIEGRKDLDVLINECYHGKLMASKEELKEALTGRLTNHHSFMLKQIKSHIAYLEQQIALIDAEMDNKLKEYNEQLELLQTVPGVGKDGAKGILSEIGVSMDVFPDEQHISSWAGICPGNNESAGKKKSSRTRHGNKYLKSLLVELAWGATRTKGTYYRAKYESMVGRRGKKRALLAIGHKILVDSYHIIKNKVPYQELGANYLLERKKKNKIDYLKRQLKELGYNVEKIEKAA

SEQ ID NO: 381300 - protein, 413 aa, unidentified
MDLLHDRCAGLDVSKKDVKACVRSPGARANQRHTEVRTFATTTNALLQLRDWLVEQRVTLIAMEATGDYWRPPFYVLEDDLNVILVNPAHAKGLPGRKSDVTDSMWLAQLAECGLLKASFVPPTPIRQLRDLTRYRTTLSREHTREAARLEKELEDAGIKISSVATDILGVSGRAMLEALIAGERDPQVLAQMAKGRMRTKITPLTQALIGRFGQHHAFLCRMHLDRLDALDEDIAKLSTRIEAALEPFRDTLARLDTIPGVGRDVAEVIIAETGADMSRFPTPGHLASWAGVAPGLNQSGERSKPAHTRHGDHWLTGALGVAAMAANRTKDTTFLGARYRRLARRIGKLKALVAIEHSILTAVWHVLSENTDYHDLGGDYHAKRDPQRALRRITRDANRLGYTVRFDPIQAA

SEQ ID NO: 381301 - protein, 339 aa, unidentified
MDSHKDTLAVSDVDQAGRQQQTQTFANTRNGHRRLLVWLQGQPGVVRVGIEGAGGYGRAVAMCLVQAGLVVVEVTPSLTVRERRRLRQRGKADPTDALAIARVVAREQDLPPVRRQDLTEDLRLLVDYREQLLGERTRIANRVHADLVALRPGYQRQLPELRSQRAAGLVRRLLGGQVSVRAELVRRRLDQLDRLDAEIRALKARIGDLVQATGTSLVQVHGVGPLVAARILGEVGDVRRFADRHKFAAANGTAPIPASSGRTQRHRLNRGGNRRLNRALYTVAITQARSDHPGRAYLARKQRQGKTRREALRCLKRRISDAIYRQLLADLQPDPSPAP

SEQ ID NO: 381302 - protein, 369 aa, unidentified
MSDTVTHYIGLDVHKDSISIAAAKANSRAQPTFIGTTQYSPKQIRKALCKVGAPSEMRLCHEAGPCGYGLARELEALGIACDVIAPSRVARQPADRIKTDRRDAVLLARLHRAGELTPVIIPDPNDEAMRDLVRAREDAVNARRRARQQLAAFLLRHGQRYTGGRAWTKRYQLYLSRLKFDNPIHHIVFGEARLALTATDNRVERANQALSDHLENWRWIDTVRGLMTLRGVDLIVATTLVAELGDFRRFARPSALMSYVGLVPSEHSSGNLQRRGQITKTGNQHARRILIECAWNYRFPARVGETIQPRLVGQPQDIIDIVWKAQLRLTKRFRKLKARDVHHNKVCTAVARELLGFVWDIGNRTSPSQ

SEQ ID NO: 381303 - protein, 338 aa, unidentified
METYAGIDLHSSNNFIGVINEKDKILYGKRHANRLDDVLRALDPFRDSLQGVVVESTFNWYWLVDGLQEQGYPVHLANPSAIQQYEGLKHTDDPWDSVWLAHMYRLGILPEGYIYPKEHRAVRDLLRRRLLFVRHSTAHILSLQSMISRNLGYKMSNNEIKKLKPADLESLFDCSNLVFMANNSLSAIEFLKKIIKDIEKKVKSQVKMRKEFEMLLTIPGVGNILGLTIMLEVGDIVRFPKVGDYSSYCRCVGSTRLSNGKKKGENNKKNGNKYLAWAYVEAAQFCRRYCVKAQSFYQSKEAKTKPVVAIKALSNKLSKASYYIMRDQVAFDEDKLFS

SEQ ID NO: 381304 - protein, 344 aa, unidentified
MDHFAGLDVSVKETSICIVDDTGRIVREVKVGSEPEALLKVLGNPAYRFKRIGLEAGPLSQWLFSALAEAGLPVVCVETRHMRAVLKAQINKTDRNDARGIAQMMRVGLYRPVHVKTLRSQKLRMLLTHRKLLQSKAIAIDNDLRGTLRNFGLKVGMVGTVRFEARIRELVEDLPDLAALIEPLLIVRRTLREQVVILHRRLLAIVRDDEVCRRLMTIPGVGPVVSLTYRATVDVPARFRKSKSVGAVFGLTCSRYQSGEVDWSGEISRCGDEMMRTMLYEAAQSMMHSKKWCWLKAWAMQIARRRGMKKAIVALARRLAVIMHRIWVDGTEFRWTREQAAAAA

SEQ ID NO: 381305 - protein, 327 aa, unidentified
MKKNPAPVYVGMDVAKATLQVHLNGHQFEFKNDSAGHARLSKQLAKLTLPHVVCEATGGYERPVVEACHKANILISVLNPAHTLAASQAQGKRAKTDPCDAAALTDYGQRFQPEPTAPVPPAEREIAQLTLWLKQLIDHRAVVRTQAEHQANSFVGQRHEELLAHYQSQIETVEKEIKKRVQAQARFQQRVDCLTQIEGVGFRTALLTLVFLPELGLMNRGGTAALAGLAPWTRESGTMKGKRCIGGGRAQVRPVLYMAALSASRCNPVLAPFYQNLIKRGKPAKVALTAVMRKLVIHMNGELKKLAAKPVNEKTGKSNKTTKSLAK

SEQ ID NO: 381306 - protein, 352 aa, unidentified
MIIIGVDFHPEFQQIASVDTDTGEFQEKRLAHPEEAEKFYRALTGPKVRVGMEASGHARWFERLLAELHYELWIGDAAEIRAKRVRKQKTDRQDAQLILQLLLEERFPQIWVPSWENRDLRQLLWHRHRMVQARTRIMNQLQAVALNEGLRCKKRLWRERGREQLEAFRLAPWASRRRRDLLELLDRLNPIITELTHAIEQEVEQCPAAQRLMTHPGVGPLTALAFVLIIGKADRFQCGKQVASYLGLVPLEDSSGNRRRLGHITKQGSSMLRFLLVEAAQVTVRSLPEWRSKYFHLAMRRGRKIAKIAMARRLAVRLYWMWRKGWDYEQLTKFGSHAGQPGDRHGVQSNTE

SEQ ID NO: 381307 - protein, 349 aa, unidentified
MERIMAIDLGKFKSVVCNYLAPSGAHDFVTIKTCPQVLHDLVVEQEPEVVVVEVCGIIGWVYDLVRSLGVEIKVANTNDERWRKRRIKRKTDRKDALKLARMTAMNELPEVYIPELMVREKRALINYRQSVSGRVTQVKNSIRSILERQALSLPAGKNGWSQKNVAYLRSLARSGKDVGVDQMWRFELATELALLENLTDALAGVVEKLDQLNAKDRRVKLLQTVPGVGPRLAEAVAAYIDDPHRFKNGKQVGCYFGLTPRQYQSGTMDRHGRISKDGNGLVRSLLVEVCWLAQRWNPWVRQCYEQTARGSKTRKKIAIVAVGRRLLVRMWAMLRDGTAWRMPELKSTV

SEQ ID NO: 381308 - protein, 340 aa, unidentified
MKLHVLGIDLGKTVFHLVGLDSTGRVVIRKRCSRRQLLVFTGNLEVKLIGMEACSGAHFLGRALREQGHEVRLMPAQYVKPYVQTNKSDYLDAEAIAEAVQRPRMRFVPIKTEEQLDLQALHRVRERWVMRRTAVVNQIRSLLLERGLTVPKGRSHLDEQLPRILEDAELNLSDSFRVLLAQLKLELEQLAARIEEMDRVIQETARENEACQRLTEIPGVGPVTATALIAAVGNGSTFEKGRKLSAWMGIVPGEYTTGGKQKLLGISKRGNKYLRRLFIQGARSVLQQRHKQAPDLSEWLAQLLARTHQNVVVVALANKLVRMSWAVFERYRAPVLAVTT

SEQ ID NO: 381309 - protein, 354 aa, unidentified
MTSLTAPGAVVIGVDTHKHVHVAVAITTLGERLGSIEVPTTAAGLDELTAWARTHGEVTAWGIEGTGMWGKGLNWAIAATGARVVEVNRPNRQARRALGGKNDVIDAEAAARSVLSGFATATPKSGVGTVEAIRVTRSVRASAVKAKTAAMNELRAHIVTAPAALRDELETLTSMALIKRCAGFRPGPADHLKTVLRLLARRWQHLNVEARDLERTLVELVTAAAPGLLDQFGVGPDSAAALLITAGDNPERITTPAKFAALCGTNPIPASSGMTDRHRLNRGGDRQANAALYRIIIVRLRYDPETQAYMAARLNANGSNKKHLIRCLKRALTRRLYREIIAASVHPEPTALAA

SEQ ID NO: 381310 - protein, 335 aa, unidentified
MQIYGIDLAKEKFDVSFFDLTSKKVSNQPSHKVVKNNLKSIGRFLETLPSDAVLVAEHTGVYGDTLLKCCMDSNVKIAFVGGYVIHRYRATPDRAKTDVLDCALLREFGERYPDKLKYKTFPEEALYELRQLARHREMLVEQRKQLITADKSEDCRPVRSLAVKRSMDRIKEMLDTEIAETEKEMLKVINGHDSIHHNYELVKSVDGVGLITAVELLVKTENFTKITTARQYSAYAGTAPYEKSSGKMDKGAHISKIGNRRSKTLLYICAESARLHNKEIKLYYERRTLIDKKPRHYVLNAIANKLLRIIFTLVEKGEYYDANFIRQDPRVVKYN

SEQ ID NO: 381311 - protein, 340 aa, unidentified
MSEVTTIGLDLAKHVFQVHGVDANGAVVLRKQLRRGQVVAFFAALPRCLIGLEACATAHYWARELQAVGHEVRLMPAQYVKAYVKRNKNDAADAEAICEAVRRPSMRFVAIKTAEQQAALLLHRGRERLVRQRTTLVNALRAHLAEFGVIAPHGLRHVARLVAIVRDDSDTRLPALARQVLEVLAAQLEQLTTAVTAIEKELMAWHRNNPVSQRLASIPGIGPIIATALAATVVEPIGFKSGREFAAWLGLVPRQHSTGGKARLGGISKRGNRYLRRLLINGASANLLRSRATNANPWVIGLRRRRPSLVVAVALANKTARIAWAVMRRAQSYRHRSAAA

SEQ ID NO: 381312 - protein, 459 aa, unidentified
MKRDKRKAKRLPSQLAAVNLHAAGIDIGAQEHWVAVPADRDLQPVRRFGACTADLEAIADWLQQCGVTTVAMESTCVYWIALFELLEARGFAVVLTDAREVQRAPGRPKSDVQDCQWLQRLHTYGLLAAAFRPTEQVCVLRSYLRQRAMLVTYASQHIQHMQKALTQMNIKLQHVISDVTGVTGMTILKAILAGERDPQKLAHFRDRHCQHSEAEIARALQGNWRTEHLFALQQAVELYEFYHQQITTCDHQIEAHLQTFVDKSEGKELPHRPRKRKRRATEPRFEARTPLFRLSGVDLTAIEGIDENTALVLLSEIGTDMSRWPTEKHFASWLGLCPHHKISGGKVLSRKVRPSANRAATALRLAAQCLHHSHSALGAFFRRLKARLGAPKAITATAHKLARLVYRLLKYGEDYVAQGMEEYEQAYRARTLQNLVRKAKPLGYKLLPTSDAASQGAPA

SEQ ID NO: 381313 - protein, 393 aa, unidentified
MVCVGIDVAKDKHDCFIISSEGEILADVFTIPNNAEGFDTLLQAIRRSTRPEDKIKVGLEATGHYSYNILGFLLDKGLPTYVINPLHTNLYRKSLSLRKTKTDRVDARTIAAMLMSDVDLKSYTDTVYHNEELKSLTRYRFDKVRERAKLKQSVSRLVTILFPELEKLVSSLHSASVYALLSEFPGAKQISSTHMTHLKAVLKNASQGRYGQEMAETIRNAARSSVGSVMPAKSLELQHTIRLIRELDAEIEDIETAIQAIVDEMQSPITTIPGMGVRMGAVILAEIGDFSRFDSPDKILAYAGMSPSTYQSGQLSLSGAYSHMEKRGSRYLRYALYNATKHVCHWDPTFAAYLAKKRAEGKHYNVALSHAAKKLVRLIFAMEKSQRPYCAAA

SEQ ID NO: 381314 - protein, 318 aa, unidentified
MENISQWVGIDISKATLDVYLRPLGKAMKVANTKEDISKLVETLKSYTVNLIVLEATGGLETELVIQLQEADLPVALINPRQGRDFAKATGKLAKTDAIDAQILAHFGEAMQPQILAVESEESRQLGDLISRRRQLVEMRTAEKNRRERARGKALVDIEAHLEYLDNCLEKLNQEIEELTQANQQWLEKVNLLKTVLGIGQVISTTLVSDLPELGQLTAKQISRLVGVAPINHDSGQHKGKRMIQGGRAQIRATLYMGAVVAMRHNPVIKTFYERLVGRGKSKKLALTACVRKILVILNAMVRQNQPWQLADNLPPCS

SEQ ID NO: 381315 - protein, 350 aa, unidentified
MIVIGADTHKQTHTCAAARTGTGELVGELTAAARKPGFRELLDWGRSLDGQRSWALEDCRHVSGSFERFLIAHGERVVRVPPKLMGASRKGERAAGKSDAIDALAVARAALREGPGTLPAAHLDERALEVKLLLDHREDLVRSRSEDQQRLRWHLHDLWPELELPAGCLDRIVWLDRVARKLARAEQGARVRVARELVRAIRERTRRASELEREITALVRAQAPALLVLPGCGALTAAKLLAETAGVQRFQTDAKLARLAGAAPVPASSGNRQRHRLDRRGNRQLNCALHRMAVTQGRLHPPARDFLARKQAEGKSHGSSADPEAPPRASGLAGSSCRRDSSHARLLHGC

SEQ ID NO: 381316 - protein, 446 aa, unidentified
MDVVFTRCAGLDVHKKSITACRMLPDPTGREAEGIMELRTFGTMTRDLLSLADWLTEANITHVAMESTGEYWKPVYNLLEDTFTVFLVNAAHVKNVPDRKTDKADARWLAKLMSFGLLQASFIPPKGQRDLRDLTRYRTKLVQERVREVNRVQGVLERANIKLASVIADIMGISGRAMLEALIAGRVEPATMAALAKRRMRSKIPLLEHALTGIVHDHHRQLLAMQLAHIDFLDEQIEALNRAIEVSLRALSVDAPSGEGRAPLPVISTVSPPVASPTLTFTRAVELLDTIPGIDQRGAEVIVAEIGIDMSRFETAPRLAAWAGVAPGNDESAGKQRSGKTRKGNRPLRAILTQLAHAAVRTKGTYLSALYQRLAVRRGKNRAIVAVAHAIMCSVFHMLSRQESYRELGANYFDERRRHYTVDRLARRIEHLGYRVHLEPVTTSVA

SEQ ID NO: 381317 - protein, 453 aa, unidentified
MTKAKTGDHPDLKMVNPNAAAIDIGSTMHMAAVNPDADEMPVRAFGTFTQDLHDLAVWFRSCGVTTVAMESTGVYWIPAFEILEAHGFEVILVNARYAKNVPGRKTDVSDASWLRQLHSYGLLRGSFRPKAEIATLRAYMRQRERLTEYAAAHIQHMQKALMEMNLQLHHVVSDITGATGMRIIRAIVGGERDPEALAAFRDVRCKSSIDTIKAALVGNDREEHVFALTQSLELYDFYKAQIEACDRKLEAAVKSLTVRADDDLTPLPKARIRGKQHNAPSFDVRAALYGVLGTDLTQIHGLGPSLALKLVAECGTDLRAWKSARHFTSWLCLAPGNKISGGKLLSSRTRRSSSRAAALLRLAAVTIGRSDTALGAFYRRLSARIGKQKAVTATARKIAVLFYNAIRHGMTYQDQGAAAYDQRHRQRVLSNLQRRAKTMGYALAPIPEERAVS

SEQ ID NO: 381318 - protein, 344 aa, unidentified
MLHVSTIGLDIAKHVFHVHGADGKGRAVFSKRISRGKLLDFFAAQPSCTVALEACGGAHHWARQLAQLGHEVRLIPPAYVKPFVKRQKNDAIDAEAICEAAQRPSMRFVAVKSEEQQAAGLVFRTRDLLVRQRTQLINAIRGHLTEYGWIAPKGPSHVATLADMIEEEAMASSLPEAARPMFRVMLDLLAELNGKIADLDKEIARRAREDEVSRRLMTIPGIGPISATAIAALAPPIETFVKGRDFAAWLGLTPLQKSTGGKQKLGATSKMGERTLRRLLIIGSSAVVQQASKRGAPKGSWLEQMLTRKPRMLVTVALANKMARIVWALLVKRENYRAPVSAKA

SEQ ID NO: 381319 - protein, 336 aa, unidentified
MDMVCATVGIDVSKKKLDLALLVNGKLKTKVLANSSEGYQALLDWLRKSAVPLSALHICMEATGVYSEPVALALHEAGLVVSVVNPSCIKGFGHSENIRNKNDEIDAGLIARYCAAMKPPQWTPAPLEQRQLRAWSQRIQTLKDIRQQEENRLEALTISGIEDVAQHVKQLIAWLSAEIEKLERDISDHIDRHPGLKRDADLLASIPGIGMTTVARILGQLGDIRRFDSAKAFAAFLGVTPRQRCSGSSIKGRTVISRTGSSSIRAALYMPSLVARRHNPLLHQFADRLAINGMAKKAVIGAVMHKLAHLIYGVIHNNKPFDPNYLAKGLAIQDGI

SEQ ID NO: 381320 - protein, 482 aa, unidentified
MATRKRSTYERLQPGPLNRQQRRELGRKIAAADPGLAVVHPDAAGIDIGNASHFVAIPPDREPVPIREFGAWTAALQEMAQWLTAHGIRTVALQATGVYWIAVQDVLEQAGLEVYLVNARGTKTLPGRKSDVQECEWLRKLHTYGLLRNSFRPPAEIRAIRTLWRQRDRWVQEAARAIQHMQKALTTRTVQLANTISDLSGVTGQAILRAIVAGTRDPGALAQLRDCRIAASEAELAASLQGTWREDVLFELRQTLEAYDFYQAQLAACERELAKYTAAVATRELPPPPPPPAGAAPLSPGKAARRATSRRKPQPGFDLAAELHRTMGVDLTRIDGINVLTTQVVFSEIGPDFSAFPSENHFASWLTLAPRHDISGGKVLRHVPAAGRNRVANALRMAAQSLVRSDSYLGARYRRLRARLDGPVAVKAMARYLACLIYRLVTKGQAYVDRGAAHYERKRQERERQALERRASNLGLKLVPAA

SEQ ID NO: 381321 - protein, 370 aa, unidentified
MGNRSMFVGLDVHKETIDVSIAEGHRGGEVRHYGVIASDLEPLDKVVRALRAPDRRLHFVYEAGPCGFGIYRHLTTHGEDCVVVSPSMIPKRSGERVKTDRRDSQMLARLHRAGELRAIYVPDDADEAMRDLVRAREDAVVVGTQAKYRLKAFLLRQGRRYPGREGWTLPYRRWLTDLSFPTAPQHITLQEYRDTIDETERRLERVTEQLRQLAPTWRWAPMVAALQALRGVSFITAVALVAELGDLTRFGHPRELMAYLGLVPSEYSSGPSVRRGAITKAGNPHARRLLAEAAWAYQGIPRIGRQHAYRQEALPKVVCDIAWKAQLRLTTRFRRLVARGKAKPKVATAIARELTGFIWAIAQEVSPASQ

SEQ ID NO: 381322 - protein, 412 aa, unidentified
MEVMYERCCGLDVHQRSVVACVVVPGTRGRPEKTIRTFGTTTDELQSLADWLVSQGVTHAAMESTGVLWKPVFNVLAERLEVLVVNARHVKAVPGRKTDVADSEWLADLLQHGLLRASFIPDRAQRDLRDLTRTRTSLIDERSRTVRRLQKVLEDANIKLSSVATDIMGVSGRAILAALVDGTTDSATLADLARGKLRTKLPALKRALSGRLTDHHRLLLATHLAHVDFLDEAIQHLSQTIAERLAPVEADLQRLETIPGVKRRTVEVLAAETGLDMTRFPSAGHLASWAGVCPGNYESAGKHKGGKTRRGSKWLRRALVEAGRAAARTRSSYFHAQYRRLAARRGPNKAALAAGHTILTTVYHLLTRQDTYRDISPVYQEERLRARAQRRAVEQLQQLGYQVALTPLNPAA

SEQ ID NO: 381323 - protein, 347 aa, unidentified
MRFYTKQHKFYCGIDLHAKTMYLCILNQEGKIVLHRDIKTDPNVFMKTIASYREDIVVAVECIFTWYWIADLCDRENIPFVLGHALYMKAIHGGKAKNDKIDSHKISVLLRGGMIPMAYVYPAEMRSTRDLLRRRMHLVHKRSELLAHVQNTTYQYNLPEIGKRIDRKSNRKGVADLFPDLSVRKSMELDLALLDHYDPLLCRLEHELSLIAKVHDADSYFRLRSVPGIGRILGLVILYEIHDINRFPRVQDFVSYCRLVKSAKESGGKRMGTSGKKIGNVHLKWAFSEAAVLFLRRNPEAVKYREKLAKKHGKAKSLTILAHKLARAVYYILKRKEVFHPKVFFAK

SEQ ID NO: 381324 - protein, 363 aa, unidentified
MNTIYIGVDFHARKQTVCYLTTEGEIQLHELKHQNKEELRAFYAGFSGQVVVGLEASGYSPWFERLLEELGCEVWLGHATEVRRRARWRHKNDRRDAELILDLMLHDEFPRLYLPPLKSRDVLRMLRYRQKLVKIRTMGKNSLQALALQAGLAKGPRLFTKAGLQELATAEMSPAMQWQRQQWLQLLAPLNQRLLETMVWLKQQSQDDPRVSRLRTHPGIGLLTSLCLVHSLEPVSRFRNQRKVVAYAGLEPLERSSAERVRFLGISKAGSRIMRFLLVEAAQVAVRKDEELKRFYQRLAERRGGPKAKVAAARKLLIRAYIMLRDEIDYAEFRRRAVAARLARRITGPSVPGFVIGQLASFE

SEQ ID NO: 381325 - protein, 343 aa, unidentified
MKNGLKLLGIDIGKNSFHLIGHDAGGHQVLRKCFNRNRLLQFAAQIEPCTIATIAMESCGGSHWLARKLASLGHRVKLIAPQHVKPYVTGNKNDFIDAEAICEAASRPRTHYVAVKTVEQQVLSVQHRLRESLVCHRTEAINRVHGFLLEFGIALPATKAAIAKVPELIDDSRSDLPLQFKRVMEHLLEDIHRLDTEIKACDAQIKQQLAQDDAGTRLMTIPGIGPITASAFVADLGDASNFRASRDLSAFLGLVPRQFSTGGRPVLLGISKRGDRHLRTLLVQGSRALMIRIERRDDALGQWVRDLLARKHPNKVACALANKLARIVWAVLRRGSTYNASMI

SEQ ID NO: 381326 - protein, 342 aa, unidentified
MEHYAGIDVSLECSSVCVVDAKGKIVREAKVASEPEALIAWFRSLGFGLERIGLEAGPLSQWLFAKMKAAGLAVELLETRHVRDAFKAMPVKSDRNDARGIAQLMRLGWFRPVHCKSLSAQETRATLTARKLVQSKLLDVENSLRGILRGFGLKVGKAPGRKFAGRINELVAGHPHLQRIADALLAVCDVLRKEFAAFEKQTRAMVRSDQQARLLTSVPAVGPIVALTYASAIDDPHRFKSSKQVGAHFGLTPKKHQSGETDYTGRISKLGDSAVRTALYEAAHIMLIKPVKGCTQLKSWAMRIARRAGMSKAKVALARRLAVIMHRMLVDQTPFNAAAAAA

SEQ ID NO: 381327 - protein, 391 aa, unidentified
MSMYFIGIDISKYKHDCCIISAADQKVVSKVTIKNNKAGFNELLTIIHSLANPADIRIGFESTAHYALNLELFLENAHHSFMEVNPVLIKEYKKSTTLRRTKTDSVDCESIARWLMTVEYKPHSKGFYHAYSLKSLTRLRDKLIRQRSFYLIKITNVLDHTFPEFKPFFNERLSKTALYLLENYGSAEKMARMNSASYEKLRSLSRGKFSPQQFLRLKELAANTVGVNNSIFDVELNSLLSLYKSLVKEINTIEKEINKLIEEVHPHYMSVPGIGPLSAAVIYSEYGDISNFTNPGQMLAFAGIEPGINESGTESHGGKMVKRGSSQLRYTLINCCLPLIRFDMTFATYYAKKRGEGKPHRVAITHVAKKLIRVIYALERQDIDFNAQKLR

SEQ ID NO: 381328 - protein, 400 aa, unidentified
MNAVGIDVSKGKSMIAIMRPFGEVVVSPFEVRHTDSELSELAGLLKSLDGETRVVMEYTGNYHAPVAHALHEAGIYVSVVNPMLIHDYGNNRLRRAKTDKKDAVKLACYALDRWLSLPEYLPEEGLMLKSCYRQYEQYVKLKTMLRNNLISLLDLSFPGVNSLFRSPPKADGTEKWVEFIAAFWHCECVSGLSEKVFTQRYEKWCRKNGYNFSEAKAAEIYAAACGHIGVMPKTDTAKLLVEQAVSQLRATAAAIATLQKEMQTLAASLPEYTVVMRMFGVGPVLGPQLMAEIGDVRRFHSKKALVAYAGLDAPPYQSGTVDVRSRSISKRGSSSLRRTLFLVMSVLLQNAPEDEPVYQFMDKKRHEGKPYKVYMMASANKFLRMYYAQVKAYLNALEVA

SEQ ID NO: 381329 - protein, 355 aa, unidentified
MVGLKYIGLDVHQDTVSAAVLDQQGKLMIQSVFATRAGAILDFLHGIKGTLQVTFEEGVHSAWLYDLLARRVARVLVCDPRKNKLLKSGNKGDLIDARKLAELLRNNSLSPVYHGGMSALEVQHRTRSYTMLTEDTTRVMNRLKAVFRSQAIHCHGRKLFRLDLRESHLTQLSTPGLRQRAESLYRELDALHPLRLRAKREMLAECRKHPAMKWLQSVPFLGKVRTAVLIGRVQTPHRFRTKRQFWSYCGLALETHDSAEYRVVQGQVQRKSRPAQVRGLNWNHNHELKGLFKSAATMAAFREGVFREYYSGLLAKGMRPEMARLTLARKIAAITLKIWKEGETFNAEHIKPQAA

SEQ ID NO: 381330 - protein, 415 aa, unidentified
MKGIEDTSQIKRYVALDIHKEYVLAGGQNAKQEWLMPPRQIKMAKFREWASANLQAGDAVVIETTTNVWDIYDIVAPLTTRTVVAHAGAVRQIAEARVKTDKEDVKRLIRLLIADIVPEVWIPPTEVRELRGMISYRNRLVKMGTMVRNRLQSLLHRHNILLPKGKLLDATWWQEQKMSTLEKMQIQQELAMLEELDRHKREVDAELGRQCLREPWGRQAVRLLQLPGFGVVMTMIVLSAIGDIHRFESTKYLVGYAGLGAGIHESGKEHIEKRITKSGRKELRWALVEAAWQAIRISPYWKDQYEKYLRRMRRPNQAIVVIARKLLVAVWQVLTKEETDVHASEEDLAYKMLVLAWDLDEDVRMGLTYKQFAKYALMKLGVETDITRFVRKNVPRRVAPREEVLARMEELGLTC

SEQ ID NO: 381331 - protein, 345 aa, unidentified
MELHTIGIDLGKTVFHLVGLNQRGEVMVRKKFSRKQLLHFTANLQVKLIGMEACGGSHFLGRALREQGHEVRLMPAQYVKPYVKTNKSDYIDAEAIAEAVERPKMRFVPIKSDDQLDLQSLHRVRERWVMRRTAVINQIRGLLLERGITLRQGRRHVDEALPGILEDASAKLSGAVRLLLAQLKLELDHLQMRIDEADAVIQKIAGENEACRRLVVIPGIGPVTATAIIAAIGNGAAFKKGRGFSAWLGIVPGEYTTGGKQKLLGISKRGNSYLRRLLVQGARAVLQQRAKQSSGLSAWLAQLTTRVHSNVAAVALANKLARMAWAVLAKNEPYRPPMLAAAATT

SEQ ID NO: 381332 - protein, 448 aa, unidentified
MSKPQVIDDEEHERVYERVAAAGVAKKDGMVCVRGPHPSRPGQRQSTVWTVTATMNQVRALAGQLAGLGVQKVTVESTSDYWRIWFYVLEEAGLDVQLVSATQVRQISGRPKTDRLDAMWLARLTEKGLLRPSFVPPAEIRALRGYTRARTHLTQDRTRCFERLEKLLEDALIKVSSVASSLTTLSARDMIAALIAGERDPVVLAGLARSRMKAKHVALAQALDGMFAEQHGQIAQILLDQIAFCDAGIARLTMLISEQLATVRAAWGVDADGTAGPGAGTGPGAPVLNAVARLDQVTGLSAELAGSILSETGLDMTKFPTAGHIVSWTGLCGRTHQSGPRTRHDKGTGNSYLRGYLGQAAIAAAGTNTFLGERYRRIARRRGKAKAQVAVARSILVIIWHLLNDPQARYRDLGPGWYENNINHNRAARSHIRQLEALGYQVTITKAA

SEQ ID NO: 381333 - protein, 350 aa, unidentified
MIIIGCDYHPGFQQIALVDTDTGEVRELRLEHREPAEKFYRSLAAQRVVVRLGMEGSGHTRWFERLLAELNFELWIGDAAEIRTKRVRKQKTDRQDAQLLLRLMVEDRFPRVWVPSWENRDLRQLLWHRHRMVQARTRIMNQLQAVALNEGLRAKKRLWREAGREQLKSFPLAPWASRRRRDLLELLDQLNPTIAELTQAIEQQVEKYPEARRLMTHPGVGALTALAFMLIVGEAGRFRCGKQIASYLGLVPLEESSGNRRRLGHITKQGNSLLRFLLVEAAQVTARSLPEWRNRYFHLMMRRGRKIAKVALARRLAVRLYWMLRKEWDYEQVKQFGSHAGQPGNRHGVR

SEQ ID NO: 381334 - protein, 330 aa, unidentified
MPLFCVGVDVGARELVVSIDRNGIRESGIVFSNDAGGHRKLIRWATKKGATARVVLESTGVYGLDLAFALHRAKRVTVMVANPRAIAAFAKASLQRSKTDALDAETILEFSIRMPFVNWNPPAPSILELRALSRRIEALSKTVTQEKNRLHANQQSEKLSNFVREDIRELVELLRSRINRLRKQALLVIEQNPGLAKAFRHLTSIKGIADAAGIQLLAELGTLPKDMTTRQWVAHAGLDPRQYQSGTSVHKPARISKTGNAHLRRALFLPAMVAVRWEPNVKAFYEKLLAKGKTKMQALVAVMRKLLHSIHGMLEHGQDFDGEKFFVMKA

SEQ ID NO: 381335 - protein, 426 aa, unidentified
MTNSLFIGVDVSLQSNQICVLNFDQHKFFNLKFSNTPNGCEDAINRIKNIHDKFFFDKIVVVCEATGMYSFHLACYFSSHEYLNNFNTEVYQINAHDFAKYKDSFSDLEKTDPSDAYILADFARVGRTKSLHPFRGSQYIALQRLTRQRYHISKNLVKEKLYVMNNIYLSFSGLIIADKKNKPFSNMFGATSCAIFDNFDSPDQIAETPVDDLLDLISKVGKNRTKNPNEKIDLLNKAIRSSYRLEQTAYNGINIAVASSLSTIRFLENELKQVDKAILDTVSGLNSNAYNSLLSIRGIGKVYAAGILAEIGCIDYFKHNSNLAKYAGLYWNRTQSGKFEKEDKKFSQHANKYLRYYLIEATSSCVRMNFPFIKNFYDLKYKEVTKHQHKRALVLSARKLVRLIFGLLRKNQYYSPIDSNTQSLIN

SEQ ID NO: 381336 - protein, 378 aa, unidentified
MPQSRTLSIGMAGQKDSMAVAYVAPDLHAEVSSLGALGTRQCDIAQLLRKMPSTSQHLMFVYEAGPCGSWLSRSLTKKGHACWVVAPSLIPKKADDRSTTYRRDALQLARLRRSGALTPVSVPQVADEALRDLRRARADALRELKTAKHRLKAFLLRHGYRYQGKANWSQPHIRYLRELVLPHPAMKTILEEYLQGIDAAHARVERIEASMLSLLESWRLKPAVQALMAFRGFQLVAAMITVSELGDIHRFEHPRQLMTYLGLVPTQDSSGPHQRLGPISRCGNGHQRWLLIECAEHYFLPPKISKELSARQEGQPQAVRDLSWKAQNRLHLRFRRLLARRLQRNKAKVAVARELCGFVWALLRSLECYRTSAGGATS

SEQ ID NO: 381337 - protein, 414 aa, unidentified
MMICSLDLGKFKSVACFYDCKTRKFSFEAILTRRSHIDKLLDDNEFDLLVMEACGPSGWISDVCQQREIKTLVCSTNDEAWMWNKTKRKTDRDDALKLAKMAAMGVLTPVHVPKPEIREQRAIIKYRKNLDGRITRIKNGIRSTFANRGIEIDTGARAWNTGRVHIDSFRKSIAECTCDDLWKGQLDLELTQLDALTAEMQAVEDRLELFAADNPLIQIVMTIPGVGRKTAELLVAIIDDPHRFKSARHLSSYLGLTPKQYQSGETDRNGKISKRGPKLARTMLLECAWASLRYNAWSKKTFERIHGGSKTRRKKAGIALARKIAVVAWAMMRDQQAWDQSKALQEAVTDPGTQELMEEATEPHEAKPKKKAKLLRAKPHPPGPVISDEPKQRSGRGSKPTRRRGSKRRSPLKT

SEQ ID NO: 381338 - protein, 311 aa, unidentified
MASFLGIDVSSLSLDALVRPQGIKISVRNDPAGFQELVKSLRGLSIKRVLLEATGGYERDVMRFLQDANYKVIRVNPKRARWFADSLGIKAKTDAIDAAVLAHFAEVIPDKPTLKTSPERALLRELLQQRDRLVQQRDDDRRRLKQAQSAMVAIFLKTNLQHFASQIKLVEQAIKRQATVLNDERIAKLDEVKGIGMVTATKLVALLPELGHVESREIASLVGVAPFNHDSGKSVGKRFISGGRFEVRRALYMACLVAVKHNPTLKARYEALRGRGKLAKVALVACMRIFIVRLNAMLRSGTPWRDDLPQP

SEQ ID NO: 381339 - protein, 371 aa, unidentified
MKHNSIFIGMDVHKNSIDIAIAESGRTGQVRHYGKINGTLAALNKAVGKLVGKGDRAHFVYEAGPCGYQIYRHLTARGFDCAVVAPSMIPRQSGNRIKNDRRDSLMLARLHRAGELTAVYVPLAEDEAIRDLSRAREDAKSDEKRSKQRLLAFLLRSGHRYSGRSPWSQAHMRWLADIKMAHPGQQIVLQEYIDTINQCTLRLQRLTDQIRQLLPQWRLFPVVQALQSLRGVSLIVAVTTVAEIGDFKRFQNPEELMGFLGLVPSDKSSGEKIKHGSITKAGNSHVRRMLVEAAWAYRFRARLSRALLKRQEDLPQPICEIAWKAQLRLCARYRHFWAKGKVKPVIVTAIARELCGFIWAIAIKTDIPVAV

SEQ ID NO: 381340 - protein, 353 aa, unidentified
MISIGVDAHKGVHVALALDEAGHELNQWQGLNSAAGWQAISQWAASLRSPRQWGIEGAWGYGRNLAQHLVGEGETVYEVNPRWTAMGRRSARKPGKTDRLDARAVALLVRQEASALPLVHAEDDTAVLDLLTSEREAAVAESTRLRNQIHALLLQTDPEYRTHLPTLKSQAALDALESYTAGNSNPVQVQRAAAIRRLTQRLRLALSQAEELACQIKDLARRRFSPLTKLCGVNLITAGTLAGILGPGDRFATDAQLAAYAGVAPLEASSAGLVRHRLNRGGNRRLNCVLYRIVLTQAHHLPAAKAYIDRRLSEGKTRREAHRALRRFVIRAIWRLWQECQPAQMAASAERAA

SEQ ID NO: 381341 - protein, 364 aa, unidentified
MNCVIVNTELSSLEETRRQFNGGKAYIKLGIDVHQDFYVVVMQEGSSNPKPPQRFHKEAFLRWAAKLVCSGAQVYAVYEACGFGFSLQRRLSALGIECYVVCPQKLDEQNKRVKTDSLDARALCLKLDRFLQGNRHALALVRVPTEEEEQTRALHRQREQLVKVRKVLEAQGRSLMVNHGIEPVQQWWKRRAFAALSMPEWIRVLLQNTQPIVLSLQSQIDQLTLQLQNAATAEPPRGLGKMTSVIIDREIGNWHRFNNRWQIASYTGLCPGEYSSGQKRLQSCVTKHGNPRLRAALVELAWRMVRFQPNYRAVRKWNERLRKGALTTGSARKKAIVALARQLAIDLWRIRTGRLSHAQVGLEM

SEQ ID NO: 381342 - protein, 325 aa, unidentified
MEKLYGGIDIHKEKLAGCIMDENGEIFREHIFPFSREAIERFLYGIPNSGIEIVIEACGIWRGAYKVLADLGYEVKLANPKKTHDIACKKKTDRVDARILADLLRTNYLPEVWIPDEQVLKLRDLTRHKSNLTRMRVKVQVKLKGYLLRKGTKYGKLWNERALSELAEEDPDLRNLIRVYWSLKAEEKEVMGRIRKTARSMKKANLLMSMTGIGELSSLMILAEVGDIKRFKTPKELVSYAGLCPGIYQSGDTERNVRNNAVNKWLKWILYECSGRAAMLDPGIQEYFYKVKQRKGFKTARRAVARKMLTIIWYMLTNEEPYRAS

SEQ ID NO: 381343 - protein, 399 aa, unidentified
MAQPTLWAGIDAGKAAHHCVAINADGQRVLSRRVVNDEDALRDLIRAVKAVADGGAVRWAIDLNSGGAALLITLLLDDDQELLYIPGRVVHHASGAYRGDGKTDAKDAAIIADQSRMRRDLHPLRHRDKTAADLRILCARRNDLAADRNRAINRLRAQLLEYFPALERAFDYAHRKAALVLLTGYQTPDGLRRMGVARLEKWLRDRHAYHAGDLAARAIAAANAQRITVTGQEVAASVVARLAQTVLDLNAELVDVDAMIEAKFEQHRLAGIITSMPGFGSLLGAELLAATNGDLASFNTADRLAGIAGLAPVPRDSGRISGNLKRPRRYDRRLLRVFYLAANNSIKTCPESRNYYDRKRSEGKRHSQTILCLARRRLNVLWAMQRDNTSYQPGLPRAA

SEQ ID NO: 381344 - protein, 328 aa, unidentified
MYVGLDISKNSTVGVWKDEKGNKIAGEVFSTDKQGLQKLAEKLKGCEVALEASTSGVFVYDYLCTKGLSIKVANPNAIKLISHSDKKTDKSDAEKLADLLRTNLLPTCYMPDKEIREIRDLIRHRRTLVNTRTVLKNKVRAILAREGLKLPYKDVLGERSLQWLYKVEIGAVQKDAINKFLHLALTIDDEIQDYDRKLASERQQNKNARLIDTIPGIGEYSAMHIMSAIGDIKRFPSDEELASYAGLVPRIYQSGNTQYTRGLKPGEKSLKWILIECAHTAVKTSKRFRKYYRKKMKKKNKQKAIIAVARKMIEIIYCMLTRCEEYHE

SEQ ID NO: 381345 - protein, 457 aa, unidentified
MGDDVLVSVDPHKASNTLAVMDPVTKTVIARQRFMNTAVGYRRLREFAGGWTHRRWAVEGCHGAGRSLAQRLAGDGEIVLDVPAKLAARVRVYSQGHGRKSDADDAISIGLAALNSTRVAVVRRDDTLVSLRLLCDRRDELGALRTQAVCRLHRLLCELTPGGTHRGLRASRAEQLLAKLRPVDPVDVVRCQLAHQHLDDIRALDAKMTAVRAQIAALVDGTGTRLTELYGIGPVIAGRILAEVETIDRFPSKDHFASYNGTAPIDASSGEQVRHRLSRAGNRRLNHALHMMAVTQIRQPETIGRRYYERKRLEGKTPKEALRCLKRRLSDVVYWQLVADRRATITQCGSATTPTRTRPTSTSATTPVPRTAPPRRPPHPTASTGSSHSTGKTAASSASKSSTPAVGSPKTSSTKQKTRAEATRKPRTNSAAVPDRRPTSAAAAGVKAGAATRRARP

SEQ ID NO: 381346 - protein, 331 aa, unidentified
MLDTETGEVVERRLEHENGEAKRFYEGLKEQALVGMESPGFTRWFQEMLSELGPERVVGEAAKIRAMEPRKQKHDRRDAPHLLNLLVRGDFPRLWLPSAEERDVRVRVEHRHQWVQMRTRAKNGLQAMALGCGLRRRGRRWSQAGQEALQKLPRREGMARRREDLLRLLAQLDPWVKELDQRIEQEVGRRPEAQRLMTHPGVGPLTALGTVLVLGPVERFPDARHVTSYVGLIPQEESSGGRQRFGPLTKQGNPLLRFLLVEAGQTASRFAPGLKRVYRRLAFRKGRASAKVAVARKLIIPLYIMLRDGIDYAEFVRRGSHAGMLGDVALV

SEQ ID NO: 381347 - protein, 358 aa, unidentified
MQAKGTTIDFNGQNVYAGIDIHLKSWKVTIMLGEREHKTFSQDPNAETLWNYLRKNFPGALYHSAYEAGFCGFSAHRDLEVLGIHNLVVNPADIPTTDKEKRQKEDKRDSRKIAKSLRNGELVGIYVPSKGMEELRGLVRYRKTLVKEISRHKCRIKSYLYFNGIQIPIELGGTSTHWSGRFTRWLSEVKLSTVHGKMVLDDTLDTAELLRKKLLKVNRHLRHEVGSGEYSDKLRLLQSIPGIGLITAITLLTEMENILRFRNLDQLCSFVGLVPSTNSSGEKEKVGRITRRNNHFLRSVIVEAAWMASRKDPSLLYSYSLLIKRMEPTEAVIRIAKKLLNRIRYVMKNETEYVQSVI

SEQ ID NO: 381348 - protein, 362 aa, unidentified
MSKAIICGTDAHDNSLVCRVGVDRGEPETLSFGNTRSGRKKLFDFLNAQKQKHGAERVVLAYEASSLGFGIYDDCVSSGIECFVLAPTKMRKSRKDMKRKTDVKDAQLILETLRAHILGGNELPSIWIPDDQTRDDRELVRCRLDAAHKLTALKTQVQTLLKRNGVIKSKSAGNSWTKTYRAWLEVLLLPNGARIGLSSLLRQIAHAEAEIKLLDAEVERLSESRRYAEPAKALVEQLKGVGLLTAMVYLTEMGDLRRFSNRKQVGSFLGLAPSSNESGEVSDHKGHITHAGPPRVRKVLCQASWCRVRLDAQEHLVYERLVAKNPKKKKIAVVASMRRLGVKMWHVGLEAQVNANVFDKAA

SEQ ID NO: 381349 - protein, 341 aa, unidentified
MDKELYFGVDVSKKTLDLAYYDGETIDWKNAHIKVSNDNAGFKKIGSWVAKVGKDFDTFLFCLEYTGLYNQNFRLWLESKEYIYSMVEPRKMHRFEPDLDDDQRSLDRIKTDELDAFRIAIYCEQNHKKILRNPSKLPSPVYFKLKRLLAERKQNTKQSTLYKQQLHDICAYDTDLSVERKKLLLKNMKENQKAIDKEIDSYMNADASISKNFNLLTSIPGIGRIIALETIVLTENFTTINNPRKYACYIGIAPFKKESGTSVRKKTGVSKKGFSEAKADLSIAVLSAIRNNPSIRDYWIRKRKEKCGGIVLNAVKFKLVLRMFAVIKRGTPYVETDAYKN

SEQ ID NO: 381350 - protein, 337 aa, unidentified
MERQYVAIDLHRRRSLIVRQNARGEQLSVVNIDNDPVALSLAIEEAGPNPEVAIEATYGWYWAVDVLQAQGANVHLVHPNGLAWDDRRVKSDYRDCCELLKRLRLGELPEAWIAPVGLRGLREMVRQRAKLVALRSGLKVQVHAVLAKHGLHPPVSDLWSQAGTQWVQALKLPAPYAFKVESLCELIDVYDRQVAQYERVIWDWLRDDVRYRAIQALDGVGETIGAIFIAEIGDVGRFPSPEHLCSWAGLTPKLRESDVKSRAGHITKQGSPLVRWAAVEAVARVRGTPKIKRDYQRIAERRGKGIARVAAARKLLTLVYYGMRDGHIRCLKHAKAG

SEQ ID NO: 381351 - protein, 417 aa, unidentified
MIRKVMEVIHQSVGGLDVHKKMVMACRRRMLGNGEVETEILEFGTTTLGLCALSKWLGEWGCTHVAMESTGVLWIPVWNVLEGGFKLLLTNAQHLKKVPGRKKDVTDAEWVAQLMQCGLLKPSFVPSREVRHWRTLTRQRMKLIDQRTGVINRMHKVLQQGNIKLSSVATDVMGVSGRAMILAMIEGESDPEALASLAKGRLKSKHEQLVESLEGRLNQDDRWVMKELWEQMEYLEEEIVRYDEQIKEKMSPYEESLSRLMTIDLIERRSAENLLAEIGPDMSFFPSDSNLVSWAGLCPGSDESAKKNRSGKTPKGNRWLRRALVEPAWGAARRKDGYLGAMYRGIAARRGEKRAVIAVARTILQAAWHVLSKGEEYKERGGDYFDRINSEQTKIKLIRRLEKLGYEVDLKPKQAAI

SEQ ID NO: 381352 - protein, 427 aa, unidentified
MTDQLKHKAYHSWVAIDIAKDFNVVMVELTDGKTRRFRMANSGKDHDRLIEVIRELPQPCHIGFEATGNYHRPLAYRLLTEGFDVSLISSLASARYREAIFNSWDKNDPKDAGILLELLKRGIVQIYVDPIRSGYHDIQELSKTYSNITLSRTRLQHSILTHYLPLYFPEMAKFWCSTRNAWWINYLLHFPTPASVIQYSEQAFCQIASPIIGRKMNKQAKLLELYEAAQHSIGLPIASDSLACQTFQLQLQRYQELTNQRQQLEQQAETTLSMNPDYCLLKTIPGIGPIVAMTILAEGGDLRRFNHHRQFLKYCGLDLAKNQSGNFRGQDKLPKRGNARLRLALYMASLHAIRQTENSFRNKFHRYTQATPKDADCKRKAMTAVMAKMARVIHALIKSGTPYQGYFEVSPSGSIPLCRAVGATRTP

SEQ ID NO: 381353 - protein, 411 aa, unidentified
MLEVKVERCAGIDVGKKFLAVCVLIGLANQKPVGEVRRFGTSVKELERLRTWLLESGCTEAVMESTGSYWKPVFNILEGSLKIILANPEQVKALRGKKTDPKDSRWLASLLRHGLVQGSFIPPRDIRELRDLTRRRRTLVGDGAAEKNRVQKILEDANVKLGNVLTDVFGTSGQTMLEALLENKHSAAEIAELGHWSLAAKIPQIVEALEGHRMTDHHRLLIRQCLRHMRTIEEMIEELDKEIAVRLKPYQEQVKLACTVPGIKPTAAASILAETGMDMSPEGPFPNCHHLASWATICPGNNESAGKRRSGRTRQGNRWLRGTLTQTGWAGAADKKSLFQLRYQRVKLRRGGQRAVLAIAHAQLIAIYWALRNGTPYPEQVQRMEQDRREAQIRYHLQRLTKLGYEPDVHG

SEQ ID NO: 381354 - protein, 348 aa, unidentified
MILVGIDVAKDKHDCFICNSEGEVLCKTFSFPNSMEGFNHLYAKIKSLSDDVSKLKVGLEATGHYSYNLLGFLLNKGLPTFVINPLHTNLYRKSLSLRKTKTDKVDAHTIAMMLMSDVDLKPYSNTLYHNEELKSLTRYRFDKVRERAKLKSSVSRLVTILFPELETLAPTLHMKSIYALLSEFPSAQHIADAHLTKLTNLLFTASKGRYNRDTAIRFREAARNSIGSVMPAKSLELRHTIKLIGELTAEIDEIENEIKRIVDHLDSPILSIPGISYATGAMIIAEIGDFNNFSSPDKILAYSGMSPSTYQSGQLTNCYSHMEKRGSRYLRFALYNACLLYTSPSPRD

SEQ ID NO: 381355 - protein, 348 aa, unidentified
MFSQQTHFRIKPLEFDLFCGMDVDKKSISVTFVSHDGFVKSFRIPYDSSNLIAYVRRRYPDKRIAFVYEAGPTGFGLYDDLVAAGYVCLVIAPTQLSRSAADRVKTNRLDSRKLAEDLRGGRFKGIHVPNRHYRDLRHLVHLREIVVRNQAATKVRIKLLLLLEGIRFPAMTAKERWSPAAFSSLYSLQTGSEIRFKLDQYLATLQFSKEQLQIINKELLRFCKEDPDLWHCLDLLCSIPGIGKVVSLYLLARIGDWRYLTSCRQIAHLLGLVPVEHSTGDRIRKGAISRMGDATTRSKLVESSWMAIRKDPELTDFYQRIKARNPDQFGGRKAIVAVARKLVLLKTV

SEQ ID NO: 381356 - protein, 370 aa, unidentified
MSEPTTLYVGLDVHKDSIAVAHAEAHRADPPHFVGTIGTRQADVDKLVRRLHSKASTLVFAYEAGPCGYVLHRYLTGRGLDCWVVAPSLIPKRPGDKVKTDRRDAVELARLLRSGDLTRVYVPGVEDEALRDVSRARDATLVTLKAAKLRLKSFLLRLGLHYTGRADWNEAHRRYLAKVVCPTAAQQIVFQESVRAVDEQIERLRRVEQELLELAPTWRLYPYVEAVQALRGVQWIVATTVVAELGDLTRFDNPRQLGAFVGLIPSEYSSGESRRQGGITKAGNGRARRALIEAAWAYRYNPKISVQIQKRLESLPKPIQDIGWKAQLRLCKRFRRLRARGKHANIVVTAVARELLAFMWAIAREVPKTS

SEQ ID NO: 381357 - protein, 343 aa, unidentified
MKLHVLGIDLGKTVFHLVGLDSTGKVVIRKRCSRRQLLAFTANLQVQLIGMESCSGSHFLGRALRDQGHEVRLMPAQYVKPYVQTNKTDYIDAEAIAEAVQRPRMRFVPIKTEEQLDLQALHRVRERWVMRRTAVVNQIRSLLLERGFTLPKGRRYVEEALPRILEDAELPLSGSFRLLLAQLKLELEQLSARVDQLDVVILERAKEDEACQRLTTIPGVGPVTATALIAAVGNGSAFQRGRDLAAWIGMVPGEHSSGGKQTLLGISKRGNSYLRRLFVQGARSVLQQRHRQSPGLCSWLAQLLARKHQNVVVVALANKAVRMAWAVLCKGERYRAPALAMST

SEQ ID NO: 381358 - protein, 395 aa, unidentified
MMYLGIDIGKNNHEAGIISEGGKKVGKSLRFSNDREGFTALLDLIGRSVPAGEDLSIGMEATGHYWIPLYSFLHEKGFKVHVINPIQSDSLRNFRIRQAKTDSIDCFLIAETLRFGGFTETRLADEDIMSLQKLARFRESLKDKCGDCKRQVIAVLDQVFPEYDTLFTDMFGESSKAFLKTCGTPEQTLEVDVKSLAALLSKASRGRHGTEKAGEIKDPAANSVGVTLCADTFAFQIRLLIEQIEFTEKQIEKIDKLLARLLKKLNSVIMTIPGVGPVTGAIIPGETGDVNRFDNPKKLVAFAGIDPTVRQSGNYSGTNNRLSKRGSPYLRRAIWMSAVVAARFDPVFKAFYEKKRSEGKAYGTAIGAVARKLIYTIFAILKENKPYEVRLNPPG

SEQ ID NO: 381359 - protein, 458 aa, unidentified
MSRSNTHPHPRVAEALPHLNPDAAGLDIGAEEIWACVPADREAQPVRRFGTFTPDLHALADWLAQCGVKTVAMESTGVYWIPIYEELETRGFEVYLVNARHLKTVPGRKSDVQDCQWIQRLHSYGLLTASFRPAEEMRVLRAYLRQRALLVEHRAAHIQHMQKALQQMNVQLPQVVSDITGHTGLQIIRAIVAGERDPHVLAQLRHGRCHASQAEIATALSGQYRPEHVFALKQALALYDCYTQQVQDCDAYIEQHYAAIRPTYDDTTPPPPLGPAPKPTAHAKNAPSFDVRGCLYRILGIDLTAVHGLEASTAQTLLSEIGTDMSPWPTEKHFASWLGLAPHNDISGGKVLRSHPLKVRNRAAQALRLAAQALGRTQTALGAYYRRRRARQGPKAAVTATAHKLARIIYHLLKHRDPYHPLSPEAYEHHLRQRELALLKRKAARLGFTLLPRPATAA

SEQ ID NO: 381360 - protein, 426 aa, unidentified
MKYNQNEKLNQMDLSTMVVGIDVGSESHYARAFDYRGIELSGVFKISNDAAGFEAFEKWTHDLMKKHGKSRSIVGMEPTGHYWFNFGYSLKEAGTKVVLVNPMHVKRSKEFDDNSPTKNDRKDPKTIAMLVKDGRYLEPYMPEGIYRELRIAMETRERYVKQLTVIDNKVQRWISIYFPEFKTVFKDWTGQGAMIALKNFATPEKVLAKGIESIASMWKAEIKRAVGTKHAFKLVKAAQDSVGIKEGLKSAEYDLISLIEEYEFSLKKYKATMNLVEELLYEVPNIKELLAIKGIGIVTVAGFVAEVGDIRRFEHPKQIQKLAGLNLKENSSGKHKGKTTLSKRGRKRLRRVLFQAVMVLAAKNPEFRQLHLYYTNRVENPLKKKQSLMAISCKVIRVFYTLLTKGLTYDGEKMIKDIQRPQQKGA

SEQ ID NO: 381361 - protein, 413 aa, unidentified
MRLFVGDDWSEDHHDVEVMGEGGRRLAKARLPEGVAGIARLHAMIGAELGEDAEEEDAGQVAIGIETDRGPWAAALIAAGYTVYAINPLQAARYRERHGVSGAKSDAGDAHVLADMVRTGSHQLRPVAGDSAQAAAVKVVTRTHKTLIWERTRHVQRLRHALRDYFPAALEAFEDLDAPDTLDLLARAPDPASAARLTTAQISAALKRARRRDVAAKAGEIQAVLRAAHLGQAAIVTAAYAASARALIAVLNTLNEQVTVLQGQVEAYFGQHPDAEIIMSQPGLGPVLGARVLAESGDDPARYASAKARKNYAGTSPITRASGKRKVVAARHVHNDRLIDALMTQAFSALRASPGARAYYDHQRARGARHNPALRQLANRLTGIQHGCLKTRTLYDEATAWPQYAAKTDKSAA

SEQ ID NO: 381362 - protein, 362 aa, unidentified
MPKMIWLGMDVHAASITVAQYEDQAPTATVQTIANDPAQVRRLVRRLPAGSDVRACYEAGSCGYGLHRQLTALGVHCDVIAPALIPRRPGERIKTDRRDAEKLGRFYRSGELTTITVPTPSQEGVRDLVRAREDVRRDRTAARQRLAMFLLRHGHRYPGSHWTKRHWEWVCGHTFDGPVRTVFVHYCDHVLALNERLAHLEREIRTLAESAAYQPVVTRLSCLRGLATLSALVLIAELYDLRRFRTPRELMAYLGLVPSEHSSGARERRGRITKTGNALARRLLIEAAWAYRHPARQTRRVQQALTTQPPAVHAISDRALHRLTARYRRLLSRGKTPHHAVTAIARELCGFVWAIALVPDLA

SEQ ID NO: 381363 - protein, 376 aa, unidentified
MTRIIKIGMDVHKDSFTLCAMEPKFGGKDTVFSTIKTGPHADLVVDYIDHIREKMQDDDLDIECGYEAGCLGYVLYAELKARGVKCTILAPTTMMAPQGKRVKTDARDALMIAQCLSYGGYKAVHIPTDQDAAVSGFLRMRDDHKAALKKIKQQILSFALRNGLRCEANNWTQVHLQFLRYQKCDPVVRETLNEYLQTYDYLNNRIDAMNKRIHEFCQEKAYCENVKKLQCLIGIKEHTALALITEVGDFTRFDKGNTLGAYLGLTPGEQSSGAKIVRTRISKAGNGHLRKLLTESAQGICKGQIGYKSKDLKSRQEGNSKEVIAYADRANEYMRRKYYRLIRKGKKHNIAVTAIARDLSCFVWGLMTDNICIARN

SEQ ID NO: 381364 - protein, 347 aa, unidentified
MTIVEAPPGITGGVDTHLDKHVAAALDPLGRLVGTESFDADAAGYKALLVWLKDFGEVTKVGVEGTGSYGVGLARFLRRKGIEVVEVNRPNRQSRRNQGKSDPLDAVEAARAAISGRASGVGKTKDGPVEAIRVLVVAKRSARQARVKAIVQMRHLGFTAPDQLHSRLKGLSVTALVAEGAKLRATKSADTVTAATKASLSSLAHRIQGLDLEIAELDEKITSLLLATAPDLMARFGVGPDTGASLLVAAGDNPERLHSEAAWAHLCGVSPVPADSGKNAGHLRRHTGGDRQANSALWRIAMVRIAHDPETTQYFERRVKEGRTKRDVIRILQRYIAREVYRYLPRG

SEQ ID NO: 381365 - protein, 315 aa, unidentified
MKSVAGIDVSKATLDVRFQDKSLSFANDPAGHKKLAHWIKGAEVVVMEATGAYHFAVACALHQANLPVAVVNPARPCYYAKSLGKRNKTDKVDAKTLVEFGRTHELDLFVPPTQEEQSLCQYVRLRTDLVDQRAQVKNRLKEPVISELESTTLKAQIKFFNSQISSVEKEIEKLVKSSSVLTRNVELLTGIPGIGKVSAWILLAELKDVKRFESAKKVAAFAGVCPALRQSGTSLSGPGTLSRQGNRTVRKCLYMAALAAMRQEGVFREFFLRLVTKGKNKKSALVAVMHKLIRTAFGVLKKDCPFNPKWALKTK

SEQ ID NO: 381366 - protein, 360 aa, unidentified
MFSERTSVGLDVHARSVVAAALDTVTGEVVEARLSPDVREVVGWLARLPGPVAVAYEAGPTGFGLFRAISGMPVRCVVVAPSKLLRPAGDRVKTDRRDALHLARLLRTDQVVEVTVPSVEQEAARDLVRAREACRADLMRARHRLSKLLLRHGVVYSGGAAWTVVHDRWLQQQRFDNPQTRATFDAYYDQVLTTTALRTRLNAQIEALAADSEFTGVVRRLGCLRGIATLTAFGLAVEIGDWTRFTGNTIGAFVGLTPSESSTGASRVQGPITKTGNGHARRLLVEAAWHHAADYRKTKTLFDRWQLASPAARARGDAGNRRLHQRWEVFHARHKRPVIANVAVARELAGWCWSLAVLNE

SEQ ID NO: 381367 - protein, 359 aa, unidentified
MQKQNYELDFTGQDIYAGIDAHLKSWKITIMVQGISCKTFSQNPDADILKNYLSKNYPNGNYHSAYEAGFCGFSAHRELINQGIDNIVINPADIPTTDKERKQKEDKRDSRKIARSLHNNELEAIYVPDMEIEGLRSLVRYRKTLVKEINRYKNRTKSLLYYYGISVPMELEKSSGHWSKRYTTWLKGLELKTEYAASTLNSMIETVEHLRVKLLEINKQLHILEKEGEYSDTIVLLRSVPGVGLIMAMTIITELEDIQRFGNLDRLCSFVGLIPRTNSSGDNDKVGEITPRSNRQLRSMLIESSWIAIRQDPALMMRYSELCQRMEPNKAIIKIAKKLLSRIKHVLKNKEPYEKGMVK

SEQ ID NO: 381368 - protein, 274 aa, unidentified
MAQEQQKVLGVDVSKDKLDMYLNQTGEAWTVKNDRQSIRRLVKACHKKGVTLLVMEPTGKYHWELMTQMVQGGIRTAVANPKKVRYFAKSLGIIAKTDKVDAKVIAEFGNKLGPRVIQQIDKKMLHLKELVSRRRACVKAMIAEKNRLSSTINPVVKKSITTILSALKKQIDLIQTAIIKAIAVDEQMDKTFKLLQTAKGVGEVTAAILVSELPELGKLNRKEIAALVGLAPFNKDSGTFRGHRMISGGRFFVRQALYGDSFGNKIQSSVEKIL

SEQ ID NO: 381369 - protein, 487 aa, unidentified
MVRELAILSLVKHPLSRSEESRTSTAPLSGPPTNISEANVMNQKKPLKKKLVRLPKHLEHINAYAAGIDVGSRSHFVAVPVGVDEEPVREFSTFTDDLERLTDWLISCGITTVAMESTGVYWIPVFEILESRGLEVKLVNARHVKNVPGRKTDVLDCQWLQQLHTYGLLRGAFRPAEQVCALRAYVRQRATLVRVSASHTQHMQKALTQMNLQLHNVVSDITGVTGMRIIKAILAGERNPKTLAAFRDKRCKNDEKTIARSLHGNYRPEHLFSLKQAVELYEFYLAKIADCDRQILEQLKLFDAIGSDQNPSDGKPGSSLDEALLRMSGVDLASIDGIDTTTALKIIAEIGIDMSRWKSDKHFASWLGLCPGAKISGGKVLSSATKRIANRAALAFRMAAFSLIRSRSALGGYIRRLKARLGAPKAITATAHKLARLVYSMLKNGTTYADLGQDYYEERYRSRLIQNMKRKAKQLGFDLVAVEVQPS

SEQ ID NO: 381370 - protein, 414 aa, unidentified
MDVIYKRCAGLDVHKQTVECAVRRAEPDGNARVEVRQFGTMTDDRLEMVEWLQAQEVTHGAMESTGVFWKPIYNILEGHFTVRLVNARPVQQVPGRKTDVRDCQWLAQLLQCGLLKGSFIPPCWQRELRDLTRERTQLVEEQTRVANRIHKVLEDGNIKLGSVASDILGVSGRDILQGLIHGEQDADRLAEKARGRLRAKIPELRRALRGYLREHHRFQLRLHLDHLRRLEELIERLNERIAELCQPQREHLERLDGIVGVDQAGAESIVAEVGVDMEVFPSDGHLCSWAGICSGNPESAGKRRSGRIPKGDRWLRRRLVLAAQAAGHAKDSFLASRFRRLAARRGRKRACVAVAHSILRIVYHVLKEGCPYQDLGGNYFDRLDPERLTRYLIRRLERLGHKVILEPAATVSSV

SEQ ID NO: 381371 - protein, 337 aa, unidentified
MTIIRIGLDTAKHVFQVHGVDENEQTVVRRQLRRGEMEKFFGKLAPTRIGLEACGASHYWARLLRGLGHEVVLLPPQYIKPYVKRGKNDANDAEAICEAMSRPGMRFVPIKSAESQAELMLLGVRSLLIKQRTTAINAIRGHAAEFGVIAAKGPVKVAELLQQAHTKEANVPELALDMLRLLAAQLDALDIKLKLIETRLMASHRENPLSQCLASQPGIGPIGAVSFALRVTDPKSFRSGRHFAAWLGLTPKDHSSGGRHRQGRISRQGNEALRKLVVLGATAVIRFARPGHASPWLLNLLARKPKKLAAIALANKMARTLWAMMVSGEVYRRPLPA

SEQ ID NO: 381372 - protein, 439 aa, unidentified
MAKEAIFETVHENVAGIDVGAEQIYVSPDGKEVTVFETFTSGYHACARYLKEKGIKKVAMEATGVYWIALYFLLEESGMMVCLVNPKETKQVKGRKTDVKDCQWIQRLFTAGILRHSFIPEGKYMELRMLVRERIDIIEMGSTYVNKMQKCLELMNIKLKEVISQIQGASGIRMIRSILSGERNAASLLSLCDERIQKNKKAKVLKALEGTFNETYLYMLGQNMELWQIHQDRIEKIDAKIAQLLDELSMNKEEVPTGKTKRIRHHAPKIEGLQTTMARLYGVDLSSISGMNDYTVLRLIGETGTDMSRFPTAKQFIAWLCLSPKTHKSGKIKKNVRGTPCNPAGQIFKECAQGLMNSKFIAIGAFMRRIRGRKDSGIAIKAGARKLALAYYNALTKGMAYVEQGTKQYEEQIKRRELISLKKLAKKYNMQLIENQIAA

SEQ ID NO: 381373 - protein, 402 aa, unidentified
MVGTGDVGVFLGLDVGKSAHHGHGPTSAGKKVFDKQLPNSEPKLRAVFDKLTTKFGTVLVVVDQPASIGALPLTVARDAGCKVAYLPGLAMRRIADLYPGEAKTDAKDAAVIAGAARTMPHTLRSLELTDEITAELTVLVGFDQDLAAEANRTSNRIRGLLTQFHPSLERVLGPRLDHQAVTWLLERYGSPAALRKAGRRRLVEAIRPKAPRMAARLVDEVFGALDEQTVIVPGTGTLDIVIPSLARSLAAVHEQRRALETQINQLLEAHPLSQVLTSLPGVGVRTAAVLLVTVGDGTSFPTAAHLASYAGLVPTTKSSGTSIHGEHAPRGGNRQLTRAMFLSAFAALHDPSSRTYYNRCRARGKTHTQALLRLARQRISVLFAMLRDGTFYETRTPEVAAA

SEQ ID NO: 381374 - protein, 411 aa, unidentified
MQVVHARCAGLDVHKRTVVACVLLTQPEGTVERDVRTFGTMTAELLALADWLTAREITQVAMESTGVYWRPVFNLLEAGRTVVLVNPQHMKAVPGRKTDIKDAEWLADLLRHGLLTASFIPPQPIRDLRELTRYRTTLVQERAHEVQRLHKVLESANLKLAAVATDVLGTSGRAMLEALLGGEQDPAVLAELARGRLRAKLPALRQALEGRVRLVHLVQVRMLLAHIEFLEGAVAELQGEIERLLSPFTEAVALAQTLPGVGQTAASTLIAELGTDMSRFPTHKHLASWAGVCPGNKQSGGRRLSGATTQGNPWLRAILGEIAWAIAHTRDNYLAALFHRVARRRGIQKAVVAVAHSVLVILYHMLRDHRPYSDLGADYFDRLDTERLQRHHVRRLEQLGYTVTLTPAPAA

SEQ ID NO: 381375 - protein, 385 aa, unidentified
MDVHSSNFTLCSFEPGYGMTEDKIFGQVQFKEDLIKNTEKYINNLKSQRKDIDIVCGYEAGCLGYVPCRELTKAGINCKILAPSTMAVQKGGKKLKNDFRDALDIARCLASGSYKAVNIPDIEDEDVRDYIRMRDDHQTALKQIKQRLNAFCLRHGFQYDKPKWTLAHIQWIKRLECTFKQKEIINEYLATYEALKSKIEAFDVRIEDFASSERYADKVKKLVCIKGIQTNTAMSFISEVSDFNRFRTAEQFAGYIGLVPGEHSSGDKVCRTGITKSGNTHLRRIAVECCNSYRRGNVGQKSAALKKRQKNVPSEVINYADKASSRCQRKYYRMVNKGKNTNIAVTAVAREFCCFIWGMMTSNYECGNNEAGEVIPAEGLIRINV

SEQ ID NO: 381376 - protein, 359 aa, unidentified
MANNEDGTRHVVGGVDTHKDLHVAAVVDGQDRVLGTACFATTRQGYRQMLVWMRSFGDLRRIGIESTGSYGAGLLRFMQQAGIDVLEVTAPDKHDRRRRGKNDDLDAQNAAHAALAGRRTVTPRSRDGMVESLRVLTVCRKTAVAARRVAIQIIQTTIVSAPDGLRDTLRSMTRMQLVRTLAAWRPDLTAYREVEAAYRISLKSLARRYLELHDEIADLDAMISAIVDDLAPELIARNSIGYTSAAQLLLTAGDNPERLRSEASFAALCGVSPVPASSGKTIRHRLNRGGDRAANSALHIIAIGRIRTDSATKAYVARRTSGGHSKLDAIRALKRYIAREVFHIITRRRREINQTRIAA

SEQ ID NO: 381377 - protein, 417 aa, unidentified
MKKNSKSPTKKEPKAKGAKAQRPVPRETKQVLAELVGKLRGKLELKPTPASPVKAGQRPERSPNLDRLTVGVDLGDQWSRYCILGLQGETLSEGPLQTRQAELAEFFQAFPPARVVIEVGTHSAWVQEVIAGEGHEVLVANPRLMEGSKRRKRKNDRIDAHKLARLGRVDPQSLHPITHRSREVRQDLVLLRAREALVEARTELINATRGLVKSLGTRLPQCSSRSFGHQVGDAIPAEAREALLPLLQLADGMSACIKDYDRRIEELASEKYGHTKLLRQVKGVGPITSLAYVLTLEKPERFPKSRDVGPYVGLVPKQEDSGESQPQLGISKAGDTMLRKLLVGSAHYILGPFGPDTDLRRYGLRLCERGGKNAKKRAAVAVARKLAVLLHRLWVSGEVYEPLGYASSAAMVQKAAA

SEQ ID NO: 381378 - protein, 357 aa, unidentified
MEKRLKQSLGIDVSKSSLSLSLGFLDDKLEKEFMSHPDIPNDELGYRTLLKWLKKSVDNSVELLVVMEATGVYHQGIAHYLYGKGYCVSVMQSGRVKRYAQSLDQRSKTDALDSKMLSMLGLERSIRLWQPPNEELQHLKGLSRERCSLLKDKGSENNRQGAISSSVYSNAKALKRHKNRLKLLNEQIAIIEEEMKELISKNDELQRKVDLLTSIPGISFISAATVIGETLGFESIANGKQLASYAGYDIVLRESGNFKGKTRISKRGNSHIRAALHMPSMTCVRCNPTLKQFYNRLKPKKAKPLVALIAVQRKLLILMFTLWKNEEVYDAKFEIKKQQKHDALAARDNSLINQPVS

SEQ ID NO: 381379 - protein, 342 aa, unidentified
MEKITTIGLDLAKSVFQVHAITEDGHIAVRRALRRSQVLEFFRHIEPCLVGMEACGSAHYWANAIGEFGHTVRLMPPAYVKPYVKRNKTDAADAEAICEAVTRPTMRFVPIKSPEEQAAGMVLKTRELLVRQRSQTANAMRAHMAELGIVAAAGMTSIAKLVAILRDDRDGRLPNSARAALLEMADQIERLTERVEVLDSKIVAAVKADDAARRLTTIPGVGPIIAATVRAAVQDPAAFRTGRDLAAWIGITPRANSSGGKERLGKISKRGNKQSRTLLIVGATSILKQARRGSKLPGWVVSIMGGRPYKVAAVALANKMARTIWAILVKGGTYQAPAMAEV

SEQ ID NO: 381380 - protein, 323 aa, unidentified
MPTLGIDISKDSFHAELSINNKLRHRRFANRKEGFAELCVWLAKHKAGSVHACLEATGPYSEAVALYLHEQGHTVSVVNPAQIKAFGQSELLRNKDDRPDAGLIRRFCEKQQPAAWQPPPAHFRELQALTRHLENLLETRQQQVNRLEVATTKDVLKSLRKLVAHLDAEIKRTEQQIDDHVDRHPDLRQQCQLLQSIPGIGKRTATKLLAEIEDISRYKSARQVAAYAGLTPRNNRSGTWRGQTRLSKTGNARVRKALFLPAMVAKQHNPVVRSFCHRLARHGKNKMQLVGAAMRKLIHIAFGVLKSGKVFNPDHELLFNSVS

SEQ ID NO: 381381 - protein, 391 aa, unidentified
MVCVGIDVAKDKHDCCILDSDGMVRADCFTIPNNMDGFKQLLQTIRNCTKKSDKIKVGLEATGHYSYNILGFLLDNDLAVYVMNPLHTNLYRKSLSLRKTKTDRVDARTIATMLLSDVDLKSYTDTAYHNEELKSLTRYRFDKVRERAKLKQSVSRLVTILFPELEKLVPSLHIASVYALLSEYPGAKQISEIHLTKLTNLLVTASKGRYGKDKAIQIRDAARTSIGSVMPAKSLELKHTIKLIRELTSEIDEIEVSIQKIMDELNPPILSIPGVGIQSAAMILAEIGDFSNFESPDKILAYAGCSPSTYQSGKLTNCYAHMEKRGSRYLRYALYNATKYVCYWNPVFAEYLAKKRAEGKHYNVALSHATKKLVRLIYALQKSGKAYLTAA

SEQ ID NO: 381382 - protein, 389 aa, unidentified
MIYVGIDIAAAKHACCILSEEKKVIKQFTFANSASGYEKLRSALLSPAETKIGLESTGVYGNNLVEFLRRNGYTTHIFNPLLVKKSIQATTLRKTKTDKSDAKQIARYTMEHSQPDQLPSYHISELKSLSRGRFSLVRERSKAKTQAKTLLIQLFPEFSEAFSDMFGVTASAVLRSFPSARALSLCPANVLAEILSQTSRGRFGKAKAEYLIGLAKDSIGTQSIALELELQMLLQQIDLFTAQIAGYEAAIKSVMEKIDSPITTIPGIGYVLGAVILSEIGDISRFSTPAKLQAYAGVDPSISDSGSSVSAPGRMVKHGSRYLRWALCQAARCVSLYDPVFAAYMQSKRNEGKHYCVACSHVAKKLTRVIYSLLKNNSVYSPTYSLLSA

SEQ ID NO: 381383 - protein, 344 aa, unidentified
MEHIGIDVHKVESQICILTEGGEVVGRRIRTQRERFAAVVGGRPRAKVLIEASTESEWVARCLEELGHEVVVADPNFAAMYATRSRKVKTDLRDARTLAEACKLGAYRPAHRTSDRQRHVRAQLSVREALVQTRARYISLIGSLLRREGLRVASGNAVSFTKRVAGLALPVQLKSEIAPLLAVFVSINRQLVWIDTRLEHLAQSDETVERLCTAPSVGPVTAAAFSSTVDDAHRFKSAHQVEAYLGLTPSEWSSGEKQCKGHITKAGNSRMRRLLVQVAVSILRLRSPRTEALRKWATGIAARRGKKIAIVALARRMTGVLFAMMRDRTCYFQAALPEPSAQVA

SEQ ID NO: 381384 - protein, 415 aa, unidentified
MALKIVYQICCGIDVHKTFVVACIASTNKQGVTTYKRHRFSTFTQGLKELLQWLLDNHYKDVCMESTGKYWIPIYNVLEKDCNIVLAHPKYVKAIRGKKTDKKDAKWIADLFKHDLVAGSFMPPADIRQLRDLMRYRFKLTCFMSSEKNRLQNCLTVSNIQLASVVSDTFGKSSQRILDKILENPDDTSFDIEPLIHGSMKKKLPELELAIDGFITPEQAGKLKVIKKHFEDLESRKAELEKLILALASPYQQELDLILTAPSFKNKFTAIGIISEIGVNMEAFPSAKHLCSWAGLTPTNNESAGKKKSVRVSKAGCYIKPLLVQCANSVVKSEKHPEIRNRYLRLRKRRGHKKAIIAIARMLLTALYNMLKNKEPYNAELYRKSDVLPVNREITIEQAILMAQFQGYKIKSAAE

SEQ ID NO: 381385 - protein, 398 aa, unidentified
MKYIGIDIGKRFHVACICDETNTYAKHIQFSCLGDGYGKFMEYLKNHEAIKDTSIIGLEATGHYWLTLFQKLKADGWKVCVLNPLQVQSFRNEKIRGSKTDDLDCELIAKVIKFGVGKETAMPSEELFQLKQLARFRWDLVQRLSSIKLEVISVLDTVFPEYETVFKGLFGKTSVVVLSEYTMPDEIALLDVEKLTKVLEKTSRKQFGRKTAEKLQLVAKDTFGLRFGINAFSLELKLLLSQIQHLQRQKETVEETITKSVKKQKTTLTTIPGISYVTAGTILGETVGFYKKQEKDPRALLAFAGLDPVLKQSGQFTGQTKMSKRGSPYLRYALMQSALVAANCDEGFKKIYQKYKGMGKHHRVALSHVAEKLTFVVHSVMRTNKAYVPLLEYNKKKK

SEQ ID NO: 381386 - protein, 346 aa, unidentified
MKIIGCDFHPSFQQIAVFETETGEITEHKLVNGNGEAERFYRSLPVGSLIGIEACGNSHWFIDLLGQLGHQVWVGDAAKIRASYVRKQKTDRRDAAHILTLLLENRFPKLWTPSRQERDQRQLLIHRHKLVQIRTRIKNSLQHLALNQGVQKKQKLWSKEGQKLLIQLPLQGWTAVRRQDCRELLAQLDERIAKLDKAAEQAAEAHPQASLLMQQKGVGPITSLAFALTLGDVSRFPHSNQVARYLGLIPSEHTSSNKRRLGSITKQGNSFLRMLLVESAQSVTRCDPQFRKHYLHLCRNKHKAVAKVAAARKLAVRLYWVLRTDQNSQNAVHIESSPRVPLVGAS

SEQ ID NO: 381387 - protein, 351 aa, unidentified
MRNLAAPESDRRLGRKLTLVGVHPDCLTLHRRGFVMQTIRDLGADVDSRTFVVACAARSVAPQRVANERRAILAWLRTVPPGSRLGLEATGTHHELLADLAHRAGLQVFVLNARDVRRYAQGLGRRGKTDRVDAEVIARYVAHEHSELHAYLPPSKEQRALSRLIKRRAKLVAIKGALTQSLRGVPGLRQELRQVSARLERLIAQVEALMQCALQQLPAAHQAAQRIATVPGYGPLGSTCLGYTFTRVPYPNSDAVIAHTGFDPRPADSGQKRGRRRLSKRGPGELRRVLFNCAMAAAKTRLWRPYYQAQRRKGLSSTAALVILARKMTRVAFAVYQRDQPFDATRLRFNA

SEQ ID NO: 381388 - protein, 417 aa, unidentified
MDTLFAKVAGLDVHLKTIQCAVRCRHESGKLLAEVRSFGTMTRDLRALADYLQALGVTHVALEATGVLWKPVWNVLDGRFTLLLVNPRHLKKVPGRKTDVKDAEWIAQLLQCGLLQGSFVPSRAVRELRDLTRQRAQLTAEHTRVVNRIHKLLEDSNIKLGVVASNVMGKSGRAMLRALLHGEQDPVKLAELALTRLRSKIPQLQLALEGNFTAHHRYLLGRLLSHASYLEGQIDQFRVRITPRLNQLLDQEAADRLDRIPGVNRTTMENILAEIGVDMSVFPDEHHLSSWCGICPGNEETGGRRLRSRTRKGNPWLRRALTEAAWAARQTKKSYFAAQYRRLAGRRGKKRAVLAVAHSLLVVIYHVLRYKVEYQDLGPDYFDRLEPERMRRYLVKRLQTLGYDVTLTPKNPGDRAA

SEQ ID NO: 381389 - protein, 391 aa, unidentified
MVCVGIDVAKDKHDCCILDSEGTTLVDCFTIPNNMDGFKSLLQTIQDCSQKSDKIKVGLEATGHYSYNIRGFLLDNDLPVYVMNPLHTNLYRKSLSLRKTKTDRVDAKTIATMLLSDVDLKSYTDTAYHNEELKSLTRYRFDKVQERAKLKQSVSRLVTILFPELEQLVSSIHGTSIYALLSEYPGAKQISEAHLTRLANILVTTSRGHYRKDRATHIRDAARTSIGSVMPAKSLELKHTIKLIQELTSEINEIEDAIRKIMDELKPPILSIPGMGFHSAAMILAEVGDFSNFNSPDKVLAYAGCSPSTYQSGKLTNCYAHMEKRGSRYLRYALYTATKYVCYWNPVFTEYLTKKQAEGKHYNVALSHATKKLVRLIYALQKSGKAYLAVT

SEQ ID NO: 381390 - protein, 355 aa, unidentified
MERYIGMDVHAGSCTLAVISEKGRKLKDFPVETNGQALVEAIRMIPGHKHLVMEEGLQSAWLYETLNPHVDELVVAGITQSRGPKSDKRDAYGLAEKLRVGNLDKHIFKAPRQFTQLREFSRTHMTLVGDVVRAQARIKSIYRSRGVLVTGVDVYSSRRRNEWLKQLPSPTQLRATRLYDHLDFLLEQKKQAEADLLREGKKHPIVKILETAPGFGPIRAARLVPIVITPHRFRTKRQFWSYCGLGIVTRSSSDWVQTADGAWIKSRVPQTRGLSRQHNHFLKSIFKGAATTVVTQRNKDPIHARYERLTDGGTKPTLAKLSLARMIAATVLRMWKNEEEYDPGRAGLPTQTRRG

SEQ ID NO: 381391 - protein, 377 aa, unidentified
MEKDSRFVGLDVHAETIAVAVAEPGGEVHSLGTIPNTPQAVRRLVNKLGPPETLRICYEAGPTGYVLYRQLTALGAPCAVIAPTLVPVKAGDRVKTDRRDAEKLARSYRSGDLTPVWVPDPDHEALRDLVRAREAAKKDQLRARHRLGKFLLRQGRRAPTGIKAWGVKHRAWLQTIRFAHAAQDATLLDYLTEIDHAAARIARLERAIATAADLAPAPVRAVIAGLQALRGIAKLSAVSVVTEVGALSRFAKPRQLMGYSGAVASEHSSGPHRRRGGITKTGNAHLRRIVIEAAWAYRHRPAIGGTLRTRQAGLSEEVKALAWKAQHRLHGRYARLLAKGKAPTQVVTAIARELLGFIWAIGVHIEQHTAGGAPAAA

SEQ ID NO: 381392 - protein, 352 aa, unidentified
MEIIGLDLHKRETQLCRQQPDGHIVDERIPTSRVRFTQTFGGVAPARILLEASTESEWVATHLEQLGHTVIVADPNFAPMYATRSRRIKTDKRDARALMQACALGAYRPAYRLSAPRVHARAALAVRDTLVRTRARMITLIKTLVRRDGLRVPTGTSRTVVQRVATLELATTAPALGAELAPLLAMLPGLTAQIATLDATLAAVAADDPVVARLATAPGVGVVTAVAVVATLDDITRFRSAHAVEAYLGLVPSEDSSADRRHLGHITKAGNARARWLLVEAGWRILRSKQPEMAALRAWGRAIAARRGARIAAVAVARRLAGVLYAMWRDAVPYDATKLQRRARRAGAPPVP

SEQ ID NO: 381393 - protein, 346 aa, unidentified
MEIITIGIDLAKNVFQVHGVDDAGKIVVRRALRRKEMLGFFGKLAPCLVGMEACATAHHWARELARLGHEVRLMPPAYVKPYVKRNKNDTADAEAICEAVTRPTMRFVAVKSAEQQSVLMLHRSRALLVRQRTMLVNAVRAHLAEFGIVVGLGVRNVTTAVHDLLKPDNGPRASEDRAIPDLVLIALAPLVTAIEDMAGRIKQLEVEIARWHRADETSRRLETIPGFGVMTASAMSASVANPSMFASGREFAAWLGLTPRQNSSGGKERLGGITKMGDRYLRTLLVIGATAVIRYAKEEGSAKTAWIRKLLDKKPAKVVAVALANKMARIAWVLMTRHETYRAAPA

SEQ ID NO: 381394 - protein, 344 aa, unidentified
MLKHAPSQAGRGTHADVHVAAALDPIGGLLGVREFPATTAGYARLLGWLGGFGTVALVGIEGTGSYGAGLARHVTAAGVRVVEAVRSDRQDRRRQGKSDPLDAVSAARAAQSGRARGAPKGRDGAVEAIRALMADGRSAAGERTRTNGQARALIVTGPDDLRARFAKHTAAALVAGIASLRPRPGDVPGYATRVAMRELGRRAVFPDGQLERLDELIVPLVTARAPGLPALYGIGPSTAALLLIAAGDHPGRLRSEAAWAHLCAAAPIPASSGKVTRHRHGPGGDRQASHALWRIVFTRVGSDPATRAYVERRTKEGKSKAEIIRCLKRYVARQVYPHLRPAGD

SEQ ID NO: 381395 - protein, 366 aa, unidentified
MRKPSTKTVRGKGKLQDQQLIIGLDLGDRSSFYCVLNGAGEVILEERVATNPEAMKKTFGKMARSRIALETGTHSPWVSRVLSELGHEAIVAHARNVRLIGESRRKDDRLDAQALARLARIDPQLLSPIQHRSAQAQADLSIIRARYALVRTRTALICAARGLTKSFGERIRSRYIRGFKPAMGDTLSPQLRVALGPLLSALETITARIREYDAQIDKLAEESYPDVALLKQVKGVGTLIALTYILTLEDRRRFRKSRDAGCYVGLQPGRRNSGQSEPQLHITREGDSYLRMVLVQGAQHILGPFGEDSDLRRWGLKLAEHGGKSGKKRAIIAVARKLAVLLHHLWISCEEYEPLHNARKRRLAAA

SEQ ID NO: 381396 - protein, 386 aa, unidentified
MQKLNDLNRSLAALEPDGTLIAVIEMSLSSWLVAGIVPGVERQPLKKLVVDESALLKLLHRWREEAEKAGRRIERIAVAFEAGRDGFWLARWLKARGIEAYVIHASSVAVSREHRRAKTDRLDTELLKRSFLGWLRGERDHCKMVEIPTMKDEDAKRPNREHDSLIGERSRIVNRMKAALVRLGIRGFNPKLKRATTRLDGLRTPEGEPIPPNALAELRRDMERRRLVNNQIRQIEEERLERIEQAPCDGPHVMVRLLARVMGIGIETADMLVHEVLSRNLRDRRAVARYAGLTGSPDESGRKRREKGLARSGNVRVRRGMIQLAWRFLLHQKNSALTKWFRSRTENARGTRKPMIVALARKLLIALWRLVREGIVPDGVVLRAAQ

SEQ ID NO: 381397 - protein, 361 aa, unidentified
MAGTMTWVGLDVHARSTHGAAIDSMTGELTSLRFGPGIEAPVAWLSELPGPVRACYEAGPTGFGLYRAAAAAGISIQVIAPGKTPRGPSDRVKTDRKDAELLARLLLAGSLRRVVVPPPEVEAAREMTRAHDACRRDLMNARHRVSKMLLRHGRVYPKPTTWTAEHRRWLSAQQFDEPASDLVFADLIASVDGLSARKAAIALRLSELATDERWWPTVARLRAFRGIDTLTALSIHLELGADWKRFEKASSLSAWLGLTPSLSQSGESSRQGAITKTGSMLARRLLVESAWHYSRPPRLGATLANRQAGQPEHVLAISNRAQQRLFKVNQRMKLRGKPHNVTVVACARELAGFLWAAATAD

SEQ ID NO: 381398 - protein, 349 aa, unidentified
MSVIAPGLFIGPAWLPELKVRIRKEGSRKMREDITQTAGIDTGKKKLNLGFWPKAERLVVDNAPEDFERLAAVLDKHNIKRVGIESTATYHLAVSEFLRARGFEVIVLQPLQVKAFAKVHLQRAKNDKMDPEMVAGCAAIQTKVHTPHSPEILRLAEHLTFIEQCDDNAARLKTQLERFTNEQYRKKIKQEIARFRLMVRRELKMLEKELRLNRLLSERLDLVLSIPCVGLRSALATLIRMPELGTLSREQAAALLGVAPMDDDSGDHKGKRFIQGGRARPRKTLYMAAFSGALHHNPQLKAFYLRLIKRGKEHNLAVVACMRKLIIMINAVLQRGTPWKTHEGMPCPQ

SEQ ID NO: 381399 - protein, 369 aa, unidentified
MPHVTSIGLDVHARSVAAAAFNPFTGEVVRRSFGTDASEIAEWALGFEDPRACYESGPTGFHMARELRALGLDCAVAAVSKMQRPAADARRKNDRRDAEFIARMLATHNIVEVPLPDMAVEAARDLDRALDDATRELRRSRQRLNMFLIRLGHVWDERNADGARKKAWTRAHWRWVSEIRLEGPQRDALEYYVTAARCAESDRRQLERRVVALAGTDRWRATVEALSCIKGVDTLTAFRLAAEAGSFSRFRSAPAFASWCGLTPSEHSSGESERRGGITKAGNALARTALIESAWHYSTCSPRPKAPAPGTDVPPAIRSRADDCTARLHRRREALAAAGKSACKANAAVARELACWVWEIGCRSEGTVL

SEQ ID NO: 381400 - protein, 423 aa, unidentified
MQGVEDNEEIIERVAAIDVGKAEVVVCIRIPDPARPGRRQQEIVHSSTLTPRLLVLADRLVELGVTRVVMEATSDYWKPVFYLLESRGLDPWLVNARDVKHLPGRPKTDRLDAVWLAKVAERQMLRPSFVPPGPIRLLRDLTRYRAGLVKVRTAEKNRVEKLLEDAQIKLSSVVSDIFGVSGREMLAALLAGERRPTVLAQLARTRMRPKIPLLEEAFVGQFTEHHAFLLRLMLARIDEAGADIAALEDRIRQLVAPFATVVTRLDEIPGVGATAAWTVIAEIGLDMTRFPTPAHLSSWARFAPGVNQSAGKTKGRGATGHGNRYLGQALGEAAVAAAHTHTFLGDRFRRLARRRGGPRATVAVGRSILVIIWHLLSQPDARYHDLGPDYTRRRADPNRATRNHVQHLEALGYTVTLTPVALA

SEQ ID NO: 381401 - protein, 341 aa, unidentified
MEEVTTIGLDLAKNVFQVHGIDAAGNAVVRRKLRRGEVLQFFASSPPSLVGMEACCSAYYWAREIAKLGHEVRLMPPAYVKPYVKRGKTDAADAEAICEAVTRPTMRFVPVKTEEQQAAAIELNARDLLVRQRTQTVNALRGYLGEYGLVAAQGAAKLSELIDALRRGDVDGLPIMAREALLELIEQIDSLEERIERMERRMVRRARQDETAKRLTAIPGIGAITAVALQGLVPDPGGFASARHFASWLGLTPKSRSSGGKERLGRISKQGNGMLRRLLILGATARLRYARRGHHDGDWGERLLARRPFKVAAVALANKMARIAWALLTKGGTYRTSAAAA

SEQ ID NO: 381402 - protein, 312 aa, unidentified
MYYIGIDVSKKDLSVFDGKKDLKFINQEGLTSFKKYLKKKYHLQEVAIIFEPTGVYSLYLKEFCAENSIKAYIVNPKKSHNFTRALGKRSKTDKIDARILYQFHKLINLKDIKVPQIDQEAKTLASYLTSYEFALKQRVSLSHHLESLRDKRLIDLIKKEQKRAKKLEDKIFNDIKEYLGKNQNLKEDYQRLSTIPGIGEKAAIALLTLFKTYQGTNRAQITALAGLDPVRREPGTSVKYKVKISKNGKGIYRKILYLPTLCATVHNQKIKIFYQRLLANHKNKKLAVIASMRKILLIAHAMYRDKTEYVAA

SEQ ID NO: 381403 - protein, 339 aa, unidentified
MQVTTIGLDLAKNVFQVHGITEDGTVAFNRSLRRAQMFAFFEKLEPCLVGMEACGSSHYWARELSKLGHAVKLIAPIYVKPYVKRGKSDAADAEAICEAVTRPTMRFVEMKSPEQQAILSLHRARDLIVRQRTQIINMMRGLLAEFGIIFAQGAGHAIQFAKRVIEGHSPELPQAASDVVTDLSEQLLMLHERVNWYSRRMTKVAKSEPRIALLQTIPGIGPITASAIVATVGSGEQFRSGRDLSAWLGLTPINKSTGGKERLGRISKMGDRYIRRLMVVGMTSRIKQIKSTPERFDPWVADILQRKPAKLAAIAMANKTARIIWAVLSRNEPYQARIV

SEQ ID NO: 381404 - protein, 351 aa, unidentified
MPILADLVQVVIGVDTHKHTHTAAVVAAATGGVLATQTIPTTPVGYQALVALAGQYPQPRVWAVEGTGGYGAGLARLLTERGEWVVELDRPARPARRHGAKSDPIDAARAAREALGRPQLAQPRAGGQRAALGVLVTARRSAVAASTCAQRQLHALVVAAPQRLRTRLAGHSTRQLVTACARLRGHPSWDLECRTTARALRALARRVRALDSEARTHQQAITAIVRAWRPDLLAEFGVGPITAAVVLGAWSHPGRCRSEAAFAMLGGAAPIPASSGQTIRHRLNRSGDRQLNRALHTIVLVRCRFDPATRAYLARRRAQGKTDREIRRCLARYVARQLYRRLQAQPALDTR

SEQ ID NO: 381405 - protein, 361 aa, unidentified
MNATTAAIDLAKNVFQVALADANARVLEQHRLTRAQFERFFDNRKVARIVMEACGSAHHWARVFTARGIEVMLLPAHYVRAYVRRSKTDAADALALLEAARCADIVAVKVKSVEQQSLQAVHRTRSLWMGTRTSRINALRGFCRELGLHVPVGARTGLEAMARAVADDQSPIPALLRPIMQQLLEEIRVLEVRIAQLERQLAQLARESSACRLLMSIPGVGLLSATAILAATSGNVAHFKSARHFASWFGLTPKESSSGGTRRLGRISKMGDKYLRMLLTHGARSVMRAATVAKLRGQELLGVRHWALQLQGRSNHNKAACALANKMARICYAVLRDQTPFGQPATRLSKKMQRQSFELAH

SEQ ID NO: 381406 - protein, 428 aa, unidentified
MHSTQNERINQITSSTLIIGVDIAKFKHVARAQDYRGVELGRPITFENNREGFELFVRWFRNIATEQGFVDAIVGMEPTGHYWLNLAYYLGEQQVLCGVVNPLHVKKSKELDDNSPTKNDIKDAKVIAQLVKDGRYAIPNLLHGKYAELREAMKIRDHLSTDLRVVQGRVHNWLDRYFPEFLTVFKDWECKSARQMLSLCLLPHELAAQSEEALLRHLREVAKRGLGMERMRCLKAAASRSVGIREGTELAKLELKLLLTQYELLESKFEELEEKLDELLEQIPHVKQIMAIKGMGRDSIAGFLAEVGNIERYRHPNQIIKLAGLNLKENTSGKHKGQTKITKRGRKRLRALLFRVIMPLVAKNRAFKALHQYYTKRPDNPLKKMQSLIALCNKLIRVLFGVLKKGHRFCEEKMLQDIPRFTEVSLAV

SEQ ID NO: 381407 - protein, 372 aa, unidentified
MNYNTVYVGMDVHKESFTLCSCKYEDEKASHYQRTPASYKNVLRYLAFLRTIYGEDTRFVCGYEAGCLGYSLYHQLENFNVECVILAPTTMLEQRSKRRIKTDKRDAEIIAKSLAQHNYSPVHIPTKMDNQTKEFIRMRDDHKAELKKIKQQILAFCLRQGYQYDGSGNWTAKHVKWLRSLKTEGLYKEILDEYLLTYTILTDKLNRLDQRIEELASKEEYKESVSKLTCFLGIKTHTALSVIVEVGDFQRFASARKFAGYLGLVPGQHSSGDDRNGLGITKAGNTHVRRLLVESAQSYTRGKIGYKSRVLRSRQAGNSPQIINYADRANERLRRRYYQMVLKDGKKYNIAKIAVARELACFIWGMMTDNIY

SEQ ID NO: 381408 - protein, 497 aa, unidentified
MKNKSTIYGNCNPQLAALFASAGPPTKVLCVALDYAKEKHTALICDGGGRLLHKSFPVQNSAQGAQGLVEQVRQCAKQRHVKPEHVFFGGEDCPSYAENFVRRLRQQEYLVVGVNAWEAKQQRSNFAASNDSLDLLGVAKCCLNQRGQTLEDWPAEYSNLWLATRNRAQLVGQRTALSNRIHTYVDQLVPGFLDAAKSGISPFGQASLELMAERFSPQQLRRRSRKALVCWLRQRGVDQPEQAADQLKALVKDAMEPAPDQVALLQRSLAQLVKLYEEMSAAIGLMDRELAHWLARTPAAFLTSIDGIGITLAALWTAELGPTQQWRPVRSLCAYAGVVPRIKQTGGPDRAPVTGPPQRRCNTRLKNALLQAVEKVRQWDRADLLQRAQHLEEQGSHVEFGMAKWLLRLGQYLVRNHAVYRPKALMGPDTPKADLASYYQGLWGKLIEKWKAKADLKDAFSAAHPLGQWRKMVQQLYALKLPLPQGRKGQKASAWAP

SEQ ID NO: 381409 - protein, 373 aa, unidentified
MSVYVGIDVHRKRSQVAVVDEGGAVQVNRNVPNGVESVLQVIGELPVGTPVAFEAAFGWGWLVELLEDYGYAPHLVHPLRCKAIASARLKNDKVDAAILAQLLRADLLPEAWIAPPAVRLLRALLRHRCQLVRLRTLLRNRIHAVLADHGQDRPAGCWSGPGRAWLADLSLPPASRRVIDDDLALIDALIEPVARLDAQISERAKTDPRVKILTTLPGVGELTALVILAEVGDFSRFANARKLAAWAGLTPTVRGSDLVVRHGHISKQGSAWLRWIGCEAAQTAKRSPEFALTYQAIARRRGKKIATTAVARKLLTRAYHLLADADGTAGPKNPTAHSRAVPADRTRPEGREVTKPPGELAKSHEPATRRSLT

SEQ ID NO: 381410 - protein, 429 aa, unidentified
MSYRIAGIDVHKKMLAVVVSDVEVDGEHQFERRMFGSNPEQLRSLAAWLVEQEAEEVVMESTAQYWKPVWAALEHYWKPIREKREGARRRSGTLHLAQAQSNRGRRGRKSDFRDAERLVKRLVARELTLSFVPDAEQRLWRTVTRRKYQLTRVRVRLQNHLESLLEEAHIKLSSLVSDLLGASARRMLKALAEGETNPAALAALADRKLRATPEQLCDALGACTELNPVYRRLLNMMLEELRLIDEQTGQLDQEMANLLSLHQDTVKRLAEVPGLGVDSAQQIIAEVGATAATFPSAEQLSSWAGTCPGDEESAGVNYSHRSPKGNRHMRRLLNQTANAAVKTKGSIFEIVYRRSVPRLGHNQAIGAISHRQCRLIWLILHQGVRYEERGPAVTQQSKQKRTARMIRQLRRLGYRIELPKPQPRQAQVQ

SEQ ID NO: 381411 - protein, 411 aa, unidentified
MSQMLVGIDVSMRSHHVQFMHGEGHSLADFSVSNDIEGANTLIQKLLKTAEKNQLTQLKIGMESTDQYSWHLAHYLKNQLQGYAPLFQTAVFMLNARKVARFKKGYDTLPKNDRIDAWVIADHLRFGRLPYDMQETLQHEALRRLTRTRFHMMHEIARNKTYMLNQLFLKFSGLRQDNPFSNTFGTTSLAVIEELDPEMIAEMPLEELVEFLQEKGKNRFAEPEEIAKYLQKLARNSFRLDKTMADPVNLSLSVILSTIRHMEAQVKRLDKEIERMMKGFTQTLTSVKGIGPVYAAGLLSEIGDIKRFDDHHALAKYAGLVWSQYQSGEYESENTHRVRTGNKYLRYYLVQAADAIRKNDTEYKTFYQKKFNEVTKNQHKRALVLTARKLVRLVHSLLRTNQLYIPTERRE

SEQ ID NO: 381412 - protein, 310 aa, unidentified
MTTTCYVGLDVAKAHLDLATAPATTAVRFPHTEAGLSALVAHLRPLAPALIVLEATGGYEADVAAALALAGLPVAVVNPRQVRDFAKAIGRLAKTDALDADVLARFAAHVRPEPRPLPDAAQQALTALVARRRQLVEMLTAERNRLLVAHGRVKHDVQTHIHFLEQRLKATTTELRSTVQESPVWRAQDNLLQSVPGIGPTTSATLLAELPELGRLSRQQIAALVGVAPLNRDSGARCGPRVTWGGRAAVRAPLYMATRVAIRWNPVIRAFYQRLRAAGKAPKVAAVAAMHKLLTILNAMVKAQRPWQPA

SEQ ID NO: 381413 - protein, 367 aa, unidentified
MKKVSTVAAKQSRNISQQKLTIGLDLGDRNSWYCVLDEAGQIQLEQRVRTTAKALSEVFGAMRRSRIALEIGTHSPWISRLLSELGHEVIVANARKVRLIGESRKKDDRLDAQTLARLARIDPQLLYPVKHRSAQAQADLMMIRARAGLVRARTGLVNTARGLAKSYGERLHGCNVRNMSPEKAESLSPELQAALEPLLNAIESLSERIVEYNDGIENLAQQSYPQVALLKQIKGVGTLIALTFLLTLEDPHRFHKSRDVGGYLGLQPGRRNSGQSEPQLHISKEGDPYLRTLLVQGAQHILGPFGVDCDLRRWGLKLAERGGRNGKKRAIVATARKLAVLLHHLWVSGEAYDPLHNSNRVTVAAAA

SEQ ID NO: 381414 - protein, 342 aa, unidentified
MLYVGIDIAKNKHDVTALNVPGKTVLKPLTFSNNKAGFELLDLSFRQLNQDCLIALEDTGHYAFNLLNFLHEQGYKVYTYTPLLIKEFAKSLSLRKTKTDKKDAHGIALKLLSDPNREQFQHDNRQVELKILARHIHRLKKKQSDWKVQYTRCLDIIFPELDKIVGKHSEYTYQLLTCYPNPQKRLEAGFDKLIEIKRLTASKIQDILSVAPRSIGTTSPAREFEIIEIIKHYKRLIDKAETCVNDLMAEFNSVITTVTGIGGRLGAVILAEIRNIHAFDNPAQLQAFAGLDSSIYQSGQIDLAGRMIKRGSPHLRWALIQAAKACARFSPAFKAYLKTKLE

SEQ ID NO: 381415 - protein, 345 aa, unidentified
MESMYYIGLDVHKKTISYCVKDVSGRIHAEGKIPATRFDLDRWMKTLPQPWTVAMEATIFTGWIYDHLRPHAAAVKVAHPLMLRAIAAAKKKNDRIDAKKIADVLRCNFLPECYMAPTAIRERRRTLRYRNLLVRQTVQLKNRISGLLMEAGVSYNKAKLHKVGYFRELLKSNPDIDESLRPLLQLCRETLVRLQKTESALIRSLAHDRFLVERVEHLMTIPAVGPITALTWALEVGEVSRFSSIKKAISYCGLCGDEQSSGEHVKRTPISKQRNKHLQWVLVEAAHMAPRLSPELALLYDREKQKGNANRATLAVARKLVAYLVAIDRSQRDFLLVEKENQAAA

SEQ ID NO: 381416 - protein, 337 aa, unidentified
MTKLPVFVGLDYHQSSVQVCVMNASGAVLANRKCPNDWRAIVQVVRPLGAQVHAAIEACGGAADLADELVQHAGWSVDLAHPGYVHRIKQSPDKSDYSDAQLLADLERVGYLPRVWHAPQRIRELRRLVRYRQQLAAARRSLKLRIRALLRDHRLSTSNANAWTKAWLAWVAETTELPELSRWIMDQHLGELKRLAEQIREVEGLLARIAEEDRLVVELLKIPGVGLVTAVTIRAEIGRFDRFRNGKQLARFCGVSPRNASSGERQADAGLIKAGNAELRRVLTQAAHRLIRYEPRWQALACQLKQRGKPIPLVVAAVANRWMRTLYHQLQSYGLAA

SEQ ID NO: 381417 - protein, 410 aa, unidentified
MDVLYTRCAGLDIHRDSIVACVRLAEAGGVTRLVETFATTTTDLERLSEWLRGHGVTAVAMEATGVYWKPVWAVLAGHFELVLANAHHVKAVPGRKTDVNDATWLADLLAHGLIRPSFVPSLFEQALRDLTRARKQLTREKASHVQRIDKTLQAANIKLGSVLSNIMGQSGRALLEALAAGESNPEQLAGLVRTKIRASHAQVVEAVRGRLAAHQRLLLRLYLTQVDALDAAIAAIDHELGERLKPVQETVQRLTTMPGLSPLSAAVVISEIGLDMSRFPSAAHLISWAGLCPKNDESAGKRRSTRLRPGAPWLKAVLVQSAWCAVRVKASYLHALFQRLKARRGPRKAIVAVAAAMLTAIYHMLKRGAAYHDLGPDHFQRTERSRLAARLARKLGELGFDVTLTQRAAA

SEQ ID NO: 381418 - protein, 386 aa, unidentified
MPQSNDLSRCLIPFRQDETLVAVVEMSKTSWLVAGMIPGVARHPLKKLVPDEKALFELLERWRDEAVKAGKIITRITVAYEAGRDGFWLARWLRARGFEVYVVHSSSVAVTREHRRAKTDRLDCEMLKRVFIGWLRGERDHCRMVAIATQTQEDAKRPNRERENLVGECTRIVGRLKAGLARLGIRSFNPKLRNAAERLESLRTPEDVPVPANTLCELRRDMARLRFVKDQIKQIERARVRQLEQAPEQGPQQMVRLLARVLGIGIETADMLVHEILSRNLRDRRAVARYAGLTGSPDESGQKRREKGLSRAGNARVRRGMIQLAWRFLMFQKTSALAQWYRVRTKDAGGAVRKTLIVALARKLLISLWRFVTTGEVPVGVILRFA

SEQ ID NO: 381419 - protein, 400 aa, unidentified
MRVVFGIDVSKVSSEVAILVNGEKVHNYTMSNDAIGFSRLLGDLKTVHKPEIIFEATGVYSRRLQAFLDEHGYAYTRLNPLEAKKQPDSLRVRKTDQIDAEKLAQSQFVLNRKTTYVQKEVYQNLRDLSRFYQNLTEDIVRAKNRLHKVLQVTFPELENILSTPTGEQYWNLVITFPCKDFVLELSNDELSKSIRLSTSKRISDKRVAYLAEKLIALANQSYCAVKKTSSILEEVRYYAKELLRLSEQRQAVLDEMVELAQPLPEYDILLSIPGIAETTATSIIGELGDIRRFQSANQINAFIGIDLRHYESGNFLAKEHITKRGNPYARKILFKCIHNIASASHTNPCHIADFYKKRKRQSQTTSTKPHTIASIHRLIRTMYYLIMHNKLYDYASTQNR

SEQ ID NO: 381420 - protein, 445 aa, unidentified
MFIQSQDDSHYCYSFFTKVVILMMKLKYSICCGLDVHKNVIVATIVITNKDGVSEYKQKSFSTISSDIQKFHNWLIENHCYHVCMESTGKYWIPIFNYLENDIEVCLTHPKYVKAIKGKKTDKKDSKWIAGLYKFDLVRCSFIPPKDFRQLRELARYRFKLVCMKSSEKNRIQNCMTVSNVGIASVLSDPFGKTATEIMSYLLEHTADSIDEKAVRKLIKKGAKAKSDEIIEAIRGYNIETDQAKKLELARAHLDFLDDMITQTEVELYVRIKPYYEFVEFVSSMPGMTGLSSTIVLAETGVDMNIFDNAKHLCSWCGLSPANNESAGKKKSVRIAKAGDYLKPMMVQCALAAVKSRKQPYFAIKYGRIKKRRGHKKAIIAIARMMMVCIYHMVSEKKPFTPTDYEELMDPQNHVERVVLNENNVFAYLETLGYDNSKLVKRSDN

SEQ ID NO: 381421 - protein, 337 aa, unidentified
MLSIGLDVHWRSFVLCILDTNGKRIKEIRRKGGWQRLLESLRQIRQPFAICYEASCGYGYLYDQLSKLARRVVVAHPGQLRLIFRSKRKHDRVDARKLATLLFLEQVPTVHVPSVAVRSWRQLIEFRQRLIRQRVRVKNGLRSLLRSHGIAAPWRGSLWTQKGQAWLAELKLPTPAAAVQRDLLLDDLQRVAQQIKRVEQELKRIAAREPAVALLQTIPGVGPRTAEAVVAYVDDARRFARSRQVGSYFGLVPCQDQSADKNRLGHITREGPSTVRKLLTEAAWQGIRRDERLKRYFERIQGSDPGRRKIALIATAHYLVRAMHAMLRTGEVWRAAA

SEQ ID NO: 381422 - protein, 429 aa, unidentified
MTESHDTPRAVTLVAIDVAKGHHDVLVEPPAPARRRRFRLSDSVEDYERFAGYLRGTGAPALIGFEATGNYHRPLAYFLQRGGFELQLIPTLALARTREAMHNSWDKNDPKDAQVILHLLKTGLGQTWHDPLMNGINDAQELSKTHHQVTLARTRVWHSLRNHYFSLYFPEIERFIRSDHSEWLINLLLRFPTPASISELSEADFATRAWTLVGRKVHKAALLGEIYAVAGRSVAIPVTLESPAITMFRLVLEQYLGLCRLREQIAEQAQALLADHRDSQRLMTVPGIGASNALTIIAEAGDLRRFAHHRQFLKFCGMNLSTQQSGHFRGQTRLSKYGNARLRTVFWLAAQSAVRMRENSLRRKFDDYVHRDPLNPDLRRKAYTAVAAKLARIVFGLIKSETDYRPFFEHSFQVDEPSRRGPLGRVSTP

SEQ ID NO: 381423 - protein, 312 aa, unidentified
MFEGKVVHEEETANHQNAIMALLHQFEEDYGIAGGQMLVCAEHTGQYTFPLACACKAVECKLWLENPAEIKYSSGVQRGKNDKVDAKRIAIYAKRFQDRVQYYERPTEDIERLKQLESERTLYVTDLAKYKGQMKDQKDYMPRKLYERKMKRLQTLMDDLEKAIQAITYEMDEVIASCPVLCRQRELLMSIDGVGRVVATNMIITTEAFTRFDDPRKFNCYAGVAPFSYSSGSSQHSKARVSHRADKVMKRLLHLAAVAVTHRIGGELKKYYERKVAEGKNKMSVINALRAKIVARMFAVIKRNEKYKPILS

SEQ ID NO: 381424 - protein, 364 aa, unidentified
MCDDQRLGRKEPNVIIIGVDYHPSDQYIAFVDTETGECGERQLNHSDKEAEKFYRELAQRGVSVRVGMEATGYSRWFERLLAELGIEAWIGDAAEIKTKRVRKQKTDREDARLLLRLMRENNFPRIWVPSPENRDLRQLLWHRHRLVQMRTRIMNQLQALAMNEGQRRRKKLWNEQGRAQLEKLPLATWASRRRKDLLELLDRMNPTIEELTAAIEQEAKKWPEVLRLMTHPGVGPLTALAFVLIIGTPERFKCGKQIGSYVGLIPCEDSSAGHQRLGHITKQGSSLLRFLLGEAAQAAARWDADGRRRYIHLAMRRQRNIAKVAMARRLAVRMYWMWRNGWEYAEWVKFGSHAGQLGTGHGVK

SEQ ID NO: 381425 - protein, 262 aa, unidentified
MIAAINVIGIDVSRDWLDGFRLPGLQRFRLANSPEGHEELISMICQMSELVQVGFEATGGQEWALWAALVEAGDEARQLPPAQIKAFAMSRGTRAKTDRIDAELIAHFMMFRPEAGRTLPSDNLRVLRALTTRRAQIVEMRKRLTAQISARKKQGIPADIEDLDAELKAMLDAQISDLEQRINRAISSEETSATKAHLLRSIPGIGPVSAAMLIAEMPELGRMTAGEAAAMAGLAPVPHDSGAMRGRRAIAGGRRALRHVLF

SEQ ID NO: 381426 - protein, 305 aa, unidentified
MLSWVGIDISKSDLVVWVQPQGDGFKVANTSQGFVELIERLSPYDVARVLLEATGGCETKVMAALQAAGLPVLRINPRRVRAFAVAMGKNAKTDPIDAAVLADFAEVLQASSNKVISPEREALRELIQQREHFVQQRDDNRRRLQQAQQAAVVTIIKDHIHYLQAQIKQLDKVINRSMYDLDAEKANRLISVKGIGPVATASLLVYLPELGELDRREIAALAGIAPYNEDSGKHSGRRQISGGRARVRRALYMSCWVVIRHQADFKARYEALRERGKSAKVALIACMRILLIRLNAMLRDGTEWR

SEQ ID NO: 381427 - protein, 392 aa, unidentified
MLFVGIDIAKRNHEASVIAQDGRVVRKAMRFANSQAGYNKFMDIVRSLSEPVVFGMEATGHYWLTLYTHLRNDGFTVHVINPIQSDALRGMYIRKTKTDSVDSVIIADVIRFGRYCETSVEPGDLHATRELCRQRFYVIDMASDLKRKVIALLDQVFPEYEKLFSDTFGVSSMELLSQYTTPEEMLSVSSQQLAEVLEKASRGRLGAEKAVEIQDAARNSFGIVLASSSFSLIIRQYIEQIRSLEASVDVFDAEIARLLSGFDTQLTTITGIGSTLAAVILSEIGGDIRRFSSPAKLAAYAGVDPTVKQSGDFSGTRMKMSKRGSPYLRRAIWLASTVAAFKDPAIHALYERKRAEGKDHMTVIGHICRKMISIIFAVLRDNTPYVPAGISD

SEQ ID NO: 381428 - protein, 341 aa, unidentified
MKNLFIGIDFSKEKVDVAIIFAENLSETASRVFNEFKTTVSGYKQLVKWVEQNSYGIDSSLWLFCGENTGDYSKGLCNFLYGKGYDMWLENAKSIKDASGLRRLKSDRADASMIAEYAMRNYDKAIMYEPLSESLAQLRELFLYRQIVVRHRCSFQVRRGEKRLTMEKSPVKTMISQSGRHIVSELNKEVAKIDKRIAELIKSDEELSEVYTIVTSVPGIGTQNAVCLMIYTDNFRKFNYNSRKIACYYGIAPFGKDSGTSVHSDPHVHYMANRQIKAMLTQAALSAVNFNPIMARYYMRLVECGKKKQVALNNVKNKLIHLVTAMVRNHQLFSHEYKISA

SEQ ID NO: 381429 - protein, 409 aa, unidentified
MGASGGQLKVFAGKQSPGVSVMTQAPVPNSVPTAPDYDRTLVLAIELSNKSWVLAAQVPGLPRVKAKRTIEPTAEALLAAIQGYRERAQAAGRQVERVVATYEAGWSGFWLARWLATHEIETHVVQPSSVPVDRRARRAKSDGIDAELLLRTLLAWLRGEPRVCSMVPVPAEADEDARRCVREREELVAERVALVNRIGAVLATLGVGEYNPLLRNRRERLDVLRTALGTPLPPHAYAKISRTLDRLDLVRAQIANLEQERDAVLENEAPDRAGEMIQQLATLRGIGVQSATVLVREAFVREFANGKALGSYAGLCATPYSSGGTEREQGISKAGNRRLRTVMVELAWLWQRYQPGSAPVSWFRERVGGTGARMRKVMVVALARKLLIALWRFATQGVVPEGAVMKPAT

SEQ ID NO: 381430 - protein, 366 aa, unidentified
MRKNSTVVKNGNKIFKQPALTIGLDLGDRSSCYCILDESGNVILERSVPTTSSGIRQAFGKMPRCRIALETGTHSPWVSRQLAQMDHEVIVAHARNVRLIGESSRKDDRLDARTLARLARIDPGLLGPVKHRSAQAQIQLTVIRARAALVSTRTALVNAARGLAKSYGERLKKCGTEQMNRDSSEGLSQEMREALDPVLREIESLNERIKEYDQRIEQIAKEVHPEVARLKQVKGVGTLIALTYVLTLDDPRRFRHSRDVGCFLGLRPGRRNSGQSEPQLHISKEGDRYLRTLMVQGAHDILGPFGQDSDLRRWGLKLAERGGKNAKKRAVVAVARKLSVLLHKLWVSGEVYEPLRNNRKAERAVA

SEQ ID NO: 381431 - protein, 389 aa, unidentified
MGWTQPHYLKRPLKGQDGKLDHPNRGREEGPVMKVTTIGIDLAKDVFGLHGVDGQGRVAFKKRLVRSRLLEFMSQLPRCLVGLEACSSAHYWARKIERLGHRVRLMSPRFVKPYRKSDKNDANDAEAICEAVTRASMRFVPIKSEAQHEVQALHRVREQLLKSRTALVNQVRGLLAEHGIVAPQGIARARRLLLEILADPERHGLSGLFRETLQEIAERLRFFDERVGAYDDRIERVFKEDERCRRLAKIEGVGPLVATAVVAAVGNASEFKSGRELSAWVGLVPRQHSSGNRSQLLGISKRGDRYLRTILIHGARAALRRADHKRDQRSRWAMRIKLARGYNKAAVALANKNARIIWALLTRGENYRPPAISVASPTADRISLTQVQA

SEQ ID NO: 381432 - protein, 343 aa, unidentified
MAKQTIIGIDLAKHVFQVCIVTPTGTIKMNTTVARGKLLALIARQPPALIFMEACGGAHDWARRFCALGHEVRLLAPQYVTPFRRGQKNDPNDALALTEAGQRPNIPTVPIKTIEQQDLQALHRVRERLVKHRTAVVNQVRGLLLEYGIVIPQGIARLRKRLPRVIEEADNGLSFLMRDLLQSLQSELSALDTRITERTGQLTRLSHELEACQRLQEMEGIGPLSATALVAALGNGHNFHDGRQVAAWLGLVPRQHSSGGTTRLGGITKGGNSYVRRLLIHGARAVISHVRDKPDAKSAWIRQLVTRIGVNKACVAVANKMARVAWALLHTGAQYRKPAAPSI

SEQ ID NO: 381433 - protein, 338 aa, unidentified
MKLYAGIDLHSNNSVLVVLDENNKVIYSKHLPNDAQVILGVLAMYKEQIEAIAVESTYNWYWLVDALQAEGYDVRLVNTAAVVVYDGLKYSGDFADARHLAHLLRIDLLPCGYIYPKEPRALRDLARKRAQLARQKTTQLLSIKNLLVRNTGRDTPSYTIKTWTPEHVAALPLLPEQHLALQANWVVMQALEQQIHAVEAELLRQLKPCKAFQLLKTVSGIGDILSMTIYLETGDIKRFDSCGNFASYARMVNSKRESNGKKKGEGNRKCGNRYLCWAFMEAAHFAIGSDELIKRFYQRKCAKSLKVVAMKAVAHKLARACYNMLKDGVEFDVKRAFN

SEQ ID NO: 381434 - protein, 334 aa, unidentified
MKKFKIFTGIDVSKSTLDFCIIDFESKVLLQGKTSNDSKGIKQLLNTIQKLKLTLNEVLFLFENTGFYSMPLTIFLSEKDCDFTEIPALEIKRSKGITRGKSDKTDAKDIALYGLRHLDKIILSSAPQIEILQLKVLFGEREKVVDAIKIFNSTNELEGFIPDAVFKIVSPINKKTLTLLKKMLQCIEEKINEIIEQNERLKQQKYLLKSIPGIGDVIALYLLLATKGFSVFKDWRKFASYSGIAPFEYSSGTSVRGRTKVNHFADKKMKALLHLAALNSIRYNPEIKSYYQKKKNEGKHTLLVLNNIKCKIVSRAFAVITRETPFVNTYKFAS

SEQ ID NO: 381435 - protein, 400 aa, unidentified
MISVGIDVSKGKSTVCILKPYGEIVSKPFNITHTQKDLSELSSMLFRLNDEVKIVMEATGIYHLPVLTYLQEKGFFVSVINPYLMKSYRNESLRKAKTDKIDSRIIANYGIDHWFKMKEFQTSGEIYEELKLLGQQYRHYMKLHLLSLAELTHLLDLTMPGIKNLLASWNETNRKDKRSDFVERFWHYDVITSMSEQEFTEKYILWAKEKKYVPSQEKAKVIYTLAQESIPTLPSETSSVKMLVTEAVRVLKEVDATLGLILSRMQEIAKTLPEYSVVREMGGVGNTLAPKLIAEIGDVRRFRNGKALVAFAGIDPPPYESGQFVGCNRKISKRGSASLHKVGYETMRSLKMRSRPEDPVYRYVVKKESEGKSKKSAKIAGLNKFLRIYYARVTELYKNI

SEQ ID NO: 381436 - protein, 388 aa, unidentified
MNKIIYIGMDVHSTNFTLCSFEPGYGFEADKIFGQTQIKEDIFNSTVKYINKLKSMRPDVDVVCGYEAGCLGYNLHRKLKAKEIESVILAPTTMAVSRNCSKKKNDYRDAITIAKCLASSAYKAVYIPDDKDEDVRDFIRMRDDHKTALKQIKQQLNAFCLRHGHHYDKTKWTGLHLNWLRKLELSKVKRETVEEYLATYEALTSKIAALDVRIEDIASEERYAEKVNKLKCIKGIKTHTALSFVCEIGDFNRFKSADKFAGFIGLVPGECSSGNTERMLGITKAGNRHLRRLVVEISNTYRRGAVGRKSAVLKERQKDMPKDVVAYADKATNRCQKKYQRMMFKGKNSNQAVAAVARELCCFIWGMMTGHHSRTAQAEASVYRSELD

SEQ ID NO: 381437 - protein, 389 aa, unidentified
MKIYVGIDIAKLNHFAAAISSDGEIIIEPFKFTNDADVFQLLVSKLESFDKNSLIIGLESTAHYGDNLVRFLVTELYQVCVLNPIKTCQMQKNNVRKTKTDKIDTYVIAKTLMMQDNLRFVSFFDLDMMDLKALGRFRQKTIKQRTRLKIQLTTYVDQVFPEIQYFFKSGLHQHAVYALLKEAPSPKEIASMHMTHLANLLKVNSHGHFTKEQAKELRVLAQKSVGANDSAISIQITQTIQQIELLDSQLEKIEAEMTDIMKFNDSVIMTIPGIGYINGGMILGEIGDIHRFSNPNKLLAFAGLDPSVYQSGNFQAKTTRMSKRGSRVLRYALVNAAWNVVRNNATFKAYYDAKRAEGRSHYNALGHCSGKLVRVIWKMLTDNVEFNLK

SEQ ID NO: 381438 - protein, 304 aa, unidentified
MFGIGIDVSKATLDVVVHGEQFRQFSNDKRGFVRLIRWLKTWPIKQVVLEASGGYERAALDVLHAAGLPMVRINPARARRFAQGTGRAAKTDRLDATVLAQMAHLLPLTRYVPPAPWQQRLAEFAQCRRHLVQMRVSEMQRLRRLVDPDLIAMKQRHIAQLSDDLKQLDKAIAEQLEGQPGWKNIGTLKGVGPILISTLACELPELGSLGSKAIASLVGLAPMNRESGTWQGQRRISGGRAVVREALYMAALTAIRYEPGLRAFYAGLKAKGKASKVALVAVMRKMLVILNARKRDAEVALGCP

SEQ ID NO: 381439 - protein, 332 aa, unidentified
MYFNHYLGIDISKATLDAALIIKEGEVVGQTKVANNSHGFNDLASWIRKLKVKLSDVLVCAEHTGIYGYDLQIWLDDMQISFAFVSALEIKRSLGIRRGKNDAVDALRIAEYAYIRRESISLSHKPSDVIFQLRALLGERKQYVRMRAALLARKDALHQYESKESIYRREEIIDKYAEYIASVDKQMRGLMEHDDEIKRNYELISSVKGIGLVNAINTLVYTNNFTSFQTPRQYACYCGIAPFEHTSGTSIKGRTAVSKMGNQQLKCELTMAARSAIIHDPWMKQYYKRKMMSKGNAPGAHGIVLNAIKFKLIVRMFSVVKSGIPYKVMAYC

SEQ ID NO: 381440 - protein, 410 aa, unidentified
MERVLERCCGLDVHKKTVAACIRIPGKKKGQREQEVRTFGTTTRELLELRDWLEANGVTHVAMESTGIYWKPIFYVLEGAFSCLLANAAHIAQVPGRKTDVKDCVWIAQLLEHGLLRGSFVPEAPIRDLRDVTRYRKGLVQERTRVSNRLHKVLEDAGIKLASVATRVLGVSGRAMMEALVAGTTEPAVLADLAKGRLREKLPALREALAGSFRAHHAFLVSQLLAHVDYLDEAIQGASVQIETLMAPYAAEIERLDTIPGVNRRTAEVLIAETGADMSRFPSAKHLASWAGLCPGNNESAGKRMAGTVRKGNRWLRTALVEAALSASRSKDSALAARYRRVMRHRGHKKAVIAVAHAILISVYYMLSRQVPYQELGPDYFDRRHAERARRRAVQTLERQGYRVTLEPAA

SEQ ID NO: 381441 - protein, 306 aa, unidentified
MLTNNVIAIDLAKNVLQACHISVHGELLSNKPLSRQKMKEFLAKAKPSIVAMEGCCGCHYWGQLAEKHGHQVRIINPKKVKGYLQGHKTDHNDALAIANAAIQIGIKYSRPKSLEQQSMHSLESSRRFLSRSVVSLGQHIRGTMLGYGVANPRGEKGLKASVQTALDGETSIPANVVSVLSMLWNQYKELKAQLIAFEKEKNALTRQIEPCQRLMEIEGVGETTAAMLYTTLGDGKQFKNGRQASAFVGLTPKQHSSGGKVFMIGIDKCGGRERVTLPSLSWCNVLRWATTRKTKDPEGCLVEEHH

SEQ ID NO: 381442 - protein, 452 aa, unidentified
MAKKAQKIKTDKGLALKIVNPNAAGIDVAATEMQVCVPADRDGENNRRFGSFTKDLNEISDYLLACGIDTVAMESTGVYWIPIFMLLKDKGFDVILVNPRDVKSYSDKKTDEADAEWLMLLHSYGLLKPSFQPENLARRIRNISRHRDSQLEQAAKAVHHMQKALEQMNVKITNVLRDITGVSGMRMIRAIIRGERNAEELAKLADSNCKASRETFIHSLEGTWDEDHLFELEQSLENYEHFQHQARLCDMKIQQIARQYAAHVDMERPELKRSKKRIAKKNAVNFDIEMYAHALWGVNTMAIPGVGPGALLTLVGELGHDFVDKFQTPAKFCKWLNIVPNNKISGGKVLSSHVPKRMSIAGQAFRQCANAVKDSKNLMGYYFRRQKAKGGHRYAIVCTAHKIAKIFFSMVRDGAEFNEKLCAVDEKQLLEKKIARAQKALDRMNEKLRKSA

SEQ ID NO: 381443 - protein, 351 aa, unidentified
MSQKTNAVAVRTIGIDTGKNTFHLIGLDEQGTIVLREKLARGRIGRRLANASPCLIGIEAGMATHYVARELLALGHDVRQVPPAYAKPFRQGHKNDFRDAYAIAEAVLRPSTRCVPVKTDDQLDLQALHRVRSRLVGQRTAVINQIRSFLLERGIAVRQGPRFLRRQLPEILAKRIDVLSPRMIGIIEDLGGDWRRLDERIERVTEEIEQLAHGSESCRQLMTVPGIGPLIASAMVAAIANGAAFAKGRDFAAWLGLVPKQMSTGDRTILGHISKRGNRYLRTLFMQGARVILLRPANWARHSFGPWLTAAAKRLHHNVLAAALANKLARIAWTVLAQRRNYETRVVTEAA

SEQ ID NO: 381444 - protein, 326 aa, unidentified
MNLMPLGIDIAKQKFNVCLRFAHDKLKHKVFTNNQAGFTQLHRWLQQHAGARVHACLEATGAYGEALAFYLHEQGHLVSIVNPAAVKAFAASCLSRTKTDRVDAELIARFCLAQQPPAWEPARPEVRELQALVRRLASLIEMRVAEENRLAAGPTVPEVHRSLEESLAHLQAQIKRTEKLIRTHLDQHTGLRQQRDLLTSIPGIAATTAALLLAELPHLKQYRSARQVAAVAGLVPRERQSGSSVKGRVRLSKIGNARLRKALYFPAITALRCSPFMQQWAQGLRERGKSKLSVVGAVMRKLLHLAYGVLKTNQPFDPEWTTRAAG

SEQ ID NO: 381445 - protein, 362 aa, unidentified
MLKQEQQVKKISFEGEQIFVGIDTHKKTWKVSLYHQQTSLKTFTHEPNSKQLVRYLRRHYPGADFHCAYEAGFSGFWLQKQLTKEGIDCIVVNPADIPTSHKDKEFKTDPRDCRKIAIALRSNLLEGIYIPTDAGLEYRKIVRLYHDMSRNYTRYKNKVKAIINFHGIEYPEEFRSENNHWSKRFYLWLKQLTLSTEYGNWSLQWYVEECLRAKEQKRIALAKVRELSKTECLLNNVTCLRSISGIGLVTAMTIITEIEDIKRFKNLDTLCAYIGLVPSTSSSGEKERIGEITRRGNKYLRHVIVESAWMAIRRDPVLLNAYLRVKNKSESNKAIIRVSRKLAARIMYVLVNQKPYEVKYMQ

SEQ ID NO: 381446 - protein, 309 aa, unidentified
MKKEKVYVGIDVAKTHLEVAFEQARWRLSNDARGHRELMKRLTQTNTSIQVICEASGGYERALLLALERSGIDFSLIQASRVRQYARACGLLAKTDVIDAQLLVRFGQAIVPRPSKTLPPAQAQLRELEAHRRHLVRLLVAQQNRRPQLSNKTLLGLDHRLTTQLRKQIAQIEALLAASIEQDQELSRKARQLTSIVGVGARTATLLLAQMPELGQLNRREVAALAGLAPFNRDSGSLQGKRAIFGGRRAVRCGLYMAALVAARRNPILAPFYQRLRQAGKSPKLALTATMRKLLIVLNSTLKTDPLPT

SEQ ID NO: 381447 - protein, 326 aa, unidentified
MAQEKKVDKVGIDVSKAKLDVALLREQGKFRDKVIANSRKGFAELTAWLAKHGVTQAHICMEATGAYWEDLAEFLVDAGFQVSVVNPVLIKKFGESLGERSKTDKLDARVIARFCAERAPQHWQAPSKAVRGLRALVRRRAALIELRTEELNRRDSASEPRVLESIGKVIAMLDEQIAQIERQIHDHIDSDPTLKEQRQLLQSVPGIGKVVSGMLLSYYGGELRFDSSKQAVAFAGLDTSRRESGTSVRAKPRLSKKGHSNIRGTLYMPAVVAMSKTPWGKAFAGRLAAAGKPPLLIIGAVMRKLLAIAYGVLKSGKPFNPALHGA

SEQ ID NO: 381448 - protein, 429 aa, unidentified
MNNNRKRRINQIDEDSLIVGIDIAKNKHAARAQDFRGIEYGETVYFVNRDHGYERIKKWILKLAKKASKKDIIIGLEPTGHYWLPLYKYFTASGFKVVTVNPHHVEKSKELDDNNPTKCDKKDALVIAQLVKDGRYSTPNLPEKEYAELRVAINHRERLMKDLNGIQNRIIRWLDIYFPEFNDVFKDWEGKAALSTLKNLPLPEKINKEEVKEIVNIWREDGIKRGVGKKRAKKLKRCAQRSIGIQTGKKMAELEIKNLLKQYEQLSKQLENLEEKIEKILKEIPGAKEMISIPGVGAMTVAGFLSECGNLDDYNHPKQIIKLAGLNLMEHSSGKHKGETKITKRGRPQLRSLLYRVSMPLVRHNNEFSQIHEYYKNRSKNPLEKKQSLIAICCKLIKILYTLGTREIEYDGEKMLNDIKRPKEYKKAV

SEQ ID NO: 381449 - protein, 313 aa, unidentified
MSEQKVFVGIDVSKRTLDVMALPSLESFSTSNDATGHEEILKRLRLMGPALIVVEATGGYEQALTLALASQELPIRVVNPRHVRHFANAIGLTAKTDRIDARVLAEFAQRVTPALRTIRSEAQQALLDLSTRRRQVMEMLVAEKNRVKQARGAVRREVADHIKFLEQQVKNVDRELRRLIAESPEWQLQDELIQSVPGVGGGTSASLTAEVPELGRLTGKQISALVGVCPFNRDSGQWRGQRHIAGGRSGARCALYMATFNACRCNPVLKAMFERLTAKGKPYKVVMTACMRKLLTILNAIVRTGRPWTLQTV

SEQ ID NO: 381450 - protein, 318 aa, unidentified
MAQITTIVGLDIAKDKIDACIRSALAKRTFTNTTEGHRELLHWLSEHAVGRAVMEASGGYEQCWAELLERAGVEVVIVDPRRVRHFAKSAGRLAKNDLIDAEMIAWFGQTFVNLAGKPRDEERQALEKVVKARLSLNGMKERIDNGGEREQPAEVREAYRAVVKALATQIVKLEATAAGKIEHSAEFAKRADIIRSVPGLGPVATSGLVALMPELGHVDNQAAAALLGVAPYDDDSGDRRGQRHILGGRHKLRKLLYMPILGAATQHNPVLMAYYERLLDRGKLKKVALVACMHKLIIILNAMLKRGEKWDPAKYARA

SEQ ID NO: 381451 - protein, 347 aa, unidentified
MNFYTRQHKHYCGIDLHARAMYVCILDQQGTKLVHKNLPTTPEAFLRLIAPYREDLVVGVECMFTWYWLADLCAKEGMAFVLGHALYMKAIHGGKAKNDKIDAHKIAVLLRGGMFPQAYVYPSEMRATRDLLRRRCHLVHKRAELLVHIQNTNSQYNLPELGKKLAYKANREGVAEHFPDPSVRKTIEVEVSLIDHYDKLLGEVELYITRTAKMHDGQTFTRLQSVPGIGQMLALVLRYEIQDIARFPRVQDFVSYCRLVKCAKESNGKRLGTSGKKIGNVHLRWAFAEAAILFLRQNQPGKEFFMKLEHQHGKAKALTVLAHKLARAVFYMLTREQAFDLQRFVTA

SEQ ID NO: 381452 - protein, 390 aa, unidentified
MSQPNDSNKSVIPLEQDNTMIAVIEMGQASWLVAGIVPGLERQPLKKLGSDEQALFQLLQRWRNEAVQTGRTIKRLVVAYEAGRDGFWLARWLRARDIEAYVIHPNSVAVSREHRRAKTDRLDTELLKRAFLGWLRGEAGHCSMAAILTIEEEDARRPNRERENLVGERTRIVNRMKATLARFGIRSFKFTLRHADERLNDLRTAEAASLPANTHAELRRDIARLRVVRDQIKEIEQQRLQRIEQAAPSEKSPHAMIRLLARVIGIGVETADMLVNEILSRQLRDRKAVARYAGLTGSPDESGKRRREKGLSRAGNARVRRGMIQLAWRFLMFQKDSALAQWYRARTAHARGGTRKTMIVALARKLLIALWRMVTTGEIPEGISLRPAVA

SEQ ID NO: 381453 - protein, 438 aa, unidentified
MSMTFARLLDPCFEDDDDPFRHYDYRGEPLEDRLYLPCGIDPHKKVCHAAFVHPLPHRQDILSHRQVQNQHLPDALWLVEEGQRLAEPFQATPLYIFESSGPYWRPYRLFLHQFGLPTATVSGRQTRRAGGTGTRKKRNDLQAAFLVAKVFKQGESHASRIPPEPLATLREYTRLHLFFVEQSVAIQNRMFDLRYQIHPGFDDLFSKSIMPTTLALAKEELVHPVKLLQADPEMLTEVIHQASNGKLGAPRVEAILRSARHTFYLPYAPEAQSFNLKLMAQAHEYIIHHLLPPLQARIEECLQEIPFPQHLTEIPYFGPIVTATFLAELGSPFWFRTVDSVVAWFGLDPSVSESADHTTGISRLTKRGTKFGRRIMWLVARNWSRYVSQGNRMFRKERDENKLSYDGAICVIAAKLVRIAFAMARDGSHFDMDKAFPS

SEQ ID NO: 381454 - protein, 360 aa, unidentified
MIVIGADIHKRNHTLVAVRAGSGELIGELEIKAAEAGHRQALRWAWELEDERVWALEDCRHVSRRLEEALLGAGERVVRVAPRFTGLGRREERRPGKSDAIDALAVARAGSARAPSASQSPSSMSGQWRSACSQTTAATWSQSAPGPRTGCAGTSSSSARSWRRGLPSGSLDRGVRLRAIAECLAGIETTRARLARELLDRIAEIGREAKHLEAEIGQLVRSHRPALLAEPGCGPLCAATLIGHTAGAQRFAGDAQFARMAGVAPIPVSSGKTHRHRLHRGGNRQLNHALHVIAITRSRVDPETRAYLAKKRAEGKSHREAMRCLKRHLARRFYRLLLEPSPSLSEEGDSLKSVGSQRCP

SEQ ID NO: 381455 - protein, 343 aa, unidentified
MKLTRVGVDLAKQVFQVHGVDRAERPAWCKRLKRARWIADLERDVEPGCEIGMEACGGAHHWARVLCAKGYRVKLIAPQFVKPYVKTNKTDANDAEAICEAMSRPSMRFVAMKTVEQQDLQAVHRVRSSLIRERTAKANQLRGLVYEYGLVAPREISSLRRALPEWLEDAENGLTVRFRALLAGLYRDLQQLDERVRELDREIATIAREHEPIGRLQQLTGIGPLTASALYALVGDARQYRNGRELAVALGLTPRQHSSGGKEKLLGISKRGDKYVRTLLIHGARSALRVAPNKTDRISCWAVTLAERSHPNVATAALANKLARIAWAMLRHGTNYEAEHVAA

SEQ ID NO: 381456 - protein, 362 aa, unidentified
MAQVRSWVGLDVHRASVVAATMDRDSGELRVRRLPGTTGDVVAFCVGLPGPVRVAYEAGPTGFGLARALQAAGVQCVIAAPGKIERPTSDRVKTDERDAQRLLRLLMIDGLHAVRVPSIQEEALRDLVRAREDVRGDLMRARHRMSKLLLRHDVRFDGTASAWTTHHRAWLAKVDLGERGAQVTLLDYQGAIDALIIRRDTLERTIDELVPDSPWADTVARLRCLRGIDTLSAVGLCAEIGDWQRFARAGHLMSYLGLIPSEHSSGQTRRLGAITKTGSGHGRRLLVEAAWHYRRPPRKGDALKRRQAGQPAHVLAISWQAQQRLHRTWQRLDRERGKRRTVVAVAVARELAGFCWAAANAD

SEQ ID NO: 381457 - protein, 285 aa, unidentified
MTTNISMLAVDLSKGSFQVCAVRPDGSVLYNRALSRARFAALLADQPACVVAMEACATSHHWGRVAQHNGHEVRLVPAVYVKPFVKRQKNDRADAEAIAEAASRPSMRFVTVKSAETQARAVAFRTHQCLVRQRTQLINALRGHLAEFGVVAPKGPANLKVLDEALANEVGDLPGAVRAMGSVYLNQIARLTEVIERLADELETASRTDTDLRRLCTIPGIGPVIAGAVAAFAPDLDTFDSGRNFAAWLGLVPRQRSPSPGLSPATRIPSISAWTRAMTIRSRAP

SEQ ID NO: 381458 - protein, 343 aa, unidentified
MKLTRVGVDLAKQVFQVHGVDRAERPAWCKRLKRARWIADLERDVEPGAEIGMEACGSAHHWARLLQSKGYRVKLIAPQFVKPYVKTNKTDANDAEAICEAMSRPSMRFVAVKTVEQQDLQAVHRVRSSLIRERTAKANQLRGLVYEYGLVAPREISSLRRAVPQWLEDAENGLTVRFRSLLAGLYGDLKQLDERVRELDQEVAAITREHEPVRRLMQINGVGPLIASALYALVGDARQYRNGRDLAVALGLTPRQHSSGGKEKLLGISKRGDKYVRTLLIHGARSALRTAPGRTDRISRWALALAERSHPNVAVTALANKTARVAWAMLRHGANYEPERVAA

SEQ ID NO: 381459 - protein, 344 aa, unidentified
MHYVGVDLHKEQSWFYVSDQEGKRLISKSIPNTDAELKQIFDIIPKPFKLGVEATRNWYFFVDLAEQYAEEVNLANSFELKAFAKRNKKTDKIDAKLICDVLRMGYLPTVNIPPKPIREIRELIRYRMSLVYERTFNINRLKNTLGKLGRECSGDLTAYKQLDKVQTDGLPEIYETVIQGHKERIRFLTEKIKGMKMYLEETFQEDQEIMNLTTIPGLSYLSAAIVKSEIVNVSNFGSFNRLCSYAGLAPRVSQSANKDIHGPLSKNRRKLLQWILLEVTPHFVRASVEKKKKFDELVKRKNYNTAKVALARDMLRMIYVVLREKREYYSKIIRSTADVALHGV

SEQ ID NO: 381460 - protein, 394 aa, unidentified
MFIVGVDIAKRSHEAIVIDSDGNIIHKAFNFKNDVVGFNKLLSVLEKIGQPSDFIIGMESTSHYWLALFSQLENKGYTVKVFNPIQSNALRGMYIRQVKTDERDSFIIADVIRFGRYNEGGLPPSKLYELREMCRARFYIVDMVSDLKKKVICLLDQVFPEYESLFSNIFGLTSTELLQQYSTPEEILAIDTEKLAAIIKVTSNKRFGIAKAEEIKHAAANSFGILMGIESMSMLIKQYIEHIRFSEKQINEINERITEKFAEFDTYITTIPGISTVLGASIFSEIGDISRFSSPAKLAAFAGIDPTVKQSGEFNSVHNHMSKRGSPYLRRAIWQASVLSAIHNPDLKEFFRKKRVEGKPYMNAIGHVTRKLTNIIYAVLRDNKPYYSRSDIQN

SEQ ID NO: 381461 - protein, 373 aa, unidentified
MPKYSTAFGMDVHLRSTTVCALDADTGEAVTRRFPGNPWGEIAGWMDGFPGPSLAAYESGYLGFAPQRELAGLGVECVVAAVSKIPRSAADSASKNDRNDAARMAKAILAHDISPAWVPSPEVEGIRDLAGAYDGATARLATAKQRLLAFLAKRGFVYGGTTPAGNPRKYWTYDFLRWLDKVRPEDDGGVRALAALRNEVEAAAEARADLLSEYRAAVDASPIAAEVAALQSIKGCAFALAAAFSAEVGDFTRFRSGRQVTAYFGLAPSQRSSGDSVRLGGISGAGNALVRKLAVEGSWCYAAARHQPKLMPRDTGVPLEIGMHGRKGSERLLRRREEMLARGMPAAKANAATAAELVRWLWALGMMCREGAE

SEQ ID NO: 381462 - protein, 412 aa, unidentified
MEVLYPCCCGLDVHKKSITACVLWAGGKGAVRKEKRRFGTFTPELLSLADWLRACGVTHVAMESTGVYWKPVWNILEGQFEIVLVNAQHIKAVPGRKTDQKDSEWIADLLQHGLLRGSFVPPRETRELRDLTRYRVSLTEECNRIANRIQKVLEDANIKLASVATDALGASGRAMIQAIIDGEQNPGLLADMAKGLLRNKISELQSALAGRITAHHRFMLAQLMDDLRHAEAKMERVEEEIKRHIFPFGDDVARLCTIPGIDRVTAWGLVAELGLNMDQFPSAGHAASWAGLCPGNFESAGKRLSGKTRKGNAFLRRCLANAAWAVSTKKSSYLSALFRRIAARRGNKRAILAVGHAMLVIAYCLLKRKEEYKELGVNYFDQLNAEGLRRSLVRRLERLGHQVTLQPRPVTG

SEQ ID NO: 381463 - protein, 405 aa, unidentified
MNAVGIDVSKGKSTVTIRKPGDVVLMSPCDIPHTQSAINDLIKQIKSLEGETKVCMEHTGRYYEPVATWLSDAGIFVSAVNPILIRDFGDDSLRTPKTDKADSKKIARYTLDRWAKLKQYGIMDKTRNQLKTMNRQFGFYMAQKTAMKNNLIALIDQTYPGANDFFDSPARNDGSQKWVDFIHTYWHVDCVRSKSLNAFTEHYQNWCKRKNYNFSAEKAAKIYQISSDLIAVFPKNDITKMLIWQAVALLNTASKTVESLRSKMNELASTLPEYPVVMDMNGVGATLGPQLIAEIGDVSRFTHREALTAFAGVDPGKNDSGKHIQNSVRTSKNGSPYLRKTLFQIMDSLIKRSPVDDPVYAFMDKKRSEGKPYYVYMTAGANKFLRIYYGRVREYLSNLSNNETI

SEQ ID NO: 381464 - protein, 337 aa, unidentified
MERQYVGIDLHRRSSTIYRMSGDGEVLGCVKIPSQPMELAEAMADAGEKPEVVLESTYGWYWAADLLQELGANVHLAHALGNNWGNRRVKNDERDARDLAAMLRLGRLAEGWIAPPETRELRELVRYRARLVHHRSSCKAQIHGVMAKNGVLPERTTMWGPTGAAQLDAMSLPEAYALRIASLRGLIDIYDTEVRRLDAHIHRQCKDDRGYQAILGLNGVGKVLGAIFVAEIGDVNRFDSPERLCSWAGLTPKHRESDDKVQRGPITKQGSPLVRWAAIEAISKNHGGTKLRADFARIAERRGKFKARVAVARKLLTLVYYGLRDGEVRCLEAHEAA

SEQ ID NO: 381465 - protein, 416 aa, unidentified
MNFNKLLSGNIIKYQKEGFIMISVGIDVSKGKSTVCIMKPCGEILESPFDIGHTADELDSLISLIKSFDEETRVVMEDTGHYHLPVATYLSSHNIFVCCVNALRMKKFCSQSIRRAKTDKIDSIKIASFGITYWNELVKAYPSNVIYDELKFLARQYYQVTGMLVKSKVNFSNLLDQVMPKINDVLSNQGENHKLTEFVNRYIHFQNILDMGEMKFTSDYCKWAKKKGYRLNERKAAEILALAQNGIPTLPNSQSVKIAVSEAVKLIHSIEESRNTILAQMQDLCNTLPEYSVVKEMDCIGDTLAPRIIAEIGDVRRFKNKHSLIAYAGIDAPPYQSGAFHASERHISKRGNSYLRKTGYEIMQSLIKHKPADNAVYDFIQKKRSEGKCGKEAMIAGLNKFLRVYYGKVMEFYSEH

SEQ ID NO: 381466 - protein, 397 aa, unidentified
MNKLKSNVACAGMDVHYKFSNVTFRDAGGKLVSRRRLEHPDREKLRQHLGQWPSGIPVVMEASFGWGWLSDLVEQAGMEVHLSNCFKVEKMRKARGWVKTNKKDADLISLLPFEMSDWWEVWRAPPDVRNRREQMRFRADLVGTQTMVKSRIHAVFHRHGVFHEFSDLFGAKGRKFLAELCSDNPANLPPEALAALRGHVMLVDHLRRQLAAVARVLHSQMRKNRLTSRLKTIDGIGLVLAYILAAEIGRIGRFRNHKSLAAYSLLAPRADDTGEEDPSHSPKGRHLGVRGNRTLKWAFIEAAHGAVRSGGRWRDMFDRVTGGGRKDRGRGYIKVARELVKVVYVVWSKCVDYQETPPARPGSDKNKKSKKNKKNKKKQSRSGTGQLLHPMVHAVSA

SEQ ID NO: 381467 - protein, 493 aa, unidentified
MNGKTNSPKKQTGNRGGRLGGRGGKQKKAIVPVLSAEQEAALKQTTEEISKGLQSFTWRDLETAGKFSHNDKLTFIRDDMLIVGCDIGSETHYARAIDAKGRELSKGAYSFENNTEGFQRAKDWALHLAAQHGKNQIVLGLEPTGHYWFSLAAWMIANGISVVQVNPYAVKQTKELADNSQDKNDVKDPKLIADLVKNGNYGVPYLPEDVYAELRVLCTLREQLMEDRVRNMNRLHREMKIVFPEYREAFGKIDGIFTLRVLASAPLPSELAALGEDGVKDIWHAEKLRGGGYKRAREIVRLASVSAGLRQGAEARKIAIVSFVDKVIKLAAELEEIEAKIAQKCREIPGAENILEIQGLGDTTVSGILAEMGDIDRFDAAKEIQKLSGLGLVACSSGKHQGQTKISHRGRKRLRYWLFQGALSVVSHNEAFRKIHEYYTTRAENPLKKMQSITVIACKLLRIIFTILKKGVRFDPEKMLRDIVRPELLEAAA

SEQ ID NO: 381468 - protein, 417 aa, unidentified
MKAWNELTHFAALDWADDHHDLVVVDKQGQIVLELTFDHNAAGWQQAQEALARWPELPVAIETSAGPAVDQLLQRGFAVYPVMPKAAARYRERKRPTGSKDDRHDAWSLADALRADGQGWSALSPLDPLTAELRALCRDEIALIEQRTALINQLQAALKEYYPAALEAFDDWTAPYTWAFVLAFPTPAGLVGAGKRKWEKFLHTHKLWRPQTSAQRMETFARATVFGGSAAITAAKSLLAQSLCRLLQTLEQQLAAYRKRIQALFDQHPDHDLFGSLPGAGAKLAPRLLAELAGSDWTQISRVQARAGTAPVTYESGKIKRVKIRRACVHWLRASLHLWADLSRQYSTWAAAYYQAHRDKGQSHACAVRCLGHRWLEIIGGMCRNHKPYDAETHLKEVQKHGSYVFKLIATPVAKTE

SEQ ID NO: 381469 - protein, 478 aa, unidentified
MAAKKKDARTGPDRTTAGAAAEHGGEGAEVAEDRVQVVEYAAAIDVAKGSGMVCTRVPGSRPDRRRQTVWRVEATYAQVTALMDHLRCEGIQRLVLESTSDYWRIWFYLAEAAGLEVWLVNAREVKHLPGRGKSDRLDCVWHCKLNERGMLRRSFVPPEPVRDLRALTRTRARLAQDQARHQNRVEKILEDAQLKISVVISDLFGASGRRFLDALVAGERSPKALAALGDPRLKATRQQLEDALTGRFRDIHAFEISTHLRIIDAINEEITRLDGKIEEQLALVPRTAPACVACGLAGGGHAPGCADEQVPLLGLAARLDEITGIGECNARAIIAELGTDPSQFPTPGHAAAWARLTPRTRQSGETARPGRTGKGNRYIRGALGQAAMTAAKTDTRLGAMYRRIARKRGKQKAIVAVSRIICEIAWILICDPAARYHELGPDYYTPRSPARQTRDKIREIERLNPGKKVILADAAAAA

SEQ ID NO: 381470 - protein, 345 aa, unidentified
MKQYAGIDVSLEYSSVCVVDADGRIVREAKVLSEPDALIAWFGEHGVTMERIGLEAGPLSQWLYAGMAKAGLAVELIETRHVRAAFKTMPVKTDKKDARGIAQLMRLGWFRPVHCKSVPAQEVRALLTARKLIQGKLHDIEMSMRGILRGFGLKVGPTTRRTYAARIRVLIEGHPTLDAIAASLLKVRDALADEFAGFERKLRALARQDDNALRLMTTPGVGVLVALTFVSAVDAPERFRSSRAVGPHFGLTPKKYQSGETDYSGRISKIGDMSVRTALYEAANVILTRPVKGSDLKSWALAVARRAGPRKARVALARKLAVVLHHMLKDKTNFIPHRATPAMAA

SEQ ID NO: 381471 - protein, 414 aa, unidentified
MESVYRSIAGIDVHKKMLAVVIRRQCGEQANYCQRKFGTTHAELAHLGAWLRAEGVGEVVMESTAQYWRPVWYELEPHFELHLTHPLKTRAPRGRKSDFRDAQRLADRWSSGDLEASFIPGSEQRCWRWLTRTRVQWKKKLSATHSHVEGLLEQGGIKLSAVVSDLFGVSSWAMLEHIAQGVTDVEVLAAEARGALRAKDAQLREALAGGLDPVCRLLLRQHLEQARLLLQQVEEINHALAEAMKDHVTTLHRLTKIPGIDLYAAQELLAEIGPRAAAFASAEQFASWVGVCPGSQESAGVNFSHRSAKGNRYLRRLLCQIAWGAIHTKDCFFAGLFARLKPRVEGKGAAWAVAHRIARIVWLVLHRQVEYQEKGPALPNERTLVRKFKRMLKEFGRLGLDVRALLDQQPPVPA

SEQ ID NO: 381472 - protein, 408 aa, unidentified
MEIEHTHCAGLDVHKKTVVAAIIVPDRKEVRTFETMTSDLLGLSDWLLSFGVTHVAMESTGEYWKPIFNILEENFDVLLVNARHIKQVPGRKTDVMDAEWIADLLRHGLLRGSFIPPVGQRELRELTRARTNFVRERATLVNRLQKTLESANIKLASVASNVSGRAMLEALINGTTSSVEMAELAKGRLREKRQQLDKALEGRVKPHHRFVLSELLCQIDNLDESIARFDAEIEKYCRPFEQAVELLDTIPGIARRNAEVIVSEIGNDMSRFPTADHLAAWAGVAPGNNESAGKRYSGTTRHGDRALTVALVQAAHAAARSRNTYLSAQYHRLAGRRGKKRAIVAVAHSILVISYHLIQRKEPYQDLGGNYFDQQRPQATAKRLIRRLQQLGYDTSRIEQPLALPTAA

SEQ ID NO: 381473 - protein, 346 aa, unidentified
MTIVGDRPAITGGVDTHGEVHVAAALDRIGGLLGVREFPATITGYASLLGWLGEFGDLGVVGVEGTGSYGAGLARHLTAAGVRVVEVNRPDRQDRRRQGKSDPLDAVSAARAALSGKASGAPKGGDGAVEAIRALMVAKRSARRERTEAINQARALIVTGPDELRARLAGLGPAALAAAIAALRPRPGAVPGYATRVALRELGRRVQFLDAQLGRLDELIGPLVSARAPGLLALHGVGPDTAALLLVAAGDNPGRLRSESSWAHLCGAAPIPASSGKIQQRHRLSRGGDRQANHALWRIVITRLSNHPATRAYADRRAKEGLTKKEIIRCLKRYVARETYHYLRDA

SEQ ID NO: 381474 - protein, 416 aa, unidentified
MSTVVEIVYPTCCGIDVHKNFLVACIAKTDERGHTRHFTHRFSTNTGDLRKLAAWLEIHECKDVCMESTGKYWIPVFNILEKTCNVVLTHPKYVKAIKGKKTDKKDAKWISELFKCDLVRGSFIPPFDIRQLRDLCRYHAKLGNITSSEKNRSQNCLTTCNFKLDAVFSDVFGKSASRILDNLIACGNSDFDIAPLLDRRCKASVEDVRDALDGELSFAQAQKLNIIRKHMESLESLRDALESIIHQLAAQYQTQIDLLLTVPGISSPLTAIRIIAEIGTDMSVFETAKKLCSWAGVTPQNNESAGKKKTTRISRAGAYLKPLLVQIAVAVNKSNKHPEIKEKFLAIKKRRGHKKAVIAICRRLLTAIWHMLTKNEPYNAVLYRKAEKLPQNRLLTPDQAFALLRRNGYQIVETVA

SEQ ID NO: 381475 - protein, 356 aa, unidentified
MVIVAIESHLGALYMQISTIGLDIAKNVFQVHGIDAAEKVVVRKRLRRRQVLEFFKALPPCLIGMEACATAHYWARELTRLGHRVRLMPAKDVKAYVKRNKNDAADAEAICEAVRRPTMRFVRIKSAEQQGQLMQHRTRDVLIRQRTQIINALRAHLAELGLVAAQGNAGVNELRAIVTDEQDTRLPIDARASVIVLAAQLEALESVIGAIEKRIKMQHRSSEASQRVEAIPGIGVIGATAIVATVADPTIFRSGRDFAAWIGLVPRQDSTGGKQKLGPISKQGDRYLRRILVVGAIAVLRRAQENPGKYPWLTQLLARRPFKVVAVALANKMARMAWALLAHGGTYRTPELAETA

SEQ ID NO: 381476 - protein, 365 aa, unidentified
MRKISTIETSGNSVLQQQLTIGVDLGDRSSACCVLNDAGEIVLERKLATSPEAMKETFGKMARCRIAMETGTHSPWVSRLLTGLGHEVIVGHAQRVRLITKSRRKDDRLDARRLARLARIDPELLSPVKHRNVQAQLHLTEIRARAGLVGARTALVNAARGLVKSYGERLRKCGTRKFRRETAGGLSTGLREALEPLFREIESLTDRIQEYDRRIEKMAKETYPETSLLKQVQGVGSLIATTYVLTIENPHRFRKSRDAGCFVGLQPGRRDSGDSEPQMRISKEGDEYLRTLLVQGAHYILGRFGEDSDLRRWGQKLSERGGKNAKKRAVVAVARKLAVLLHRLWVSGEMYEPLHNTQKAMTAAA

SEQ ID NO: 381477 - protein, 402 aa, unidentified
MPLFVGIDWASAEHAVCVVDAAGKVQGRFSVTHTAAGMDALRRQLAQFAPDLRVAIERPSGLLIDTLVEAGFTVVPIHPNALKASRPRYSAAQGKSDPGDAFILADLLRTDGHRFRPLQPLSDQTRALRALVRTRDDFVEQRVALANQLRALLESFWPGAAAIFADVDSPIALAFLDRYPTPQTAERLGEKRLAQFLAQHGYCGRRPLAVLLARLRSAPAGLCGEAESEAKGELVRALVRILEPLVAQLAKLSAAVEHAVAAHPDGPVITSLPRAGRINAAQILAELGDDRARFASDDQLAAEAGVAPVTHASGKHRGVSFRFACNKRLRKALTCFADNSRHGSVWAADVYGRARGRGCDHPHAVRILARAWLRVLWRCWRSHQSYDCSAHRGAQRLNEVAA

SEQ ID NO: 381478 - protein, 427 aa, unidentified
MAYRIAAIDVHKKMLAVVVADVEREGEYQFERHKFGASPEQLQVLAQWLVEQEVEEVVMESTAQYWKPVWGALELYWKLARQQREGATKMSGKLHLCQAKSNRGPRGRKNDFADGERMIKRLVAQELVLSFVPDPEQRLWRTVTRRKQQLTRAKVRFKNQLESLLEQAHIKLSSFVSDLLGLSARRMLHAIAEGETSPAALAALGDCRLRATPAQLRDALGACTQLNGVYRRLLKMALEELKLLEEQMEQLDREASHLMQDHQDAVQRVAEVPGFGVESATQMIAEVGAEAAAFESQKDLASWVGVCPGDEETAGKSKSTRSPKGNSTMRRLLNQSAQSAVKVKGSIFEITFHKLLPRLGYKQAIWAIAHRLCRLLWIILHKGVRYQERGPAVSAKSLRTRTARMIKALQKLGYRVEGGPLPAGSPA

SEQ ID NO: 381479 - protein, 415 aa, unidentified
MGLMVLYARCAGLDVHKVTVVACLLLTAASGKVHREVRTFATTTAGLLALSDWLASQEVTHVAMESTGVFWRPIFNILEGSFQVILVNAQHMKAIPGHKTDVKDSEWLADLLRHGLLKASFIPPKPIRDLRDLVRYRKTLVQQRTQQINRVHKVLETANIKLSSVASDVLGKSGRDMLEALLAGISDVESLADLARGRLRAKLPALREALEGRVEDTHRILLRHLLDQIDTLEAVIEKLQSEIDQLLLPYEARLALLLQIPGIGRIAAAAILAEIGDDMTRFPSAKHLSSWAGVAPGNRQSGGKRLKAASNKGNTHLRAVLAEAVWVISHTKDNYLSAQYHRLARRLGEKKAIVAVSHSLLVIIYHMLRAHQDYHDLGPHFFETLDSTRQRDTAVRRLQALGYTVRLEQKTEVLA

SEQ ID NO: 381480 - protein, 352 aa, unidentified
MRHFIGCDAHKKYSVFVAIDETGNVKPAVRVNHDRELYRGFLRGLPAGSEIAVETIGNWYWIVDEMEEAGHRPRLAHARKAKLMMGEIDKTDKLDGRGLATLLRNGTLPEVWIASREVRDQRELLRLRMTLVAMEIRLKNRVHAILAKYAIQLEEVRDVFSQQGRRLLLGATLENLPPHTAKVIRQHMELLESTEQQRKIAEERLKSIVKERADVNLLMTLPGVGWILGTVIAFEIGDIDRFSRAPEIASYAGTVPRVHSSGGKTRYGRVHPDVNRYLKWAFVEAANVIVMHQKRLGDVHVVRLYKRLRQRKGHGRAVTAVARHLAEAAFWVLKKQQPYQQPQGCRVSSTHR

SEQ ID NO: 381481 - protein, 347 aa, unidentified
MAKTATEVQVFAGVDVSARELSVAMRSATMDREEVQSFSNNAAGHQALLGHLLRGKGRARVCLEASGNYSLDLALTLHANRRAEVSVVNPRRARRFAESLGERNKTDPVDAHVLCQYAVRMPWEPWVPPSALALRLRGLTRAIEALGVTQTQEKNRQHSLRASRALPTFVIRELQRHLEYLQLRITRLRREALRLIARDPELDRRFRLMLTTPGIAETSALQILGELAALPATLDARQWVAFAGLDPVRFSSGTTVDKKPRISRGGSRHLRRALYMPALVAIRHEPHLRAFFQRLVAHGKAPLQAIVAVMRKLLHAFFAMFRSDHSYDGSRLCLVEVASNPVAMCAA

SEQ ID NO: 381482 - protein, 346 aa, unidentified
MKILALDLSKFKSVGCVYEAESGDHRYRRVKTTPQALHDLLVEVEPDRVVIEVSSVSGWVSDLVRALGIELQVVNTNGEAWRWRSVKQKHDQADALKLARLSAMNQLDLVHVPAPEIRQWRAVIKYRQHLVGRRTDIKNHVRELLVREGVILPRGRKCWSQEGCAALEEMCRSWEEVEIAELWRGELQSELQQLQVIQERLREVEAKLETLAAADDRVGLLRTIPGVGPRLAEAMVTLIDDPHRFKRGRDVGAYLGLVPRQYQSGEMNRLCRITKRGSKLLRSLLVEVSWVSLRHNPWLRSLYERMNRGSKTRKKIAIVAVARHLAIYCWAMLRDGTTWRQPCATQ

SEQ ID NO: 381483 - protein, 322 aa, unidentified
MSKVIGIDISKATFDVGFKCKEQWPHHVFSNDLRGFRSFKKIIDSDDHCVMEASGPYYLQLAMYLHSQGIRVSVVNPLVIRRFGQMRLTRAKTDKKDARIIAQYGIKESPAPWSPEEKHIIHMRQMFTTIQNISKQIDMSNKQLGAFESTGMLCREVKSTLRGLIKTLSQKKEKLQAQLIELTKQHYQQTFDRLQTIPGLGPKTAVLLTTITNNFQKFEHSRQLIAYVGLSPRVFQSGTSIKGKGHICKMGSGVVRKQLYMCSWTAKFYNKGCRQMYDRLKEKGKPERVIKVAIANKLLKQAFAVVKNNVNFNENYVPKPCF

SEQ ID NO: 381484 - protein, 317 aa, unidentified
MEQTEHSMKVAGIDVGKRHLDVALHGCGDVTRVSNDEAGIATLLAWLSAREVGRVGMEASGGYQRLVCERLQSAGCEVVVHKPEEVRAFAVFKRMKAKNDRMDARVIAAATAHAEALRAASDPRLVELAERLTAYEQATDRLAEQKTQLEHVTLPDLKALLDAQIALAEAHKAALFETVVTLIRAHDDLAARYKLALSLPGVGPVVAAGLVVRMPELGSMARGQAAALVGVAPFDRESGQYKGHRFIAGGRGRVRRMLYLAALAARRSNPAYRDFADRLAATGKPPKVILVAIMRKLIELANVVFARGKPWVKTVAA

SEQ ID NO: 381485 - protein, 321 aa, unidentified
MKSQNVSSIGIDVGKASLSFATMWENQKATVKSCTNDRQGINALIATLRKNKTDLLVPCVIEATGDYHLHCALMLKEAGFNVNVINPLISKYYQRTSVRNCKDDSVDAVRLARIGVLEPDLRIFTGTKQSFALRKAVTSVGKLERYQQQLKAHAKQLREAEKMLGAKFDLVALNKTIKSIEKQIKVFENYINEHAPTQAIEIAKNVRGVSRTGVAKILALLDGHEFESKDKLVAFTGLDVAARRSGSWRGKEKLSKRGSPHFRKILFQLAWGLKQHNQEYKEYYNKLRERGLHYFTCLIATARKFLRFLYAYLWKKSVSFS

SEQ ID NO: 381486 - protein, 357 aa, unidentified
MNNHSIQINFSNQHFYIGLDVHKKRWSVTIRNSNLTLKTFSMNPSPELLINHLHSHYPNGIYHIVYETGFSGFWIYRKFKELNTDCIVVNPADIPTAHKEKDRKSDPIDSNKLARELEKGELNPIYIPISQIQHLRSLTRFYHRIVQNMTRVKNRIKGHLYYNGISLPSHTSQWSNNFISYLKTIVLDNGPADDYLSLLLEELQQHRSRLLVTLKKLRQYISLYNFDTTIHNLLTIPGIGFKSAITLFSEIMDMNRFKNFDNLKSYIGLVPSTHSSGEHNIVKGITKRRNAYLRYVIIESAWVAIRKDPVLLQSYNTLISKMKKQQAIIRIARKLLNRVRYVWLNNHPYNYGLVEIR

SEQ ID NO: 381487 - protein, 344 aa, unidentified
MTIIRIGLDTSKHVFHVHGVDGHEQPVLRRRLQRSQVEKFFAKLPPTRIGLEACGASHHWARVLRSLGHEVVLIPPQYIKPYVKRGKNDAIDAEAICEAMSRPGMHFVPVKSRDEQAALMLLKVRDLLMKQRTMLTNAIRGHAAEFGVIATKGPQNLAELLERIGEDANVPAPARELLNSLAGQIAALEVRLEALEAKLMAHHKADPRSRLLATIPGVGPITALSLTLKVPDATVFRSGRHFAAWLGITPREHSTAGRQRLGKISRQGDEGLRQSLVLGATAVIQQVERRIKAQRVSRTDSPWLLQLLARKPEKVAAVALANKMARIIWAMLVSGELYRQPQAV

SEQ ID NO: 381488 - protein, 345 aa, unidentified
MIIGCDFHPSWQQVSWVDTETGETGEAKLVHATGEAERFYRGMPVPSLIGVEATGNSQWFVELVEDLGHALWIGDAAQIRASYVRQQKTDKRDAAHIRMLMEEGRFPKLWMPDREQRDQRQLVIHRHKLVQIRSRVKNELQHLSLNKGMQKRSKLWSMAGQVALRALPLKPWAACRREDLLGLLAMLEQQIGKLDAAVKAAAERNPEAQLLMTQPGVGPVTSLAFVLTLGDVSRFQRGKQVASYLGLIPREPSSGGRQKLGAISKQGNRLVRSLLVEAAQTAVRCDPGMKKEYLHRCHRKAKGVAKVAAARKLAVRLYWMLRTKTGYPEIVRIESSPRVALVGAS

SEQ ID NO: 381489 - protein, 387 aa, unidentified
MCIRDRDKHDCFITNSEGEVLFNAFTIPNNADGFHDLFQKISSLTNDFSNVKVGLEATGHYNYNLLGFLIDKGLPTFVINPLHTNLFRKSLSLRQTKTDKVDAHTIALMMMSGVNLQSYSDTSYHNEELKSLTRYRFDKVQERAKLKTSISRLVNILFPELEKLVPSLHMVSIYALLAEFPSSAQIASCHLTRLTNLLANASKGHYNKEKAIEIRNAAKHSIGSNMPAKSLELKHTIRLIQELTSEIDEIECFIKSIMDEIRSPILSIPGINYRMGAMIIAEIGDFNRFSSPDKILAYAGLSPSTYQSGQLDGCYSHMEKRGSRYLRYALFNATKFVCIWDNQFSAYLAKKRSEGKHYNVAISHAAKKLVRVIYQLEKSGQLYHRAA

SEQ ID NO: 381490 - protein, 409 aa, unidentified
MEVVHEVCCGLDVHKKSVTACVLWASGRRRQTRAFGTFTRELLELGDWLRACGVTHVAMESTGVYWKPVWNLLEGQFEVLLVNAQHIKAVPGRKTDQKDSEWIADLLQHGLLRASFVPPTPIRELRDLTRYRASLAQEINRIANRIQKVLEDANIKLASVATDTLGASGRAMLEAIIQGEQDSQHLAEMAHGKLRNKIPELQEALQGRVTAHHRFLLRELLDHFYFVESKMQRIEQEVAERLGPFQSEVARLCTIPGVDRVTAWGLLAEIGMSMKQFPDAQHLASWAGLCPGSHESAGKRKSGKIRKGSLWLRRCLCQGAWAVSTKKNNYLSALYRRLAVRRGSKRATIAVAHKLLVISYYILRDGTCYSDLGADYFDRLNPEGLRRRLTRRLEGLGFKVTLEPSAQVA

SEQ ID NO: 381491 - protein, 406 aa, unidentified
MATDFFFAGLDWAGHTHMVCVIDTAGSVRDRFEIMHDRDGLAELMRRLARFGTSVPIAIERPSGLIVDALVEAGHQVFPIHPNAVKASRPRYRCHGGKSDASDAYLLADLLRTDGHRWSALSPQSDSIRALRALVRARDDLVHTRVAVGNQLLSTLQAFWPGGARIFSDITSPIALAFLRRYPSPGSAARLSEAALARFCRTHRYSGRRTPAELLARVKSAAHGLTGALTAEAFAHVVLALVAMLDPLVEQIAQLTHRIERFVESLPDGLIMMSFPRAGRVCAAQILAELGDVRERFPNVDRLAAEAGAVPVTRQSGKTRSVLFRWACNHRLRQAITCFADNSRHASDWARGIYEAARARGCDHPHAIRILARAWLRVIWRAWTDRKAYDPQLHQGAIKVASATGG

SEQ ID NO: 381492 - protein, 330 aa, unidentified
MSDHPPTPTTIMGCDVSSTEIVMACANANQAVKTVANNRRAITAWLKQLPTDVVIGMEATGRYHDVLADCAARRGHRVYVINPKHLSLYAKGVGQRGKTDPLDARVIARYVAREGDRLHPYTVPTPTQRLLRNLLSQRAGVVKHRGAIQQCLRATESMGCATLKRAHRKALRGLQALIAEIDAQLKASVQTDAALEQKRATLQTITGIGLLNSLALTHRFDRTPFTNSDAVVAAYGMDPRPKDSGNKVGQRRLTKQGNAEDRRLIYLAAQSAAKTKTFKPIYLALRAKGFATTEAIVIIARKLLRIAFAVWTSNKPFDPKKIGFQACKKP

SEQ ID NO: 381493 - protein, 347 aa, unidentified
MYTIGLDVHQRLFVLCILDSAGKLVKEERLRGDANVLFAYLRKLRVPFQICYEASCSYGYFYDRLQGLARRVLVAHPGAVRLIFRAKRKHDRIDARKLATLLFLDQVPSVHVPPVDVRSWRRLIQFRRRLVAQRTAVKNRLRALLRTHGVTAVRGKRLWTRAGRAWLAEVNWSTREAALERDLGLDELEQVGTRLRTVERMLNAIGRRRSGVALLRTIPGVGPRTAEALVAWIDDVRRFRHNRQVGCYFGLVPSQDQSAACNRLGHITREGPSVVRQLLCEAAWQAKARSPFLQAYYERIRRGDRDRTKIALVALARYLACVAAAMLRTGEVWRHDSPAETSACPAA

SEQ ID NO: 381494 - protein, 392 aa, unidentified
MIFVGIDVAKDKHDCFIVNSDGEILFDTFTILNNIEGFNDLFEKIESCSNDFSKIKVGLEATGHYSYNLLGYLLNKGLPTFVINPLHTNLFRKSLSLRQTKTDKIDSHTIATMLMSNVNLKSYSIALYHNEELKSLSRYRFDKVKERAKLKTSVSRLATILFPELEKIVSTIHLSSIYELLYQFPGAMQVANANLTKLSNLLANNSHGRLDKSKAIEIKQLAKNSIGSNMPAKSLELKHTIKLIREFDTEISEIETEIEKIMNEINSPILSIPGIGISMAAMIISEIGSFDNFDSPDKILAFAGLAPTTYQSGKLESSHSKMEKRGSRYLRYALFNATKLVCTWEPNFAIYLAKKRTEGKHYNVAISHATKKLVRVMFALEKSKTVYNKVVA

SEQ ID NO: 381495 - protein, 343 aa, unidentified
MHVNTIGVDLAKNVFQVHGVDSAGKVVITRQLRRKQVLEFFSKLPGCLVGMEACGTGHHWAREISKLGHTVRLMPPSYVKGYVKRSKNDAADAAAICEAVTRPSMRFVPIKSTDQQALLMLHRTRDLLIRQRTQLINALRAHLAEFGLVAETGREGLAQLGAIITDESNHEALPSAMKQALQAIVDQLAALELQVGALDRAIHAHHRANDMSCRLETVPGIGVIGATAIASTVADPSGFKSGRDFAAWIGLVPRQHSTGGKERLGGISKQGDRYLRRLLVIGATAVVRQARLHPQKHVWIMRLLAKKPAKLVAVAVANKMARIAWAIMAKGGYYRAPELAAAT

SEQ ID NO: 381496 - protein, 313 aa, unidentified
MSEDRTIGLDVSKAEIAVAVYPSGTQWTSDTTPTALEGLVARLASVDARVIVLEASGGYEAGVAAACAAAGLPIAVVNPRQVRAFAHALGRTAKTDAIDAEVLALFGARVQPAVRPLPDAATQTLAALVARRRQLLEMLGAERQRLSLATARAVQRDLRQHVRWLERRVGDVDGEITAAIEASPVWRVREDLLRSVPGIGPVVARTLLAELPELGQLTRRQIAALVGVAPFNRDSGQWRGHRTIAGGRASVRAALYMASLVATRHNLLLRPFYERLVAAGKPRKVALVAVMRKLITTLNAIARTQQRWTVQPA

SEQ ID NO: 381497 - protein, 389 aa, unidentified
MIYVGIDVAKDKHDCCILGSEADKLYPVFTIPNNKAGFDELYEKIFSVTDDKAEIKVGLEATGHYSLNLLGSLIDKGLATCVINPLHTNLYRKGLSLRKTKTDKVDAGSIAMMLMTDKTLKPYSDTSYHSEELKSLTRYRFDKVQERAKLKSSVARLINILFPELEKLVPNLHMASVYALLSEFPGASYIAESHLTHLRNVLETTSKGRYGRDMAITIRDAAKDSIGSVMPTKSMELKHTIHLIEVMTDEIDEIEASIKSIMDACNSPIMTIPGISYRMGAMILAEVGDFSRFSNADQILAFAGLSPSTYQSGQLDSSYSHMEKRGSRYLRYALFNATKYVCHWDESFGAYLSKKISEGKHYNVAIGHAAKKLIRTIYRMELTGEAYRK

SEQ ID NO: 381498 - protein, 381 aa, unidentified
MQSNHTVPTILVAIELSTATWLVAVRVPGSEKPHLHRVDGGDTAALLALIASVSARAAHQLNAEIGIVCCFEAGRDGFWLHRLLTTRGITNYVLEPTSVLVNRRARRAKTDRLDAEGMLRVLAAYLRGDHQVCSMVRVPTPDEEDAKRMHRARENLVQERLRIENRIEALLFTQGIRKRPSLRSWERDLAILRTGDGREIPRHLLAELDRLRRRLVMTLELIREVEAERDQATKTKPQDQACRKIAALCRIRGISDNFAAVLTREVFYRSFDNRRQIASYVGITPMPYQSGGIDRDRRISRAGNPRARTTMIQLAWLWLRYQPGSELARWFRERVGTLAGRTRRIAIVAMARKLLIALWRYTESGVIPAGAEIRAETPVAA

SEQ ID NO: 381499 - protein, 327 aa, unidentified
MNAVGIDVSKGKSMVAIMRPFGEIVSAPFEIKHTASDINSLVELINSVEGESRIVMEHTGRYYEALAHQLSEANLFVSAINPKLIKDFDNDSLRKVKSDKADAIKIARYALDKWQNLKQYNVMDELRNQLKTMNRQFGFYMKHKTAMKNNLIGILDQTYPGVNTYFDSPARSDGSQKWVDFASTYWHVDCVRKMSLNAFIVHYQNWCKRKKYNFSQSKAEEIYGKAKELVPVLPKDDITKLIIKQAVNQLNSASTTVESLRTLMNETASKLPEYPIVMAMKGVGASLGPQLMAEIGDVSRFTHKGAITAFAGVDPGVNESGWSYVKI

SEQ ID NO: 381500 - protein, 361 aa, unidentified
MSGTMTWVGLDVHARSTHGAAIDVMTGELTRARFGPGIEAPIAWLASLPGPVRACYEAGPTGFGLYRAATAHGVAMQVVAPGKTPRGPSDRVKTDRKDAELLARLLLAGSLTRVVVPPPEVEAARELTRAHDACRRDLMTARHRVSKMLLRHGRVYPKQSTWTAEHRRWLSLQRFDQAASDLVFGDLLAAVDGLSARKAAIALQLSQLATDPAWWPTVARLRAFRGIDTLTALSIHLELGADWQRFERASQLAAWLGLIPSLSQSGESSRQGAITKTGSMLARRLLVESAWHYSRQPRLGATLANRQQGQPAHVLAIANRAQQRLFKVHRQMKARGKPHNVVVVACARQLAGFLWAAATAD

SEQ ID NO: 381501 - protein, 391 aa, unidentified
MIYVGIDVAKDKHDCFITNSDGEVLFKAFTITNNLDGFNELHQKIASVMDDVTKVKVGLEATGHYSYNLLGYLIDKGLPTYVINPLHTNLYRKSLSLRQTKTDKVDARTIASMLMSDVNLKSYSDISYHNEELKSLTRYRFDKVKERAKLKTSVSRLVCILFPELEKLVPTLHITSVYALLSEFPGAKHIATAHLTRLTNLLSEASKGRYGKDTAITFRDAARASIGSNMPAKSLELKHTIKLIQELDSEIDEIENEIKIIMDEINSPILSIPGINYRMGAMIIAEIGDFNRFDSPDKILAYAGFSPSTYQSGQQDSAYAHMEKRGSRYLRYALYNATKYVCHWDPTFAAYLAKKRAEGKHYNVAISHAVKKLVRVIYHLEKTKQQYIKAA

SEQ ID NO: 381502 - protein, 349 aa, unidentified
MDKEAPAVGIDVSKHKLDIALLVDGRVRSKSVTNSTTGYHELKVWLNRCKVELDECAVCMEATGAYSEPVALGLQALGLTVSIVNPARIKGFGQSELIRNKNDGIDAALIARYCAKMHPEPWHAQPPERRRLRTWCDRLKALKEMRQQEENRLEACTFSANAELVEHIQRHVNWLSLQIREIECEIENHINRHPCLKRDADLLRSIPGIGTATIMVMLGHVGDFRRFSSAKALAAHLGVSPRQRSSGSSIRGRTMMSRTGNRATRSALYMPAVVASRHNPILRTFAERLHANGLPKKAAIGAVMRKLVHLMYAIVRSGIAFTPNYLEQQVEKAAAARRDISRSEADLQT

SEQ ID NO: 381503 - protein, 317 aa, unidentified
METTPAADRFVGIDVSKSWVDVHVRPDGTKWRCTTDSEGLAELVRRLHPLHPRLVVMEASGGYEGIVAASLAEAELPVAVVNPRQVRRFAEALGQLAKTDAIDARVIAHFAEAVRPPPRPMPEPMMAQLQELLARRRQLVVMINAEKQRFAKAASRITQRSHQAMRRSLEGELGRIDRAIDKLVQQSPLWCAKLDLLTSVPGIGDIVARTLLAELPELGTVDRHQIAALAGVAPFSRDSGRKKGKRVVRAGRVQVRGPIYMACLVAIRYNPPLKSFYRRLRAAGKPARLALVAVMRKLLTILNAMLRDNTPWACVEN

SEQ ID NO: 381504 - protein, 379 aa, unidentified
MGFFAGLDWGGAAHALCVIDAGSGAVVDRFEAVHNRAGLQAMLKRLARIAAPAGLPLAIERPSGLIVDVLVEAGHPVVPIHPNAVKAARPRYRAAGGKDDRGDAYLLADLLRTDGHRFRPLAPLSDEMRALRALARARDDLVATRVGLANQLRSLLESFWPGAAAIFADIDSPIALAFLGKYPTPQSAARLGPKRMAAFMAQHRYCGRRSAEDLLMRLRAAPGGLAGEDEAEAKGEIVRALVAALVPLVRQIAGISARIRHAITLAPGGQTVMSFPRAGHICAAQILAEIGDDPARFQTADQLAAEAGLCPVTHQSGKSRGVGFRWACNRRLRKAITCIADNSRHASAWAADVYARARARGCRHPHAIRILSRAWVRIL

SEQ ID NO: 381505 - protein, 369 aa, unidentified
MADRITYVGLDVHKDSIVVAVAVGGLRGEVREYGRIANTPTALDRLLRKLGGDGMTLRFCYEAGPCGYGIQRRLSTQGHECVVVAPSLIPKRAGDRVKTDRRDAASLAKLHRAGELTAVWVPDARHEAMRDLVRARLDAVHSLRRARQQLSGFLLRQGCHYGRPAWTRLHRRWLAGLKFEQAVHHIVLEDYIAAVEAAEARRNRLTAQIAAMLPDWTLAPVVAALQTMRGMALVNAVTLIAELGDLSRFANPRQLMAYLGLVPSEHSSGASVKRGGITKAGNAAARRLLIEAAWSYRFPARLSRELLLRQESQPRLIRDIAWKGQLRLCARYRRLARTGKPANIVTTAIARELSGFVWAIARQVTVTTD

SEQ ID NO: 381506 - protein, 387 aa, unidentified
MARKRTLSTLDTSIAYEAVGLDLAKTDVALAAFDSDHKEPYLIDRIPYDKLYELLADMAPTLVAMEPCSGAHQIAEQIEALGHEVMMISGRHVQAWVKDHCNGQKTDLNDAFAILNLAYDRWLTPIRGKTREECRLLALQASYRQLKGQRTKTMVHVKATLHAWGFPIRAGSFNQKVLHELIDTNREAFGDEVVETLHLMINRVRDLDHDIATVLKLLTEATKRDPRASLLRSIPGFGILTMSRWCAVIGDIARFDSPKQTMAFVGLVPNNRITGHHTETSSGREARGQGRMLKRGDKMLRSLCILGAASLCLMVRNDRLPDCPFVASIKERLASPRPWFKVLVYVAAKLVRIATALLKYGETFSYEKAGISKAVLKQWELEQAKAA

SEQ ID NO: 381507 - protein, 331 aa, unidentified
MFPVGIIVSKETVDLCMLHDGMKGRVKTRNIRNDSSAVAHLLRWLRLQHCGPEDVHVVMEATGVYHECLATALHDAGFYVSLANPHRSREFARGMGIMTKTDKVDAYMLACYALLIKPHRWEPPAADIRFLSALLRRRDVILADAVREENRFEKYQSTETPADVVSSCIRMAQLLREEVRSIERQVKAHIQASQDLKRDYALLTSIKSVGPQLEMHMLVVLRSHHFESADQAAAFLGVVPVEKRSGTSVRGGPRMSKIGPSQMRAKLYMSALCGKIHNKRMRNIYEAMCLRGKPKMVAIGALMRKLVHWCYGVLKTGTAFCDGGPRAALNT

SEQ ID NO: 381508 - protein, 341 aa, unidentified
MNITTIGIDLAKNVFQVHGTDERGKAVLTKALRRAQMMQFFTQRPPCLIGMEACGSAHFWARKLTALGHTVKLMAPQFVKPYVKGNKNDARDAEAICEAVGRANMRFVSIKTPEQQALLALHRARQGFVRARTAQGNQIRGLLAELGCVIPKGRSHLEQHIPDILEDAENGLSGMSRELFARLLEHLRHLDAQVQELEAQIKAWHREDVASRRLEQIPGIGPLTASALVASIGDARNFKNGRQLSAWLGLVPRQHSSGGKPTLLGISKRGDVYLRTLLIHGARSTLLRAKPSDWGAALAERRNKNLAAVALANKNARIVWALLAHGRNFQADYRALRNQAA

SEQ ID NO: 381509 - protein, 411 aa, unidentified
MHHRQNYLYVGVDLHKEQHTAVIINCWQEKLGEIQFENKPSAFSKFLLEVETYVCDGITVVFGLEDVGGYGRALAKYLVDHEQVVKEVNPALSFLERKSQVMIQKNDSWDAECVARILVNKFEQLPNVNPNDLFWSIQQLVSRRNALVKAQSALKNQLHIQLNHHYPSYKKFFSELDGKTALAFWEQYPSPSCLEGANIKQLTAFLLDVSNNTCSVKKASEILKLVKEDGQTMKEYQETRDFLVRSIVRDIEFKKKEMKYSERELKQLVKLLDYQLETMPGIELVTASALIAEIGDVRRFPNANKLARFAGIAPVYFGSGGKGKTHKSKQGNRALHALFYNLSVQQVQVAKGSKLPRNPVFHAYYQKKLKDGKTKGQALVCIMRRLVNIVYGMMKYKTAYELPVVEEKEVV

SEQ ID NO: 381510 - protein, 411 aa, unidentified
MSVTQNEKIRQVTDTTMVIGVDIASELHWARAFDWRGLELGKTVKFENSAEGFNFFLRWVSELTVEQKKDSVMVGLEPTGHYWFTLAAHLQGGDFKLVLVNPYHVKRSKELDDGHPSKSDKKDPKTIAKLVLEGRYVYPYIPQGLYAELRVAMNCRWRIRKELASLQNQIQRWLKIYFPEHSKVFGRFTGAGSMALLHSAPFPSDLISLGVEGISGIWKQMKLRGIGRKRAQRIYEAAQTSVGCTTGMEAARMKLQILLEDYDAKLQQYERVMQVVENLCSQIPAVAELLKIQGLGLVTVAGLFAEIGDIRRFESPRQIQKLAGLAITENSSGKHKGPTEISRRGRSRLRAILFRAAIPLLAKNREFQLLHRYYTTRQNNPLQKIQSVIAICCKLLRVFYALAIKDLCIQS

SEQ ID NO: 381511 - protein, 464 aa, unidentified
MTRGDRRRNARRERLRAVLPRDGAVIGIDLAEDKQAIAVIDHDVRVLARKTVQVKAFRLGEALDWAAGQARAKGFASVTVACEPTGPRWLQVQRLCAERGLPLVCIQPLMSHIAREQQDYTTHKTDEADCVLIARLAVELHCYLPEELDETWAHLRHLGRRRQQLITSATASAQRIQDFLSVAWPTVTETCARPLESRTWLAALQVVTSRCGADPGKLAVMGPEAFTALVRGAVPGWGGKKGWGTICGRIFAALTSTEGVVVSSRRGLLRRCADELGDLQRVRGHLRAVEADMAAVLDELGLSRLADIPALTAVGAAAILAEAGDPRRYDSSSSLVKHAGMSPSDNASGAFYGEAHISRRGRPGLRLTVWRAVWPMLRYNPVMAAKYQAMTQAAGTAAQTAEAQSGAGSRQVSAAAAAVRARRAKARVACAASLLRWIYSMVVHDTSWDPAAAAGTASCPAEAA

SEQ ID NO: 381512 - protein, 317 aa, unidentified
MKRSEISMKSAGIDVSKATLDVALAETDERLKTANRAEAFAALAEWLQGHGVRRVGLEASGGYERAVAEHLRGSGFEVVVHQPAEVRAFARFKRIKAKNDRIDAEVIALATAQVEGVKAANDPRLVELAEWMTAYEQAADRVAQMKTCLEHVTLAELKAGELEQIKQAQLWKAKLLRAILKRIKACPDVARRYGLLQSLPGCGPVVAASLVVRMPELGALQHGRAASLIGVAPFDRDTGQSSGKRYISGGRGRPRRMLYIAALAASRFDPGLRAFAQRLHAAGKPPKVTLAAVMRKLIEAANLVLARGTPWVPNPAN

SEQ ID NO: 381513 - protein, 427 aa, unidentified
MLQDTDDREEIIARVAALDIGKAEVVACVRVPSDTTPGKRMQEVNTYSTMTRSLLSMADHFRCLGVTRVVMEATSDYWKPAFYLLEAYGFETWLVNAKDVKHLPGRPKSDKLDSVWLCKVAERQMIRPSFVPPPEIRRLRDLTRYRIDLVNVRTAEKNRAEKLLEDACIKVSVVVADLFSLSGRDMMRALIGGQRDPKVLAQLARSRMRSKIGLLEEAFVGQFTDHHAYLLGKMLDRVEAAEADIIDIETKIEAQIAPFATTVAQLDEIPGVGPATAYTIIAEIGVDMSRFPTPGHLASWASFTPTIKESAGKKKGKNATGHGDPYLARALGEAAVAAGKTNTFLGERYRRIARRRGAKKAIVAVGRSILVITWHLLRDPDARFHDLGPDFYDNRIGPERRKRNHIRQLETLGYKVTLEPAALPTAT

SEQ ID NO: 381514 - protein, 409 aa, unidentified
MNPIPNSSTRFIALDIHKHYALVAAVDRDGQPLMKPRKVTNEQLPDWATGHLFADDLVVIESTTNAWHVYDLLAPLVAEVKVANPIRIKQIAQARTKTDKRDALILARLLAANLIPEVWVPPVHVRELRQLVSQRRRLVEMHTKVVNRMHSVSHRHHFGHPKGKRFQEKDMPWRDQLSEMERFQLDMDLDTKKYLKGQIDRMTNQLATMSHQPLWSSQALYLFQIPGFGVITVMTVLAAIGDISRFQSPKHLVSYAGLAPGVHQSGTKQRSKPITKEGRKELRWAMVEVAWRAVRADPFWKKRFEDLKRRKHPNDAITVIAHQLMIVVWHILTRQQPYRHYTHERIAYKFLTWSWQLDEIQRRKMSRPQFVRYYLLQLGIGDDLTRIALDPKHPHRLASVDEVHTLFDS

SEQ ID NO: 381515 - protein, 394 aa, unidentified
MHKATHTAVIIDCWSTVLGELTFENKPTAFDKFIAFVHEYAIKNEKVLTPLFGLEDTKGFGRSLSAYLVGHKYVVKSVNPALANEFRKSAPTYKKNDSYDALAVAKVLRDMVDSLPDAKHENIYFTIRQLTKRRDSINKRLMILQHQLHDQLLHVYPSYKKFFSQVCGKTALYFWENYPSPQHLMGIDVETLADDLRGASRNACSTRKATQILELITHDGVNVIQYQTERDYIIKSIITEFRHNYENMATIESRLQHLIDETGYQLDTMTGINLITASHLISEIGDINRFPNADKLASFAGISPVKFSSAGKGEDKRSRQGNRILNSIFYFLAIQMVQISKSGTPRNEVFHEYFNRKISEGKSKPQALVCIQRRLVRIIYGMMKKKTAYVPYKR

SEQ ID NO: 381516 - protein, 451 aa, unidentified
MEMEIINPNASGIDVGSRSHFVAVGQSLEDVKEFGVYSEDLTKLCECLMSYGITSVAMKSTGDYWQNLYAELLKHGIDVVLCNGKFTKHAKGKKTDVKDCRHIQKLHALGLLTSSFLPGETTEKLRTYCRQRSNMLDLAAASSRKMQKYLKFLNFRLDVVVKDVCGLTGLAIIEDICKGNLDPNKLAEHRYYNCKKSKEEIAKALHGNNREDFLFGLKQEFESYNFYQRKIKACDKIIEKFVKEELKKQPENSNLKTCEKPYKRQNKNAPGIKNFNQVAFQYFGGVDLMAIECLSHSTVLSIMSEIGLEGFHKFSTSKEFVSWLRLAPNNKISGGKILSSKISKGSNRLKIALRQAANAIGNLKDTHLSNFFRRIAYRKGRTAAVSATARKLAVIIWTMVTKKCQYNPPSEYLFLDQKRKLKMVKNIKKNVAKFDLKPEDFGFNNSLIISS

SEQ ID NO: 381517 - protein, 354 aa, unidentified
MIIIGCDFHTRYQQIAMAREETGEVLVERRLDHESGEAHAFYRNLQSSQEPVRVGIEATGPIHWFERLLAELGHELRIGDSAKIRASEVRKQKTDERDARLILDLMLAKRFPEIWVPTPAERDLRQLLWHRHKLVCLRTMLGNQLHFLAMSQGLCRKKKLFTKKGRAELTGLALAPWTRRRREELLKLLDQVDAPIAELDRAVLEEAQRRDDAVLLMTHPGIGPVTSLAFVLAIGPVTRFPRSRKIASYLGLNPSEDSSGQRRRTGAISKQGNTMVRWLLIEAVYPAVRKDPALRQDYQRLKFRRGHAVAKVAIARKLAVRMYWMLRSGADYAQLVRRQGSPAATLVDTSPSLG

SEQ ID NO: 381518 - protein, 415 aa, unidentified
MPKSDGKRAQTARSGGMLRWNPNAAGIDVGGASHYVAVPEDRDPQPVREFAAFTGDLYRMADWLRGCGIQSVAMESTGVYWIPVFQVLEERGFEVKLVDARQLKRVPGRKTDVADCQWLQQLHSFGLLAGAFRPDDQVCVLRSYMRQRSMLVTYASQHVQHMQKALVQMNLQLQFVIDDITGATGMRIIRAILAGERDPHRLANLRDGRCKSDAATIAKALQGDWRAEHLFVLQQAVELVESYQAKIAACDERIQAYLQTFTDRSDGQPLPKGRPPRAGRHDLHFDATAELFRLTGVDLTLINGLEAHTIMTVLSETGLDMTKWPTSGHFGSWLGLAPNNRISGGKVLGRRTIPSANRAAAALRLAAQSLHHSKSALGAFLRRKAAQKGMPKAITATAYNLSLDNDCKPAVIRAG

SEQ ID NO: 381519 - protein, 342 aa, unidentified
MEKVSIIGLDLAKRSFQAHGARAEGGVAFRKKLSREKVLTFLAEQPRCVVAMEACGSAHHWGRTIRDLGHEVRLIPPAYVKPFVKRQKNDAADAEAIVEAASRPTMRFVAVKTEEQQARAMLFRTRDLLVRQRTQLINALRGHLSEHGVVAAQGPANVKVLEEAVEDQGTSLPLLVVELARVFLDQIDGLWKRISGLEKVTAHEAACGETTRRLQTMPGVGPITALAIETFAPPMDVFKCGRDFAAWLGLVPRQHSTGGKQVLGKVSKMGQRDIRRLLIIGAMAVVRSALRKGSPEGSWVQRMLARKPRMLVAIALANKMARSIWAMLAKAEDYRVPMAAAA

SEQ ID NO: 381520 - protein, 417 aa, unidentified
MKKNTNSPMKKEPRAKRAKAQRPVQRDTKEVLAELVEKLRGKLGGKATLASPAAAGPRAELSPNLDRLTVGVDLGDQWSHYCILGLQGETLSEGQLQTREAEVAEFFQALPPARVVMEVGTHSAWMQEVIAGKGHEVVVANPRLMEGSKRRKRKNDRIDAKKLARLGRVDPESLYPIRHRSREVRQDLVVLRAREALVAVRTELINATRGLVKSMGTRLPKCSSESFRHKVKDAIPEKVREALLPLVQLADALSDCIQSYDQKIEELGNGKYGHTKLLRQVKGVGPITALAYVLTIENPEQFAKSRDVGPYVGLVPKQEDSGESQPQLGISKTGDTMLRKLLVGSAQYILGPFGPDTDLRRHGLRLCERGGKNAKKRAAVAVARKLAVLLHRLWVSGEVYEPLGYVASRTIVQPVAA

SEQ ID NO: 381521 - protein, 351 aa, unidentified
MVIIGVDYHPSDQYIAFVDTETGEGDERRLNHSDGEAEKFYRELAARGASVRVGMETTGYSRWFERLLAELGIELWIGDAAKIKTKRVRKQKTDRNDAQLLLKLLLDNNFPRIWVPSPENRDLRQLLWHRHRLVQMRTRIMNQLQALAMNEGQRRKKKLWSEAGRAQLEKLALAPWASRRRKDLLELLDGMNPTIGELTQAAELEAKKRPEVLRLMTHPGVGPLTALAFVLIIGTVERFQCGKQIGSYVGLIPCEDSSAGHQRLGHITKQGSSLLRFLLGEAAQAAARCDADWRRRYMHLALRRQRNIAKVAMARRLGVRLYWMWRKGWEYSDWIKFGSHAGQLGTGHGVQ

SEQ ID NO: 381522 - protein, 407 aa, unidentified
MYAIGIDVSSRHSTVAVLSSQATVVIKPFDVPHTPEGFSQLADKLNALDGEKRIVMEHTGRYYEPVAHSLHNLGFYVCAVNPLLIREYSENTLRKVKTDKADAVKIARYTLSNWETLRRYSPEDETRYLLKTMNTQFQLASKTLTAHTNNLVALMEQTYPGVRSLFDSPARADGSQKWVDYANTFWHLDCVRNLSETAFTERYRKWCRRNHYCFSASKAAMLYAGAKNRIAVLPKSEISKKMIKETIALVNAVSRTVESLRREMDELASTLPEYDEVMSMFGAGKSTGPQLMAEIGDLRRFANKNALVAFGGLDPGKDDSGDKNTKSVKASKRGSPALRKTLFLIMTVLLQKQPVDDPVYQFLDKKRSQGKPYYCYMTAGSAKFLRIYYGRVRDSLKEQGLWNCAAE

SEQ ID NO: 381523 - protein, 387 aa, unidentified
MEPVYPISRAQSVVSKEATTLFVSLELSRARWLVTSLSPGGSKISRHFVTGAASKDLLQLLADLRVKAERHIAAPVKIVTIQEIGFDGFWIHRLLAANLIESHVVEAASIAVPRRRRRTKTDAIDGELLLRTLMAFKRGEPRVCAMVVVPSPDEEDQRRLSRERKTMIKERIEHINRIKGLMACQGIAGFEPMRANAREKLGELRTGDGRAIPERMKAEIRRELDRLELLRRQIADVEAERDALLRAEEASTGSPGAQLLKLRGIGPEFATVLWHEGLYRRFANRRQLAAYAGLAPSPWRSGDMKREQGISKSGNARLRTTMIEAAWLWLRHQPGSALSQWFQERVRTDRGRLRRVSIVALARKLLVALWRFSTHGEIPEGASLKAA

SEQ ID NO: 381524 - protein, 323 aa, unidentified
MKKFVGIDISKETFDIYFEQEGKGCHVKLQQTEEDYKVLLRLISKDAICIMEATGNYHLKLAHYLHQAGIKVIAENPLKIKWFSQMSLQRTKTDKADAKLICEYGRLILSSNKLHCWQPDETEIGHLKQYDTVRHQLIKQRTALSNSEEALNALTHLNDEVTQVLNDMVTAVNKAIKQLDKGMLKLVKEHHSETFDLVTSVPGVGPKTATLMICLTDGFNKFSHDQVKQFISYIGMSPRTFESGTSVKGRAHISKVGNSRMRSMLYMCSWTAKRKNQQCIALYERLSGKGKPEKVIKVAIAHKLIRQVFGVIKSGEPFSKEYA

SEQ ID NO: 381525 - protein, 300 aa, unidentified
MRIVMLGIDLGKNLCSLAGLDETGAVVLRRRMKRASVLPFTAQLEICTVAMEACCGAHHLGRQLVAQGHVVRLMSPAYVQPYVKAQKNDERDAEAIAEAATRPTMRYVEIKSEAQLEVQSLHRVRGRLVAERTALINQLRALMLERGIAVPQGRCKLARYLPEILADERNGLGPRLRQLIEDIREEWRSIDQRIKGYDDELAEQVRNEDTAKRLISIPGIGVLTATALVAAVGNAQTFSCGRDLAAWLGLVPRQATTGGKPRLLHISKRGNGYLRMLQDPTTSASGRNEMASQSIGALKA

SEQ ID NO: 381526 - protein, 428 aa, unidentified
MNCNTQNAKIASITEKTLIVGIDVGSETHYARAFDWRNYEYSKKPLEFSNTEAGFMTFKAWVEDIAEKQGKTAVIPGMEPTGHYWFALGKFLQDSGMKPVHVNPHHVKKSKELDDNNPNKNDRKDPKTIAALVNEGRFSYPYIPTGIYVEIRSLSNLRFQTQEELTRIKNRIARWFSIYFPEYKDVYGDLMAVSGRMILKEAPLPEDISKLGVDGVNQIWRNVKLRGIGMKRAKTLVSAAEHSVGSKEAPEAARIELMNLLNDVDVYASRLEELLRNIEDKLMTIPYVDKLMEIKGIGLVTVSGFIAEVGDIGRFDNPKQLQKLAGYAIVANDSGKHNGESRISYRGRKRLRYVLYEAAISLVGKNAEFKAIHEYYRTRKENPLKKMQSVVAVACKIIRVFYTILTKGVDYDPMKLMSDIRRPQLQAA

SEQ ID NO: 381527 - protein, 375 aa, unidentified
MIATTRPEISVSEPTLYVAFELGKKTWNLAMTSGVGVAPWLRSVASRDWRGVERALAQGRVRFGLPAAVPVVSCYEAGRDGFWIHRALATRGIRNRVVDSASIEVNRRARRAKTDRLDALKLVTMLVRVCYGEKRVWSEVHVPSVAAEAARQVSRERTALTQEQTRLTNQMRGWLATWGAALPRRRTPAWWTMVRDWAEATLPVEVQARLARAEARLTVLEAQVAELDGQQHAAMTTAAPASALRQLVRLKGVATTGASVLLDEGLVWRAFRNRRQIGGLLGFAPTPYDSGEAVREQGISRAGNNRLQAISIQLAWNWVRWQPLSALTQWYREHFGTGKRTRRIGIVAVARKLVIALWRYVTTGVVPAGAILKVA

SEQ ID NO: 381528 - protein, 376 aa, unidentified
MESNTFIGLDVHKASISVAVARGERGGEVRHWGSVPNRPDHIRKLVEKLAASGAQLRFCYEAGPCGYGLHRQLVEMGHDCIVVAPSLIPLKAGDRVKTDRRDALMLAKLHRAGELTAVWVPDAAHEAMRDLVRARATAMRVAGKARQHLQGFLLRHGRVYPGKKGWTGAYRRWLAMVRFTHPAQQIVLQDYIDAVADAEARVERLTGQIADLLPQWSLAPVVAAVQAMRGVGFIVAVTVVAEVGDFHRFDSPRQLMAYLGLTPSEHSTGASVRRGGITKAGSDLARRALIEGAWSYRMQARISVKLLARLEALPQVVRDIAWKGQLRMCQRYRHLVAAGKAKVVVVTAVAREMLGFVWAIARAVTAPPVSPVATAV

SEQ ID NO: 381529 - protein, 355 aa, unidentified
MTSTKYIGMDVHKESISIAVMNASGKIVMECVIETKASMILQFFDGLRGDLQVTFEEGTSAAWLYDLLKPHVTKLVVCDPRKNASMREGNQSDKIDARRLAELLRLNHLNPVYHGEHGLRSLKELVRSYLTITKDLGRVMSRVKAIYRSWAIPCTGKQVYAPRHRAEWLGKIGEPGVRRRAEFYYQQLDALRTVRQQVRRELLVESKKHQAWKRLCQIPSIGPIRSAVLLGILQTPHRFRTKRQLWTYSGFGIETQSSADHRSVDGQLQRVKKQSSIRGLNRNCNHDLKNLFKGAAIVASSKPGPFQEFYTALLTKGIRPEMARLTLARKIATIVLIVWKRGACFDAQHLKPQTA

SEQ ID NO: 381530 - protein, 387 aa, unidentified
MPQPNDLSRSLVALDQNSTIIAVVEMSQSSWLVGGMLPGIERQPQKKLEPSAERLLGLLHRWRDEAVRAGKKITRIALAFEAGRDGFWLARWLNARGVEAHVIHPSSVAVSREHRRAKTDRLDTELLKRGFLGWLRGERGHCSMARVPTIAEEDAKRPNRERECLVGERTRIVNRMKATLARLGVRNFKPTLRKAAERLATVHTPEGMPLPPNVLAELQRDMARLGFVVSQIREIEDTRQKRLEQEPETGHHAMVRQVARVIGIAIETADMLVNEVLSRPMRDRKAVARYAGLTGSPDESGARRREQGLARAGNARVRRGMIQLAWRFLRFQKQSALAQWYRARTADSRLGTRKTMIVALARKLLIALWRFVTTGETLDGVILRPAG

SEQ ID NO: 381531 - protein, 408 aa, unidentified
MDLTPMHKRVIALDVHQAKITACAVVEHEDGRVEVTRLDFGAFKRDRRALAQWALQIRPEIVVMESTGVYWKSPFAALESVGIIAWVVNARHVKAVPGRKTDMADAQWLATLARAGLLRASFIPPLQMRQLRLVARQRQKLVGMCSAEKNRLHKVLVDAGIRLNVLVADIHGASARAMIKALIAGKPMHEVLDAKGRLRASREELFEALSTEQFSAVHRFVAEEIVEHIEQIEQRLARLDRYLLDGLRPWQAQLKLLQTLPGVDEQGAAMLLVEIGAEMSVFGSAERLASWVGICPGNNESAGKRKTGRIRKGNAWVRRLLCEFAQAAARTRCALKAKFEALAIRKGRKKSVIALAHKMLRTIYAMLANGTHYQDKEVDYEALNVQRNAPRWMRMLSKHGFIGQPSAA

SEQ ID NO: 381532 - protein, 412 aa, unidentified
MLFVGDDWAEDHHDVEVVGEDGRRLAARRLPEGPGGIAALHALIARFVPEEWAELDPLAAAARVKVGIETDRGPWVAALSAAGYEVFAINPMSVSRYRDRHSTSGAKSDAGDAHVLAEIVRLDRAHHRPVAVDSTLSQAMKLVARSHQSLIWERTRHVLRLRSTLREYFPAALVAFEDLDSSEALELLAAAPDPDRAARLSKARIAAALRRAHRRKVAERAEIIYSTLRDAALRQPDAIQAAFAVITASEVRLISVLTGEIDSLGEVVAEHFGRHRDADIYASQPGLGVTLGARILGEFGDAPGRYVDARARRNYAGTSPITKASGTKRVVLARYARNRRLSDAVRQWALGSLRGSPGARTYYDTMRDRKIGHEAALRQLGNRLVGILHGCLKTHTLYDETIAWAHWNTLAA

SEQ ID NO: 381533 - protein, 374 aa, unidentified
MKKTIYYGAIDVDDHYFNVALIDSKKEELLHFKCAANVGSMIKKIKQKNIPLKDIKLCYEATYLGFTLYRELKSKGISCEVIAPSLIPKTPGKKVKTDRLDCIKLAKLYLKRMLTPVHIPDEGDEMVRDLIRSRKLLVDQVKKIKTHIISLCKRMGFDYRKSTGASNPSYWTQTHHRWLEKKINQLPDNSPLRLNLSGLLSVCNNIETFISSYDEQISSMAEFPKYKDQVKALNCFRGLKTLSSLTLTVELGDIRRFPHPSKVTAYSGLSIREYSSGGKEHRFGITKQGNRILRTVVVEACQFASQPPKVSKYLKERRIGVDPEYINIADRCMHRLRKKSIRMFINRKHSNKIKVACAREMLCFIWEALNKAAA

SEQ ID NO: 381534 - protein, 320 aa, unidentified
MTILTSQTVVGVDVAKAEVLVYRADLQTTQAIPNNRAALKRWLKTLPAKSGIAVEATNIYHLDTVELAHELGHQVYVVDGYRLSHYRRGVGQRAKNDPCDARLLARYLAHEQAGLRAWSPPPKAYKALQSLLHRRAALIKARVSLAQSWANEPRLEEELKCLMETFKHSDLAIQKKLRDLSKEAGAAENIERCKAIEGVGVLTATGFATAFLRGEFKDSNAFIAFLGMDLRVDDSGKKTGSRSLTKKGDPEIRRLAHNSAMAACRSATWKPFYEGYLARGFKKTQALVILARKLARVAFALMKNQSEYQPNRPLQGCPAT

SEQ ID NO: 381535 - protein, 346 aa, unidentified
MKIIGCDFHPAWQQVAILDEETGEIAELKLSHEDGEAERYYRALPAPALIGIEATGNSQWFLDMLQRLGHEVWLGDAAEIRASYVRKQKTDRRDAGHILRLLVEGRFPRLWTPSAEERDLHQLLIHRQNQVEIRTRVKNGLQHLAMNRGLQKKRKLWSVKGRTDLEKLALEGWAARRREDLLGLLNQLDKQIGELDEAVKEAAQLHPQARLLMTQPGVGPITALAFALTVGDVSRFRRSKQVSSYLGLIPRERSSGGKQKFGSISRQGNSFVRMLLVEAAQSANQSDEGFRKQYVARCHYKPKAVAKVASARRLAVRLYWMLRTNTPYPEIAHIEGSPWVGMVSES

SEQ ID NO: 381536 - protein, 387 aa, unidentified
MTVYVGVDIAKELHYAAIMDDDGAVSNPFPFENNDKGFQSLLSHLTPFKKESVLVGYESTAHYQENLAYFLKQEGYRTTELNPLQTSALRKANLRNTKTDKVDAKLICLALAQHSVTAKERNASCMDDLYSLCRMRMDLVTKRTQCKIQFIAIMDRIFPELAKFFKGNLCINTSYRLIEKYPLPSQIMKTRVDVLTNLFLKASRGRYGRDKAAALKKLAAISVGIPSDVFAFQAQQLIHQIEFYSDQIAAVDQKIDSDPIVTSSLLMTIPGISSYACACILSVIKNINDFDEPCKILAYAGLNPVIRQSGNFNARCTRMSKRGNSLLRYSLIWTAGNVVLNNATFAAYYAKKTSEGKSHYRALGHCAKKLVNSIFHILKYNEAFNLA

SEQ ID NO: 381537 - protein, 316 aa, unidentified
MAKLVSKSTYGIDVAKDQLVICQWGCEELIVLDNQPAAIHAWLDSLCGPIRIAIEPTSHYHLVVVEAALARGHQVYLVNPRQLVHYREAVNLRHKTDAVDAWLLARYLEHEADQLRPFQPQDRRAQRLWALLMRRATVVQSRQQLQQSFAELRLSIQALLTQFRQLLQRLDQQIQRLIRELGWEADYLRCQSIPGIGPASAAALVAAWHRGAFASSDAFVAYLGLDIRLRESGGFKGKCKLTKRGEPELRRLLFCGSRAACNHPNFAAYRQRQLDKGLSKTAARVALARKLVRIAFTLMNNQQTFNQPENAYCAAP

SEQ ID NO: 381538 - protein, 392 aa, unidentified
MNPHALGWDNHRKFSKVSVMEQTPDGDIRAVERARLEHDDKDAMRAWLSRLDPEIPVALEATFGWPWVADLLEELGHPVHLAHPPIVRALAKHEAKTDRCDSDRLGKFQLRGILPESYLAPTEVRQRRERTRYRMALSALRTAVKNRTQAVLHRHGILHDFSDLFGKAGRRFLDDLALPDGSRQALKGCLKLLDNLTLLIDEVEQWMVENLEEDDIVRLLMTIPGVGLILAHVIRAEIGEIQRFPTFRHLASYAGLAPISDDTAGREGPRHCSSACNHVLRWAFIEAVHGVQRTKGSHGFRLRQLHARLCGSGRPKGRTSSAKVAVARELSKVAHVVWTKRVPYTDTPPPRPGSRPGRPEPKESPTAKTTLRSNQPRHPMVRRRATIGQTRS

SEQ ID NO: 381539 - protein, 324 aa, unidentified
MKDRNCSSLKDRGEACFVGIDISSKQLDVGILPGDEFQQFGNDSRGIKRLVKFLGTRNVELIVMEATGGYEIDVTVALHEAGLPIVIANPRHVRDFARSLGILAKTDKIDARVLARFARDVRPQERSFPSEEERFLRELLTRRSQLVGMHTAELNRLQQARSEDIKQSVQAIIGVIKEQLHAVEEEIGQVMQTCSTYHDKNRILQSAPAIGPVVSQTLLIDLPELGTLNRREIASLVGVAPINRDSGQFRGRRTTWGGRSRVRSALYMAALVAARHNPTIKTFYQRLRNAGKPAKVALTACMRKLLTILNTMIANKTPWREPAV

SEQ ID NO: 381540 - protein, 325 aa, unidentified
MSQFTLGIDVSKDTLDFALLGEKKTEYRHFTNDETGYSHLVNWLRKSGAASLHACLEATGQYGEDVATYLHNHGYRVSVVNPARIKAYAASKLRRFKTDKGDAEVIALFCQKEVPPAWTPPPDSFRDLKYLVRHLDDLKKSRQQERNRLMSGVSLPSVLAQLKDHIHFLSTQIKQTTNIIAQHIDKHPELKKQKELLKSIPGIGDTTAAALLSEVRDFRTFDSGGQLAAYAGLVPEQRDSGTSVHRKPHLAKNGNRNLRKILYMPAMVAIRFNPIVRAFSERLKASRHCPMSIIGAAMHKLLNLAYGVIKTGQLFDPAWGQKLAV

SEQ ID NO: 381541 - protein, 389 aa, unidentified
MKIFVGIDIAKLNHFAAAISSDGEIIIEPFKFTNDADGFQLLVSKLESFDKNSIIIGLESTAHYGDNLVRYLVAEFYQVCVLNPIKTCQMRKNNIRKTKTDKVDTYVIAKTLMMQDNLRFVSFFDLDMMDLKALGRFRQKTIKQRTRLKIQLTTYVDQVFPEIQYFFKSGLHQHAVYALLKEAPSPKEIASMHMTHLANLLKVNSHGHFTKEQAKELRVLAQKSVGANDSAISIQITQTIQQIELLDSQLEKIEADMTDIMKFNDSVIMTIPGIGYINGGMILGEIGDIHRFSNPNKLLAFAGLDPSVYQSGNFQAKTTRMSKRGSRVLRYALVNAAWNVVRNNATFKAYYDAKRAEGRSHYNALGHCAGKLVRVIWKMLTDEVEFNLE

SEQ ID NO: 381542 - protein, 351 aa, unidentified
MAMLAEVVEVVIGVDTHKHTHTAAVVAAATGQTLASLTVPATPDGYRQLLELADQHHRQRVWAVEGTGGYGAGLTRFLHAYQEQVVELDRPKRAARRHGAKSDPLDATRAAREALGRDQLAQPRATGPRAALSVRLAARRSAVQAAGDAQRQLHALVIAAPEPLRERLRIRSTRQLVAACTRLRVHTDWDVETSSTAATLRSLARRIRELTAEAADHRQAILVLVRAWRPDLLTRTGVGPIVAATVLCAWSHPGRCRTDAAFAMLGGAAPIPASSGQTVRVRLNRSGDRQLNQALYTVVLTRLRTDPATRAYALRRRAQGKTKREIKRCLVRYVARQLYRQLETQPAVDAT

SEQ ID NO: 381543 - protein, 429 aa, unidentified
MNYNTQNAKIASITEKTLIVGIDVGSETHYARAFSWRNYEYSKKPFAFSNDEAGFAAFKEWMDDIAEKHGMEVIIPGMEPTGHYWLNLGAYLQEQGMKPVHVNPHHVKKSKELDDNNPSKNDRKDPKTIAGLVNEGRFSYPYIPTGIYAEIRNLSNLRIQTQEEITRIKNRMARWFSIYFPEIKDVYRNPDAVSGLMVIKQAPLPCDIRELGVEGVNKIWRDARLKGAGIKRATTLVTAAEHSIGNTEAPRSARKEIRNLLEDYEGYKKRMDELMEEIEKTLSEIPYIDKLMEINGIGIKTVSCFIAEVGDIGRFDNPKQVQKLAGYAIVADSSGKHNGESRISHRGRKRLRYALYEAAISVIGKNREFKEIHSYYRTREKNPLKKMQSVIAVACKLIRIFYTILTKGVDYDGQKMLNDIVRPEIQPAA

SEQ ID NO: 381544 - protein, 318 aa, unidentified
MENISQWVGIDISKATLDVYLRPLGKAMKVANTKEDISKLVETLKSYTLNLIVLEATGGLETELVIQLQEADLPVALINPRQGRDFAKATGKLAKTDAIDAQILAHFGEAMQPQILAVESEESRQLGDLISRRRQLVEMRTAEKNRRERARGKALVDIEAHLEYLDNCLEKLNQEIEELTQANQQWLEKVNLLKTVPGIGQVISTTLVSDLPELGQLTAKQISRLVGVAPINHDSGQHKGKRMIQGGRAQIRATLYMGAVVAMRHNPVIKTFYERLVGRGKSKKLALTACVRKILVILNAMVRQNQPWQLADNLPPCS

SEQ ID NO: 381545 - protein, 369 aa, unidentified
MKEFSKYVGLDVHKEAIVVAVADAGGEVRYVGEIAHTPEAITKLVRQLRKGAGPMSWCYEAGPCGYGVHRQLSAAGENCQVVAPSLIPKKAGDRVKTDRRDALSLARLHRAGELTAVWVPDQAQEALRDLTRCREDMKHLQRQSRQRLSAFLLRHGRGLSGKSKWTQAHLRWFETVRFEQPVQQIVFQEYVDTVLACSQRVRALDEQLERVARESVFWPIIEALMALRGVNLLTATTIIAEIGDLHRFTSAPQLMAYLGLVPSEHSSGSKQTRGAITKTGNGHVRRVLVEAAWTYRHPARKSAFLQRRAERTGEAVQDIAWKAQKRLCQRYRHLTNRGKQSVQVCTAVARELAGFIWAIGYAAPRVAAV

SEQ ID NO: 381546 - protein, 345 aa, unidentified
MNHDRVIAIDLAKTVFQVCVFDKHMKVLSNKSTRRAALLRFLAKQSPALVALEACGSSHYWGRKALSFGHRVAIIPPKQVTPYRQGHKTDGNDALAIGIASQQAKIKTVGVKTREQQSLQSDKRVQEHLSDHLTATGNLLRALVAEFGIVIPKGIAAFRRTMPCILEMADNGLPDAMRQSLSLAWQQWQFLAEQLAQAQRLLKQRVQQLEPCQRLMALEGIGDKNAIGLYVCIGNGQHFKNGRETAACIGVTPKQYSSGGQVHLMGIGKFKGDQRLRSSLIVGCRAAVNALGKRPPRNAKEVWLKQLIERRGPGRAAVALANKNIRTAWAMLHNNTTYEPQRLAA

SEQ ID NO: 381547 - protein, 339 aa, unidentified
MKYTPVGVDIAKHLIQVHFIDEHTGEVIDKQLRRQDFLMFFCNREPCLIGMEACRGSQHWGRELTKLGHKVRLLQAHFVKAFVMGNKNDVMDARAIWMAVQQPGKDIAVKTEEQQSVLVLQRSRRQLVKFRTMQINSLHGTLLEFGKTIHKGRAAMERELPEALERMKERLPPYLITVLGNQYNRLNELDSLIEDIEKKLTSVARQNETCKRLLDIPGVGPLIATAAVATMREASAFKSGREFAAYVGLVPKQTGSGGKIRLLEISKRGNTYLRALFIHSARAAALLPKEPGPWITELKKRRPTSVAIVAMANKLARTVWAIAAHGSKYDKNHVSIRSY

SEQ ID NO: 381548 - protein, 406 aa, unidentified
MAVMIGVDPHKGSHTAVAIGPAEEPLGRQQVRACPDQARQLLAWAAAWPQRTWAVEGATGLGRLLAQQLAAAGEQVLDIQPKLAARVRLLEAGDVNKNDPNDARSVAVAALRSRAPRQVAADGHAAVLKILAKRHRDLARSRNQVACRLHAVLCELVPGGFAGEITAGLAERLLDQVTPAGAVAAARHDLATELLADVRRLDHQRRECAKKLAAAVRASGTSLTGLFGVGPVIAGLVIGDIADVTRFPGRSHFAAYDGTAPVEVSSGGRKVYRLSLRGNRRLNHAIHMVAITQIRHKHSQGRAYYDRKIAEGKTHKEALRCLKRRISDAIYARLRADARQAAAAAPKDPGGQPGNDSDSSAAGSHPAHRLFGSATPGPETSLRAEAALTAAKPPSGPPPKKTRRTT

SEQ ID NO: 381549 - protein, 404 aa, unidentified
MNSSKVAGIDVHKQVLMVVVQEVDAEAGPSKRFGTTREELQHLAAWLMAHSVDHVVMESTAQYWKPVWREFEPHFQLHLAQAQSNRAPRGRKHDFGDAQRLARRFLAGELILSYVPEPEQRRWRNVTRTRYQLVRDRVRLHCQMECLLEEAQIKLSSVVADVLGLSGRRILQALSAGETDPVQLAQLGDRRLRCSREELEQALNGRIEAVHQQLLRLYLERLALLDRQIEELEKLAADIMHAHADALARLVQIPGIGLESAHELLAELGPHAAAFASADRMSSWVGVCPGRQQSAEISRSTRSAKGSTHVRRVLVQAAHAAVKTKGSYLQTLFYRLLPKLGFTKAIWAIAHRLCRIIWKILHDGVPFIEFGVLSDPRTRKHLANKHVRALRRLGFHIEINDATV

SEQ ID NO: 381550 - protein, 365 aa, unidentified
MKKSSTVAAASNKKFGQKLTIGLDLGDRSSWYCVLNEAGEVVSEQKLGTTPKDMKEVFAAIARSRIALETGMHSPWVSRLLSELGHEVIVAHARNVRLIGESRRKDDRLDARTLARLARIDAQLLSPVKHRSAQAQAHMTVIRARASLVRARTALVNTARGLTKSYGERLRGCNPRNLDTEKAQTLSPELQAALGPLLQALESLSERIAEYNRQIEAIAQQSYPQTALLKQVKGVGTLIALTYMLTLEDPHRFGKSRDAGCYAGLQPGRRNSGQSEPQMHISKEGDPYLRTLLVQGAHHILGPFGVDSDLRRWGLKLAERGGKNGKKRAIIATARKLAVLLHRLWVSGEVYEPLRNSKRTMVAAA

SEQ ID NO: 381551 - protein, 344 aa, unidentified
MNHYAGIDVSLESSAVCVVDGTGKILCEAKVASEPEALIAWFGSLGLAIERIGLEAGPLSQWLFAALREAGLAVELLETRHVRDAFKAMPVKSDRNDARGIAQLMRLGWFRPVHCKSIEAQEMRAVLTARKLLQSKLRDIENSLRGILRGFGLKVGKTTERTFAARIKELVIGHPGLERVVEALLEAHTVLRREFNGLDKHTQKLARLHPQAKLLMTTPAVGPIVALTYASAIDDPTRFRSSKATGAHFGLTPKKYQSGQSDYTGRISKIGDASVREALYQAAHIMLTKPVRNCSGLKSWAMRIARRAGMRKAKVALARKLAVILHRMLADAQPFNPLAKTAAA

SEQ ID NO: 381552 - protein, 409 aa, unidentified
MLFVGDDWAEDHHDVELQDPAGRRLARARLPEGVVGIARLHELVAAQLGEDDGPEQVVVGIETDRGPWVQALLAAGYQVFPVNPRQVARYRERHGTSGAKSDAGDAHTLADMVRTDRHQLRAAAGDSDLAEAIKLLARAHQTLIWDRHRHLLRLRAALVEFFPAALAAFPNLAAADALELLQAAPDPTSAARLSRARIAAALTRASRRGVPAKAAQIQQALRAEQLPQPETVVAAYAATVGAAVAVIGTLNAQIEALAGQVEAHFGEHRDAAIYRSQPGLGGVLGARVLGEFGDDPGRYRDARARKNYAGSSPVTKQSGKKKVVVARFVRNDRLADPLHQQAFCALTASPGARAYYDQLRARGTGHHAALRQLSNRLVGILHGCLKTRTRYSEATAWSHRTSDAATAAA

SEQ ID NO: 381553 - protein, 349 aa, unidentified
MLYVGMDIHKNYSSVAVIDEQGALVDRRRVSHRYREELTRYFNQFSSKTQVVMEATCGWSWLSELLQDLGLEVKLANPSKVRIIAESQIKTDKVDALALAQLLRTNFLPESYLAPKEQREARDLLRYRISLVHLRSGIKNRVHALLIRLGIYHSFSDLFGKRGRRFLSSLELSPVHQRSLDGYLCLIDVINKLIGEAEVEIRKVVKESEDGQHLLSAPGIGFILAYLTLVEIGDIFRFSSAKKLCSYGGLVPSVRQSGAKSYHGHISKKANRYLQWGMIEAAQKAKVIDPFLRVKAEKIQRKKGASVATAAVARHLLVAVYHILKDKTIYRQPKLKYYSPGKPVPTLVA

SEQ ID NO: 381554 - protein, 441 aa, unidentified
MDVVFTHCAGLDVHKKSITAYRIVPDPTGHVVEGLTELQKVGTLTIELLALADWLTEAGVTHVAIESTGEYWKPVYNLLEGTFEVVLVNAAHVKNVPGRKTDKADARWLAKLMRYGLLQASFIPPAGQRDLRDLTRYRTKLVQERSREVNRIQGVLERANIKLASVASDIMGVSARAMLHAVIAGRAAPATIAALAQGRLRKKLPVLEQALTGVVRAHHQRLLAIQLAHIDFLDEQIEVLSTEITRCVADLDGSVGVASPGEVASIPAPSATPELTLTRATTLLDTIPGVNQRGAEMLIAEWGIDMARFESAGRLAAWSGVAPGNDESAGKQRAGTTRKGNRVLRAGLTQLAHAAVRTKDTYLSAFYHRIAARRGKKRAIMAVAHAIVVSAFYMLTRNEPYRALGATYFDKRQREHTVDRLARRLEHLGYEVHLELRSATA

SEQ ID NO: 381555 - protein, 370 aa, unidentified
MAEPTTLFVGLDVHKDSIAVAHASADSASDIVYVGQIGTREADLDKLLRRLHGHASRLVVAYEAGPCGYGLYRTLTQKGISCLVVAPSRIPKKPGERVKTDRRDAAQLARLLRSGDLTSVYVPTVEDEAVRDLSRAREASIRVLKAAKLRLKSFLLRLGLNYSGRATWNDAHLRYLAKVVCPTPAQQIVFQESLRAMSEQTERIRRLEDELVEVAATWRLHPLVDAFQAMRGVQHHTAVTVAAELGDLTRFHTPGQLAAFVGLIPSEYSTGTARRLGPITKAGNGHARRALVEAAWAYRYPAKVSAHLQQRLERCPKPIQDIAWKAQVRLCKRYRRLVARGKNPNIVVTAIAREILAFLWAIAREVPIVQ

SEQ ID NO: 381556 - protein, 347 aa, unidentified
MNIIRVGVDIAKSVFHVHGVDRHGQTRWQGKYSRTKWLDALSRKVPAGAEIGMEACASSHYWARELQKRGFHVRLIAAQFVKPYVKSNKNDRVDAEAICEAMSRPNMRFVAPKTVAQQDIQAAHRIREELVGQRTAKANQIRGLVGEYGVIAPVGIQQLRCALPRWLEDAENGLSDSFRVLLNGLAEDLQHLDDRIKVLDGRIAENVNQDPVARRLMTLRGVGPLTASALSGALGDGQAFKRGRDFAASLGLTPRQHSTGGRDRLLGISKRGDSYVRKLLVHGARAVLRHVDGKDDGLSHWLKGLASRKHVNVATVALANKTARIAWALVHNETAYDDNLAAMSVGN

SEQ ID NO: 381557 - protein, 396 aa, unidentified
MELPMSHQDYHFDASRSLTALEQDGTIIAVIEMSQSKWLVAALVPGVERHPLKKFDAQEEGLLKLLHRWRNEAGQAGREIKRIVVAYEAGRDGFWLARWLRARDVEAYVIHPTSIAVSREHRRAKTDRLDTELLMRAFLGWLRGEKRHCSMVAIPTIEEEDARRPNRERQNLVTEQTRIVNQMKAIFVRFGIRAFRSTLHKVEGKLKDLRTAEGSPLPENTRAELCRHLARLRVVRDQIRAVEQERLRKLAAAPAAEKGSHVMVRLIARVLGVGIETADMLVNEVLSRRWRDHKAIARYAGLTGSPDESGKRRRERGLARAGSARVRCGMIQFAWRFVRFQKGSALAQWFAARTADGRASTRKTMIVALARKLLIALWRLATRGEVPPGIILRPAS

SEQ ID NO: 381558 - protein, 482 aa, unidentified
MAKRKKSTFERLQHNGMNRKQRRELGRRLNSEDPGLEVMHPNAAGIDVGNESHFVSIPPDRDTVTIREFGAWTADLRQMASWLKEHGIRTVAMQSTGVYWIAVQEVLEQAGLEVYLVNARGTKNLPGRKSDVQECEWLRKLHTYGLLRNSFRPPNEIRAVRTIWRQRERWVKDCGRAIQQMQKALTTMNVQLANTISDISGVSGQAILRAIVGGVRDPWKLAKLRDPHVAASEEEIAYSLQGNWKEDVIFELRQVLEAYDFYRKQMADCDRELAKYTEAMPSREIAEKKDLPKEALPLACSKPLRRSKAHRKNQPGFDLAAELQRTMGVDLTRIDGIDVITAQVIFSEIGPDFSAFPDENQFASWLTLAPKHDISGGKVIRRIPAAGRNRVANALRMAAQSLSRSDSYLGARYRRLRSRLDGQVAVKAMARYLACLVYRMVTKGQAYVDRGAAYFEGKYLEKQRLALQLKATALGLKLVPAS

SEQ ID NO: 381559 - protein, 422 aa, unidentified
MKKRRYRTTEVNQVNWSQLAEQAGEQRVVLAVDVAKVKFVAALMKPDCTVLKTIRWRHPQQTPELVHGLLSHLDAQRLEVAMEPSGTYGDPLRWLFASHAVAVYRLSPKRVHDSAEVYDGVPSLHDAKAAYQIGRLHLDGVSRRWEARTEQRRVLTARLTVLKLYQERLQSSRSRLEAQLSRHWPELMGILDLGSVTLMTLVGEYGSASEVAAHTDEARQLMRRCGGAGLCREKIDGVLEAAGQTLGMPCIDAERVLMQTLARDMLENHRAVQRAEQALAVQVDADITLKRMAPVVGKTSAAVLVSTVGNPQEYPNAGSYLKSQGLNLKERSSGNFVGQLRITKRGPGIARQYLYFAALRWSYRDPVVHAWYQRKVARDGGHKGKAIVALMRKLAKALWHVAQGTAFDSRKLFNIKALAMDA

SEQ ID NO: 381560 - protein, 413 aa, unidentified
MNKHTYRAQKVNTINWLQVKEHVAGEALVLAIDVAKVQQYALLTNQDHTKSWMMQWSHLEQTPYLIEQIKALEVSIAVVMESTSTYGDSLRYQCRQAGFVIYQANAKKVHDAREIFDGVPSLHDAKSAWLIANLHKDNITKLWCEPTLEERRMNALRLEYDLHQSQHLRNQNRLEAYLSRHWPEVLTLMPLDSVTLEQLIKHYGSPQNIAAESKQAALDMRSWGRSGLSLEKIAFVIASAINTLGEPCIEAERQFLMALASELEHSRLEKQTAKNALEALVDNDEALREMGQVIGKVTTAVLVSLHLDPRRFATPKSYQKALGVNLTEKSSGQINGRLRLSKRGSAVARKFLYMAALRLLVNDPLVGKWYKAKKDDRAKLKTVIALMRKLPLALWHIARGERFDASKLLKVAI

SEQ ID NO: 381561 - protein, 427 aa, unidentified
MSVTQNEKIRQVNDTTLVIGIDIASETHWARAFDWRGLELGKIISFENSAEGFQQFTSWASELAARENKDRLVIGAEPTGHYWFTLAVYLKNSGAKLVLVNPYHVKRSKELDDNHPSKSDRKDPKTIAKLVLEGRYIEPYLPEGLYAELRIAMNCRWRILSELTAAKNQIQRWLKIYFPEYCTIFGNFAGAGSLALLKAAPMPGDLAKLGPDGINNIWRQMKLRAVGKKRAQRAYEAAKDSVGCTEGRTAARMELKLLLEDYDAKLRQYEEIMTTVTALCEQLPEVAELLKIKGVGLVTVAGVLAETGDPRRFDSPRQLQKLAGLAITENSSGKHRGKTEISKRGRAKLRAILFRAAISLAKSNTEFRSLHRYYTTRAENPLKKKQSIIAMSCKLIRVFYAIATKGCAYDPVKMLADIHRNQPSKAA

SEQ ID NO: 381562 - protein, 348 aa, unidentified
MRFYTQQHKYYCGIDLRARSMYICILDQEGNTLLHKNFKTDPESFLRAIQPYREDIVVAVERMFVWRWLADLCNREAISFVLGHALYMKAIHGGKSKNDKIDSRKIAVLLRGGTLPTAYVYPEAMRATRDLLRRRNHLAHKRTELLAHIQNTNSQYNLPDFEKKLSIKSNRVGVAERFPDPSVQKSVEVNLQLMELDDRLLNDLELSIVKQAKGHDVRSFYLLRSLPGIGKILSLVILYEVQDITRFDRVQDFVSYCRLVKCPRESGGKKFGSKNSKIGNAHLKWAFSEAACLFLRGNEPAQSYHERLVNKHGKGKALSIIAHKIGRAVYFMLKRKEPFNMDIFMTRA

SEQ ID NO: 381563 - protein, 427 aa, unidentified
MSYRVAAVDVHKKMLAVVVTDVAGEGEYQFERRKFGATPDQTHLLAQWLVQQEVEEVVMESTAQYWKPVWGALERYWKPARQKREGASKMCGTLHLCQAKSNHGPRGRKNDFADGERMIKRLVAQELVLSFVPDPEQRLWRTVTRRKHQLTRAKVSFKNQLESLLEQAHIKLSSFVSDLLGVSARRMLKALAEGETDPVALAALADHRLRATPEQLRDALGACAELNGVYRRLLKMVLEELQVIETHIEQLDREALGLMQEHQDVVKRLAEVPGFGVDSALQMIAEVGPKAAAFRSEKALSSWVGVCPGNEESAGESHSTRSPKSNRPMRRLLNQAAQSAVKVKGSIFEVTFSRLLPRLGYKQAIWAIAHRLCRVLWLILHKGVGYEERGPAVSAKSKRTRAARMIRELTKLGYRVEGGPLPAVTRA

SEQ ID NO: 381564 - protein, 334 aa, unidentified
MEKVTTVGIDLAKNVFSLHGVDGEGRVALRRTVRRDQLMDAVARIPPCLIGMEACSGAHEWGRRFQELGHTVRLMAPKFVSPYRKTGKNDGNDAEAICEAVTRPSMRFVPVKSTEQQALLSLHRVRQGFVVERTAIINRLRGLMSEFGVILPLRSVTVRRQARAAAEALPELARRVVSDLLEELRSLDQRIEGYDREIEAQARLSEPARRLMKIRGIGATTALAIVATVGDAREFKNGRQFAAWIGLVPEQYSTGGRPHLGHISKRGDAYLRNLLVQGARSVLQSVAAHQDRMSRWILEVLSRRGYYRTLVAIANKNARIAWALLAKNETLRTA

SEQ ID NO: 381565 - protein, 413 aa, unidentified
MDVVHPRCAGIDISKKDAKVCVRVQGRGRRSAAATVTTWGSMTNQILALREHLLAEEVTCVVMEATGDYWKPFYYLLEEGLTVMLVNAHDARNVPGRKTDVSDAAWLADLGAHGLLRSSLVPPPPIRRLRDLTRARTALTRDRSRQVQRIEKVLEDTGIKLSSVASDIVGVSGRLMLQALIDGQNNPTVIAELAQRRLRAKIPVLTEALNGRFTAHHGFLISMHLKLIDEYNQALGELDDKIAEALAPLAAARELLVSLPGFSRIVAEVFLAETGGDMSVFPTAAHLASWAGTAPGCNESAGRVKSTKTRPGNRYLKGALGVAAMAASRSKGTYFSAKYRRIASRRGPMKALVAVEHSMLIATWNMLTNGEFYRDPGADYFTARQPAKTKARAINQLESLGYHVILQPLSDTA

SEQ ID NO: 381566 - protein, 343 aa, unidentified
MQMITTVGLDIAKSVFQVHGIDAEDRVVIRRQLKRRYVQAFFQKLPPCLVGIEACASSHHWSRELKALGHTVRLMPPAYVKPYVKRQKNDAADAEAICEAVSRANMRFVATKTPEQQSCLMLHRTRHLFIRQQTAVINAIRAHLAEFGIVAPVGRKGVEELLDIVADPSDERVPEVARACIAALGTQLRALKAQILEFDRRIMAWHRSNQTSKRLDEIPGVGPALATALVASVANPRAFRSGRNFSAWVGLVPKQRSSGGKDKLGSISKQGDRYLRSLFTAGALAVIRYAKIHGTKHRPWLTALLARRPTKVAAIALANKIARMAWAMMAKGERYKEPAALAA

SEQ ID NO: 381567 - protein, 340 aa, unidentified
MRQLYVASDLHGNNNLMGIIDGEGKRIFKKKLPNDPLVIRDVLKPFKEEIVGIVVESTYNWYWLVDGLMEEGYKVHLANPAAIQQYSGLKHADDKHDAFWLAEMLRLGILPEGYIYPKEERPVRDLLRKRGHLVKLRTSLILSLENIISRNFGRKLPVNKVKGLREDHVTPLFEGKEDLGLAGRVSKETIDFLTHQIRQIEGAVEKRITLKEQYRNLLTLHGVGKILGLTIMLETGPIGRFETVGDYTSYCRKVPSQWISNGKRKGSGNRKNGNKYLSWAYAEASDFARRLHPESRAYYNRKMQQSNPAVAHSALSHKLARAAYYIMRDQVAFRPEKLFG

SEQ ID NO: 381568 - protein, 343 aa, unidentified
MQTVTTIGLDIAKSVFQVHGVDAAGQVVIRRRLKRRTVLAFFQKLPPCLVGIEACASSHHWSRELQALGHSVRLMPPAYVKPYVKRQKNDMADAEAICEAVTRANMRFVPTKTAEQQSCLMLHRTRHLLIRQQTAVINSIRAQLAEFGIIAPVGRKGVTELLHVVADPNDKRVPGVARACLAALGTQLLSLKEQIMEFDRMILDWHRSNETSQRLHYIPGVGPVLATALVASVADPRTFRSGRNFSAWIGLVPKQHSSGGKDRLGSISKQGDRYLRSLFVAGALAVIRYAKIHGTKHRPWLTALLARRPTKVAAIALANKIARMAWAMMAKGERYKQPVALAA

SEQ ID NO: 381569 - protein, 419 aa, unidentified
MNYVGFDWASRAHDVTVLDEAGGVLDRWAFPHSETGWVTTLDRLARHGSAAEVPVIIERTSGLIVDRLLAAGHPVVPVHPTAFYAARPRWGASGAKSDPGDSYKLADYLRTDGHRLRRLTPTDPGLHELQALVRLRDDQVRARTAATNQLTAILDTYWPGPKQLFMSLASQIALAFLTDYPTPTSAAHLGEARMAAFCRRHAYRGGKSPAELLSRLRAAPVAPVGLPPATLAAMVTAQVTLLKTLQTVISDVERLIAVRVVAHPRSNLFENLPGVGMINLAQLLAEVGPILDRVDSAEQAATECGAAPVTRSSGQTRGVYFRWAANTRARKAITSFAHNARMQDDWAAALYADARARGKRNPHATRIVARAWLRVIWACWTSGQPYNPDRHHSSRFLHRCHPAGAQARSRWSPPPEERS

SEQ ID NO: 381570 - protein, 455 aa, unidentified
MSKETKKNTKPKQADVLSLPVVNQDAAGIDVSATMHVVAIPPGRDIDSVREFGAFTEDLYALADWLKRCGITTVAMESTGVYWKGLFTVLIEYGFKVSLVNARHVKNVTGRKTDMDDARWIQKLHSCGLLTSSFLPDNITESLRTLVRHRKSLIQDSSKYVLRIQKALELMNIKIHSVIADIMGKTGTAIIEAILAGERNAENFIPFINNKIKAGHDTIKKSLMGNWRDEHLFLVQENYDMYKYVQQRITCCEKKIEQYLQQQAAINNEGIMESVQPGDKVLCKRKTKNHPSFNVKDQLIKIHGVDVTGIFGISEGTALEILSETGTDLSKWDNENKFVSWLNLCPNNKISGGRLISSMVMKKKAGNATQAFRAAANSVQRSDNWLGDYFRRMKAKGGNKYAIIAVARKIAIIYYKMVRFKQPFKPVDADEYRKKYKAAKINYLEKQLAKLKAVA

SEQ ID NO: 381571 - protein, 351 aa, unidentified
MMIIGVDYHPSFQTIAFLMEETGECGEQELNHSDGQAEKFYRDLKQRGICVRVGMEATGYSRWFERLLAELGFEVWMGDPAEIKAKRVKKQKFDREDARLLRRLMLENNFPQIWVPGPENRDLRQLLWHRHRLVQMRTRIMNQLQALAMNEGYRWKKKLFSEQGRALLEKLSLAPWASRRRQELLELLDRMNPTIAELTAAVEREARKRPEVLRLMTHPGVGPLTALAYVLIIGTPTRFERGKQIGTYVGMIPCEESSAHKQRLGHISKQGNSLLRFLLVEAAQAAARIHPDWRRRYKHLAMRRHKSIAKVAMGRRMAIKLYWMWRNGCEYSQSVKCGSYAGQLGTVHGVK

SEQ ID NO: 381572 - protein, 347 aa, unidentified
MVASDTESLCDVHAAAEVSSLGERIGTYSFPATAVGYRELLTWARGLGTVRRAVVEGTGSFGAALSRYLLAQQVEVFDVNWPDWSDRRRRGKSDAADAQLGPGGVERAGTRPGQVRRRAGAVRRMFKLAKGSAVKTRTQATNQLKAVLVTADPVLREELAGLNNRALVRTCARLADNDGDGGGGDVVLQATHVTLSLLAQRIEQLTGQIDEPNQRLTCLVERHAPQLLIPVGIGPDSAVTLLITMGDKPERLKNEASFAALCGVSPVEYSSGRRSSRRLNHEGDRQANAALHRIVFTRLRVDPRTQAYYERRTQEGKTRREIIRCLKRCAAREVFNLVRTVSTDPPL

SEQ ID NO: 381573 - protein, 408 aa, unidentified
MQVTFGIDVSKSTSTVCELIGESKNELTITNNRPGFIQLLNELTAFSKHPQIIFEATGVYSRRLQAFLEDYGYEYVVLNPLKAKKEMDMGLRHNKTDKTDAYHLALIQRLYRHPVNQSESQTYKQLNALSRFYDQLTSDLVIAKNRLHQALQSTFPEIENLFSSAKGKNYWQIVVRYPHCDLVRREDKKQLINWLMSLKGIAFKHALRTADKLIELAYQAYPVVSCSSIEVEQVQYYAHRLLNLSDQRENLNARMVKLAKTLPNHDLENLESIPGFAQTTAVRVLAELGDLRRFSNPNKINAFIGIDPGRYQSGEMDSNLSITKHGNAVARKLLYRAIGQIDNAAKTNPCHIADYYESKKLSSQTKGFKKIAIASIHKLIRTIYALIINDQPYDYNVATHNQKDFSRN

SEQ ID NO: 381574 - protein, 427 aa, unidentified
MRSIALDVHRDFCEVAIKDESGLRLAGRVKSSVEQLERFAQSLAPDDEVALEATGGALAIARILEPHVGRVLIANTRKLSAIAESKVKTDKVDASTLCELLAAGFLPAVWSPDEFTRALRRRCQRRSKLVRSRTRSKNECHAVLQRNLKGRPPMSDVFGKGGREWLAALELPADESETLQCCLREVDFLDNEIGLIERELARQALSSEEIRRLMSVPGVSLVSAAAFVAAVGDIHRFSSPKKLVSYLGLDPRVRQSGEGPARHGHISKQGSAEARHMLCEAAWVAVRTPGPLRAFHERVRARRGAQVALVASARKLGVLFWHLLTREEDYAFGRPSLTRRKLRALELKTREGWRRGRYSGPRVNESRKEREREAEFAEQMESAYRRLVEDWQPKAPKSGAGATRGRASSKPSSGKQRGRASVPNSAL

SEQ ID NO: 381575 - protein, 428 aa, unidentified
MINHKITRRQQFCQIQSEITGSDQYLVVGIDVAKDKHHAFMGTASGKTLLKKLIFENDLDGFRKLLQRCEAARVQNGLAKIVLGLEPTGNYHKPLANHLTANGYHVVLATGKAVKDNRRLLDGRWDKNDTKDAANVADLVSRGRCLYYDAGSAQINQLRDLLSLRRRLKKEEHSIKMRIRNTLLAKYFPELDRFYSACESESLAIVRWCLDPAKLAVLDFDQFFAMVTRSRRGIAQKLRLQKIHQLAAQSVGCPMGPAAEFEAALLVQKLKQDREQIKQVEDLMQQVARDFDEYQILLSIPGFGPYVAAVVLAAIADAVRFESSNQVVKLAGYDLCANRSGKSSDDAVPVISKNGNAQLRYALYQAAFIASVHNPHFSAYFTHVLRGRQRERGIKTKMRVKLAAKMLIIAWTLMKKKEPFNPDYLHIE

SEQ ID NO: 381576 - protein, 401 aa, unidentified
MKYGVGIDVSKGKSTIAILSIEGEIIEEPFEITHDIDGLEFLEDKLKKLPKDDLKIVMEETGTYHLPILGYLLDKEYFVTAENALKIKKYLDRGLRKAKTDKKDSYKLAEYACDNWFKLNKVRENDEIYNELRFLSRQYLATVAVQIKQKINFSNLCDLLFPGYYQLLDDNNFILGLEIFKKYFHPEIVKKKKENQFIIEIDKMAKKLGHKGAGITLANKIYTLAQNTIPPRPNNQYSQLSAISCIEALIITIKTSNTIITEMDKLASKLPEYNVISEIPGCGKKLTARVIAEIGDIRRFKNAGSIIAYAGLDAPPYQSGQFEATNRHISKRGNKYLRKTGYEIMKSVKSNVNSDNELRTYIVKKENEGKLKKVAKIAGLNKFLRMYYGKVKKKYKELNIW

SEQ ID NO: 381577 - protein, 444 aa, unidentified
MKKAILILIPATVSWLVVQNQKRSIAMKFIKAEKIKTINTKTLIVALDIGKNIHYAYFRAPNGKDIRPFPFYNTSHSFDNFWEKLSRFKENHMLDEVVIGFESTGPYAEPICHYLRKKSVKLVQINPMHTKRVKELTGNSPGKTDKKDPRVIADVISLGHSLTVVIPERAAAQLRRLTHARERAIERRTAMNNQLQGLVFVIFPEFVSIIKPSTKTGMYLIKNFSDPKSIVSIGIERLYEIIKKISRGKIGADRAEKLYNAAIQSIGITEGVESILLEITHLVSSIENENRHIKNLEKQMVVFLEQIPYSHTILSIKGIKHITAAGLIGEVGDFRKFKTISEVMKLAGLDLYEISSGKHQGCRRISKRGRALLRKLLFFGALNTTRKNGVFYTPYQRHLAKGMPPMKALVAISRKLMMVIFALVRDHCKFDIDYSTQIELKKAA

SEQ ID NO: 381578 - protein, 372 aa, unidentified
MIVVGVDTHKATYTLVGADAGGRRLAEVTVRATDAGHLKALGWARERFGADLVWGIEDCRNLSSRLERALLDAGQQVVRVPPHLMARTRASGRTRGKSDPIDALAVARAVLREPDLPVASHDEVSREFKLLVDRREDLVGHRTATINRLLWRVHELDPSHAPGPSALVGVRARQVLGAWLATVPNLVAVLARDELAEIGEFTEQINALERRIAARVRVQANSLLRIVGCGELTAAKILGETAGVSRFRSEAAFACYAGVAPLPRSSGSTRVRVRAGRSGNRQLNVALFRIALTQARHPGPGQVYYQKRRAAGDTHAEALRRLQRRAARRVFGCLCADDTRRTTPSPTGRPFSFSELERINTEWSRALTLLGL

SEQ ID NO: 381579 - protein, 318 aa, unidentified
MAGFWGIDVAQAELVIAEAGTSTSRTQPNTVAGCQALAQQFATQSVQLIVLEATGGYERNMVAALGAVGLPVVVINPRQVRDFAKATGRLAKTDAIDAHVLAEFGARVQPELRPLPTTEQEELRAVLARADQVQQMLVAEKARLLQALGRRDRQPLRKKIKRHIAFLERELHELDADLDDQLRQSPLWREQDDLLQSVPGIGSKTARAMLAFLPELGTVSAAEVAKLAGLAPLNRDSGTQRGKRRIGGGRARIRAALYMATLAAIRCNPVIQALYGRLVAAGKPKMVALVACMRKLLVVVNAMLKTKTRWQPRVAATT

SEQ ID NO: 381580 - protein, 433 aa, unidentified
MLKLNYMSTLFVGIDVSSKTNAVYAMDFEENKYISSSFGNNQPGADKLVNMIAECMHKHKNLNTILIVLESTSVYSVHISNFLSTSEVLMPYKPYVFCVNPKATSNYRKSYIGMEKTDPTDAYLIADFGRVGRTKKLEPWRGGQFIALKRLTRHRMHLSECITREKTYMVSNLYLKFSELQLLEGDDKPFGSLYGATSSAVLTEFLSPQEIIDMPEEELLTFLAGKSRNRISDLSKTSELLRKAARDSYRLDKCMYEPLNVSLASSFNCIHAYQKEIKLIEQAIEKCINGMNPNALIILQSIPGIGPIWASGILSEIGDITVFHSSDALAKYAGLYWPKGDSGDFTSEDNKMSKAGSPYLRYYLGEAANSVRKHIPEYADFYARKYAEVTKHQHKRALALTSRKLVRLVFGLLVKNQLYTGEKLDTEYNIESN

SEQ ID NO: 381581 - protein, 349 aa, unidentified
MIYAGLDLHKRFSVITAADEGGEELIKQVKVPNDEGRIVKLFRGLDGPVQVAIEATRNWQWLYDLLEENGIEPKLSHPLKTRAIASARIKNDKIDSKILTQLLRAALLPLSYVPPKEIRLQRELLRYRASLVKIQTGVKNRVHSILAKNNISHEFSDLFGKKGREFLRELCLPQSYRMALDGYLTLLEVLALEIKEASKEIRVLAGEDKEARLLMTIPGVGYYSALLIKSEIGDINRFPSPRKLCAYTGIIPSTRASGDKVYHGHIIKQGSKWLRWILSEVVEHCMDRPGPLGRYFSRLKGRKGRNIAKIATERKLLTWIYYMLKEKKTFQEVEEVAKSWGEPVLTHSR

SEQ ID NO: 381582 - protein, 343 aa, unidentified
MEHFAGLDVSVKETSVCIVDDTGKIVREVKLASEPDALLAELRNPAYRFKRIGLEAGPLSQWLLSALAEAELPVICVETRHMRAVLKAQINKTDRNDARGIAQMMRVGLYRPVHVKTLRSQKLRMLLTHRKLLQSKAIAIENDLRATLRNFGLKVGIAGKVKFEARIKELVENQPDLAVLVEPLLIVRRVLREQIGILHRRLLAVVRDDEVCRRLMTVPGVGPVVALTYRATVDVPARFRTSKAVGAVFGLTCSKYQSGEIDRSGRISRCGDEMMRVMLYEAAQSMLFHSTKWSWLKAWAMKIARHRGMKKAIVALARRLAVIMHRIWVDGTEFRWTKEVVTA

SEQ ID NO: 381583 - protein, 423 aa, unidentified
MMKLKYSICCGLDVHKNVIVATIVTTNKDGISEYLQKSFSTINSDIQRFHNWLIENNCYHVCMESTGKYWIPIFNYLENDIDVCLTHPKYVKAIKGKKTDKKDSKWIADLYKFDLVRCSFIPPKDFRQLRELSRYRFKLVCMKSSEKNRIQNCMTISNVGIASVLSDPFGKTATEIISYLLEHTADSMDEKAVRKLIKKGAKSKSDEIIEAIKGYTIETDQAKKLELARGHLEYLDDMITQTEVELYVRIKPYYEFVEFVSTMPGMTELSSTIVLAETGVDMDIFDDAKHLCSWCGLSPANNESAGKKKSVRIAKAGDYLKPMMVQCALAAIKSKKQPYFAIKYGRIKKRRGHKKAIIAIARMMMVCIYHMVSEKKPFTPTDYEELMDPQNHVESVVLNEINVFAYLESLGYDSSKLVKRNDN

SEQ ID NO: 381584 - protein, 425 aa, unidentified
MKNTQNQKISQIKNETLVVGIDVAKETHYARAFDYRGIELARLLKFSNTAEGFKLLDQWMQDICKQKGKTEIIAGFEPTGHYWFVLGDHLKRQGHKLAIVNPFHVNRTKELDDNSPSKNDSKDCKTIAMLVKDGRYREVYIPDDIYQELRETVAERERLQEQLTSIHNRVVRWLDIRFPEFQKVFKDWRRNAALITLRSFPTPEKIVEAGARKICETWKTEMKRPSFKRAEALVKVASNSIGRTSGRVASEASLQNLLAENDLYCQQYEALEQLMRELLMQVPNASKLLDIKGVGLTTAATFVGEVGDISRFQDPRQIQKLAGFNLVANSSGKHKGKTTISRRGRRRLRHSLFFAMIAILAHNPEFRSLHQRNLTRENNPLNKMQSIVALCGKLIRIFYALLNKGVDYDPEKMLSDIHQPMQQAA

SEQ ID NO: 381585 - protein, 348 aa, unidentified
MPYFGRMGGEKMEQTNLNDVTFVGIDAHPSEHTALAINRFEDEKGILRFENTREGIARFLSWLPTIDTRSDNVIVGIEGGAGMQNELLRQLLLNYSNVYEINPVYTKQRRTFGTRADKSDPFDAKLIAEVLTKKLSFLPRITKDQLSSQRLILKKVVWFYEEVTLQGARLQIQLKQVKAQYELCSSPAEKKILGSIVKDQNRTLIQIRKQQKKLEENLKILLGREGGDNLLTIPGIGVTLATKIISHSGGITRFKSIDKFIKYSGIAPTEKSSGKSKRYIKNTKGNRKLNSTFYLAALGQINWNPKAKEYYQKKIKEGKSKKQSLVCVMKRIACIVYGMLKSGEDYRG

SEQ ID NO: 381586 - protein, 338 aa, unidentified
MQYCGLDLGKKSSRFCVVDEKRVVVREGNVRSRVAELQKVFTQLPSMRIAIEASTKAFWIADRLRELGHEPVVVDPGRTKAIGAALIKHDKLDARVLATLCAADVLAKVDQPSEKQRMARMPVVVRDGLVRCRVRLAMMVRSILDSEGIDFQHCALDRFADRVDELASEVPAEIRLTIAPAVEMIRDLSKRIEECSSRLEESMESDEDAQRLMTAPGVGPVVAACFLLAVRDPARFESGRQVGAYLGLVPSLYQSGQTNRRGRITKHGNRQTRWALTIAANALLRTRRPSAIRDWGRKLAERIGRKKAVIAIARKLAAVLWAIWRNKISFEPRLAVAA

SEQ ID NO: 381587 - protein, 477 aa, unidentified
MGKQAGSATSKRKAARDAERRKRSKDTKGKAVLGLPVLHADTAGIDIGATEIYVAVPADRDEEPVRCFGGFTEDLRKIAEWLRQCGVQRIAMESTGVYWIPLWQVLADGGFEVCLVNARHFKNVPGKKTDVEDCQWLQFLHSVGLLRASYRPDQAICGVRTLLRYRGELIQFAAQHIQHMQKALEQMNIKLSHVISDLTGVSGLAIVDAILHGERDLRKLAKLRHNRVHASEETIMKSLEGDYRPEHLITLQYSLDLYRHYQTRIVELDKKMETFMSELPDRVDMDQYPLPPWRKKSRQHKQHNAPAFDLRTHCYRILGVDLTAVDGLDEVTAHMVVTEVGADFSAFPGAGDFCSWLRLCPNNKVSSSRILSRKTKKGKHRLAVALRNAAQTLHGSQSSLGDYYRRMKAKFGPAKATTAAAHKLARTIYAMVTKHQEFNPAVFAKQDQKQQRKTENRVRRQALELGFQLVPLQTATA

SEQ ID NO: 381588 - protein, 315 aa, unidentified
MSAEMNVGIDVAKATLDVAERPDEVGWGTTNDDAGIGTLVARWTVSRPARIIVEATGGYEMRLVTALVEAALPVVVVNPRQSRAFAKATGQLAKTDKIDARTLAHFGEAMRPAVRPLPDAQTRALSALLARRRQLIDMRTAERNRLETVDRPIEREIQTHLRWLNKRIDAMDRQLDKAIKASPVWCQKDALLQSVPGVGPTVSRTLLADVPELGTLDHKKIAALVGVAPFNRDSGTFRGRRCIWGGRASVRTVLYMAIISAAQHNPVIRAYHQRLMAAGKPFKVAQVACMRKLLVILNAMVRDGAHWQQNHALAA

SEQ ID NO: 381589 - protein, 320 aa, unidentified
MQSPSAALNIGADIAKDAIVVACSEGSFPVREVANQRPAVLAFLKSLPAGSRIGVESTGTYHELFAEAAHQLGFRVFLLNPKDTHHYAKAVGLRGKTDRVDAELIARMIAHEHTKLHAWNPPTPQQREIDRLIKRRATLISLRQAVAMSLHELGGFADELKALRTRFNQLIARIDLRIRALVEASPDRKQNFTRLCTITGVGPVIGTALVNTLERVPVNSADAFVAFTGLDPRPDDSGQHRGKRRLSKRGPAELRRLLYLAAMSAAKTKTWRPLYEHYRAKGLSSTATLVILARRIARTAWSIYTHKTEFDPSRLTNPLT

SEQ ID NO: 381590 - protein, 340 aa, unidentified
MPNPAVIGLDIAKNVFQVHGADAEGRCVLRRRLRRAEVITFFARLPKALVGIEACPSGHHWARELRSLGHDVRLIPPQYVRPFVKTNKNDAADAEGICEAVVRPNMRFVPIKSVAQQAAMMLHRTRALLLRQRTQLINAVRGHLAEFGLVARRGARNIRELAELVRDTGSDKLPDAARAMLVLLLEQIREVQLRVQKTEHALEAWAKQSDACRRLMTIPGVGIMFATVIVLAMDDPKRFRSGRHFAAWLGLVPRQSSSGERQVLGGISKRGDGYVRTLLIHGARSLTRWRRESWRWLAGLLMRRPTNIAAVAIANKTARTAWAILAYGHQFQPTRRAEAA

SEQ ID NO: 381591 - protein, 398 aa, unidentified
MDQDRFDVFVGLDVGKEHHHATALNSAGRRLHDKALPQDEAALREVFDKLTVHGSVLVIVDQPATIGALPVTVARAMGIEVAYLPGLAMRRIADLHPGNAKTDARDAFIIAEAGRTMPHALRRVGGDDDLIADLAVIVGFDDDLASEVNRVSNRIRGMLTQIHPALERAIGANIGHPAVLALLAKFAGPTGLAAAGRRRLTTTTKPLAPRMHTRLVDAIVKALTEQTVVVPGTRAAELVLPQLAAQLQGLLAQRAAAAKQVEEALDAHPLSQLLMSMPGVGIRTAARLLLDVGDATAFPTAGHLAAYAGLAPVTRRSGSSIRGEHPSRAGNKHLKRALFLSAFAALHDPDSRAYYDRKRAAGKKHNAAIICLARRRVDVLHAMLRNGTYYQPRPAVAA

SEQ ID NO: 381592 - protein, 384 aa, unidentified
MYVGIDAGINHCICIKDDDGKILNKFFINNSKNDYGKLTSLIDRTAKICIEDTGTYSLLIYSFLSKQGYDIKRINSFKAEKLRQFLNDNVKTDSKDAEFLADLRKIKDDFIIKDITNNIELKKLSRLYDFMVHYQSKVKNKLIDELFRVCPELKSKFSRKLSVTSLRLLEHFGVKGIQKNSFECLCKYSKDHMLGLHYSVIKKIKDAFTQTVGISKKDYINLNSLITLYFDNQNNIDNMVKKLKEMIDNSEYKNLLTLPGINVITASVIIGEIGNVMRFDNCKQIVKFAGLDVKITQSGSKRGHIVLSKRGNSRIRKTLFMTTLKFIGIKNKNKFKGFYERLKAKNKQSFTCISAVSRKILIWLYFEMVRCHTKKGYVHKVIYS

SEQ ID NO: 381593 - protein, 347 aa, unidentified
MDFVGIDLHKTSSQICTLSGGGELTERRIKSTRASFDEVFAGKPPARILVEASTESEWVACHLEALGHEVIVADPNFAPMYATRDKKIKTDKRDARALCEACRLGAYRPAHRTSERQRRIRSQLLVRSTLVRTRSKYITLIGSLARREGCRIATGGSNNFCARVEAAGLPAHVMQVITPLLESLKMLNRQIAEADAELEKIVREDEVVRRLCTAPGVGPVTATTFVATIDDATRFGAAKQVRSYLGLVPREYSSGERQRKGRISKAGGSRARTLLVEAAWALLRWRNQKNEALYDWAMRIAARRGKARACVALARKLAGILYAMWRDGTEFDPLAGSRGDGQAAAAA

SEQ ID NO: 381594 - protein, 350 aa, unidentified
MKGDSFGNFVLVTIKTKVMKKVQFFVGIDVSKATLDVFIHGLNLYFVVENNLQGFVCLLEKVLTGTKCKKEEVFFCFENTGKYSRMLSVFLQSENILFTMESALQIKKSLGITRGKNDRIDAKRIAHYAYEKREILVPTILPGAKIDQIRSLISLREKLLKHRTAYKNGISDLHDCYEDGESELIKEVQLRLISNLNDEIKKVEQKIEDIIESDESISRNYKLILSIRGVGKILGFYMIGYTANFTSFANARAFACFAGIAPFSYSSGTVKGTPRVHPFANKMLKALLNLAAMAAIKYQGEYLQYFNKRVNELGKNKMSTLNIIRNKIVYRVFAVVQRQTPYVDLLKFAA

SEQ ID NO: 381595 - protein, 414 aa, unidentified
MEQIYERVAGCDVHRDQVTVCVRTPGPRGGVHKDKARFKTTTAGLIEMADWCGDRAVELVAMEATGVYWKPVYYALEDRFRVWLCNAYHVKNVPGRKTDMSDADWLADVAAHGMVRPSFVPPVPIRELRELTRYRKKQVDTRASELARLEKVLQDAGIKLTSVASKVLTQSGRAMIQALIDGEGDPGALAELAKGKLRPKIPELTAALTGHFGAHHALVAERILAHLDFLDDTIAQLSRQIATRVAEGYQPALDLLLPIPGLDHTSVEVIIAETGADMSCFPSPGQLASWAGLCPGNHESAGKRRKVGTTPGNQWLRRTLIESARAAARTKGSYFGAQYHQIARRRGPNKAAVAVAHSLLDVIWHALSTGEVFTDPGADYFTTRQDPEQRTRRLVNQLERLGYTVELTQTVQTP

SEQ ID NO: 381596 - protein, 367 aa, unidentified
MSHIIYCGVDFHARQQTICCLKTETGELTSHELKHEHKQVLRQFYAALGGPVIVGLEASGYTPWFEQLLEELGHQVWLGDATEIRRRARRRQKNDRRDAELILELLCHGEFPRIHRPSPESREILRMLRYRHKLVKVRTLIKNSLQSLSIQAGLSLQAHLFTRQGTQQLEALTLSPVMGHQRQQWLELLQELNQRITATEGWLKQQALPDPRISLLRTHPGLGLLSSLGIVHTLIPVSRFPNTRKLAAYGGFDPMERSSADKKRYLGISKAGSRLLRFLLIEATQTAVKTDPELKRFYHRLGQRRGKPKAKVAVARKLLIRSFIMLRDEINYAEFQQRAIAARLAREFARPNVPVPLIGQPASPAKG

SEQ ID NO: 381597 - protein, 345 aa, unidentified
MENGRAAYRLYVGVDIAAETFVAAWLSPGGKPTAPFTGEQTPAGFAALQGRLRAMAVPPPATLVVVEATGNYWVALAVALHEAGYRVAVVNPRQAHHFAKAQLRRAKTDALDARDLAQLAAALRPAPWTPPPAVYHEVRQRLVARDGLLAMRTQARNQRHALLQWPVVVEGVRQHLDELIADLDRRVAALEGEIAAVLQESAWAESLACLTSAPGLGLVTAAWLLVGTLNFALCAGPDSLTAYAGLAPMPRESGRSVRGRPSIGHDGNARLRTALYMATLSATRYNPAIKAFYQRLRAAGKPHKVARCAAARKLLHQAWALGSKRQRFDPDHKQQQHDASSQLAA

SEQ ID NO: 381598 - protein, 343 aa, unidentified
MEHFAGLDVSVKETSVCIVDETGRIVREAKVASEPDALLAVLTNPAYHLKRIGLEAGPLSQWLYSALAEPGLPVICVETRHMQAVLKAQINKTDRNDARGIAQMMRAGLYRPVHVKTLRSQKLRMLLTHRKLLQSKAIAIENDLRATLRNFGLKVGVAGKVKFEARIRELVENLPDLVVLVEPLLIVRRVLREQIVTLHRRLLAIVRDDDVCRRLMTVPGVGPVVSLTYRATVDVPARFRKSKAVGAVFGLTCSRYQSGEIGRSGGISRCGDEMVRMMLYEAAQSMLTRTIKWSWLKAWAMQIARRRGMKKAIVALARRLAVVLHRIWVDGTEFRWTRETVAA

SEQ ID NO: 381599 - protein, 357 aa, unidentified
MSKPTILKQSIGIDVSKDKIAVCFAVEQTDKKFRILATRKFDNNASGFAQLHGWAKKHQKVNLPVNVLMEATGVYYESLAYFLREINVRVSVVLANKTKAFAKSLNYKSKTDGIDAKILAQMSLEREVPEWAPAGKNMLKMKRLCRERVELIMDQTIAKNRLHAKKHSYKGEQSSMKRAVKVLAFLKKQIEEVEQEITKLIASDPEIKGKVEKICSIKGIGIITAATIIGETNGFALIKKKAQLVSYAGYDVVENQSGTSINGKTRISKRGNSFIRRALHFPAITTIKYNPSLKELYDRVFERTRIKMKAAVAVQRKLLVLVYTLYRKDECFDPQGLISNKSNLPNKNRQEQQSVPA

SEQ ID NO: 381600 - protein, 441 aa, unidentified
MTVRKRVFEVAYPNAAGIDIGAKSHFVAVPADRDELAVREFTSFTDDLVRLADWLQACEVDIVAMESTGVYWIPLYELLSSRGLVVHLVNTRQVKNVSGRKSDVLDCQWLQQLMSYGLLSGAFRPDDAICQLRALSRQQQMLTHYQSRHVQHMQKALAQMNVQLHNVISDITGETGLRIVRAILDGERDPAKLARLRHRGIRASEADIVRSLQGNWRQEHLFALRQAVVLYEAYTQLLQECERAIVQQLDQLSRVEVEEPAAPKRGRPPTGHAHRLRLALHRTLGVDLTRIDGIQVGTALKVLAEVGFDLSQFKSAKHFASWLGLCPGTRISGGKVLSGASKRSANRLAQALRMAAMALRRSQSALGAYHRRMLSRLDKAKAITATAHKLARLIYTMITKGTAYVDQGQAYYEERHRERVVHHLHKKAALMGYALVPINAQ

SEQ ID NO: 381601 - protein, 468 aa, unidentified
MDLTLGIDLACRAAHQASLAGPDGTFVWTGRKFFTRPADLQRVWADLGLTDADTVTVVMEPTRNAWAPVASWFRRRGARIIMVPTTQSADLREYYSKHTKNDHLDSKLLARLPLLHPEGLREQTGDGPAEPLRRVVKQRSSIVKRRTAIYQRLDALLELLGPAWYDALGSNYGKAALAVLARYADPNALTRLGHARLTRFLIRHSRGAWRDDHATLFLTAARQSMDLWGGDPETGIDFAELAADIAIEAEQAQVLTEQIEDLDERIANLYAEADPEGVIASAPGVGPVTSGVIAGRIGDPHRFHSLAAVRAYSGLVPKVSQSGQSHHQHGLTKAGDPLLREALWAAADAARKTDPQLAVKYKRLMDTDRHHDSALCHIATTLLTRIVAAWRAGEHYLIRDTDGRTITAEEGRQIVRQHHRVDRKRRQQAADTRRSKRLKNRTGREQKESQSAPASRPANTRLEAANVA

SEQ ID NO: 381602 - protein, 342 aa, unidentified
MKISTIGIDLSKTTFHLIGLSPRGEIVLRKKLSRKQLLTYTATRMPMLIGMEACAGAHYLARALRDQGHDARLMPAQYVKPYVKTNKNDYLDAEAIAEAVQRPTMRFVPIKNDEQLDLQALHRVRDRWVARRTAVMNQIRGFLLERGIAIRKGPSYLATQLQVIFSDGDSSFSGRLLHLIRELKLEWDELERKIEEASAELARIAKLDDGCHRLMEVPGFGPIVSTALVAAIGNGISFRKGRDLAAWLGLVPRQHSTGGKTRLLGISKFGNEYLRRMMLHGARSVVMQMERKPSALGEWLTGLSARCHRNVTVVALANKMARIAWAILSKGTCYNSPAFVSA

SEQ ID NO: 381603 - protein, 318 aa, unidentified
MTTQEEVYIGIDVGKSWLDVAIWGEDNVWRVANDAEGIGKIMERMTGLEPQIIAVEATGGYEQMAVQTMLLNNLPVAVINPTRVRALSKATGKLAKTDVIDARLIAEYACKVRPEALAPKEASEIRLKALVTRREQLVEMCTMEQNRLGTAPSCTKVDIREHIEWIKERIVEIELQVDELIDSLPEWKEQADRLDSIPGVGRITAVSILAVLPELGQIDRQKIAALAGLAPFNQDSGKKRGKRRIFGGRKGVRRVLYMACLSAIKCNPIIKSLYTRLTEQKGKVFKVAITACMRKMLTIMNAMTRDRLDWSPPVSIIH

SEQ ID NO: 381604 - protein, 398 aa, unidentified
MLSIGIDVSKGKSTVCGMKPGGEIVYTPFEVQHTREGMSELVSLLRGSGEEVRVVLESTGSYHCPVVAALLENGIFVSVVNSLRMKRFCSQSIRRVKTDQIDAMQIALYGLAYWPELQPTRLPENTYRELQLLARQYYQMTSLLIKAKVDFNALCDQVLPGMQELMNDHAGRHKLSDFVLRYHHTAHILKMGETRFRKDYCKWAEKKGYRNHERMAALIFATAQNGIPVLPNAPSTQIVITEAIRVLHTVEASRDAILTQMQALAKTLPEYSLVREMPCIGDTLAPRLIAEIGDVRRFHSKRALIAYAGIDAPPYQSGKFCANNRHISKRGNRYLRKTGYEVMQSYVMHKPANDPIFTFIEKKRSEGKSGKLAMVAGLNKFLRVYYGKVTELYRSLPQ

SEQ ID NO: 381605 - protein, 532 aa, unidentified
MATRRNSRKNRANGPGRLGKPNGIIQPRVEEVGPRRFGVVAIDCAKARSKWMLCDFYGKVLVPPSEVEHARTQMQLATLQFREACEQHDIRDAIVAVEMTGTYHRPIQRAFRKAGVETRLVHPFASKHYRQPAHGDNKTDDHDLEAIFRAAVNGFGLLEPAWDETYLQLQLLSRHRRDLVDKRSKLQCQIRQYLERCLPGYGAMFPRDDLWTRPVAISVARRATSAEAICQARIPGVTRWLREEKLRFQARTVEKIVAWAANAADADPLAAHLSRVWHALHDDWRSKTELIRRLERELAGILVKTPYLLLMSLPGINVTSAAELAGEMGPIEHYAHARAVTGRAGLFPSRYQSDTVDRADGPLARFRNARLRAAWMRVAENLIKCNAHYHGKFQFWKQRRVDSRDIRCRIANRAVRTVFQMVSGRKLYRHPSRLDRGYVMDKLLTFHREHATPPHQIVRDLQQAAEQIPKLNHLEEAAPLRTTYERCRRSRRKGPQEIGTILVAVLARLGINGLESEPEARGPTANVSKAST

SEQ ID NO: 381606 - protein, 338 aa, unidentified
MKAYAGIDLHSSNNYVGIIDENDKRLYGKRIPNELNHVLTALEPFRNRLEGIVVESTYNWYWLVDGLQEHGYKVHLANPSAVKQYEGLKHTDDKWDSFWLAHMRRLGILPEGYIYPKKDRAVRDLLRRRLLFVRHRTSNILSLQSMITRNLGSNMSGNAIKKLNDADADELFDCPNLAFMAKNNIAVIAFLSKIIKGIERQVKSQVKLRKEFEMLLTITGIGDILGLTIMLEVGTIHRFEVVGDYSSYSRCVKSERLTNGKKKGENNKKNGNKYLAWAYVEAANFAIRHSVAAQRFYQRKKAQRDGIVAIKALSNKICRASYYIMRDQVPFDEGLLFK

SEQ ID NO: 381607 - protein, 342 aa, unidentified
MQVTTIGLDIAKNVFQVHGIDAAEKVVVRKQLRRSQVLEFFKALPPCLIGMEACATAHYWARELTKLGHKVRLMPARDVKAYVKRSKNDAADAEAICEAVRRPTMRFVQVKSAEQQSQLMLHRTRDLLMRQRTQVINALRAHMAELGMTAAQGNAGLRELLAIIAGAADERLPAEAHASLIVLAAELQAMRTLIASIEKRIIAQHRSDEASKRLRSIPGIGLVGATAIVATITDPKAFRSGRDMAAWIGLVPRQDSTGGKQKLGPISKQGDRYLRRILVVGAHAVLKLARQKPEKYPWLTQLLARKPFKVVAVALANKMARIAWALLVKGGPYRARALVAAA

SEQ ID NO: 381608 - protein, 339 aa, unidentified
MYYGAIDLHKNNSVLGIINADGQRLCMRKIPNDLDLIKKALDPFAENLEGIVVESTYNWYWLVDGLQDAGYRVHLANPTAIQQYSGIKHTDDVTDAWWLAELLRTRLLKEGFIYPRAERAVRDLLRKRAHLVKQRTQNILSIQNLICRNTGGRLSANQTKQLTEETVQKFYDKEEERALAINCSLRVIQTLKREITIIEKQAKSKLKLSQPYQVLQSVPGIGELLAMVIMLEAGDISRFPGVGNFSSYCRCVNSVRLSNGKKKGSGNRKNGNKYLSWAFMEAAHYAIRYYPVIRKFYQRKSAKKGMMVAQMAVAHKLARASYYVLRDQVPFEETKCFVH

SEQ ID NO: 381609 - protein, 317 aa, unidentified
MSNPESFVGIDVAKAWLDVAWLDGATLRIDHSDEAVAGLVQRLRSQPPTLVVMEATGGMETELASALVAAGMAVAVVNPRQVRDYAKACGRLAKTDRIDAMVLAAFAAAIRPQVRELPDEHTRALSDLLARRRQLIDMRVQEKLRLPRASSVQRTSLREHIAWLDERIDRLDVELTHALRSSAAWRDKDDLLKAIPGVGSLTRATMLGLLPELGTLSRRQIAALVGVAPFNRDSGRQQGQRVIWGGRAQVRRTLYMAAVAALRCNPVIRGFYQHLRSQGKPAKVALTACMRKLLIIMNAMLKHHCVWSPALDTQHGC

SEQ ID NO: 381610 - protein, 347 aa, unidentified
MILVGCDLHTRQQQVAVLDTETGEVVEQELAHAGDAVEQFYAALPPPVTVGIESTGYSLWFHTLLQRLDHTLLVGEAAKIRAMVVRKTKTDRRDARHLLDLLQYERFPTVWIPDPAARDLRVLIKHRLRLVRIPTMIKNGLHAIALNQRRALGPSLWSQRGLAQLRTLVLLPHTCRRRDDSLELLDWLTHRIDALDRQVAAAAAANADVQRLMTHPGVGPLSALATVLVLGPVSRFPGSKHVVSYIGLAPTVNASADKYRLGHISTQGSAVLRWLRGQAAPLAARADGDLTRSYFAVLRRRGRPTAKVALARRLLVRLYVMLRDQIDYDEFRARGQARRRAAASSPV

SEQ ID NO: 381611 - protein, 344 aa, unidentified
MDHFAGLDVSVKETSICIVDDAGKIVREVKVASEPEALLAVLKNPAYHFKRIGLEAGPLSQWLFSALAESGLPVICVETRHMQAVLKAQINKTDRNDARGIAHMMRAGLYRPVHVKTIRSQKLRMLLTHRKLLQSKAIAIENDLRGTLRNFGLKVGMVGKAKFEARIRALVENLPDLAVLVEPMLIVRRTLREQIVILHSRLLTVVRDDEVCRRLMTTPGVGPVVALTYRATVDVPARFRKSKAVGAVFGLTCAKYQSGEVDRNGRVSRCGDEMMRVMLYEAAQSMLRSKKWSWLKAWAMQIARRRGMKKAIVALARRLAVIMHRIWVDGTEFRWTREQATAAA

SEQ ID NO: 381612 - protein, 340 aa, unidentified
MRNIKVLGIDLAKNVFQIHGTDAAGKCVLRKRLTRDKLPSYIATLTPCLIGIEASTGAHYWARLFASMGHTVKMMAPQFVKPYIKSNKNDMNDAAGIAEAVTRPDMRFVPIKMIEQQDALLSHRARELAVKQRTAQANQLRGLLAEYGVTIAQGIRHIHSLVQILENNHDKLTVKSREIFLRLYEQFKIYDTQVSTYDKEIEQSAKQDVRCRELMKIEGVGPLTASAVAATIGDAKCFKNGREVSAWLGLVPKQHSSGNTIRLSGVSKRGDCYVRKLLIHGARSVVKRCELKTDKKSLWVADKKRRSGYNKAAVALANKNARIIWAILATGECYRQSNIV

SEQ ID NO: 381613 - protein, 342 aa, unidentified
MEYYAGIDVSLECSSVCVVDANGKIVCEAKVASEPQALIAWFGSLGFGLERIGLEAGPLSQWLFAAMKAAGLAVELLETRHVRKAFEAMPVKSDRNDARGIAQLMRLGWFRPVHCKSMSAQETRSLLTARKLVQSKLHDVENSLRGILRGFGLKVGKTTGQKFAGRIEELVAGHPHLQMIARALLAVRAVLRTEFAAFEKQTRRMVRSDKQARLLTSVPAVGAIVALTYASAIDDPARFKSSKQAGAHFGLTPKKYQSGETDYTGRISKIGDASVRTALYEAAHVMLTKPVKGCAQLKSWAMRIKNRAGMSKAKVALARRLAVIMHRMLADGTPFNAAAAAG

SEQ ID NO: 381614 - protein, 341 aa, unidentified
MQITTIGLDIAKNVFQVHGIDAAEKVVVRKQLRRGQVMKFFAALPPCLVGMEACATAHYWARELTKLGHEVRLMPAKDVKAYVKRNKNDAADAEAICEAVRRPTMRFVQAKSAEQQGRLMQHRTRDLLLRQQTQVINALRAHLAELGIVAAQGREGLKQLLAIIADEKDTRLPIDARASLIVLAAQLQAVHTMIGSIERRLTVQHRANEASKRLQSIHGIGIIGASAIAATVTDPKAFRSGRDFAAWIGLVPRQDSTGGKQKLGPISKQGDRYLRRILVVGAHSVLRRAKQNPEKYPWLTQLLARRPFKVVAVALANKMARIAWALLASGGHYRPARLAAA

SEQ ID NO: 381615 - protein, 321 aa, unidentified
MAETVLGIDIGKQKFEVHLLVNGKTKSKSVSNSKEGFLILSQWLNKHKAGIVHACMEATGSYGDELALYLHDSGHTVSIVNPARVKGFAQSELIRTKTDAVDAGIIARFCLAMNPEPWTPPVPAVRRLQAIARRLDALIAMRTQELNRLGVAHSLVEPSIKAHLLYLDSEIEKLKKQMRSEIDDDPDLRNKRDLLITIPGISDTTISIILAELDFNKFESVREVVAFMGLAPKDKISGTSVKGKPRLCKTGNARLRKCFYMPAMVAMRFNPVVSTFQRRLKENGKNGKVIVCAAMRKLVHIIYGVLKTGQPFNPQIATQIA

SEQ ID NO: 381616 - protein, 379 aa, unidentified
MCTKIVYISVFCERMEKKIERVFGVLTPQLDSMRDFMAENEVCEVAMESTSVYWIPIWRVLVDSFELKLVNPYFIKQLPGRKSDVKDAQWIAECVMKELIRGSFIPPPLIQQLRLYDRRIFKLNAELGRKYSKIDAILQRCNIHLSNYVSNTDCKSYKYVVKRISEGVTSPQELLMLVRKRIINKHGEDTILTALTGVVSDAEIDMLAQYVAESALLEDNKNKCIEKMREICNREFEEQMKNLQTIPGVSERSALTVLAEIGPEVNAFPSAKHLVSWCGFNPRNDESNKKIKSNKITHGSRFIRIASVQCAWAASRTKECYFSKFYAFHTQVRKKFKLKVVVAVARKVLVCIWHILNFNVSYKDFEPQKSVAKDCTQLA

SEQ ID NO: 381617 - protein, 412 aa, unidentified
MEVVYPRCSGLDVHKRFVVACLSIIEQGQRHKELREVSTMTSDILALKTWLLASGCRQIAMESTGVFWKPMYHLLEDSFEIVLVNAQHMKAVPGRKTDVKDAEWLTDLLQHGLLKASFIPSSEQQAVRDLTRTRMRLIQERTRLVNRIQKVLEDANIKLASVVSDVMGVTGQAILRALVAGQEDPESLSHLARGSLVKKEDQLQAALQGKLTAHHRLQLEELLQLIATLDHSIARFDREVAERLRHLDALIERIDAVTGLSRRSIEVLFGELGWDMSHFPDAAHAASWVGICPGQHETGGQQKSGRTRQGNRWAKTVLIQAAHAAGHSQTYLGDQYRRIRVRRGSKKAAMAVGHSILVIFYHMVKSGEPYHEKGVDYFTSVNKEKIQRRLVRQLERLGNTVILQPQAEGALA

SEQ ID NO: 381618 - protein, 333 aa, unidentified
MVEGTKGSHHKEGTTKMGKHSMVCAGIDTGKHKLDVALDGHPEQVQVDNTSDGHKALSVWLRKHRAQRIGIEASGGYEQAVVATLRRNGFVVIVFQPAQVRAYAKFHLQRAKNDKIDAALIALCSAATKTVRAPPDPRLVPFAASLTMIEQITEDIARLKTRRESCRDQRLRRFWEEEIGRFKSLLRSELKQLIAAIRQHPDLAERLDLIASVEGIGPRTAVAILVRMPEIGSLTREQAAALAGLAPYDDDSGKRLGQRHIAGGRERLRTSLYAASLPAAFNWNPQIIALYRRLTAAGKPHKAALVACARKLLIFANTVVARGTPWVSKTATS

SEQ ID NO: 381619 - protein, 349 aa, unidentified
MKRTTIGLDIAKRVFQAHAVDPESGEVRRTKLHRSEVLRHFAQLSPALVAVEACGSAQHWARELRKLGHEVRLISPQFVRPFVKSNKTDAADAQAIWTAAQQPEMRSVAVKTEEQQAVLALHDIRTRLQKSRTAAINQLHGLMGEFGVDLPRGWRTMLPKAATALDSASSPVPALLQPQLHFQLMEIRSLTARITEVEGRISAWMRQREDCERIAAIPGVGLLTATAAVATIGEPRTFRSGREFAAFLGLVPRQTGTGGRVQPLGISKRGDRYLRTLLIHGARAVISVRKGKSASDPSIWLDRLLQRRPTNVAAVAQANKMARQIWALLAHGCIYEPKHGVLQAAGAPA

SEQ ID NO: 381620 - protein, 346 aa, unidentified
MEHYAGIDVSLELSSVCVVDAQGKIVREVKVASEPEVLVAFFASLDFAVKRIGLEAGPLSQWLHAGLKRAGFDTLLLETRHVKAALSAMMVKTDRKDARGLAQLIRMGWFRPVHAKSMGSQEVRALLVARKQLLGRLIDVELSIRGILRGFGLKVGVVTRKGFEGRIRELVSGHITLERIAGAMLSARATLKVEYEKLHKIVLTIVREDAVCRRLMTVPSVGPLVAITYKTAMDDPNRIAKSKAAGALFGLTPKKYQSGEKDVTGGITRAGDEMARTALYEAANVLLARITRFSKLKRWGMNVAKRRGSKRAKVALARKIAVILHRMWVDGTTYRWTDTQPVAVQV

SEQ ID NO: 381621 - protein, 312 aa, unidentified
MKPLTEPPLYCAIDVSKDTLDVSGAQLALPAQLDNKLSGFRQLIQAAKKYPGRVQFVFESTGAYHLGLALALWEAQLPLSILNPARVRHYAKALGKAKTDPLDKQLIGDFARSTQPEPTPAPDPTTRELSELLQRRDSLIASRAAEQTRLTQSRHKLVRTQIASSIKHLTQQLKAIDQLMAKLVADSKALNLKVRALCQVSGVALLTAVTLLITLPELGSLGRNRIARLVGLAPLNDDSGKRTGKRFIQGGRFRPRWALYMAAITASVHNPILGPFYQRLLKAGKPKKVALTALMRKLLIHLNSLLRPLVAT

SEQ ID NO: 381622 - protein, 396 aa, unidentified
MGFRHGKSYANLQDDHGNVRERADIAHTAAGLTQLQRCLVRYERPPLAIERPSGIVVDTLLDAGFTVVPIHPNVVKATRPRYRSHGAKSDASDAYLLADLLRTDGHRFTPLRPQNDDIRALRALVRGRDDLVATRVQLANQLRSLLESFWPGAAEIFADVDSPIALAFIERYPTPESAHRLGPRRLAAFCAQHAYSGRRSAQDLLARLHQAPACVCGEMEIEAKGELARSLARTLAQLVDQIRLLSSRIEHHVESLDDGRIVMSFPRAGRICAAQILAELGSVRERFDNDARLAAEAGICPVTYESGKAKAVTFRWACNQRLRAALTCLADNSRHASAWAAHVYNNARARGCDHPHAVRILARAWVRVIWRAWTDRKPYDPARHRAAQLLAKPAVG

SEQ ID NO: 381623 - protein, 369 aa, unidentified
MADYREAFVAFDVAKIKHAVAVADSGRAGEVRFLGEIENRPVTIERTIRKLAKRYDRLHVCFEAGPTGYGLYRQVGDLGHDCMVVAPALIPKRSGERIKTNRRDAVTLARLHRAGELSAVWVPDIVHEAVRDLVRARQAGAEDLRRKRQQLLSFLLRHGRICDAGGHWTLAHRRWLARQAFEHQAAQIVFQETSDAIEDAAQRLHRLDEQLAAIVETWSMKPVVEAYQAMRGASFLVAVIFAAEIGDVRRFETPPQLMAFLGLVPGERSTGDTVRRSGLTLAGNRRARRALVEAAWTYRYPARVSEPLRARLEGLPKAVRDIAWKAQVRLCARYRRLAAAGKKPPVIAAAIAREMAAFLWAIGREVAPS

SEQ ID NO: 381624 - protein, 359 aa, unidentified
MSKLSKIDTFFNTVKFTADDTLFVGVDVHKKSYHVALYLNDAPSIDFVMPANKQQLSEKLKPAMPALRQVCYETGPTGYSLARWLYKNHLPVSVAATSKIPRPSGGEDKTDKLDSKKLAEYTAKNLLKSVQIPTVKQEADRQLYRMRHRQVRNLAKVKTQIKSFLLMHDIAEPPGLGRWCKKSVEALRTQRLQKTLRLSLDELLCDLDYYSQRVKTLDKLLAEQLDKGVLGRRMALLKTHPGVGPVVSCQVATELFHYRAFSSPREVFKYLGLSPRIHQSGDRSVGGSVSKVSNSRLRSNLIQAAWRWIALDVNAKKTYLRILNNNGGIKQKAIVAMARKLAGHLWTMLIKGQPYDPTK

SEQ ID NO: 381625 - protein, 377 aa, unidentified
MHSENIAAYIGLDVHKETLAVAIAAPERLGEVRYYGTINNEAQAVRRLFQKLQGLYGNILSCYEAGPCGFGLYHQLTAMNIKCQVIAPSRIPKSPTDRIKNDHRDAISLARLLRAGELTPVWIPDLTHEAMRDLIRARAAAKRDSRVARQRILSMLLRTDKRYAGKHWTGKHRTWLANQSFSQPSQQIAFQHYCQSLEQIEDRILQLDQEISRLLPEWSLCNLVCQLQALKGVGQLIAITLVAELGDFSRFSNPKQLMAFLGLVPGEYSSGNSIRPRGITKVGNSELRRLLYEAAWSYRTPAKVGAWLIYYRPDSVTQYSKDIAWKAQQRLCSRYRALTAKGKKSQVAITAVARELTGFMWDIALAAQSSFSQQKQN

SEQ ID NO: 381626 - protein, 356 aa, unidentified
MNEGSWVGLDVHARSVVAGVIEGVSGEVRSLRVPTGNAETVAWLETLPAPVRVVYEAGPTGYGLARACAGAGISCVVAAPSRIRPAADRVKTDRRDAERLARLLRLGEITPVRVPDPEEEAARDLVRAREDARGDLMRARHRLSKLLLRHGAVYDATAWTRAHDVWLRRQRFQSGPLAIVFDECYGRMLDAKTRRDALDKAIAELAATPPYVEVVDRLVCLRGVSTLTAFALTVELGDWRRFRPESLGPFLGLTPSENSSGERRRQGGITKTGNTHARRLLIEAAWHQRRPPRMSTVLTRRRDGKPPAVQAQADRSARRLHGRWHALEARGKPRSIVVVAVARELTGHCWALATME

SEQ ID NO: 381627 - protein, 372 aa, unidentified
MKDKVRFLGLDVHAETIAVAVAEPDGEVRSLGTIANRAESIRKLVKNLGPVEQLRACYEAGPTGYILYWQLAELGVKCEVIAPTLVPIRAGDRIKTDRRDAERLARSFRSGDLTSVWVPDEGSEALRDLVRAREAAKQDQLRARHRLAKFLLRTGQRPVAGVKAWTLGYMAWVRQLRFEQVAQESTRQDYLHEVEHLAERIKRLEQAITEAVKLASPALQEVIGGLQSLRGVAQISAVTIAAELGNISGFDTARKLMGYSGAVPREDSSGKRTQRGSITKTGNAHLRRIAIEAAWSYRLRPGVGPALRKRQEGVAEEIKWKAQHRLHKRSMRLAAAGKDQRKIITAVGRELLGFIWAIGIKTETAGKLRMAA

SEQ ID NO: 381628 - protein, 359 aa, unidentified
MFYGIDLHTDSFKAAILVENKDEVTMETVSLKTEAFKKFLCKLTHEDYVAVEASTNTFWFVDQVKEYVKEVYVVDPYKFSIIANSRKKTDNIDATKLAKKLKYYICYDKSADEFPTIYIPSKEVSELRSMFVTYEILKKQACMTKNRIRSLFRQNGVFGFSKENLSYKHIQDKIKDLSVSETLSVQITILLSTLNSLENEKKNIKKAILKKGKIFYREIRILTSIRGVSPFLAIAIMSDIADINRFANAKKLCSYLRTAPRIDASGNTAHIGKVNKQSRTLTASLMTESIKHFIDSSDRLHRFYFDKRKGKSAGKVRVAIMRKIIVIIYNMLKENKMYYYVDEKNHASKLKQYESVLAA

SEQ ID NO: 381629 - protein, 387 aa, unidentified
MTVPAQVFKIIPRHYDIFGGLDVAKKNMAVTFTDHEALMRSLRLPYSSAHLLHYVRKHFPDRRVAFVYEAGPTGFGLHDELVTAGYRCLVVAPSMVPTAPGDKVKTNRLDSRKLSVQLRGGELRSIHVPAPRYRELRHLVQLRDTQVGQLRATKCRIKSLLLCEGLAFPPAPESSQWSARVLSELLELPCSPAVRFELDQLIGTLHFHFNSAAAAQKQIRYFCQNDPELRQSIRLLASLPGIGVIVATHLVARLGDWREISNVRQIAAFLGIVSSEHSTGEKENRGRITRTGDSRLRNKLIQSAWTAIRKDAELRAFYLRIYHRHPKKIAARKAIVAVARKLTTRIYAVLKEQRPYVLRPENLPAPLTAEETVGPRGRLVGPQNEQP

SEQ ID NO: 381630 - protein, 359 aa, unidentified
MTSMNQDRRRGRVVIGVDTHKYIHVALALDDFGGVLGKEKFTADTAGYGQLIDWSMTLGHLLTFAIEGTGSYGAGLTAAVRRRDIGVVEVMRTDRRDRRLRGKSDFLDAENAARAVLAGHADAVPKTADGVVEMIRTIKVAKDVAVKARTSAMISLKSILVNAPTALREQLQPLSKMALIHRCAGLRPGTITTVEAATKHTLRSIARRWEQLNDEIAAHEKVLAELTTALAPQLSAAFGIGADVASEMLIVAGDNPQRVRSEPAWARLCGVAPIPASSGLTTRHRLNRGGHRQANAALYRTVIVRMQHHEPTKAYVARRIAEGKTKAEIIRCLKRLLAREIWSLMRPLRVNPQTMKSAA

SEQ ID NO: 381631 - protein, 321 aa, unidentified
MNLKEKHYVGVDCHKDTIACYINGNFKEFKTNFKGFTKALEWVKKIEPNCAWAIEGAYSYGLTLSKFLLSSGCEVYEFNALVTAKARKALSISGEKNDLGDAKVISIFAKQVKMQKVSLKTIELKRLITTRRLLVKQRTEIILSIKNHCMKEGIILPFNSLTTKKAISWLINQDDFNLNIMANNLKIQYESIKKLEEQIQKATPEKVKKLRKITGIETLTASIFYTETKGKKMSKAEFASYCGVAPVECSSGLSTRFRNNKRGNRTLNSLLYSISIFQSRFDEEGSKYYMKKLAEGKSKRLARKCLARQVSNQIWKILFAA

SEQ ID NO: 381632 - protein, 362 aa, unidentified
MAHGIRWVGLDVHAHESTIAVFDQDTGELVTRRVVGRPHELLPWLKRIPRPARIVYEAGPTGYGLVRRARAAALEVAVCAPTRTDRRPGDRIKTDKRDAIRLARLLAAGELTLVTVPTVEHEQLRDLVRCREDIRADLMRARHRLGKFLLRREIYYEGPNVPWSRAHRNWLASIKFADRASQLTIADYLHAHDLLIARRDRIEAELEQVAADSPWTGAIARLRCLRGIDTLSALGLCAEVGEWDRFEHPDQLSAYLGIVPSENTTGERRRQGAITKAGSTHARRLLIEASYHYQRRPGITTALERRQRGHDAAVINIAWRAQRRLNARWHQLKHMRKKPNGIVAVAIARELAGFCWEIALAT

SEQ ID NO: 381633 - protein, 349 aa, unidentified
MGQVITIGVDIAKSVFQIHGVDADGTVVIRRRVGRARVLEFFADLPPCRVGMEACATAHQWARELKKLGHDTRLMPPTYVKAYVKRGKNDAADAAAICEAVTRPSMRFVPIKNVEQQSTLMLHRTRDLLIRQRTQLINALRAHLAELGLVAAKGREGLHQLVTVVTECGDERLPSNARFACQAIVTQLHAVQIEISGLDKRITQIHRTNADSKRLDTIPGFGVILSTAVVATMTDPKAFRTGREFAAWIGLVPRQNSTGGKERLGSISKQGDRYLRRLLVVGATSVINCARARPYKYPWVIELLGRRPTKLVAVALANKMARIAWAVLAKGEPYRAPTRSSNAVVPAAA

SEQ ID NO: 381634 - protein, 338 aa, unidentified
MIAVGVDAHKHEHAICALDGLGRVIGARTICANRRGYAELESWIGRLPEAVVVGIEGAGSYGAGLCEQLLAAGVDVVEVDRPRRSERRRGGKSDRSDALLAAKKVLTNDGLSTPRAGGTRQAMSALLVAYGSCIAERTRVLNALHALHTTGPAALREQLGTGSGKQLATRVMKLQQRRNSLPAAQISLELLRDYAERAADLTRRADTYKAKLDELVRSLDPELLNEPGIGPISAAKLLVSDPHRLSGEAAFARCNGTAPLPASSGQTIRHRLSRSGDRQANNAIHTIALSRSIHDPETRAYLNRRIAEGKTRREAMRSLKRHLSRSLYKRLITINLTS

SEQ ID NO: 381635 - protein, 358 aa, unidentified
MEQSKEIDFTGQNIYIGIDVHLKTWNVTIITQSGYKRKHRQQSSAKELFEHLKKHYPNGSYHAVYESGFSGFSTYHALVELGIQCMVIHAADVPTTQYENVMKSDSIDSEKLAKALRTGILKGIYIPDRNKLDDRAVVRVRKTLQRQLAGYKTRVKHLLYNNGVSIPECFDNPRTHWSKRFMRWLREDVVLLSSGRKSLDLLLDQVELFRKSLLEATRQVRALSRTDRYAEVYQNLTSVPGIGLIVGMCLLTEIDDIHRFKNARQFASYLGLIPLSHSSGQKLIHGEKTFRGNKQLGPMLVECAWVTIQHDRAMACAYGEYRKRMKPQEAIIRIARKMSSRIMTVLKSGKKYEYDRCR

SEQ ID NO: 381636 - protein, 478 aa, unidentified
MDDRRLVGIDLGITSAHTVRVLSGDGTIVCRRKAVPTLASLVEVERAALVGAMPGICLEVVVEPTGPSWLPIAVFFGARGHIVYRVSSAKAHDLRRVLSRHAKSNGIDADALARLPLVDPAGLHPLVLPDAPRAALDRRVRACDRLTQAAACHKRRIKDLVRQLMPMTPLAGELGQADLAVLERYADPHTLLAAGRARLTRVIAKASRGQQGAARANQWLGAARAALELYADHPAVAFQDLAAEVTTELRLLAATQAELDRHATQRESCYRWVDPAGLARSLPGLAEIGGPALVATMGPATRFATAAKFRSFTGLAPKASETGQTDRKGQPISKAGNRLLRTTLYRAADNARRVDPQLARIYYLQMVERGKDHLGAVCVVAARLAERAWVTLDRGMPYVICDTDGTPVTAEQAKAIIAERFTVPEEVRRRRRSKKGKAPQQVLQGHVTGAQGATRRPSPSPSSLGRRPTPVKQALPRI

SEQ ID NO: 381637 - protein, 452 aa, unidentified
MDQGNNGLSRGDRNRNARLAALRAVVPGDHAILGIDLAQSRQAAVLADHDSRVIARWRPRCSPWKLGELLERALRKARSAGFAGITVACEPTGHRWMVISQLAAKRGMPMVCVQPLVTARAREAEDYTRGKSDDRDAVLIARLVSQLHCYLPGQSGPAWARLRHLGARRSRLIESCTACVQQLRDLLEVAWPAVLQAAADPLGSSTWLAGLSVALAGGDGDLAAVHAAGREAFIAAARAALPAWGARRICARIAAAGYAALTSEAGIAAQRPGALERAAFVLGDWQVLRGELADVSDRMLQALGELGILEVAGSIPGVSALSVAAILAETGDPSRFATSRAMVKHAGLAPCENSSGNHAGQPGISRRGRPALRLAAWRAVWGALRHNPVYAARHAALTGRAKDSLTTEQARAAIAAALLRQIHAITTRRVPWDAAIAAGQRRPGQEVTANAA

SEQ ID NO: 381638 - protein, 341 aa, unidentified
MAIVTLGIDLAKNVFALHGVDQYGKAVLIKPKVARGQLLELVAQLPPCLIGLEACSGAHHWAREFRRHGHTVKLMAPKFVAPYRMSGKRGKNDAADAAAICEAVTRPNMRFVPVKDIDQQAILCLHRTRQGFVEERTALYNRLRGLIAEFGIVLPQKVERLRREIGAHLEALPGWANHCVGDLLAHADRLKERIEEYDRAISVAARQDLRSRRLMQLPGIGPTTASALIASLGGGHDFKNGRQLAAWAGLVPGQYSSGGKPRLGRITKVGDAYLRSLLVMGARAILAGLGEKQDRFSRWARSLVERRGYWKAAVAIAAKNLRLAWAVLHYGEDFRLNAETA

SEQ ID NO: 381639 - protein, 346 aa, unidentified
MKHYAGLDVSQQTTSLCIVDEEGKIVAERKVASSPDAIAEALKPFAVTRAGLETGPMSVWLWNGLKERGVPIVCMDARHANAALKMMPAKTDRNDAIGLAQIIRTGWCRSVHVKSTASHEARALLATRSQFVQIRCDLENQIRGVLRTFGILFGKRVGGFAKRAEEIINGELHASPTIQAVVEALMRARANILEQVRLLDAKVRSVARQNAVVRRLMSVPGVGVITALGFTATIDDPTRFKRSSSAGAYLGLTPRIYASGETMRSGRVSKRGDDFLRRSLYEAANALLTRVPQFSSLKSWGLRIARRNGYRKAKVAVARKLTVILHAMWISGESFRWSSQNSKELA

SEQ ID NO: 381640 - protein, 339 aa, unidentified
MKQMTVGADIAKNVMQLHYIDAETGEIVNKPVKRAVFLEHFANRAPCLIGMEACGGSQYWARKLTAMGHEVKLMPGKFVKAFVMGNKNDAVDAKAIWLAVQHAERSVAVKTETQQAVLGLHRMREQLVKFRTMQINGLRGLLTEYGEVMGKGRAALDKAIPSVLERLVDRLPAILIDTLREQWNGLAELDKQIAGIERRLQMWMREDKACKAIAAIPGVGLLTATAAVATMGDAKTFRSGREFAAWIGLVPKQTGSGGKVQLLGISKRGDTYLRKLLIHGARAVLCLTKEPGPWAEGIRKRRPLNVAIVAQANRIARTIWAILAYDRPYEKGYVSVKPV

SEQ ID NO: 381641 - protein, 382 aa, unidentified
MDVLHDRCAGLDVHKKTVVACVRRVGPDGRVDRLTRTFATMTAELLALADWLEAEGVRHVAMESTGVYWKPVWHLLEDRFELMLVNARHMRQVPGRKTDVKDAEWIAQLLQHGLLSPSFVPPPPIRELRDLTRQRTQLARDRATAVNRVQKVLESANIKLASVATDVLGVSGRAMIARLIAGESDPARLAEQARGSLRKKVAPLRLALEGRVTDHHRFQLRLLIDQIGALEELMARLEARIAAVMGPLAEAAARLTTIPGVGARAAEVIVAEVGADMGRFATAGHLASWAGMCPGNDQSGGKRRGGKTTKGSAWLRAILVQVAWAASHTKGTALAAAYRGWAKRLGRKKALVALGHKLLRIIYEMLAQRIDYVERLRPGQAA

SEQ ID NO: 381642 - protein, 402 aa, unidentified
MNAVGIDVSKGKSTVAVLRPFGEVVASPFDVAHTGSELKALVGFIKKLRGETKVVMEATGNYYEPIARYLHEQNIFVSVVNPMLISDFGGNTLRKPKTDKKDSLKIASYALSYWTDLKKYTPQEDLRKSLKLLNRQYQQASKLKTMMNNNLVSLLDMTFPGINKLFTSPSRESDGHEKWVDFALAFPHCDMISKLTVKAFSRKYKKWCNSNSYYFTEASCEKIYDFAKDCVSSIPSAESTIFAVIQAAKMLNSATENCHAIQHEMNCVAALLPEYETVMSMYGVGKAVGPQLIAEIGDPRRFHSRKVITAYFGYDSENNDSGQKISKSNAMTKKGAGSLRRTLFIIMQVLLQTKPADNPVYDFLIKKQSEGKHYYSYMNAAANKFLRIYYARVKEVLTATEA

SEQ ID NO: 381643 - protein, 352 aa, unidentified
MNQLKYIGMDVHKAMTVISVLNSEGKELAQAIIETKSTTIIDFIHGQRGTLHVTFEEGTQAAWLYDLIRPHVASVLVCDPRKIVTQGNKADKIDARRLAELLRTKGLTAVYHGEQSTRAVKELTRSYQEMMEDSTRVKNRLKALFRARGIDCSGNAVYTPDERKNWTAKLEHAAVRARAGRLWGELDALEKLCEQAEDDLKTEARKHAAIKILQGIPGIGPIRAAVILGIAGTPHRFRSKKQFWTYCGLAVTSKITSEYQLVDGRISRSKKQPLVRGLNRNCSRTLKDVFKGAAKTAAAGAWKSHFDAMVAKGQDPPLALLTIARKIASITLALWKRGERYDQKKVGILHAA

SEQ ID NO: 381644 - protein, 263 aa, unidentified
MVEQVVVGIDVSKAKLDVALLPGGEQFTVSNDRHGVGELVRRLSPLAPSRVVLEATGKLEQLAVSELAAAGLPVVVINPAQVRHYAKARGKWAKTDPIDARLIAEFARDLEPELRPLPDAETQALAALCQRRNQLLEMEQMEKSRLQRAPGANQKSIKAMLRFVRRQVEQVEKQIEHSIRHSPLWQAKRELLESMPAIGKVNSSTLLARLPELGQFTRQKICALVGVAPYNDDSGQWHGRRHIAGGRGGVRQVLYMATLSGAL

SEQ ID NO: 381645 - protein, 349 aa, unidentified
MRKLYVGIDLGCKTCAGAVRDSKGKLLETCGFPTSAENLINFVGKQEGEVRVLIEECELAGWVYRTLLPHAKSVEVSDPRHNAWIARGKRKSDPIDAAKLAELLRGGFYRAVYHPEEEEMANFKIAVQHYDQMVRTTTRLQNQIKARFRQQGIMTTGKGVYGTAGRQKAISMVKSEAIAEMLRQDFRLLDHAQKERAGASRLVTKLSGGLPVIKRLKRIPGVGTISASRFVAYVANPHRFNTKGLVSFSRLAVVKKESGGSSIGREHLSKEGNGAMKALSRTVFNGAMRARRINGIRDYYQGSLRRTKNETHARLNTQRKILAVMNAVWRDETEYSDYLVTGDGAKRPL

SEQ ID NO: 381646 - protein, 410 aa, unidentified
MDDRTLWVGVDLGNEAHQFCVLNASRKVVLQRAVEHKGIALSDAIERLVDLAEGQAERLQVALETPQSAVVEMLVERGIAVFTINPKQLERFRDRHSTAGAKDDRRDAFVLADSLSTDQHLFKRVKLGSTELVELRALSRIRDELLEETNALSNRIEAELVRFYPEILSVGSIQSDLWMVELLELVPTPERARKVRAPQLRMLLKKHRVRKISADDLLPLLRSSSVSVAPGVAESCGRHIEMLIPRLRLAREQEQKCHQDMQRTLDALSEPEPEIEGQRDAGIVQSLPGAGTIVSATLLAEAWQPLVERDYARLRVLSGVAPVTKQSGKSKTVSMRRACNPRLRQAVHHWANCSVRLDARSKMQYAALRAKGHTHGRALRAVADRLLGLLVTLLKRGERFDPARRALKAA

SEQ ID NO: 381647 - protein, 344 aa, unidentified
MNCKAISIDLAKNVFQILGVNERNTPLFNQKIQRKKFLSFMVRFSATTIYMEACYSSSYWARQLQALGHTVKLIPAQHVTPFVRGNKNDTNDTIAIFEASQRPYIRFVPIKTEYQQEISCLHRIRERLIKTKTAVCNQTRGLLSEFGVIFNTGQSEFIQGMNSFLDSDQHRHGLKVLMKAQFEEYNALRERISIIDKELTRFVCDSPSGKILMSIPGVGPIIASAILAAIDKGQAFKNPRDFAVWLGLTPQQYASGNTSKMGGITKRGDRYLRKQLIHGARSVVNNTQDKVDQLNVWVRQLRERKSYNQTAVATAHRMARLIWVLLQRQELYVPQPAICGVRHA

SEQ ID NO: 381648 - protein, 405 aa, unidentified
MPYILALDVSMGHSYSVLYKDDTCLFEDEIEHTQRGFHALLEEIQHLPERLLIVFEATGIYSRPVEKFFQDHHFSYCLLNPLEAKKQMEESTLRSWKTDKSDAHRLAQTHLKNQRQPKEVQSNFYLEMRDLARFYQEIEKKITRLRMDLHNCLQLTFPELEQFFSNRLTPYALTLIRLFPHPDFVLASTRTKIKNKLINETRKKISANRAEQKADQIIHYAQCAYPAVEKDSIHCQKTIYYAELLQDLLEQKEALATQMIKKAEGSPCFLLYQTFPGIGALTAALLLGELGDITRFKTHKQLNAFVGIDIRRYQSGKYTGQDRINKRGNPKARKIIFFTIRNMIRQQRAAPNHIVDYYYKLKKQPIPKKDKVATVACMNKLLKCMHAMVRAHTEYDYAYAVSVDH

SEQ ID NO: 381649 - protein, 353 aa, unidentified
MKYVGVDWAYRTAQWCALAPGGEIAGEGRIAADRDGLARLVFELGDEVKACLEMMSGALWVRDELVACGWQVEVADARKVKTVAPLAAKTDKVDARLLAELSRRELVPGLWLPSLDERALRERLRRRMHLVRLRTSAKGRIFGLQTQWGVRVSLARLRRADGLSLLERAGVPEVWRRSVDECLALIDFLDTRIAPLDAELRPFAQADPRAVLLDTIPGVAELLALTMAVEIGEINRFTRPEKLVSYGRLAPRVRQSGDGRARSGRLSKSGSRLLGWAAVEAAQQAWRESNPWHELYLDVGRRSRHTNAARAAVARKILIAAWHMLSRNEPFKPASRTTAGTSVPASSRLALAA

SEQ ID NO: 381650 - protein, 320 aa, unidentified
MRNAVGLDISQNTFDAAAIVNGQRKQALFDNSINGFENFKAWLDGFDCELHICMEATGNYFEDVADYIGQFYTVSVINPYKISEYGKSRFHRTKTDKQDARLIAEYCHTAMPKDLPARQKISIGHYRLKRLLALYEQLKTQKTAQKNRLKVAKDEFVRKIHQAQIQELDQHIQQAEAEIQAITNGNQDLKTVSEGLQTIPAIGKLTAAILTNYLLSGDFKTANQFTAFAGLNPQQKESGTSVKGRSSMTRYGNRRLKAALFMPAMVALNRDYFHDFVKRLKAKNKPKMLILGALMRKLLVVAYHVYKTQKPYNPERYKPA

SEQ ID NO: 381651 - protein, 419 aa, unidentified
MNQQHAGPGLFIGMDWADQKHDIHVIDREGKGCHQQLDHSAESIDAWVGEMLKLADGQPIAIMLEQSRGSLIHALMFRKDVLLYPVNPKQLARYRESYPGGGKNDPTDAMYLARMLRERITTLKAWQPDDEDTRLIANLSQQRRKIVDGQTKLRQQLTAVLKSYFPVVLELFGKKHQLPLLLSVLCRWSDPRKLRRADRRLIRRVLSEHSLHNEQQQNETIERIRAAQLLTRDAAIITPSAMAAKLLANQIQQAQKTIEELDAKIAAAMKHHPDAHLFTNLRGAGSTLAPRLLCAFGSQRDRWEDAESLTSFSGIAPVTKQSGKHRHVHRRFACPKYLRQTFHEFADSARRYCPWSKARYRLLRDRGMKHHAAVRKIARSWIRILFRVWKTRVPFDCDRYIANLKQRCPDIVPYLTQEN

SEQ ID NO: 381652 - protein, 355 aa, unidentified
MTSTKYIGLDVHKESISIAVLNSAGKVVMECVIETKASTLLQFIHGLGGDVHLTFEEGTWAGWLYDLLKPHVTELVVCNPRKNALLKEGSKSDRIDAHKLAELLYMSKLSSVYHGEHGLRMLKELSRSYLTITKDLGRVMNRLKALYRGWAIPCAGTQVYAPHYRSEWLAKIHEAGVRRRAELYYQQLDALRLVRQQARKELLAEARKHRATKLLRQIPGIGPLRAAHLVALMQTPHRFRTKRQLWTYSGLGLETHDSAQYRVVEGQLQRSKKSVTLRGLNDNHNHDLKDIFKGAAMRASTAAGPLRDFYEALLAKGRKPTMARLTLARKIAAITLIVWKKEVRFDANYLNQQAA

SEQ ID NO: 381653 - protein, 404 aa, unidentified
MNAAGIDVSKGRSTVAVVRPFGEVVRLPFDVLHTGSELGKLANFLLSLDGETRVVMEFTGRYYEPIAHALCEAGLFVSVVNPILIKEYGNNTIRRAKTDAKDALKIANYALANWLDLQRFVPEDELRRTLKVCNRQCNKYTKVKVMLKNNLISLLDQTFPGVNELFASPIRDDGHEKWVDFAEKFWHCDCITPLTQRAFSERYAKWCHKYGYHYSESKAEEIYFASAGHFDTLPMCDATKFLVTQAVVQLNTINEAIATLKNEMTVIASKLPEYNVVLAMYGVGKTLASQLIAEIGDTRRFEKKSSLVCFAGVEPPENASGAFVQKSRSMSKQGSPVLRKALFQVMVCVLRVGDPNEPVFQFLDRKRSEGKPYRVYMVAGMNKFLRIYYARVKECLDALELVST

SEQ ID NO: 381654 - protein, 391 aa, unidentified [sequence omitted]

SEQ ID NO: 381655 - protein, 348 aa, unidentified
MSTMTETRVRITGGVDTHRDVNVAAALDERGALLGTSEFATTTVGYRQLLAFLEAFGDVDRVGVEGTGTYGAGLARHLLDAGVPVIEVDRPNRQRRRRAGKSDTTDAISAARAAQSGEAATTAKARNGNVEKLRVLRVARRSISKDRVRAINQLRALIVTAPPELRDQLAELTAIGVAQAAARFRVADPTSDLGALKYAMRSLGRRAEALRAEAKELDKILRSIITDTAPDLIARPGIGVDAAGALLVAAGDNPERMRTEASFAKLCAAAPMEASSGLVTRHRLSRAGNREANSALFMIIINRMSRDEATQAYVNRRVAEGKSKLEIIRCLKRYVAREVYPLLLQIDP

SEQ ID NO: 381656 - protein, 319 aa, unidentified
MDALGIDIAKAKFVVALLTADGRLRRKSCPNTPAGFAELGVWLVRHGVTRVHACLEATGTYGDALAHWLVDAGHVVSIVNPVIIHAYARTQLTRSKTDDIDAALIARYTATQHPPGWTPAPLAVRELQALVRRLDSLHDMRAQEANRLAAGPVVAAVRRSIEAVLANLDAQIAQVQQLIRKHMDQHPGLRSQRDLLTSIPGIGEATAATLLAELFDKRYTSARQAAAFAGLVPRLHESGTLRGRPRLSKLGPGRLRKALYFPALTALRWNPSIRAVRERLHAAGKPKMVIVGAAMRKLIHIAFGVLKSGRAYDATFINA

SEQ ID NO: 381657 - protein, 366 aa, unidentified
MFTERTSVGLDVHARSVAAAAIDGVTGELFQAKLTPSHDHIRSWIRDLPGPAAAVYEAGPTGFGLSRFLNTDGIRCVVAAPSKLQRPSGDRVKTDAKDAIHLAKLLRLDEVTAVVVPSVDQEAARDLVRAREDCRGDLMRARHRLSKLLLRQGIVYYGGNAWTGKHDAWLRRIGHAGFDNAATAMTFESDYDAVLTVRARRDRLDVAIAAMAADSEFTPLVRRLGCLKGVSTLTGFALAVEIGDFHRFTGNSIGSFVGLVPSEYSSGASRVQGPITKAGNTHARRLLVEAAWHHRSRYRPGKTMRERWELASPAARVRGDAGNRRLNKRWDTFTARRKKPVIANVAVARELAGWCWSLAVLDEATS

SEQ ID NO: 381658 - protein, 312 aa, unidentified
MKQELFVGIDVSKARLDCCAWPVQKHFAAPNEVEGIEQLVAELVSLKPVLVVLEATGGLETAFATVACAAGLSVAIVNPRQVRDFAKAVGLLAKTDALDAAVIARFAAMVKPIPRPLRGEETAALASMVARRRQLVLMRAQEKNRLGSANGRQREDIKEHIGWLDERIDRLDIDLTATLRQSEAWRVKEDLLKSVPGIGPVASATFLSQMPELGTLNRAEIAALGGVAPFNRDSGKHRGRRMIWGGRAEVRSVLYMATLAAIRYNVTIRAFHAQLIARGKLPKVAIVACMRKLLTILNVMLKNNQPWNPKVA

SEQ ID NO: 381659 - protein, 415 aa, unidentified
MALKIVYKICCGIDVHKTFVVACIASTNDKGVTSYESHRFSTYTSGLKTLLQWLLDRNCKDVCMESTGKYWIPVYNILEKDCSIVLAHPKYVKAIRGKKTDKKDAKWIADLFKHDLVAGSFMPPADIRQLRDLMRYRFKLTCFKSSEKNRLQNCLTVSNIQLGNVVSDTFGKSAQAILDKILEDPADTSFDLEPLVFKSLKKKLPELRDAIDGYITPEQAGKLKVIKAHYENLEARKAELEELILALAAPYQQELAILQTAPGISSDFTAIGIISEIGTNMEAFPSAKHLCSWAGLTPTNNESAGKKKSVRVSKAGCYIKPLLVQCANAVVKSNKHPEIRNLYLRIKKRRGHKKAIIAIARMLLTALYHMLKNGENYNAELYRKSDLLPVDREITVEQALMIARNQGYKIKSATA

SEQ ID NO: 381660 - protein, 339 aa, unidentified
MRREDFECIGVDVSKDTLDVALFRGKVDWNEGHVKVSNNESGYKELKKWLRSKQAEKQRMRVCMEYTGLYAHDFRTWLEKEVITYYMVDPKRMHNFAPPLSIKGIRQTKTDKADAFRIAIYCSLFHDSMEPSRLPSPAFFKLKRLLAERKQYQKQVVLYKQQLHDISVYDTVSSRMRKQEELKNLGRCVRQTEKEIGEIIESDAAIKKNYDLLLSVVGIGLVVAVTTIVLTENFTVFANPRKYGSYIAIAPFPHESGTSVRGATRVSKQGFRQAKADLSVCVLTAIRFDPDIKEYWQRKKAEGKHTGVVFNAIKFKLVLRMFAVVKRGKPYVNTKGYKG

SEQ ID NO: 381661 - protein, 350 aa, unidentified
MLTTVLGIDLGKRWFHVVGKDAAGHVTLRRKCNRAQLIEFIAQHSSCLIGMETCCGSQHFARKFSAAGHEVKLLPAQYVKPFVKSQKNDFNDALAVAEAVVLPTMRFVPIRSEEQMDVQALHRSRERMLQQRLALTNQIRGLLLDRGVEIAQGFYALRTVLPQLLADDRSDLTPMMRDLGRLTLEMWNRTEQAIKELNARISQLAGSSDICRRLQSVPGVGPLLATAIVASVGNASTFKHARDLSAWIGIVPRQLSTGGKTRLLGISKRGNSYLRRLFIQGARAVWVWKDKHPDDSLQRWLTQVGQRRHAHVAVCALANKLARIAWAVMTSGEEFKVNYRRLGIEPSPSI

SEQ ID NO: 381662 - protein, 445 aa, unidentified
MVDGTGLSRGDRNRNGRLGGLRELLPAQNAIVGIDLAQVKQAAVVCDHDSRVLARRRVSCRAWELGTLLDWAVERAAAAGFVSVTVACEPTGHRWRVLDQLAAERGLPLVCVQPLLVWRAREAEDLTWDKSDPKDAVVIARLAAQLRCYQPERTDATWARLRHLGARRVRLTTEATAGVQQLRDLLDCVWPAVLDASGSPFRSASWQASLAVVLDRAAGDLGRVRRLGLARFTAAVRAELPRWGATRPCLRIVAAVFAALADPAGVIAQRPGALERAGLALADLRDTRRRLGEVESRMAAVLDELDLTDLVCSIDGLTAVGAAAILAETGDLARFGSPRSVVKHAGLCPRDNASGAHQGKTSISGKGRPGLRLAAWRAVWAALPNNPVLAARFRYLTTREHNRLARQQARAACAAALLRWLHVVVTRRVEWNPAIAAGKTLQPAA

SEQ ID NO: 381663 - protein, 310 aa, unidentified
MEPVFVGIDVSKDRLDVHVRPGGEVFVVSRDGSGLEELVGRLQALDPTLVAVEATGGFETIVAAAVAGEALPLAVVNPAQVRHFAQAVGKRAKTDPIDAGVIAHFAEAVRPVPRTLPDEAARLLAELVGRRRQIIDMIVAERQREKRATNVRVRKSLARHLAMLEKELDAIDQDINTLVRGSPLWRVKEDLLASVPGIGKTLARTLLAELPELGSLDRRHIASLAGLAPYTRQSGRWRGRSMIAGGRSAVRSASFMAALVASRHNPPLKDFYLRLIGAGKPKMVALIAVARKLLTILNAILRDNRPWQSA

SEQ ID NO: 381664 - protein, 344 aa, unidentified
MDHFAGLDVSVKETSICIVDDAGKIVREVKVASEPEALLAVLKNPAYHFKRIGLEAGPLSQWLFSALAEAGLPVICVETRHMQAVLKAQINKTDRNDARGIAQMMRAGLYRPVHVKTIRSQKLRMLLTHRKLLQSKAIAIENDLRGTLRNFGLKVGMVGKVKFEARISELVENLPDLAVLVEPMLIVRRTLREQIVILHRRLLAIVRDDEVCRRLMTTPGVGPVVALTYRATVDVPARFRKSKAVGAVFGLTCAKYQSGEVDRNGRISRCGDEMMRVMLYEAAQSMLRSKKWSWLKAWAMQIARRRGMKKAIVALARRLAVIMHRIWVDGTEFRWTREQATAAA

SEQ ID NO: 381665 - protein, 401 aa, unidentified
MKKFNPEQHRIETASALEIVRTAENVDVYAAYVGLDVHKETIAAAVAEPGREEPIYRGEIANKPKSVQKLLAKLSETYDGGLLLFCYEAGPCGYVLYRQILASGHDCQVVAPSRIPKAPGERIKNDRRDALKLARLLRGGDLTAVWVPDQEQERMRDLSRARDDMKGQERKARQQLNAFLLRHGYHWPRGKSRWTPAHENWLAGLKMEHPWQQVVLEEYIAAERAAGERVAQLNDHLMRALPEWSLAPVVDSLIALRGVDKLAAIVLLAELGDISRFQSPRQLMAFLGLVPSEHSTGTRRRQGGITLTGNAHARRMLVESAWSYRFPARQTKHLKGKARNASPEAKQIAWKAQTRLCGRYRTLIRVGKNTKLVCVAIARELAGFIWDIVRHEMPRRGAQAI

SEQ ID NO: 381666 - protein, 389 aa, unidentified
MPTVADRPDAPTAIQTNLAAIFVSLELSRSIWLITSLSPGSGEKMSKHSVRAGDVAALLARFSELKRKASERTGKSFPIVVIQEAGLDGFWLHRVLQSEGIESHVVDPSSIATSRRRRRAKTDRIDGEALLRALLAYKRGEPRVCAMVKAPTPEEEDRRRLCRERKVLIAERVKHVNRVKGLLFSQGASGYEPLRRDRRQRLDELTTGDGRPLPAHLKTQIRRELDRLELLLDQIKQAEAERDALLAAPQPAAPAPAGRMLLEFKGIGAELATVLWLEALFRHFDNRRQLASYAGLAPTPWQSGSVDREQGVSKAGNPRLRTTLIQLAWLWLHHQPQSALALWFKERVNRNGGRLKKTTIVALARKLLVALWKYVTAGVVIEGAVMKAA

SEQ ID NO: 381667 - protein, 364 aa, unidentified
MKIIGCDFHPSFQRIAMVDKDTGERTKRQLLHGNGEAQRFYESLTGPVLVGVESSGNMLWFERLLEKLGHKLLVGDATAIRAAAPRKQKCDPRDALNLLDLLLESRFPAIWVPTMAERDVRQLLKHRHMLVQMRTRVKNQLQHVALNQGLQKKKQLWTKVGMERLKSLSLEPWTMRRRDDLLKILEQMEAHITELDQAVKTEALRWSQAALLMTHPGVGPIVSLATVVTLGDVSRFERGKKVASYVGLIPSENSSGEHRRLGAITKQGNSFMRFLLVQAAMSAARGDAELGRAYKRLCQQKHHGVAKVAIARKLVVRLYWMLRTNTRYPEVVRMQGSSSHSVAARTVDALSGHPASRPSTGPAQ

SEQ ID NO: 381668 - protein, 338 aa, unidentified
MMIGVDLAKRVFQLHGASMAGHVQFRRRLTRGQFRSFMAEQPPAVVVMEACGSAHYWAREITALGHEVRLIAPVYVKPFLKRHKNDAADAEAIVEAAQRPGMRFVEPKGPDQQARAMLFRVRDQLVHQRTELLTALRAHLYEFGYAVPVGLAGLRRMQAIIDDPDSTLPDLVRDLGDDMLQQIAEKSACIDATSSRIKSMAEQTGPARRLQTMPGLGPITALAIEAFAPPMESFRSGRDFAAWLGLVPRQHSSGGKQRLGRVSKAGQADIRRLLIIGAMSRLTWRNRKVIPKGSWLARMLERKPRMLVAIALANKMARAIWAMMTKGEDYRDPVSAAA

SEQ ID NO: 381669 - protein, 352 aa, unidentified
MEQNNTLCCGIDIADRYSQIVLLEQDGQVSEMCRIQTTPRAVKRYFRDKPLMRVAMEASTHSPWMSQLLAEMGYEVLVGNPSKLRLIYENNRKHDLIDAELLARLARFDPQLLYPIIHKDDQSRLAWTVISSRDALVRARTELINHIRGMVKPFGQRLPSCSAERFAKLAPEVPAVLKEVLAPAFTGVATLSLQIRFCDEQIARLCQQQYRQSKLLQQVPGVGPITALMFVLTIGDPYRFSRNRSVGAYLGLVPRRSQTGQSDPELPITKAGNRYLRCLLVQCAHYIMGPFGPDSELRRFGERIAGRDGKSARKRARVAVARRLAVLLLSLWKTGQQYEPFHASPSTDSSAA

SEQ ID NO: 381670 - protein, 359 aa, unidentified
MDIRDQAKRHVVGGVDTHKDLHVAAVVDERDRVLGSQSFATTRQGYRQMLAWMGSFGEVQRIGIESTGSYGAGLLRFVQTVGIEVLEVTTPDRHDRRRRGKNDDLDAQNAAHAAFAGQRTVTPRRRDGLVESLRVLSACRKTAVAARRVALQLIQNTIVCAPDGLRDVLRSMTRMQLIRTLAAWRPDLTAYRDVETAYRITFKSLARRYLELHDEIADLDIMIGAIVDELAPDLVARNSIGHVGAAQLLLAAGDNPDRLRSEASFAALCGTSPVPASSGKTIRHRLNRGGDRHANSALHIIAIGRLRTDPKTKTYVAKRIAEGHSKLEAIRALKRYIAREVFTLIMRRHKTINQTQIAA

SEQ ID NO: 381671 - protein, 366 aa, unidentified
MKKTSTVRVNGNMIFKGHKLTIGLDLGDRWSNYCVLDEAGEVLLEQKLATTPEAMKQTFERMPRSLMALETGTHSPWLSRLLKELGHEVLVAHAQKVELITKSNRKDDRHDARTLARLARIDPELLGPVRHRSAKAQIHLTVIRARAELVSARTALVNAARGLTKSYGERLPKCGTEQVSRELAAKLSAELREVLEPLLREIESLNERIKEYDARMEKIARESYPQVALLKQVKGVGTQIALTYVLTLDDPHRFAKSREVGCFLGLKPGRRDSGESQPQMHISKEGDRYLRTMLVQGAHYILGPFGADSDLRRWGLRLAERGGKNAKKRAVVAVARKLAVLLHRLWVSGEVYEPLRNSHKAMRAVA

SEQ ID NO: 381672 - protein, 343 aa, unidentified
MEYYVGLDVSLKQTSICVVDRTGSVVREGVIDSDPEAISVYVRSKAPGAVRIGLETGPTSTWLWTELKRFGLPVICIDARHAKAVLKMQINKNDRNDAIGIARIMQTGWFKEVHVKDIDSHSVRALLASRALLVKIKRDLENHVRGLLKNLGLVIGRATFNVFAVRAEELIEDRPDLVAAVRPLLEARNAVEQQVSELDRKVMKLARRDAQVQRFMTVPGVGPITALAFKATIDDPARFARSRSVGAYVGLTSRRHASGEIDWSGRISKCGDAMLRSYLFEAAGVLLTRVPKWSTVKAWGTRLAKRNGLRKAKVAVARKLAVILHRMWIDGTEFNWSKKEIAA

SEQ ID NO: 381673 - protein, 400 aa, unidentified
MISVGIDVSKGKSTVCLLKPYGEIICKPFEVQHTEKDLEELANLLQKLDGEIKMVMEATGIYHLPILTFLLEKGFFISVINPFMMKRFARDNSLRGAKNDRLDSVMIASYGIEKWHKLKKYEVNDGIYPELRFLGRQYHRFMQTHVKHVQELTHLLDHTAPGLKAMFNSWNEHSNRDKLSDFVERFWHFDLITSLSREEFVEQYLLWAKEKKYHQSRSKAEKIYDLASNGIPTLSSRTPSTQMIIQEAINVLRIVNNSLYRILSRMKELAKSLPEYATVRSMGGVGDALAPQLIAEIGDVRRLHNGHALVALAGIDPPPYESGQFVGTHRKISKRGSPILRKIGFEVMRMLKSHKEPEDNAVYNYILKKEAEGKNKKLSKIAGLNKFLRIYYARVMEVYR

SEQ ID NO: 381674 - protein, 353 aa, unidentified
MTSTLQTSQPRLIVGVDTHQRTHHAVVIDTTGRRIAGAEFAASAAGYRQLTDWALGHGQVEAFGVESTGSYGAGLTRHLLAEGMDVVEVNRPDKTTRARQGKSDPIDAEHAARAVLAGTATARPKVSTGIVEAVRALLVARGGAVKARTAAVSQLRDLITTAPEEIREVLLPLTTQARIAKAAALRPDLTRLHEPAHAARHALRALARRIQALDKEITDAEKALKPLVASAVPTLIARTQISTLTGAQLMVTAGENLDRFRSEAAFAKLTGTAPLPASSGKTRRMRLNTGGDRQANKALHLIAVGRLRSDPRTRDYFARRSAQNLGTKEILRCLKRAIAREVFHALRTDLLRA

SEQ ID NO: 381675 - protein, 313 aa, unidentified
MECFVGIDTSQERLDVYVEPTREQFSHTNDGAGIAELVKRLKALSPTLVVIEATGKLEIPFMNGALEACLPVVVTNPQRIRDFARSVGQSAKTDTLDARIIAQFAEKVRPELKRLPDHDQQKLVELVVRRDQIVAMLAAETHRLHRVSPFMRTEIQQDVTYLMSRLNEISEQVQQLVRNHPVWKERRKLLESVPGVGPATSACILACLPELGRCSNRQIAALVGVAPFNADSGTRKGQRFIRGGRSRVRKALYMATLVALRYNPVLSAFYTRLITAGTRKKVALVACMRKLVVILNTMIRHQQPWRTQTATQT

SEQ ID NO: 381676 - protein, 428 aa, unidentified
MSYRIAGIDVHKKMLAVVVSNVEVDGQYQFERRMFGSNPEQLRSLAAWLLEQEVEEVVMESTAQYWKPVWEALERYWRPIREKREGARRKSGTLHLAQAQSNRGRRGRKRDFPDAERLVKRLVARELTLSFVPDTEQRLWRTVTRRKYQLTRDRVRLQNQLESLLEEAHIKLSSLVSNLFGVSARRMLKALAEGETNPAALACLADQNLRATPEQLSDALGACTDLKPVYRRLLKMALEQLQFLEQQIGQLDQEMATLLSQHQDAVQRLAEVPGLGVDSAQQIIAEVGPTAATFPSEKQLSSWVGVCSGDEESAGVNYSHRSPSGNRHMRRLLNQSANAAARTKGSLFEIVYRRSVTRLGHNQAIGAIAHRQCRLIWLILHKGVRYEERGPAVTKRAKQKRTARMIRQLRNLGYRIELPDPQHQTQAT

SEQ ID NO: 381677 - protein, 315 aa, unidentified
MTKLTVGIDVGKEKLDVAVHSEKKVSCWNNDVQGREELGKWLAGREVELVVVEASGGYEAAIASELVEREIAVAVVNPTRVRAFARAEGQLAKTDKIDAGVIARFGATMKPQPQARRDQAQLELNQWVTRRRQLVLMVTAEKNRLHTVSAAVQEHINQHLAWLQADIEALEQHISQSIAANPLWHETAKRLTTVPGIGPITASTLVADLPELGQLNRQKIAALVGLAPFNHDSGKHRGQRRIFGGRLSVRVGLYMATLSAIKCNPVIKNFYQRLLDNGKLKKVAITACMRKLLVILNTMINTGQDWNPPITSPSV

SEQ ID NO: 381678 - protein, 378 aa, unidentified
MKKGSRKRVSEVAGLDLGDKTSELCVLGKDAEILEESRLNTTEEGIRRRFTHVPKMRVAIEAGTHSPWVSRLLEELGHEVIVANPRKLRLVYRNKRKCDRADALYLARLARMDPKLLAPVQHRKEKGQADLALFRSREVLVQTRTRLINHVRGMVKSMGGRLPKGSARSFGSHLADAVPVRLRMALGPVLKTIDEVTERIKAYDRKIEEMANRSYPETARLRQVRGVGALTALAFVLTLEDPARFERSRTVGAYLGLVPGRDSSGESDPQRRITKEGDMYLRKTLVQSAHYLMGPFGEDCDLRRHGERIAERGGKNGKKRATVAVARKLSILLHHLWRSGEEYDPLHNASRQDRSKAVAAGAQWEAASSLMALKKAAK

SEQ ID NO: 381679 - protein, 341 aa, unidentified
MKNLFIGIDFSKEKLDVAVITAVGLSETAQRECYEFKNSVSGFRQLVKWVERNSNGIATSSWLFSGENTGDYSKPLCNFLYGKGYDIWLENAKSIKDASGIRRLKSDRADALMIAEYAMRNYDKAFMYEPLSASLSQLRELFLYRQMVIRHRCSFQVRRGEKRLAMEKSPVKTIISQSGRHIVSELNKEIEKIDKRIAELIDSEEELKEIYHIVTSVPGIGCQNAVCLIVYTDNFRRFNYDARKIACYYGIAPFGKNSGASVHTDPHVHYLANRQIKAMLTQAALAAINHNPVLSQYYLRLVERGKKKQVAMNNVKNKLIHLVTAMVRNRQVFSPEYKISA

SEQ ID NO: 381680 - protein, 374 aa, unidentified
MPVSSTGMMGWTAPDGIVCARMVGICNTRQKEPSAMKTIMIGLDIAKSVFQVHGIDEAGNVVHRRQLRRSQLEGFFSNLDPAVVGMEACGGAHHWARLFESLGHEVRLMAPGYVKPYVKRNKTDGRDAEAICEAMQRPTMRFVAVKSVEQQAVTTLHRARALLVRQRTMTANQLRSLFGEFGVVARQGIKGLRSLIAELGDTSAAPPLAVEVLIRLARQWEGLNGDIEALDKRIVAEARDNEAARRLMEIPGVGPVTASAIVATVGDASQFRSGRGFAAWLGLTPRQNNSGNKRRSGGISKQGDRHLRTLLILGSTAHLRYEPHRKTKDPWLTGLMARRPAKVVAVARAAKVARIIWALLVKGERYRAPARLAA

SEQ ID NO: 381681 - protein, 480 aa, unidentified
MAKRTHAHPDLKAVPMLLNESLYIGIDIGKGKHVAGFLSQTLLSRHDRFEACPALVFENSREGFRLLIERIRSYSPLEHVFILMERTGHYHRALEQYLQDLDIPVYVMHVQSRPAGMLKTDKRDALTLANQLYSQLELGVQVANKLQLIRRIVPPTEAAAQLKGLIRHRYELIRESTQRKNKLTAICDEVFPELTRVVKDPNALVALALREKFPTPQALATASLTTLQQIRGGARSLSDAKLLELQRLAAQSIGAKDLARQRGLVLEQTQLIKELRLLREHVEQLETEIVSIVEQAREGQILRSFPGIGPVMAATMIAAVGSIHNFPSASALKSYFGWAPVVVQSGSTLDHARLTRGGTRTMKQMLFLAVLQAIRLQDNEWAKLYERLVKTKCPYDERTQSYVGKTRVIGRVAGQMTEAIYALLKRDAEVLSKVLPGQEPPAPLLYDPEVHRKHRQGQYRPLKSTPLPNTITVLHPRSPQ

SEQ ID NO: 381682 - protein, 344 aa, unidentified
MREVITIGVDLAKNVFQIHGVDAAGGVIVRRQLRRSQVLPFFKKQPSCLVGMEACGTAHHWARQLIKLGHEVKLMPPHYVKPYVKRNKNDIADAEAICEAVTRPTMRFVSVKNMEQQAVLMLHRTRNLLVRQRTMLVNAMRAHMAEFGVVAPVGVSRVKELLAVIADTDDGRLPTLARSCLERLARQFLSLHDEIYATEKAIHAWHRCNEVSRRLETIPGIGPIVASALTASITDPEVFKNGRELAAWIGLVPRQNSTGGKQRLGRISKQGDQHLRWLLVAGAMSVIRHEKGRDVPRLPWLADKIDRKPTMVAAVALANKNARIVWALLRHGGTYQKPATVQAV

SEQ ID NO: 381683 - protein, 354 aa, unidentified
MSQTPNTAMAVIGIDIGKNSFHVVGHDARGAIVLRQKWSRGQVEARLANIPPCLIGMEACVGAHHLSRKLASLGHDARLMPAKYVRPYSKGQKNDFNDAEAIAEAVQRPTMKFVATKTVEQLDLQALHRVRERLVSQRTGIINQIRSFMLERGIAVRQGIGFLRTELPTILATRTDALSPRMLRVIEELAGDWRRLDQRIDGLSSEIETVARQDAGCERLMSVPGIGPIISSAMVAAIGTGDVFSKGRDFGAWLGLVPKQLSTGDRTILGKISRRGNRYLRVLFVQAAWVVLIKPKIWERYGLKPWIEAAKKRLHHNVLAIALANKLARIAWSVLARGRAFEVRKMDEAANQSA

SEQ ID NO: 381684 - protein, 342 aa, unidentified
MDHYAGIDVSLERSSVCVVDATGRIIRETKVASEPEALVRFFRELGLPLTRVGLEAGPLSQWLHAGLTGAGLEAVLLETRHVKAALSAMIVKTDRKDARGIAQLLRMGWYRPVHRKSPDAQEARALLAGRKLLQAKLRDVELSIRGILRGFGLKVGEVSKGRFAARIGELIAGHEMLEAVIGAMLQAREGLRAEFVRLHRRMLAIVRGDAVCRRLMTVPGVGALVALTFKTAVDDPERFRRAKAVGAHFGLTPKRYQSGETDVSGGISKVGDATVRTALYEAANAMLTRVSGISALKRWAMGVAKRRGMKRAKVALARKLAGVLHRMWANGADFRWGEEAVA

SEQ ID NO: 381685 - protein, 316 aa, unidentified
MTTTAVVVGVDVAKDRLDVAVRPSGEVWSEANDETGITTLVGRLRPLRPALIVCEATGGFERAAIAALAAAGFPVVVANPRQVRDFARATGQLAKTDQLDAAILALFAERVRPTPRPLPDAAVQLLDAVLTRRRQLLEMLVAEKNRLGFAPKPLHRGIQAHIRWLERQLDDVTKELAGLIEASPVWRAKDDLLQSVPGVGPIVSSTLLGELPELGTLSHKQIAALVGVAPLARDSGTLRGKRQVWGGRASVRTALFMAAMCGRRWNPTLKVFYERLKAAGKPTKVALIACARKLLTILNAMVRDQSRWMSNVQYSC

SEQ ID NO: 381686 - protein, 355 aa, unidentified
MTSAKYIGMDVHKESISIAVRNAAGKVVMECVIETKASMILQFFDGLRGDLHVTFEEGTWAAWLYDLLKPHVTKLVVCDPRRNALLQDSNQNDRVDARKLSDLLYMNKLNAVYHGDHGLRTLKELGRSYLTITRDQSRVMSRIKAIYRSWAIPCSGKQVYGSRHRAEWLGKIGEPGVRRRAELYYQQLDALRTLRQEVRRDLLAESKKHKVWKRLCAIPSIGPIRAAELLGILQTPHRFRTKRQLWTYCGLGVVTSSSADHEVANGQLRRKKKHVEIRGLNENCNHDLKNLFKGAAVVASIKPGPLAEFYAVLVTKGMRPEMARLTLARKIATIVLIVWKRGVCFDAHHLKPQTA

SEQ ID NO: 381687 - protein, 375 aa, unidentified
MKDVQKFVGLDVSKEMISVGVAEAGRGEPRFHGNIPNQPEAIRKLMRKLGNPEDLHVCYEAGSTGYGIVRFLLSMGIDCIVVAPTLIPRRAGDRVKTDRRDSLRLAQLLRAGELTAVWTPDEDHEALRDLIRTRHDTREDLQRARQRLNHFLLRHDIRPAQGTRNWSVKHRDWLNTLTFEKSSLRIVFQEYLHTIHEVEERMKRIEAQIHEEAMQSEHAPVIQALQTLRGVAEVTAVTLVAEIGQFSRFINPRQLMSYAGLVPKEYSSGLSRWQGSITKIGNAQIRRALVECAWAYRHRPSLKGELLKRQEGQDPEAQRIAWKAQHRLHKKYHRITSRGRGGKHAAVAVARELIGFIWAIGCAIEKKKLEEFNTA

SEQ ID NO: 381688 - protein, 368 aa, unidentified
MKEVTTYVGIDAHKKDLFIAMLIGDQPTPVTWTVPNEANAIRQLIRKMERAAPGPVRACYEAGPCGYALQRQMTTPRVGCQVIAPALVPRKPGERVKTNRRDARKLAELLRAGLLTEVRPPTPDEEAVRDLCRARDDAREDLQRCRHRFNKLLLRRGWHYSGKHWTGAHRRWLEGLAWTHPAERIVVSDYLLAIDQLKARLIELDARLTEIAASVPYRDPVGWLRCFRGIDTLTAMMILAELHDFRRFQAARALMAYVGLVPGEDSSGEKQRRGRITRTGNALVRRLLVEAAWHYQHRPGVGVALTRRRKGQPGRVIAIADKAQQRLCRRFRKLAAEHKPAPKIAVAIARELVGFLWAALQPQPVAVH

SEQ ID NO: 381689 - protein, 348 aa, unidentified
MMIIGVDFHPEFQQIASVDTDTGEFQEKRLAHREEAEKFYRALAGKKVRVGMEASGHARWFERLLAELQFELWIGDAAEIRTKRVRKQKTDRQDAQLILQLLLEDRFPQIWVPSWENRDLRQLLWHRHRMVQARTRIMNQLQAVALNEGLRCKKRLWREHGRQQLEAFRLAPWASRRRRDLLELLDRLNPTIAELTQAIEQEVEKCPEAQRLRTHPGVGALTALAFVLIIGKAERFGCGKQVASYLGLVPLEESSGNRRRLGHITKQGSSMMRFLLVEAAQVTVRSVPEWRSKYVHLMMRRGRKTAKVAMARKLAVRLYWMMRQGWDYQQWNKFGSHVGQPGNRDGVQ

SEQ ID NO: 381690 - protein, 415 aa, unidentified
MKKVSSYYAGVMCVGLDAHKVSINVAMLRPGENTPVEWQMANEPRAIRRMVGRVVREAGGAEVRFCYEAGPCGYALQREIQEAGPVVCDVIAPSLIPAKPGERIKTDRRDARKLAELYRAGLLTVVRPPTPEEEAVRDLCRCREDAKEDLGRSRHRLGKLLLRRGLIFSGKAWTQAHRQWLKTLQFEGDADRIVFEDYLLAITQLEERVKSLEQSIEAIAQREPYSNPVGRLRCFKGIDTITAMTLVAELHTIRRFQSARGLMSFVGLVPSEYSSGESKRRGGITKAGNGHVRRVLIESAWHYRHRPSVGPSLSKRREGQSARIIAIADKAQQRLHRRFLQMESRGKPRNKSVVAVARELTGFIWASLVEALQPEGFEGKGRGSSPTKSAPLQAQPRRKAVPSQGQPSTRRSRAA

SEQ ID NO: 381691 - protein, 338 aa, unidentified
MNIQTIVIDLAKDVFQVHAVDQHGHTVLKKRLNRKQLRPFFATLPSCTIGIEACSSASYWARQLESLGHELRQMSPQHVKPYVKTNKNDYNDAEAICEAVTRPNMRFVSTKSVEQQDIQAIHRIRERLIRVRTALINQTRGLLREYSVSFPLSHAAFNARISDALEKARNDLSMLTRELIADQIEQLRDLDRRICQYDQRIGRVFQNNPLCKRLAGVNGVGPMTATAIVSAVGDASTFRNGRQLAAWIGLVPRQHSSGGQPRLLGISKRGNTYLRTLLIRGARAVLRYSRDRDDPRSRWLRELIARRGFNRVCVALANKNARILWALMARGTTYQPAA

SEQ ID NO: 381692 - protein, 420 aa, unidentified
MKYVGIDIAKKFHIACVLDEDNSFITRNYRIESELTDFDLFYQLLETIDKDKNQFLIGMEATGLLFENLYLFLKRLGYNVVLLNPYQTTKFREMDTMKYVKNDNIDSQMIAALLKSGRYAKGFVSEDIYQAIKSLYRHKATLMQEMKNAKRQVSTSLAVVFPEFERIIKDPFSVSGMALLEKYPTAKHYKGASPQRILKVFRNIKGNNFNLQKAGELYDFAMTTIYQGNAKDERAYVILSNLRRIRFLKEEIEQCESQMFTLLNESEQAVSISISNEEEVYIADLVDNLRSIDGVSDKTIFAVLSECGDIARFKSGQAFIGFLGLYPTLHQSGNTTKYGRLAKRGAKLAKMAIYQAAVACVRHNDELKKVYLDKKSSGRAPKECVVVVARKLAMIIYSIYKNNTPYNPARVFNTQASLSH

SEQ ID NO: 381693 - protein, 355 aa, unidentified
MKNTKVDFSNQTLYIGLDIHKKRWTVSIYSNHLELKTFNQPPEPAKLVSYLHRNFPNAIYKAVYEAGYFGFWIYDELQSCGIDCMVINPADVPTSGKERRHKNDRVDSRKLARELRSKSLKRIHVPDPTIRAHRSLLRARSQTVRKQTRCKNQIKSILSYFGKKLDPDITYKHWSRRYITSLQEIEFQHDELRTSLGHLIDELLYHRQSILKLTRQIRQLSRTPRYAADVHLLLSVPGIGLLSAMVFLTEIININRFESLDELASYFGLIPTEDSSGENENDGSITPCGNKYLKHIIVEATWTAIRKDPFLTLKFEKLVRRMKKQRAIVVCAKNLLNRIRFVLKNRQKYVTCVAA

SEQ ID NO: 381694 - protein, 317 aa, unidentified
MNAIGIDMSKDTFQACFDEGKGKKFDNTEDGIKGFVSEILKLKFRKNDTRIGVESTGVYHLLLAIRLTDLGWSVYVINPLESHKMIMQGLRTVKTDRLDAEKIRLMTLSKHGYLFCDTKETLILKGLISERLALVEMRQQTKQRLGVNKLKTLALQSSLPSSHQDLLKTLTKNIKELERLMGKYEQSKQELLRSIPGIGQTAAAALVAFVGDVDRFETPEKLVAYIGLDCRVYQSGTSIHGKGYISKRGNTYLRHILFNSAFIARQYDKDLFSYYHKKLSEGKHYFSVMCAIERKLVHIIYAVWKRGTPYESRGKVE

SEQ ID NO: 381695 - protein, 337 aa, unidentified
MKLYCAADLHSNNHFLTIIDEHDKRVLEKRLPNDLAVTLHTLEPYRADSSGVAVESTFNWYWLVDGLMEAGYPVMLVNTAKARQYEGLKHTDDRYDAFWLAQQMRLGILPTGYIYPKEQRALRDLLRERRRLVRQRTTHVLSTQSTLWRHTAVRLPSKVILGVSKKPWPELPDANVELGVRAHRATIKVLTTHLEGIERTVLKSLQPRPEYQMLLTVPGIGPVIAWTIVLEAGDLRRFVNVGHFASYCRCVDSSRTSNERKKGENNVKNGNPYLAWAFFEAAHFAIQFLPVAKRFYERKAAQRNPILAMKALAHKLARACYYIMRDKVPFDAARLFA

SEQ ID NO: 381696 - protein, 417 aa, unidentified
MAVVMIGIDPHKGSHTAVAVDHTETALAQIRVRSGPSQLERLLAWASAFPERSWAIENATGLGYLLAQQLVAAGEAVYDVQPKLAARVRLLGTEATNKNDPHDARSVAIAAMRSTKPNQVQAEDHAAVAKLWSKRHRDLARATNKVACRLHSLLCDLVAGGVPDEITPAKAAKLLASVTVTDAVTAARLELGQELLNDLVRLGGQMKESNKRLAAVVAASQTTTTKVFGVGPVVASTVIGITGDVTRFANRAHFASFNGTAPIDVSSGGKNIYRLSLRGNRHLNHAIHMAAIVQIRFRHSPGRAYYDRKIAEKKTHKEDLRCLKHRISDALYDRMVADAQRSGRGVDGGPGGQTGNDSVSSAAGSHPEKPTLRTSHSRTRSQATTVRTPATRRSAASKRKITRPKTATSPRTARKAS

SEQ ID NO: 381697 - protein, 408 aa, unidentified
MDMIEFPQIIERGCGLDVHKETVVATIKGTDILEQTQTFGTFTSELEQLVGWLQNAGVTHVAMESTGVYWKPVYNILEEYFEIILVNARHIKNVPGHKTDKKDSEWIAKLLLSGLLKGSFVPQEPIRELRLLNRHKRKLIGLKTAEKNRLQGVLEEANIKLSSVVSDVFGKTGSAIIYALAQGITEPAYLSNLAKGSLVKKKDQLQLALYGRVTEHHRFMLNFILKSIEWIDQQIKLLDERMDSYLCHMQQETELLQTIPGVSAQIALEIIAEVGTEMHTFPTHKHLASWAGICPGNNESAGKKRSSKITHGNKFLKTTLVQAAWAASHTKGTVLSDTYLRIAQRRGRKRANIALGHKILSAAFFILRDRVAYKNPLQNSQIAEQRKIAKIKRLEKQLSNLKKHNTSD

SEQ ID NO: 381698 - protein, 386 aa, unidentified
MPQLNDLSRSLAILEQDATLIAVIEMGQSSWLVAGIVPGVERSPLKKLAVDESALLKLLNRWREEEEKAGHRIERIAIAFEAGRDGFWLARWLRARGIEAHVIHASSVAVSREHRRAKTDRLDTELLKRAFLGWLRGERDHCKMVAIPTLAQEDAKRPNRERESLVGEQSRIVNRMKAALARLGIRGFNPKLKKAVERLDGLRTPEGEPIPPNTLAELKHDMERRRLVRSQIRDIEGTRLERLKQAPGDGPHVMVRLLARVIGVGVETADMLVQEVLSRNLRDRRAVARYGGLTGSPDESGKKRREKGLARSGNARVRRGMIQLAWRFLMFQKGSALAHWFYARTKNAPQTRKTMIVALARKLLIALWRLAREGAIPEGIVLRPAL

SEQ ID NO: 381699 - protein, 324 aa, unidentified
MSKRSIICAGIDTGKRRLDVALENRAQELQVENTAEGHRQLSAWLRKHKVARVGIEASGGYELAVVSQLRRDGFVVVVFQPAQVRAYAMFHLQRAKNDKIDAGLIAACTAVTKKIYPPPDPRLAPSAEIMTFIDQINEDIARLQTRQESCRDDRIEGHWNSEIRRLRALVRVELKQVVAGIRQHDDLAKRLDLILSVDGVGLRTAVAILVRMPEIGSVTREQAAALVGLAPYDADSADYVGQRHIAGGRERLRGNLYNAALPASFRWNPQLIALYERLIAKGKPHKVALVACARKLLIYVNIVVQRGTPWTKEMPALAMARRNN

SEQ ID NO: 381700 - protein, 366 aa, unidentified
MKKVSTVRVNGNMIFKGHKLTIGLDLGDHWSCYCVLDEAGEILLEQKVATTPEAMKQVFAKIPQSLIAMETGTHSPWVSRLLTELGHKVIVAHAQKVQLITKSNRKDDRHDARTLARLARIDPELLGPVRHRSAKAQIHLTVIRARAELVRARTALVNAARGLVKSYGQRLPKCGTQQVNRELAAGLHAELREALEPLLQEVESLNERIQEYDERMEKIARESYPHVELLKQVKGVGTQIGLTYVLTLDDPHRFPKSREVGCFLGLCPGRRDSGESQPQMRISKEGDRYLRTMLVQGAHYILGPFGEDSDLRRWGLKLAARGGKSGKKRAVVAVARKLAVLLHRLWVSGEVYEPLRNSQKAMRAVA

SEQ ID NO: 381701 - protein, 392 aa, unidentified
MVVSVGIDVSKDKHDCFIISSDGEVLADVFTISNTLDGFHGLLQRIQECTAPQDKIRVGLEATGHYSYNLLGFLLDNGLATYVLNPLRTNLYRKSLSLRKTKTDRVDARTIASMLLSDAGLKPYTDTAYHNEELKSLTRYRFDKVKERAKLKSSIARLVCILFPELEKLVPSLHIASVYALLEEFPGAKQVAAAHLARLKALLETASNGHYKRDMALEIRDAAKNSIGSQMPAKSLELQHTIRLIRELNREIDEIEEQIQSIMDELHSPITTIPGLGFRMAAMILAEVGDFTRFDSPDKLLAYAGMSPSTYQSGQLKNCYPHMEKRGSRYLRYALYNATKYVCHWDSAFADYLAKKRAEGKHYNIAISHAAKKLVRLIFAMEKSRQPYCSAA

SEQ ID NO: 381702 - protein, 346 aa, unidentified
MKILALDLGNFNSVACDYETQSSRHEFETIVSSKEGLRELLLKRRPDRVVIEICPLAGWVCDVTRGLRIEIQVASTNEDAWRWRHVKRKSDRRDSLKLGHRSALGDLKLVHVPERELRQWRALINYRRQVVQRRTKIKNHLRALLVRENLGWPRGKSGWTQEAVNKLAQWALPLNQVGADDLWRGELGVELEALKATTDLLRQVEKKLDQMGKANERVQLLQSAAGVGPRLSEAIAAVIDDPARFKTGKDVGPYVGLVPKQWQSGETNRLGHITRHGSRLLRALLIEASWAGLRYNPWMREIYQRVKRGSQARRKIAIIAVARRLLIRCWAMLRDGARWRESAPAT

SEQ ID NO: 381703 - protein, 485 aa, unidentified
MAKRKMSTFERLQKGEKLRRWERRELERKFQAEEPGWEVVHKDVAGIDVGNESHFVAVDPKCCPQPVREFGSWTAGLQEMAEWLKSCGVKRVVMQTTGVYWIPVENVLQAAGFHVAVVDARGTKNLPGRKSDVQECEWIRKLDTYGLLRKSFQAPESIRGIRTVWRLRDRLVKDAGRAVQQMQKALTTMNVQLANAISDVSGKTGMAIIRQIVAGERDPWQLAKLRDKRIQAREEELAHSLEGNWREDVLFELERVLESYDFLQEQIAKCDRQVEEYMGQQPTREVVKEGAAEATVGVAAGKRRRKKTAVKPPKNHPVFDLGAELTPLLGVDLTLIDGIKLMTAQVIYSELGPDLSAFADEGHFTSWLGLAPRRDISGGKVIKQHSGHVCNRVANALRMSAQALSDSDSYLGARYRYLKARLNCGLKAAKAMARYLACLVYRMLTKGQAYVDRGAAYFEQKRQDRDLKQLQRKAAALGMQLVPTA

SEQ ID NO: 381704 - protein, 476 aa, unidentified
MQAVHWLHIPLGRFVLFKEQNARRARRAAEPPDTMTMKNPLDLPILNPHAAGIDVGSEKFFVSVGGQEPKVFLTVTEQLEELCRYFEAQGVRTVAMEATGVYWINLYGTLEAAGFEVVVVNGAHCRNFPGRKTDMKDCQWLAVLHAHGLLTSGFVPPADIRQLRDYLRLREDLVSMAAQHVQHMQKALDRLNVKLHVVISDITGVSGMKIIQAILAGQREPEQLLGLCDEQILKTKRAAVLASLHGLWRKEHLFALELALDSYQAYQKQIAKCDERIAEVIEKMRGGKTPPLELGPAKELRHNAMVIEGLQRSMAQIYGKDLTKLPCLNQSTVTMLLAEVGADMSRWKDWRHFGSWMALAPSHAQSGRHRRRVKRYLNPAGRILCRAVQCMAVGKHTWLASFYRRIRAKRGAKVAIKATAYKLAKLIYLVLTQGWEYVEQGIAKYPERMQQQQIKALQKLARKLDCVILPKQMATN

SEQ ID NO: 381705 - protein, 447 aa, unidentified
MSKNRSAHLRGDRGQAFAALVRGISPEQILCVCVDISKYFHVAMIHNSLGEIITPPFEVDIYQSGLDQLCQKIEAARLQVQAQVVLVGMEPTSHYFENLARHLLDRSQPVKLVNSFSVKQNREQQLMRREKTDQIDVAAIGDLLRRGEGTPYQPPSRIYLQLQQIDRVRLGKLKIETMLKNQILGHLDRIFPGLVLIGEAAQERYTPFFNVDFWQCRTLQALIRICPNPHQLAGMSPEQLIRLFHTQKCRMGPAMAAKIIAQAQKTLLPDPELAAIRCELLQHDLALLESVQAHIASLEQRLTSLLAQTPYQVWTKFKGISSVQAASLAAAIGDPAHYTEAAQVFRRSGLVSGRNDSGTHQRKGRGNPILKVGDVYLRRNLMNAVSTLLVHQPALYCYYKRLALSKPAGVARVATARKAIGLLWAAQRDQFSNTLIHCKAYYWKNVK

SEQ ID NO: 381706 - protein, 360 aa, unidentified
MRTITIGVDLAKQVFSVCSVDPAGRVRDRRELRREAFSQWLPNVPAGTVVAMEACSGAHHWARRCQAHGLQPRLMAAQFVAPFRKSRTAKNDRNDAEAIATAARQGNMRFVPVKTVEQQVRLSWHRVREGYKAEALATSNRLRGLLAEFGVVVAQNDAALRRTLADLEALSLPGSLTELLRDVDAQWQQLQARIANADRRIQAHAKADEACTRLRAIIGVGPITADAVVATVGSAHDFKNGRQFAAWLGLVPMQHSSGGRSRLGRISCRGDSYLRTLLIQGARSSLQRAKAVPWEKATPEQRWIQDIERRLPFGKVLVAIANKHARQLWAMLARSETYDAEAWLKHPMVQRPARRRDSKN

SEQ ID NO: 381707 - protein, 398 aa, unidentified
MSRIWAGIDSGKGHHHGLALDTDGKTLLSRRVANDEPELLKLIGDVLDLADGRPVTWAIDMTGGEPALLLTLLVNHGQEVLYIPGRLVNRAADGYRGEGKTDARDAYVIADQARMRRDLRPIRPVDEAATELKLLTGRRADLVEDRTRVVNRLRGTLLSMFPALERALEVTNTGPLRLLTGYQTPAAIRRAGVTRLTTWLANRKVRGARALAEAAAEAAERQHTAVPGEKTIAKLVHTLAEEVMALNEQIAEMDKLIEGRFREHELADIVLSVPGIGTVLGAEFLAAVGGSLEEFDSPDALAAFAGVAPAPRDSGKVSGNLHRPITYHRRLQRVFYTSALVSVRYDPNSRKFYDPKRAEGKKHVQAVLALARRRVNVIWALIRDRRCYEVTPPVTAAA

SEQ ID NO: 381708 - protein, 416 aa, unidentified
MNAVGIDVSSRKSTVAVLRPLGEVVCLPFDVTHDIAGLASLVEKLKALDGETRVVMEHTGRYYEAVAKALHEAGLFVCAVNPLLIKEYGANSLRRVKTDKADAVKIARYALDNWADLRDFTPMDAIRYDLKTLNRQFQLASKQRTASANNLIALLEQSFPGIRKCFDSPVRSDGTQKWVDFAHSFWHVDCVRKQPFAAFCERYRKWCKRHAYLFKLSNAEEVYALAKRAVVLTPKSKVVKVLVQEAANQLISISRSVEVYRAEMDRLAAMLPEYPVVMAMYGVGKSYGPQLMAEIGDVRRFERKQALVAFAGIDPMPNQSGDKNVRSNKSSKRGSPYLRKTLFNVIRTYLQCAPQDEPVFQFLNRKRAEGKPFYVYMLAAANKFLRRYYAKLRDYFASLDTLQPVDPIPTILKATL

SEQ ID NO: 381709 - protein, 341 aa, unidentified
MNSMAVGVDIAKQVFQVHYVDQESGEIVNKPIKRAKFLEHFANRARCLIGMEACGGAHHWARQLTKLGHEVRLMPAQFVKAFNIRNKNDAADARAIWLAVQQPGKPVAVKSEMQQAMLALHRMREQLVKFRTMQSNGLRGLLTEYGEVMSKGRAKLDKEIPAVLGRITERLPAALIETLREQWNGLARLDEQIAEIERRMRDWKKEERAVKAISEIPGVGLLTATAAVAVAMMGDPKAFSSGREFAAWAGLVPKQTGSGGKVNLHGISRRGDTYLRTLLIHGARSVLTHAKEPGPWVEQMKKRRPMNVVIVALANKMARTIWAVLAHDRPYQKDYLSVKPV

SEQ ID NO: 381710 - protein, 356 aa, unidentified
MTKVKTNFAAQTIYVGLDVHKRSWNAALFLNDQYLRNIHQPPSPQALYKFLQTNYPGADYVCAYEGGKFGYWIQRQLSSKGVGCIVVNPADIPSTHKDEVSKTDTRDARAIAMALQCGQLRGIYIPSRQQEADRSLVRHRKKIWRDLVRCKNRIKGFLDYTGVELPDKFSNSNWSRIFLQWLSTIKFEYGSSRTTLDYMIREAELLRKELLSISNDIRKLMRSAAYKKIYYLLRTITGIGPLTAALLITEIGEMNRFPSFYQLNSFIGLLPSEHSSGEKELKGRLTIRRHRQLRSDLVECAWTAKRTDPALSLFYSHQLKRGKEPKLIIVKIARKLLSRIRYVWLTEKPYEKGVVK

SEQ ID NO: 381711 - protein, 316 aa, unidentified
MSEPVYVGIDVAKRTFEVATTGQAQTFSLGNDEAGHAQLCQLLAPLSPRLVLLEATGGYEQDLALALSAAGLRVSVINPRQARDFARCMGKLAKTDRIDAQALRGFAALLDAQGHEPRMLADEQQRELTALVVRRRQLVAMLVAERQRLALAHPKAKPSILRIMATIAEQLNDLDGQLKEHVLAHHADLAALLTSVKGVGPTTASTLLAQLPELGHLNRKQITSLVGLAPINRDSGTLRGQRHIFGGRADVRRVLFVAALVGTRFNPVLKAFYARLLAAGKPKKVALVACMHKLLVILNAIARTKSPWRNELAEAV

SEQ ID NO: 381712 - protein, 334 aa, unidentified
MSDRDRVAGIDIHKLMLAVVVVEGSSQACRVVERAKFGSMESELRRMAAWLAERRVREIVMESTAQYWKPVWMQLEGQFQLHLAQAQSNRAPRGRKSDFRDAERLARRYLADELILSFVPDTEQRLWRTMSRTKYQLRRERVLVQNQLESLLEEMRIKLSGCVSDLLGASSRRILEALSCGEQDAEKLAAMADPGLRASRAQLTDALAQAGCLTAAHRQILGLFLERLDLIDTQIQTLDSSLAESMRQHQDAVRRLAEVPGLGPDSAQQIIAEVGPTAATFPSAPELAAWVGTSPGREESHDAPLVKSGRQRRSSYQRQFFRETLPPSRDAAGT

SEQ ID NO: 381713 - protein, 461 aa, unidentified
MMEHAMAQRNRTQGRTGFELTHPNAAGIDVGSASHFVAVPADRDDEPVREFQSFTADLHRLADWLRACRIDTVVMESTGVYWIALFELLESRGFKVSLVNARHVKNVSGRKSDVLDCQWLQQLMSFGLLNGAFRPAESVCVLRVYTRQREMLLRSQARCVQHMQKALAQMNVQLANVISDVVGETGQKILRAIVDGERDPAKLARMKNVRIRASEEQIERSLHGTWRDEHLFALKQAIAAFDFHADQIAQCDSLIESQLESLQRCDATPGKAKRRSRPRNAPKFDLRARLFRMCGVDLTRIDGIDITTALVVVSEIGTDMSRFPSDKHFASWLGLCPGTKITGGKVINGKTKRCANRAAQALRLAASALRTSQSALGAYFRRLCARMDKPKAVTAAAHKLARLIYAMLSKGEEYADKGQEYYEQRYHQRVVQNLTRRAHQLGMRLVPADQAPSNPVAQSVT

SEQ ID NO: 381714 - protein, 380 aa, unidentified
MRLKGGAMSTIYIGVDFHARQQTICYLTTENGEIQLHELKHQNKQEVRSFYAQFQGHVIIGLEASGYSPWFERLVEELGCEVWLGHATEIRRRARWRQKNDRRDAELILDLMLHDEFPRLYLPPLQSREVLRMLRYRQKLVKIRTMGKNSLQALALQSGLAKGSHLFTKAGLQELRTAVMSPVMQWQREQWLQLLEPLNQRMTETMFWLKQQSLDDQRIARLRTHPGIGLLTSLCLVHSLEPVTRFRNQRKVVAYAGLEPLERSSAEKIRFLGISKAGSRILRYLVVEAAQVAVRKDEELKRFYQRLAERRGRAKAKIATARKLLIRAYIMLRDEIDYAEFRRRAVAARLVREITKASVPEFVIGQPASAEHRVKVTTTK

SEQ ID NO: 381715 - protein, 407 aa, unidentified
MQIVGALDVHRRQITFLTLELASGESRRGRISPAAREPFRAWLEQFVGMQAEFALEGTTGWRFIVEEIERAGHLARLADPAETAGRRGRKRRAKTDDSDCALQLRLLLAGELPEAWIPPAHVLELRTRVRLRKTLIDQRTAWLQRLQAQLFHQGVTAGIKPRTLAGRQELATVDVSPAGRDVIELCSRMLDQLDREIGPIDRALGSFARRQPGCRALTEHLYGVGAVTATAILAELGDARRFRSSDDAVRHSGLDITVWQSDQKRAAGHLSHQGSCCAGPSSKPPSAPLAAALPTTPTTCRLPTGSTTTAPASRSRANSAGVRTTSCASSVTPRSPLPTLQKPSSALPPDQTVRAPAITPMPLRPAPVMLPPPARFALDGPHRPSGRRTFRGNHTRSASRRRNHPRT

SEQ ID NO: 381716 - protein, 348 aa, unidentified
MNTNELTIGLDLGDRRHHVCVLSASGEIIAEEVLPNTRECLRAYAARYPGATIIMETGTHSPWVSRLLEQQGHRVLVANARKLRAISASHTKNDAEDARMLARLGRADPALLSPIKHRSEQGQRALLRIKVREALVRSRVNQMNSVRFLLKSLGLPVPSGSKAMTFTRKLRPMLDDATRCLVEPLLTMIDTLNAKIAAMDDELEAFGRECHPMTERLRQVPGVGPLTALAFVLTIEDPARFRDTRDVGAYLGLVPRRDQSGNTDKQLPITKAGNVQLRCLLVNCAHYILGPFGPPSRLREAGERIAARGGKSAKKRAVIATARKLAVTLLALWKSGADYEALPMPRAA

SEQ ID NO: 381717 - protein, 424 aa, unidentified
MNYNRNSKIRQITEQTLIIGVDIAKHKHVARAQDYRGMDLSKAVVFENSRIGFQTFLNWVHTLMNQHEKRDVIVGMEPTGHYWLNLAYFLTSHDILCVTVNPMHVKRSKELDDNSPTKNDVKDAKVIAQLVKDGRYSIPILPEGIYAELREGVKLHDMMTQDLYAVQAQVHNWLDRYFPEFLTVFKDWTGKAALQLLKLGYLPNEIAKIPSERLLVEVKKVAKRAVGMKRMEQFKEAAKVSIGLQPGTQMAKEELRYLLEKYEYLTHRLDELEKQLSEMVQTIPGAKEMCEIKGIGEMTVVGFFAEVGNLHQYQHPRQIIKLAGLNLKKNESGKHRGKTTISKRGRKRLRALLFRVVMPLSTKNKGFKALHEYYRTRTHNPLTGKQSLVALCSKLIRILFVIGRRQISFSEEKMIQDIPHLKTL

SEQ ID NO: 381718 - protein, 300 aa, unidentified
MALTIVEDTRAVTGGVDTHADMHVAAALDPVGGLLGVGEFPATAAGYARLLGWLGGFGTVCLAGIEGTGSYGAGLARHVTAAGIRVVEVDRSDRQDRRRQGKSDPLDAVSAARAAQSGRARGEPKGRDGAVEAIRALMVAKRSARSERTQTINQARALIVTGPDDLRARFARHTAAGLVSELAALRPRPGATVGYATRIALRELGRRAEFLDGQLGRLDELIVPLVTARAPALLALHGVGPDTAALLLIAAGDHPHRLRSEAAWAHLCAVAPIPASSGKRTATASTPAATARPATPCGGS

SEQ ID NO: 381719 - protein, 407 aa, unidentified
MDLLKTVFGIDVSSRKSNVCIMVNGQKVDDYAISNDMVGFNQLLDDLKQVTKPQIIFEATGVYSRRLQAFLDMHELRYVMMNPLEAKRKTKDDLHQNKTDKLDALYLAKLQSEHPQRLAYVQSKEYQELMANNRIYEQASHDLITNRNRLHKAIQLTFPEIEHLMVNPRGKNYWSIVLRFPHPDIVLETKEADIIDFLKGLSGIGKKRANDIMQSLIRLAKVACPAVKKDSAHIRGLEMAINNILSAEEACQTALKEMTKLAPKRDLEILTSIPGIGENTALRIISELGDIRRFNNPSQLNAFVGVDPQVYESGNLTAHLSISKRGTAIGRKVLYLAINQIQSAKKAGNPSHIADYYEKRKRSSETASHKKAAIASIHKLLRTIFALIKNDQLYSYDVAKHNQRHLS

SEQ ID NO: 381720 - protein, 350 aa, unidentified
MHYIGMDCHISTLEFAVIDEAGRLVKADRVATSVSGMVEFVKKVPKPRKVFMEEGTLAAWALETCVRYGEELVITDPKQNRWIGSAGQKEDDIDALKLAQLSRGGYIKEIQQPVGQRRRFRELMLAYHDTVRSSTRVKNKIKAKFRQNGIPCAGEKVYGKTHREEWKAKLPQDPSVLLILESLWNQLDGLAQTEKELLTAAKGQARHYSEIKLFEGVPGIGFIHAATVSAIIETPHRFASKSKAWMYAGLGIVKKASGGKVYTEKLSTDYNRQLKYTLKQAVEATIKATDNPFRRKYLDMTLVRGVVPHRARLTIARDILATMLAMWRKGERYNPEIREKAKTHKQVQAC

SEQ ID NO: 381721 - protein, 415 aa, unidentified
METIFERVGALDVHKAQVTACVRVPGPEGREPVLAQFATTVRGLLALRDWLAAHRVTHVAMEATGVYWQPVWHILEEDFELTLCNARHVKQVPGRKTDVSDAQWLAQLMEAGLLRGSFVPPKPQRQLRALTRYRKTQIAERQREANRLHKALEDTNVKLDCVASDILGVSGRAMIDALVAGTTDPEILAELAKGRLRQKLPALREALEGRFEAHHAILIGAILAHLDFLDEQIDRLSDAVQEHLQLDPQKAAGALLAATITGVAARTAEVLVAEIGTDMSHFPSARHLASWAGQCPGNDQSAGKRRSGRTRKGPKWLGIALQEGALAATRAKGSYLWALYKRLRPRLGHGRALGAVKHSMITAYWHMFTTGEIYADPGGDYFDRRDPERLTRRLIARLGDLGHTVTLNTPNATAP

SEQ ID NO: 381722 - protein, 456 aa, unidentified
MSKLKKEKQGRGEEAQAWSGMQKIKKAVAGIDIGSQEIVVCIERAGAQIVRTFGSYTIDLKAISQWLIENEIKSVAMESTGVYWIALFEELESRGFECKLISSRSIRRVPGRKSDISDSQWIQTLYSYGLLESSFRPEGEIAKLRTLIRHRAELIQHRAPHILHMQKALLQMNIQISQVLSDIVGNTGQAILRAIVAGERDPYKLAKLRNYRCKKEESEIAKALTGTWRAEHLFILKQSLELYDYYTKEIQGCDAEIEKTYRQIYPDREVEEETEIPKYKSKTHSKNAPQGVQVRQHLKRISGVDLTAVHGMSDSLAQTIVSEVGTDMSKFPNEKHFCSWLGLAPKREISGGKVLKERTLKTKNRAGQAFRLAANSVMRADCYFGALYRRQKARLGPAQAVVATAHAIAKVVYRMLKYKVEYEPLSVSEYEKRYREQQVKYLHQKATKLGFQLTPT

SEQ ID NO: 381723 - protein, 361 aa, unidentified
MRFIGIDLHKRGMTVCVIDKATGETFHRTLPTSRPDDIRDFFRGLVKFQAVVEATATYEWLWELLEPLAERLVLAHPKKVKVISESMQKSDKRDAYFLAWLLSQDAVPEAHRPTPRQRAYQQLVRHRVFLVRERTKVLVKVQNYFAARNINHGRLFQTVDPRKLATKLPPAERLCVQELSELFEELEERLGRAGKELAKFREAAPPAEKKAHEIVCSVPGVGDVTADVVLSTIGPVARFRSVRKIASYSGLIPGLRASDKTRKELPITKEGPRLLRWALVEAAWRCIRSSRYWEDQFERIARRRGRKKAIVAVARRLIGVIFALLKKGESYRERGFDLRRLTHLDLCRRKVRAAEAVSGAG

SEQ ID NO: 381724 - protein, 420 aa, unidentified
MRNAGIHADSLLEVRRMYNAVGIDVSKGKSTVAVLQPGGTVIRKPFDVSHTSQNLNELADYLSSLDGTTKIVMECTGRYHEPMIKALSEAGLFISIVNPHLIKNFGNNSLRKVKSDPADARKIARYTLDNWTELRQYSGMDNTRTQLKTLNSQFSFFMKQKVAAKANLIALLDNTYPGVNKLFDSPTREDGSEKWVDYAYSFWHVDCVRRIGLKTFTERYRAFCRKHHYIFQPDKPEKLFHASKELVAVFPKEKTYKLLIQQSIQQLNLASEHVERLRREMNELASTLPEYSTVMGIYGVGKTYGPQLIAEIGDVSRFTHREALTAFAGVDPGVDESGQHKSKSNRASKVGSARLRKTLFQIMTTLLQNAPEDDPVYRFLDKKRAQGKPYYVYMTAGANKFLRIYYGKVKECLRNLEQAE

SEQ ID NO: 381725 - protein, 478 aa, unidentified
MNLKYRKAKNQVIINNPVSVLSQEALGRRIAAVEAGLKSSTWRNLETGGKFDKNAKLTFISDDMLIIGCDIGSETHYMRAIDTRGRELSKGAFPFSNTAEGFQSAKAWAVQTAAEHNKKQIVLGLEPTGHYWFCLAEWMIANGISVVQVNPYAVKQTKELEDNSQLKDDRKDPKLIANLVKDGNYGMPYLPEGVYAELRRLSMLRDQLTEDRSRNINRLHREMKICFPEYMDAFGKLDGVFTLMILKEAPLPEDILSLGTGGLREIWQEARLRGRGYSRAEQIVRYASESVGLKSGTTGSREAVKCFVEQILYLTKKLDDIGESLHQKCREIPHAEKLLEIGGIGETILSGIVAEMGDISRFDDVKEIQKLSGLGLVTCSSGKHKGETKISHRGRKRLRYWLFQAAKSAVSHAEEFKVLHEYYTTRPDNPLKKMQSLIAIACKILRIIFTILRTGQKYDPARMLRDIKHPAKGKVQAA

SEQ ID NO: 381726 - protein, 285 aa, unidentified
MAKVRTLVGLDVHAAKVVAAALDAETGELQRFRLGGDVVDAVALCAGLARPVRVAYEAGPTGYGLARELARRGVECVVAAPSKIPRAPGDRVKTDRRDAELLVRLLLAGKLHPVRVPGPEEEALRDLVRARAVRVDLMRCRHRLSKLLLRRGIRYEDGRAWTERHRAWLATIELDRPAAQATLADCCGAVDALCHRREALERQIVALLPGSPWATQVARLRCLRGIDTLTAAGLCSEIGDFERFARPGQLMSYVGLVPSESTTGAQRRLGAITKTGTQTQEPPQA

SEQ ID NO: 381727 - protein, 403 aa, unidentified
MNSVGIDISKGRSTVAVMRPFGEVVISPFEVRHTDSELSELARRLKSLTGETRVVMEATGNYHAPVAKLLHDAGLYVSVVNAKLVHSYGNNDLRRVKTDRKDAVKLANYGLDRWLTLPRYVPEENTRLLLKNCYRQYRQYSKVQTVLKNNLISLLDTVFPNANRLFSSPIRGDGSEKWVDFVAEFWHCRCVSEKSERTFTNKYQRWCKKHGYNFREAKAHTIYAEASGHIGVMPKSETTKLLVEQAASQLRATSAALAALKHEMQSLASMLPEYPVVMDMFGVGPTLGPQLIAEIGDVRRFYSKKALVAYAGLDAPPNDSGDVTGRHKSMSKVGASSLRRTLFLVMSVYLQNAPLDEPVYQFMDKKRAEGKPYRVYMMASANKFLRIYYATVKAYLESLERTA

SEQ ID NO: 381728 - protein, 395 aa, unidentified
MNKVIHYIGLDVHKESIAVSIAPAHSTEVRRYGIIGGTLAAVDKLISKLARENVELRLVYEAGPCGFVLCRHLRAKGLHCEVVAPSLIPKKASDRIKTDRRDADQLARLHRAGELTCIHVPDQEDEAVRDLIRARFSAMTDQRQARNRLKGFLLRLGFRYTGKSSWNDAHQRYLSGLVMPQAPQQIAFQEYIHAINDATDRLERLTRAVEDALAGWKWEPVVRALMSLRGVQVLTAMTLVAEVGDFSRFDDPRSLMHFFGLTPSEHSSSDKRVQGGITRCGNAHCRRVLTEAAWHYRLTPKVSAAIQIRQQAQSKEVRLIAWEAQQRLHKRFKQLSAKKKSVIAATAVARELAGFVWAIACQVKPAQQAPVPEIIRTCRGKVYRLDPNTKLQKNK

SEQ ID NO: 381729 - protein, 348 aa, unidentified
MRCYRQQHRFYCGVDLHARTMYTHVLAADGQTVFEKDLPTDPDAFLDAIAPFRPDLVVGAECMFSWYWLADLCEDHSIPFALGHALAMKHIHGAKTKTDRIDAAKLASLLRGGLFPVGYVYPRAKRQTRDLLRRRSFFVRQRAQLLAHVVNTNTQFNLPALPKKLTYAANRTPDLAERFADPSTRLAVTADLGLIDAYDGQIAGLERHLVRHAKVDDPVTFGLLRTVPGIGPILGLTLLYEVDDIARFPEPGNFLSYARLVRCPHESAGKKKGAGPKKVGNAHLKWAFSEAACLMLRSCLPVKSWMQRMEKRKGKRKALSILEAKVGRCVYHLWRKAVPFDLKRFLNG

SEQ ID NO: 381730 - protein, 428 aa, unidentified
MVDQVNGTAELNLVAIDIAKQFNVVLVQEAKGARRTFKVANNRADHDRFIDYLKSLPGTVRAAFEPTADFHRPLAYRLLMEGFEVKSVSSLALARLREARYGTWDKNDPKDAQVMLYMLAQGMVQTYYDALAAGTNDIQELANTYFQITLARTRLQHSLLMHYIPLYFPEFSRYWTCTRSAWFIRFLQRFPTAAAIRILSFEEFSREAWDLVGKKVAKRAKITEMYALAGNSIGLPVATDSPAIEMFRIQLSRYQALTEDRKQIEERAAELLADNEDFKRLQTLPGIGPIVALTILAEAGDLRRFDHHRQFLKYCGFDLAKCQSGQSRGREELSKRGNRRLRMVLWMAALVAIHRRENAFRDKYERYLSATPLDADRKRKALTAVAAKMARVVYAVIKNGADYERFFEQRLPSGSIPLTRAVEAIATS

SEQ ID NO: 381731 - protein, 316 aa, unidentified
MTSSAVYVGIDVASAELVVAVRPTAERWAVPNDEAGGAAVVRGLRPLAPTVIVLEATGGYERAVVAALAAAGLPVVVANPRQVRDFARATGQLAKTDQVDAAVLALFAERVHPEPRALADAATQALDAVLTRRRQLLDMLTAERNRLAQAVPAVRRDVQVHIRWLERRLGDLDRDLDALIQHSPVWRAKDNLLQSVPGVGPVVSRTLLGALPELGTLTHKQIAALAGVAPMARDSGLWRGRRRITGGRAAVRATLYMAALVATRHNPTIRGFYQRLLTAGKPKKVALTACMHKLLTILNAMVRANAVWRNTLAHTV

SEQ ID NO: 381732 - protein, 331 aa, unidentified
MNLAGIDVANETFDIQKRCAEKITHRTFSNSKSGHQQAVAWLQRGSRRVRVCLEATGIYHLQLALALDRAPGIELMVLNPKAARRFAEAQMVRGKTDKVDALVLLHYLECMPFKPWSAPSHHRLELQSMAHRLAQLTKEQTRERSRLHAAERAGAHTRVAQHDTRVHIRYLERRYQLLEIKAIELMKQYASMAEDLALVDTVPGFAETAAMQVLAEVGVLPDDLQPQQWVAQAGLDPKPDESGTSVYSPRHISKEGNAKLRAALFFPSMSACRCDPNVRAFYEKLLARGKTKRAAQTAVMRKLLHSIWGILKHRQPWDGDKFCRIEKPMIA

SEQ ID NO: 381733 - protein, 407 aa, unidentified
MDLQHSKCAGLDVHQHTVVACARVVAGSTVRHERRTFGTTTADLLALSDWLTAHDCTHVALESTGVYWKPIWQVLEGQFTLVLANAMHIRNIPGRKSDVNDATWIADLLAHGLIRGSFVPPAPVQELRDLTRTRKQLVREITQHTLRIQKTLETANLKLTGLLSNILGMSGRAILHALVAGETDPERLADLVHGRLKASRAALVAALHGRLTAHHRFLLQLHLTQVDALEQAVHAVEERLGHALVPCRAALDRLITMPGVSETVARVLVAEIGFDMTRFPTAGHLVSWAGLCPRLDESAGKRLSTRTRPSNPWLKTTLVQAAWAAARTKDTYLRAQFLRLKSRRGPKKAILAVASSMLTAAYHMLKHDLDYRDLGADHFDRRDKTKLANRLIHRLQELGLTVEVRAA

SEQ ID NO: 381734 - protein, 342 aa, unidentified
MTAFISFVGVDMASASFMACIGTTPWKVTVKPVKFENDEDGFVSFLDWLKVHNLKTESTVVCMEATGVYSEGLAYFLHASGYTVAVEPPLNIQRKFPVNASKTDELDCQYIAEYACRYQDKLSFWKPRAEILEQVKVLLSTRQHFSVQLTGHKNALHAVQRKKVSSELAKRSHQNMIEQIVKAIKEIDQEIRRLIDSDPTFKQTLLLLLTVPGIGLQLAAHLLILMQETLDPRVLASFIGISPIKHESGSSVFSAPTSRHFGPPMLRKLLYLAACSVRTHKKQFQQYFFRKVAEGKHKKLVLNNIQNKILKIACAVVRSQQPYLSSYVSVNPLVFQKTLTAS

SEQ ID NO: 381735 - protein, 334 aa, unidentified
MNQKYFIGIDISKGKLDCAVILADYTVVDESIIPNNVNKIKSYLKAFLKKHNTEFDQMIVCCESTGIYNGPLRQVCTDLNIDLWEEHALKIKRASTDMRGKSDRKDAMRIAEYLVRYRDKAILFKNPSAALQALDQLNKVRETLLGQKLALQNQLGESKSFDPEGFKVLSKHYKQMIAQIENQLKKIDLEIQDLLNQHEEIQQNINLMKGVPGVGKQTAMQIIIYTQNFTTFKSVKHLACYAGVVPFQNESGIVIKRARVSKMASKKLKSILHMAALAAVRTKSELKAYYIRKLAEGKNKMCVLNAVRNKILQRVWAVIERQTPFLSEENFRPI

SEQ ID NO: 381736 - protein, 310 aa, unidentified
MEVITVGIDVSKDRLDVAVRPGAQAFAVERNAAGLDRLAQRLRQLSPQIVALEATGGFETIAVAALAAAELPVVVVNPAQVRAFAKALGQRAKTDPIDAAVIAHFAEATRPQVRQLPDEATRLLADLVARRRQIIEMIGAERQREKRMTSRRLQNSIARLVKALEKELASVDDDINDAVRGSPVWREKENLLASVPGVGPVIARTLIAELPELGRLGRKQIAALAGLAPFTRQSGQWRGRSFIGGGRTAVRTALFMGAMVAKKHNPVLKAFFDRLTATGKPKMVALIAVARKLLIILNAIIRDNRPWQNA

SEQ ID NO: 381737 - protein, 346 aa, unidentified
MTIVEEKPSITGGVDTHSETHVAAALDPLGGLLGTREFPATAAGYAGLLGWLGKFGDVALVGVEGTGSYGAGLARYLANHGVRVVEVDRADRQERHRSGKSDPLDAVSAARAALSGRASGIPKGRDGAVEAVRSLMVAKRSARHERTQAINQARALILTGPDELRARFAGLRAGALAAAVASLRPRPGDAADYALRVALRELGRRVEFLEDQVARLDELIVPLVTARAPGLLGLYGVGPDTAALLLVAAGDRPERLRSEAAWAHMCAVAPIPASSGKTRRHRLNRGGNREANHALWRIVITRMSAHPETRAYVARRTAEGLSKKEIIRCLKRYVAREVYPYLRPGA

SEQ ID NO: 381738 - protein, 356 aa, unidentified
MADKPIVGIDISKEWLDLCTSQAVEVERIANTPEAVAAWLERTGPGFIAFEPTGGCERFVSAAARERRIPFLRVHPNDVVAFRQSRGIKAKTDAIDARLLLAFAGDRLARRELRTSVLGDERLRALAARRRQLVETLQAEGCRLGAAALPAVRNSIEAVMAVLRHSLDALEAELAAVIAANPQTAELARLLQTICGIGPVVATALIADLPELGLLSSKQIAALVGLAPYTRRSGKTQFRETTGHGRVGVRRALFNAARATLRHPSPFKDFFDRLVSDNRRPGKVALTAVMRKILITANAVARDRQPWRGLRHTTPPPGAVGTLCQPHGEQTGHRPGRVKAAAALRAVARSASLDAA

SEQ ID NO: 381739 - protein, 388 aa, unidentified
MLQSNDLSRSFTTLNQDNTLIVVIEMSLSSWLVAGIVPGVERQPLKKLEPDEDQLLKLMNRWRHEALQAGHAIERVVVAYEAGRDGFWLARWLRERGVEAYVMHSSSIAVSREHRRAKTDRLDTELLMRAFLGWLRGERRHCSMAAIPTIEEEDAKRPNREHEKLVGDRTRIVNRMKSTLSRFGIRGFKPTLRKADEKLGELRTAEGTLLPENTRAELRRDMTRLRIVREQLKEIEQQRLRKLEAAAPAKKGPHAMVGLIARVTGIGIETADMLVNEILSRHLRDSKAVARYAGLTGSPDESGKRRREKGLARAGNARVRRGMIQLAWRFLRFQKDSVLAQWFRARAADGRSGTRKTMIVALARKLLIALWRMTTTGEIPEGVILRVA

SEQ ID NO: 381740 - protein, 345 aa, unidentified
MLHAGLDLSRRRLDVCLIDDEGDVVGRLAAPPDADGLRHLVERVGPQGRVRGVIESMTGARFVRDTLEELGWEVLVADAQKVKGLAPLACKTDRIDAQVLAVLSHRDLVPAIWLPDPRVRAEREQARFRLHLVKHRSMLKHRIHATLISFGHPCPVTDLFGVAGRELLDRLAIPEPWRGTVEASLSLIDDLDAEIDLVNRQLRLSGAEHPYIPLLLTVPGIGWVLAFTIAGEIGDIHRFATPKKLCGYTGLCPRVNQSGDKDRRGPLTKQGPRYLRWAMLEATMHALRHPAYADRYQATKRRLGKQRGAKVAQIDIARRLTEAVWHMLTRNQPFAPAGATLRLAA

SEQ ID NO: 381741 - protein, 316 aa, unidentified
MNDKQMVYGVDVSKAMLVVGQYESEALIEIGNAPEPIAAWLASVPAGSVIAMEATGVYHRLLAHLAHAAGMVIYVLNPQTLKHYARAIGQRGKTDGCDARMITRYVVHERAKLRVWQPPAVPADTLSRLLVRRRALVNARQMLCQSLSGMPALKGPRQTLLASFKRMIGSVDLLIRAELARVPEMAALHRRLMSIVGIGAVVAAQLVAALTALHFTRADSFIAYTGLDPRPDDSGQHRGKRRLSKHGPALLRCLLYNAGMAAANSKLFKPLYTQLRARGFQSTEAIVILARKLARIAFALYKSGQTFDAQRHLKTA

SEQ ID NO: 381742 - protein, 369 aa, unidentified
MNHVTSIGLDVHARSITACAFDSITGEVVTRKFGYAPAELASWILSFEAPKAVYESGVTGFHLVRQLRSLGVDCMVGAVSKMQKPAADKRRKNDRNDATFLARQLMAHNIVEVFVPDEETEAARNLSRALEDARDDLTRAKHRLTHLLIRWGHVWNEHGDNGARRGTWTRAHWEWIRAVELPETAAQETLDYYISQVRHAEAQKKALEKRVAQYARKERWATRVAALTCLKGIGTATAFALTAEAGVFSRFGSARRFSSWLGLDPSEHSSGPKVSRGGITKAGNTHLRKVLVEAAWHYTRATKERKHDLWDTGVPSAIANHAAKGIDRLVARRAHFAERRMKPVVANVATARELSCFVWAIGCMAEGTL

SEQ ID NO: 381743 - protein, 303 aa, unidentified
MLIIGCDYHPAFQQIAFVDTDTGELQERRLQHREEAEKFYRELAVQGMKVRVGMEASGHARWFERLLAELNFELWIGDAAEIRTKRVRKQKTDRQDAQLILQLLLEDRFPQIWVPSWENRDLRQLLWHRHRLVQARTRMMNQLQAVALNEGLRCRKKLFREAGRKQLEGFRLARWASRRRHVLIIGKADRFQCGKQIASYLGLVPLEKSSGNQRRLGHITKQGSSLLRFLLVEAAQVTARSLPDWRSKYYHLSMRRGRKIAKVAMARKLAVRLYWMMRKEWDYGQLTKFGSYAGKPENRDGVK

SEQ ID NO: 381744 - protein, 408 aa, unidentified
MEILHPRCCGIDVHKESVVACVRIQDGPRARTEIRRFGTTTTELLELHRWLTEADCTHAAIESTSVYWKPVFNLLEGSVEVVLANAAHVKAVPGRKTDVKDCEWLADLLAHGLIRASFIPPAEIRALRDVTRHRKSLIRDRTTAINRVHKLLESTNIKLGNVVSDLMGKSGRAMLNALVAGERNPDVLAQLARGNLVRKIPALTEALRGRFTEHYAFLLGQLLTHTDQLADLIAACDARIAALMTADEETVQRLQTIPGVGRRSVEVIISEIGLDMSRFDSDGHLASWARICPGTHTSAGKRRATGTGTGNNWLRTTLVESAWAASHSKTYLGAQYRRIAKRRGPKRAAIAVAHSILIIAFHLLRDGLEYQDLGPDYFDRVDAVRLRRYHLRRLAELGYDVTKLGIPA

SEQ ID NO: 381745 - protein, 347 aa, unidentified
MELHAIGIDLGKTLFHLVGLDSSGNVIVRKRCSRTQLLKYTANLQVQRIGMEACSGSHFLARALREQGHDARLIPAQYVKPYVKTNKSDYIDAEAIAEAVQRPTMRFVPIKTEEQLDLQTVHRVRERWVTRRTAVVNQIRGLLLERGFTLPKGRSHVDRALPEILTDPTLRLAGSFRVLLGQLQLELEQLSARIEQMDAVIQETARENEACQRLTAIPGIGPVTATALVAAIGNGAGFRRGKDLAAWVGMVPREYSSGGKQKLLGISKRGNSYLRRLFVQGARVVMQYRTKQAPGLSCWLSQLMARTHQNVAVVALANKLLRMAWAVLCKNETYRIPALAAPCVRTQ

SEQ ID NO: 381746 - protein, 316 aa, unidentified
MAEINTTTAGIDTSKNKLDIAVHGSNASWQVANALPGWRMLAGKLAKAGVTRIGIEATGGYERGVVEHLRAAGFIVLLLQPLQVKAFGRLHLRRAKNDALDAVLIAACAAALDPREAPDPRLAKLAQQLTFLDQIEEDIARFKTRLEHIEETGLRRMVLGDIVRLKARKRAQIRHIARQIRSHHDLALRLDLVLSVPGIGERTAIALLIRMPELGRLSREEAASLAGLAPFDHDSGQYKGQRRIAGGRARLRRSLFAAALPAAFRWNEALMTLYQRLIAAGKAHTAALIACARKLLIYANTVVQRGTPWTEKPARV

SEQ ID NO: 381747 - protein, 406 aa, unidentified
MMNAVGIDVSKRKSTVTILRPDDEVILDPVDIPHTRSSIDELINLIGNLDGDTKACMECTGRYYEPMASRLSDAGIFVSAVNPLLISMFGDESLHAVKTDKADSEKIARFALARWSKLPQYGLMDETRNQLKTMNRQFGFYTDRKTAMKNNLIALLDQTYPGANSFFDSPARDDGHQKWVDFVYTYWHVDRVRGMSLNAFTKDYQKWCKRAGYNFSPTKAEEVYEASSDLIAVLPKDDMTKMLIRQAVDALNAVSAAVETLRVKMNETAATLPEYPVVMGMKGVGPSLGPQLIAEIGDVTRFEKRGSLIAFAGVDPGKDDSGDRNRKSVPTSKKGSPHLRKTLFQIMDSLIKTSPVGDPVYDFIDKKRSQGKPYYVYMTAGMNKFLRIYYGRVNEYLARLEETEES

SEQ ID NO: 381748 - protein, 391 aa, unidentified
MIYIGIDVAKDKHDCFITNSDSEVLFKAFTIFNNLDGFNDLYQKIESVMDDVTKVKVGLEATGHYSYNLLGYLIDKGLPTYVINPLHTNLYRKSLSLRQTKTDKVDARTIASMLMSDMNLKSYSDTSYHNEELKSLTRYRFDKVKERAKLKTSVSRLVCILFPELEKLVPTLHMASVYALLSEFPSAKHVATAHLTRLTNLLSKSSKGRYGKDTAITFRDSARASIGSNMPAKSLELKHTIKLIQELDSEIDEIENEIKIIMDEINSPILSIPGINYRMGAMIIAEIGDFNRFDSPDKILAYAGFSPSTYQSGQLDGAYAHMEKRGSRYLRYALYNATKYVCHWNPTFAAYLAKKRAEGKHYNVAISHAVKKLVRVIYHLEKTKQQYIKAA

SEQ ID NO: 381749 - protein, 403 aa, unidentified
MNSVGIDISKGRSTIAVMRPFGEVVISPFEVRHTDSELSKLARRLKSLNGETRVVMEATGNYHAPVAKLLHDAGLYVSVVNAKLVHGYGNNDLRRVKTDRKDAVKLANYGLDRWLTLPRYIPEEDTRLLLKNCYRQYRQYSKVQTILKNNLISLLDTVFPNVNRLFSSPARADGSEKWVDFVAEFWHCRCVSEKSEKVFTNKYQRWCRKHGYNFSEEKAHTIYVEASGHIGVMPKSETTKLLVEQAVAQLRATSAALAALKHEMQSLASMLPEYPVVMDMFGVGPTLGPQLIAEIGDVRRFYSKKALVAYAGLDAPPNDSGDVTGRHKSMSKVGASSLRRTLFLVMGVYLQKSPLDEPVYLFMDRKRAEGKPYRVYMMASANKFLRIYYATVKAYLESLELTA

SEQ ID NO: 381750 - protein, 459 aa, unidentified
MAAGKGKADGTGVPGRGGDGAEVAEDSTQVVEYAAAIDVAKGSGMVCTRVPGSRPDRRRQKVWRVEARFNEVTALMDHLRAEGIQRLVLESTSDYWRIWYYLAEAAGLEVWLVNARDVKHLPGRGKSDTADCVWLCKLNERGMLRRSFVPPQPVRDLRALTRTRARLAQDQARHQARVEKILEDALLKISVVISDLFGASGRRFLDALVAGERSPAALAALGDKRLRATRAELAEALTGRFRDIHAFEIAVHLRLIDAICAEITALDEQIGQQLALVPGTAPACAACGLAGGGHAPGCADGDVEVLGLAGRLGEITGVGAVNGRAVIAELGTDPSQFPTPGHAAGWARLTPRSQQSGETAKPGRTGKGNRYNPRRPGAGRDDRGQDRYPPRRDVPADRPQARQAESHRRGLPRHLRDRLDPHLRPLSPLHRTRPGLLPSPQRRPPDTGEDPRDRAPQPR

SEQ ID NO: 381751 - protein, 396 aa, unidentified
MKTVCGLDVHKSMILMCILKENGSKVIQEFSTLTRDVESMRGLMKEHGVEEVGMESTGVYWIPIWRILQGHFELKLINPYFIKQLPGRKTDVKDSEWIATTVQKELVRGSYVPGRRIQELRQFERRYVRLCEQSTRIEQEIDRQLHRCNIQLTNYATKIGGTSVIKVVKAIIAGEADPVQLEKHVHGRIKNKHKDKIGAALTGVISHTDRFIFGQNIREYDMILAQQEECLKEMGQYCEKYFQNELLLLCTVPGIQKLSAMIIIAELGADLKAFATAAALTGWAGLRPRNDESAKKIKSHKITKGNKYLRRILVQCAWAASRHKNCWLKTKYEQLCVRKSNRKALIAIARKLLVIIWNVLSKQEPYHDFVPKIDPKQRQKKIDYHNKRLQELTVEM

SEQ ID NO: 381752 - protein, 352 aa, unidentified
MTNSILAHRWCIGIDLHKDTMTICTYCRCCGEIAFRKIACKNRDQVAEFFRALPRPHAVAIEAVGFYRWLWELLEPLVEKLVLADATQARALAGRRMKTDREDARNIAELLADGRLPLAYAPPMEVQVLRDWTRQRNRLSRAHARALHGVKSIMNTNNRPGPVRLSAERLTGYIKAYGARLPERHVRMLWQHQRQLSLVEEEMGLCEREIAGLLASPRFAATAALLITAPGVGPVVTATVLAEVGDFHRFPDGKAIGRYAGLTPRLFASGGKERHGHICKTGPRDLRWVLQQAAWTAIRCDERIKHRWLRISRGSGRKAAAVAVGRQLLVTLWHMVHRQTPYRSPAPQEEAA

SEQ ID NO: 381753 - protein, 392 aa, unidentified
MPAALRGWLSIELLADRFLHRGVARKRREHDQPESGAPTSVSITEKGIQLVTITIGIDPHKGSHTAVAVDGNEHVLDEIRVRSCSTQTVRLREWADRFEERTWAVESAHGLGYLLAQQLVAAGEDVVDVPPVRASRVRVLGSGKSQKNDPNDARSIAIAALRADDLTTVCADDHARVLKLLSKRHRDLGRLKNKASCRLHALLLEMIPGGAGFRITTVTRINAVIDEFEPTDAMGRQRQDIARDLAGDIDRYNDLLETSKQRIQTAVAASGTSLTTISGIGPITAAMIIGQAGNIDRFKSKHHFASYNATAPVEASSGSKVRHRLNQRGNRQLNWALHFIAISQLRHDTLGRQYFDRKVAEGKTTKEAIRSLKRRISDVVYCHLAADARQQS

SEQ ID NO: 381754 - protein, 405 aa, unidentified
MFCGIDWASERHAVCVLDDAGTTISAFQVTHSADGLEQLVTRLCRLGDPAELPVAIERPDGRLVDRLLAAGHPVVPVQANTIKAWRDAEVLSGAKSDPADAAVIAEYLRLRQHRLRILQPFSPQTRALRAVVRTRGDLVDQRVAATNQLSACLEAFWPGAKHIFADVESPIALDFLARYPTPESAERLGEARMRAFLTKHGYSGRRPAAQLLHRLRAAPPGLVGTPEVEARRDAVLALVGVLRALNHAIKDLDRSVVAHLGEHPDAEIFTSLPRSGRISAAQVLAEWGDCRPAYDHPDAVAALSGIVPVTKASGKHRTVSFRWACNKRFRAAITGWADNSRHASPWAAKVYADAIARGCDHPHAIRILARAWVRVIWRCWIDRTPYDPAKHGAARRLTEMPTSAT

SEQ ID NO: 381755 - protein, 339 aa, unidentified
MLIIGCDYHPSVQQIALVDTETGECGERRLRHRAEAEQFYRELKGKQVRVGIEATGHSRWFERLLSELSFEIWIGDPAQIRAKQVRKQKNDRRDAEHLLKLMMKDDFPRIWAVTPENRDLRQLVWHRHRLVGMRTRVMNQLQAIAMNEGIRRKKGLWTEKGRQQLESLSLMPWTTRRRQELLELLDRLDPNIDELSQAIQQEAEQVPEVKLLTTHPGVGPITALAFVLVLGTAERFDNGKQVASYLGLIPCEDSSADHWRFGHISKQGNKLLRFLLGQSAQSAARCEEQWHRQYAHLTMRRNKPIAKVAMARKLAVRLFWMWRRGWDYQQLKKFGSYVG

SEQ ID NO: 381756 - protein, 343 aa, unidentified
MEVRTVGIDLGKTVFHLIGMDERGNVVAKKRLSRTQVLNYTANLPTCLIGMEACCGAHFLGRALAAQGHRVRLIPAQFVKPFVKSNKNDYVDAEAIAEAVTRPNMRFVPIKTDDQLDLQALHRTRDRLVSRRTSVINQLRAFLLERGITFRQGRKFLRTQMPEILEDADRNLSPRMRSLIDRQWQEWKTLELQIEEIGMEIEGIAEQDASCQRLLQIPGVGPLIATAMVAAIGNGSAFAKGREFAAWLGLVPRQHSTGGKARLLGISKRGNSYLRRLFIHGARAIALHGRRDNYPFGTWMDHLAAKAHRNVFVVAVANKLARIAWAVLAKGEAYRPASARMAH

SEQ ID NO: 381757 - protein, 343 aa, unidentified
MHHIAIDLGGRESQICVRTPDGEIAHEGKVATRDLARVLKRQPKSRVILETCTEAFSVADAALSLDHEVRVVPATLVRSLGVGARGIKTDVRDARALSEVSCRIDLPSVHVPTELARQRRSMCGIREELVASRTSLVNCVRGWARTQLLRIRCGHPETLPRRFRAAALARADGLPEYVERMLVVIESLNEQVELADREIQQLARRDPVCARLMSVPGVGPVTSMRFAAALDDVSRFPNAHSVEAYLGLTPGENSSSQRQHRTGITKAGPAAVRRTLVQAAWSLRRFRPADPITQWAAELERRRGKQIATVAVARKLAGVLYALWRDGTQYETNHARAKKPAAA

SEQ ID NO: 381758 - protein, 366 aa, unidentified
MIFVGMDVHVRNSYLIATDEKGQVLKKSRVSNDRDALAGFLDDLGAESMRVCLESTTNSRPIVCFLEAYGRQAGIDLTAQVLDARRLRIIAESTAKCDRVDAAAICELARSNLKLPVCYMPDDEVFALREHLRSRQDLVRVRTMLKNRVHAVLHRRGILPPEQGLFAMEGRMFLKQMPLDEAGREILDRMMRLIASLDEELMASIRSLRALSQRPRWQVEARRLQTIPGVGLITAMTILAELGDWRRFKSRAAVANYSGLVPVVRDSNDKQFRGGITHRGSNHLRSVLTEAAWVSIRRVPKYQQLYSRVRFKRNAATAIVAVARELLEDAFTLLCKQEDFRYVPTSADEPMTDTRSDREIAMSVAG

SEQ ID NO: 381759 - protein, 331 aa, unidentified
MKKKDVIGIDVSKLTIDAYLKLAQAHAVFGNDTKGFRQLVKWIRKHTDCKTEELLICFETTGLYSLQLASFLSQSNIDFVMENPIQIKRSMGLVRGKDDHVDSKRIAEYAYMRKEKLKLTQLPSEELIKMQNLLAIRERMIRQKAGYQVSLGEYKRVLVQQQQKDFFLLLNNMINALKKQIRKAEETLIEIIHSSSKLLNIYTLLTSIKGIGVILAANIMVTTICFTKFNDSRKYACYCGTAPFKYSSGTSINGRTKVSQMANKKMKALFNLAALSAIQHDPELKLYFDNRMANGANGMSTINIIRNKIIHRVFAVVKRGTPYVVMAKYAA

SEQ ID NO: 381760 - protein, 422 aa, unidentified
MNEDVYYERCAGIDVHKQFLVVCLRIGRETEIRKFSTLTQELREMVAWLKENGCQMAAMESSGSYWKPIYNIFEQEGLPVMVCNAYHIKNVPGRKTDVNDAQWIAKCLSQGMLNPSFVPDRQQRELRDMTRFRKSQIEERARNINRLQKFLEGANIKLSGWLSDIEGKSATQLLELIIGKPDFTVDEVAACMHKNMKSTADELFKSLDGYMTATQREFFAHIMTVIREQTAQIEKTDAMIKRSLDENYQAAVAALDAIPGIGKISAEQIIAETGTDMSRFKSQHSLSKWAGVCPGNNESAGKRKSGKTPPGNKTLKATLTQCAKAAKKNKNSFFSAQYNRLVSHRGKNRATMAVAHSMLIAIYFVLCGYEFKDLGAEYYIQFNREKKINSHIKQLSKLGVTLPDDLLREISLHPPEPRSRSA

SEQ ID NO: 381761 - protein, 428 aa, unidentified
MRKPKQRQTKPRQSKQRKPNDLSRSLAALDLDRTLIAVIEMGASSWLVAGLVPGVERQPLKKLAVDESALLKILHRWREEAEKAGHKIERIAVAFEAGRDGFWLARWLRARGIEAHVIHASSVAVSREHRRAKTDRLDTELLKRAFLGWLRGERDHCKMVAIPTVAEEDARRPGRERESLVGDATRIINRIKSALARLGIRTFNPTLKKAPVLLNDLRTPEGDPIPPNTLDEIKRDMERRHLICEQIRRIEQERVKRLEQAPDTGPNAMVHLLARVTGIGIETADTLVREVLTRNLRDRRAVARYGGLTGAPNQSGSFNREKGLARSGNPRVRRCMIGLAWRFVRLQKDSPLVKWFELRTANARGSRKTMIVALARKLLIALWGAGARGRGAGGYRHASGVIEPSRADTRSNAPSTDRRSDSFGLIRT

SEQ ID NO: 381762 - protein, 344 aa, unidentified
MVTFGVDAHKRTHTIVAVNDRGTPVGQTTVGTTSQDHLVLLRWAARFGAERRWAVEDCRHLSRRLERDLLAAGESIVRVPPKLMAHVRDSARTYGKSDPIDALAVARAAQREPNLPLARLDGPDREVRLLVDHRESLISERTRLICRLRWHLHELDPAWEPKARSLDAQRTLDEVRGRLQDHVGVVARLAVELTERCAELTITIKALEKEITELTTQLAPALLELPGCGALTAAKIIGETAGVDRFKSRDAYARFNGTAPLPVWSSNKARHRLSRTGNRQLNAALHRIALTQARWHAPAKEMIERRKSGGNSGREALRVLKRRLSDAVFQALLHDQTAGLTLAA

SEQ ID NO: 381763 - protein, 411 aa, unidentified
MEVIYECVCGLDVHSASVQACVRRLKGGRIEQQVRSFGTMTRDILALADWLAAEGASHVAMESTGVYWQPIYNILEGRLEVLLVNAKHVKHVPGRKTDVKDCQWLAQLLQCGLLKGSLVPDRPRRERRDLTRHRAQLVAQRGAVANRIHKTLEDANIKLGLVASDILGASGRDMLRALIAGRQTPNEMADLARLKMRTKIPELRLALQGHVTEHHRFVLAELMDQMEDLERRIERFSRRVEEISGPFAAAIQAVADIPGFDQRSAQNVLAEIGTDMSRFPTDDHLASWAGICPGSHESGGKRKSGKTTKGSRWLRAALVQSAWAATHTKNSYFRAQYRRLVGRRGKKRALVAVAHSLLVVIYHMLKTGRPYQDLGVGYFDKLDGARIVKNHVRRLESLGYKVTLTACEQAA

SEQ ID NO: 381764 - protein, 343 aa, unidentified
MNATTKTVVGVDTAKQVFQLHWVDTATGEVFSKQLKRARFLEHFVNKAPCLIGMEACGGSQHWARRLQEMGHHVKLMPGKVVKAFVTGNKNDIADARAIWLAVQQPGVHAVAVKSEAQQAMLALHRMRQQLVKFRTMQSNSLRGLLGEYGEVMPVGRAALNRGMKEALERLAERLPAVLIETLREQWEMLARLDEQVVRIEQRLLAWMRQDRSCKTIAAIPDVGLLTATAAVATLGDAKAFRSGREFAAWLGLVPAQTGTGGKVRLLGMSKRGDTYLRTLLIHGARAVLMHAKEPGKWLQEIGKRRPPNVVIVALANKMARTIWALLAHSREYDKEHVSVRPI

SEQ ID NO: 381765 - protein, 421 aa, unidentified
MTNVTPQEFAAFIGLDWADAQHDVCLQVAGSDKREGKTLAHQPEVIEAWVTDLRQRFEGQPIAMALELNKGPIVEALRQYDGLVLFHINPLMLARYRQAFTPSRAKDDPTDAELQLELLLRHRDKLKPLMPQSPEMRALAQLVEHRRRLVGDRVRITNRLTSTLKTYFPHALQWFPHKDTMLFCDFLSQWPTLKAAQLARRRTLERFFHQHHVRDEQRIHECLAAIKSAVPLTTDEGVMMPNALMAQALMTQLRVCLAAIERFDHAIAERAQRHPDYALFEALPGAGPVLAPRLLVAFGEQRERYGAAEEMQQYAGIAPVLERSGKQSWVHWRCQCPKFLRQTFVEWATGSIRFSGWARAYYEQQRDKGASHQAAVRALAFKWIRIVFRCWQTGVPYNESVYVAALQRRGSALISHLAPSS

SEQ ID NO: 381766 - protein, 312 aa, unidentified
MDKIIVGIDVSKDRLDVAVRPSGEVFVVERNAAGLEELVERLRPLGPHLVALEATGGFETVAAAALAAAGLPVVIVNPAQVRAFAKAIGQRAKTDPIDARVIAHFAEATGPEPRPLPDEATRLLADLVARRRQIIDMIGAERQREKRAPARLKKSIVRLVKALEKELTSVEGDIDDAVRGSPAWRETEDLLASVPGVGPTIARTLIAELPELGTLDRKQIAALAGLAPHTRQSGQWKGRSFIGGGRTTVRTALFMGAMVGKKYNPVLRAFFERLVAAGKPKMVALIAVARKLLTILNAILRDRQPWRQPART

SEQ ID NO: 381767 - protein, 423 aa, unidentified
MDVIYQRVAGLDVHKKMIVACVRIMDGSKVRRECRSFETTTDGLLGLLGWLMDSGCTQVAMEATGVYWKPVWNILSDGEFELIVANAAHIKNVPGRKTDMNDAVWIADLVACGLIKASFVPDEDQQEIRSLMRTRKQLGREQTSHVQRIQKTLEEANIKLDSVISDILGVNGRRMIQAMIDGVRNPQKLAELADRRLKASPKALYDALHGRLTDHHRFLLKLHLGQWDALDKAIQEIDAQVNEQISRMDEEAEAGKAPFRALIGLLSKIPGISTLSATAILSEIGRDMSRFQTAGHLVAWAGLCPGQNESAGKRKSSRLRKGAPWLKTMLVQCAWAAKRQKNSYFRAQFHRLQNRRGPQKAICAVAASLLTTIYHMLNDGTEFHDLGVEYFNRQSTETKANRLVSQLTKLGFKVDLQPLQAAA

SEQ ID NO: 381768 - protein, 337 aa, unidentified
MKSYLFIGIDISKATLDVCVLSPSDITDSHHHPFCNNAKGFSQLMKWLKQNSEGLAPEEWRVCMENTGVYSFELNFFLHEKGIWQSMENALQIKRSMGVVRGKTDKADSKIIAMYAYRFIDKLKPYVLPTSTLLRLRALFAQRERLVGMHSQLLVASQSIKGYPKELVKDIQDQNEMLLKNLTVQIKGIDKSIKECLQEDKDLQRKSKLIQSVPGIGQQTAAYLLIVSQGMKGFTSARQFACYSGCAPFAHQSGASIRGKTKVHFIANRKMKVLLHMAAMNAITFNDELKAYYQRKVAEGKNPMSVLNAVRFKLICRIYSVVKRNKEYQKEYGKIAA

SEQ ID NO: 381769 - protein, 346 aa, unidentified
MVTIGADLHKRTHTLVATDAAGQEMASRTVSATVDGHADALRWARQWPERTWALEDCRHLSRRFEVDLLRAGEAVLRVPPKLMAGTRRSARTRGKSDPIDALAVARAALREPNLPVAQLDGPVRDIRLLLDHRDDLVAERTRIQNRLRWHLHELEPGQEPPPRSLDRTHVLDAVEAQLAASTTLVARIAGELVCRCRELTVRILDLEREISGLTAVAAPTLLQLTGCGSLTAAKILGETAGIGRFRSRSAFAMHNGTAPVPVWSGNRERHRLNRGGNRQLNLALHRIAITQLRRGGRGRDYYDHRRSAGDTKTEAIRALRRRVSDEVFRRLHLDESTSAAALSRAA

SEQ ID NO: 381770 - protein, 336 aa, unidentified
MINNIFYGLDIAKMVFHVFTINKDEIVKKQLSRSQLLKYFAQQARGVVGIEACGSAHHWARELEKLGYQVKLLDAKHVKAYLKGNKNDFNDAEAIYDAVTQVNCREVGKKTIEQQDIQLIHSFRQELMKHKKALVNQIRAHLRERGIIISVGMSKFHQQLPELLENETNYLSQISIRSIRAHYEQVKQLELLIRENDLEIEQLCRANELSQRLVEIQGIGVMTATILVSDIGKSRTYNKSRDYAASLGLVPRQYSTGGKPRLLGISKRGNAYIRTLLVHGARAVLKNIKDKKDKLSCWCRALIERRGFNVAAVALANKNARIVWAMATYGTNYEKP

SEQ ID NO: 381771 - protein, 337 aa, unidentified
MTKITLIGVDTAKQVFHLVGIDNHSAFVWRRRLSRAKLLPTLARLEPCRVVLEACAASHHWARQIGGLGHTVQLIAPQHVKPYRRGQKNDYRDAEAIVCAALAPGMHGVGVKTVEQQAEQALHRVRSRLLSQRNAAANELRGLLGEYGLAFARGQRAVREGALRFIDDGQAAALGLVELIEDVLAELRGLEQRLQDYDHQVEQRVRQDAVSTRLRSELDGVGFLIASAVRVKVAEPRDFVSGRNFAAYLGLAPGHQGTGGEVRVGKLPKRRDRYVRQLLIHGARAVVSRLGDKQDAQSRWLRALVARRGFNVACVALAHRNARQAWAILARDPATMN

SEQ ID NO: 381772 - protein, 342 aa, unidentified
MKIIKQVIGIDVSKDTLAYSYGTLSINQGQLITKPITVDNNQKGFKELMSFVKKSKGTSQAPLYFVMEATGVYYENLAYFLTEKHLKVVVMLPNKTKNYSKTLDIKSKTDKLDAQMLTQFGLERQMQLWRLPSPVMKALKSLTREYHSIKTMVAQVKNQIHAKEYSYQPLKQSLKRSQQVLSVFQKQLKAIEQQIKELVEKDSDLNDRMNKIGKIEGVGFMSIVSIIAETNGFALIENTKQLVSYAGLDVVYNESGLKKHKTSISKKGNRFLRQAVYMPAISACRYNPRLKQLYIRLVTKKNIKKVAIIAVARKLLILIYTIFRKNVEYISNYNPAYAANIR

SEQ ID NO: 381773 - protein, 424 aa, unidentified
MSSDLEIAAFIGLDWADQQHVIRLRVAGSAPVEAQLLDQKPETLRSWIGQLRQRFGGRPVAIALEQSRGSLLYALMNVDFLLLYPVNPQNLAQFRKAFYPSGAKDDPQDALLLLEMLEKHRDRLRVWVPDDADTRCLRLLAENRRKLVHRRTALTNQLTSLLKESFPQALDWAGPLDSLRACDFLQHWPSLQILQKIPTSRLRKFYRDHTRLDSDAIHQRLDQIRQAQPLTSDSAVLAAAELMIPALVRQLRCLIESIQQFDQQLKDRFQQHDDYTLFHSFPGAGPALGPRLLSAFGSNRNRFECAAEVQMLSGIAPVTERSGKSHWVHWRLACPKFLRQSFHEFAAQSILFSTWARAFYDQLRSRGTSHHAAVRTLAFKWIRILFRCWKNRTPYQEQIYLASLRRHGSPLCAALSSPTTGANL

SEQ ID NO: 381774 - protein, 370 aa, unidentified
MNVTTFVGLDVHARSIKAVALDAMTGEVRSATFGYDAAAAAEWVRSVDPAAKCVYESGVTGFDLQKRLSALGVDCVIGAVSKMMKPAADRRRKNDRNDAEFLARMLSVGNVVEVWVPDDECEAARDLVRALDDAREDLKRQKQRLSKFLLRHGLVFDERTPSGQRKGNWTGAHWSWIKSISFGEKADNDALAFYVDAVRQAEEDKRRLEKLVADEASKPRWRKRVDSLRCLKGVDVMTAADIVFEAGEFSRFRNARSFAAWLGLTPSEHSSGEKVARGGITKAGNKHLRRVMVEAAWHYLAASPHSKGLASGQAPDPAARRHASKGVRRLVERRAALLERGVHKNKANVATARELACWCWAVGLMAEGAR

SEQ ID NO: 381775 - protein, 347 aa, unidentified
MEYFAGLDVSLETVNVCIVNAAGDILLEKKIAAEPAAIIHLLKSFGSPFKRIGLEVGPTSSWLYGELRAAGYGAVCLECRHVKAGLSAMRNKTDRNDARGIAQLVRLGWFRQVHVKSEEAQRTRMLLVNRQQLLTKALDIENSVRGSLKVFGLRIGVVARRGFEARVLELVAGDPIVLAVTKPMLRVRRALLEEFERLDRLCQQLARRDPVCRRLMTVPGVGVVVALTYRTGVDAPERFSKSRDVGAHFGLTPKRYSSGQTDYDGRISRCGDEMVRTALYQAANVLLHHGRWSSLRSWAMRIAKRGSVKGAKVALARRLAVVMHRMWTDGTDFRWSDTSRMTAPTAA

SEQ ID NO: 381776 - protein, 351 aa, unidentified
MAEAQFKRIRRYTWFIGVDISKNKLDFSVMHNMVLILHKEITNDVDGIKSFIIELKTLEKFSMIKSIFVMEKIGFYSNHLTTVLLKIKANIVMGGAFHIKRTLGLVRGKTDKIDSIRLAEFAFIRRESLVLWKPKRPIINELAMLCNISDRLLTSINRLAVPINEQKSFIGNKQSAFQMQCCNRSISALKADLLEVDSKLLSLIREDPELKRLFELIVSVDFVGPKTAIRLLISTNEFKDIKNPKQFACLIGIAPFPRESGTMKMKMRVSNLCDKKLKSILHICALCSLRGENGFKSYFKRKTENEGKRGFSVLNAIKNKIILRIFACVNQNRPFEKEYLNPKRKLEARNL

SEQ ID NO: 381777 - protein, 413 aa, unidentified
MSGPVLLRGPDEQTLVVAIDPGKVSHRVWLTTGERGLVAEPVSLPVSRAGVDELERLISGSSSSGPPLIGIEATGALHRSWASELERRFPGSLRLLAPSETQAARTQLGSRRFKTDDRDCAALVALMRQGLGRPAPAPALDALLAAVRHRRALVDQRRPLSQRLHDQLNALCPGLSAPAGHGRVLKLEDPSGQAVLACAAAFAGRAPSVRSLRARAPGRLSERNARFWAQRWRGLLAPPPDAELRAQRLGRDLARYRQLQDDVAFVERQVALLLVETDGRVLTTLPGVATVRAAAFAAHSLPVERFESAERLYSSTGLAPASYESATLRRRGRVSRQGLAEHRDALMAIAWGLSQFSASFRARDSELRARGMQPIQARVALARHACRLCFALLRSQQPFDEKRYGRTRHSRGR

SEQ ID NO: 381778 - protein, 349 aa, unidentified
MAIVCGLDLHRRQITFDALEVESGEEWRGRVWQPDRERFRRWLRQDMTRRAKGGPVALAVEGCTGWRYVVEEIEAAGFEGHLAEPADTQAARGRKRRAKTDRTDARLLRELLASGELPESWIPPEQVLEWRERVRLYVSLVNQRTVWCQRIHAELYQHGVAVPEGAIRTSKTRALLADDALVLSPAGRQRITVGYRMIDATDAEARPLKKDLQRFGARQPACRALVEAQYGIGGLIAVAVWSELGDCQRFSRSQQAVRHTGLDVTVDASDRRRAGGFLSRQGPETLRWALYEAAKNSSHHRSPDHAYYAKVKARHDGKIAAISVARQLARRCYHVLRDVDPDLVYAIPA

SEQ ID NO: 381779 - protein, 339 aa, unidentified
MKHTPFGVDIAKHLMQIHFVDEYTGELIDKQLRRNDFLTFFSNREPCLIGMEACGGAHYWARELRKLGHEVRLLRAQFVRAFRMGNKNDVQDARAIWLAVQQPGKSVAVKNEEQQAILSLHRMRHQLLKFRTAQINALHGLLLEFGETVHKGRASLDKAMPEVLERLRERLAPFLLNLLEEQYHRLNEIDEQIDQVEKHLIAWAKQNTDCQRIMKIPGIGVLIATAAIATMGDPSAFRSGREFSAYLGLVPKQTGTGGRIKLLGISKRGDTYLRTLFIHGARAATLLTKTPSPWVTELKKRRPACVAIVGMANKLARTVWALVAHQRDYQKDYVSVRPY

SEQ ID NO: 381780 - protein, 343 aa, unidentified
MEHYAGIDVSLEQSSVCIVDGTGKIVAEAKVTSEPEALIGWLRAQPFTLSRIGLEAGPLSQWLFARLEVDGLPAELLETRHVRTAFKTMPVKTDKKDARGIAQLMRLGWFKPVHCKSLAAQETRALLTARKLLQTKRHDVEMSVRGVLRGFGLKVGPTTPRTFEARVRELVDGHPTLVMVADALLAARAELQRQFKDLEKRIVAIGRADERVRRLMTVPGVGNLVALTFTTAIDDPARFRSSRQVGAYFGLTPSRYQSGETDVAGRISKIGDHGVRTALYEAANVMLTRPVKGSSLKDWALAVAGRAGPRKAKVALARKLAVILHRMLVDGTTFVPRPTTTAA

SEQ ID NO: 381781 - protein, 442 aa, unidentified
MALSDSSEPAPAPVFAAFIGLDWGDKKHAWSLQEQGSTLIQRGELENTPEAIELWAIAMAQRFDGRLIAVALEQARGAVLNVLGKYAHFYLYPVHPTTSANYRKSFSPSGAKSDPCDADILLDLLLKHREQLRPLRPDTEETRSLQILVEERRKQVDLQTAQAHRLTMHLKQSFPQIVQWFDDIKAPLVANLLERWPTLEQLQKARPETLRKFFHQNNCRNQERIEERLVQIREAVPATHDQAVLSTGILIVHGLFQILAALREVIVCLDVRIATIVKSHPDFFIVDSLPGAGPVMAPRLIAVLGTDRDRWNSAGELQCGTGIAPVIESSGKQYWVHWRWACPKFVRQTIHEWAQHSMKSCAWARQYYDLQRSREKSHHAAIRSLGFKWLRILFRCWKNREPYNEARYEASLGNHTAKAEEKTKKTTLELQWKNCGGFSKLV

SEQ ID NO: 381782 - protein, 400 aa, unidentified
MDRVEQGWVGIDAGKRHHHVVLIDANGRPLLSRRVVNDEPELAALIDVIRDRVTDPTWAIDLADGAGALMIALLLHRGQPVFYLPGIAVNRASAGYRGEGKTDAKDAAIIADQARMRRDLRQLHLLDDDIVRLRLLTAYRADLAADRTRSINRLRGLLVGIFPALERVLDFTNQGPLILIGGFQSPTAIRRLGQTRLARWLEKRRVRGAARLAAAAAEAAGRQTVEISGEAAAASVIARLAQTILELDRQLADIDRETAAIFHTQQDAAIITSLTGIGDVLGAELLAAIGGSLAGFISADHLAGYAGLAPMPRDSGYRTGNLHRPQRYNRQLQRVFYTSAMISIQHSPASKAYYDGKRAQGKRHTQAVIALARRRVNVLWAMLRDHQPYRERLQTPALAA

SEQ ID NO: 381783 - protein, 398 aa, unidentified
MSERRARVRAGIDAGKGHHWAAAVDETGATLWSKKVDNDESAILTAMGEILDLADKVHWAVDISGTSSALLLALLAAHGQQAVYVPGRTVNRMSGAYRGEAKTDARDAYVIAETARTRRDFAAIDVPAQLAADLALLTAHRSDLVADRVRMINRLRDTLTGVFPALERAFDYSSQKGALVLLTGYQTPEALRRRGRARLTAWLANRGVRGADAVAATALEAAQAQQTALPGEDVAAQIVADLAEQILALDDRLKRIDQQIRETFRSHPQAEIIESLPGMGPILGAEFVVAAGDLTADAGHLASAAGLVPVPRDSGRRTGNLHRPRRYSRRLRRVFYMSAQTSMMREGPNRDFYLKKRGEGCKHVQAVIALARRRASVLWALLRDNRVFTPELPVAQAA

SEQ ID NO: 381784 - protein, 315 aa, unidentified
MVEQVVVGIDVSKAKLDVALLPGGEQFTVSNDRHGIGELLRRVSPLAPTRVVLEATGKLEQLAVSELAAAGLPVVVINPAQVRHYAKARGKWAKTDPIDARLIAEFARDLEPELRPLPDAETQALAALCQRRNQLLEMEQMEKSRLQRAPRANQKSIKAMLRFVRRQVEQVEKQIEHSIRHSPLWQAKRELLESMPAIGKVNSSTLLARLPELGQFTRQKICALVGVAPYNDDSGQWHGRRHIAGGRAGVRQVLYMATLSAVRCNPALRDYYQRLLGRGVEPKAALIAVLRKMLTILNAMVRDNTPWRPPCPTPA

SEQ ID NO: 381785 - protein, 391 aa, unidentified
MIYAGIDVSKDKHDCFITNSEGEVLFKAFTIQNKRDGFDELYQKITSVTDDLTNIKVGLEATGHYGYNILGYLLDQGLSTFVINPLHTNLYRKSLSLRKTKTDKVDAHTIATMLMSDVNLKSYSDISYHNEELKSLTRYRFDKVKERAKLKSSVSRLVTILFPELEQLVPAIHMASIYALLSEFPSASAIAHSHLTRLTHLLSTASKGHYGKDTAILFREAARTSIGSHMPAKSLELKHTIKLIQEITSEIDEIEADIKSIMDSIHSPILTIPGISYRMGAMIIAEIGDFSRFDSPDKILAYAGMSPSTYQSGQLESSYSHMEKRGSRYLRYALYNATKYVCHWDTTFATYLEKKRTEGKHYNVALSHATKKLVRVIFQLEKSGQDYIKSA

SEQ ID NO: 381786 - protein, 379 aa, unidentified
MATTKQALLNDTSVTLMLYMALELSGGKWKVAVADGKRAASQHALVAGDVGGLLLLIDKAKKRCGVQGKVRVMSCYEAGRDGFWLHRWLLEQGIDNVVVDSSSIEVNRRKRRAKNDALDAAKLYEMLVRYVAGEKRVWRVVRVPSVQQEDERRLHRELERLKRERNAHVNRIRSLAVLHNVRLQRVGGRDWSERLEQLKGQLPAGMLAEIERQSARAKLVGEQIAQLEKSRQEQLQTMIEQQQDGPLLALLKLRAIGVQTAWVLVRELFSWRRFSNRRELAGCVGLNPSPYDSGASQREQGISKAGNRRVRALLVEIAWYWLRYQPHSALSAWFNRRFGGAGKRMRRVGIVALARRLLIALWRYVEQGVIPEGAQLKRP

SEQ ID NO: 381787 - protein, 343 aa, unidentified
MEIKRVGVDLAKNAFQLHGADRKGKTVWTRKLFRGKWLRVLYETVKPGTEIGMEACAGAHHWARLLTHRGYAVKIIPPQFVTPFVKTNKNDANDAQAICEAMGRPNMYPVRVKTVEQQDIQAMHRIGEEIKGHRIAKANQIRGLVSVYGLVAPQQLSSLRRAIPDWLEDADNGLTLLFGQLLQGLWGDLYVLDQRMDELDQQIAVIAEENPVAKRLQQLRGVGPLIATDLVVTIGDARQYRKGRGMAAAIGLTPRQHSSGGKDRPLGINKRGGVHIRHSKNNERKILNDNPRSTCRSGMKLERHLIRIISTATPMQIYRSRFNNLLSKRHPRTRGLCNCSSVS

SEQ ID NO: 381788 - protein, 320 aa, unidentified
MASRESLFIGIDVSKQTLDVAFGADPHAPRETIPSTDEGVQLLVTRLQRLQPTLIVLEATGGLERMVFAQLLQAGLPTARVQPRRVRALAHAEGRQAKTDRLDARLLARFAERVRPPHHQATDEQRASLRDLLVRREQVIQMRTAEINRLTAAAPNLRPGIQKHIDWLDQEIRALEQERDNEAERTDEVRRKRELRDSVPGIGAITALNLLLRLPELGTIKRTEAAAVVGVAPYANQSGAQHKPRHISGGRRDVRSVLYMATLAATRRRLVRRAFDQRLCQAGKPRKVAIVAAMRKLLTILGAILRQQKPWDPAVHTSAP

SEQ ID NO: 381789 - protein, 337 aa, unidentified
MVYVGVDLHRKSSHVAVLAGDGELLASRRIRSHPEEFLRVFGELEAEPIEVAFEATYGWGWFADLLSDAGIPAHMAHPLATKAISSARVKNDKVDAKTLAHLLRTNLLPEAWAAPPEVRDARKLARTRISLARISSRLKCQTHALLADQAIAPPVSDLFGPGGRQFLQGVGLRPIPQARLEANLRLIDLLSPEVATADRELRELFGRDPRIGKLVPIPGIGFTTAAVVLAEVWDISRFPSPRHLCSWAGLTPTEHSSAEHTRRGHISKQGSRWLRWAMVESATRPYLKDPVLRRFRDGIARRRGAKIAKVALARRLLTLCYYALRDEGGCRAYPVPR

SEQ ID NO: 381790 - protein, 433 aa, unidentified
MSNFFYSPVIGIDVSADFSYVAILAPNGDIYKKSFKIKHDLNGFNHLVDEIKKVEEEFNMKTGIFMESTGVYHLSLFHYLNKYFDNTFVINPLITKSNKNGDIRKVKNDKKDSLSIATIGKFQNIKLSQRLSLDIFLLKNLVREYYKLTDTCSTFKKKLSADLRVIFPGYNTIFSDSTSKSSIELLSRYSTPQSILEATKEDIIKIFLSNSKKGIVWSENIYSKLINVANEAKIIGLPLDGLAVKIASSITLIKTIQSEIDTLLEQINIFIQSEAFPESIRNNIELIDSIPGIGRLTAITLIAEIGDIDGFIKPKHLVAFFGIDSSVNESGKFKGDDNKISKRGTRIGRRALYAVALASIRNNRNGVPINKVLLEYYQINLNGKKPKIALVAIMHKIINYIFAVLRNQTPFEQRDPKIHKQMFLENNSLNKVA

SEQ ID NO: 381791 - protein, 338 aa, unidentified
MEFKRIAVDTSKAVFTLHGVDLAERPVLRRDLRRAGFEAFFAKLPPTEVALEACGASHHWGRRLTALGHRVRLIPPQYVKPFVKRGKNDRNDAQAISEAAARPDMQAVPVKSAEQQAEAMVLSARELLVRQRTQLANAIRGHAAEFGVVTAQGMARLEGLLAAVHSDDAIPQAARDMLAFLAAQVKQLDSQIAQLEQRMQRLHKANPLSRMLAEVPGVGPIGALSLALTVDATRFTSGRHFAAWLGLTPKDRSSGGKQRLGKISKAGNERLRQLLVVGAMAVIRAARPGSRIASAWLLKLLERKPRKLAAVALANKMARIVWAMMTSGEAYRRQPVAG

SEQ ID NO: 381792 - protein, 395 aa, unidentified
MFIVGIDVAKRSHEVCMITSDGQTVQRPFSIRNNCTGYNLMLEKIRKHTNIKSQIVFAMESTAHYWLALFTRLRKDGYHVILLNPIQTSAMRDMFIRKIKTDAKDSFIIAELIRFGRYAESNVAQDRLLALKELCRNRFYLVDMAGDLKRKLIALIDRVFPEYEVQFDTIFCKSSVALLKKYPTPQKLSNAHLDKLTELLWNSSNGHFGEWKARELRELARNSFGVEDCDGAYSTLILLMLDQIQSLSEKADALEKEISRLFQSFDTTVTTIPGVGPIIGAVILSEVGDISRFSSADKLAAYIGVDPSVNQSGEFQAAHAHMSKRGSPYLRRCIWMASQVAVQRDPMFRAYYEKKAAEGLKYMTIIGHVTRKMTAVIFAILRDHKVYEPVLPTAA

SEQ ID NO: 381793 - protein, 387 aa, unidentified
MIEEARTCDAVLGLDVGKRSHWACLASRDGEVLMSAPVQNSETDLDGLFSEVGADVLVVVDQVRNIGALAISRARAAGLAVAYLPGLADRGAARLFAGDSKTDERDAAVIAKTALGIPDALLPVDEPDERLDAARSLAAQRDHMVACATRDKNRLRSILLESCPAFEALADLSDPHWLAMLEKLGGPWGCIDAGKASFGAVTKGADRERMDAAWRAASASTRPSAYQVAAENPQVRMLARRIREAVEEAGRLDGEISSLLSGTKAYSCLLTVPGIGPRTASELVIAIRIESFPDHDHLASYCGIAPRNRRSGTSISSVSASRQGNKRLKNLLIFSCNSLVRSRNRFGDYYRACRGRGMCHGEALKATARKRMKVIYAIMRDEVPYAA

SEQ ID NO: 381794 - protein, 327 aa, unidentified
MSQIKSVGIDVSKTKLDICLYTGDNNIFSKVESNPTNINDLTALLDHHQVGFDTPIVVESTGGYQMLAVQVLQQNNFNVKLINPLITQKYLHSHIRKTKTDKQDSLLLAQIGLQEDLYTYTEQPELVKLKRLYRLRESLIKQRQIHKNQIANIKDTYQDEVSTLEISVLRSVVTQLNEQIKVIEKEILSNDLVKSSLDTIGKIRGISPLALAGIIIELGDVNRFANSKQVVAYAGLDPSIKESGLSVRGKSRISKRGSRTLRSILCKSSWGVFMHNEELKAYFMRKRSEGKHYFSALVATARKILVIVYALLRKKEAYDPKYLTRSI

SEQ ID NO: 381795 - protein, 331 aa, unidentified
MYGLKHQKEKRSMDHFAGLDVSVKETSVCIVDDTGKIVREVKVASEPEALLAVLKNLAYRFKRIGLEAGPLSQWLYSAFAEAELPVVCVETRHMQAVLKAQINKTDRNDARGMAQMMRVGLYRPVHVKTLRSQKLRMLLTHRQLLQSKAIAIENDLRGTLRNFGLKVGMVGKVKFEARIKELVENQPDLAELIEPLLIVRRALREQIVVLHRRLLAIVRDDEVCRRLMTTPGVGPVVALTYRASVDVPARFRKSKAVGAVFGLTCSKYQSGEIDRSGRISRCGDEMMRVMLYEAAQIETSLARLSRAHSAAPMEHPPSRIRCSTTNHNGFF

SEQ ID NO: 381796 - protein, 382 aa, unidentified
MRTVSDLDIHKDSIFMCILDEQGKKTEEKFGVTTREIKRLGSVMRSHIVSEVCMESIGIYWIPVWRLLENDFQLRLVNAQFLKQLPGRKSDVKDAEWIATVLLKELVRDSFVPDGNIQSLRQYGRRINEINKDLVRCQQRIDMILQRCNIRLSNYVSNVDSKSYRKVVDALIKGESSSCELVKLVHGRTINRFSKSIIEDALEGDVKQSDRDLLKQYTQMLDLYQLQKQQCVDSMIQKCRELYPKAFSILLGICGIDKLSAAIIISEIGDNMKLFATSAALVSWAGLRPRNDESAGKIYSRKITHGNKYLRKALMECAWGASRNIGSVFYCRFWHLKEMKKHHNAIIVAIARQLLTIIWTLLSKEEKFDSEYHLKKHIPSIA

SEQ ID NO: 381797 - protein, 347 aa, unidentified
MNFYNNMHPYYCGIDLHARSLYVCIIDQSGKTCLHKEISASPDKLHQLLEPYIGNVVLGVECMHCWYWVADFCNEIGVDFILGHALYMKAIHGGKAKNDRIDSFKIANLIRGGNFPLAYVYPKAMRATRDLLRRRMKIVRHGADLKAHVANTTSQYNLPPNKVNLKNKDARQQLRNTFTELSVQKNIDLDMVILDCYAEQLSQVEWYIQQQAKQHKPNHFHLLKSVWGIGPILALTIIYEIGDIERFESVQKFASYARLVKCKAESAGKTYGTQGNKIGNAHLKWAFSEAAVLYLRGNEKAQKYLLKLQKRMSKAKALSALAHKLGRCVYFMLKNESVFDETRFLKG

SEQ ID NO: 381798 - protein, 354 aa, unidentified
MSQKLDTSPAVVGIDIGKNSFHIVGQNQRGAIVLRQKWSRDQVEARLANLPPCLIGMEACVGAHHLSSKLQMFGHDARLMPAKYVRPYSKGQKNDFRDAEAIAEAVQRPTMKFVATKTADQLDLQALHRVRERLVGQRTGVINQIRAFLLERGIAVRQGLRSLRSELPGILATRTDVLSPRMLRIIEDLAGDWRRLDERIEGLSNELETLARQDKACERLMTVPGIGPIISSAMVAAIGTGDVFSKGRDFGAWLGLVPKQISTGDRTILGKISRRGNRYLRVLFVQAAWVVLVKVKCWERYGLKSWIEAAKKRLHHNVLAIALANKLARIAWAVLNKGRAFECVKTEETASRPA

SEQ ID NO: 381799 - protein, 347 aa, unidentified
MLHLGLDLSRKRLDVCVLNEAGTKLAVTQAPPDLDGLRHLAKEVAALGGPVNAAIESMNGARFVHDSLELMGWDVEIADAQKVKGLAPLACKTDKIDAWVLAELSRRDLVPAIWLPDPEIRAERERARFRLHLVRHRVMLKNRIHSSLLAFGKPCPVSDLFGKSGRELLGRLELPDPWTKNIATALSMIDDLDSEIDACEKELRSLGADHPYVSLLQSAPGIAWVLGFTIASEIGDISRFSSPKKLMGYTGLCPRVYQSGGKDFRGPITKNGPKYLRWSLIEAAVHASSHPVYKDHYDRTKARLGRQRGAKVARIEVARKLAEAIWHMLQTGSMFAPARSHAVPLVA

SEQ ID NO: 381800 - protein, 349 aa, unidentified
MVIIGTDSHKHTHTCVAADELGRRLAERTVAATGAGHLELLAWAARFTDRSWALEDCRHLSRRLERDLLGAGEPVVRVPPKLMAGARRSSREPGKSDPIDALAVARAALREPGLPVARLDGPEREVRLLVDHREDLVAQRTAHENRLRWHLHELAPGGEPAPRTLGRLPVLDALGARLGGIDGPVARIARDLVARIRELTTAVTALERELAALVRPLAPTLLALQGCGVLTAAKLVGEVAGIGRFRSAAAFARWDGTAPVPVWSGDTTHVRLSRGGNRQVNAALHRIAVTQLRSGPGKEYVDRRMAKGNTKKEAIRALRRRISDEVYRRLISDEMARSASNSTCELVAA

SEQ ID NO: 381801 - protein, 346 aa, unidentified
MDHIAIDLGSRESQVCIRTAEGQIIEERRVSTRSLGKYLTKRPKSRVVLESCAEAFSVADAAMGAGHETVVVPATLAPSLGVGERGVKTDCRDARNLSEASCRMSKLPSIHVPGQASRNRKSICNFRESLVQTRTKLINSVRGWMRSEGLGVVRSGAPTSFPVRVRTHATERSTTLPAYVEPVLVVIDKLTVEISAMDDQLEEAAESDATCRLLMTAPGIGPTVSMRYTAAIDQVTRFPNAHRLQSYLGLTPGERSSSQRKRRTGLTKAGPSKLRRVLIQAAWAARRYYKDDPVVMWSFEVEKRRGKQVAAAALARRLAGILYAMWRDEKPYDKAHQVTRATQATA

SEQ ID NO: 381802 - protein, 359 aa, unidentified
MKLYMAIDLHSTNNYVAAVSEDGKPIMNKRLRNDPGIILETLAPYKDEVAGLAVESTYNWYWLVDLLMSEGYRVHLANPTAIRKYSGLKYADDRHDARWLAELLRLGVLPEGYIYPKEQRPLRDLLRKRQQLVRLRTSMMLSLQNLVTRHHGVKLGGSVLKRLGNPLEGYLEAHDDLKLAGTVSKQVIDYLTERIAALESHILKQVKEHEAYRHLMTIPGVGKILAMTIVLETGPVSRFAKVGRYASYCRKVQSLWLSNEKAKGKGNEKSGNKYLAWAFSEAAEIARRYDPACQAFFERKRRQSNRMVAHNALAHKLARAAYHVLRDNVAFEATKLFCEKPGRNGKPESVAGDPSRLIG

SEQ ID NO: 381803 - protein, 460 aa, unidentified
MNRNRSKSRVDRTMPMVHPNAAAIDIGATMHMAAVRADRASEPVRSFGTFTADLHRLVDWFTECGVETVVMESTSVYWIPIFELLDARGFAVFLVNARDAKHVPGRKTDVSDAQWLQRLHSFGLLRASFRPKGQIAELRAYVRQRERLLEYAASHIQHMQKALTEMNLQLHHVVADITGATGLRIIRAILAGERDPEALAGLRHYSCHSSAETIAKALTGSYRTEHLFALEQALSLYDAYHEKASACDVRIESVLKELIIHRGHDHGSAPPVSRRRNRTDQANALAFDVRAALFGLLGKDVTTIDGLGPYLSLKLIAECGDDLTSWPSAKHFTSWLGLAPSNKVSGGKMLSSRTRRSGGRAAALLRLAAVTVGRTDTALGAFYRRLSSRIGKAKAVTATARKIAVLFYNAVRHGMDYVDPGASSYETRYRTRVINNLHRRAKTFGFVLQPLEPKAGATVS

SEQ ID NO: 381804 - protein, 403 aa, unidentified
MGAICGIDWADEWHDVRVSDADGELLRQRRFVHDEAGIDALVAMLVELHVEVAAIERPDGLLVGRLLAAGITVLAMHPNQVKAARDRFRAAAGKTDVFDSFVLCELARTDRHRFAALAPCGDETAALRALVRTREDLVDARVALANQLRAQLDAFWPGARRIFADVDSPIGLAFCERYPSPADARGLGEKRLQAFLARHAYCGRRPANELLERLRQAPVAVVGELEADARRQTILGLVAVLKPIVEQISQLTSQIAGAVRAHPDGPIFLSLFRDAKSVICAAGLLAEIGDNRHRYPTRDSLAADAGMAPVAIESGKRRTASFRWACDKRLRNHMCVLADSTRHWHPWAHDIYARARARGANHPHAIRILGRAWSRVLWTCWQDQQPYDITRHQAATRHLAAAG

SEQ ID NO: 381805 - protein, 332 aa, unidentified
MMAQNDRVVVGIDVAKDKVDACIRSLSQEQTFLSTAEGQRALIRWLRKHKVGKVAMEASGGYERDWAKTLREAGIEVRIVDPKRVRSFARSAGRLAKNDAIDAEMIAWFAETFTDAPGQAYDAAREKLVQIVNARQCLLDLQTGLQNRGEHSTPEVVQKMQARLLKTIALEVAKLEAAITAMIKVTPHFAELAEIIESVPGLGKIASAGLIAAMPELGQVSDNIGAALLGVAPYDDDSGQRRGGRHIKGGRRKVRNLFYMPCLGAATQHNPVLKAFYDRLIAKGKEPKVALTACMRKLIVILNTMIARRQKWDVTRYKVSDPARLPPSACPA

SEQ ID NO: 381806 - protein, 369 aa, unidentified
MKKTIRFVGLDVHQKTITVAVAEPGSAPAQLLTTLPNDHLALAKCLERIGPAPTLQVCYEAGPTGYGLARWLLESGIHCRVVAPSLVPRDGRRIKTDRRDALKLAHFLRSGDLVAIAVPDAAAEAMRDLERAREDAKNAERVVRHQLSKFLLRHGRIWSGATKWTDAHWRWVRAQQFACPILQRVCDDALQAVEQAGHRVAQLTRNLSEQTANWSQRPLVQALQALRGVQLVSAVVLAAEIGDYRRFASPRQLMTYLGLVPSEHSTGESRRQGRITRTGNTHVRRILVEAAWSYRYRPRLTKVIAARQKDVAPAVRAIAWKAQQRLHRRYVRLLSRGKSKQQVVTAVARELAGFVWAIARQDSLLVEAA

SEQ ID NO: 381807 - protein, 392 aa, unidentified
MIYVGIDIAKDKHDCFIINSDGEILFHTFTISNNHEGFNTLFQRIESVSDDFTKVKVGLEATGHYSYNLLGFLLDKGLPTYVINPLHTNLYRKSLSLRKTKTDKVDSRTIATMIMSDMNLKSYSDISYHNEELKSLTRYRFDKVKERAKLKTSVSRLVNILFPELEKLVPSLHLSSVYALLSEFPGAAQIAASHLTKLSNLLSQASKGRYGKETAILFRETARSSIGSVMPAKSLELKHTIKLIQELTAEIDEIEAAIKQIMDEEIHSPILTIPGISYRMGAMILAEIGDFNRFDSADQILAYAGMSPSTYQSGQLNNCYSHMEKRGSRYLRYALYNATKYVCQWDESFSAYLAKKRSEGKHYNVALSHATKKLVRLIFAMEKSGRTYQPAA

SEQ ID NO: 381808 - protein, 289 aa, unidentified
MLIIGCDYHPSGQQVFGIDRESGEVIADRWIAHTGTELEEFYGGLPAGTVVGVECSGNMLWFERRLAQYGHRLRLGDAAKIRSKETRKQKHDRRDAELIARLLREDQFPDLPWVPTLAERDQRQLLMHRHKLVRMRTQVKNQLQHIALNQGQQKKRQLWTKAGRELLESLRLEPWTARRRDDLLRWLDVLDRDCASLEREVEQAAEARADARLLMTHPGIGPVISLAFVLTIGSIERFQRSRELVSYLGLNPTEDSSGERRRLGRISKQGSSFMRPAADSGSADRGSWR

SEQ ID NO: 381809 - protein, 339 aa, unidentified
MDHVAIDLGAKKSQICVRGADGRIVEEKRWPTGDLEAYLAGRPTSRVIVETCAEAFCVADAARKLGHETRVVPATLVKTLGVGARRLKTDQRDARALSEVSCRIDLPTVHIPKAESRDRKTMCGMRDALVGARTKIVNNVRGWLRSRGRRIERGARASFRQRVEAAWQGQVPSYVERQLQVLDVLNVQIKAADAEVKSWAEADETCERLMTVPGVGPLTALRFVAALDEVKRFENAHQVESYLGLVPGESSSSERQQRLSITKSGPRSLRWVLVQAAWALHLRCRKSEAIPLQLWAHRIEQRRGRRTAIIALARKLAGILYALWRDGSVYDGRRGAKMI

SEQ ID NO: 381810 - protein, 362 aa, unidentified
MKKSIRERESEWKPRPDGTIGIDLGDRFSHYWVLNGDGEVMEEGRVRTSEEAFRRHWEAEPQQRMVMETGTHSPWISRLLRGFGHQVIVANARKVRAISENESQNDRQDAERLARLGYCHPRLLKPIQHRSAERQRDLNLIRARDTLVRARTMLINSVRGLVKSAGGRLPPASSESFAARVSAAVPAELGTATQPLLHQIAGLTVEIRGLDQAIEKLAERYPEIRILRTAPGVGPVIAAAYVLTLDGVDAVEHSRSVGAFLGLRPKQSQSGDSDPEHNISKTGNIYLRRLLVQAAQYILGRFGPDSALRRWGLKLAQGGKRTKKRAVVAVARKLAVLLHHLWRTGQNYPPFPEAAAAGGRAA

SEQ ID NO: 381811 - protein, 370 aa, unidentified
MGQHSRAFVGIDTSKLRNAVAVAEEGRDGEVRYLGEIDTAEAATRKLVVKLAAKYRQLTFCYEAGPTGYGLYRLIRELGHDCLVAAPSLIPKRPGDRVKTNRRDAVGLVKLLRAGELTAVWVPDERHEAMRDLSRAREAARKDLKGKRQQVSSFMLRLGRHYPGKKTWGRAHMNWLMLQKLEHREQRIVLEELLGAVRQESERVERLEQAIRDAVPEWSLAKVVTALQAMRGIDLVAAVTVLAEIGDLSRFQNPRELMGYLGLVPSESSTGDTVKRGSITKAGNGRVRRILIESAWSYRYPPRVSREKQMKVAAAPRAVREIAWKAQMRLCARFRSLTRKGKQPNVIAAAIARELSAFIWAINREVMAGR

SEQ ID NO: 381812 - protein, 350 aa, unidentified
MKKFIIGIDFSKETVDASIVQKEQPETLIAYKKFRNNLKGVDGLIAWAKSKVAQDGEIIFCGENTGTYSTLFSDELTDRGFIIWIEHGMNIVRGMGDVRGKDDKTDSLRIASYAARFYDKMKPYVRPKDETRVLKTLLAKRDRLKSFLKAEITNTKENPLMLQDSNIASSINEFFKRIEESLRKELKELERMILDVVMSCSEYAKNFNILTSMKGIGLINAVALIVYTDNFTKFNFNHRKIATYWGVVPFKNESGTSVRRGTHVSPKCNSWLKALLTEATLCAIRYNSRIKAYHDRLMARGKAIGIVLNNCKNKMLKILVAMVRDSKIYSDMDVSKDPHTTTTTSSIIVC

SEQ ID NO: 381813 - protein, 425 aa, unidentified
MAALEEAFSIFVGIDWGSESHQVCVLDAGRKVLLEQTFAHSGKGLGELVDAVLQVGDGRPGRIAVAIEVPRGAIVDTLLEKDVAVFAINPKQLDRFRDRHSVAGAKDDRRDALVLADSLRTDKPAFRRVHLGDPMLVELRELSRVQEELKAERIALGNRLREQMQRYFPQILAIGSVYDDRWLWDLLEKAPTPELAKRVSLAKIGSLLKRYRIRSQTPEQVREALLAESLHVAPGVVEACRKHVTLLIPRLRLVHEQKLEVERDIENLLEQLSAPQEGKAEHRDALLLQSLPGLGKLVCATMLAEAAEPLGNRDYYSLRTLCGVAPVTRRSGKQYAVSMRTSCSRRLRIAVFYWAGNAIQRDQHWKSRYGALRAAGHSHSRALRGIADRLLATLVAVLKTNTPYDPTRRGVSGPAGLPRTAPVTA

SEQ ID NO: 381814 - protein, 355 aa, unidentified
MSQEKYIGMDVHQATISAAVMDAHGKLIMECLLETKASTIVEFMQGLQGALSVTFEEGTSAAWLHDLLQPHVDRLVVCDPRKAALLKEGNKSDRIDARKLAEMLRTHQLHSVYHGEHGVRTLKELGRSYLTITKDVTRVMNRIKALYRSWAIPCSGTTVYAPRHRTEWLAKIAEPGVRVRAEHLYQQLDSLQPIRLEARHELVRESQKHSAVKLLRQIPSIGPIRAALLVALLQTPHRFRTKRQLWAYSGFAVETHDSGEYRYVQGKVQRNRERITVRGLNDNHNKDLKSLFKSAAISASTRPGPLRDFYVARVDKGMRPTMARLTLARKIAAISLTMWKKGVHFDPQNLPRQAA

SEQ ID NO: 381815 - protein, 391 aa, unidentified
MVQSGRVVIGMDPHKRSVTIEVMSGDETVLGGGRFATDPAGFEALGQYVHRWPDRTWAIEGCNGVGRHVALRLLAQGQDVVDVPPKLSARARVFATGQGRKTDATDAHSVALVGTRMTGLRPVVDDEQLAVLRTLVDRRRSLGEEHTRMVTQLHHLLLELVPGGAKRFLSAAQAKQILAGIRPRDTAGKVRRRVAVELVSDMERTYKRKKATDKELTELVRATGTGLLGLNGIGPSGAARLLVEVSDITRFPNRGHFASWNGTAPIDASSGDHVRHRLSRAGNRQINRVLHIMATVELRHPGIGRDYFDRKKADGKTSMEAMRCLKRRLSDIVYRTMFDDAVAALGTGPGGHRGASADSSAAGSHPHTGTSDQSHPGPATNEPRTALPAAS

SEQ ID NO: 381816 - protein, 343 aa, unidentified
MDHFAGLDVSVKETSICIVDDTGKIVREVKVPSEPEALLQVLMNPAYHFKRIGLEAGPLSQWRFSALAEAGLPVICVETRHMRAVLMAQINKTDRNDARGIAQMMRAGLYRPVHVKALRSQKLRMLLTNRKLLQAKAIAVENDLRATLRNFGLKVGMVGTAKFEARIKELVENLPDLAMLVEPLLIVRRVLREQIDILHRRLLAVVRNDDVCRRLMTIPGVGPVVALTYRVTVDVPARFKNSKAVGAVFGLTPTRYQSGESDRTGGISRCGDEMMRVMLYEAAQSMLVVSTKWSWLKAWAMKIAKNRGMKKAIVALARRLAVIMHRIWVDGTEFRWTKEVVAA

SEQ ID NO: 381817 - protein, 354 aa, unidentified
MKRTTKYVALDVHQATTLASVREEGGRVIARTILPTEELALVEFFRAMRGAIHVAFEEGTQAQWLHDLLVPFVDRVIVCDRRGEPQQGNKGDQTDADQLSELLRRGGLRAVYHGSAHRETLKELARTYANLVQDGTRVMQRLKALFRARGIRTPGKRVYHLKGRAEWLAQLPGRGVQFRAEALYSELDVLNALRPKAKTAMLAEAKRDPAWSVLRTIPFLGPVRVALLLATMQTPWRFRTKRNLWAYAGLAVVTRSSADYALSNGRPVRRRRAPMTRGLNRNHNRVLKDVLKGAATAATARPGALQDLYHGMIARGMREELARVTLTRKLAAITLRLWKQGERYDSAKLTMQAR

SEQ ID NO: 381818 - protein, 357 aa, unidentified
MEQRKEINFEGQNVYVGIDVHLKKWDVTIMTESGHKRNYCQPPSAQALFEHLKKHYPNGNYQAVYESGYSGFSTCYALNESGINCIVVHAADVPTTQYETVMKTDPVDSEKLARGLKAGVLRGIYIHRKETLDDRSLVRFRKTIQMQLGGYKSRVKHLLYTNGVSYPDYFESSGTHWSKRFMEWLRKDVVLFSSTRNSLDMLLKQVESMRNNLLEATRRIRQLAKNERYATAYRNLLSIPGIGSITAMCLLTETDDINRFRNEKQFASYIGLIPACHNSGEKKINCEKTFRGNKHICPMIIECAWTAARRDKAMADFYSKCCRRMEPNKAIIHIARKMSNRILMVLNTGKQYEYEKV

SEQ ID NO: 381819 - protein, 338 aa, unidentified
MEYFGIDLHQKHSEICGLDASGKVRLQERVATSEAGLRKVFGKSKGVRVVLESGGQSSWAARVLGEMGHKVVVVNPRRIRLIAESTLKTDRIDAEILARLGRQEDDSQLRPVYQRSEGALELRTRLRVRLNLVRVRTALINGVRGTLRAHGYRMSSCVAGRFAARFVDLKLAAELRQVLDPLVATIAEVSARIEQLEKDLIEEAGSDELLVRLQEVPGVGPLVCLAFIGWMDKPERFKRSRDVGACLGLRPQVRGSGEREWRGPITREGDAEMRRLLVQAAHALLLCRKDSALKRWALQLATRVGKRKAVVALARKLGVLLHRLWVTGNSYQALPKAA

SEQ ID NO: 381820 - protein, 311 aa, unidentified
MENYIGIDVAKQNFDLCCLNQKEIRQFENNTKGIRKAIKVITKLQPKLVVMEATGGYEASLAAELHAARLPVAVVNPRRIRDFARANGQLAKTDKLDAAVIALFAARMRPPTQEQIDHNSRRMKALVTRRNQLIRMHTAENNRREHVLDRVIDRSLKKIIKMIEREIEDVEQLIREQLDSMPDLRAKAHILDSAPGIGETTATMLVTEVPELGRLNRREIAMLVGVAPINRDSGTFRGKRMTGSGRRDVRSRLFMPTLVAIRYNPVISRFYKHLLAKGKVKMTAIIACMRKLLTILNVMVAKNEAWNTKFV

SEQ ID NO: 381821 - protein, 346 aa, unidentified
MTIVEAARTVTGGVDTHLDVHVAAALDPIGALLGTERFDTDSAGYKALLSWLESFGPLCKVGVEGTGSYGAGLARYLRRADVEVIEVDRPNRAERRRSGKSDPLDAVEAARAALGGRAKSISKSKDGAIEAIRVLVVAKRSARGARVKALTQMRHLVITAPDQLRSRLRGLSVIALVNEAARLRPSRSGDAVMAAHKAALCSLARRIQGLEEELAELDGRIAVLVESAAPELLARFGVGPDTAAALLVSAGDNPERLHSEAAWAHLCGVAPIPASSGKSNRHRLDRGGDRQANSALWRIVMVRIAHDPDTTAYFERKVKEGRSKRDVIRLLKRYVARELYRYLPRG

SEQ ID NO: 381822 - protein, 316 aa, unidentified
MAKRKSYIGIDVSKQLLEVAVYESDFHYCCPNQASAFAALLAELIALRPARIVLEATGGLEKPLLTFLQTAGLPVVVINPRQVRDFAKAIGQLAKTDRLDAGVLAHFAAAIKPPLRPVKSKDDQELKDLMGRRGQLIEMLVAEKNRRHTATSDVVRKAIKEHIDWLEQRLAELDEQLQTRLVSSPEWQSKDTILQSVPGIGPVVSFCLLADLPELGTLNRQCISKLVGVAPLNDDSGQHRGVRHIFGGRARVRCMLYMAALTAVRFNPILKQFYQRLLAKAKPRKVALTACMRKLLSIVNLMVRNQTPWRDDPVSA

SEQ ID NO: 381823 - protein, 408 aa, unidentified
MNTLYVGIDVSSKSNVIYLMLPNGDKHSNFSVANSHEGSTQLVKRILSALTSHSLDTVLIGLEATSVYGDNLVYFLREDATLAPFNRKIHVLNPKQVKKFHDAYNGLPKNDYVDSFVIADCLRFGRINKEVYMGDYRYKALQNLTRARFFAVQNLVKEKQRFMNVLFKKYSTMTQEKVFSDTFSTTALAVYDEFESAEALANMDLHELTDFIIEKGKNRFPDPDAVAKAIQKAARSSYRLPKTVNDSVNQVLSISITSMKALESQIKEFDKAIKAQMELLPNVLISIPGIGPVYSAGIMAEIGDINRFNSQAALAKYAGLAWKQHQSGGFESEVTRLIPSGNRFLKYYLCEAAFSLVRCDKEYSDFYRLKYKEVNRCQHKRALALTARKFVRLVFRLLKDNRLYCPAK

SEQ ID NO: 381824 - protein, 328 aa, unidentified
MFYLGMDVAKAKLDCCLLLDEAAGRRKTKVVSNTKPGIVDLLAWVAKQNVSSKELHVVMEGTGVYHEQAALALADAGVVVSIVNPAQVKDFGRGLAVRTKTDGVDSFVLARYGALLKPAAWMPPAPEARILQALLARREAIAQDLQRERNRQEKADATDAPERIRQSLADSIEFLVKQLAELQQDIDQHIDRHPDLKSDMALLQSIPAVGPQVGGNLLSVMHSHDFGSAEQLAAYLGLVPVERQSGSSVLGRAKLSKAGPARIRAVLYMAAVVATRCNPHVKAIYDRLLARGKSKMSALGAAMRKLVHLCFGVLKTRKPYQPDYAKIA

SEQ ID NO: 381825 - protein, 355 aa, unidentified
MNSLKHQKEKRSMDHFAGLDVSVKETSVCIVDDVGKIVREVKVASEPDALLQVLLNPTYRFKRIGLEAGPLSQWLFSALAEADVPVICVETRHMRAVLKAQINKTDRNDARGIAQMMRAGLYRPVHVKTLRSQKLRMLLTHRKLLQSKAIAIENDLRGTLRNFGLKVGMVGKLKFETRVKELVENLPDLAGLVEPLLLVRQVLREQIGVLHRRLLAIVRDDEVCRRLMTVPGVGPVVALTYRATVDVPARFRSSKAVGAVFGLTPAKYQSGEISRTGAISRCGDEMMRVMLYEAAQVMLLRSAKWSWLKAWAMKIARHRGMKKAIVALARRLAVVMHRIWVDGTEFRWTREVAAT

SEQ ID NO: 381826 - protein, 343 aa, unidentified
MDHFAGLDVSVKETSVCIVDDTGRIVREVKVASEPEALLQVLRNPIYRFKRIGLEAGPLSQWLFSALAEAGLPVICVETRHMRAVLQAQINKTDRNDARGMAQMMRAGLYRPVHVKTLRSQKLRMLLTHRKLLQSKAIAIDNDLRGTLRNFGLKVGIVGTVKFEARVRELVENLPDLAVLVQPLLMVRRVLREQFAILHRRLLAIVRNDEVCRRLMTVPGVGPVVALTYRATVDVPARFRNSKAVGAVFGLTPSRYQSGEINRTGAISKCGDEMMRVMLYEAAHIMLVRLAKWSWLKAWAVKIARHRGMKKAIVALARRLAVIMHRIWVDGTEFRWTHEVTVT

SEQ ID NO: 381827 - protein, 370 aa, unidentified
MKKNSSQKQNSGKSNPQREKEGFASYIGIDLGDKYCDVCVLDGQGEVHEEFRLRMKGPELQGYFTSIGRSRVAVEAGGQSRWVAEIIQRCGHEVYVSNTRKVAYIHQSDDKNDPGDAYKLAELVHFKPRLLHPIQHRSLEAQADLSWIRAREVLVESRTQLVNAVRGMSKAFGERLAKCSVESFTAKMAGQVPEAIRKAMAPLLETIDHLNEQIYYYDLMEAHIARERYPKYRLLEQVNGVGVHTALAFMLTIGDAERFAKSRQVGCFLGMRPKKQESGESKPQLGITKAGDVYLRKTLVNCAHYILGPHGKDSDLRRFGLRLCARGGKNAKKRAVVAVARKLAVLLHWLWVSGEVYEPLRNSKAREVAA

SEQ ID NO: 381828 - protein, 445 aa, unidentified
MDVVYRHCAGLDVHKKTVVACCITPGAKGEKQTEVRTFGTMTVDLLALSDWLTSKQITHVAMESTGEFWKPIYNLLEGNFELLVVNAKHIKNVPGRKTDVKDAEWIAELLRHGLVRGSFIPPQAQRDLRDLTRQRTNLVQDRATVVNRLQKVLEWANIKLSSVATDVTGVSARAMLEAIVQDQVDPAALSELARGRLRKKRDALEQALTGTVRDHHRFMIAQHLTQIDFLDQQIAAFDEQITAAMQDMSQPPDEPGPTQPDASQAVVTPPEDTTAPLTWEAAVALLDTIPGVGPRAAEMILAEIGLDMNRFPSEAHLSSWAKLSSGNNESAGKRYSGAIGHGNRWLRTILVQVAWAAVKVKKSYLSSFYHRLAARRGAKPAIIAVAHRILIAIYHMLKKHEPYKDLGATYLDERNKPKVVSRMKHRIEQLGYRVTIEPMTVSVPG

SEQ ID NO: 381829 - protein, 364 aa, unidentified
MKLVKDIVNRVVRYIGMDVHKDSTTAVVVDAQGNLVMQVTLRTEGSVLVDFLRGLRGTLHLTFEEGTYSAWLYALLSPCVEKLIVCNPRQNALLKQGNKSDRIDARKLAELLRLGSLTAVYHGSPGLRTLKELAASYATLVSDGTRVMNRLKSLYRGRGIRCGGTQVYLPRHRARWLAQLVEPGVQQRAQLLYQELDLLLKLRPQARRALLKESRQHPGQKILRTIPGLGPLRVARLLALLQTPHRFPNKRKLWGYGGLGVLTRGSAQYRLQQGELVVSPKGVMVRGLNPAHNAPLKDILKGAALSACQRPGPLREAYERCLREGMEEPLARLTIARKIATLVLTLWKRGERFNAQRLRREQAA

SEQ ID NO: 381830 - protein, 371 aa, unidentified
MADYREAFVGIDVAKLKNAIAVAESGRDGEVRYFGEIDASDGSMRRIIQRIAAKFDHVHFCYEAGPTGYGLYRLIQSLGHKCMVVAPSLIPRKPGDRVKTNRRDALALARLLRAGELTAVWVPDEGHEAMRDLVRARAAAVETLRVHRQQVSAFMLKHSRIYPRKKGWTMRYLRWLQEQQFDHPAHQIALQEMVEAVRLSKERVERLEKVIEEFIPTWSLAPVIRALQTLRGVDLIVAVTFATEVGDVTRFESPRQLMGYLGLVPGERSTGETVRRGSITKAGNGRVRHMLVESAWTYRHPPKVGARKLYRMEQAPPKVREIAWKAQSRLTARYRTLTGRGKRTTVVCTAIARELSGFMWAVAREAQSIRS

SEQ ID NO: 381831 - protein, 477 aa, unidentified
MSKPKQPSDTSNQPGPKVAHRKRTRPQQQETPSVFQPNAAGIDIGAREIYIAVPADRDEHPVRKCGTFTSDLHQMAEWLVNCGITTAAMESTGVYWIPVYDVLEQHGIQVCLVNPRNMKNVPGKRTDFHECQWIQHLHAMGLLQSAFRPEAEVCAVRTLMRQRNDLVQMASQHVQHMQKALTQMNVQFHHVISDITGLTGMAILDAIVAGERDPAVLAKLRDHRIKASEETIQKSLEGNWRSEQILVLKQRLSLYRSYGEQIIDCDREIEKLIAAFEPRVDLEEKPLPEDRKQQQRRRRNKSGSPDFNMRTEAYKLFGVDLTQVPGLMMLVFMLFSEVGRDMSRWPTAAHFVSWLGLCPDNDISGGKVLWRGARRTKNRAGTLFRLAAHSLHHDKTPMGDYLRRMKAKLGPAAATTATAHKIAIIFYTMIKNQVEFDISLWAERDAMRQRRLDARLHRQAAQRGYKLVPLEEKQPAA

SEQ ID NO: 381832 - protein, 362 aa, unidentified
MVKAMAFVGLDVHARQTHAAVLDPAAGELAVSRLRMAPLEVVSFLQTLGPGVRAVYEAGPTGFGLARAAREQGIDVRVAAPGSIPRGSGDRIKTDRRDAVRLVRLLAAGELSFAFVPSVADECFRDLVRSIEDARADLMRARHRLSKFLLRRGERYPGPGRAWTRRHTIWLGSHRFEDACSQATFADYLAAVELLTGRRGGLIDALEQAIPSCSHATTVARLRCFRGIDTLSAAGLSAEVGDFSRFAAPKLLSGFLGVVPSERTSDLKRRQGSITKAGPGHARRLLVEAAHHYRYQPRIGEALARRQQSQDARVIEIAWRAQRRLHQRWQHLYRERCKPAGVVAIACARELAAFLWEAATLE

SEQ ID NO: 381833 - protein, 373 aa, unidentified
MKKVRFLGLDVHAETIAVAVAEPDGEVRSLGIIPNREESVRKLVKKLGAAEELQACYEAGPTGYVLYWQLTALGVKCEVVAPSLVPVKAGDRVKTDRREATKLARNYRAGDLTAVWVPNEEHEALRDLVRAREAAKQDQLRARHRLSKFLLRHGRRVPPGVKVWTQRYQDWVKEQVHFEQPAQEYTLLDYLHEVEHMADRIRRLDLAIGEAVKLAPAGMQDVIQALQALRGVAQISAVTIVAELGEISRFERARQLMGYSGAVSSEHSSGKRIQRGQITKTGNADLRRIAIEAAWAYRHRPTIGAALRKRQEGLSEEVKEIAWKAQHRLHKRYCNLLAAGKEKQKVATAVGRELLGFIWAIAVQVERNRKQVA

SEQ ID NO: 381834 - protein, 343 aa, unidentified
MQTISTIGLDIAKSVFQVHGVDANGLVVIRRQLKRRYVLAFFEKLPTCLIGIEACASSHHWSRQLQALGHTVRLMPPAYVKPYVKRQKNDMADAEAICEAVTRANMRFVPTKTPEQQSGLMLHRTRHLFIRQQTSVINAIRAHLAEFGVIAPVGRKGMEELLRVIADPGDKRVPDVVRACLTALGSQLLSLKKQILDFDRMIMAWHRSNQTSKRLNCIPGVGPLLATALVASVADPKAFRSGRNFSAWIGLVPKQHSSGGRDKLGSISKQGDRYLRSLFVAGALAVIRYAKIHGTKHRPWVTALLTRRPTKVAAIALANKLARMAWAMMASGERYNYPAALKV

SEQ ID NO: 381835 - protein, 406 aa, unidentified
MIFVGDDWAEDHHDVHVMDESGTRLASKRLPEGLAGIRALHELLARHADEPGQVVIGIETDRGLWVEALVAAGYQVYAINPLAVSRYRDRHQLSGAKSDAGDAKVLADLVRTDRHNHRLIAGDTPEAEAIKVLARGHQNLIWARTRHTNMLRSALREYYPAALDAFENLHDRDALAVLGRAPIPAEGARMPLSAIRAALARGGRRRNLDAHAREIQAALRGEQLAAPDSVAAAFAATTRAAVGIIGELNKQIADLEAQLVQDFEQHPDADIYLSLPGLGVVLGARVLGEFGDDPDRYTTAKSRKNYAGTSPLTIASGRKRAVLARHIRNRRLYDAIDHWAFCALSVSPGCRAFYDHHRAAGDLHHQALRALGNRLVGILHGCLRHRVTYDEHTAWAHRTQDRQAAA

SEQ ID NO: 381836 - protein, 385 aa, unidentified
MQTITTKPATTAESILAIDLGKYKSVVCLYGAADDVRFLSISTTRYELTRLLTKHQPAAVLIEACLLSSWVHDLCVAQGVKCLVANTASEAWKFKHTKRKTDRDDAKRLAELYVLGQLPTVTVPAPATRQRRALIEHRQKLVGRRVAVQNRIRAIFVSQGLPAPRGAAAWSKTGLAGMASQARPLAECDVLELWRGRLHLALTELEQVIDLQGQAERKLDDLAKGDANVQRLQTIPGVGPRTGEAVVAFLPEPKRFKSGKQVSSYGGFTPRQYQSSELDRRGRISKRGPATLRKLLVECAWCLLRYNAWARAVYHRLTHGGKARKKQAIVAVARKLLVRCWAMLRDGQSWHDAQTGPKPKLSPSKQRRQAEAQRRRQATQQAAPA

SEQ ID NO: 381837 - protein, 497 aa, unidentified
MRHKRYLLIEGAWGESLNKHLVGLTLHLCLGITMQSIPSPHYSKDGATMVAIAPIPRLHNEPLYIGIDVSKRTHKVALISPFLLRKNGRYDACPVFDIENSQIGFESLIAKMECYAPRSKCIVLMEQTGHYHRPLQQYLLEIGVNVYEVHVQKRPSRNKSDKRDALNLANLLYNQIELKVQTADSTQIAHQVIAINAVATTLRPLVMRHFELSQRSTRCKNQLIAIIDEIFPEFCRAIKDPNGNSALRIRERFLTPADVAQADLADLKACCPGQRPGIKTLTLLQELASRSVGINDQARIEALLFEQGQLIAELRLLREHMESLDEKIATLIENTREGTILTSIPMISPLRAASIIGSIGSIGNFKSAAKLKTYFGWSPEQRQTGTSMDKMKLGKGGNRLMKLTLYLAGRSAIRTDTEWRVLYERLVPIKCSYDARLKQYVGRNKVLGTVIGRIIDCIYALLRKDYDLLQSLPPGETPPTPTLYDRAIHQAHRRGRK

SEQ ID NO: 381838 - protein, 346 aa, unidentified
MDQIIRIGMDTSKHIFQLHGVDSAERSVLRRKLRRSQLLAFFAKLPPTVIGMEACGAAHYWARELGKLGHEVKLIAPQHVKAYVKRNKNDGRDAEGLCEAMSRPTMRFVPVKTEEQQAALMLAGIRQQLIARRTQLSNAIRSYAAEFGLTMARGLDKIEPLLARIAQDEGLPALARELLAIQGREYAQLQAELKAIEARLMAWHRANACSRRLEQIPGVGPIGATALVMKTPDPRAFSSGRHFAAWLGLTPKDHSTAGKTRLGKITRAGDEMLRSVLVAGATAVIQQARHGRGHPSPWLIALLKRKPPKLAAVALANKIARIAWKLMVTGENYDGARMLGASTLAA

SEQ ID NO: 381839 - protein, 428 aa, unidentified
MNGEDLSRLEEFRQFRREVRGSDEYLLVGVDIAKDKHYAFFGTAQGKALFRRLVFENNLEGFQKFLVQARAMRDQNGLKRMVFGMEPTGNYHKPLGEHLIRCGHLVVLVSGVAASENRKTLDGRWDTSDPRDAANVADLMSQGKCLFYEFPVGPLSDLRNLLSLKRRFKRVEHGYRVRIRNHLVAKYFPELDRYYEQSPVTSLAIVRWCLDPSVIAGLEYPEFSQRVGTGRRRGAQEKRLQAIWKLAVDSVGCEAGPVVEFEAQVMVEGLKQIQKALEEIEEKIQEVCSSFPEYECLLSIPGFGPDVASKVLGAIGDPLRFENGRQVLKLAGLDLSAKRSGKKSESVIPVISRKGKTDLRYALYQAAFIASIRNQDFMVYYTHKLRGREREPGIKIKMRVKLAAKFLLIAWTLMKKKESFNPDYLANQ

SEQ ID NO: 381840 - protein, 343 aa, unidentified
MNVTRIGLDLAKQVFQIHSVDRDERVVVKRQLKRSQIRAYFEKLPACRIGMEACAGAHYWAREFGRMGHEVKLIAPQFVKPYVKSQKNDANDAEAICEAAGRPNMRFVTVKTVAQQDLQAVHRIRSELVRQRTAKANQIRGLLAEYGIVVAIRIDALRRALPDLLEDADNGLSGLFRRLLEGLRQDLVELDRRVAELDGEIQIAAKEDETARRLQTIPGIGPITATALAASVGDARQFKRGRDLSAWLGLTPGQHSSGGKDRLLGMSKRGDSYLRTLLIHGARSVIQAAANKTDPRSRWIVGVASRRHKNVAAVALANKNARIVWALVVRGGAYDSQFGRVAA

SEQ ID NO: 381841 - protein, 322 aa, unidentified
MSVVVLGIDIAKQKFDVALLVEEKTKHKTCKNSAEGFEALTVWLEKQGVGKVHACLEATGNYGEDLGIYLHEAGHTVSIINPARIKGFAQSELLRTKTDKIDAALIARFCLAMKPEIWTPPAPEIRSLRALVRRVDSLIDMRSQEKNRISTAHESVVLLIKEHIVYLDKEIENIRRQIDDLIGKNPYLKQRKDLLASIPGLGKATIPHLLAELDDLNKFTHVREMVAFIGLAPKETLSGSSIKGKPRLCKIGHARLRKALFMPALVSIQCNSAMIAFHNRLKERGKNGKVIVCAIMRKLVHVIFGVLKSGKKYDPNYKPVFA

SEQ ID NO: 381842 - protein, 378 aa, unidentified
MKKILYVGMDVHKESITIATGWGMDLSTGHIPDEIRMVGTIPNTTVAVDNAIRKLVSTGAVLQFVYEAGPSGYTLYRHIQSRGFSCTVVAPSLIPRKPGDRVKTDSRDAIMLTRLFRAGELTKIYVPTEEDEAVRDLFRMRCDIKILERKAKLFLLSFLLRQGVRYPGVSNWTKAHFKWLDTVALKQPAHQLTLQEYLDTVKHCSARIQHIDAMLLQVTKNWSGLPLVRALQTFRGISFFSALGLAAELGDMRRFATPRQLMSYVGLVPSEYSSGESKRRGHLTKMGNTHARWILVEAAWSYRLKARKTARLLQRQKDVEQEILDISWKAQVRLCSRYQRLLYREKPKNKVIASIARELTGFIWAVGQLPTAEKILSQ

SEQ ID NO: 381843 - protein, 337 aa, unidentified
MNYSGIDLHSNNSVVTVTNDEDRIMAEKRLPNDLTKILAFLLPWRETLVGVVVESTFNWYWLVDGLQAAGFKVHLANTTAIKKYDGLKHSGDEADARHLAHLLRLGILPTGTILPPEHRAVRDLSRKRMQLVRSRTTHILAVENIAARQQGVRISSDQVKRLDAESISRMGLPADVELAVESNVAVIATLNAQIDRLEKRLQENVKARAEYGLLTSVPGIGHVLATTILLETGPIDRFATVGNFASYARCVDSVHTSNGKKKGEGNTKNGNKYLAWAFIEAANFALRYCAEAKRFYERKKAKTNNVVAIKALAHKLARACFHILKERQSFDVKRCFA

SEQ ID NO: 381844 - protein, 409 aa, unidentified
MRFAGIDIGSETHVVAVVDEAGAVLHKAAPFGEEAAGYRRLREILGTSDDLVVAMEATGHYWRNLGAMLIAHGYAVALINPLRTRRFAEEDLARTKTDAIDALGIARFAAQKRPAMTDFCDDEIQQLRELVRLRERLLVEQGNQIRHLHRSLHLTFPEFTRHVRTLESALATAILSRYPTSEAFRTVRLKTLARLCYDGRHRVGESLAGTLIAAAKHSIGGHHTEPYRRQIKFACQDIEIARERIRQLENDIGLKLERHEVGKLLTSIDGIGSQTAARLIAELGDPARFRSAAALASYVGVIPRVRQSGKRRYSGRPSVPLGNAALRHSLWMPTLTAVRLSPWLRPYYLRLRRAGKRPKAALVAAMHKLLLAVWSVAKHRRPFVSRTSPPSDEVRNSLSGRASRPLNSG

SEQ ID NO: 381845 - protein, 317 aa, unidentified
MNNPDSFLGIDIAKDWLDVAWLSGQTLRIDYTDEAVAGLTERLLADPPSLVVMEATGGLETAVASALAAAGLPVAVVNPRQVRDYAKARGRLAKTDRIDALILAAFAAAIRPQVRELPDEHTRALGELLARRRQLVEMRVQEKLRIQRASALQKASLREHIAWLDERISRLDIDLTHALRTSDAWRDKDDLLKAIPGVGSLTRATLVALRPELGTLTRRQIAALVGVAPFNRDSGKHQGDRVIWGGRAQVRRTLYMAAVSAMRCNPVIRAFYKHLRSQGKPAKVALTACMRKLLVIMNAMLKHHSPWSPELDLQHSC

SEQ ID NO: 381846 - protein, 359 aa, unidentified
MSTTQTSESSAQGILWIGIDVSNASFDAALYPPIVDGQAWELRQIQVRSFGMDEQGATELLKWARAYRSTPGEIRVGMEASGKCSLRLAALLLEISPDVKVSIINPLFVKRFGQSLGVRNKTDRLDARVISRFAAERQPHAWQPPSQVTELLREMSRQRQSIVEAITEHNNRLAECESKLTRQVQSSVIKCLEKQCAKLDRAIAELVAGDSQLRADVALLDSVMGVGQVTAVTVVAELGDLRDFARAVSLSAFTGLSPRRHTSGTSVNGRTVMCKVGNDRIRRVMYMASLSTLRTENRFSKCYHRLRQRGKSHRQALGAVMRKQLLVMRAVLKSNQPYQDAHLPCGKKSAKGETALNAA

SEQ ID NO: 381847 - protein, 338 aa, unidentified
MYYTGIDLHKRTSYITTVDEKGRIVARGNFGNIETEILDHFVSLGTEGQIVIESMSSWFWLYDLLTGNGFEVVVSNPVKTKAIASAKIKNDKLDSHMLAQLLRAGLICTIHVSNLETRKLKELLRHRNRLVQDATRMKNRIHNLLMKNNYQIPVSDLFGLEGLRYLQEIDLPCYHRESLETYLHLYEGLKEQIDPLTMAVHGLAKENVMAKLLMTIPGIGPIVAMYMVAEIEDIRRFPSYRHLSSYAGLVPSLDSSGDKVRTGRITKQGSPHLRTALIEAAHTIPRMKKCRLNIFFRRRIVKSGYRKAIVATAHKILQIGFYVLKNQTPYREEYPVCA

SEQ ID NO: 381848 - protein, 483 aa, unidentified
MKSKPEEKNKGATNHPRQHHWDEMNRKQRREMTRKMQSEDLRLEVMHPDAAGIDIGNESHYASVPPSRDSQPVREFGCTTAELKAMAAWLKQCRIRTVAMQSTGVYWVAVYDILEQAGLEVYLVNARDTKNLPGRKSDVQESQWLMKLHTYGLLRNSFRPPQEIRTMRTYWRQRNDLVQSAGRHILRMQKALTQMNLQLANVLTDISGVTGQAIIKAILAGERDPHKLAEFRNPRVKASEEQIAQSLEGNWQPDLLFVLKQEHEGYEFCQKQMAECDRQLQHYLQQREDRSQGAPLPEEKRKGRLKKKRANKPQFDLRGGLFRMTGTDLTRIDGIDVLTATTVISEAGYDMSKWKTENHFVSWLRLCPDNRISGNRVIGKGRLPTNNPISIALKMAASTLKESKTYLGAQFRRLRTRLGAPIAIKAMAAKLARLVYRMLRYGMKYVDQGAAFYELRHRELQIKRLKAKAEKLGYRVTPIPVAA

SEQ ID NO: 381849 - protein, 379 aa, unidentified
MNEYSKYVGLDVHKETIVVAIATAGRGEAVLYGEIDHTPEALQKLAQKISIPGQRVVFCYEAGPCGYGVYRHLTGRGYDCLVVAPSLIPKKAGQRVKTDRRDALSIARLSRAGELTGVWVPEKEQEAVRDLTRAREDMKAMERHACQRLGAFLLRHSHTYPGKSRWTQAHFRWLEGLRFEYPSQQIVFQEYVDMVKHTQRRVEELEQQMRSALESWSMREVVTALMALRGVKLVTAMTVVAEVGDLTRFASARQLMSYLGLVPSEHSSGGKRKQGGITKSGNGHVRRVLVEAAWCYRFPARKTAVLQRRAEQTTAAVQEIAWKAQKRLCLRYRHLVSRGKRSVEACTAVARELAGFLWAIACEVRQQGSVTLIPPVTAA

SEQ ID NO: 381850 - protein, 579 aa, unidentified
MAKRKFRVKMPKDGKTPCNRPKKPYEVCDAGSAVGRAVLESLGSAQLYKLLQLKNIPDRSKARKKEDRVQLLTEVTTRADLEAIGLEVPAPDSSHKCTGSNLCGELKIRAGYGVRLNEDVGSVDVHEHVLVAGVVTPSGREVERQFPNSAEGLRSLDLLYRHFHVRHVAFESTAEYWLKPLWALEDAGYDVLVANPGQTKATQGDKTDWNDALRIAYALRDGRLKPSILCTPEQYARRKLVRDAKKKVQQGGKALSRLDAMFEMFDAPEWVKKLPKSQRGRGILYQCLALPAEVRVGDFQEILTEGFAKGKGKIDDPAALLRMAAELVVFLYHLGKVPGNRVRFAQHLEEYVMFRRMATELRTEALKSAAGDERLLEDITLLAGMPDVGVNSALSAAIEVVDARYFRRAKSVAKWAGLAPRVNQSGHKKRSTGHIYKGGNKYLRNTCFDVAKVSFAHAGEEGHPIGDFASRLYHSGKKAYKVAVTAGARKFLTLAYHVLTERRPFAEVWPELAAEEAEANRQRKLKELQKRVKGATTSDLLPCVLASLRRQTDSLSAADAAYADEIVALLGSAYPVEIA

SEQ ID NO: 381851 - protein, 392 aa, unidentified
MIYVGIDVASKKHDCYLMSDKQTETKHIRFGNNAFGFQILIDTINDFKERMGDDKIRIGLESTGIYSHNILQHLVKNGFDTMLINPLLTNMERKSSSVRKTKTDKIDAKSICTFLIRNQDFRPYTIKSYHNLSLKSLSRRRISLVKQLTKEKQQLNALVTVMFPEYLDVFCSLYGNASLEILVKYSTPDMLSKARIDALSRLIHKASKGHHGHDTAVKIRALAKNTIGDFRNVFDFEVRFLIKRIRLLQSQIKEYTLKIKEMMIEHCPQILTIPGIGYVTGAIIIGEIGDISRFKSPYQLLAYAGLDPCVYQSGNYDADNVSISKRGSRYLRWAMHIASSIIIHNDFVFNAYYTKKRKEGKHHFVALGHVSKKLIRVIFHILKYDTAFIPKF

SEQ ID NO: 381852 - protein, 344 aa, unidentified
MPVMIGVDPHKASHTAAALDEHGQLLDRQRIPASVDGYRALRGWAAQWPHRCWAVEGAHGIGRALAQRLVGDGEQVVDVPAKLAARVRVLSVGHGRKSDPDDAVSVAVAAQSVPQLRQVGVEDQAVVLHLLTKRRQDLVAARTQTINRLHRLLMDLVPGGARRNLTAKRAAALLSEVTPTSAPAVTRWQLATELVTDIRQLEQRIAAMEAQIKAAVAQSNTSLLGLFGVGPVLAATFLGEVGDIGRFPSRHHFAAHTGTAPLEASSGQVVRHRLSRAGDRKLNYALYMMAMVQVRRPSAGQAYYRRKLAEGKSPREALRCLKRRLSDAVYRCLVADARSPAVNG

SEQ ID NO: 381853 - protein, 349 aa, unidentified
MEVTTIGIDIAKRIFQLHGVNNNGKTVLKKRLMRDQVLIFMSNLPKCLVGIEACGGSNYWARELSKLGHEVKLMAPQFVKPYVKTNKNDEADAEAICEAVARSNMRFVPIKTVEQQDMLSIHRVRARLVKNRTALANEIRGLLLEFGIIIPQGINKIVDKLTEVLDSDQLSGISYQTFSDLKEEYITNDKRVKELENRLKILSSQCSLYKRLQEIPGVGLITGTALIASIGNASCFKNGRQLASWLGLVPRQNSSGGKTKLLGISKRGDVYLRSLLVQGARAILNAKLRYISKKDQIHANCSKFTEWICNLSERCGSNKTVVAIANKLARVIFAVLSSGNAYLEQKVCN

SEQ ID NO: 381854 - protein, 346 aa, unidentified
MGKFITDLSSVTTVGLDLAKHVFQVHGVDASGRVVVAKAIRRNKLLEFFASLPPCLVGLEACGSAHHWARELVKLGHDARMMPPAYVKPYIRRQKNDAADAAAICEAVTRPSMRFVGLRSLENQAALMRHKTREMLVSQRTQLLNGLRGHLTEVGVIAAQGPRHARELAGLIEACDETIPFEVCEALAPLVVQLRTLDEAIARLDRTIAKMAQKDEAARRLMSIPGFGPITASAMAATIQDTSSFAGPREFAAFLGLTPKQNSSGGKQRLGRISKMGNRNLRKLLVVGAHAVLFHRKPHTDPLRMWAKKLIGKKPFKLVAVALANKMARIAFAILRGKTVYRKIAA

SEQ ID NO: 381855 - protein, 406 aa, unidentified
MAAVMIGVDPHKASHTASAIGPAEEPLGGIQVRASASQAGQLLAWAAAWPDRAWAVEGASGLGNLLAQQLVAAGEVVLDIQPKMAARVRLLAAGNTNKNDSNDARSVAVAALRSPDPRQVSAEDHTAVLRVWSKRYRDLGRARTQVACRLHAVLADLVPGGFSREITAGQAATMLKRIRPSGPAARARRELAAEFLADMRRLDAQRRDTRTKLAAAMQASGTTLTGIFGIGPVIAAAILGTVGDTSRFADRDRFAAYNGTAPVEVSSGGRTIHRLSLRGNRRLNHAIHMAAVTQIRYPHSPGRAFFDRKIAEGKTGKEALRALKRQLSDAIYVRLQADAARGITAPQQNGPGGQSGNGSVSSAAGSHPERRLFGQATPGPQLSLRPAAKARRPMPATPIKTSRAPT

SEQ ID NO: 381856 - protein, 416 aa, unidentified
MDTMYERCCGLDIHKKTIEACFRSGKKKTHMSFGTTSAELRKLTMWLVENDCQSVAMESTGSYWKPIFNILELSGTDMKIIVVNARHMKNVPGRKTDVNDAEWIAELLQYGLLRPSFIPDREQRELRELSRYRKSLVGERAREINRLQKMLEGGNIKLTSVVSEVTGYSSRRLLDRLLRNDEPMTEDVISGLVHTSLAGKSKELETALDGLLSERQKELLIKVLDHIDDMSKRIADLDDFCRKQMKKYEDALDKLDEIPGIARRTAETILIETGLDMSRFPTAKHFARWAGLAPGNNESAGKRSSGKTTKGNPTLKSTLIQSAKVAARQKNSFFKARYQKIAAKRGANRASVAVAHSMLIAIYHILKSGERFKDLGEDYYNQFNREKKKNYYLKKLTKLGVNLKEATLSISIQTAT

SEQ ID NO: 381857 - protein, 450 aa, unidentified
MNKGVKKTGKGKKEISFQLVNPMAAGIDVSVSEMVVAIPEGLVEESVRAFGTMTCDLRELCNWLKDCEIETVAMESTGVYWQPLFYMLLSAGFDVCLVNAAHVKNVSGRKTDESDAQWIQKLHSCGLLSGSYLPEDVQRSIRCLTRTRRSYTEEQNKHLNRIQKELESMNIKFHTIINSIAGVSGMAVLQAILDGERNPESFLPYIDRRVKASRDEIVKSLEGNWDPTHLFLLAIHVASYKECQKTIEELDKELEKKLVLLEAKVNHGEVKSLPELQKRRHKNSPQAQVEQHLQNIHGVNVMAIYGLGMTSALEILAETGIDLSKWRTENHFVSWLNLCPNNKKSGGKELSSKVPRRRANPASQAFKSAANALQRSQHWLGDYFRRMKSRGGNKYAILATANKLAKIYYRMIQEKEEFKPINLQEYRTKFNQDKISYLERKLQLLKNQAA

SEQ ID NO: 381858 - protein, 358 aa, unidentified
MADKVTEAAVVGGVDTHKDLHVAAVVDQNNKVLGTQYFATTRQGYRQMLAWMTSFGALKRIGVECTGTYGAGLLRYLQNAGLEVLEVTAPDRMERRKRGKSDTIDAECAAHAAFSGIRTVTPKTRNGMIESLRVLKTCRKTAISARRVALQIIHSNIISAPDELREQLRNMTRMQLIRTLGSWRPDASEYRNVTNVYRISLKSLARRYLELHDEIADLDVMIAAIVDELAPELIKRNAIGYESAAQLLITAGDNPQRLRSESGFAALCGVSPVPVSSGKMNRYRLNRGGDRAANSALHIIAIGRLRTDDKTKEYVARRVAEGHTKMEAIRCLKRYISREVYTLLRNQNRRVNSIPIMA

SEQ ID NO: 381859 - protein, 348 aa, unidentified
MKFYIKQHKYYCGIDLHARSMYICISDQFGNILVHRNIGTDAEYFLRIIKPYKEDIVVAVECIFSWYWLADLCARHNITFVLGHALYMKAIHGGKAKNDKIDSAKINAILRAGTLPRAYVYPEKMRAARDLLRRRTHLVRKRSELMAHVINTYSQYNLPEIAKRLDRKCNHEGIAERLNDPSAQKNIEIDLAMIEHYNSIISPLEWHIKKTARSHDPMMYNLLITIPGVGPILTLVILYEIHDINRFPRVQDFISYSRLVKCAKESAGKRLGTSGSKIGNAHLKWAFSEAAVLFIRCSKERKRYYEKLKRRHGRGKSLSVLAAKLGRAVYYMLKKEKVFNEEKFLRHW

SEQ ID NO: 381860 - protein, 424 aa, unidentified
MKVTFQTCCGVDVHKSFLVATIVKTTGGIEPSYQKKRFSTFNSSILEFKQWLLDNHCHDVCMESTGKYWVPVFNLLEDKINVVIANPKWVKAVKGNKDDTKDSKWIGDLFRLGLVKGSYIPCKKVRILREYTRYRYKLVSCRSSEKNRYQNTLTVCNVALDSVVSDIFGKSSMSIIDYLLEQSGTSINHEEIASKLLRSLKSKEDAVIESVEGYQMTDSQKYRMHLVRAHMDYITAEINDVDKMIENMISSNPDFENAVRFLCTIPGVKRDSAITIISEIGTDMSQFSGSKRLCCWAGLTPGSNESAGKKKSVRITRAGVYLKPALVQCAHAAVKSDKSPYYKKKYESLVKRRGKKRAIIAIARMILTAIYQMLSTGEQWNPSDLYKIDMPVALVEKQKAKAIKQAKKLLQREGILPPDEPLAS

SEQ ID NO: 381861 - protein, 333 aa, unidentified
MSSILRTVGIDISKDWLDAFAAPEGRASRFTNDRTGFRKLIAWIGSGIDRIAYEPSGSFHRNFEDTLLKAGLPLYAINPFQVRSFARSIGRRAKTDAVDARTLATMAMAIEDLRPTEARSEGQRDLTELQQIRDALVRDRTATTNRGRNLRTPVGKRVTKQRLRQIDRQLKLIDAEIRQRIGEEKEMERRAEILTSIPGISDITAAGLIVHLPELGMLTRSRAASLAGLAPVTRESGNWKGYSFIQGGRHRVRTLLYMPAVVAAQHNPDLRRKYEALVARGKPRKVALTAVMRKLLVLANALVQQDRTWTARPPREYSCPAFPAPSPAGSVHG

SEQ ID NO: 381862 - protein, 325 aa, unidentified
MTQISKKQKLDCIGIDVSKDKLDICYINNSKGRYLNTKIGFKKLIKSLPSNKNIIVVLEPTGGYERKVIYALQAAGYNVALANTFKMRNYAKAMGIYAKNDPLDSYVIKSFGEDMYPKDKLQILYKKSTEFKQLENWLTRSRQLVKTITCEKNRYEKSIDKDISKSYLKIIKFLEKELGKIEEKIQNLSESSQLLEKAETFKKINGFGNVCANGLLIYLPELGHVSNKRISSIVGTAPFCRESGKFKGKSKISGGRAKLRGLLYMGVLSATIHNKIIKKFYDRLIKNGKPHNLAMMACMRKMLCILNAMVRNDTQWDDNYRGCSS

SEQ ID NO: 381863 - protein, 428 aa, unidentified
MSGKETVQAEPEFVAFVGIDWADQKHVWCLQKANSRQREAGELEHRPEAVEAWVGELCRRFGYGPIAVAVEQVKGALVYMLRKNECLHLYPVPSTMSASMREALYPSGAKDDPRDADMLLELLVLHRDKLRRLTPDNEATRRVQNLVEERRKLVEEKTAQLNRLTGYLKVYFPQMLEWFAKLDSKLVCDFLERWPSLEELQKVPSAELKKFFRHRRGRHGELTEWRMQGIGQATPAIRDRAVIEAKQTVVQVIAQLLRTLLEGIATLERKIAEAAEVHPDFFIFQSLPGAGAALAPRLLAAFGSQRDRYSSAEEVQKYSGIAPVTERSGKKKWVHFRWACSKFLRQSFHEWAGHSIPQSVWARAYYQRQRERGKEHHAAVRALAFKWIRVVFRCWQDRVAYDETRYLAVLTKRGSHLTSAFVDVAVSM

SEQ ID NO: 381864 - protein, 318 aa, unidentified
MPQTVRLVGLDISKRKVDACIRSLDLQSSMPSTADGRATLIGWLRANEVLLAVMEASGGYEQPWAEALREAGIAVRIVDPKRVRYFAKSAGKLAKNDPIDAAMIARYGETFRDALDQPQEPRNEELDRLMTARAGLLRMQTQLESQGEHQQPRTITAAHRAVLRTLRAQLAKLEAVIAAKIKADPHAARRAEIVESVPGLGAQTAAGLLAWLPELGRISDKAAAALVGIAPYDDDSGEHKGKRIIKGGRRKLRNLLYMPIMGAATQHNPVLKAYYERLRANGKEAKVAFVACMRKLIVILNTMLARDQTWNPPARATA

SEQ ID NO: 381865 - protein, 415 aa, unidentified
MDVVHARCAGLDVHKQTVVACRITPGAGGTPRQEVQTVGTMTADRLALAAWLAAAECTHVAMESTGVYWKPLYNVLEGQCELLLVNAQHIKQVPGRKTDVRDCEWLADLLRHGLLRASFVPERPEREWRALTRYRMSRIRERRAEVNRLPKTLEGGNLKLGDVASDVLGVSGRERLTARVAGTTDAAVLANRARGALRPKLPQVERALAGRSGRHQQFLLARQLAHIDDLDELIAQVSAEIAERLRPVDEALARLDTIPGVGRRTAAALLAELGTDLSRFPTAAHLAAWAAMCPGNHASAGKVRSGKTRKGNKWLRALLIEAAHAAARTKGSYLAAQYRRLAARRGKAKAAVAVGHSIWRIAYYLLLRGTTYQELGANYFDERDRQRVERQLVRRLEQLGHKVTLEPAAPAHPAA

SEQ ID NO: 381866 - protein, 366 aa, unidentified
MKKTSTVRVNGKMIFKGHKLTIGLDLGDRWSNYCVLDEAGEILLEQKLATTPEAVKQTLGRIPRSLIALETGTHSPWLSRLLKELGHEVLVAHAQKVELITKSNRKDDRHDARTLARLARIDPELLGPVRHRSAKAQIHLTVIRARAELVSARTALVNGARGLTKSYGERLPKCGTEQVSRELAAKLSAELREVLEPLLKEIESLNERIKEYDTRMEKIAKESYPQVALLKQVKGVGTQIALTYVLTLDDPQRFAKSREVGCFLGLKPGRRDSGQSQPQMRISKEGDRYLRTMLVQGAHYILGPFGADSDLRRWGLRLAERGGKNAKKRAVVAVARKLAVLLHRLWVSGEVYEPLRNSHKGMRAAA

SEQ ID NO: 381867 - protein, 315 aa, unidentified
MEHLPAAPSFVGIDVSKDRLDVHILPTGQTLAVQRNEKGFEDLVSELRKLAPALIALEATGGLEVTVAAALASANLPVAVVNPRQIRDFARAVGRLAKTDALDAQAIALFAERVRPEPRPLADADSQSLAELVARRRQVVEMIGMETNRLHQARNPRIQRMLRATLKTLTAQLAQLDRDIDDLIKRSSLWRDADDLLTSVPGVGDVTAHTLIADLPELGQLDRRRVAALVGVAPVNRDSGQLRGKRTIAGGRIGVRNTLYMATLSAIQWNPVISTHYHSLVNRGRPKKIALVACMRRLLGILNAIMRTKTPWQCA

SEQ ID NO: 381868 - protein, 334 aa, unidentified
MWHIGIDLHREFVVMAAVNDAGEVMDPVRIACRETQALLDAVRALGAFRAVIEASGTYRWLYDLLRPHGVVLLAHPLRLRAMIQRRSKTDKLDAQLLANLLRINQIPLAYIPPQPYQQLRELTRCRARLGRDQAEVKIKLRALLARQNRESPFRVPFGPRGLAWFGQQDFGPIENLIRDELLARLSHYRRQLTILDEQIARTGGDFPQVQAITDIHGIGLFSALLVVAELGEVERFRTAKQVGAYAGLTARVHQSGSHCYRGSITRQGSPWLRWILVEAAMKAIHKDAALKNFYTRVRKRSSAKIARVAVARKLAEICWKRLRRWEREHARQAA

SEQ ID NO: 381869 - protein, 364 aa, unidentified
MKNHSKENAWKPRPEQTVGVDLGDRFSHYCVLNHDGEVMEEGRIRTSEEGFRQHWEGETRQRVVLETGTHSPWISRLLQSLGHEVIVANARKLRAISQNESKNDRQDAEMLARLGYSDPKLLRPIRHRSVERQRDLNLLRARDTLVRARTMLINAVRGLVKSAGGRLPAASSESFAAKVTAAVPAELVAATQPLLEQITALTAQIRGLDRTIEKLSQRYPEIHILRTVPGVGPVIAAAYVLTLDGVDAVQHSRSVGAFLGLRPRQGQSGDCDPELNISKTGNIYLRRLLVQAAHYVLGRFGPDSALRRWGLKLAGTGNQGAKKRAVVAVARKLAVILHVMWRTGQSYQPFPPAARARAVPDVNP

SEQ ID NO: 381870 - protein, 343 aa, unidentified
MDHFAGLDVSVKETSVCIVDDTGRIVKEVKAASEHEALLQVLGNPAYRFKRIGLEAGPLSQWLFSGLAEAGLPVVCVETRHMQAVLKAQINKTDRNDARGIAQMMRAGLYRPVHVKTLRSQKLRMLLTHRKLLQSKAIAIENDLRGTLRNFGLKVGMVGKMRFEARIKELVESLPDLAELVEPLLIVRRALREQIVVLHRRLLAIVRDDEVCQRLMTTPGVGPVVALTYRATVDVPARFRKSKAVGAVFGLTCARYQSGEIDWSGRISRCGDEMMRVMLYEAAQSMMRSKKWSWLKAWAMQIARRRGMKKAIVALARRLAVIMHRIWVDGTEFRWTREQATAA

SEQ ID NO: 381871 - protein, 385 aa, unidentified
MAPPRMPEAVIGLDVGKSSHWACVATRDGEILLSAPVANREDDLDSLFGRFPDALVVVDQSRNIGALALARARAAGMSAAYLPGLAAHGAARLFAGDAKTDERDAMVIAKTALGIPDALLPVGDPGPTVAAARALAAQRNFLTCENTRSKNRLRSILLESCPAFEALVDLSDGPQLRLMASLGGAWSVADAGPRRAAALTRGAARGKIEALVRSITSSTRPDASVVAAEDRAVRLLARRISENSAEIEAITAEISALLEGDDTYRCLLTVPGIGPKTASELAISIDIEDFPSHDRLASYCGLAPRNRQSGTSISSVTASRQGNKRLKNLLIFSCNCLTRTEGRWGDYYARCRERGMPHGKALKALARKRLKVIYAIMRDRVPYAA

SEQ ID NO: 381872 - protein, 343 aa, unidentified
MEYYVGLDVSLKQTSICVVDQSGSVVREGVVDSDPEAISVYVRSKAPDAVRIGLETGPTSTWLWTELKQLGLPVICIDLRHAKAVLKMQINKSDRNDAIGIARIMQTGWFKEVRVKDIDSHSVRALLASRALLVKIKRDLENHVRGLLKNLGLVIGRAKFNVFAVRAEELIEGRPELIAAIRPLLEARTAVEQQVSELDRKVMKLARHDAQVRRFMTVPGVGPITGLAFKATIDDPARFARSRSVGAYVGLTCRRHASGEVDWSGRISKCGDAMLRSYLFEAAGVLLTRVPKWSAVKAWGVKLVKRNGLRKAKVAVARKLAVILHRMWIDGTEFNWSKKEIAA

SEQ ID NO: 381873 - protein, 429 aa, unidentified
MQNESTPGARGPVFCGVDTHADSHWLCVLDWRGRRVLSRRFPADAAGYEALAGAIAAAGEPACVAMEGTSSYGAGLTRHLASLGMPVREALSPAGTQRRRPGQGKCDEADAERAARAAMSGSKLGTPKSQDGWVDGVRCMLAARSGAVKARTSAINTARSLLTTAPEGLRSRFRGMGGPRLMEELPSVRAEGALGAALGALADLWAAARDAALDMELAIEASLEENCPALLAMYGCGPVSAAKLAVAAGDNPGRLRSEASFAAICGACPIPASSGKTVRHRLNRGGDRQANSALHEIARQRVMRDPETAEYAERARGRGKSDREVMRCLKRYVAREAYRALMRPHEIRRPEDASELVAARRAAKVSQVRAASILGTSEKYISMLERGQRELKPIRRAYEAWVEAGLPLDWDRQAFEAERKMDSKKHLAK

SEQ ID NO: 381874 - protein, 345 aa, unidentified
MKIVGCDFHPSHQQVSIFDTSTGEVQELKLLHVEQAVEFYRGLQEPALIGMEAVGNSRWFEQAVADLGHELWIGDAAQIRASYVRRQKTDRRDAGHILTLLLEKRFPRIWVASETERDQRQLLPHRHRLVQIRTRIKTELQHLALNQGVQKKSALWSVAGMEQLKNLPLKGWSGCRRRDLLRLLEMLEQQVTALDVAVERTARSNANARLLMTQPGVGPVTALAFAVTIGDVSRFPRGKQVASYLGLIPTERSSGTKRRLGAISKQGNVFLRTMLVEAAQSAVRHDETFRREYLHRCHKKPKGVAKVAAARKLAVRLYWMLRTQQPYAQAVHNEGSPGHSVVGAS

SEQ ID NO: 381875 - protein, 356 aa, unidentified
MAILADTIDGVIGVDTHRDTLTAAAVTAIGGLLADATASTDAAGYRQLLGFATSHLPGRRCWAIEGAGSFGAGLATFLLDHGEQVIEVPRRRRSTRRTAAKSDPLDAVHIARDALITQHPAIVRRRGDREALRVLLTTRRNAVTAWTQTVSQLKALIVSAPEELRAELRGRGTKAQITYCAALRERPTRSLEHQMTARALHATARRCQLLRAEINQHQHDLHTLVVAIAPWLLELPGVGPITATQILISWSHAGRWRSEAAFAAQAGTSPIPASSGQTKRYRLNRRGDRQLNHALHTIAIVRMRDDPLTHAYVQRRTAQGKNPREIRRCLKRIIARQLYNLLKHYDRPAIQILHAT

SEQ ID NO: 381876 - protein, 340 aa, unidentified
MDTIGLDLHKRESQLCVLTEAGEIVERRIVTSRERFTVVLGGRPPARILLEASTESEWVARHLETLGHEVIVADPNFAPMYATRRRGVKTDRRDARTLAEACRLGAYRRAHRASDEQRHVRAELAVRDALIRTRTRTVALAKALIRRDGLRLPSGGPAHTEAKLAALPLPPALAAELAPLRALWAPVNTQIAAADARLAHVAAADPVVAQLMTTPGIGPVTAVAFVATLDVVTRFASAHQVEAYLGLTPREYSSGEQQRRGRISKTGNARMRYLLVEAAWRVLRTKDPAAAALRAWAEGIAQRRGRSIAAVALARRLAGILYAMWRDGKDYRAPQPAAVA

SEQ ID NO: 381877 - protein, 331 aa, unidentified
MKFTETIGIDVSKLTLDACIHCQQFLIQVPNTKEGHLKLLSWAIKKTGCSLENILFCFEHTGIYSFNLSRFMTEKKLNYILVPSLEIKRSLGIQRGKNDQIDARKIAQYAYRRRDEITPYQAPDESINKIRQLLSLREKLVKQRSEFMATIKDQANFIEKSKNKLFFSVPNKLIKELTKQIDNVEKEMDIVLEESPAIMDNFKLVTSITGIGRQTALLLIVVTNNFLWFNDHRKLASYAGIAPFPYTSGTSIKGRNKVSPLANKKLKSLLSSCAVSAIRNDPEMKLYFNRRTESGKHKMNTINAVRNKLLSRVFAVVKRKTPFVSLCKHAA

SEQ ID NO: 381878 - protein, 445 aa, unidentified
MHPQAPASPRLVNMNCSPSSAIQTEMKTNDYAAYLALDWGDSHHAFALQMADTQKTEKGQFAARPEAIHDWLKELGSRCSHGRVACAIEAGGDALVSALLEHKWIEIYPVNAAMSARFRKALVPSGAKDDVPDANVLLTLLLRHGDQLKPLQLDSAKTRELAALVLARRGAVDRRSQLGNQLRAVLKGYFPQALALVGDDIHGVMALDFLERWPDLATLQKARAATVQSFYVLHRVRRPELIKSRLELVAQAQPLTQDSAVIGPAVLQVQMLTAMIKTLQRHIARFDESIQERFAAHAESALFRQLPGAGPQLAPRLLVAFGDNRQRYPDATSLQKYAGLAPVKEKSGRQLWVHWRWNAPIFVRQTFVEWAGQTVVYCDWAGAYYARQKRAGKGHHAIIRALAFKWIRVLWRCWHRQEAYDEARYLTALRQRRSPLIQDLDLALS

SEQ ID NO: 381879 - protein, 438 aa, unidentified
MRRKAYGAVHVNDVDVAKVVRGRDGLAVVTGIDVGKRNLFGVCRWPDGGFERPWRAENPGAIGELVTLLQRVGAGRKLVVAMESSGTYGDALRQALADAEIEVQRVSTKASHDYAEVFDGVPSQHDGKDAAVVAELAALGKSAPWPYRPAEVWEQELAYWVDGMVAHRHVLNLWQGRLEGLLGRHWPEATRVLKLSSATLLRVLGHYGSPQALAADPEAAAQLARWGGRFLATEKVHQLLADARASRGVRPGEWERRRLQDFAQQALQARAQGERGQRRLRVLARGQSVLEAQGKVVGVPTACVLWVNTGDPRKFYAAAAYRKALGLNLVERSSGEHRGQLHISKRGSARSRQWLYFAALRLVQKAGVRSWYEAKKARDANAAQSVLVALMRKLALALYRVAVDNKEFDPRRLFARVLSSHAETAPVLAPAKEVSVVH

SEQ ID NO: 381880 - protein, 347 aa, unidentified
MDVFIGFDISLQSTHICVVDNDGNVVREGVAPSEVHDLDQWLSTHSGGWSVKRIVFETGQLSTHFHQGLRQSWPVICIDARHAHGTLKAQRVKTDKHDARGLAQIARTGWYKPTHVKSDEGQALRALIGGRKQLVAMRMDLENHVRGVLKTFGIKLGGVTAAAFDAKVRTALVTKDGLVRATVLTLLDAREELLRQQRTLDKQCGAIARADAVCRRLMTVPGVGIITALTFKAEIDDPLRFKKSRDVGVHIGLTPRRYASGEVDRSGGITKCGNGALRTLLFEASVTMLTRSGKWSRLKAWAVRLAQRSGFKVASTALARKLAVVMHRMWVDGTDFAYGDVPAAQAA

SEQ ID NO: 381881 - protein, 331 aa, unidentified
MDEVRRFVGIDVAKAALDVFIGSAETAFSVANDEVGVRELLRQMKPADFVILEATGGLETPVASALAAAGIAVAIVNPRQVRDFARATGKLAKTDRLDAEVLARFGEAVRPEARPLADEQAQALEALVTRRRQLVEMLTAEKNRRARAPKVLHRSIDEHIRWLEKRLSGFDDELGELIRNTPLWRERDELLRSVPGVGKVLSSTLLAQLPELGMLNRKQIAALAGLAPFNRDSGKLRGSRCIWGGRAQVRRVLYMATVAGVRSNPTIRTFYLRLRTNGKHAKPALIACMRKFLVILNAMLHDKTHWQTPALTSPTSPLSPLLAAVSEHGCC

SEQ ID NO: 381882 - protein, 369 aa, unidentified
MRLYTLKAAPAASAVELKNNNKSSKAKRILVGCDVHLRGYQVARKIDEGAIGVVDNFRSEEALLLYIEKQRQQAEQVVVVYEAGPLGYTLYRKLSATGVLCYVCAPDSTQQRKKRRKNNKIDARNLASKLFNYLNGDPHALPLARVPSEAQEQQRMASRQHDQLVEERKRLGAKGNAMLLSQGIGSWSNWWRPKAWSQLSRVAPQWLLERLQIWVDVLKILDEKISLAKAALARACSGPRPKGVGALSQMQLQSEVLDWSLYRNRRKIACLVGMVPSEWSTGDKESRGSITKVGVPALRRIIVEMVWRMVLFQPQYKPVQKWQEVLKGPNPALKKKAVVAIGRQLMVDLWRLQTGRVTAQDLNLIMVEN

SEQ ID NO: 381883 - protein, 395 aa, unidentified
MKGRYNLMIYIGIDIAKFNHFAAAISSDGEILIEPFKFTNDYDGFYLLLSNLAPLDQNSIIIGLESTAHYGDNLVRFLISKGFKVCVLNPIQTSAMRKNNVRKTKTDKVDTFVIAKTLLMQDSLRFMTLENLDYIELKELGRFRQKLVKQRTRLKIQLTSYLDQVFPELQYFFKSGLHQNSVYALLKEAPTPNAIASMHMTHLAHILEVASHGHFGKEKARELRVLAQKSVGVNDSSLSIQITHTIEQIELLDSQLFHTELEMANLVTCLHSVIMTIPGIGVVNGGIILGEIGDIYRFSEPKKLLAFAGLDPSVHQSGNFQAQRTRMSKRGSRVLRYALMNAAHNVVKNNATFKAYYDTKRAEGRTHYSALGHCAGKLVRVIWKMLTDEVEFNLE

SEQ ID NO: 381884 - protein, 338 aa, unidentified
MKRYPGVDLHRNCFTVCTRTEGGQEALRSWSIHELHRFARAVRSTDEVAVEATGNTRLFCEGLRERGCRLAVVDPRQFEVISRSVKKTDTHDAKVLAEFLAKGLLPEVRMKDGIQARIASLTQTRDKLVKLRTILKNKINNLLAARGILIRKESLASEKGLVGVLRAPVEDLERVELEILVEQIRHLNESIEKVEAVLREQGPKLPGWKNLTSIKGIGDTGASILLSTIGKIEDFADEGKLAAYFGIVPRVSNSNETERSGRITKLGCKLGRTALVQCSLIAMRYSPYLRAYYERIAARRGTGKAIIALARKFLGIIYKTLKNDWVFEDFPNFVLVKT

SEQ ID NO: 381885 - protein, 354 aa, unidentified
MDRYIGLDVHSQSCTVAVMSPTGKRVGLQVVETNGAALKQALRAVSGGKHLCLEEGTQSAWLYELLRNEVDEIVVTIPEKHVGSKDDARDAWLLAESLRTGAIKRRVYKSLGPYSELRAAVRSYGLLRGDVRRAKNRLKAIYRSRGLMPPSNEVFDPKQHLEWSKQLPGDQGRSAETLLAQITSLMALWAGAEERLTEASRPHRMVRVLATAPGIGPIRAAQIVALVVTPHRFRTKRQFWAYCGLAIVMRSSADWTRDRQGHWVRALTAQTRGLNRNRNPLLKEVFKGAAHLVATRMTSHPLHQDYLRLTEAGTKPNLALLTTARRIAAAVLSMWKHEEAYDAEKHRSHMTVPA

SEQ ID NO: 381886 - protein, 335 aa, unidentified
MKKFKLVIGIDISKAKLDVCIIEDPTSKQHKYFIVSNDKKGIASILKEVKKYKIDLTDCLFCFETTGVYTMHLCTELESKNHSYAMVPAIEIKRAKGLVRGKSDKADSRDIAMYAITHAHKLNLTSLPEADLMKLRLLLTEREKLMKSISVFDSTNENESFIDKNILKVVLAQNKKTLTFLKRQLIELEKTIQSIINSNEKIKAQFELAQSVPGVGAQTAINLIVTTRCFSAFKNWRKLACYAGIAPFEYSSGTSIRGKTKVSPMGNKKLKSLLNMAALTAIKRDKQLKDYFERKKEEGKSGMLIMNAIRCKIISRVFATINREKPYVDVLKYYA

SEQ ID NO: 381887 - protein, 462 aa, unidentified
MKKDSNRRKVVKLPSELECVNLNAAGIDIGSGSHFVAIPEGRDEVCVREFKSFTTDLYELADWLKDCNITTIAMESTGIYWIPLFEILEERGFEVRLVNPKHLKNVPGRKSDVLDCQWLQQLHKFGLLLGSFRPTEDICELRAYTRQRDSLVKSTSTHINAMQKALGLMNVQLHNVLSDITGQTGIKIMRAIAAGEKCPKKLAEYRDIRCKNSAEVIEKSLVGNYRAEHLFKLRQELSLYDKFQEMLAECDAAIEICLQGFEEKVDISVNPLAPKQKKKRRKNELYFDARENLYKMTGVDLTMIDGLDSHSVLKLLGEVGLDMKRWPSASHFSSWLGLAPGTKISGGKRLSGKTKPTANRAAEVFRIAAFTLSNSNSALGAFFRRMKTRLGPPKAITATAHKIARLFYTMIRYGIDYKDTGATYYEEQHQKRIIKNMQYKALQMGFSLVPIAAETQNKVEVS

SEQ ID NO: 381888 - protein, 395 aa, unidentified
MFIVGIDVAKRSHEVCMITSDGRTVQRPFSIRNNCTGYNLMLEKIRKHTNIKSQIVFAMESTAHYWLALFTRLRKDGYHVILLNPIQTSAMRDMFIRKIKTDAKDSFIIAELIRFGRYAESNVAQDRLLALKELCRNRFYLVDMAGDLKRKLIALIDRVFPEYEAQFDTIFCKSSVALLKKYPTPQRLSNAHLDKLTELLWNSSNGHFGEWKARELKDLARNSFGVEDCDGAYSTLILLMLDQIQSLSGKADALEKEISRLFQSFDTTVTTIPGVGPIIGAVILSEVGDISRFSSADKLAAYIGVDPSVNQSGEFQAAHAHMSKRGSPYLRRCIWMASQVAVQRDPMFRAYYEKKAAEGLKYMTIIGHVTRKMTAVVFAILRDHKVYEPVLPTAA

SEQ ID NO: 381889 - protein, 342 aa, unidentified
MTVSVLGIDLGKNVCSIVGLDASGAVVLRRRAKRERLIGLAAKLSPCIVAMEACCGAHHLGRIFVAHGHDVRLMSPEYVRPYVKAQKNDDCDAEGIAEAATRPTMRFVELKSQAQLDMQTLHRSRERLVAERTALINQLRAILLERGIVVPKGKRSLEQRLASLPEGEESLSPRMRLLIEDVRAQWLDLDERIAAFDAEFVAFAKRDEDARRLATIPGIGALNATALTAAIGKGQAFAHGRDLSAWLGLVPRQSTTGGKPMLLGISKRGNKYLRKLLIHGARAALPHIAERDTALGRWAKGLLAGVHQNVAVVALANKLARIVWAVLRRGEKFTAKGLPLAA

SEQ ID NO: 381890 - protein, 334 aa, unidentified
MRFVGLDIHWRRTTMCILNAQGKQVKQTTIRGGWEKMLALVADLPKPIAVCYEASCGYGHLHDRLSKLAHRVVVAHPGQLRLIFRAKRKHDRVDAAKLAKLLFLDEVPPVYVPSRQVRSWRQLIEYRRRVIDKRTRSKNGIRTLLRSHGVVGPRGLWTGKGRQWLRQVALPELGGFQRDLLLEELEQFDRQVEGMTRLLNRIGRRHPGVVLVQTIPGVGPRTAETIVAYMDDPSRFRRARQVGAYFGLVPCQDASAAANRLGHITREGPPTARKLLVEATWQGIRQSESIRGYFERIVGGKPERRKIAVVATAHHLLRCMHAMLCTQQAWREAA

SEQ ID NO: 381891 - protein, 347 aa, unidentified
MRFYTKQHKYYCGIDLHTKKMYVCILDSEGKIRLHQNIRTDPESFLHILTPFREDVVVAVECMFTWYWIADLCVQHNIPFVLGHALYMKAIHGGKAKNDKIDSHKIATLLRGGMIPQSYVYPVRMRATRDLLRRRNHFMRKRAELFAHIQNTRNQYNLPDPLGCIAKPQNRKGIVERFDDPSIQKSISANLLMIESYDRLLTQLEHEIIASAKEHDLRSYALLQTIPGVGKILALVILYEIESIDRFPSVQDFVSYSRLVKCTKESNGKIYGTNGNKIGNAHLKWSFSEAAVLFLKGNEPGKKYLQRLAHKHGKAKALSILAHKLGRAVYFMLKNKEAFNPKKFLGL

SEQ ID NO: 381892 - protein, 338 aa, unidentified
MSIVFVGIDLAKNVFALHGVNEAGKPALVKPSVARAKLLELVASLPPCTIGLEACSGAHHWARQFTAHGHTVRLMAPKFVAPYRLSGKQGKNDAADAAAICEAVQRPNMRFVPIKNLAQQGQLGIHRVRQGFIEQRTATINRIRGLLAEFGIVLPLKASTVRREATGCLEDLPGWANTAVGDLLSELHHLDERIGQYDKHIAQMAHEDSRAQQLMRLKGIGETTASAMLAMIGNGHEFKCGRQFAAWLGLAPSQYSSGGKARLGHITKAGDPYMRSLLVLGARAVLNRAKDKTDNLSRWAMALAERRGYWRAIVAIAAKNARMCWAMLARGERFAMPV

SEQ ID NO: 381893 - protein, 372 aa, unidentified
MTKIVVGVDAHTDSHDAAVLDDCGRLLATRTFRADAGGYHDLLGWVQRFGAIASVGVESTGSYAAGLVRHLRAQGLEVLEVNQPHAHSRRRRGKSDPIDAEMAARHVLAGSSVVIAKDTTGIVEAIRQLRVARDGAVKARSAALNALTGLIVTAPEQLRQQLLVRKTTRGRATLCARFRPDRARLHEPVHAAKAALQSLARRVIDLDAEITALDRQLTPPAAKAAPATTARLAVSTGHAGALLVTAGQNVDRLRSEASFAALCGASPLPVSTGRTDRHRLNYGGDRDANRALHMIAVCRLRHCERSRAYAERRTAQGKTKTEIIRCLKRYIAREIYHALVTDLLPPTSRRRPAPTVSITCGAGTIGRTVKTT

SEQ ID NO: 381894 - protein, 371 aa, unidentified
MKVKISYVGLDVHKESITVAIADAGRNSEVRNYGVIGGDLKDVDKLLKNLKKTEREYKFVYEAGPCGYVLYRHLTSKGYECSVVSPAHIPRPKCDRIKTDRRDANNLARLHRSGELTSVYVPLEEDEAIRDLVRAREDAVKAKRTARQQLKAMLLRHGIKHPGKGTWGPKYFEWLADVKMPSRVQQIVFQEYINTVHHTTDRVEGLTKIILEVVPEWCLYEVVKALQVLRGISIIAAVTILSELGDIKRFENPRQLMAYLGLVPTEHSSGQTRKQGGITKTGNSRVRQVMVEASQSYRFPARVSKHLLKRQADQPMKIIDIAWKCQQRLCGRFSKLKARGKHHNIVVTATARELVGFIWAICNKVDIPVRQ

SEQ ID NO: 381895 - protein, 391 aa, unidentified
MTRISVGVDVSKNRSTVCIMDQDGKFIMRPFLVWHSTEELDFLADTLKRLNGEVRVIMESTSIYQYPIALHLKEKGIFISIVNAYEMKQFANIDFRGGKTDKKDSRTIASYGISYWYKLVEWQIPKDTYFNLDLLNRTYMNAKKHRQIILQELQHYIDCAMPGMNKELHSLNLSTKKDFMLDFVEKFWHRDEIVNKTETEFTEVFTAWAKKKGYRPVEGKAAKIYAIAKSCIPYYPANPTVKTILQCIVDKLSGVNRTLVTIVTQMIEEAKKLPEYQIVREMPGVGDPLAARFFGSVGDIRRFKNSKALVAYAGIDSPPDESGDFSSTHRHITKKGSKVFRDTGYEIMMALRAQKRTWEKVRKNPEVYDYMLKKEAEGKPPPKLNELARFN

SEQ ID NO: 381896 - protein, 550 aa, unidentified
MSRHQVLGGDLAGLLGRFADLQRKAHARTGQLARIVVIQEAGLDGFWIHRALVAEGIESYVVDPASIAVSRRHRRAKTDRIDGEALVRTLLAYKRGEPRVCAMVRVPTPDEEDQRRLCRELKTLVGERIRHVNRLKGLFFSQGITDYDPRRPDQRARLDELRTGDGRALPQHLKALTLRELEAIELLDRQIAAVKAERDTLLAAAQTAEVPSKAVRMLVGLKGIGSGFAGALWSEGLFRHFDNRRQVAAYAGLAPTPWKSGRIDHEQGVSKAGNPRLRAILVEMAWLWLRHQPGSALSLWYHDRVRRLDGRLKKVTIVALARLIFRRQLLIPVHHVAGVVEIQHHAIRQGGVAGHSLIDQSIGQMDCIADRGRILQAREGRLGRQSRPDFRQVPAGELERRIRAQRAEVVAVLIPARDGEDAGADHVRDGVLHAIRIAPVGDDARQALGLGQAHDAAVGRQAPAVESEGDLLAGHGWKQERRSCIVRYGGCGTVQSVAGISLSNQILRCFKCLSYIRQPSPAASCIRTVSYSQLLLRWSAASTALSDLRR

SEQ ID NO: 381897 - protein, 461 aa, unidentified
MRKARKVAGRQGKKRVDVTANLEILHPHAAGIDVGNAQHYAAVPVGRDPQPVQIFGSFTADLHRLGQWLRACQIETVVMQATGVYWIALYEVLEGYGFKVYVVNAKHTKTLPGRKTDVCECQWLQKLHTFGLLNNSFLPPEEIRVLRTYLRQRENLVAGAGTCIQQMQKVLTQMNVQLANVLSDLSGKSGLEILKAILSGERDPYRLAALADPRVQASRKEIAQSLEGHWREDLLFVLRQVHDLYFFHLDNIAECDRRIEAHLQTLESKVDLASQPLPQPTSLPRRKHIPQTNLQGELYRIAGVDLTRIDGIQVQTAQVVLSETGVNMTYWEDEHHFASWLGLSPNHQITGGKVIRRGTKKVLNRATTALRLAAQTLHHSQSYLGAKYRRLRAKLGAPKAITAMAHQLARLIYRLLRFGTEYHDKGMEQYQRQYRKNQIECLKRQAAQLNMQLIPNTGVAG

SEQ ID NO: 381898 - protein, 457 aa, unidentified
MNRKRTKSKVDRTMPMVHPNAAAIDVGATIHMAAVSADRTPEPVRSFGTFTTDLHRLVNWFKECGVETVVMESASVYWIPIFELLDARGFTVFLVNARDAKHVPGRKTDVSDAQWLQRLHSYGLLRASFRPKGQIAELRAYVRQRERLLEYAASHIQHMQKALTEMNLQLHHVVADITGTTGLRIMRAILAGERDPKALAHLRDYRCHASAETIEKALTGSYRAEHLFALDQALALFDAYHEKVSACDVRIEAVLKELSISRSRGSGSLPSSRRRTDQTNAMAFDVRAALFALLGKDVPQISGLGPYLSLKLIAECGDDLSAWPSAKHFTSWLCLAPSNKISGGKVLSSRTRRSGSRASALLRLAAVTVGRTDTALGAFYRRLSARIGKAKAVTATARKIAVLFYNAVRHGMEYVDPGASFYETRYRKRVVENLHRRAKAFGFVLHPAEPTPSVAVS

SEQ ID NO: 381899 - protein, 396 aa, unidentified
MTAIWAGIDAGKAHHHCVVIDATGKRLLSRRVANDESELLQLLADVLALGDEVIWGIDLADGGAALVIDLLLSHGQHTLYIPGMAVNRASEGYRGAGKTDAKDAAIIADQARVRRDLHPLRPGDELVTELKILTVHRRDLIEDRTRVINRLRGHLTGIFPALERALDLTNAGPLVLLTGYQTPAAIRRAGARRLESWLRNRKVRGAAQLAQTAVTAADSQHTSVTGEKPTAQLVHTLAKEVMRLNEQVAAVDKLIEARFREHQHAEVITSMPGIGPLLGAEFVAATGGDMTPFGTPDRLAGFAGVAPAPRDSGKISGNLHRPKRYSRSLQRVFYTSALISIRSCDESRRFYDRKRAEGKRHTQAVLALARRRVNVLWALLRDGRCYEAIPPVTVAA

SEQ ID NO: 381900 - protein, 483 aa, unidentified
MDSKQRTKGKSANHRTKKSHWHEMNRQERRELMRKIQSEELTLEVIHPDAAGIDIGNESHYVAVPPTRDDEPVRRFGCTTAEVKAMADWLKQCRIRTVAMQSTGVYWIPVYDILEEAGIEVYLVNARETKNLPGRKSDVQESQWLMKLHTYGLLRNSFRPAQEIRTLRTYWRQRNDLVRAAGRHIQRIQKALTQMNIQLANVLSDVSGMTGQAIVKAILAGERDPYELAALRNWRVKASHEEIARSLEGNWQKDLLFILKQEEDSYEFCQKQIVECDQQLQHLLQQQEDRSQSADLPQETRKERLRKKKRGNTPQFDLRSELFRTSGADLTQIDGIDVTTAMTILSEAGWDMSKWKTEHHFVSWLRLCPDNKISGGKIIGKGRLPTTNRVTTALRMAASTLRVSNSYLGVQFRRLRTKLGAPVAIKAMAAKLARLVYRMLRYGMQFVDRGADFYDAQHRNLQINYLKRKAAAFGLQVIEVPAA

SEQ ID NO: 381901 - protein, 298 aa, unidentified
MWYSGIDQHKAFCLITTYGPEGPRVKPARVACTPLALQQYFAEFPGPHQAVVESTGGWYWLADALAALGVELVLAHATRVKAIAAAKVKTDKVDSDTLALLLRADLMPRAHLIRPDARDPRDLMRTRLRLVEKVVSAQNSIDRLLEKFNRESVADLDELYQLQAACHAAQIHRFQEQISTLERALYSYLIPTADVQRLLWVPGLGKVTAFTIYTEIDDISRFPAERQFFSYCRLVPGAKNSASHTRPRSGSKAGNRYLKLAFRHAGIRAAQYYPESRAFFQAQARKKPIRIERRSPRG

SEQ ID NO: 381902 - protein, 350 aa, unidentified
MRYARVNSQYYCGIDLHSRSMYVSVMNKAGDILFHRNMPNNFDIFKRYVKPFLPDMAIGVESSCYYYWLCDACREAGIPFYLGHAFYMKAVHGGKVKNDRVDSKKIADLLRANLFPLAYHYPKEMRPTRDLLRRRHFFVWKRASAYSHLQVLCAQYGIIDVDTKMVKDKKSRRELIELFSEEELRIMIEKDLEYIDFLDPLIAELERYIRRKARFHNHRDYQLLLTIPGVGDILALIILYETHTVSRFKTVQRYSSYSGVVKCKRTSAGKVVGAKNNNIRNPYLKWAFGDIILVAQRCETRIASLYERMKSKYGLGRAKSLIAHRFAVATYFMLKNRQGFDVDRFVETSR

SEQ ID NO: 381903 - protein, 432 aa, unidentified
MYLIGIDISKYKHDCFIATEVGEIIKDSFSFDNDAKGFDQLLNVLQALDQSQLKKIGLEATGHYGYNLKVFLDQHGFDYMEFNPILVKKLSTGLSLRKTKTDKADARLLSMILLSVDYKTYPVKSYHIQELKSLTRYYKSLVKKRSRELVELTNTLDLIFPEFKPFFQNKFSQTAYFILEHYQTPRRIARMSYQNYEKLHSISKGHFSYAKFLRLKDLAKNTVGSSSDLLIFELESCIRLLRGINQEIKKLDSLLNNWTLKIDSPIFSIKGIGNVSALSLIAEYGNFTSFDSPAQMLSFAGMEPSIIQSGTSNKQGHMVKRGSGYLRDTLMNVAIPFMMHNPVIYDYYLKKKNEGKPHRVALSHVAKKLIRIIFYLVKSNQQFNQSKLVWSFDLVAEVIWLIFFLKNLLLLSRGVLSWNENCSWLLIVSHPC

SEQ ID NO: 381904 - protein, 408 aa, unidentified
MSQNIIFGIDVSSRSSTVCVVIDRVKQGNPFTITNDSFGYQDLLDHLNQYLITPLVVFEATGVYSLSLQAFLEDHHIKYLRLNPLQAKKLMDNNLRHNKTDKLDAYHLALIQFSAPQKLQAPQSREYHELQATSRYYEELTRALIVNKNQLHRNLQSTFPQIEHILSNPSGKIYWTIVSLFPHAQYVLDMNEDQVKQRLLSISGIGRQRAQYLTARLYAFARQAYPYDRKDGITVRAIQRTISNLLSLSNERDQVINYMEKLTKVVNARALTIYLSIPGIARTTALRLIAELGDLRRFNTSAQIDAFVGIDPGRSQSGDKDSRLGITKHGNHIARKILYRVITQMETVRATQPCHITDYYDKKKQSSHSPGYKKIAIASVHKLIRTLFALIKHNQLYDYNIATKNQRL

SEQ ID NO: 381905 - protein, 338 aa, unidentified
MTWYANGKSLVDGDESLRLVWDRGGCIRTVTRNPSGAADMTSVSVPLGTVYVGLDYHQAFVQVCVMDARGKVLSNRRCDNIASEIVRFVARHGVAVQASIEACCGAAALVDELVALGWRVSMAHAGYVHKAKQSPDKTDWSDARLLADLLRVGYLPQVWLPPAGLRQLRHLVRYRHQLAEARRSAKQRVGGLLRSHRVQFAVSRWTKAWVKAVRSCEAFGSHGMWVVNELLDAVEHLNAQLAKAEARLVEITRDDAFVAKLLSLRGVGLVTAATLRSEWGEMSRFRSGKQLSRFCGLSPRNASTGLKQADAGLIKAGNSQLRSILIETAHRLQKFDPR

SEQ ID NO: 381906 - protein, 351 aa, unidentified
MNILAMDLSKSNTVFCLYNKDSAKSRYGKVKTTPQQIHDLIVKYSPDRIVFEVCSAAGWVFDTADGLCAEVQVANPNTQAWRWKNVKNKNDKKDALKLAQLSAMNQLPTVHMPKPQVRQKRALIQYRQTLVSRVVGIKNSIRSILDKQGYSITAGKSGWSKRQVEILERLSLPFERCDIDNLWRGQLYVELEMMRSARKALADVTGKLDELAKSDKNIVLLQTAAGVGPRLAEAIAAFIDEPARFTSGKQVGSYVGLTPRQYQSGSMNRQGKISGQGNKLLRALLVEVSWLGLRHNAWISRTYHRLLRGSPSRKKISITAVARKLLVRCWAMLRDGQPWRDIEAETERQAA

SEQ ID NO: 381907 - protein, 388 aa, unidentified
MTTDSYAAYIGIDWADRKHDIALYDCASGRWQESVIGSRPQDLLDWVNQLRTLYGAGQIAVGLEQKRGPLLYALCQYDNLVLFPINPRTVANYRKAFQPSRAKSDPVDARILVELMQKHPEKLERWVTGCPQIRALRQWVESRRMLVQEKVRLTNRITASLKSYFPQVLDWFEDKDTRLFCDFLQQFPDVKSAQAATSQQLTLFFRSHTVVRRTAITRRIQQIQDAGPPLTPDEAIVMPAQALTLALVALLKVIIQQLTRFNDTIAHLFEALPDAPLFAELPGAGPHLAPRLLVAFGEDRSRFTSAQAFMSYVGIAPVKEESGKKRWVHWRWSCPIFLRQTFVEWVNQARRFSAWSQAFYEQQKQAGKSHQKAIRSLAYKWGRILWRC

SEQ ID NO: 381908 - protein, 400 aa, unidentified
MISVGIDISKGKSTVCILKPYGEIVCRPFEMQHVEKDLEAFHGLLQRLDGEIRIVMEATGIYHLPILTFLHDKGYFVSVVNPFAMKKYAKDNSIRGAKTDKLDSMMIANYGIEKWFKLQKYEGAEETYAELKLLGRRYRYYMDLHVKALQELTHLLDYVMPGIKKMFNSWNEANGKDKLSDFVERFWHFDLITSMSLEKFTEEYIAWAEEKKYHRSRSKAEAVYELASSGIPTLSSGTPSTKMLVQEAVSTLRTVDSSLSLILTRMQTLAKSLPEYSTVREMGGVGDVLVVKLIAEIGDVRRLHSAKALIAWAGIDPPPYESGQFIGSKRKITKRGSSTLRKVGYEVMRVLKSHPAPKDDAVYNYILKKESEGKSKKHAKIAGLNKFLRIYYARVTEIYQ

SEQ ID NO: 381909 - protein, 308 aa, unidentified
MNDTVTLTAVDVSKESLEIKMIHRSFNVPNTKKGIAQLIRKMSPAENPFVVCEATGGYERLLMHTMQDADIPICRANPARIRAFARSEGVRAKTDPIDARMILKFAQEKELRPAVPLEPERKRLAAYLDRRSHLKDEAVREKNRIQNSPEEIHAAINRMLHVLGKEIDLIEEMIRETISSHALISAQVECLKKIKGVGEVTAWVVIAFLGEIDKLTRNQLVALAGVAPFNRDSGIFKGKRKIIGGRAKVRTTLYMATQTASMHNPVIKEYVEGLRARGKPYKCAMVAAMRKMLIHMQSELKKLELEVA

SEQ ID NO: 381910 - protein, 370 aa, unidentified
MLDTTTFVGLDVHARSIKAVSLDVMTGEVRCATFGYDAGAVAEWVRSVDPKARCVYESGVTGFDLQKRLSGLGVDCVVGAVSKMIKPSADRRRKNDRNDAEFLARMLSVGNVVEVWVPDDECEAARDLTRALEDARDDLSRSKQRLSKFLLRHGLVFDERTPTGRRKGNWTRAHWSWIESIRFAEGADNEVLAYYVDAVRRAAEEKARLEGLVEAEARKPRWRRRVDSLRRLKGVDTATAADLVFEAGEFSRFRNARSFAAWVGLTPSEHSSGESDRRGAITKAGNKHLRKALVEAAWHYLTCSGRPKDLAKGQAPDRVARRHAAKGVRRLVERREALLARGVHNNKANVATARELACWVWAVGLMAEEA

SEQ ID NO: 381911 - protein, 310 aa, unidentified
MPPSLFAGIDVSKSRLDIALGDQFFSIEHTEEEISGLVDKLKAASPQLIVLEASGGLETPLVAYLAEEGLPVVVINPRQVRDFAKATGKLAKTDKIDAKTLSRFAEAIKPQQRPVKDAERRQLCDQVTRRRQIVNMIAQEKNRLFRASAQVRSDIEHHIAYLKERLERSDKDIERIIKSSPLYQNTAEILRTVPGIGPVTISNFIAFCPELGSLDRRQIAALIGTAPLNRDSGSKTGVRCVWGGRKAVRNQLYMATVSAIRCNCKIKEFYLRLSAAGKKPKVAITACMRKLLTILNAMVRQRKYWQFNAV

SEQ ID NO: 381912 - protein, 395 aa, unidentified
MFIVGIDVAKRSHEVCMITSDGQTVQRPFSIRNNCTGYNLMLEKIRKHTNIKSQIVFAMESTAHYWLALFTRLRKDGYHVILLNPIQTSAMRDMFIRKIKTDAKDSFIIAELIRFGRYAESNVAQDRLLALKELCRNRFYLVDMAGDLKRKLIALIDRVFPEYEAQFDTIFCKSSVALLKKYPTPQKLSNAHLDKLTELLWNSSNGHFGEWKARELKELARNSFGVEDCDGAYSTLILLMLDQIQSLSGKADALEKEISRLFQSFDTTVTTIPGVGPIIGAVILSEVGDISRFSSADKLAAYIGVDPSVNQSGEFQAAHAHMSKRGSPYLRRCIWMASQVAVQRDPMFRAYYEKKAAEGLKYMTIIGHVTRKMTAVIFAILRDHKVYEPVLPTAA

SEQ ID NO: 381913 - protein, 426 aa, unidentified
MEETDEAVDLVERVCALDIGKAALTVCIRVPHDDKPGHRRQEVREHATTTRSLLELAARLHAAGVTLVAMEATSDYWKPAFYLLEAEGFTCWLLNARHVKNVPGRPKTDKLDAVWLAKVVERGMCRPSFVPPAPIRQLRDLTRYRRTLIRERTREKQRVEKLLEDAQIKLSSVASDIFGVSGRHMLQAMIAGQRDPKVLAQLARASMRAKLRQLEEALAGHFDDHHGFLCQMMLERIDDLSAKIQELTAQIDQQAAPFAAQVAQLDAVTGIGGVCAQELIAELGVDMAVFPTAAHLVAWAKFAPQANTSAGKAKTAATGRGNPWLAATLGEIAVTAGRSNTFLGERYRRIARRRGKQRALVAVGNSVLTIVWHLLADPEARYCDLGPDFYQSHSNRQRQERNLIRQLQQLTGKTVTLTPQPTTPAA

SEQ ID NO: 381914 - protein, 333 aa, unidentified
MLYTGVDLDKSYSYITTMNDKGEIVGQKRLPSDGEIIDFLKGFDESMEVAIEATPSWYWLYDSLEDGGFDVKLSHPLKTKAIAYAKVKTDKVDSATLAHLVRSNLLPLSYVPEKPIRLNRELLRYRASLVKIQTGLKNKIHTVLAKNNVSHGYSDLFGKEGMSFLHSLALPENYKIALEGYLTVLDVVREEIQAASKKVQQLAEEDGDARLLMTIPGMGYYSALLTKSEIGEVKRFRSAKQLCAYAGLVPSTYASGNTRFHGHITKQGSRWLRWILIGAAIHAVKRPGVLRCFYFKIQRKKGGQIAKVATARKLLEWIYHISKMAGPTRRWRR

SEQ ID NO: 381915 - protein, 343 aa, unidentified
MIYVGVDLHLRFCYMTVLDANGKILQQGRVENVDSALQQFFTNLKSSLPEKTGIAVAVEACGFWCAFVDCVEPLVERVVLVHPAKVKAIAHAKLKNDRVDSLTLAQLLRADLLPEAWKADRATRDLREVLRMRVALGRDRTRYKNQIHAVLHLHGQRAPVSDLFGRQGRVWLQALALRPTARQAIDTSLRMVDQLDHELRGVDRQLQKSAQQDPDARCLLSIPGIGAFSAMVLKAEIGDIRRFPDKKSLYNYAGLVPVIRQSADHLRRGGITRSGSPLLRWVMSEAAVTATRYSPAARAWFTRLAQRKHPHVARTALARKLLGAVWALWTQGICFDERIFAAM

SEQ ID NO: 381916 - protein, 338 aa, unidentified
MQLYCGIDLHSNNSMISLIDDNDQLISEKRLNNDLDAIHRHLMPYQDDISGIVVESTYNWYWLVDGLMEKGYPVHLANTLAIQQYNGIKYTNDATDARFLAHLLRLKILPTGYIYPKAMRHVRDLLRRRLLLVQQRTAQFLSLQSMIARHTGQRLTALKVKQLKVDNLPDYFPDQASVFAARHALQLLQQLTRQIDEIEEFVLARCQSETHYTQLTSVTGIGKILGMTILLETGPIERFPAVGNYSSYARCVPTDKISNGKSKGKGNSKNGNRYLAMAFIEAAHYATIWDETIKRYYQRKCKKVPLMVAKKTVANKLTRACYHMLKDGTLFDVKRAFG

SEQ ID NO: 381917 - protein, 345 aa, unidentified
MEHFVGLDVSQEMTHLCVIDGQGKTVWQGRCLSTPEAIAGTIKSKAPDVVRIGLESGPLSTWHWHGLKAMGLPVVCLDARHAQATMSGQVNKTDKNDAFGLAQIVKAGWYREVGVKSLDSHAVRSMLGARAQLVGMRVEVTNQIRGILKTFGIVLSRRTGEPFERLVNEACSDGESMLNHTVRSLLCVYSGLKEQIRHMDRELIDCARKSVVCRQLMTIPGVGVLTALAFVTAIDDPAKFAKSRSVGAYFGLTPRCYQSGEIDQNRGISKCGDSLVRTYLFEAAGTLLTRVEKWSALKVWGLRLAKRNGLKKAKIAVARKLAVIMHRMWVDGAVFRWSADTAEAA

SEQ ID NO: 381918 - protein, 344 aa, unidentified
MDHYAGIDVSLECSSVCVVDANGKIVREAKVASEPEALIDWFSSLGFGLARIGLEAGPLSQWLYAAMKKAGLAVELLETRHVSDAFKAMPVKSDRNDARNIAQLMRLGWFRPVHCKSTTAQEIRAMLTARKLMQSKLLDLENSLRGILRGFGLKVGKTTRTNFAGRIEELVKGHPNLQTIGQALLRARAVLLAEFNGFEKRVRAMSRLHEKARLLMSTPAVGPIVSLTFACAIDDPSRFTSSKQAGPHFGLTPKKYQSGETDYTGRISKHGDASVREALYEAAHIMLTKPIKGCPQLKSWAMRIVRRAGTNKAKVALARKLAVIMLRMLKDNVPFNPAAKAATA

SEQ ID NO: 381919 - protein, 402 aa, unidentified
MNSVGIDISKGRSMVAVMRPFGEVVVSPFEVRHTDSELSELAKLLKSLDGETRVVMEATGNYHTPVAWLLHGAGLYVSVVNAKLVHGYGNNDLRRVKTDRKDAVKLANYGLDRWLTLPRYIPEEDTRLLLKNCYRQYQQYSKVQTMLKNNLISLLDTTFPGMNRLFNTPARADGSEKWVNFAADFWHCGCVCECSEKVFMNKYQRWCRKHGYNFSERKALDIYTEASGHIGVMPMSDTTKLLVAQAVSQLRATSAALAVLKQEMQTLASQLPEYPIVMEMFGVGPALGPQLMAEIGDVRRFHSKKALVAYAGIDAPPNDSGDVTGRHKGMSKVGAPSLRRTLFLVMSVYLQNAPLDEPVYQFMDRKRAEGKPYRVYMMASANKFLRIYYASVKAYLETLERF

SEQ ID NO: 381920 - protein, 345 aa, unidentified
METMYYIGLDVHKKTIDYCVKDGSGRIYAAGSIRATRLELDMWMKTLPRPWTAAMEATIFTAWIYDHLQPHAAAVKVAHPLMLRAIAVAKKKNDRIDAKKIADCLRCDFLPECYMASTEIRERRRTLRYRNLLVRQAVQMKNKIAVLLMEAGVSYNKQKLHKVGYFRELLATNQDIDEGLKPLLRLCRETVVRLGKTESALVRSLQCDSLLVERVERLMTIPAVGPITALTWALEVGDVQRFSSIKKAISYCGLCGAERSSANITMRTPLSKQRNKHLQTVLIEAAKMAPRNSPELAMVYEQEKQKGNANRATLAVARKMVAYLIAVDRRQKGFLVVENKNRTAA

SEQ ID NO: 381921 - protein, 355 aa, unidentified
MERYLGLDVHAASCTLAVISQTGKRLKDLPVETNGQTLVEAVRMIPGRKHLAFEEGLQSAWLYETLSPHVDEIVVAGITESRGPKSDKRDAYGLAEKLRVGDLEKHVFKAPRQFTRLRELSRIHMTLVGDVVRVQARIKSLYRSRSVLVTGVDVYGPRRREEWQKRLCSSAQTRATRLYDHLDFLLEQKKQAEADLLREAKKHSIVRILETAPGFGPIRAARLVPIVVTPYRFRTRRQFWSYCGLGIVTRSSSDWVQTADGDWIKARVPQTRGLSRQYNRVLKSILKGAATTVITQRNKDPIHARYQRLLDGGTKPTLAKLSLARMIAATVLRMWKDEEEYDPGRAGPPTKTREG

SEQ ID NO: 381922 - protein, 341 aa, unidentified
MLADEVDAVIGGDTHRDSHALEMAAPNGGTIGTLAIGNDETGYADAIAWITQNSPGPRVIVGLEGTRSYGVGLTRALQAAGFLVLEVEQPRRADRRRGKSDPIDAHLAALQVLRMPADRKALPRSDGDREALRILLIARREMTTVKTQQINRLRALLLTGDDADRELCRGPMSDAHLQLIARRRGRLDDTKEQQIRRGEARRLALAIRQATSELAANKKQLAELVASFAAGLLDKFGVGPVSAAQAIVSFSHPGRCRNEAAFAALAGVSPLQASSGRTVRHRLNRGGDRQLNRALHDIVKTRWRDCPRNPRLHRCPARRGQATPKSGAASSVTSPVSCSAH

SEQ ID NO: 381923 - protein, 331 aa, unidentified
MNRIIKIGMDVHSKNYTLCAMEPTIGAEDRIFGEVQVAPDYKEVICFIESLKMKLGPDNKYSIECGYEAGCLGYTLYHQLTGAGVKCVILAPTTMLTQQGKRIKTDKRDARLIAQCLCYGGYHPVYIPTGEDDAVKEYLRMRDDHKLALKKLKQQINAFVLRHGHQYSGTKWTIRHVTWLKKLELAPMYRETLDEYLASCEEQEAKIERYDKRIEEIASEARYQENAKKLGCFLGIRTHTALSLIVETGDFKRFAKGNTYAAFLGLAPGERSSSENVNRLGISKAGNTHLRCLLIEAAKGICKGAIGHKSKELRSRQSGQPAEVIEYSGRF

SEQ ID NO: 381924 - protein, 399 aa, unidentified
MITKLSLYVKGFGVAAVRKSAAMKNFAIKLKIMKQQTSATSETLIEGRNIIDFTGKTIYVGIDVHQKDYQVAKVYDGICLGNHRMAANSEALIEHLRSHYQGADFKCVYESCAWGFNLQRKLTAANMECMVVHAADVSTNDKERKRKTDKVDALKLARNLAAGELKAIHVPDETIQKERNLIRYRTRLVGDINRSKNRLKSLLKYQGIEIPAPYLKNNWSRNFMAWVEDQAAKDDLLKDRLLLMLEQMKLLRQLLLKIERKLGVLRKGKYESKAKLAMSVPGIGPLTAMLFLLEVGDVKRFKGFDTLNDFVGFCPDTASSGETDRDKGISARRHKQLRSALVEAAWQAIRIDPAMMNTYQMLTKRMKGSQAIIRIARKLLRRLRAVLLTGIEYQKGVVA

SEQ ID NO: 381925 - protein, 379 aa, unidentified
MNGPIYEQSVIVGVDAHKYSHTAAAMDAWGQEKGRLNFTNDSLPDCLSWLKTLGRREDVIVAVEDANSYGCHLVAALAGQKFAVRSVPAVLTERDRRHSTQRDKSDFRDAKRVAKVILSKYEETLPVIASLATSAELAIATELNLLLSERRDVVKECTAIKNQLHSLLHQYYGDHYADEFSKAFNKQAMIFYQANLAQAISVNSLSASKAGKALIAESILRRIQRLKLLQEQSAVILKQITKIGETSKPVVALHENIHGCGLLTAGAIMAELVTIRRFGGRDKLAKYAGIAPTLKSSGSHHRLYTNPFGNRLLNKALHTIALSQIAIKGDDRGKIYYRKKLKEGKTKLWALRCLKRRLINLVFRILKQTEVGSAETAIS

SEQ ID NO: 381926 - protein, 430 aa, unidentified
MKSITQNKKIEAITERTLVIGIDVGSETHYARAFDHRGIEYSKKPFKFSNDEEGFASLKAWILEYKEAHEKDKVVPGMEPTGHYWFNLGKFLQDNDMKPVLVNPHHVKKSKELDDNSQTKNDRKDPKVIAGLVREGRYMIPYLPDGVYADLRTASNMRYQMQSELTRILNRISRWFNIYFPEYKTVYGNLNAISGMLVLKNAPLPEDILTLGVDGINQIWRDAKVRAVGKKRAQTLVTAAEHSVGSKEGATAARMEIRMLIEDYESRNTRLQEIMSLIDELVKQIPTAEKLLDIKGVGIKTVSGFLAEVGDISRFNNPKELQKLAGLALVENSSGKHKGETTISRRGRKRLRYLLFEVAMSLVAKNREFAELHHYYTTRKQNPLKKMQSLMVVAAKLIRVFYAILTKGVDYDPKKMTEDIKRPMVVLQAA

SEQ ID NO: 381927 - protein, 398 aa, unidentified
MTNQDHRVGGIDSHKDTIHVAVITAIGQPVTDREFPTTVAGYRRAVAWLIEHGPLSAVGVEGTCSYGIGITTELLAAGIRVVEVNRTRAAEKRKQGKTDPLDAYRAARSVLSGEASTEPKNPSIEPLRALTIARRSAVKSQQAAWRQIGSLLVTTRPALRDRFRDLPETKLIATLRDCRPDQIHDVDDADTLYALRTLARRYLALQDEITALEERMLRRATRANPALMAIKGVGPAVGAQLLITAGDNPDRLRTSASFAALCGTAPIPLSSGRTDKHRLSRGGDRQANAALHHIVKVRMSYDQRTRAYRDTRLANGWTTKEVFRALKRAVAREIFHALAGHTLAPDYSDLRPARHAKNLTLTAAAQHLGVWPARIGELELGRRPNDELATRYRAWLAA

SEQ ID NO: 381928 - protein, 398 aa, unidentified
MFSRGIVMLICGIDIGKNHHEACLIDETGRQLAKTVRFANTTAGAQTLMDYFHGCNPNKETIVVGMEATGHYWLSIYSFLFDQGFQVNVINPIQSDAIRNLFLRKTKNDAKDSFLIAETIRIGRFSNTELADEDILSMRQLCRHRMDLVDYISDQKRKIIGVMDRVFPEYQHFFTDMFGKTSTELLTAAVTPEELLAIPTDELCAILKRASRGRFGEAKAEEIRAAAQNSFGITIATAAFAMQLRQLLELIDLLERQLDELDFEIEQRMNKLDTCITTCPGVGKVLGGIILGEIGDISRFSDPKKLVAFVGIDPSVHQSGEFNGTQNKMSKRGSPHLRRAIWLAATVAAFHDPVLSAFYQKKRIEGKHHSTAIGAVARKLTLIIYAVLRDNKPYVPNC

SEQ ID NO: 381929 - protein, 320 aa, unidentified
MAPEVVDVIIGVDVCKERLDLFEYHSERSYWINNDAAAIKAWLDGFAGRLKLALEPTNRYHLGLAEAAYARGHEVYLIDPYRLSHYRAGLGRRAKTDAQDAQLLARFLERELGELRPWEPMIPGQQRFWQLLKRRAALVRCKVQLNQSLIGLGVLQEDAEALVQQCEQMIRKLDRALLKQAQELGWAEWIERCQAIPGVGPLTAMALVASWQRGQFRSVDAFVAFLGLDVRVKQSGRWQGRCKLTKKGDGEVRRLLYNAAMQGRRSSQWAPYYLRLRERGMSSTAALVALSRKLARVSFALLRTDARFVPAAPEIACVST

SEQ ID NO: 381930 - protein, 403 aa, unidentified
MVTSIDRYDEVDVFVGLDVGKGEHHAVALDRTGKRLFDRALPNDERRLRGVLDQLKAHGTILLVVDQPATIGALPVAVAQAGGALVGYLPGLAMRRIADLHPGEAKTDARDAAIIAETARTMPHTLRSIQVADEQVAELSMLCGFDDDLAGQITQVSNRIRGLLTQIHPALERVIGPRLDHPAMLDLLQHYPSPAAMRSAGEKRLGNRLLKNAPRKGRVWAAEIVTALGEQTVVVTGTNAAALVLPRLAEQLAALRRQRGEIAVEVEKIVDAHPLQPVLTSMPGVGVRTAARLLTEVTTKTFPTAGHLAAYAGLAPVTRRSGTSIRGEYPSRRGNKILKRAMFLSAFAALRDPESRAYYDRKIAQGKRHNQALIALARRRSDVLYAMLRDGTLYQPHTTAIAA

SEQ ID NO: 381931 - protein, 339 aa, unidentified
MQVTTIGVDLAKNIFQVHGITKDDEVAFNRPLRRAQLLSFFSKLEPCLIGMEACSSAHHWARELTKFGHDVRLIPPIYVKPYVKRGKSDAIDAEAICEAVTRPTMRFVAIKTVEQQSLLSVHRARSLLVRQRTQLINGLRGMVAEFGVYIARGLARVISFSEDILAGEVLDLPDIANDVIHNLCEQLTALHTRLRWYEERLKQIAKEDARVRLLRTIPGVGAVTASAIIASIGDGHQFSNGREFAAWLGLTPANKSSGGKEKLGHITKMGDQYLRSLLVVGMTSLVRQTKSHPERASKWLISLLERKPARLATVAMANKTARIVWTVLTRNQPYTPHKA

SEQ ID NO: 381932 - protein, 349 aa, unidentified
MISIHAISRLPWPGKEPLSCLIERRLDHESGEAHAFYRNLQSSHEPVLVGIEATGPIHWFERLLAELGHELWIGDSAKIRAQEVRKQKTDERDAALILDLLLAKRFPKIWVPTPAERDLRQLLWHRHKLVRLRTMMGNQLHFLAMSQGLCRKGKLFTKKGRAELVSLGLAPWARRRREELLQLLDQLDSPIAELDRAVLEEAKRRDDAVLLMTHPGIGPVTSLAFVLAVGPVTRFHRSRKLVSYFGLNPTEESSGGRRRLGAISKQGNTMVRWLLIETVHHAVRQDPELKQDYQRLKFRRGHAVAKVAIARKLAVRMYWMLRSGADYARLVRRQGSPGATLVDASPSLG

SEQ ID NO: 381933 - protein, 411 aa, unidentified
MLYVGDDWSEEHHDVELQDETGRKLAARRLPEGAAGIARLHELIAAHLEQDGDPGQVVVAIETDRGLWVQALTAAGYRVYGLNPKQVARFKERYNLSGAKSDAADAHALADMVRAERHQLRPVAADTADAQAIKVVARAHQTLIWERTRHTLRLRSALREFFPAALVAYAGLDLTGADTLELLARAPGPQAAAKLTAAQISAALKRARRHDVPARTQAVKDALRAPQLAQPAAITAAYAAAVQAAAAVLTTLNEQITRLEAQVEAHFLQHPDAGIYLSQPGIGPVNGARELGEFGDAPGRYASAKARKNYAGSSPVTRASGRSKVVLARFIRNTRLADALQSQALSALTASPGARGYYDKQRARGIGHNAALRHLSNRLVGILHGCLKTGTRYDETTAWPGAVAHAEPLAA

SEQ ID NO: 381934 - protein, 331 aa, unidentified
MFKAPVVVCPEPAGAVEVFVGVDVSQAHLDVALRPSGETWHVAHDEPGIAALGARLRDLRPALVVLEATGGVEVPLVGALAAAGLPVAVVNPRQIRDFARATGKLAKTDRLDAVALARFAEAVRPEPRPIPDAAARALAALLARRRQVLAMLVAERSRRRVATPTLRLDLDEHIAWLAARLERLEGELAAAVRASPVWRAREDLLRSVKGVGPVLATTLLAELPELGRLDRKRIAALVGVAPFNRDSGTLRGRRTVWGGRAAVRAALYMATLSAAHTNPVLQAFYARLVAAGKAKKVALTACMRKLLVILNAMLRDGAPWLAPRAARPAAA

SEQ ID NO: 381935 - protein, 331 aa, unidentified
MEEVKRFVGIDVAKVALDVFIGSAGGAFSVANDEVGIRELLRQMKPADFVIVEATGGLETPVASALAAAGIAVAIVNPRQVRDFARATGKLAKTDRLDAEVLARFGEAIRPEARPLADEQAQALEALVTRRRQLVEMLTAEKNRRARAPKVLHRSIDEHIRWLEKRLSEFDDELGELIRHTPLWRERDELLRSVPGVGKVLSSTLLAQLPELGMLNRKQIAALAGLAPFNRDSGNMRGSRSIWGGRAQVRRVLYMATVAGVRSNPTIRTFYLRLRTNGKQAKPALTACMRKFLVILNAMLHNKTRWQTPAPTFLTSSLSPLLGAVSEHGCC

SEQ ID NO: 381936 - protein, 342 aa, unidentified
MEIVYVGLDLGSSNFQQVALNQHGVSRVNRDFSTSEANLVRAFSDLKGEIHVHLEAGELAPWAASVIAPLVTRVVCSHPKDNAWIAKDADKCDRVDAFKLAELLRLNRFKEVHYAPDQPRRNFKQLVQHYDELTAQQARLKTKLKARLRMQGVIVTGERLFSATGRKEVLTRVAARDLRIAITQLYSVLDQSVEAQTKARWLMLRAAQAFPEIKLFRTAPGVGPIGACRFSAYIHTPSRFSTTRKLWKYCRLSVSHRSSNGKPLRRPRLDRSGCGRLKDVSRKAFEAALRRRDNNGFKRAYQRALETTHDKTHARLTVQRKIVSTLRAMWLNQTPFGDELMR

SEQ ID NO: 381937 - protein, 452 aa, unidentified
MAKRSGLTRGDRRRNDRIEALRAVVTSDLAILAVDLGEDKQVAALMDHDGRVLGRRTVQAKSHALAGLLAWAGGQAVRHGFAGVVVGCEPTGHRWRAVMALADDAGMGFVCVQSLRVHLAREADDYTRDKTDHKDAVLIGKLISRLDCYLPERAEADWARLRHLGQRRLRLVSEVIACGQQILDLLSCCWPAALGCAAKPLESTTWLACLAATMDRCHGDPARLARLGRDGFFAAARGQLPRFGARRLSHKVAGRFFDALADRAGVPAQRRGALERVHFLVDDWRSALARLSDVEQRMVGVLDAMGLTGLVTSIPGLSAVGAAVILAETGDLSRFASARSVVKHAGLNPAENTSATFRGVTRVSHRGRPALRLAAWRATWGALPHNRVLGAKYTHLTRRDRDRLAPGQARAACAATLLRWLHAIVTRRQPFNPDIAAGLVRTHQPAPAAAAA

SEQ ID NO: 381938 - protein, 429 aa, unidentified
MNYNTQNAKITSITEKSLIVGIDVGSETHYARAFSWRNYEYSKKPFAFSNDEDGFASFKAWMDDIAEKHEMEKVIPGMEPTGHYWLNLGAYLQGQGMRPVHVNPHHVKKSKELDDNNPNKNDRKDPKTIAGLVNEGRFSYPYIPTGIYAEIRNLSNLRIQTQEEITRIKNRIARWFSIYFPEIKDVYRNPDAVSGLMVIKQAPLPCDIKGLGVDGVNKIWRDARLKGAGIKRAKTLVTAAEHSIGNTEAPRSARKEIRNLLNDYEIYKSRMDELMEEIEELLSEIPYIDKLMGISGIGIKTVSCFIAEVGDIERFDNPKQVQKLAGYGIVADSSGKHKGESRISHRGRKRLRYALYEAAVSVIGKNKEFKEIHHYYRTREKNPLKKMQSVIAVACKLIRIFYAILTKGIDYDGQKMLRDIVRPGMQSAA

SEQ ID NO: 381939 - protein, 332 aa, unidentified
MSEVVVGLDVHLKDTQVTVMKNDLVGEIVKRERVGTSKAELRECLASVPKGSRVALESVGFCWPWIDFLEGLGYEVLLANPVKVKLRAEDIKNDRVDSKTLAELLRMNWLPTCYVPPAELRWLRSLLRHRAYRTRLSVSVRNRSRSEFRKRDIRLDVDLGTLKGRKAAGELDVFEVSQNMELLDVIERQSKEIERLLWKKYGKIKPVQLLMSIPGIGFLSALTLYAEICDIKRFSSAEKLAHYAGLVPRVCQSGEHLRVGRETKGCDKWLKWIFIEAAWSFIRFCPESHLTRAYEDACQRKRDKTKAIKIVARKLVNVVWAVWTFEKVFTVK

SEQ ID NO: 381940 - protein, 348 aa, unidentified
MRFYTGQHRYYCGVDLHARTLYLCILDAHGKVRLHRRLRCERESFLQAIEPYRSDLVVGVECIFCWYWLADLCAREEIPFVLGHALYMKAIHGAKAKNDRIDSRKVAVLLRGGAFPEAYVYPAQMRATRDLLRRRLFFVRKRGELLAHIRNTFHQYNLPRPSGQLLYKKNREGLARAFDDPVLRSMLEADLALAERYDTVIRELERNVLAQAKVQDRDTLDRLQTIPGVGTILALTLLYEIHDIRRFSSVQRFSSYCRLVKTEHKSAGKRTGSGGSKIGNAHLKWAFSEAAVLFLRHNPRGQAHLKRLTRRHGKGRALSILAARLGRATYFMLKNNQNFDTERFYART

SEQ ID NO: 381941 - protein, 402 aa, unidentified
MNAVGIDVSKGKSMVAIMRPFGEIVSAPFEIKHTASDINSLVELINSVEGESRIVMEHTGRYYEALAHQLSEANLFVSAINPKLIKDFDNDSLRKVKSDKADAIKIARYALDKWQNLKQYNVMDELRNQLKTMNRQFGFYMKHKTAMKNNLIGILDQTYPGVNTYFDSPARSDGSQKWGDFASTYWHVDCVRKMSLNAFIVHYQNWCKRKKYNFSQSKAEEIYGKAKELVPVLPKDDITKLIIKQAVNQLNSASTTVESLRTLMNETASKLPEYPIVMAMKGVGASLGPQLMAEIGDVSRFTHKGAITAFAGVDPGVNESGSYEQKSVPTSKRGSSDLRKTLFQVMDVLIKTHPQDDPVYQFLDKKRAQGKPYYVYMTAGANKFLRIYYGRVKEYLSSLPES

SEQ ID NO: 381942 - protein, 433 aa, unidentified
MDIVYPRVAGIDVHKKVVWVAVRLPGEAPGERKVIIKRFKTFWRPLQKMAAWLADLGVTDAAMESTGVYWCPVYHALAGAGIEVCVCNAAHMRNVPGRKRDIADCQWIAELHEYGLLRPSFIPAAEVAALRARTRYRKRLIEQRTAESQRLAKVLEDAGIKIDSVASRLLGVSGRAMIEALIAGERNPGRLADLAKGVLRRKADDLQMACDGRFTGGHGQMCRLHLDAYDHLTVKIAEMDALIAQAVAPFAAVIARLMTIPGIGQRTAEVIVAETGGDMTRFATSARLAAWAGLAPGDNESAGKRKYAAARPGNRYLRAAMTESAWATARTRTRPGARFRRLARRFGKGHEKKAAIAVAHTLICIAWAVMARGQDYADAGEDYYDQRDQRNREHLIRHHQQALARLGCQVTLVPPGDGSPPPDTASPHPGQAA

SEQ ID NO: 381943 - protein, 320 aa, unidentified
MSALSVTVGIDVAKAHVDVCVLGTHSDVQRFANDVDGHCALAAALQSMDVGLVVMEATGGYEAALACALQAVGLHVAVVNPRHARDFARSMGRLAKTDAVDARMLAELAAVLMRRDDLARFLRPVADERQQWLAALVTRRRQLLTMLNSERQRLQITPRKLHPSIEAIVAAIKAQLDDLERQMVGHVREHFGELDGLLQSTNGIGPVASATLIAQLPELGRLNRREIAALAGVAPVANDSGNRKGRRRVQGGRFEIRRVLYMATLTAARYNPVIRAFYERLRAAGKLPKVALVACMRKLLTMLNAMVRTGKPWDASLHRA

SEQ ID NO: 381944 - protein, 346 aa, unidentified
MMLIGCDYHPSWQQICWLDTATGETGEKKLEHASGEAERFYRQLPAPALIGMESTGNCQWFVELAATLGHDLWIGDAAKIRACEVRAQKHDRRDAALILKLLLEGRFPRIWTPSGEEKDLRQLLIHRYKLVRIRAQVKNELQHLAMNQGVTKKRKLWSKAGEKVLRELPLAPWAGRRREDLFKVREMLNGQIDLLDQAVVEAAEKNEKARLLMTQPGVGPITSMAFVLTMGDVHRFQRGKQVASYLGLIPREYSSGEHQRYGSISKQGNRFMRMLLVEAAQCAVRYDPQMRSEYLHRCHRKAKGVAKVAAARKLAIRLYWMLRTNTGYPEVVRVESSSRVPLVSAS

SEQ ID NO: 381945 - protein, 334 aa, unidentified
MEHCGIDVATKSSSICVTDSRGAILLERVTTTDEAGLRGVLRGRRRMRCVLEAGPYAEWISRIVEGLGHQAVVIDARKARGVIRTKKKTDKLDARNLARMSRTGWYTAVHRKSAPARAMRTFLQARQGLVKTALAQGSRIRGLLKAHGLKLGEVAESQFAVTVRRLSLQKGSQLWEMLEPLVLVRQQALRAAEQMRRQLLHQAKTEPIQHRLMSVPGVGPLTAAAYVATIDDPRRFRSSDQVAAYVGLVPSVNQSGESEVHGHITRDGDDLLRGYLVEAAHVLLTRKRGSCRLKRWGLKLAKKKGHGKARVAVARKIAALLHHLWITGELYRAA

SEQ ID NO: 381946 - protein, 423 aa, unidentified
MKPVCTQPFTAYVGIDWADTKHDICLQAAGNEQREFDCIAHQVARIDEWARSLQQRFGGPIAIAIELAKGPIVYALQKYDFFVLFPINPLTLAKYREAFTPSRAKDDPSDAELALDLLMRHSERFAPLQPQSVAMRTLVSLTERRRVLVNDKIRLTNRLTHTLKQYYPQALDWFEQRDTVLFCDFITRWPTLLQAKRARQASIQAFFHAHNGRRPQVIAARLEAIKAAVPLTQDAGVIVPCRLHAMVLVEQLRVTLQSIDQFDREIAELAPTLPDYCLFQGLPGAGPHLAPRLLVAFGEDRQRFQRADELQKYAGIAPVTERSGKKSWVHWRWQCPTFLRQTFVEWAGQTINKSFWAGAYYRQQREKGSTYQAAVRALAFKWMRILYRCWKARTPYDETKYLNALKKRGSPLLKNFILNAEIA

SEQ ID NO: 381947 - protein, 461 aa, unidentified
MRIIGIDLAVKSAHKAVIADETGRFVSKVIEFATDVRDLEQLLIQARRQNDQERVKVVMEPTGMAWFPIAAYFARQPNVVSYLVNTQQVADLRRFYKRHAKSDRIDCRLLARLPLINGENIHELVLPSAQSLACQRGCRQLDRLEEEMTALKNRIRAIDRFVWPGLDELVFRDPQAAATRWFRKHWYQPIQVLTTGEERLRQAWRQSGIDPEDPGEWVSALVSLAGRVLALYGTDSRFVDFEQLQSKVLREQAQLVYLEEVSHTLRLKTVRKLYRHIHPSRNLETIKGVGQDGAAVYASGIDNPARFANHRLFRGWHGLVPDSRQSGGSEAKGLHITKAGPDLIKKYAYLDAEVARQWDPQLAALYYDQMVHKGKHHIQAVCTCATHLLDRVLVVLREDKPYELRDVDGRPVSIKQAREIIAERYQVPKEIRERNNKLHRQQRTQRSAEKNEQKKESRRVE

SEQ ID NO: 381948 - protein, 285 aa, unidentified
MKNFFIGIDYSKLKFDVAIYSAQTKRIIATQFFENQENAFQEFTTWVKSFCGKNKNNLLFCGEDTGLYSLSLSIYLTEQKYFVWQESALKTFKSQGLKREKTDAVDAAFLAEYAYRYEDKAVRYELLSPVLDEIQVLLKYRDRLTKQKVAIEISCKEIKSVKQKNPSLSFMCEDTQSHIVELNKSITECEKRIVKLIKSDKELNDNYELICSIKGISLINAVTVLSLTNNFTLFTDPRKYACYCGVVPFKYSSGTSILGRTKISKICCTRILKNLCSRWSARNSY

SEQ ID NO: 381949 - protein, 324 aa, unidentified
MYLGLDVSKNTLDCCLNKDGFFYACKISNNEKGFQKLRAWLDGHGCDETLHCCCEATGNYYEAAAEYLAAHYKMSVENPRKIKAYAVSELKRSKNDKQDAKTIAEFCEEKSRKLKVWKPKNQTEKELQSITRYIARLKQQKASETVKRQTASDNIKDLIDETIDYLGRKIKEAEGRLKTYINQNPELKQKAANLTTIPGIGIQTAAIIMAALSGNNDFKTAKQFTAYLGLDPAEYKSGTSVKGKDRISKVGDCTTRAALFSPALVAYRIGTFPRLVANMRQNSKHIMKILTAIMRKLAVVAYTLHKTDTTFEKQRHTRIRQKAA

SEQ ID NO: 381950 - protein, 451 aa, unidentified
MSKDKEKKKKKKAIHGLPVLQPYAAGVDIGDTKHDIAINDGQGGHIVRIFKSFTADIEEAVSWLKEEGITTVAMESTGVYYLPFYIMLEEAGIEPYLVNARHVKNVTGRKKDDTDAMWIQRLHSCGLLQNCFQPDNDFRTLRTYVRERKGLITRGSDEVRRMQKALELMNIKIHTVISDILGKTGIQIIEAILNGNYDPVALSKLRDPRIKATEQEIIKSLEGIWKEEYLFMLKQAYNAYLFQQQQIKECDQKIHEQLLKQIGQANQGDITVDPQIVKKKGKPKKNQFDFPVAPLLHKITGIDLCKIPSINEVSALEFISETGIDTRKWKNTKHFDAWLNVVPNTKITGGKIISSRMMKKKNKAGQTLRMCASCLYNNKTPLGDYYRRMKAKYGGKGASLAAAHKLARIIFTMLEKKEEFNLSILLESQKKHRETRIKQLEKQLAKLRRVA

SEQ ID NO: 381951 - protein, 322 aa, unidentified
MSGTGMSAGTFAGIDVSKERLDVGLWPSGETFHESNDLAGRERLARRLAELKPVLVVLESTGRLEVPIALELGERGVPYRIVNPRQVREFARAMGTLAKTDRIDALMLARFAQSAGLAPKALPDAARRELRALVMRRAQLVETRVAEENRLQGETVAKVRTSLKASIAWLERQIAQLDRELDRTIRGNPAFAALSDTLETVPGVGPNTVRMIAAALPELGTLTRQKISALVGIAPLNHDSGKAQGRRFCWGGRVEVRCALYMAALTATRYNPVIRALYARLRAAGKPAKVALVACMRKLITILNAMVRDHTPWRQTSPAATA

SEQ ID NO: 381952 - protein, 351 aa, unidentified
MMIIGTDYHPSFQQIAFLIEETGEYDEQRLNHEGGEAERFYRDLKRKGIRVRVGMEATGYSRWFERLLAELDFELWIGDPAEIEAKRVKKRKTDREDAKLLLRLMREDRFPQIWVPSPENRDLRQLLWHRHRMVQMRTRIMNQLQALAMNEGKHWKSKLWSKPGRAEFEKLALGPWASRRRRELLELLDRLNPSIEELTTAVQQEVNKRPEALRLMTHPGVGPITALAYVLIIGTPERFTRGKQIGTYVGMIPTEDSSADKQRLGHISKQGSSLLRYLLVEAAQAAARFNPHWRRRYIHLAMRRHRSIAKVAMGRRMAVRLYWMWRNGCEYSPSFEFGSYAGQLGTGHGGK

SEQ ID NO: 381953 - protein, 459 aa, unidentified
MQTFYLGIDASKGYADFIILNIHKKVVLESFQLDDTFDGHCLLYELLMNFLTDHPDSNICAALESTGGYENNWYNALLEFQGTLNLQTARLNPLGVHHNSKAGLKRNVTDKISAQNVAEYMIAHPEKVSYQSQDQLASLRKQWGFIKMLTKQCTQILNQLGSLLYSANPEILTYCKDGVPAWVLKLLVKYPTAANLARAKVCLISQIPFVSTTKAEALVLNAKRSVASAVDEVTQQLVAATVKQILHLKETIKIQTAIMAKACAVPEVDLLKTFIGISDASAIGLILNIQSVKRFKTVKKLAAFFGIHPKLKISGDGISAVRMSKEGRAEPRQILYMVAMVAITHNPLIREIYEKHVSQGMEKMAAIGLCMHKILRIAYGMLKNNRPFDPEIDRRNSQKPTTHRKQRENKTRRYQDYDSKAPISRRQKAKRMEQRQSQSDNGAAVRDLSPRSIPDVSLP

SEQ ID NO: 381954 - protein, 391 aa, unidentified
MNYIGIDVAKDKHDCFIINSEGEVLYDVFSIQNDLGGFEDLYRKIKSVCKDPNNIKVGLEATGHYSYNLLGFLLDKGLPTYVINPLHTNLYRKSLTLRKTKTDKVDARTIASMLMSDVDLKPYSQTLYHNSELKSLTRYRFDQVSARSKLKQSVSRLVNILFPELEKLVSSLHGKSVYALLSEFPGASYIAAANLTHLTNLLEKNSNGHYGKDTAELIRKAARCSIGSVMPAKSLELKHTISMIRMMDDEIAEIEAEIKKIMDKLNPPLLTIPGIGLKMGAMILAEIGDFSAFSSADKVLAYAGCSPTTYQSGQLTSTHAKMEKRGSKYLRYALLNVVKKVCRWNSTFKAYLAKKKAEGKHPTSAAVHTAKKLMRLIYHLQITGEAFVPAP

SEQ ID NO: 381955 - protein, 359 aa, unidentified
MNDGSKQQPKVTAGLDIGDKYSYLCLIDQESGQVIEEGRLRTTPEAFRRRFASEQPPMRIAIEAGTHSPWASRVLEGCGHEILVANARKLRLIYSNKRKTDEVDAENLARLARLDPKLLYPLKHRGEESQAHMAIVRSREALVSTRTQLVNHVRGAVKSFGARLPKCPARSFHKRASEHIPEALWPALNPILETIGSLTERIRDYERKLEAVSEEHYPETKLLRQVEGIGSLTALTFVLTLEDPRRFERSRSVGAYLGLVPASDRSGERDPQKRISKEGDEMLRKLLVSGAHYVLGPFGSDSDLRRHGEKIASRGGKNSKKRAVVAVARKLAVLLHSLWVSGEVYEPLRNTHRCGGQAA

SEQ ID NO: 381956 - protein, 420 aa, unidentified
MGRLKIVYPVCCGMDVHRDFLIACIAATNAQGVTEYQSRRFSTYTGSLRELRDWLLANDCKDVCMESTGKYWFPVHNILEESCHVVVSHPKFVKAIKGKKTDKKDAQWIADLFKHDLVRGSFIPPKDIRQLRDLCRYWVKLSSYMTGEKNRAQNCLTVSNFKLDDVFSNVFGKSASAITTQLLEHPGEQFDVAPFVDGRCKTPIAQIQEAVDGIFTYEQAEKLKIIRGHMDSLERHKAELESLILEIAQNYLPQIELLLTVPGIHDAFTAIRILAEIGADMTVFDTSKHLCSWAGLTPQNAESAGKKKTTRIGKSGAYLKPLLIQVALAASRGEKHPEIYGKKQALQKRRGKKKAIVAIARRLLTAIYHIQSKNEPYNPAAYIQEDKNPMARQISQEKAFEMLARMGFIVSNPSPLSSSG

SEQ ID NO: 381957 - protein, 337 aa, unidentified
MEQQQYVGIDLHRRRSVIVRGDEHGEHSAPVRIDNDAAALAAEVTKAGEHPEVVLEATYGWYWAVDVLQELGATVHLAHPLGLNWGHRRRKDDVADAIDLVDMLRLGRLPEAWIAPPACRELRELVRYRAKLVCLRSGLKAQVHAVLAKEGVHVPVSDLFGVAGQRLLDEVSLGRAYTIRVESLRDLIEVYDREVAMADREVRAGLAGHPGWQVVQAIPGVGPVLGAVFVAEIDDVQRFPTARHLCSWAGLTPSHRESDTTVVKGHITKQGSRLVRWAAVEAAQKTGDFLKSDYRRIAERRNNRKIARVAVARKIVTLVYYGLRDGHIRCLDPEAAA

SEQ ID NO: 381958 - protein, 361 aa, unidentified
MSESMTLVGLDVHKAQTVAALLAPATGELSVQRLRGEPERVVPVFLEELDRPVRAVYEAGPTGFVLARVAEQRGLDIAVVAPGSIPRASGDRVKTDRRDAQRLVRLLAAGELSFAFVPSETDERFRDVVRCVEDARKDLMRSRHRLSKFLLRRGVRFPCKAWTQPHEQWLLTLRFDDALSRATFVDYLSAVQALAQRRRALIWVLEEAVPNSSHARVVERLRCFRGIDTLTAAGLCAEVGDFRRFAKPALLSGFLGVVPSEYTSDDKRVQGQITKAGPANARRLLVEAAHHYCHKPAVGLGLAARQDGQDPRVVQIAWRAQRRLHERWIHLGQRRGKLAGTVAIACARELAAFCWEAATLD

SEQ ID NO: 381959 - protein, 409 aa, unidentified
MLYVGIDWASDHHDVCLTNDSAQTLAAFRIAHGSEGFERLHRVIKEHQPEPQQVLVALETTRGLLVHDLLRSGYQVYAINPKAVSRYKDRHVVSKAKTDSLDASCLAHLLRTDRHRFKPLVLLPEDYRLLDRLCLDLRKLVDDRTRVVNQINDCLKEFYPQALALFYKIDCAVSITFLKTFSDPNTLLATTKGRFRAFLKKQNYPYLEKTDQLYTKIHAPAPQADAVIVQTGKVRLEALLGQFRAVREHQKVYEQKIRAVLRKLPESKPISTLPGLGNRLVPELVAILGPRQFHRRFDSARALSNLAGCSPITQASGKWKTVRMRTACVKPLRRTFRHWSFASLTCSKWAWAYYQYRRSQHHVHETILRSLAQKWTKILFAVWATGQPYDEQLHIERLKRNQVAWALSL

SEQ ID NO: 381960 - protein, 345 aa, unidentified
MKHYVGLDVSMKKTSLCIVNEQGKIVHESEVKTDPHTLSDAIEKTGLKIELIGFESGSLGHYLTQGFKERALPAVCMDARKMSAILSIRVNKTDKNDARGIADALRTGMFTRVHEKPQEAINRGAVLSMRRCLVNQRTDIKNHVRGILKTYGIRLGAVGPTKFNETVKRRIQELDLLVRQTMEEILEVFDMLTQKITRLDQELLKIAHKDKDTRLLMTAQGIGPITALTYKAEIFDPSRFLNSRTVGAYLGMTPTQYSSGETQKQGRISKCGSMELRSLLTEAGVVVLTRSQKWSKLKAWGLKLMRKKGLKKASLAVGRKLAVIMHRMLLEQKEFVWGDAPTKAA

SEQ ID NO: 381961 - protein, 353 aa, unidentified
MNDSHSIAWLGLDAHSKNCVLGQLDDHGTEIKWWGFPTKPEQLVQHIKAIPATEKHLMLEESNLARWLSQLLKPHVQQLVVCDARRNRLISQDHHKHDKRDAFALARLLRLNEFKPVWQPADPQRVLFKRVAKSYENAVQRQTRLKLQLKSLFQHWGLFPTGATIYSKPGRVAWLKQLPYDTLRAQALLLYELLDQALAGQTQFRRLMCQTGRQFPEIQRLSTTPGVGLVGSHLFVAYVQDPKRFPKFGRLTRYCRLGIRDRTSDDKPLGYQQLDREGIGTLKAISYRAYLQAAKRRTGPVWEFYQLSLRHTGSTTHARLNTQRKILLTLWTLWLTGREFDPDQFSRAQPLDV

SEQ ID NO: 381962 - protein, 431 aa, unidentified
MAKTKSSHTVDIVYPICCGMDIHKSFIVACIAITDERSHTKHHLKRFSTFQKGLRELVAWLKSYNCLDICMESAGKYWVPIFNTLETAGLNVCLTHPKYVKAIKGKKTDKKDAKWIVELFKCDLVRSSFIPPLIIRQLRELCRYYVKLTYALSSEKNREQNCLTICNFKLDDVFTDLSGMSASRVIAKLLEHGNSDFDVAPLLDHRCKATVQDVIDALDGELSPAETEKLKLVRLHKEYLYYLRDTLESLILELAQPLARQIELLLTVPGIKEPLTAVRILAEIGADMSVFETSKQLCSWAGLTPQNQESAGKKKTTRIGRAGQYLKPLLVQIALAVSKSAKHPEIKNKFDSLKKRRGGKKATIAIARRLLTAIYHMLSKNEAYNAELYHKAGKPPKERILSPEQALDFARRHGFLIERLDPPPTPGESVA

SEQ ID NO: 381963 - protein, 341 aa, unidentified
MNNVAIVAIDLGKHTFHLHAQDDRGHELYHKKFNRTGLARHLAGLEPCTVAMEACGGAHYMAREAAKWGHVPKLIAPHLVRPYVKSNKNDFADAMAICEAASRPTMRFVSPKTEAQQALAMLNSQRDAYIKERTASVNRIHAGLLEVGISLSPGFHAIKELPALLEECSFSAQIKQLLLGLRDHFNYLDGQVKALDKQVERQAAEDDLASRLMTIPCVGPITSSVLAAELGNGQQFKCGRDYSASIGLVPKQHSTGDKTVLLGISKRGDRNQRRLLIQCARVYLMGLERQTGALADWVRQLLARHHSNRVVCALANKLARIAWSIAAHHDEFKAGPSAMNA

SEQ ID NO: 381964 - protein, 386 aa, unidentified
MGSKSDCPPVLRVLSRRSGRTAALPYPPPKSGHYITEEPSAEKGQDLVYYCGIDLHSDNNVLGVIDSSGNRLSIKRNANDLEAVKKALSPFAGNLEGIVVESTYNWYWLVDGLQEAGYKMHLANPAAIEQYSGLKHGDDETDTWWLAELLRLKLLKEGYVYPRSERAVRDLLRKRGQLVRMRTQNILSIQNLTCRNTGAKLSGRQVKELTADDVKEMYKEETERGLAVICCVNVIKALTKQIEAIEKRVKSKIQLSQPFQLLKTISGIGEILAMVIMLEAGDISRFPSVGNFSSYCRCVKSVRLSNNKKKGNGNRKNGNKYLAWAFMEAANYAIRWEPIIEKFYQRKSSKKGSVVARKAIAHKLARATYHVLRDQTPFDIERCFGC

SEQ ID NO: 381965 - protein, 312 aa, unidentified
MEKLSYGGIDVSKDRLDVVVLPEGWFFSVSNDTAGWTELVARLRPLAVCAIGLEPSGGYERGIIRALLAAGLSVRRINPNKLRQFARARGVLAKNDRLDARLIAEYVAIMPTRVVQRDGAVERLAEVVTMRRQLCDEHVAVENQAAHLQDAMLRRLSKRRLVRLEADIRLLDKRLAEMVATNAAFAQLYELLTSMPGVGPVLAFTLIALLPELGKMSRKQIAALVGLAPYDFDSGKLRGHRSIYGGRMPIRNVLYMAALSASRYNPALKTFSNRLAHANKKSKVIIVAVMRKMITTLNAMLRDNAAWQPRSA

SEQ ID NO: 381966 - protein, 316 aa, unidentified
MSSPGVFVGIDVAQAELVIALRPTEDSWTVENDEAGIAALLRRLRPLTVTLVVLEATGGYERAVVAALATAGFPVVVANPRHVRDFARGTGQLAKTDLVDAGILALFAERVHPTPRPLPDAATQALEALLARRRQLLDMLTAERNRLAHAGPPIAQDLRRHIHWLERRLGKLDNDLDQQIQRSPVWRTQDDLLQSAPGVGPVLSRTLLAALPELGRLSHKQIAALVGVAPLARDSGTRRGRRRVWGGRAPVRAVLYMGALAAARHNPIIRAFYQRLVAAGKPKKVAVTACMHKLLTILNAMVRANTAWRHAVAQTT

SEQ ID NO: 381967 - protein, 356 aa, unidentified
MRSTAIQYVGIDVHQATLVCAVKDESGRTIIESKVATEREAITAFLRGLSGRLRVAFEEGTQAQWLHDLVLPLAEEVIVCDPRRIATKGNKADRIDAERIADLLRLGALVAVFHRGNTTRTLKEMVRLYEGLVDDTTRVMLRIRAMYRGRAIGSSSRSVYHPAKRAQWLEQISEEGAHFRAEELYKQLDALTRLRQNAKRAMIGEARRHKAYELLRSVPGIGPIRAAEIVAIVGDPRRFRTKRQLWPYAGLAVVTRTSGEWRTDSTGQIVRSKKRPLTRGLNQNFNRSLKKIFKAAARDVTATACELQQWYRAMVERGMRPELARLTLARKIAAMALAIWKKGAPYDPKRLTMQPV

SEQ ID NO: 381968 - protein, 440 aa, unidentified
MSCLNLNAAGVDIGATEIYIAVPGDRDPQPVRCFSTFTEDLHAAAAWLKACHIETVAMESTGVYWIPLFQILEARGFKVFLVNAQHVKNVPGRKSDVSDCQWLQYLHSVGLLRGSFRPEQAVCSVRSILRHRDSLVQMGSSHVQHMQKALDQMNLQLHHVISDITGMTGIAILEAILAGERNPHTLAALRDRRIKAGADTIAKSLVGDYRREHLFTLRQSLAAFRHYQELIAACDREIAQSLEEVESKLDPPVDPPPAFPSPSNDGSKPKASEPSFDLQTHLHRIFGVDLTQVPGINVLTAQTLLAEIGPDFSRFPSGPEFASWLGLCSDNRVSGGKVLSVKTRKVKNRAATALRMAALSVHRSQSFLGHFYRRMRAKLGAPKAITATAHKLARILYHMVTTGHAYDETICAQNEVQNRKRMEARLRKQAREFGLQLVAL

SEQ ID NO: 381969 - protein, 310 aa, unidentified
MQDTIGIDISKLILDALRLTTGEFRQFPNDKAGCAALIRWIGKTPMRIVFEPTGPYHRLLEQSLSKAGTAIVKVNPRYARRFAEATGELAKTDRIDAMLLARMAAVLDLQARPGRSEIHHDLRELSMARQALIKDRTAARNREQVAQNAIIRRQLEARLGQIEKQIGEIEKAMAAIVAADETLARRREILASIPGIGPVTAMAIIVEMPELGELDGKQAASLAGLAPITRESGGRKGRSRIQGGRASLRCGLYMPALVALRINPDLRRKYLALKEVGKPSKVAIAAIMRKLIVLTNALIRDNRKWSPNAT

SEQ ID NO: 381970 - protein, 347 aa, unidentified
MNQVTTIGLDIAKSIFQVHGVDAAGQSVLRQRLSRSRVLEFFGKLPRCLVGLEACASSHYWARELIKLGHEVKLMPAQYVKPYVKRGKNDAADAEAICEAVTRPTMRFVGVKTIEQQSIMMLHRVRRILMRQRTQLSNALRSHLAEFGIISPIGREGLDRLLKIVADMDDGRVPAEARVSLEMLAAQLEGVKAKILENDRRIIASARATEVGRRLLEVPGVGPVLASAFVASVANPAIFKSGRDLAAWIGLVPRQNSSGGKERLGGITKAGNGYLRQMLVVGAMAVIRYAQRNSTRRPWLVQLTGRRPTKVAAIALANKTARTVWALMTSGERYRDPKVIQAVSATA

SEQ ID NO: 381971 - protein, 394 aa, unidentified
MRFVGIDIASETHVVAVVDETDAVLVRPTKFTEDAPGYDRLFSLLGTPADTLVALEATGHYWKNLFAVLVTRGFAVALLNPLRTRRFADEELARTKTDAIDALGIARFAAQKRPAPTRLPDRATEELRELVRLRDRLVQDFGDHLRQLHRLVDLGFPEFTRYVKSLDSERATAILHDYPTAAAFRNVSARRLAGLRYDGRHKVGDDLARALLDAATRSVGQHHGEAYQLQVRYACEDLDLLRRRLRTLERDIERTLDDHEIGALLTTIEGIGPQTAARLIAELGDPAEFRSAAALASYVGVIPAIRQSGKWTSSRAGLSPLGHAALRAALWMPVLTAVRKNPWLRAYYQRLIARGKLPKVALIAAMRKLLIAVYTVAKTRRPFVSHLAPQEARA

SEQ ID NO: 381972 - protein, 452 aa, unidentified
MMEDAMAQRKRPTTQSAISLTHPNAAGIDIGSAAHFVAVPPDRDDEPVREFASFTTDLHRLADWLDACNVDTVAMESTGVYWIPLYELLESRGFTVLLVNARHVKNVSGRKSDVLDCQWLQQLMSFGLLHGAFRPAEQVCVLRSLSRQRTMLLRSQGRFVQHMQKALTQMNIQLANVISDVVGETGQKILRAIVAGERDGMALARLKNSRIHASEDEIAKSLQGSWRAEHLFALKQALDAFDFCGTQLAECDAQVQAQLQALHVREDEPAKGKKRGRARNAPKFDLRTQLFQMCGVDLTRIDGIDVTTALVVVSEVGADMGKFPSDKHFASWLGLCPGTKITGGKVMSGRTKRCANRAAQALRLAAAALRSSQSALGAYYRRMCARMDKPKAVTAAAHKLARLIYAMLTHGQEYTDRGQDYFEERYRQRVLHNLAQKAKAMGMQLVPSDNTA

SEQ ID NO: 381973 - protein, 412 aa, unidentified
MQVLYSRCCGLDVHQKTVVACVMITQPNGKVDKSIRTFATTTAALLDLADWLASLQVSHVAMESTGVFWRPIYNVLEDQFELILANAHEIKALPGRKTDVRDCEWIADLLRHGLIRPSFIPTKPVRVLRDLMRYRKSLVYQHTQQINRLHKILETANIKLTSVVSDVWGKSGQSMIKAIIQGESDAQTLSELARGTLRGKLPQLQEALEGRIQPHHRMLLQQIFAHLQFLESSMQQILKEIEAQMDPYQEVVELLMTHPGVQAVAAMGVVSEVGIDLSRFPSAKHFASWIGVCPGNHTSAGKRKHGKITKGNAYLRALLAEIVWGISHTKDNYLSAQYHRLARRIGKTKAIVAVSHTVAVNFYHMITKRVAYQELGANYFDTLDRERLTKHTVKRLEALGYEVTLTPKEVSA

SEQ ID NO: 381974 - protein, 343 aa, unidentified
MSNDTRIAVDVAKAVFEIAISDREGRVSRRERPKRHQFLPFLAQQPPATVVMEACGSAHYWAREIQKLGHQVVLLPPHHVRPYIRRNKTDRTDAKGILEASRNDDIRPVPVKTVNQQVLTSLHRLRAGWMLERTARLNTLRGLLRELGVFIPVGSREVVPAVWAVIEDADSNLPDALRTIFAEACREIREIEARVRLAEQQLASIAGQLPAVKHLQTIPGVGLLTSTALVGFIGDIQRFPSGRHFASYLGLTPREYSSGLKRNLGRISKRGDGYLRTLLIHGARSVLVHARKQQPDRLREWANQLAKTHVHNKAAVAVANKLARIVWAVWKHERPFALMARAA

SEQ ID NO: 381975 - protein, 345 aa, unidentified
MQTITTVGLDIAKSVFQVHGVDAQGKVIVRRQLKRRYVLAFFQKLPPCLIGIEACASSHYWSRELQALGHTVRLMPPAYVKPYLKRQKNDSADAEAICEAVTRTNMRFVPTKTVEQQSCLMLHRTRHLFIRQQTAVINAIRAHFAEFGIVAPVGRTGVEELLKIASDGNDKRLPDVARVCIAALGAQLQMLKARILEFDRLIMAWHRSNQVSKRLDELPGVGPALATALVASVADPKAFRSGRDFSAWIGLVPKQHSSGGREKLGGISKQGDRYLRSLFVAGALAVIRYAKKRGSKNRPWLAALLARKPTKVAAIALANKIARMAWAMMAKGERYKQPAALAAVW

SEQ ID NO: 381976 - protein, 360 aa, unidentified
MTGTMTWAAMDVHARSTYAASLDVISGELCRQRFDTGAVEPVVGWLAGLPGPVRACYEAGPTGFGLYRAARAAGIDCQVIAPSKTPRPSGDHNKSDRRDTDLLLRQLMAGALTPVAVPSATFEAARDLARAREQVRMDLMRCRHRLSKLLLHHGRVWDRTAWTQVHRQWLSAQTFEHQNTELAFIDNLAACDGLTARRQALDERLSRVATDPEFWPVVRRLRAFRGLDTLSALIIVLEVADFTRFPRAVQLGSWLGLVPSREQSGETDRHGSITKTGSKYARRILVEAAWHYARSPRIGRTLYERQQGLPDHIVQIALRAQHRLHRIHRRMRERKKPGNVIVVACARELSCFLWVAATAA

SEQ ID NO: 381977 - protein, 323 aa, unidentified
MNKYSETFGIDISKDVFDCYGSLQGHLQFKNDEFGFKKFHKILPKNSLVVMEATGYYHYRFAQFLYKKDVCVSVVNPLSIKRFIQMKLAKIKTDKSDAKAICDYGLTQEVPLYNALTDTQSECLQLFRLMDNLLKSRTAIKNKIHGEKVLGIPSRYVFRSLNKTLKHLNNELKGIDVKLLSLVKKDQQKQLTLLQTIPGIGQKTALFLIVVTDGFNKFETASQLCSYAGITPVIRESGSSVRGRARISKVGNRKLRNLLFLCSFSAYKHNKACVAIFERITNKGKSKKLALIAVSNKLLKQCFAIAKSGIPYDPTHVSVLKVK

SEQ ID NO: 381978 - protein, 400 aa, unidentified
MISVGIDVSKGKSTVCILKPYGEIVSKPFNITHTQKDLSELSSMLFRLNDEVKIVMEATGIYHLPVLTYLQEKGFFVSVINPYLMKSYRNESLRKAKTDKIDSRIIANYGIDHWFKMKEFQTSGEIYEELKLLGQQYRHYMKLHLLSLAELTHLLDLTMPGIKNLLASWNETNRKDKRSDFVERFWHYDVITSMSEQEFTEEYILWAKEKKYVPSQEKAKVIYTLAQESIPTLPSETSSVKMLVTEAVRVLKEVDATLGLILSRMQEIAKTLPEYSVVREMGGVGNTLAPKLIAEIGDVRRFRNGKALVAFAGIDPPPYESGQFVGCNRKISKRGSASLRKAGYETMRSLKMRSRPEDPVYRYVVKKESEGKSKKSAKIAGLNKFLRIYYARVTELYKNI

SEQ ID NO: 381979 - protein, 402 aa, unidentified
MNKKKRYSRFAGIDIAKNKHVVCIVDRDGKTIRKSQSFANTKESYQQFRQTLKSIGQARTFLVGMEATAHYWYSLHDDLTRHGYNVVVLNPIQTAQQAKKGIRKCKTDKVDAWHIATLIKNGDYKSALIPGPLAMTCRQLTRLRVRLVQQNAALKQLIWSRLHPIWPEYEALFKNPFCATGRKLLSVAPSPADVLALDPDELSELIRRTSRGKYGPLQAQKVWQAAANSAGMQRSLDGARISIRTLLSQLEASKPVHEQLKQEIAQLAQHLPMYLFSLPGIDPIRAVSLFGETDPITNFKTPSKLVAFSGLDLSVFQTGQYDAPNRRISKRGSPFLRHTLWQMAYQAVYQEGDLRSYWLRKKADGLKHKEAVTAAAIKLCHITWRILTDERDYRLEGRPNQS

SEQ ID NO: 381980 - protein, 410 aa, unidentified
MQLFVGDDWSEENHDVELMDAGGRVLGRARLKEGAAGMARLHAMIGEHAGDDEDGLVVRVGIETDRGLWVMALAAAGYEMFAINPLQTSRYRDRHGVSGGKSDTGDAHVLADMVRTDSHQLRQIAADTPAVQAVKVVARAHKTLIWERTRHVQRLRHQLRDFFPAALDAFGDLDAPDTLELLAKAPDPVSAARLTTAQISAVLKRARRRNISEKTTAIRAALRSPQLAQPPQVTAACAAVVRSLTAVLATLNEQITIMEGAVDAHFRQHPDAEIITSQPGLGPILGARVLAEFGDDPHRYASAKARKNYAATSPITRQSGKKKAVQARHVHNDRLRDALDGQAFAALSVSPGARAYYDQLRARKVSHRAALRQLANRLVGILHGCLKDRTLYDEAFAWSSPASQETRTAA

SEQ ID NO: 381981 - protein, 453 aa, unidentified
MARRPKQASKSNNAVLPVMRPDAAGIDIGATEIFVAVPADRAEENVRSFPTFTQDLYALADWLKQCGIRTVAMESTGVYWIPLFQILEERQFEVCLVNARHVKNVPGRRTDVSDCHWLQFLHSVGLLKASYRPEQEVCAVRSLLRHRESLVQMAATHVHHMQKALDQMNLQVHHVISDIVGQTGLAIVDAILDGERDPLTLAKLRNERIKASEEVIAKSLVGDYRPEHLFTLRQSLAAYRSYQKLIDECDREIRQRLRDFQPPHPPAERPDEEKCTHKARSSGSVLRSELKRVFGIDLTRIPGIRTGIAQTLFGEIGPDFTPFRSASAFASWMGLCPDNDISGGKVLWTGTRKVKCRAATALRLAAQSLHHSKSGLGDFYRRMRAKLGAPEAITAAAHKLARILFHLISTRQEFDESKFTADQLRFQKSQETKLRAKAKSLGYQLVPIEPAAA

SEQ ID NO: 381982 - protein, 313 aa, unidentified
MAQITPKAGIDSSADWLDVHLYPLEIGFRVSNDAPGWRELHRRLGAERVEIVALEASGGCERAACHFLLERGYSVRLLDALRVRQFAKATGRLAKNDRIDAEIIAHFVTVVATRPMVRDRQRERLAELVGARAQLADQLVLLQNQARGHGEALLRRLDRQRVARAQADMQTIERRIAEVIAADPDMTADNAPLRSMKAVGPVLAFTLQAFLPELGHLTRKQIAALAGVAPFEDQSGKRQGVRYIQGGRASVRGPLYMAALVAARYNPVLKQTRDRLRALNKKPKVVIVALMRRMLTILNAILRDGTQWQNRAV

SEQ ID NO: 381983 - protein, 447 aa, unidentified
MTEALSRFLMVVRHVAENGYQTRKETAMSWQSVMQKRASIKSDTLVVGIDIGKRSHVARAILPDTTIAKPLHFENNRAGFEKLQGYVVNWQRAALCSETVVGMESTGHYCENLAYWLAGRGTKVVQVNALHVKRTKETFDNSPGKADPKDAALVADLVSQGKYLGLILPQGDIAELRQLVNLRQRLVTERTAKLNLLHAALDRVFPEFTTVFKDPLGKTARYILGHFPLPAELLRFSAIELWKQLQEKCDKRLSLKKVEGLLAAAAGSVGVVAGSSGARLALCEALAMVQYLADMIGRLEDSIAVLVAKVEESRWLMSLRGIGLITAAVILAETGGLKCYDRAASVLKLAGINLYEISSGQSHGLRRISRRGRSLLRHILYLAALQQTHRGAPLYEFYTRLVEKGKPKVKALIAVACKLVRVLFALVRDGRCYVARPRCPEATESIA

SEQ ID NO: 381984 - protein, 358 aa, unidentified
MQRNKISFKGQKIFIGIDVHAKNWEVAIAPEIGIVRRHSQKPSAKELFDFLKKNYPDGEYQAVYESGFSGFSTYYALKEVGIECMVIHAADVPTTQYEEVMKTDRVDAEKLARSMKAGLLNGNYILEKQYIDDRSVVRIRRTIQKQLGAYKSRVKHMLHCHGVEYPERFSKKQTHWSRAFITWLMKDVQLMSETRASLDLLIRQVEVIRGTLLEATRQLRKMSQAERFRRRHNLLRTIPGIGLITTMCILTEVCDVKRFRNENQFAAYLGLIPTSHSSGEKVVHGEKTFRGNKQLGPLIIEAAWIAIGRDAGLGAQYFQYKKRMEPQEAIVRIARKLSNIIFSVLKNEKEYVPYQTGN

SEQ ID NO: 381985 - protein, 346 aa, unidentified
MDKFDACGIEVSAQELVVALCRDGRAERLRSFPNTAEGHAAICRYLTSGSPRVRVAMESTGLYGLDLAYALRQEAQIEVMVANPRAVRSFASALMQRSKNDRLDAVVLREFAARMPFQAWVAPSLPCFALCAVSRRLETLTEQCTAEKNRQHAASLTVAIPAAVRRDLQRSVRSIQRAIVRLTKEAQRILEQDPVLKSSYHLLLTAKGIGPTSALRLLAETALLSEDLDARQWVAYAGLDPRECQSGSSVHKRVRISKTGNRHLRRALYMPTLVAVRHEPHLRAFYRHLLARGKCKMQALVAAMRKLLHAVYGMLKNRQPYDGAKLYRLSETLPALPCAHHSAEAA

SEQ ID NO: 381986 - protein, 342 aa, unidentified
MDHFAGLDVSVKETSVCIVNDTGRIVREVKVASEPEALLAVLKNPAYHFERIGLEAGPLSQWLFSALAEAELPVVCVETRHMQAVLKAQINKTDRNDARGIAQMIRVGLYRPVHVKTLRSQKLRMLLTHRKLLQSKAMAIENDLRGTLRNFGLKVGMVGKVRFEARIQELVENLPDLAELVEPLLIVRRALREQIVILHRRLLAIVRDDEVCRRLMTTPGVGPVVALTYRATVDVPARFRKSKSVGAVFGLTCSKYQSGEIDRSGSISRCGDEMMRVMLYEAAQSMLRSKKWSWLKAWAMQIARRRGMKKAIVALARRLAVIMHRIWVDGTEFRWTREAAAA

SEQ ID NO: 381987 - protein, 362 aa, unidentified
MNYVGVDIHKKYSVLCAVDERGRKLREARVEGNAPFGFAQFFSGLGGPSKAVVEACWNWSLIYDELEELEGIEEVVLAHPYKTRLIADAQIKTDRLDAYALSTLLRGNLVARAHVPRRETRMRKNLLRQRLYWARLRTMLRNRIHALLDRQRSLELPQCSDIFGVRGLSFLRRLELPETDAALLREQLALHDLIAQQMKAQEKRIGLEFGSEAIHRQLMSVPGIGPTLAAVIACEVDSIERFSSAEKLCAYAGVVPTTHSSGGKTRHGQLLPFCNKWLRWALIEASWVAIGCSPYFGALYKQHRARGKKANSAVLIVARRMCRIIWQLLHEKRDFEKRPLRPNFNFPGCSVVRLTAATAARP

SEQ ID NO: 381988 - protein, 344 aa, unidentified
MSNHDSCGIEVSAKELLVKVRRAEEGVRERSFTNTPQDHPAIVGYLRRAGRVVRVCMESTGLYGLDLALALSGQEGIELMVANPRAVRHFAHALMRRSKNDPIDAGVLEEFAARMPFQPWVRPSPAALALHALARRLRELVEMQTAEKNRQHAAGLSQAIPAAVRRDLVRSLRAQQGAIERLTREARKLIAQDAPLRERFELLISVPGIAETSAVQLLGELGVLAPDLSARQWVAYAGLDPRCFDSGSSVHKKPRISKAGNKHLRHTLYMPALVAVRHDPHFRGFYQHLQAAGKLKMQALVAVMRKLLHALHAMFASHQPYDGSKLFQLRSTPAQEVASAPALA

SEQ ID NO: 381989 - protein, 352 aa, unidentified
MTKIVAVATVGLDLGDRNSYFVALDGNGEIVSEGRVATRETALRKFFGAMEPCRVVIEAGAVSGWVSRTLVSLGHEALVANPRQLPLVTRGVKKTDRTDAETLARIGRFDPALLKPIRHRDAERQRDLLTLRSRDKLVGVRRDLVNSVRGMLKQFGIRVVKCSPGAFVKRALGVTPGELRNSLGPALAVIKRLTVQIRGMDREIERLCAEKYPETGVLTQIRGVGPITALAFVLVLETPGRFCVARDAGAYVGLTPRNRQSGGSDPQLGITKAGDRMLRCLLVNCAQYILGPFGIDCDLRRHGDKIRERGGKNAKKRAVVAVARKLAVLMARLWRTGEVWEPLYNESLSRAA

SEQ ID NO: 381990 - protein, 310 aa, unidentified
MAVSETCLIGIDVSKAQLDVAVSPSGETTGFANTDVGIEELVAWAKGFQPHLIVFEATGGLEVVATGRLTAASLPVAVVNPRQVRDFAKATGRLAKTDRIDAQVIAQFGQAIKPVPRALKDEETQRLRALLVRRRQLVDMLTAEKNRLSRAQLRIQKDVKQHIAWLEKRIAKTEGELAAAIKASPIWRAKEQILTSAGGVGPVLATTLLCRLPELGDLNRRQISALVGVCPFNRDSGTMRGKRSIFGGRADVRAALYMSTLAATRFNPPIKAFYDRLIRAGKLPKVALTACMRKLLTIVTIQPPAPDPRS

SEQ ID NO: 381991 - protein, 370 aa, unidentified
MLDTTTFVGLDVHARSIKAVSLDVMTGEVRCATFGYDAGAVAEWVRSVDPKARCVHESGVTGFDLQKRLSGLGVDCVVGAVSKTIKPSADRRRKNDRNDAEFLARMLSVGNVVEVWVPDDECEAARDLTRALEDARDDLSRSKQRLSKFLLRHGLAFDERTPTGRRKGNWTRAHWSWIESIRFAERADEEVLAYYVDAVRRAAEEKARLEGLVEAEARKPRWRRRVDSLRCLKGVDTATAADLVFEAGEFSRFGNARSFASWVGLTPSEHSSGESDRRGAITKAGNKHLRKALVEAAWHYLTCSGRPKDLAKGQAPDRVARRHAAKGVRRLAERREALLARGVHGNKANVATARELACWVWAVGLMAEEA

SEQ ID NO: 381992 - protein, 331 aa, unidentified
MGIDLHRRRSVIVRMAADTGERLGTVRIDNDSMALVAEIAKAGEHPEVVLEATYGWYWAVDVLRGEGAQVHLAHPLGVKGFAYRRVKNDERDAADLADLLRMGRLPEAWIAPPATRELRELVRHRAKLVALRSGLKAQIHAVLAKEGLREPMSDLFGAAGQSLLNEVRLGAAYAARVVSLRRLIDAFTFEIDTVGRRVTAQLAADPGYRAVQALDGVGPVLAAVFVAEIGDVTRFSGPAQLGAWAGMTPRHRESDTKVHRGRITKQGNRLVRWAAVEAVQRVHRGGIGAARARIGERRGANIAKVAAGRKLLTLVYYGLRDGHLRCLSRPA

SEQ ID NO: 381993 - protein, 307 aa, unidentified
MALCVGIDVAKHTLEWCVASEGAIQHARNEPRPIAQLVRQLVALEPKRVVLESTGGYERPLVAKLAEAGLPVVVVNPRRVRSFGQALGILAKTDAIDARLLARFGEKAEPEVRPILQGRARLLADLVARRRQLVSMIVAEKSRRETASAAVRRSIAAMLRTLAAHVRDLERRIDQALGEDVETAELAALLQTVPSVGPGVARTLLVDLPELGHLGRREIASLVGIAPFARDSGKLRGVRYIRGGRASVRTVLYLAAMNAARFNPVLRPLYQRLRQAGKPPKLAFVAVARKLLTILNAIARERTAWQA

SEQ ID NO: 381994 - protein, 385 aa, unidentified
MLYVGIDIGKFHHEASIVNEQGKEVKKSLRFSNNREGFQRLISWLPHSAISFAIEATGHYWFTLFDFLINKNFPIKVVNPIQCDAYRQSKIRKTKTDKRDSFIIADLLRLGLIQETISTQKWILELRDLSRFRFSLIDQISDLKRHLIAILDKIFPEFEDLFKSPFLKSARELLKAHPTPEDIASLSIKELTQLLTQNSHGKFTEEKAEKIKLQAANSVGLTYLKDSATVQIRCLLLHIEFIEEQVKLLEEKITEIVQQHQTFLTTIPGISNVLAGTIIGEIGNIDRFSSPRKLTAYAGIDPTTFSSGEFEATQTHMSKRGSPYLRRALWLAATCAWKFNPDLRDYYNRKIAQGKHYGTVIGAIARKLIYRIYTVVKEQRPYKVS

SEQ ID NO: 381995 - protein, 409 aa, unidentified
MLDVRVKWSAKPREIEGIDCVMRTQPMVKEESSFIGIDYHKRYSVFCVLDAQGEVLERGRIDHLCPEQFVVLVQRWPGCRVVFEACMNWHWLLEILEEAMPREDIVMANPFKTRIIAEAQIKTDKVDARILADLLRGNLISRVHVCAKATREIKEVLRQRCFFVRQRTMMRNRIHRLLGAQHDLQLPQCSDLFGAKGMSFLNQLELPAPAGFLLRQQLALLGELAVRIREDEKGLQGMIEASPALHYVRSIPGMGPILAAVVLSEIDHISRFASAQKLCGYAGLCPSTNSSGGKTFQGKLLPRCNKWLRWAFVEAAWVAVGCSPYFGDFYRRKRSLGKKANRAILATARLMARITWQLLTQHRDYANFPGDQKLRCPPAKEMKDFPKSKKPISSKETFPSRSHARLVGR

SEQ ID NO: 381996 - protein, 353 aa, unidentified
MIAIGVDAHKRIHVALALDARGQELSRWQGVNSPEGWQDLLEWARSIDEPRQWGIEGAWSYGRGLAQYLVECGEVVYEINPRWTALRRRGARRPGKTDRLDARAVALFVRQEAPDLPRVTQDDKSAILDLLATEREAAVAEAIRLRNQLHGLLMQLDPQYRRWLPRLASRSSLDVVEQHQFPGTSPLQEERAGVVRRMVQRLRVAMNQVEEVSEKIKRLAQEGFSPLTQIFGINLLTAGTLAGILGPGCRFSSDAELAAYAGVAPLETSSAGVVRHRLSRSGNRRLNGIIHLIAWTQIRGWQPARDYLERRIGEGKSRREATRALKRFIVRAIWRCWMACVGQRTVAAVAEAA

SEQ ID NO: 381997 - protein, 426 aa, unidentified
MQPHYQCVCGVDVHKEFLMVCILRRDEDPDIFRVFNNFSGVQDLKQRVEEEGCECIACESTGVYWYRLYLSFEGQTRVIVGNAYQIKSIPGRKTDVRDAQWIAELAMNGLINPSRVFPKKDRELRELTRTRESTVHSRTQIKNRIHRTLDSAGIVLGKGVNDIFGKSGTHLLWGLINRERAEDIITTIPSARVKKKVDTLREILSGSLSDLQIMLIKNNLNMMAHINEHIQVLDEQIIARIREQERIRDVDIACSIPGVSVTTAVTALAEIGDYHDFKNAEKLASWAGLVPSVYQSAGKNCSGKITKHGSEHLRWILVQAAKSAGRTVNTTFRKFFNRIMYRKGANTATVALARKILCILWHLLMKNELYVDPLKSAKLTKPLAVQKFSKNSPSDIQKAIDFILDSGFKVIYPDTTLDQNFKGVSR

SEQ ID NO: 381998 - protein, 335 aa, unidentified
MQIYGIDLAKEKFDVSFFDLTSKKVSNQPSHKVVMNNLKGIGKFFKGLPSDAVLVAEHTGVYGDTLLKCCMDSNVKIAFVGGYVIHRYRATPDRAKTDVLDCALLRDFGERYPDKLKYKTFPEEALYELRQLARHREMLVEQRKQLITADKSEDCRPIRSLAVKRSMNRIKEMLDTEIAETEKEMLKVINGHESIHHNYELVKSVDGVGLITAVELLVKTENFTKITTARQYAAYAGTAPYEKSSGKMDKGAHISKIGNRRSKTLLYICAESARLHNKEIKLYYERRTLIDKKPRHYVLNAIANKLLRIIFTLVEKGEYYDANFIRQDPRVVKYN

SEQ ID NO: 381999 - protein, 351 aa, unidentified
MAILAEQFVHVIGVDTHKLSLTAAAVNASGGCLELLEVRADTGGHRQLMALASRYAGPLLWAVEGTGSYGASLTAHLLAEGQTVTEVDRPKRSPRKRGKSDEIDAIRAARDALAMQRLNTPRRRQEREQLRIMLTTRQELVSNRTRLANHLSQLVVTASESIRARFLDSSLRSHSAERLVRKCLATRCSSRLSGEDRTRLVAMHDLAHLIRDLTSRADAYEREIESLVEQLAPGLRAQPGIGTLSAAQILVAWSHAGRLPNEAAFAALAGVAPIPASSGQTVRHRLNRGGDRKLNAALHIVVLTRCRYDQATRDYIARRTAEGKTRRDIRRCLKRYLARQLFRFLNGIDKA

SEQ ID NO: 382000 - protein, 379 aa, unidentified
MATTKQALLNDTSVTLMLYMALELSGAKWKVAVADGKRAASQHALVAGDVGGLLLLIDKAKKRCGVQGKVRVMSCYEAGRDGFWLHRWLLEQGIDNVVVDSSSIEVNRRKRRAKNDALDAAKLYEMLVRYVAGEKRVWRVVRVPSVQQEDERRLHRELERLKRERNAHVNRIRSLAVLHNVRLQRVGGRDWSERLEQLKGQLPPGMVAEIERQSARAKLVGEQIAQLEKSRQEQLQAMIEQQQDGPLLALLKLRAIGVQTAWVLVRELFSWRRFSNRRELAGCVGLNPSPYDSGASQREQGISKAGNRRVRALLVEIAWYWLRYQPHSALSAWFNRRFGGAGKRMRRVGIVALARRLLIALWRYVEQGVIPEGAQLKRP

SEQ ID NO: 382001 - protein, 418 aa, unidentified
MNAETNKVERVIGFDSHPDTFTAALLQGSTPAAAVVQKIFNKVPLSQLQSWAQKQTDPQDLFVLEASGNSFHVVRVLTKVNRKALVLESGHLGKLKEAHANNDKISAVRIGKAYLAGTARTVWVPDLKTQERRDLFHMHRKAVKRTTQLRNRLQSYLSDNGVRLSKGTRLTQAATSDKIRKAHEWLPGQWQLIEGLLMELRHAEEQRKHWRSLIAQEVLTDPLLLSIVRLCGVREMVAFALGALVGDIKRFSDPKKLVKYIGLNPAFDDSGENQWTGGIRGHGRKDLRCLLIEAAQAILRCSKTPLARWGKKLLGRKGAINLTVAAIARKLAVAVWYLMMGRWTALEEIDKRLSQKVGKIISQVGTAGLKNLGKTRKTFRDQIYQSLKSGRAYILDPDKKFTPKIQRPLTVAEEYGLR

SEQ ID NO: 382002 - protein, 375 aa, unidentified
MKEKLRFLGLDVHAETIAVAVAEPEGEVRSLGTIPNRGESIRKLIKKLGPAAKLRACYEAGPTGYVVYWQLAELGVECEVVAPTLVPVKAGDRVKTDRRDAEKLARCYRSGDLTAVWVPDEGSEALRDLVRAREAAKQDQTRARHRLSKFLLRSGQRAPTGVRPWTRPYLIWVAQLRFRQIAQESTRQDYLHEVEHMRERVARLEQAIMEAVKLASPALQQVINDLQALRGIADISAVTIASELGQVSRFGSARQLMGYCGVVPSEDSSGKRTRRGSITKTGNAHLRRIVVEAAWSYRRPPGIWYGLRRRQESISEEAKEIAWKAQHRLHKRYMKLGAAGKDQRKIVTAVARELLGFIWAIGTRAETVSRQQVAA

SEQ ID NO: 382003 - protein, 368 aa, unidentified
MKQQTSAATETKIKGRNIIDFTGKTIYVGIDVHEKDYQVAKVFDGICLGNHRMAANHQMLIDHLNSRYPGATFKCVYESCAWGFTLQRALNSAGIECIVVHAADVSSSDKEKKRKTDKVDALKLARNLASGDLTGIHIPDEDLQKERNLIRFRKKLVGDLNRSKNRLKSLLKYQGIKIPEHLGKKNNWSYNFMNWVEQEANKDVLLKDTLLLMLEEIKFLRQLLLKTERALRKLMKERHNEKATLLMTAPGIGRTIAMQFVLEVGDIKRFHSFDALNDLIGFCPDTDSSGDMQRDRGITSRRHKQLRSALIEAAWTAIRIDPALMDAYQKLTKRMQGKYAIIRIARKLLRRMRTMLLTGQPYQIGVAA

SEQ ID NO: 382004 - protein, 347 aa, unidentified
MSITMIGLDTAKSFFQVHAVDEAGQVVIRRKLRRSELIAFFEKQEACTIVMEACGATHHWARVLTGLGHDVKLIAPEAVRPFVKKGKKNDAADAAAICEAASRPGVRFVPIKSLEQQGLLALHSARSLLVKQQTMLANAMRGLAAEFGLTVPLGMGKLTELKQLVDADKTVSEAARQAVRGLLDQCRWLAESAETFEAEIVAHARHDETARRLATIPGIGPITASLIAATVADIGVFQSARHFAAWLGLVPRQHSTGGKTRLGRITKAGNREIRRLLVLGATSMVRRAAGWNSAAGVWTRGILQRRPVRLVTVALANKMARIAWAVMTRKEVYHAKGHVAAAAEALA

SEQ ID NO: 382005 - protein, 442 aa, unidentified
MPVMHPNAAGIDIGSQFHVVAVPPERTDQSVRTFKSFTGELHAMAKWLKKCRVDTIAMESTGVYWIAAFEILESYGFKVFLVNAREAKTVPGRKTDINDAQWLQKLHQFGLLRASFQPSKEIAGLRAYLRQREKLIEYKASHIQHLQKAMMQMNVQLQHVVTDITGKTGLAIIRAIVNGQYNPDELVMLRDPHCKNSVDVMKAALTGNYKAEHLFALTQAIELIDIYTEKIAACDRVIESTLEGLHQETDSMETTLPKPRGRENSKNAPSFDVRQSLFNMIGIDLTQIHGFGSSIALKLVAECGTDMTKWPTSKHFTSWLCLAPGNKISGGKVLSSKTRRSSSKSATDLRLAAMVVGKTNTALGATYRRYAARIGKAKAITAIARKLATLFYNALRYGMAYVDQGADYYEEQFRKKVVSNLKRRADSLGYTLLKKDEAVSAA

SEQ ID NO: 382006 - protein, 345 aa, unidentified
MENMYYIGLDVHKRKISYCVKDSGGKVYSEGSLPATRLDLDVWMKTLPQPWSAAMEATMFTGWIYDHLKPHAAALKVAHPLMLRAIAAAKKKNDRIDASKICDCLRCDFLPECYMAPTATRERRRTLRYRNLLVRQMVQMKIKISSLLMEAGVSYNKQRLHKAGYFRELLATNPDINEGLKPLLQLCRETVVRLQKTESAMVRSLERDSLLVDRVDRLMTIPAVGPITALTWALEVGDVQRFSSIKKAISYCGLCGAEKSSGSTVHRMPLSKQRNKHLQTTLIEAAKMAPRNSPELAMLYDKEKQKGNANRATLAVARKLVAYLVAVDRRQKEFLTVERENRTAA

SEQ ID NO: 382007 - protein, 402 aa, unidentified
MITCGIDIGKGKHAVAVVDESGRQLVRTRFYDNTKAGAERMLAELLRHAEPSQIHVGMESTGNYWRAYYDFLKGRGCVVDVINPIVTSASSAGDIRGRKTDKRDAESIAEVVLRGKYACRRDEGLQERKLRALTRQRGFIVEERSAAKLHLASLVAEAFAEFESLFEDPYGALALAVLSKYPTASHLARARKSSLAKIVRANTRGKDADAEALRLIGGAKDSISLSCEITDALARCVTSSIRTIMDLDERVKDVEEAIKGFDPPDLASKLMAIKGSGKVMPMVVAAEFGDISRFRNNPKDGSEAGMHKRLLAYAGCEPRIRESGKWKGRKFISKRGSRQLRTALYLLANNIRQWDPYFKAVYERKIGSGKHHNVAVFYVVAKLIEVLCALYKSGRNYAAIQP

SEQ ID NO: 382008 - protein, 405 aa, unidentified
MNAVGIDVSKGKSMVAIMRPFGEVVASPTEVAHTDSELGKLANSLKRLKGETKVIMECTGHYFQPIARTLREAGLFVSAIHAKLIHDYGNNTIRKVKTDKADSIKIANYGLSNWLDLPEYAPEDDIRQMLKAFSRQYTKYGKVKTMLKNNFISLTDQTFPEVNGLFTSPPRKSDGHEKWMDFAMKFWHCECVRGLTLKAFSERYQKWCKKEGYQFSHNKASDIHSRSCGSVPVMPKNESARLLVDQAVRQINSVSEGMAAIADEMKRLAGMLPEYPIVSEFFGVGDILGPQLMAEIGDVRRFRSKGSLVCYADLEAPPYQSGMFESNDRSISKKGSPHLRKTLFQVMGCYLLNAPSDEPVYQFLVRKRDEGKHYYSYMTAGCAKFLRIYYARVNERFAQQDALEQ

SEQ ID NO: 382009 - protein, 315 aa, unidentified
MTNNKQKKSLVNVGVDVGKSCLDIVIHEKQIYWQDGNTEQGIKRILKRLSHYQVERLVMEATGRYEFDLAEAAYNKGLAVVIAKPLSIRRYAGAVDQLAKTDKIDAAIIAEYGAVCKPRVSPRKSRNLITIKNLLVRRRQLVNLRTQEMNRLGIMGKKLEVSCRRIIRHIDTEIERMEKQLSRHVEQQAEWSEKQVILKSAPGVGNTLVYTLLADLPELGVLSNNEISKLVGVAPINRDSGQKRGKRRIQGGRASIRTVLYMATLSATQCNPVIKAFYRKLVAQGKHKKVALTACMRKFITILNTMVKNNECWNH

SEQ ID NO: 382010 - protein, 407 aa, unidentified
MPDYDWYVGIDWGGERHQVAILDATGARVAEHQVAHCGAGLESLVEHLARLGADPGRVAVAIEVPRGPVVDTLLMRGYHVFALNPKQLDRFRDRYTVAGAKDDRRDALVAASALRTDRPAFRELPPDDPQVIRLRELSRTYAELLGEERRLANQLREQLWRYYPQALTHCPGADESWLWELLHEAPTPAHAQRLTRPALRALLARYRLRRITGDLLYETLQARSVTLTPGAAEAAAEHVELLLPRLRLVHEQRQQWERRRDALLDALGTPVDGRQEPRDVTILRSLPGVGRVVAATMLAEAWGLLAARDYQSLRAQSGVAPITKQSGTQRLVLMRRSCNHRLRTAVFHWARNSVRLDPRCRAQYQRLRQRHSQARALRSVADRLLSVLVAMLCSGTTYDVTRCPNAA

SEQ ID NO: 382011 - protein, 341 aa, unidentified
MTKNIYFIGIDIAADSFVASIYQSPRKPVITKEGFENTFDGFNIFSSWITAQNINPENCVICMEATGVYSEGIAHFLVTQGFKVSVESPLKVKRAFDPVGHKTDPVDSRQIAEYAYRYSDELRFWQPKDEIIEKIRHLLTAREQFTKQSVALQNAMGAYKKHVVQVTLITTAHSHILKELKKQIAEIDKELEQLVRKSPTISNMKNQLMSLPGYGLLLSSSLIAMTGAFCEITSYKTLAAFIGICPYQHKSGKSVCRQAHIRPFGPQYARKLLMLAARSVVTHNADFKKYYLRKLAEGKAKKLVLNNVANKLIKIACAMIKNNSRYVSTYRSINPMCLIST

SEQ ID NO: 382012 - protein, 369 aa, unidentified
MTDVTHFVGLDVHKKTIAVALVDGTAGAEVRFYGTIVNTPDAVRTLGKKLSKDGQPLHFCYEAGPCGYGVQRQLTRLGHRCDVVAPALIPRKAGDKVKTDRRDAMMLAQTLRAGQLTAVWIPDEAHEAMRDLVRLRAQAMRDLRKTRQQLLSFLLRHGLDSPYGHWTKMHRRWLGEPVFAHPAQHLAHEEMLARIERAEALCDRLKQAILELVPQWSLASVVQAIQALCGVSLIVAAVIVAEVGCFGRFDSPRTLMAYLGLNPSEHSSGATIRRGSITKTGNALARTCLVEAAWTYRFPARVTQIIRDRLKALPEPIRNIAWKAQVRLSARYRKLIAAGKPAPKVVVAIARELVGFIWAIARMVEPKFA

SEQ ID NO: 382013 - protein, 454 aa, unidentified
MEQESIAMEVVNPQAAGIDIGSRSHWVAVGQSEQDVREYGVFNQDLFDMADWLEKKGIKTVSMESTGTYWQNLYAVLISKGFDVILCNGKFTKNIKGKKTDIKECQWIQKLHTLGLLSGSFLPEGKTEELRTYCRHRANLLHSAASASKKMQKYLRLLNLRLDVVVRDICGLTGLLIIRAICEGETDPQKLASLRHGNCRKSEEEIAKALQSNGRKDYHFALQQELETYDQTQQKIARCDIETEKMLDEIIQSDDNKRQHHLNPKPHKRVNKNTHKDVDLNLKSYQLFEDTDLSAIEGVNFSTVLYLMSEVGPEGIRKFKTAKHFASWLRLAPNNKVSGGKVLSSKVPKGSNRLKIALRNAANAIGNLKESTPLRDFFKRISFRKGRVSAISAPARKLAVIIWNMVVKETPYINPEGYLFLDQKRKLGLVKRIKKQIDKFGLTEDDLGLKTADI

SEQ ID NO: 382014 - protein, 316 aa, unidentified
MEQHEREQACFVGIDVAKRQLDVCIRPAGLIFSVGRDGAGFEELVARLREVRAQLIVLEATGGFEQVVTATVAGALLPVVVVNPRRIRDFARACGQLAKTNTLDAALIALFAARVRPELRPLPDEPTRHLGDLAARRRQVVEMTTTERHRLRQAALPRIKMRVATHIAWPDAELASIDGDLDQAIRDSELWRHQEALMISVPGVGPTVARTLMTELPELGQLDRRSLAALVGIAPMNHDSGQHRGRRSIRGGRSVVRAKLYMAAWVACRWNPTIKSFCEQLTAAGKPRKTVIDACTHKLLTILNAIIRTNIPWQKA

SEQ ID NO: 382015 - protein, 343 aa, unidentified
MDHFVGLDVSVKETSLCIVDDTGRIVREVKVASEPEALLHVLMNPAYHFKRIGLEAGPLSQWLFGALAEAGLPVICVETRHMRAVLKAQINKTDRNDARGMAQMMRVGLYRPVHVKTLRSQKLRMLLTHRKLLQSKAIAIDNDLRATLRNFGLKVGTVGRAKFEARIKELVEDLPDLVVLVEPLLIVRRVLREQVGILHRRLLAIVRDDDVCRRLMTVPGVGPVVALTYRATVDVPARFRNSKTVGAVFGLTPAKHQSGEVDRTGAISRCGDEMMRMMLYEAAQIVLVRSTKWSWVKAWAMKIARHRGMKKAIVALARRLAVIMHRIWVDGTEFRWTKDVAAA

SEQ ID NO: 382016 - protein, 466 aa, unidentified
MKPFYMGIDVSKGYADFMIINSKKQPVVQSFQLDDTFEGHRSLYNLLSRFLADYPESTLFAAVESTGGYENNWYNSLIEFQGSLNIQTARLNPLGVMHNSKADLKKNTTDKISAQNIAEYLVAHREKVVYQQHDQLAGLRKQWGFIKMLTKQCTQFLNQLNALIYSANPELLSYCQAEMPAWMLKLLVKYPSADRLKKAHVKTVAKIPYVSKQKAQQLIAGAKRSVASDTDVTTQQLIVATAEQILHLKKTIADQTNQMLRECSIPEVELLKTFPGIGDFSAVGLIIEIQTIKRFAEAKKLASFFGVHPVYKISGDGVGGFKMSKQGRTAPRQILYMAALSAIQCNPLIREIYEKHQKQGKHNMAAMGICMHKILRILYGMLRNNKPFNPHIDIANRLRSVRMKNDTPVKNTSRRFQDYDQKAPVSKRQRKKRLERERSHSVSDTKVGITAPVPLADIIANILPQL

SEQ ID NO: 382017 - protein, 345 aa, unidentified
MVMIGIDPHKRTHTAVAIDTAERVLDERLVRATSKQVPELLEWVKRLDGGDRIWVIESAGGLGYLLAQQLLAAGEQVVDIPATLASRVRLLGTGRSDKNDPNDARSVAIAALRAAELVPVRVEDHASVLRLVSRRHTQLGWSYNKTACRLHALVADLVPGGISKEVVVCQVRSLLADHPSIGAVAVERHALALDLVDELERLNRQRKALRKRIAVAVDASGTTLTEIFGVGDVGAAIILGQVGDVGRFRTADRFAAYNGTAPIEWSSGNRARPIHRLSRRGNRTLNHVIHIAAVTQLRHRHSPGRAYYDAKRTQGLTGRAALRSLKRRISDAIYRRLVADTARRS

SEQ ID NO: 382018 - protein, 407 aa, unidentified
MTAVMIGVDPHKATHTAVVIGAAEEPLGELRVRASAGQAEKLVAWAADWPERTWAVEGAAGLGRLLAQQLVAAGERVLDVQPKLASRVRLLQAGDTNKNDPNDALSVAVAALRSKAARPVMAEDYPAVLKVWSKRHRDLARLRNQAACRLHAVLCDLVPGGHPKEISAAQAARILEQASPSGAVDQARAELAAEFLEDTRHLDTQLRGTRKKLAAAVRASGTTLTEVFGVGPVIAGTIIGDIADVSRFPGRDHFAAYNGTAPVEVSSGNRKTHRLSLRGNRRINHAIHMAAITQIRHKHSDGRAYYDKKVAEGKTHKEALRSLKRQISNAIYACLLADARRAGQQPAQRAREGNRGTTLTPARPAHTPNAGSSDKPLPDPGTTIRPGTRAATPSLPKPTSKKTPATT

SEQ ID NO: 382019 - protein, 400 aa, unidentified
MNPVIGLDVSKGESHAQAFLDRGVPHGKIFKFKHDLEGLASFLNYLRGVESAAGMRPSIVMEATGHYHSPVVQFLDEHQYLNIVINPLISHNAKKTNLRRLMTDAADAHLLGALFYKEEFEPYKKRGQHLMNLRYLTRQHESLTGMYVQAKLQFQAILDQVFPEYHGVFGDLYSKVSLRFLALHPTSKEVLELDEKEIAATIGRLTGRGKSALWCLERAQILVAAARRNPFKETAFPSHLISMQLLIKLLLQYQDHLADLNKSIEALAEALLEYDLIQSIPGIGTKIAATILAEIGEIDRFNHAKKLVAFAGIDPSVFSSGKFTATINKITKHGSRRLRTALYQAVRCGIRSNRNKKLRAYYDKKRAEGKLFKVAIIACVNKLIHWIFAILTTKEAFRLE

SEQ ID NO: 382020 - protein, 407 aa, unidentified
MICVGIDVSKRKSTVCFMAPGDKIIRRPFDVKHTKEELQPLVDEIRVQAKYDEIKVVMESTGVYHLSIAYFLQQNGIFVSVVNALKVANFNKAENFRHTKTDSIDSTNIARYGIAYWAKLPQFDLNGDKYFLLKRLCDAYLNFSEERSRILLQLQSQLEQTMPGIFDLFGGFDINSGKDKLLDFLERYCHIEDIIAKSEAEFVASYCGWAKEKGYRSNESKAATIYAQAKNGIPSIPNNPIVRETIMWYVGLLRRADEALMASLTRMEDIAKDLPEYELVGEMGGVGRVTRVALIAQIGDVRRFKNKHSLICFAGLTPSIHESGKFRALQNHIVKKGPARLRKVLYQVMMSLVMHKIPKDDAVYRFIKKKEAEGKYKKVAKVAGMAKFLRIYYGRVMHLYRDLGLAA

SEQ ID NO: 382021 - protein, 360 aa, unidentified
MKCTRKVSQLDSFFKGFEKRPWHVGIDVHKRSYAVAILRVDGQIYTWTSQAEPQALLTTFNRHGITPTRVVQEAGPTGYHLPRAFTRAGIDVRVAAPSKVPRPVSAGAKSDRLDCRKRAEYAARDMITGIAIPTCEEELFRGIVRQREELTRQIRKFKQKVRAALLFHEDAVGLELPSWSQSHIDILFSLEMPCALRFTLESLVAELRGIEANRTVVTAQIEELLCTHPIWKQRREMMMTVPGVGPCISAVYLAELFQPERFQRGEQVSGYVGLAPMVHHSGEKTPRGRIRPVGQKHLRSLLIEASWSLKERDPGMQKIYNTILARTGVAQKAIVAVARRLAVILWRIVLENRPYYSMPE

SEQ ID NO: 382022 - protein, 313 aa, unidentified
MSQNNTNILYVGLDVAKLSLELHLAGRLHTLANDAKGHAQILKLLRRHPQTHVVCEATGGYEQPVVRALHAAGLPVSIVEAGRVRYFARAQGQRAKTDPIDAAVLSAYGTTFHPPATVPASPQQQRLADLSQRRRQLIHSLTVEINRAEHYTDPLCRRQARQLHKTLEKQIKQCDQAIAKIIAEDAVLAHKAQRLDAIPGVGPVVAATVLAEMPELGQLNRQTAAALAGVSPYNRDSGGQKGVRHISGGRRPVRCALYMATLSAVRYDRILKEFYLRLRAAGKKPLVAITACMRKLVILMNHLLKKPNFSLAH

SEQ ID NO: 382023 - protein, 384 aa, unidentified
MDVVVTSNPKPEGKHMKTEKYVGLDVHKDTTVIAVAEGDRCGEVRQFGAVSSDLRALEKALKKIGGEGITLHVVYEAGPTGYVVYRRLKRLKIDCIVVAPSRIPQANGARQKNDRRDALMLARLHRAGELTAIHIPDDVDEAIRDMTRARADAVHDLTRAKQRLKSFLLRQGMHYPGKASWSAEHQRYLRALQFPIPSLRAVLEEYLFAYDQIVQRVQRLEELLEVHMPQWRMYPAVQALMCMRGFRLTAAAMLVAELGDIRRFSHPRHVMAFLGLVPKQNSTGQTMRMGAITKAGNPHARWILVEVVQHALMTPKVSRQLGIRQEGQPALYRDLSWKAQVRLHKRGWHLLRRGVMKAKVNIALARELAGFVWDLLRQAPTPTA

SEQ ID NO: 382024 - protein, 411 aa, unidentified
MRRVIGMDIHRTFAEVVFWEDGKLRPAGRVSMTRAGLEAFGRSLGKEDEVVIEATGNAMAVVRVLSPFVGRVIVANPLQVKAIAHAHVKTDKIDAGVLASLRAADFLPEIWLPDADTERRRRLMARRNQVVRHRTRIKNEVHAILHAHLVPPCPHAELFGRLGRIWLSRQIIPDDEAAAIHRHLCELDRLGEDLAGLDRKIAQTAVADPAVKQLLTITGVNLIVAAGLVAAIGDIRRFADPQKLVSYVGLNPRVRQSGLGLAQHGRISKRGRSHARAMLVEAAWAAAKAPGPLRAFFLRIRARRGHQIAAVAVARKLAVLCWHLLTKSADYQWARPALVANKLRSMELQAGQPARKGNKRGAAYAYNIKELRDREIELARHAEQAYERFVSRWQRHGNSTRRTGAASEERR

SEQ ID NO: 382025 - protein, 400 aa, unidentified
MRNNAFVPSDYDVFSGLDVDKRSISATFNNQQGHIRSLRMPNSVEHLVNHVRKHFPDQKVAFVYEAGPTGYGLYDGLVAQGYRCLIASPSMIPKAPGQRVKTNRLDSVGLAENLRGGQLKSIHVPSPVYRELRHLTQLRDTFVSAMVGMKQRIKSLLLLEGIEFPPAPAGSQWSIVVKHKLRKLPCSCTVRFKLDQLLDSLEFNEKQVVKTTQQMRRFCQNDPELSRCMGYVMSVSGIGRIVASQLLARIGDWRELKNVRQLGGFLGLVPTEHSTGDRTDRGSITQTGDGRLRSKLIQASWSAIRQDAELRESFASVCKTHARHIAPRVAIVAVARKLSVRISVVLMKQRPYVVREKVHSAPLTQEETSPQGTTRRKPEPGEPKLLTVRPLRQRSRGLVP

SEQ ID NO: 382026 - protein, 359 aa, unidentified
MQRNKISFSGQKIFVGIDVHKRKWSVAAITESGFERVHTQNASAQELIDFLHRHYPDGDYVAVYEAGFTGFSTYYSLAEAGIECLVIHPADVPTTQYENVMKTDKVDCLKLAKSLRAGLLNGIYIRPKDSIDERGVVRIRRAIIKDLSRYKIRVKHLLMSNGVILPEQFDKRRGSCWSGAFIAWLKSDIKLLSSTRRSLDLLIAQVERMRLAQLQATRELRSLSRTEAYRENYDLICSVPGIGGIVAMTLLTEVHDISRFSNERQFASYLGLVPTSHSSGDKTIHGEMTFRGNKELGPMMIEAAWIAIRNDIGLASSFSQYCRKMKSQQAIVRVARKLSNIIIAVLKNKRKYVPYAING

SEQ ID NO: 382027 - protein, 464 aa, unidentified
MNGDSKAGSGQEGGRKEEGIAALGRRVAGVDVGSKEHWVCAPVREGEGREVGVFGATTAQLEKMATWLIERRVESVALESTGVYWVAVYEVLEARGLKVLLVDGRALARVPGRPKTDRRDCQWIQRLHRCGLLQGAFRPPEQICMLRTLVRDKGNLVAEQGDWVRRMQKSLEQMNVRVHRAVADLTGATGMALVRAIVKGEREAGELAKLRDPRCHKSEEEIAEQLKGHWREDHLFSLGQALKMYEAIQERIQDYERAILEKLKAMEREECREQEPPELKNKKKAQTILHRGQEPLRQALYRASGADLTAIDGLGVETVQAVTSEYGTDLSAFPQEKQFVKHVLLAPNRPTSGGKPVKKKQKHGTASSRVAAALRMAALTLRHSQTALGAYYRQIARHKGDDVAVFATARKLATLIYRMLRWGKDYVDEGAEAYENRYREGRLRRLTSLARELGYQLAPLPAKP

SEQ ID NO: 382028 - protein, 385 aa, unidentified
MQKLNDLSRSLSPLDPNGTLIAVIEMSQSSWLVAGIVPGVERHPLKKLEPNEGELLRLLMRWRAEATKMGCTITRVTVAFEAGRDGFWLARWLRARDIEAYVIHPTSVAVSREHRRAKTDRLDTGLLKRVFIGWLRGEPDHCHMAAIPTLAEEDAKRPNREREGLVSERTRIVNRMKSCLARLGVRNFKPTLRKAPERLATLVTPEGAPLPPNTLLELRRDMARLRFVMDQIKEVEEARAQRLEQAPQENSHAMIRLLARVIGVGIETADMLVHEILSRSLRDRRAVARYAGLTGAPDESGSKRREKGLAKAGNARVRRGMIQLAWRFLLFQKDSALAQWYRTRTESGGKKRKTMIVALARKLLIALWRLVTTGEVPAGVVLRAA

SEQ ID NO: 382029 - protein, 354 aa, unidentified
MSQHHNVTAGIDIGDRYSHLCLLDTESGETIEEGRIPTSRSAFERRFSGTKPMCIAIETGTHSPWISRLLKECGHEVLVANARKLRLIYADGKKNDKVDAEKLARLARLDPKLLAPIQHRGESSQAHLAQLRSRDALVGVRTKLINHVRGAVKSFGARLPKCTAESFHKKVADSLPRELVSALEPILQSIASLTERIREYDRRLENVAEEVYPETKLLRQVHGVGVLTALAFVLTLEDPSRFAKSREVGAYLGLVPATDQSGGSDPEKHISKHGSTMMRKLLVSSAHYILGPFGEDSDLRRYRERIASRGGKNAKKRAIVAVARKLSVLLHRLWVTAEVYEPLHNASRCGGQAA

SEQ ID NO: 382030 - protein, 370 aa, unidentified
MKDKTYYTFTLGIDISKKRLDCCLNRQNKPIWEGSVDNTKDGLANLDKKVKYLGIEKTALLICCENTGIYTEPLKYFTENHNYNLWIGMPFSIKQSQGLVRGKTDRADAKRIAQYAYRYIDQYRLWHPPHASIRELKKLWGIRKTLLKVRKQIKQQLGEIAVMVSKKARMDIENYYCHTLTSLTKDMERVTEEIACTISSNEVLKTLHNTITSVDGIGTVTATLLIIVTEGFQKICDPKKLACYAGIVPFAHNSGTSIRRRERVSHFANKELKRALHICALSSVRGNNPFADYHRRKKEEGKHNMSVLNAVRNKLLRTVCACVRKCEAYEKNYTEHKPSNEIKESSEHPLTPPSKDEKDTGDKNIVNHNC

SEQ ID NO: 382031 - protein, 459 aa, unidentified
MTKRKKKSPRSAMPLDTLQQLNLNAAGLDIGAEEIYTCVPADRDEQSIQVFGTFTTDLYALADWLEACGIETVAMESTGVYWIPVYEILEARGFHLCLANARHLKNVPGRKTDVLDCQWIQQLHTYGLLRASFRPPEEICALRALARHRDNLIRYRSAHIQHMQKALQMMNVKLTQVVSDITGVTGLSIIRAIVAGEHDPQVLAGLRNSQCAKSKAEIAKALQGNYKPEHLFVLKQALAQYDFYLEQIQECDAELEAMYAALPPSDDQVSPPPKPRGSKPRKNQAHFDLATALYQMTGVDLTAIDGLDALTVHKIVTETGVDMSPWPTVKHFTSWLCLAPYNDKSGGKVLRRSSKKTQNRANTAFRIAAQSLSRSQSALGAFYRRMRAKHGPAKANKATAHKLARIFFHMLKYREPYADPGEAHYEQQYRERAIRNLKRKAARIGMELVPVAAPTPVVS

SEQ ID NO: 382032 - protein, 404 aa, unidentified
MLLVGIDWAERHHDVCVMAADGSVLACERITDGVAGVARLHELIARHADAPAEVVVGIETDRGLLVGALVAAGYQVVAVNPLAASRYRERHTISRAKSDRGDARMLADLVRTDRHHHRQAAGDSGLAEAVKVLARGHQQLVWARQRQANMVRSALRAFYPAALAAFGGDPGGRDAVAVLALAPSPELGRALSHAELVDALRRAGRRRQVEARAAAIQATLASQQLEAPPVVAAAYAQVVAAAIAVIASLSEQLAGLETALTSAFCAHPDAGIVHSQPGLGVVLAARVLAEFGDDPDRYANAKARKAYAGTAPITRASGLRQVVLARAVGYRRLTTACHLWAFAALTGSPGARRYYDAHRARGATHHQALRALANRLVGILHGCLRHRQPYDERLAWPAPTTVAA

SEQ ID NO: 382033 - protein, 346 aa, unidentified
MTILEDTRVITGGVDTHAGMHVAAALDPLGGLLGVREFLATAAGYADLLSWLTGFGPVAVVGVEGTGSYGAGLARYLAAAGVRVVEAARADRRDRHRAGKSDPLDAVSAARAAQSGRAGGAPKGRDGAVEAIRALMVAKRSARNERTQAINQARALLVTGPDDLRARFAGLTAAALADAIAALRPRPGDAAQYAVRIALRELGRRVEFLDGQLERLDDLIVPLVTARAPGLLSLYGVGPDTAALLLVAAGDHPERLRSEAAWAHLCGVAPIPASSGKVRRHRLNRGGNREANHALWRIVITRMSAHPATRAYIERRTKEGLTEKEIIRCLKRYVAREVYHHLRAGG

SEQ ID NO: 382034 - protein, 362 aa, unidentified
MTAVMIGVDPHKGSHTATALDATEHELACLRVRAGRRQVEQLLAWATPFEARTWAIESANGLGYLLAQQLVAAGEVVLDVPATLAARVRVLSSGQSNKNDPNDARSVAIAAMHAPMLAAVPVEDHRTVLRLMAKNHTDLARWRNKICCRLHALVAELVAGGISKEVVVSDAFALLESIHPEGVAAIERHRLAGQLADELVHVDDQLTLAKANIRTAVAASGTTLTDIFGVGPVVAAMLIGYTGDPFRFPTSGHYAAYTGTAPIEFSSAGRVVHRLSRRGNRRLNHALHIVAVTQIRHAHSPGRGYYDRKRAQGKTPREALRSLKRRLSDIVWRQLVDDARRAADCGGPGRTTRDDCKACVTG

SEQ ID NO: 382035 - protein, 366 aa, unidentified
MDKELYFGVDVSKKTLDLAYYDGETIDWKNAHIKVSNDDAGFKKIGSWVAKVGKDFDTFLFCMEYTGLYNQNFRLWLESKEYIYGMVEPRKMHHFEPDLDDDQRSLDRIKTDELDAFRIAIYCEQNHKKILRNPSKLPSPVYFKLKRLLAERKQNTKQSTLYKQQLHDICAYDTDLSVERKKLLLKNMMENQKAIDKEIDSYMNEDASISKNYDLLTSIPGIGRIIALETIVLTENFTAISNPRKYACYIGIAPFKKESGTSVDTQEKGKMRWHRTQCRQVQASPSYVCRDKAWNTIRGDRCIQELKCSKSELSYRLVYNYFSIQSFVCVFFTTFAGASEKEGTPDGGSELFCRRQRPFPDLVSPD

SEQ ID NO: 382036 - protein, 343 aa, unidentified
MDHFAGLDVSVKDTSVCIVDDTGKIAREVKVASEPDALLAVLKNPAYHFKRIGLEAGPLSQWLFSALAEASLPVICVETRHMRAVLKAQINKTDRNDARGIAQMIRVGLYRPVHVKTLRSQKLRILLTHRKLLQSKAIAVDNDLRGTLRNFGLKVGIVGKAKFEARIKELVEDLPDLAVLVEPLLVVRRVLREQIGVLHRRVLTVVRDDEVCRRLMTVPGVGPVVALTYRATVDVPARFRHSKSVGAVFGLTPSRDQSGEHDHPGAISRRGDEMMRTTLYEAAQSMLMRSSRWCWLKAWAMKIARHRGIKRAIVALARRLAVIMHRIWVDGTAFRWTRQAVAA

SEQ ID NO: 382037 - protein, 360 aa, unidentified
MSHNDFKIGETIEPQEASPVKQNISVLGLDIAKRVFHAVGLDDTGKIVFRKPLSRHALMPFIAQLPPVLIGMEACGGAHYWARRFREHGHEVKLMAPQFVKPYVKSNKNDARDAEGIGEAVTRPTMRFVPTKDVDQQDLQALHRVRERLMGARTALVNEVHGLLHEYGIVLPKGVSKFRQAVVGTLESEKDKLTPLSQEMFWKLVDEFAALEEQLAYYQEKLETVATTHPECRRLMTIPGIGPLTATALLAAVSDASAFKNGRQFAAWLGLVPRQHSTGGKERLLGISKRGDGYLRKLFVHGARAVVRGIRDKTDRRSCWIRGLVARRGFNRTTVAVANKNARIVWALLTSHQDYQPATG

SEQ ID NO: 382038 - protein, 342 aa, unidentified
MAIVGGIDIHRAQLTFDYVDLDSGEVFRGRIAPADRAQLRQWLDRFIERTDVAFALEGCTGWRYVVEELHRAGITAHVAEPAETAARRGPKRRAKTDRSDAQLLRDLLLEGRIPESWIPPQPVLEARALVRLYKDLLDERTGWLQRVHASMFQMGVPDLDVSTMSAAGRERITAAELSAATRTAVDVAMRQVDRLTAEMTMVREQIHAIGRRQPACRALQAAHYGIGPLTSVVIWAEMGDTRRFRSSDDAVRHAGLDVTVYSSDGRRSAGHLARQGPPMLRWALYEAAVYAGRPSSPDHAYFQQVKARLDGQLALLSMARKLARRCHHTLRNLDDQVLAPAA

SEQ ID NO: 382039 - protein, 344 aa, unidentified
MGEVITIGLDIAKSVFQVHGVDSAGAVVIRKRVSRAKVLVLFADLPPCLIGIEACPSAHHWGRELESLGHTVRLMPPSYVKAYLKRSKNDANDAEAICEAVTRPSMRFVALKTKEQQAALMLHRTRQLLVRQRTMLSNAMRGHLAELGIVSAKGRNGTGELLRIISDSTDSRLSPVARGIPEVLARQYSAIGPEIDSIQQGILAWHRSCEASRRLEEIPGIGPIVATALVAEIGDWKAFGSGRDLAAWIGLVPKQRTTGGKDRLGGITKQGNRYLRWLLVTGAMAVIRYAQRHGTRKRPWLGRLMDRRPTKVAAVALANKMARVAWAIMVHGDRYKEPELQAAA

SEQ ID NO: 382040 - protein, 337 aa, unidentified
MAIVSVYVGLDYHDDSVRVCVLDPNGETLANRDAANDPRAVSEVVARCGSPRGIAIEACCGAANFAAELERQTEWKVRMAHPGYVRRLKQGPDKSDHDDAWLLADLVRVNYLPDVWLADETTRQWRRLVRHRQGLIAERKNIKLRIRALLREERMSTSLAKPWTKVWTYWLRTLRLGEHSRWVLDEELLRLERLNQDIARAEERLVAAVGNDPLAKRLMEQPGIGLITAATLRAEVGNFDRFKSGKQLARFCGVTPCNASSGKRQADAGLVKAGNRELRAVLIQTAQRLPRHETRWRDMKLRLCRTKPANVATAAIANRWLRWLYHQMVAVPQVASV

SEQ ID NO: 382041 - protein, 345 aa, unidentified
MQIKSIGIDLGKTTFHLVALGAHSQAVIRKKFSRQQLLTYTANLPSCLMGMEAGVGSHFLGRALREQGHEVRLIPAQFVRPFVKSNKNDYCDAEAIAEAVERENMRFVPIKTADQLDLQALHRVRERLVSRRTSVINQIRAFLLERGISFPKGPASLRRQMPEILENADEKLSARMRCLLDFLWQEWKHLQLQIESLSEDLEKIASSDAACVRLQQIPGVGPLVATAVVSAIGNGAAFHKGREFAAWLGLVPRQWSTGGKPKLLGISKRGNPYLRKMFIHGARAAVLRVKREGSCLGQWMSGLETRATRNVVIVATANKLARISWAVLSSGNNYRPMHATVVGSN

SEQ ID NO: 382042 - protein, 314 aa, unidentified
MTEVARFVGIDISSRRLDIAVFPDGVARTVAYTDAGVTDLLAWLGTAGPIVSVSCEATGGLERRLVESLTRAGHPTRVLNPERVRSLARAGNGAKTDRLDAAMIARFASVFSGPVVVLDATRTMLSELLRLRQLQVEHLTAVRNASRGLSGAAARGLVARQLAGLRTEVAALTQAIAELIGADAALRRRQAVLTSMPGVGPVTSAALLAWLPELGAAGDRQIAALVGVAPYADESGERQGKRHIHGGRMALRNVLYMAALVAVRHNPVLAAYAERLRTSGKPAKVALIAVVHKMLCILGAMVRQDRMWEVAQAA

SEQ ID NO: 382043 - protein, 385 aa, unidentified
MRQLNDLSRSLVTLEQDATLIAVIEMSLSSWLVAGIVPGVERQPLKKLAVDESALLKLLHRWREEAEKAGHIIKRIAVAFEAGRDGFWMARWLAARDIEVHVIHASSVAVSREHRRAKTDRLDTELLKRAFLGWLRGERDHCKMVAIPTINDEDAKRPNRERESLVGEQNRNINRMKATLIRLGIRGFNPKLKKAAERLEGLRTPESEPIPPNTLAELYRDMERRRLLRDQIRQIEDARLARFEQAPNDGPHAMMRLLARVMGIGIETADMLVQEVLSRNLRDRRAVARYAGLTGSPDESGRKRREKGLARSGNPRVRRGMIQLAWRFLMYQKDSALAQWFRTRTENARGTRKTMIVALARKLLIALWRLVREGVVPDGIVLRPA

SEQ ID NO: 382044 - protein, 354 aa, unidentified
MNSVRYVGMDVHRDTISVAVLDESGRLMMQSVLATRAGAILDFIHGVRGTLHVTFEEGTHSAWLYDVLVRRVAKLVVCNPRKNALMKSGSKSDAIDARKLAELLRAGMLSPVYHGETSALEVQQVARSYSQLTEDTTRVMARLKAVFRGQAVSCAGKKLYGKRHRGEYLAQLGGGLRRRAEHLYQELDALQPLRHEVRRELIVECRKHAAARWLQSVPFLGPIRAALLIGRVQTPHRFRTKRQFWTYCGLGLETRDSGQYRMVNGQVERRRRPVLIRGLNWNHNHEMKNLFKSTATAASVRGGVWREFYLGLLDKGMRPEMARLTLARKIAAITLKIWKKGETFDAEHLKLQAA

SEQ ID NO: 382045 - protein, 359 aa, unidentified
MYERTSVGLDVHARSVSATALNSETGAITETTLTPDHDEISAWIRTLPGQIQVVYEAGPTGFGLHRALTAAGIDCVVAAPSKLHRPPGNRVKTDKNDARLLAQLLLLGQITPVRVPTVTEESARDLVRGREDVRTDLMRARHRVSKLLLRHGHVYYGGRAWTGAHHQWLHRIRFDQPGTAAAYDAELEAVDFALARRDRLDAAIAEMAAASEFTPIVRNLCCLRGVSTLTGFGLAVEIGDWSRFTGASIGAYLGLVPTEHSSGGSRRQGGITKAGNTHARRLLVEAAWHHKARYTVGAVLRARWEQAPEAARARGHAGNQRLHHRWETFGHRHKKHTIATTAIARELAGWCWSLATLPD

SEQ ID NO: 382046 - protein, 367 aa, unidentified
MKKVYIGIDAHKESNTVALAFAGKTEPELYGKVSADLNRFLTALRKIKKQHNLNKDEILLCYEAGPTGFVLARRLMKLGYECFVVAPSKIPSQSGDRVKTDRRDARKLARLLRAGELFGIHIPSVEDEVIRDICRGRTDAVDERSRTKKQLLSFLLRNGYRYKGTSHWTQSHMQYLRELILADPAQKIILEEYLQRIDFAVQQIERIDDQMEKVLQTWSRKPLVDALMGFRGFQQTAAMVIISEIGDFKRFQHPKKLMAYLGLTPSEDSSGGRRRQGGITKCGNGHARWMLVESAEHYRKPPMISAALSKRQEGLSREVLKLSWHAQNRLNKRSYKLTMRKLHPNKIRVAIARELSSYIWDLAQIVD

SEQ ID NO: 382047 - protein, 347 aa, unidentified
MRFYAKQHNHYCGIDLHARTMYLCILDSTGQVVLHKNMKADPKALAKAIKPFQDDLCIAVECMFTWYWVADFCEDNNLPFVLGHALYMKAIHGGKAKNDKIDSYKIASLLRGGTFPMAYVYPRAMRSTRDLLRRRNHLMRKRAELLAHIHNTNSQYNLPEIGKNLRYKSNRSLVEDRFDDKSVQRSVDMDVELINFYDEKLSSVEWYIKKHAKIHDYHSYVLLKSFPGIGAIISLVILYEIDDINRFPKVQDFASYARLVKCKAESAGKSYGTSGAKIGNAHLKWAFSEAAVLFLRCNPKGKAYVEKLAKKHGKGKALSILAHKIGRAVYFILKRKEPYNADRFLAA

SEQ ID NO: 382048 - protein, 363 aa, unidentified
MLGVLTSDATKEAPVSEQYAGKQIVGMDLHRRRSVLVRMTETGEHLETVRISNDPEYLRAVMERAGEAPEVVLEATYGWYWAADTLAELGAHVHLAHPLGVKMFAYRRVKNDQRDAADLADLLRMGRLPEAWIAPPACRELRGWVRHRAKLVGLRSSLKCQIHAVLAAAGVQVPMSDLFGAGGRQLLTSARLAPESRARVDSLLRLIEALDFEIELFATLVARRLREHPGYRTLLQIPGVGPVLAAIFVAEIGDIGRFRRPEQLASWAGLTPKHHESDTTVHRGRITKMGSRLVRWAAVEAVQRMPAHTRLGQIRDDVAARRGRNIGVVAAARELTELVFFGLRDGDIRRLATRPQPVAQPAA

SEQ ID NO: 382049 - protein, 332 aa, unidentified
MFLGIDIHKRYAQVAVMDEAGELVEEVRVENANLDDLAQQYAGAEAAIEATSNYYHIHDTLSEHLDVTVAHPEKLNLISDTDKKTDRVDAKELARLCRLNSVPESYVPTDEIREARALVRGRQKLVENRTEYANKIHGLLSDHGITRKTKPLSVKGREFLRELSLPEPWEELLRSYLEIIETLTDEIERLDEAIEDRAGSLKETQLLMTIPGVSYYSALMIYAELGEIDRFDRDKEVVSYVGLNPVIRESGDSRFEGGISKRGSGRMRWILVQCAQTAVHTCNDEYLRRFYDRLAGKKSSQEAIVATARKLLVSIYHMLDRREVYNPPGVST

SEQ ID NO: 382050 - protein, 324 aa, unidentified
MEVMFERVAGLDVAKASVAVCVRTPGARRGTRHTEVRTFKTTTGSLRLLRQWLVEQGVQIAAMESTSTYWKPVFYALEESMQVWLLNAAHMKAVPGRKTDVRDSQWIAELLGHGLVRPSFVPPPAIRQLRMLTRYRVQLMGDRTREAVRLEMMLEDASIKLSSVASSLTTVSARVILAAMIDGERSPQVLAQMARGRMRVKIPDLAQALEGSFEEHHARMAKAILNRLDLVEQSLADLDVIIRDQCAPWAHEIELLQTIPGVGERVAQVIIAEPGGDMSQFPSAAHLEPVTKVVGASDRCWRRGRWRRSGRQACRIGWRTRGGV

SEQ ID NO: 382051 - protein, 416 aa, unidentified
MNAVGIDVSSRKSTVAVLRPLGEVVCLPFDVSHDADGLASLAEKLKALDGETRVVMEHTGRYYEAVAKALHEAGLFVCAVNPLLIKEYGANSLRRVKTDKADAIKIARYALDNWADLRDFTPMDAIRYDLKTLNRQFQLASKQRTASANNLIALLEQSFPGIRKCFDSPVRSDGTQKWVDFAHSFWHVDCVRKQPFAAFCERYRKWCKRHAYLFKLSNAEEVYALAKRAVVLTPKAKVVKVLVQEAANQLSSISRSVEVYRAEMDRLAAMLPEYPVVMAMYGVGKSYGPQLMAEIGDVRRFERKQALVAFAGIDPMPNQSGDKNVRSNKSSKRGSPYLRKTLFNVIRTYLQCAPQDEPVFQFLNRKQAEGKPFYVYMLAAANKFLRRYYAKLRDFFASLDTLQSVDPIPATLKASL

SEQ ID NO: 382052 - protein, 421 aa, unidentified
MERCKRVIMEALYECAAGLDVHLATVMACRRRLMGQGQVEVEVREFGTTTGELRGLGEWLAEWGVTHVAMESTGVLWQPVWNVLEGRFKLLLVNAQHLKKVPGRKTDVTDAEWIAQCMQCGLLRGSFVPPEQVREWRDLTRQRMKLVDHHTAVVNRVHKVLQRGNIKLSSVASDVMGVSGRAMLRAMIEGESDPARLAELARGRLRRKRAELVPSLEGHLSEHQRWLLRRLLGEVEFLEREITAYDERLEELMRPFEAALQRLDTIDGLGRRGAENVLAELGPDMEPFPSSDDVTSWSGICPGNKESAGKRRSGRTPGGNRWLRRVLVGAAWAGIKTKNSYLGAQYRRLAARRGQKRAIVAVGRTILVAAYHILKEEVEYRDLGGDYFDRLNEEKTKRHLVKRLEKLGYQVELTRSERAVA

SEQ ID NO: 382053 - protein, 307 aa, unidentified
MANHVTKITLGIDVAKDQHLTYNWQTGQTIRLPNDIGEIKTFLMTFHGPVRIAIEPTSSYHLILVDEALALGYEVYLINPRQLVHYREAVNVRNKTDPLDAWLLARYLEHEVEQLRPFQPREPRAQRLWRLVVRRATVVKSRQQLQQSFAEVGVSIRGVLTQLQNLLLRIDRQILTLIRELGWWSDYQNCLSIPGIGSANASALVAAYHRGAFSGSDAFISYLGLDVRIRESGYFKGRRKLTKRGEPEVRRLLFCASHAARHYHRFADYYQRQLDKGLSKIAVRMILGRKLARIAFTLMRNEEVFMK

SEQ ID NO: 382054 - protein, 324 aa, unidentified
MNKIKKFFGIDISKDVFDVVDATEHHYQFRNDPTGFKEFGRLLDENSHCVMEATGCYYQGLATWLYSRSINVSVVNPLSVKRFIQMRLKTSKTDKLDAQMIRMYGESEQPNLWHPPSALIIEATELHKLIEMLVRQRAALKNRLHALKAKSITKSPVLTSVRRQIRNLSNEITELEIRLEAVIKEYESDLLTRLCSIPGIGRRTAIYLIVLTHGFEKFESSRQLISYFGLNPIIRESGSSVRGRSRISKTGNNHIRNLLFMCAFTACEHNKSCREIYQRIIAKGKSKKLALIAVANKLLKQSFAIAKSGLYYDEEYRSVYVNLG

SEQ ID NO: 382055 - protein, 353 aa, unidentified
MELDKYIGIDVHSSTLVVNARDALGKVVFQGTVPTNRDAILQCVGGLRGRLHVTFEEGTHAQWLYDVLRKRTDDVVVCDPRENRLIQDGSKGDRIDAGKLSHLLRMGAVKPVYHGQHGTATLKELTHHYDGLVEDSVRVMNRIKAIYRSRAIMTEGTRVYQPDQRDAFLAQLTEPGARRRAEALCQQLDMLLKLRREAEKAMVTEARRYEIYRQLRSIPQLGPIRIAQLIAIVDTPHRFQNKAKFWNYCGFAVVTHSSAEHRFVAGELIRSRKAIATRGLNKDHNPRMKQIFKSAATKARARGPFADYYSGLIARGMKPEVATITLARKIAAVTLAVWKKGEAFDPKKLKKTI

SEQ ID NO: 382056 - protein, 354 aa, unidentified
MSEKPNSSVAVIGIDIGKNSFHIVGHDERGAIVLRQKWSRGQVEARFANLPPCLIGMEACVGAHHLSRKLREFGHDARLMPAKYVRPFSKGQKNDFNDAEAIAEAVQRPTMKFVATKTAEQLDLQALHRVRERLVSQRTGIINQIRAFLLERGVAVRQGLRFLRAELPRLLATPPDVLSPRMVRIVEDLAGDWRRLDDRVEGLSSEIQAIARQDSGCERLMSVPGIGPIISSAMVAAIGAGDAFSKGRDFAAWLGLVPRQMSTGDRTILGKISKRGNRYLRVLFVQAAWVVLIKPKSWERHGLKSWIEAGKKRLHRNVLAIALANKLARIAWSVLARGQAFEVRKVDEADAQPA

SEQ ID NO: 382057 - protein, 344 aa, unidentified
MNNMHYVGLDVHKKTIAFCIKLIDGKIVEQGTVSTNKNELAAWAKTLPNSCIIAMEATMFTGWIYDFLQPYALEIKVAHPEMLKAIAAGKKKNDKLDAKRIADLLRCDLLPECYMAPTEIRELRRILRYRNLIIRQAVQMKNKISGLLMELGAEYDKERLHGQKYFYELLENLHDVPQSVINLLKLSRSNLEMFKDSQKKLLLFLQNNPIIQHRVELLKTIPGIGEVTALTWILEISDPYRFAQNRQAISYCGLCSAEKESAGKSSRGPISKKRNKHLQHVIIEAAKIAPIWNEQLALVRTKAIERGADCNTATLEVARKLVSYMLSVDKSGCPFEYRGLKKAA

SEQ ID NO: 382058 - protein, 313 aa, unidentified
MNTTITYLGLDIAKRSLDLSPHPSFTQRTYTNDAAGYRALLAALGQVGGSIQIICEATGGYEHELLAALHQAHVPLTLVNPRQVRDFARAKGLLAKTDSLDAAVLAEYGRLFTPAATVALSPVQQRLAQLVTRRQELLGLITQEQHRAEHHHERFVLRQAARLLATLRRHLAQLEEEIAQLEKTDATLAGQVQRLTGIQGVGQRTAWLLLAALPELGTLQRGQAAALAGLAPYNHDSGPWRGQRHIAHGRALARTALYMAALVAARCNPVLKPFYERLRAAGKPGKVALVALMRKLVELANLLLKSSSFQLTE

SEQ ID NO: 382059 - protein, 420 aa, unidentified
MSNKVIFNLDELFISVGIDVGADFSWMSIALPNQQFVGKPYKILHNSIDSLTTAVSKIKEAEELYSLESRIFLESTGIYHYPLFCYLRDKGFNCSVINPIITKNSTNINIRKVHNDRFDSKKAALVGLKPDLKVSLMPSDLALNCRNLCREYYDLMDNRSAYVNKLQGELRMAFPQYLGIFSKVTINTSLTLLETYTSPSAFLKADKQEIIDIIKSTARFGLTYAQNKYNAIIQAATDANQFGYIIDSNIKRIRLYISFIRKYDEEINNILESLHELVDANEDADFVKQIHLIETFKGAGFLSAVSIMGEIGDFSAFSKPKQLFAYFGLDPAVKQSGKFEGTKVQISKRGSAIARRVIHTLTLQSISISRNGEAKNPVLREYYLKKCDSKPKLVAMGAVSHKVCNMIFAILRDNKPSPAE

SEQ ID NO: 382060 - protein, 393 aa, unidentified
MDATHNHQGILSSPLSEGNEEKEERMIERVHGIDRHKQFSTISVLNRQGEEVQFLGACREFGKYVEGLGPTDAVVLEASTGSFWWADQIEAKGAKCFVVDPRKFRIIKDSWNKTDKQDARNLAKALWVHVVTGEFGIPTVYKPAVVVRDLRKLFAQYCLLNRQIATHKNNAQAIFVENGVELKKEAKSRLFAPESGLELLKEMDVSAASRVCLELTLQVLWKIAEAKERLAVEILLAGEPLKSQAELLISIKGVTPLIALAFLADVADVRRFRTLRKMNAYLGLVPRASNSGGKSRPGHITRESRKLTRTILTQCVHHVAASSESLDRYYRELREKRGTGRARIAVIRKLCGMMRRMLLSGEQYRWMDRGLYEKKLRQYERVLKRAKEERPAA

SEQ ID NO: 382061 - protein, 410 aa, unidentified
MERQVERCCGLDVHRDTVAACVRIGGGPGQRTQQHVQTFRTTAGDLVVLRDWLAAHEVTHVAMESTGVYWKPVYYALESDFTCLLVNAAHIKQLPGRKTDVKDCAWIAQLLEHGLLRGSFVPPAPIRELRDLTRYRKAVIQDRTRVVNRLHKTLEDAGIKLASVASDVLGISGRAMLEALVQGTTDPALLAELARGRLRGKLPALRQALAGRFRGHHAFLIGQLLAHLDYLDEAIGILSGQVETVIAPFADALTRLDSIPGINQRTAEVIIAEIGVDMSAFPSAGHLASWAALCPGNHESAGKHKSGKMRKGNRWLRTALIEAAAGASRVKNSALQARFRRVLRHRGPKKAVVAVAHALLRAAYHVLADHAIYRELGADYYDRQHGQRVTRRAIQLLERQGYRVTLEPAA

SEQ ID NO: 382062 - protein, 362 aa, unidentified
MRIIGCDLHARQQTLAMLDTTTGEVVEVTLKHEGDNVREFYSSLPRPVRVGIEATGSMQWFLNLMEELGIECVVGHPAQIRAAEPRKQKHDRRDADLILKLLAENRFPAIWLPSKELLDLRALLRHRHQWVRMRTRIQNALQSIALANGLRRGTALWSHDGQSRIASLPLAPHTAYRRSELQALYEKFEAEIEKLNQRVEEQACKRAGARLLMTHPGVGPITALATEVFLGDPARFADSKALASYVGMIPREYSSGGRQRLGGLSKQGNPLLRFLWGEAGAHAARKDPELQRFYRRKLVQKGLGKASVAVARKLGIRLWIMLRDQIEYNEFCRRGQKQQKSSDACAGMPETRNGAKSHRPVD

SEQ ID NO: 382063 - protein, 353 aa, unidentified
MAIVAESFDFVIGLDTHAKTHTLAVVTPAGLVADTGTVPTSSPGLGRATSWVSKHTGGPEGCSRVLVSMEGTGSYGARLAAVLTDAAYQVVEAITPTSRARGSRGKNDPIDAQLAARTVLPVDTSRLTTPRSGNLRAALRVLVVAREEMNGEATRAKHAVLALLRITDLGVDARGHLTGGTLTTVAAWRLRGEDLATATARTEATRLAKRVLALDLELAGNKTTCQAIVAQMAPRILELPGVGPITAAITLLAFSHPGRIHSEAAFAALAGACPIPASSGNTVRHRLNRGGDRRLNRALHTIVLVRTVYDQTTREYVQRRTAQGRTRREIVRCLKRYVARQLYRTLNTPTAMA

SEQ ID NO: 382064 - protein, 457 aa, unidentified
MARVKRSRRRRDMSPIHPHAAAIDVGARMHVAAVGPGRDAEPVRTFGTFTSDLHRLADWFARCGIRTVAMESTGVYWIPVYEILEQRGFEVLLVNARDAKHVPGRKTDVSDAEWLQRLHEYGLLRGSFRPQGEIAALRAYLRQRERLLDYAAAHIQHMQKALTQMNLQIHHVVSDITGVTGMRIIRAMVAGERDPDTLASYRDRRCHASVEAVRQALVGNDREEHVFALAQALELYDVYQAKVAACDKRIEALLKRLKEASAKPAEPLPAPRHKTRQPNAPAFDVREALYAVLGVDLTQIHGLGPYLALKLVGECGTDLSAWPSAKHFTSWLCLAPSNKISGGKVLSSRTRRSSNRAAALLRLAAVTVGRTETALGAFYRRLSARVGKAKAVTATARKIAVLFYNALRHGMDYADPGASFYEERYRRRVLSNLRRRAKSLGYVLQQTDPVPATTLVS

SEQ ID NO: 382065 - protein, 411 aa, unidentified
MEHQNHVFVGVDTHKNQHTACVLNCFHQKLGLTQTPNNPANYESFIQDINSFKTPDKKIIFGLEDTQGLGHSLSQWLLDQGYTVKEVNPALTKRERHHSANPDKSDEIDAEAIANVLLVDFNELPNALYDANFKAIRQLDNQRQTMVKEQTKLKNRFHNLIHQQYPEYQKFFSDPFGKTAMAFYEEFSHPSDLNYYGEKRLQNFLEDHVKSIGNDKAATILSLVDKNKKKTADAEARNTIIKSTIEHLRLIAKSLEKINKQLKKAVEESQYQLTTMPGINFKLAALFISNIKNIDRFESASKLARYAGLAPVEHSSGTSKNLSYKKYGCRDLNHAFYMLAFEQVGKTKNSKIKNPISYKYYQKKLEEGKSRAVALTCLQRRLVDIIYAMMRDKSAYKLPENIDYEVLDKAG

SEQ ID NO: 382066 - protein, 364 aa, unidentified
MNKCHLNTELSSLEGTRSEFNRSKAVIKLGIDVHQDYYVVVKQESGTNPKPAQRFQKEAFLHWVAKLTKEGAEIHAVYEACGFGFSLQRQLTALGIRCYVVCPQKLDERNKRVKTDGLDAKALCLKLDRFVQGNREALALVRVPTEEEEQKRAIHRQREQLVKARKRLEAQGRSLMVNHGMEPLSHWWKARTFAQLQVSEWMKELLSNMQPILLALQEKIRALTAQLQATANPKQPRGLGLLSSVVIDREIGSWTRFKNRRQVGSYTGLCPGEYSSGNTRVQSCVTKHGNPRLRAALVETAWRLIRFQPTYQPVLKWRKILAKGALATGAARKKAIVAVARQLAVDLWRIRTGRVSAAKLGLII

SEQ ID NO: 382067 - protein, 339 aa, unidentified
MELNVIAMDIAKKVFQLHWVEPDTGCIERLKLKRLQVLPWFANRESALVLMEACGGAHEWGRQLFKLGHDVHLLAPKTVRPFVRRNKTDAADAQAIWTAGQQPGAKFVAIKNDAQQVVLSLHRLRAQLMKMRIMQTNELRGLLYEFSVALPEGHRAFLKELPAALQEAQSRLPAMLIDSLDEQVRRINQLDVDIATIERRLSQQLRETPACKTLAEISGVGLLTAKAIVASMGSPTAFKDAREFAAWIRLVPKQTGTGGRVRQLGISKRGDSYLRTLLMHGARAVVRSDRASSWPWLSELLKRRPYSVAVAAVANKLARTIWAVLAKGQEWRPQAWHAA

SEQ ID NO: 382068 - protein, 422 aa, unidentified
MNSQPQSLSPDEPSFDAFVAIDWADQKHVWSLQAADSDQREHGEIQHTPEAIEAWVGGLFSRFPAQPIALAVEQSRGALVFMLSKYEYLHIYPIHPRAAAQFRAALYPSGAKDDPVDANLLLDLLVHHRGHLRRLSPDTEQTRLVQQLVEARRKLVNEKTRQGNRLTSKLKLYFPQILTWFDELDSALVGALLKRWPTLEALQKAHQATLRSFFTKHNCRRAELIEQRLEQIRQAIPAIRDAAVIQSAVAMVSVLVPLIATLRQGIAAIDRQIEQAAAAHPDFAIFDSFPGAGPVLAPRLLAAFGSQRDRYQSAAEIQQFSGIAPVLVRSGKTAWVHYRWACPKFLRQTFHEWAAHSIGFCDWARAYYEQQRNRGAGHHAAVRALAFKWIRIAFRCWKDRVPYDDSRYLQSLRQRGSPLTAG

SEQ ID NO: 382069 - protein, 338 aa, unidentified
MKIFAALDVGDKTTHICVLDGEGAVVWRGVCATDPDVVASTLKRYAAGVERVVLETGPLSAFLYHGLVEREVPVVCICARHAKGALSVRVNKSDVHDAEGLAQLARTGWFKAVHIKGSATHLDRAQLKVREQLIHARLAMANQLRGLLKLFGLRMGKVTTPGKRAERLEALLVQKPELRPILAPLVAGLEALDVQIATSTRSIKARAAADPVVALLMTTPGTGPITALTFKSSIEDPTRFERGEDVGAFAGLAPRRSQSGERDVHGRISKAGDPMLRSALYEAANNLLCRVKRPCHLQTWGKALVATKGAKRARVAVARKLAILLHRLWISGNSFQWA

SEQ ID NO: 382070 - protein, 457 aa, unidentified
MQQYYLGGDVSKGYSDFVILDSQKRRVEENFQLDDTIVGHSFLYDRLLIFFEEHPDAELCAAVESTGGYENNWYNTLRKFQSSLNIKTARLNPAGVCKNNEAGLKRVITDKISAQGVAEYLIAHPEKVMYQQQDYWASLRKQWSFIKMLTKQSTQLLNQLESLLYSTNPEILKYCQDGMPAWVFKLLKQYPTAAKLSKARATSVARIPYISISRAKELVASAKTSVASTTDTITGQLISATVGQIQHLQKTIRAQTKIMAVECTLQEVELLKTFTGIGDYSAIGLMLEIQAVERFTTTKKLASFFGLHPVYKISGDGAGGFRMSKKGRKEPRRILFMVAMSAINSNSLIRDLYQKHVENGMKKMTAIGLCMHKILRIIYGMLKNNTPFNPEIDLKNRERTSEQPQKERKDKSRRYQDFDANAPISGRQKKKRAERKLSQNAVSVECGICTPVPQLSS

SEQ ID NO: 382071 - protein, 401 aa, unidentified
MVSDFMKGRYNLMKIFVGIDIAKLNHFAAAISSDGEILIEPFKFTNDADGFQLLVSKLESFDKNSIIIGLESTAHYGDNLVRYLVAEFYQVCVLNPIKTCQMRKNNVRKTKTDKVDTFVIAKTLMMQDDLRFITFFDLDMMDLKALGRFRQKTIKQRTRLKIQLTTYVDQVFPEIQYFFKSGLHQNAVYALLKEAPSPKEIASMHMTHLANLLKVNSHGHFTKEQAKELRVLAQKSVGANDSAISIQITQTIQQIELLDSQLEKIEVEMTDIMKFNDSVIMTIPGIGYINGGMILGEIGDIHRFSNPNKLLAFAGLDPSVYQSGNFQAKTTRMSKRGSRVLRYALVNAAWNVVRNNATFKAYYDAKRAEGRSHYNALGHCAGKLVRVIWKMLTDEVEFNLE

SEQ ID NO: 382072 - protein, 400 aa, unidentified
MSKRKAQVWAGVDAGKGHHWAAVVDETGATLWSKQVDNDESAILTALGEILELADQVHWAVDISGTSSALLLALLAAHGQRAVYVPGRTVNRMSGAYRGEAKTDARDAYVIAETSRQRRDFATIDVPAQLAADLALLTAHRSDLVADRVRMINRLRDVLTGVFPALERAFDYSSHKGALVLLTGYQTPAAIRRRGRARLTAWLANRTVRGADTVAVTALEAAQAQQTSLPGEDVAAQIVADLATQILALDDRLKRVDKQIRETFRGHPQAEIIESLPGMGPILGAEFVVAAGDLTTYADAGHLASAAGLVPVPRDSGRRTGNLHRPKRYSRRLRRVFYMSAQTSIIRDGPNRDFYLKKRGEGCKHVQAVIALARRRASVLWALLRDNRVFTPTQPVPQTA

SEQ ID NO: 382073 - protein, 413 aa, unidentified
MQVVHERCCGIDVHKKTVVACVIVPDEAGQARKETRTFDTLTGDLEVLAGWLAAQGVTHVAMESTGVYWKPVFNLLDGRLQVLVINAEHLKKIAGRKTDVQDAEWIADLLRHGLLKGSFIPSAILRELRDLTRYRSRLGDERKNEVNRLQKVLEDANIKLASVASDVMGVTGRAILDELVRGHTDPVLLAGLAKGRLREKRDLLEQALVGRLRPHHRFLLAQHLSHIDFLDEAIDRLDAQIAEQMRPFEAALARWDSLPGINQRLAEIIVAEIGADLQPFEDADHLASWAGMCPGNNESAGKRKSGKTRKGSKWLRRALVEAAHGAARTKNKYYQALYHRLVPRRGKQRALVAVGHSLLVTGYYLITRQQSYRDLGANYFDERDREGVKRRALRRLEQLGYQVQLMPVAVPTA

SEQ ID NO: 382074 - protein, 417 aa, unidentified
MIVAMTDPKKSSTFERYLAIDAHKHYVVVGGLNAQLEIVLPAHRMDIERYSQWAKENLTQQDCLVIEASTNTWDLYDITAAVAGKVVVAHPLTVKLIANARVKTDKQDVFRLVRLLAGGLIPEVWVPPEPVRELRTLVAHRRRLIQMRTMTRNRLHSLAHRHNLSLPEGGAFADKNQDLCKSLSLSPVEKLRLQQNLALLEFLELEVKAVDAELARLSCCDPWKEAFPYLVQLPGFGLIVVMTILSAVGDIQRFPTSKQLVGYSGLGASLHQSGETNYSGHITKQGRKELRYALVEAAWVAITSSPYWREQYQKLSHRMSANKAIVAIARRLLVAVWHVLTERAADRRADPDMVASKLMIWSWKLNDAQRGGLTSRQFVRYGLMRLKIGQEIDCIKRQGNRPIASVEEVLGACLNSI

SEQ ID NO: 382075 - protein, 442 aa, unidentified
MARKPSKQRFTVVHPDCAAIDVGGREHFVAVDPRHDNAVQSFTSFTDDLYKLADWLQSLAIKVVAMESTGVYWIPIYEILSERGFEVYLVNARATRQITGRKSDVLDCQWIWQLMTHGLLRGAFRPDDLTCCVRSLVRQRASKVKDQAQTLNRMQKAMSQMNIQLANVISDISGVTGMRILRAICAGERDPVQLAELTDRRIKAGKEAVARSLHGNWRREHLHALTQELAAYDFLEQQIADCDDAIKTALEQLPVLQNEPEPAKKALRSPHRSGAQQTELHQTLWKVLGVDLTAIPTIGVDTALVLAGEIGTDLSRFPSSQHFCSWLGLAPPTRISGGHRLAGGGPKIVNRAAQALKQAASNARNDKGFIGASHRARLTRMDTSCAIKATAHQLARLVYNLLTKKRAYVEQGLEEFETRSQDRQVRALLRKARKLGYQLVAA

SEQ ID NO: 382076 - protein, 313 aa, unidentified
MSENIYVGIDVSKDTFNVASCPNVLNTSLPNTPQGHNELCELLKQHPVILIVMEATGGYEKPIIAELLEAQLPAVVVNPRQVRDFARGMGQLAKTDAIDAEVLAKFAQVVQPARRPHKTTATTDLTELVNRRRQLNNLRTQESNRFAMAHHQKVRKSLEQVIKMLDRQIAQIDELISEHIKSDDNFSQKDKILRSTPGIGPQTSAMLLSQMPELGELNRQEIAALAGLAPFDRSSGKWIGKGHIWGGRSEVRSVLYMAALTARRCNPVIRPFADRLESEGKAFKVVLTACMRKLLIILNTMLRNQTVWTAKIN

SEQ ID NO: 382077 - protein, 340 aa, unidentified
MKNFQFTVGIDVSKLTLDWAVYDGQKIIFNFNGQNNNEGIKAFLKLLKKHNIDADKCLFCMEHTGLYNNPSLYCLSEKKFSVWLESALQIKRSGGLVRGKNDTLDSERIAKYAFKNQNDAKLWTPCRDIIIKLKALTKLRTRLISCINMLKVSANESKDFQSKDIYNSLNSNTKKSVNSLNSDLTSVEGSIMKIIREDEVLNNLFNIATSVVGVGTQTAIAIIITTNEFKYFESPRKYACYAGVVPFDYQSGKSLNFRPRVSSYANKEVKKLLHMGAMSAIAMKSEFKEYYDRKMEEGKSKMLIINSIRNKIIHRVFACIRENRKYSKIYEPIPQFSFNK

SEQ ID NO: 382078 - protein, 338 aa, unidentified
MEHHKIIGIDLAKNVFFLCEINHKGKNIGRKKIYRTKLLSHIANLEPSTIAMEACSSAHYWARAFSNLGHRVLLYPPQHVKSQRRKQKNDYNDAEAIAELALYHRDHPVPHKSIEQQDVQSLIKMRRLLVTERTRLINQVRGLLAEYGVIIARGKASFRRAIPEVLENPDNQLSPILRELIQQQYERYLSIERQVDWFENKLAQTLKQFDNARRLTSIPGFGPLTSQAVAVWLGSGQQFKSGRDASAAMGLVPKQHTTGDKVVLLGITKQGNTYIRSLLVHGARAALRRAKYKSDKLSLWALELEKRRGPNRAAVALANKLMRIAWAVIRRNEEYQPA

SEQ ID NO: 382079 - protein, 385 aa, unidentified
MKDLNQSYAAFDQVSTLVCVIELSQNSWLLAGAVPGVERQPRKKLSTRPHELLGQIRRWRAEAEKARQQITRIVAAFEAGRDGFWLARWLRNHGIEVYAIHAGSIPVPREHRRAKTDRLDTEMLMRAVLGWLRGEPRHCRMVQIPTLQEEDARRPNREREVIVREQTRLINRVKATMAWLGITGVSLTTRDATKKLAELRTPNGEPIPPFTLGELHHDLERLALIRKQIKEIEERRVKQLKAKPAEGTNPLVLMLAQVRGIGIETADLLVHEILTRNLRDHRAVGRYAGLTGSPAESGKMRREQGLAKSGNVRVRCSLLQLAWRWLMWQSDSALAQWYRGRIADASGGTRKKMIVALARKILIGLWRFVTTGEVPEGLALKPAAI

SEQ ID NO: 382080 - protein, 414 aa, unidentified
MEAIVERSCGLDVHQATVVACLLVGAADRKPRKEVRTFGTMTPDLVRLREWLRAEGCTHVGMESTGIYWMPVYSMLEGEFELVVGNATHIRQVPGRKTDVKDSEWIADLLRHGLIRRSFVPPKPLRELRDLLRYRRKLVESQTAERNRMLKLLETANIKLATVASDVFGVSGRRMLRALLKGTLTPEQMAELAKGSLRKKLTVLASALDGRVEGHHRFLLSMQLERMEEVEATIKKLDERIDEKLVPYQEQHKRLTQIPGVDRIGAAVIIAELGVDMSVFPTVRHAAAWAGVCPGNNESAGKRKGTPGRRGNIHLTTALVQAAVCASRTKGTYLKEKYWKLKARRGPMRAALAVAHKILIAAYHMLATGADYEDLGPTHLDRLSITTTTNALVKRLERLGYQVTLKEATAQTAN

SEQ ID NO: 382081 - protein, 347 aa, unidentified
MSITMIGLDTAKSVFQIHAVNETGKTEIKRKLSRNDLVPFFKKQELCTVVLEACGAAHHWARILTGLGHDVKLIAPEAVKPFVKKGKKNDAADAAALCAAASRPDMKFVPAKSLEQQGILALHSARSLLVKQQTMLANAMRGLATEFGLTVPKGINKLEELTVLVDADEAFPVKARQAFTGLSDQCKSLTESIMTFEAEIVAHARHDETARRLATVPGIGPITASLIAATVGDIGMFKSARHFAAWLGLVPRQRSTGGKTRLGRITKTGNREIRKLLVLGATSMVYRAPQWKSAAGLWFRGVLERRPVRLATVALANKMARIAWALMTRKEVYRAKGRAEVATEAAV

SEQ ID NO: 382082 - protein, 391 aa, unidentified
MNRNTGMHAGQVIGWMSGLQVVGMDIAKSVFQLYTVDMKTGELRDKRLKRDKVLEYFRLMAPAMVAMEACGGAHHWARQLQKLGHQVRLVHAQAVRPFVQGNKTDVTDARAIWLAVQQSGMRFVAVKTEAQQAALTLHRQRQQLIKMITMQLNGLRGLLYEFGVTLPLGRKAMLAQVVGAIDSVAPVLPKMTVDSLLQQVQRIVQLRQAVDEVEVSLKQLISQDRQMQRALSIPGVGILSATAAVATMGDPHHFKSGREFCAWLGLVPRQEGTGGKVKLLGISKRGDKYVRTLLVHGARSVLLRKDQSSDWQTELQKRRHKNVAVVAQAAKIARTIWAVLAKDQDYQANHKSVRPQHSSAAAQEPSQDGSPTCPPRRSFVAGDARRRGQVS

SEQ ID NO: 382083 - protein, 317 aa, unidentified
MTTPNDAYVGIDVGKTWLDVALWGSNAVWRVSNDDEGVAEIMARVTALSLPLIAVEATGGYEQLVVQTMLLNSLPVAVVNPTRVRALSKATGKLAKTDVIDARLIAEYAFKIQPEALAPKEAQEIRLNALVTRREQLVAMRTAEQNRLGTAHNSTQVDIREHIEWMNTRIQELEVEIDGLVNSLPEWRKQAERLDSIPGVGKITAVTVLAEMPELGQLNRQKIAALAGLAPFNRDSGQKRGKRRIFGGRKGIRRVLYMACLSATKYNPVIRSLYLRLMKKGKLFKVAITACMRKMLTIMNAMTRDQVNWRPPEPIPS

SEQ ID NO: 382084 - protein, 396 aa, unidentified
MESAVYLGVDIGKSGHYAVAVDASGKPIYQTAVPNDEAALRKLVIWAKEHQATVVVDQPGGAAAVLLKLCWASEVRIGYLHGLAMARARDFYAGESKTDPKDAFVLADVARAHASRVVWLEPSSEALAHLELLCGYDADLRSDANRLTNRLRALLVTHWPALERALGERLDTRGVLAVLQHYPSGPALKDAGVDQLVAALKAQRVHRAEAFAKHLHQAALAQTVTISGSATAAGLISELAVQLAAILARRVELEKEIEHGFFALPEAPILRSLPGIGPRLGARIAVELGSISRFRTPGHLAAYAGLGPTPWKSGTSINANRPSRCGNHRLKNALFLAAFASLRHEPSRSYYDRKRAQGKRHNQAVLCLARRRVDVLHAMLSRGVPYRSPVPLAAAA

SEQ ID NO: 382085 - protein, 410 aa, unidentified
MEVLYPHCAGLDVHEDSVVVCVRHMAGSKVTTQVKTFQTTTQALMLLSEWLAGEGVMHIAMEATGVYWKPVWHILADGDCELVLANAAHVKNVPGRKTDVNDAVWLADLLAHGLIRASFVPDEPTQQMRDLLRTRKQLVRERASHTQRIQKTLEDANIKLDSVVTDILGLSGRRILEASIAGETVPQALATLAHRKLRATADELEAALRGRITDHHRFLLKLHLNQIEALDAAIACIDEEVSANLEPFRAAIQRLSAIPGISRLSAEVLVSEIGMDMGRFPTAGHLVSWAGLCPRNDQSAGKRRSTRMRKGAPWLKTTLIQCAGAAARTNNSYLQTQYLRPRSRRGPKKAVGAVAASILTAAYHMLKNNTAYHDLGANYFDRQAKNTQASRLARRLKKLGFDVLLTPLAA

SEQ ID NO: 382086 - protein, 398 aa, unidentified
MTESSDYESVQVFIGVDVGKDTHHAVAINRSGKRLFDKALPNDENKLRSLISDLKQHGQILLVVDQPATIGALPVAVARSEGVLVGYLPGLAMRRIADLHAGEAKTDARDAAIIAEAARTLPHALRTLKLADEQIAELSMLCGFDDDLAAQTTQASNRIRGLLTQIHPALERVLGPRLDHPAVLDLLQRYPSPEKLASLGEKKLAAQLCKLAPRLGKRLAADIAQALAEQTVVVPGTNAAAVVLPRLALQLITLRKQRDEVALEVEQRVLAHPLYPVLTSMPGVGVRTAARLLTEVACRAFASVAHLAAYAGLAPVTRRSGSSIRGEHPSRRGNKALKRALFLSAFAALRDPISRAYYTRKMSQGKRHNQALIALARRRCDVLFAMMRDGTFYTPQAS

SEQ ID NO: 382087 - protein, 475 aa, unidentified
MSNYFLGIDVSKGYADFVIVDQKREVAEPTFQLDDTFQGHQQLYQVLSRFIEERSGARLYAGIESTGGYENNWLAALGRFQASLPVQVARVNPMQVRSHAEAEGSRTITDGVSARYIATFLLAHPNKVRYQREDALSELRDQWTFIEQLKKQRTALFNQLESLLYRAHPELMRYLSGKTPAWLLKLLTRYPTAERLGRARPRTVAKIPYVSDARAEALVERASTSAASAAGEVTEELVRELARQLLHFDGLIGKHEERLARALDLPQDVELLKSFGAIGDYSAVGLLLEIQTVERFSSAKKMAAFFGVHPVYKQSGDGVGAMRMSKKGSSRMRQLLFMITLTAIQDHPIIQPLYERLVEEEGKAKMVALGACMHKTLRIIYGILKHQTPFDAEIDRRNRARARGQSTGAHEEKKRRYQRYDVSAPVSDRTRKRRRLQRDSQGAVDTMCGISPPTAAYLEQPPVETNGSQKQRCST

SEQ ID NO: 382088 - protein, 373 aa, unidentified
MEAALKPLKYGIGIDMGKDEFHACISAIDANQRVKIKATRAFKNTSKGILDFLQWSDHHCKQTGVPIHYLMEATGVYYEQLALALHRQRAHVCVVLPQKAKYYIKALGVKTKTDGVDAQALAMMVCQQAMEAWRPISEAMYILRQLTRQYAELQTLKTQIGNQLMALEAGMYHSLTVKNQLETLITELDRQLAQCLKLIHKAIMENAEWKRKTEQICRIKGVGELTVANLITETNEFALFENQRQLMSFAGYDVVENQSGKRVGKTRISKRGNSHIRRALHMPALMMVTYEQRPFMDLYERVFQRTNIKMKGYVAVQRKLLTMIYALWKKDEAYDPTYVPVAQKKVAPTEEATRHQPQGAVLEEANIGELVES

SEQ ID NO: 382089 - protein, 354 aa, unidentified
MGTQKIIAVDLGKFKSVFCVMDVMSRQHSFETVPTTPADVHDLLARHVTADAAATHVVIETCDTAGWVHDLCAALGVAITVIHANGEAWQWRRVKRKTDRDDALKLAKLALMDQLPAVHVPSPPQRQKRRLILHRRSVVTRRTQSRNAIRSIFSQQGLSLVPGGRQWTKAGLEQLREQARPLAACGPDDLWRGRLAIELDLMAAVDQQLKLIDATLDALADDRTKLLQTIKGVGPRVAEATVLYLDDPHRFKNANAVAGYAGLVPKQIESGTMSRHGHITRRGPSLLRSMLTEAAWMVWRHNAWAKLWVQKISHGSRARRKIAIVALARKLLTMLWAMLKTNQPFREPTAAMTG

SEQ ID NO: 382090 - protein, 453 aa, unidentified
MGQGNNGLSRGDANRNARLAALRAVLPSDHAILGIDLAQSRQAAALTDHDSRVLVRWRPRCSPWQLDDLLERALRAARSAGFSGVTVACEPTGHRWMIVQQLAAGRGIPLVCVQPLVVARAREAEDYTRGKSDDKDAVLIARQAAQLHCYLPERAGAAWARLRHLGARRTRLITDSSACMQQLRDLLEVAWPVVLDAAGDPLRSATWLACLGVALAGGDGDLDAVHARGQCAFLDTARAGVGAWGATRICRRIATAVYAALPDRAGVLAQRPGALERALAALRDWKVVRDELDTVNAAMLKLLDHMGILAVAGSIPGVSAISVAAILAETGDPSRFATARAMVKHAGLAPADNSSGNRSGEAKISRRGRPTLRLAAWRAVWGALRHNQVYATRHAELTSRAVDKLTVQQANAAIAAALIRQIHAIITSHTPWDPDIAAGRRRPSRQEEDAKAA

SEQ ID NO: 382091 - protein, 347 aa, unidentified
MEQISRIGMDTSKHIFQLHGVNAAEEPVLRKKLRRKEMAKYFEELPPTRVGIEACASSHHWARLLQSFGHEVKLIPPQFVKPYVKRNKNDAADAEALCEAMSRPTMRFVPVKTAEQQAALMLVGVRERLVRNRTQLSNTIRGYAAEFGITASKGLIRIEQLLECVVTDEALPALARELFALHGKEYEQLDAQLEKIEARLMAWHRADACSQRLAQIPGIGPIGASMLVMKTPAPETFRSARHFAAWLGLTPKDHSTAGKSKLGGITRAGDEALRSVLVVGSTSVLRRVRQRGTGSPWLINLLKHKPPKVAAVALANKNARIAWKLMVSGEHYRPAKPITGFNSPRAA

SEQ ID NO: 382092 - protein, 479 aa, unidentified
MARTRKKPVPAPAGEGVEVIDAPVQVIARAAAIDVAKGSGMVCTRLPSETRAGRRTQRVQEVTATFAAVVALMDHLVNQGIERLVLESTGDYWRIWYYLAEAAGLEVWLVNARDVKHLPGRSKSDKLDCVWLCKLNEWGMLRRSFVPPEQIRDLRALTRLRTHLVHDRTRHQNRIEKILEDALLKISSLISDLMGASGRRMLAALVNGERSPKALAALGDYRLRAAPAQLEAALTGRFRDIHAFEIGMLLELTDDLTAKITRLDQQITGLLEQIPGISGACTSCGVTGGGGHAPGCASDQAKVLSVIERLDEITGVGIPTAQVIIAELGTGMTQFPTPGHAAAWARLTSRTIQSGTTARNGRTGKGNPYLRGAFGAAVMTAANTDTFLGERYRRIARRRGKQKAIVAVARTICEIACLIINDPGFRYIELGAGYYARLDPKRQTSNKIRELEKLNPGMVVTLTPREPDPGTPATQAPAA

SEQ ID NO: 382093 - protein, 345 aa, unidentified
MEHISRIGMDTSKHIFQLHGVNAAEAPVLRKKLRRKDMMAFFAKLPPTKVAIEACGASHHCARELQSLGHSVKLIAPQLVKPYVKRGKNDAADAEALCEAMSRPTMRFVPVKTAEQQAALMLIGVRDRMIRNRTQLSNAVRGHAAEFGLTAAKGMAHLVPLLERIEADESLPALARELFAIQAKEYAQLQTRIGEIDARLTTWHKADECSQRLAKIPGVGPIGAVLLRMKTPEPAHFKSGRQFAAWIGLTPKDHSTAGKVRLGVITRAGDEGLRSVLVVGATAVIQHAQRSGKASPWLVELLRRKSPKLAAVALANKTARIAWKMMVTGETYIAKSVPAAPAGTV

SEQ ID NO: 382094 - protein, 250 aa, unidentified
MNNDIKYFGIDISHLVFDVTDSDGNYYQFKNSLIGFKKFMKLLDFNSHCVMEATGYYHYQLAYYLQENSVVLSVENPLSVKRFIQMKLSKIKTDKSDSKLICEYAKQVDLKLWQGNSKHQLECLQMTRLLSVYTKQSTMLKNKLHGEAVLGHPSKLVVTSLKRSLRQLKKEIDTIEEKLLLLVNEVHKDVLTRLKSIQGIGKKTSLMLVVLIDGFDRIKSAAELCSYAVLHPIISQSVSSVNGLAPFSIL

SEQ ID NO: 382095 - protein, 402 aa, unidentified
MRYFAGLDWGSVEHAACVVDEQGVIVARFEVQHTADGLGKLLRQLAGIAPPQQLAVAIERPSGLVVDTLADAGHPVVPIHPNQLKACRPRYRAAGGKSDPGDAYILADVLRTDGHRFRTLRPPSDEVRALRALVRSRDDLVAERVALANQLRALLDSFWPGAAALFADIDSPIALAFLKRYPTPQRAHRLGPQRLAAFLARNGYSGRRHPAELLERLRSAPTGLAGPLEQEAKGEAVLDLVTVLSTLVTRLRRLTSAVEHAVEQLPVGRLVMSFPRTGKVNAAQIVAELGDAPSRFPTERQLAAEAGVAPVTHASGKARGVTFRWACNKRLRRAITTWADNSRHAHPWAQRVYSHARERGCDHPHAVRILARAWVRVLWRCWHDHVAYDPARHGAARQLQVA

SEQ ID NO: 382096 - protein, 327 aa, unidentified
MTSHQLGVDVSKAKLDVALLQVNGKFKSKVFENTVQGIEALMRWLSEHLAGRLQDVHVCMESTGNFHEALACRLTDQGLMVSVVNPLLVKRFAESEGLRNKTDAGDAKCLARFCREKAPSRWEAPSLGVRTLQALVGRLQTLQAMHQAECNRRDVAHASVADSLERVIADLDKAIEQVRAQISKTIDDDPDLRERARLLQTIPGLGDKTIPQLLAFIGRPQRFKSVKALIAYASLAPSIEQSGTSVNRRRSTHPMGHQDLKQALYFPALVAGRYNPVIAAFWKHLSAQGKPGKVVVVACMHKLLAIAYGVLRTGKSFDPEYSGASTA

SEQ ID NO: 382097 - protein, 340 aa, unidentified
MEKATTIGLDLAKSVFQVHGIDAAGGVVLRRKLRRPEMLEFFAALPSALVGMEACGGAHYWARELTRLGHTVRLMQPAYVKPYVKRGKTDAADAEAICEAVTRPTMRFVPAKTEAQQASLVELKVRDMLVRQRTQTINALRSHLAEYGIVAAQGRKVSELIAVVRDGDDTRLPGLAREALDELVGQLEALEQRIARLDSRMVRHARENEVARRLASIPGIGAIGATALATLVPDPHGFASARHFAAWLGLTPKPHSSGGKERLGRISKQGNSMLRRLLVLGATSRLRHARRSPDVADWTTRLLARRPFKVAAVALANKMARIAWALLVRGGTYNTAATAA

SEQ ID NO: 382098 - protein, 438 aa, unidentified
MSNNVIFNLNELFISVGIDVGADFSWMSIALPNQQFVGKPYKILHSSIDSLTTAVSKIKEAEELYSLESRIFLESTGIYHYPLFCYLRDKGFNCSVINPIITKNSTNINIRKVHNDRFDSKKASLVGLKPDLKVSLMPSDLALNCRNLCREYYDLMDNRSAYVNKLQGELRMAFPQYLGIFSKVTTNTSLTLLDKYTSPNAFLEADMQEIIDTIKSTARFGLTYAHNKYNAIIQAAHDANEFGHIIDSNIKRIRLYISFIRKYDEEIESILDAMHELVDTNEDTDFVKQIHLIESFKGAGFLSAVSLMGEIGDFSAFSKPKQLFAYFGLDPAVKQSGKFEGTKIQMSKRGSSIARRVIHTLTLQSISVSRTGEAKNPVLRDYYLEKCKSKPKLVAMGAVSHKVCNIIFAILRDNKPFEIITPQEHIKQYNAAKCDMAA

SEQ ID NO: 382099 - protein, 391 aa, unidentified
MTYFIDLDISKYKHDCFVMNEYGDVILETFSFDNNIIGFNTLLNELQKLDPSFEKKIGLEATGHYGLNLKIFLEKNNFSYMEINPILINQFSKATTLRRTKTDKKDASLIALYISTMTYKPYLNSSYHLQCLKSLCRMRWSLVEERTRYLVYMTNILDQIFPEFKPFFSNGFKSSTAMYLIENYTTASKIARMNIDSYNKMKAQLRHTLSYARFLELKQLAKDTVGNEDEILTYQLKTYLELFKELDTRINEIESLIASEYLGLHCHIHTIPGIGVISAATILSEIGNIERFETANQLLSFAGLEPSVIESGTMSFKGKMVKHGSSNLRRVLMNCAEMQLVHNPKFYDYYLKKKNEGKHHRVCLSHIAKKVVRIIFYLERNDCDYDSHKVR

SEQ ID NO: 382100 - protein, 350 aa, unidentified
MIIIGCDYHPGFQQIAFVDTDTGELNERKLGHREEAEQFYRQLKVRGKKVRVGMEASGHARWFERLLTEVQFELWIGDAAEIRTKRVRKQKTDRQDAELLLRLLIEDRFPRIWVADGENRDLRQLLWHRHRLVQMRTRIMNQLHVLALNEGVRRKKALWRPAGRAQLQSLVLARWASRRRQDLLELLDQLTPKIQELTRALEQEVEKRPVARRLMTHPGVGPLTALAFELVIGTPERFGCGKQIASYVGLVPSEESSGDRRRLGHISKQGNSLLRFLLVEAAQVTVRTDPDWRRRFLHLAMRRERRIAKVAMARKLAVRLYWMWRKEWDYEQMRKFGSHVGEPVHRQGAS

SEQ ID NO: 382101 - protein, 340 aa, unidentified
MGEYIGLDVSLKETAVSIRREGKRVWRGKCASDPQLLAALIRKHAQEAERVVFETGPLSVWFFHALTAEGLPAICIDARHAKAALDMAANKTDANDADGLAHLAEVGFYKEVRVKSFDSMLARTLVAARTRLVRIGTELSNQIRGLMKTFGLIVPPASGSKFERQVEALLADNADLGRIIRPLLEAWHAVRLRAAELGRKLLADARRSDACQLLMSIPGVGVVTATSFVTAIEDPTNFKHSRSVGAWVALTTRRYQSGEIDYDGHISRRGDSHLRGLLYEAATVLLTRSRSECDLRKWGLQLRERLGFKRAAVAVARKLAVIMHTMLITGEAFKETRITA

SEQ ID NO: 382102 - protein, 438 aa, unidentified
MRAKCNDDLSTVNFSTIGLDVHKNRLVACAVHVQHDAKGREVHEKEYFESTGTYSGRQRLTEWCSSQNADLILMESTGIFWKAPFRDLEKADLHPVLINPRIFNRGSDKRKTDKSDATWLANLARLGLYRASFIPAEPYRSLRLVQSQIKSLVAERQRLKNRLVKVLDDSGFRFTVAFADIGGASSQSLIAGILEDAPREELALMIDPLCKKSIEEILDAVSGELSQINKDIVQSILRLIETHTKEIETLEQTVIRELKKCEKVKQNIRLMTTIPGVSQKSAQLMMSMIGPDFVENFSSPHAFARWLGVCPGNNESAGQIKSGRTPHGQRLIKKVLTECAQAACHTKGSHLAVLFGGWKHKGFCKAVMAVAHKLALLIHWVVVNQKPYIDKEFDYTGVFKQDGQRRPRWIRALRRYGLMTLADVEKEKAARGWIIAKA

SEQ ID NO: 382103 - protein, 423 aa, unidentified
MKNSTVNKRKQVPAGYLVVGVDPHKKKHAAVFMTQDFMTHSKLKFDNSREGFETVLERARTEMLKTGCRGVIFAIETGAHHWRNLAYFLDEKGIPLRLINQFTLKRRREGKDLNHRKNDYRDSEVAAQLLCTGEFNAARLSQGVYAELRAAYGSYRRLVKERTRIVNLIKSLLDGLFPEFTQVFKNPCGQTAASVLCTCAVPQAIAGMTESEFVGAIKAACQGRVMKGKLWALHHVALTSIGIGAGAQSVSSEIAFLIEKLRLIEQQLRQIKEALTRLVHETMEGKYLLSIIGLSYVSVAGIIAELGSFSSYQNAKQLIKMAGSNPTESESGGKRHSHTPISKQGRPVLRHCAWTAVIPMLRFNPDFRDWAKKLRERPAGANPLSGREVMVAAVNKLLRLAFALVKNQTLYQIPESQPVEITI

SEQ ID NO: 382104 - protein, 426 aa, unidentified
MNEYNSIYKLKAVNKNCAGIDVHKEFVCVTTLCGSEDNILMDYHKFRTTKAELHKLKELLLNQNIKVVGIESTGKYWYPVYNALHEVINLNVYNARHIKNIPGKKTDKADSEWIARTTRFSELRPSFIPCERIRKTRSLSRIRKDFLQKRSGVRQLIHGYLEQSSIKIGSVLSDVFGVSGRNLLELLVRYKNIHSKAVAECLHGSLQNKLDEVLLAMDGYMDDDYRYAFKLLLGMEQRISEAIKDTEAKLKSMLITNESEQKTLARLTTIPGVSNLSAMLILAEVGFDLNSFPDEDHFSSWAGLAPGKHESAGKNKTGKIQVRKSHFRTLLVELALSASRTKGTYCSVKYRILRARSGPQKATISIAHHLAKAIYMIIKHSQEYKELGGDHFSKVNANSTKKRIEKMIDQVGVDVFKEYLTENHLI

SEQ ID NO: 382105 - protein, 402 aa, unidentified
MNCVGIDVSKGKSMIAVMRPFGEVVVSPFEVRHTASELSELARLLKSLDGETRVVMESTGNYHAPVAWLLHDAGLYVSVVNAMLVHDYGNNSLRRGKTDKKDAVKLANYGLDHWLTLPRYVPEEDTRLMLKTCYRQYQQYSKVQTMLKNNLISLLDTAFPDANRLFTSPPRADGSEKWVDFVATFWHCECVCGLSKKAFTAKYQKWCRKHGYNFSQDKALDIYASACGRFGVMPKTNTAKLLVEQAISQLQTTSAALAALKQEMQSLAASLPEYPVVMEMFGVGPTLGPQLIAEIGDVRRFHSKKALVAFAGIDAPPYQSGQIDVRSRSISKRGSASLRRTLFLVMSVILQRAPMDEPVYQFMNKKRSEGKPYRVYMMASANKFLRIYYASVKAYLDSLEHN

SEQ ID NO: 382106 - protein, 305 aa, unidentified
MKEQLVYLGVDVAKSYLDAALGNEQRRLANDAQGHRQLINWINKIPASVQVICESSGGYERALVRALVGAQLKISLVPANRVRQFARASGTLAKTDRIDAKLLGAFGEAIKPGLMSASQLEQEHLRELESQRRHLTRLLVMEQNRGARLSDVYVQRLNRSLINQIKKQIRQLDLLIEKQIEHSAKARKLTAISGVGARTAALLLAQLPELGQLNRRQVAALVGVAPFNRDSGRMRGKRAIYGGRRPVRHGLYMAALVAARHNPILHQFYLRLRAAGKPPKVALTATMRKLLIVLNSTLKPDLIYA

SEQ ID NO: 382107 - protein, 342 aa, unidentified
MIYHTGLDAHHSCSFFQHMDAEGDIGLSERVATDAESISEFLAQVDEPTTITFEAGRNYWWLHEFFANHPMVSQVNVVDPRRSRKLASELSVLSGYGRAKNDFIDAEMLAEQTRRGLAPTIHVPTADQLEKRTLCRHRFNSVMNRTRAKNLIHAILDLHGYSARIADLLTPSANRNQFMESLPAYVSFIVEQLVARIKLFDQQIASCETQLDRVLPESHPQMKIVMSAPGFGIVLSRIVHTEILDIAYFKQPKYLISYVGLAPIENESAGRKGSIKLNKHCNYYLKYAFVEAAHNARDNPRYRRKYDLDVKRHGKIIAKLNLARRLAKTVYWMLTRQQLYRA

SEQ ID NO: 382108 - protein, 394 aa, unidentified
MAFKIFRKNCCGLDVHKTWIYACMGITDTNGRTEYKQARFSSFTKGLQKLADWLAKYDCNDVCMESTGKFWIPVFNILEKTCWVTLAYPKYTKPQKGNKTDHKDAKWICDLYMCDMVNPSFIPPPDIRQLRDLMRYRSKLTNIMTSEKNRALNCLTVSKLKLDDVFSDVFGKSSRSVIRYILEHPGETFQVAPFIDRRCKHPVEEIQAVIDGTISHQQAVKLRECLQHLDELEVHKTNVEKEILCLVQQYPYQLELLQTVPGFSGNIMTAIALISEIGADMSVFPSAKHLVSWAGCCPRNDQSSKKVKSTRISRAGVYLKPLLVQVAIQPFTANADKLSAAGALEIRCQICDGRFLSMWAALFIFLGCPLPPCPKNLHVHNGRIVILASVAWIF

SEQ ID NO: 382109 - protein, 348 aa, unidentified
MTRFAGLDVSVRETSVCVVDEAGKVLVERKVTTEPDDVIELLRSISSEYGRIGLEAGPLSQWLVNGLAEAGLPVVCVETRHMKALLKAQQINKSDRNDARGIAQMMRVGLFKPVHVKTLASQERRMLLTSRKLLQRKLLDVEADLRGTLRNFGLKVGVVSTGGFEARIRELVAGFRSLGAIVGPMLAVRKVLCEQFAVLHRLLLGLVRHDPVCRRLMTAPGVGPVVALTYRAAVDQPQRFLHSKAVGANAGLTPKRVQSGESDYDVGISKTGDVMLRTMLYEAAQSLLTHSGARWSWLKAWGLRVAQRRGMRRATVAVARRLAVVLHRMWVDETDFRWSNKSPAAMAA

SEQ ID NO: 382110 - protein, 343 aa, unidentified
MDHFAGLDVSVKETSVCIVDDTGRILREVKVASEPEALLQVLRNPAYRFKRIGLEAGPLSQWLFSALVEAGLPVICVETRHMQAVLKAQINKTDRNDARGIAQMMRVGLYRPVHVKTQRSQKLRMLLTHRKLLQSKAIAIENDLRGTLRNFGLKVGMVGRVKFEARIKELVENLPDLAELVEPLLIVRRALSEQTVILHRRLLAIVRDDEVCRRLMTIPGVGPVVALTYRATVDVPARFRNSKAVGAVFGLTPSKYQSGEIDRSGRISRCGDEMMRMMLYEAAQVMLLRSAKWSWLKAWAMKIARHRGMKKAIVALARRLAVIMHRIWVDGTEFRWTRELAVP

SEQ ID NO: 382111 - protein, 457 aa, unidentified
MAKKTKSKAKGSCRMLPVMHPDAAGVDIGAEEIFVAVPADRDVESVRSFDTFTRDLHQLADWLQSCRVRTVAMESTGVYWIPLYQILETRGFQVFLVNAQHIKNVPGRKSDVSDCQWIQYLHSVGLLKASFRPPDEICVIRSLWRHRESLVQMAAEHTMHMQKALSQMNLQLHHVLSEITGVSGLAILDAILAGERDPAKLASLCNWRVRSSRETVAKSLEGDYRPEHLFALRQSLVGYRFYQKLLFEVDQELERSMRDLPRAVGAPVQMPPRTKTCIYQRAGNEPTFDLKAELFRIAGVDLTDVPGISTITAHTILMEVGPDMSRFRNASAFASWLGLCPEKQVSGGKVLSTRSRKVKNRAAIALRLGAHCLYRAKNYLGEFHRKMKWRLGAPAAVTATAHKLARIVYHMLSTKDPYSESVLVQCDRQASTRAEIRLRRQAANLGFQLTPVSELDS

SEQ ID NO: 382112 - protein, 326 aa, unidentified
MILGIDVAKQKFDAALLLPGGKIKSGTFPNSPEGFSSLFSWLKKTGAVKVHACMEATGVYGHNLAKALAGSGHKVSVVNPARIKGFGQGELIRSKTDKADAALIARFCQAMRPEEWTAPPPHLERLCELSRRLDALNGALLRERNRLAVTRDEVVIESIQTMILHLRKEAARIKAAIRTHIENHPELRRQSDLLSSIPGVGPATITAILAELSPAGGFQSARKMAAFAGVTPRHHQSGSSVRGKSRMSKTGSGRIRKALYMPSLVAKRRNPILFEFAERLRAAGKPPMVVVGAVMRKLLHIIFGVLKSGKPFDPMIEINKMTAHVC

SEQ ID NO: 382113 - protein, 310 aa, unidentified
MNTIRVVGIDIAKSVFQVCVWMIDGSVAWNRKISRQKLLDTLHQFEPGTLIAMEACSTSHYWGRTFSAMGFSIRLIPAQYVKAFVRSQKNDANDALAICETACRPGIHFVPVKTTEQQDIKVLRNTRQLMVEQRTALANQLRSLLAEYGLIIPVGIQCLQQHLSEFIEDTSNDLTFTLRRLISSLREDMQALNERISGLNSEITALSSQQAAYRHLLTIQGVGPLIAAAFISEVDAVQFSSGRELSAWCGLVPRQHSSGGKQRLSSVTKNGNRSLRTLVIHGARSVMRCMKKRDDRLGLWLKNLRPVAGF

SEQ ID NO: 382114 - protein, 417 aa, unidentified
MKCFVGLDISSTKLDVCIMLSDTSTPVTASLSNDLSGATEIKNHILDLNHTYHFERIVIGMEATSLYSFHPAMFFHEDRQLKELHVEIMVEQPNKIKKYRDAFEENKNDTIDAFYIADYFRIERFSPSFLKEEKYMALQHLTRTRLQIIEQLTRTKQHFIENIYYKCNTLAYQFKKEELSTNLWSSTMMTLMTDEMTLDELANMPLQELDDWLQKLGKGHFKDSEKLAQTIQAAIRGSYRLSKLQQDSVNVILGLLAREIRNLEKMIKEIDKAIEDMVETIPEYQCLTSIPGVGKVYAAGIIAEIGQIERFKDHPQVAKFAGLNWREKQSGNSNSQHTSLVNRGNRYLRYYLVEAANSVRRYDDEYKDFYKKKYHEVPKHQHKRAILLTARKFVRLVDVLLRNHQLYTPPRRIMEDN

SEQ ID NO: 382115 - protein, 343 aa, unidentified
MRTVTTIGLDIAKSVFQVHGVDAAGEVVVRRQLKRRYVLTFFQKLPSCLVGIEACASSHHWSRELQALGHTVRLMPPAYVKPYIKRQKNDAADAEAICEAVTRANMRFVETKTPEQQSCLMLHRTRHLFIRQQTAVINAIRAHLAEFGIVAPVGRNGVEELLGVVADSSDKRVPEIARTCLAALGAQLRMLKAQILEFDRMINAWHRSNETSKRLDEIPGVGPALATALVASIPDPKAFRSGRDFSAWIGLVPKQHSSGGREKLGSISKQGDRYLRSLFTAGALAVIRYAKIHGTKHRPWLTALLARRPTKVAAIALANKIARMAWAMMAKGERYKEPVALAA

SEQ ID NO: 382116 - protein, 417 aa, unidentified
MEVLYSRCAGLDVHKNTVVACVRVAVEGKVHREMRTFDTTTTGLLTLSSWLAESGCTHVAMEATGVYWKPVWHILAADGFALILANAAHVKNVPGRKTDIADAAWLADLLAHGLIRASFVPEPALQEIRTLLRTRKQLGREKTAHVQRLQKTLEDANIKLDSVITDVIGVSGRAMIEALIAGESDPAALARLAHRRLKASPGKLSEALRGRVTPHHRFLLRLHLQQVDAVDTAIAQIDQEVEANLAPFRAAAQNLTAIPGVGALASRIIVSEIGIDMSRFPTAGHLLSWAGLCPRNDESAGKRRSTRLRKGAPWLKTTLVQCAWAAIRKTGSYLQAQFRRLRARRGTKKAICAVAASMLTAAYHMLKDGTEYQDLGASHFDQRSKQSQARRLIKRLQDLGIAVDIKPSHEPPVLVSC

SEQ ID NO: 382117 - protein, 394 aa, unidentified
MKLVGIDVGKNSHHFCVMDKETGELNVTPSSFSNNKEGFDFLINSLKPYSKKSILLGMEDTGHYHVALLKFLLSNGYTVALINPKTTDLTRKMEGGITKNDKLDTITICDVLDTPERKKQYRITKVDRFDLYEQRQLTRHHHNLKEELNVYCNRLQKSIDLVFPEFNTLFSSKYGIVYMNLLKTFGSAEAIASTDIRTIRKFFEIKGKGNRISLTPEKLKECAKNSIGISSGVETIQIKHLVSQITLIKEQIAEIDKKIEEFSITNNSPILSIPGISHFSGTSILAELGDIGNYSKPSQIIKFAGVAPYHYESSQYNAQHTGITKKGSKYLRKTLYQIILTVINNNPVFKKYYLLKISQGKGHRCAQGHCIRKLLRIIYHLLETGQSFDPALLR

SEQ ID NO: 382118 - protein, 326 aa, unidentified
MLFIGIDAASNNHEAAITTLHGEVLTEPFTIPNNISGFKKLRSEIYSHTEHHNNVRIGIEETGIYHKNITEFLALCGFTVHTINAVLTSHSRKSQSVRLTKTDKIDALSICRYLEFNFKRLNSYTPSLYINEELKSLSRARFDVQNKLSKAKTEYTRLIDLSFPEFKQHFNQHSKWSYKLLSQYPSADKISRAHLKTLIKIIAIKGDRTAAANQLKSIAKNSIGSQSVTNELLLTNVLEDIKHFTSQAKRFEKSISKIVEEHYENILSIPGIGNITAGLIIGEIGDISRFKSSSALLAYAGLDPIVHQSGKFKATKVNISKRGLHT

SEQ ID NO: 382119 - protein, 497 aa, unidentified
MTTKSTIYSRCNPQLLKLFEEAGHPAKVLCVALDYAKAQHTALICNGLGDLLKPSFAVDNTLQGATQLVSEVRACAKHRKIRSEHVFFGGEDQPSFAENFLRHLRQEKFLVVRVNAWEAKQQRDNFQASNDSLDLLGIARCCLNRRGESVRDLPEAYPNLRLVTRDRDKLVRMRTAVSNRVHCYVDRLFPGFLSAGQSGLEPFCRASLELMEDRFSPSQLSRRPRQALAEWLGRRGITQPQDTADQLKQLAKAVLEPAPEQTPMLQQTLAQLVGLYRGLEESIHRIDREVAHWLARTPGAWLTSIPGFGITLAAGWTAELGLPSQWRAVRRLCSYSGVVPKSKQTGGPAKEPVVGPVQPRCNKRLKNVVLQAVEKVIQYGPEELRQTAQELEARGAHTEFAMAKRLVRLGKYLVLTGTVYRPKALMDPETPKAILAAHYQSVWEKLLPKWREKADLRDVFAPEHPLGQWRKMVQELYALELRLPQPKAGQPSSALTP

SEQ ID NO: 382120 - protein, 406 aa, unidentified
MKQYLGIDVAKHEHVLGSRYESGEQHGKAFAFANDEKGFASLLERFRELEAAPEESLVVMESTGHYWMALWEFLVAHGYEVAIVNPVLTDAFRKADTLRKTKTDQVDAFLIAEYARFKNLGPTRVSPEGAEGLKQLTRYRHHLVSERTALKNRLTSVADRIFPELAGLFSDKHSATARAILNEYGTAARVAATDIRTLTKTVREASRGRHGRAKAEEVKEAAKKSVGTTFAAEALAFEASHIASLVEHLDAETANLDAEIARLLDPEVGALLQSIPGIGPVCAAAIAAEIGDPDRFDDPKKLMAYAGMDSTKFQSGKFDGDEQHMSKRGSAPLRNALMTAADGARRFDPYFGDYYDSLRARGKHHYVAVSGCARKLCGVILAVLRERRPYESRPSIQSQRKQPDQG

SEQ ID NO: 382121 - protein, 337 aa, unidentified
MTQVHILAIDLAKRSFQACGTDRGGAVLFNRVVSRARLQQLLSEQSPCIVAMEACATSHFWGRFAQGCGHNVRLIPPIYVKPFVKRQKNDAADAAAIAEAAQRPNMHYVEVKSAEHQARAVAFRTHQCFVRQRTQLINALRGHLGEFRIVVAQGPANLTAVVGILADETNDLPAGVREIGALYLDQIRLLTEKIDGLMLKLRDATKSNEDMRRLCTVPGVGPVTAGAILAFAPDLRAFKSGRNFAAWLGLVPRQHSTGGKTRLGGVSKMGQTDIRKLLIVGAMSLIRWIVRKGVLPDNWLGSILGRKPRMVAAVALANKMARIIWAMMTREQNYRMA

SEQ ID NO: 382122 - protein, 399 aa, unidentified
MNDGYGVYLGLDVGKGDHHAVGLAPDGRRLHDAALPNTEARLRQLFDKLARHGRVLVVVDQPASIGALPVAVARACGHQVAYLPGLAMRRIADLHPGTAKTDARDAYVIADAARTLPHTLRRVDTGDEALAELEVLVGFDDDLAGEATRVSNRIRGLLTQIHPALERVLGPKVHHKAVLELLSRCGGPAGLRKAGRRKLLSIAAVHAPRMGDRLVEQIMTALDEQTVTVPGTQAAETILPRLADSLRDVLRQRDQVAGEVERILDAHPLAPVLTSMPGIGVRTAARILLEVGDGTAFPTPGHLAAYAGLAPVTRRSGTSIRGEHPPRGGNKNLKRAFFLAAFAALADPTSRAYYDRKRAEGKRHNAALICLARRRCDVLFAMLRDKIPYQHRPTAQIAT

SEQ ID NO: 382123 - protein, 412 aa, unidentified
MKDLLEISCGLDIHKEKIVACILTGPLGKPTHSEIREFTTLIPDMLALRDWIISENCHHIAMESTGIYWIPIYEILEDAFSGDITLLVVNARHMKNVPGKKTDIRDSEWISTLLRAGLLNASFIPEKRIREFRDLNRYRKSIIRDITSQQNRVEKFLQSSGFRLSSFISDIFGASGRNIILHLMEHGQIDKMSLDSYLKTKTRKRIDEILMSVNGTLSEHQKSFLKILMCHYDSMKEHLIEIETHLQEDMLPFALQIEQLNTIYGISTTASCAIIAEIGTDMKPFKTAEHICSWAGLCPGNNESAGKRKSTSITKGNPYIKSMLCEIAWVIAGKRNTYLSAWYWRIKQKKGARKAIVALARKLLVIIYTMLKQGTNFDENCFEVRRKNCEQKQLSRYIRELEKHGYTVEAQV

SEQ ID NO: 382124 - protein, 354 aa, unidentified
MDNIKYIGLDVHRDTISAAVLNGSGRLIQQSVLMTRAAAILDFIGGVRGALHVTFEEGTHSAWLYDLLSRRVEKLVVCNPRRNALLKSGNKGDAIDARKLAELLRAGLLSAVYHGETSALEVQQLARSYTMLTEDTTRVMGRLKAVFRGQAIACTGRKLYGRHRNEYLAALGVCALRRRAERLYLQLDALQLLRRQARHDLVVECRKHTAAKWLQTVPFLGPLRAAVLIARVQTPHRFRTKRQFWNYCGLALETRDSAEYRVIDGQLERKKRPALIRGLNWNYNHELKNVFKGAANAASVGQGEFRKFYLRLLKKGMRPEMARLTLARKIAAIALKIWKKGEPFDAEHLKSQAA

SEQ ID NO: 382125 - protein, 387 aa, unidentified
MFYCGIDVAKHKHAVSLLDEKGQVVKAVFTITNNRSGFDQLREALQVQPGPVQVGLEATGHYWLALYDELTRNSYPVTVLNPLQIAAYRKTGIRKLKSDASDAVWIADYIRVANLGPTTPDLPVLLQLRELTRFRFRLSEQIGDVKRKLLTILDRVFPEYEHLFSSVFLHASRAVLREAVSAQEFADFDLQELASLLAEASRGRFGQEKAEKLQQQARLSIGVAFLVDVAHIEMGCLLAQINLLEEQRSRVDQAIAELMQQIPQHITSIPGIGPVTGAAILAEIGDIHRFETLDKLVAYAGIDATIYQTGQFEASEAHMSKRGSPYLRQALWMAAIAALLHDPSLKAYYQKKRDEGKHHGTAVGAVCHKLLARIFVILKEQRPYVIR

SEQ ID NO: 382126 - protein, 406 aa, unidentified
MEAVHERVAGIDVHRMKHVVTILIEQDGAVSRETREFGGFKRDMRALVAWLQENRIQNIVMESTGIYWKSVFSHLEAAGLAALVVNAFHVKNVPGRKTDVSDSEWLAQLARFGLLRGSFIPPKDLRELRVVSRYRRKLTATLAGEKNRLHKLLDDAGIKLGGVVADIDGVYARKMVEGLIEGRTPEQLSALGRGRLKSGREVLEAAMDGDLSARHRLVLKMILSHLRYLEQELAQLDRYLVAAMQPYIWAWRLLQTIPGIDQISAAMILIEIGDDLRRFGSAARLASWAALCPGNNESAGKRKTGKVRHGNPIVRYLLCEAANAARKTKTLFRAKYESLVIRRGHKKTIIALAHKLIRTIYVLLARRKPYRDSTFDYEAASVAKNAPRWIRALKKYGYWPQVAAAS

SEQ ID NO: 382127 - protein, 423 aa, unidentified
MNDSTLCIGADIHLKDIVLRGIDKTSGQEVIKRFRVTNNLPGAKSAATTIAQAATNLGYTHIEIGWEATGMLWLPFHRFLASSSLLQPFTPDLVCFNPKLVAKFKEGLDLRGQKDDELDAYDVAARLRFGELPLSYVPDDFWQGLRRLTRYRYQLSRTISREKMRFQSIAFLKCSDWKRVSPFSDILGVTSATLLTQFTAAELRDLSLPELTDIIARRGRGRCVDPDATARAVQNALHSSYPIEPQLDEMVTFSLAAIWDHIRFINRLMKRLDKQIARAIEPIPNPIITVKGLGPVITAGILAEIVDISRFPEHKQVAQYFGLTWRKRSSGGFVSQNTRLTKVGNVYGRYYFILGADRLRMFNLEYKAYYWRKYQEVSKYQHKRALVLSARKLVRLVHALLTKNVPYVRPRMPVYLQEDELLQ

SEQ ID NO: 382128 - protein, 352 aa, unidentified
MFIVGIDVAKRSHEAVIINDSGNVVKKAFNFTNDFKGFSKLLEAIHSVSAEPTDFIIGMESTAHYWLALYSNLRKVHYTVRVLNPIQSNALRGLYIRQIKNDERDCFIIAEVIRFGRHPIGELPPPKLYELRELCRARTFIMDMVADLKRKVIALLDQVFPEYETIFANIFGDTSSELLRNCSTPEEILAIDIKKLAKLLEAPSRKRFSTKKAHEIQEVAATSFGIVLGFDSMSFLIKQHIEHIQYTEKQIDIIDEKIATIFSQFNTYLTTIPGIGLTLGATIFSEIGDITRFPSSAKLAAFAGIDPSIQQSGEFMANHNHMSKRGSPYLRRALWQASTLAIMRDSALKTFF

SEQ ID NO: 382129 - protein, 354 aa, unidentified
MRITQSYIAKNQNIFIGLDDSKKSWKICVRSNNLTLHETSMPAQYKNLSTYLQRHFPQCNISVLYEAGFRGFNLYDHLTTDGIKCIVTPPNKVTTEKDFRYKNDHTDCRRLAKILETADYKECFVPDPERRRDRQVSRTLVQIQKDIIVTHNRIRKFLEYHGIDENLKPGRWNESDYNNLKSLKLDDTLQFCFDILLQQLERLKSIHRLLFHKLRQIREKPRYIKTFNLFQSAPGIGWLTAIRLVLEWGEDLSRFQSDKQFGSFLGLVCSEYSTGDSIRFGHITRQSAYFIRSWLIQCAWVAINRDPALNHKYQQVMINSGNKKKAIVAVARKLAIRLRHCVLSNEPYCVGVLQ

SEQ ID NO: 382130 - protein, 339 aa, unidentified
MNYCAVDLHGNNGFYGIIDEDGKRVFRKRIANDLPSVLEALEPYREQLRETGIVVESTFNWYWLVDGLMENGYTVHLANPAAIHQYDGIKNTDDDTDAFFLAELARLKILPEAHIYPKEERPVRDMLRRRMLLVRQRTQHKLSLGSLFSRETGGKLSSNAISKLKPADAGKLFDSECNNMMAGINLEAITFFNGQIKSIEKVVIGKVELRKEFEVLLTAPGIGRILALTIMLETGSVDRFAKAGNYTSYCRCVKSKKTSNGKNKGQNNGKNGNAYLCWAYIEAANFMKRYCPEANAWHQSKTQRTNKIVSTKALASKLSKACYFMMKNQEEFDVKLLFG

SEQ ID NO: 382131 - protein, 409 aa, unidentified
MYDKTKFIYVGLDLHKEQHTAVIMDCFNEKLGEITFQNKPSEFSKLLVKAKRYCTGGKGIVFALENSYGYGRALAAWLIERGHIVKDVNPALSYAYRKSVPQYKKNDSYDAQCVARVAINELNKLPNAMPEDMYWTLSQLVNRRANLKTHHIRLKNQLHEQVCVAYPSYKQFFQDIGRPTALYFWEHYPSPRLLKGKTVEELAEELIPVSHNQFSTRKCQKILNAVKSDGDTTRDYQPERDEITRGLVRDVRHYVTQLEEVDRAIADFLPRFECTLNTIPGVSDTTVAKLLSEIGDIRRFPNANKLANFAGIAPVKFSSSGKGDDKPSKQGNRRLQGTIYFLAIQMIQLSSKGLPRNPVFYAYYKKQLARGKSKPQALILISRRLINIIYGMLKNKTEYRMPEVQKIHD

SEQ ID NO: 382132 - protein, 387 aa, unidentified
MQVVTSQPQLPAAIRIDLGAIFVSSELSQKTWLTTSLSPGGGEKMSKHSVPAGDIAGLLARFRQLQDKAFARAERRFPIIVIQEAGLDGFWIHRVLQAEGIASYVVDAASIATSRRRRRAKTDKIDGEALVRALLAYMRGEPRVCAMVKAPTPAEEDRRRLCRERKVLINERVRHVNRIKGLLFSQGATGYEPLRRDRRERLDELQTGDSRRLPLHLKAQLSRELDRLEMLLAQIKTVEAERDALLAAETNNGPGPAAMLLGIKGIGPEFASVLCSEGLFRNFGNRRQLAAYAGLAPTPWKSGSIDREQGVSKAGNERLRATCVELAWLWLRHQPDTALSRWFKERVVNGGGRKKPTIVALARKLLVALWKYVTSGVVIDGAKMKNA

SEQ ID NO: 382133 - protein, 412 aa, unidentified
MEVIVERPAALDVHKEQVTACVRFPAADGTRAQEVAEFKTTVGGLLVLRDWLKAHRVTQVAMEATGVYWKPVWAVLEDEFELLLVNARDVKQVPGRKTDVKDAEWLCQLLEAGLLRASFVPPKPIRALRQLTRYRKAQIKERQREANRLHKALEDTGIKLDCVATNILGVSGRAMLDALVSGTTDPEILADLARGKLRKKLPALKEALEGRFEPLHALLVGSILAHLDFLDEQIERLSWAIEEQLRPFAPAVELLRSLDGIETRTAQNILAEIGLDMSVFPSAGHLASWAGQCPGNDQSAGKRRSGRTRKGSKWLNDALKDAAMGAIRTNDSYLQAQYQRLRPRIGHSRALGAVKHSIICACWHMLSTGELYRDLGGDYFRKRDPERQTKRLVAQLERLGHKVILEALPEAA

SEQ ID NO: 382134 - protein, 360 aa, unidentified
MKKDTRDGSGLIVGVDLGDRFSRYCVLDQKGQVLEEDTVATTGRAFRKLFGDRPAARVVIEVGTHSPWVQRLLQELGHETITANPRYVRLIYSSGSKNDQLDAERLARLARVDPKLLHPIQHRGGTAQADRALLRSRNALVECRTKLINHARGIVKSMGGRLPSCSTSSFHKRVRQDLPDELKPALTPVLDTLASLTKKIQCLEARIERLANKRYPETGLLRQVSGVGPLTSFSFVLTLEDPERFKHSRAVGPYLGLRPRQSQSGEQDPELRITKAGDTDLRRLLVGSAHYILGPFGPDTDLRRWGLALAARGKKNAKKRAVVAVARKLAVLLHRLWVTAEVYEPLRNNESAIVPEAVSA

SEQ ID NO: 382135 - protein, 327 aa, unidentified
MSTPETDYRWLGIDVSKDYLDVYAVSQPVSARYENDCEGIEELWQRLRGRSDWAVVCEASGGYETLMATTLAAYGCRVSVVNPRQVRDFAKASGILAKTDALDARVIARFGHLLQPPATVFASESAQQLQDWVRRRQQLVEMLSGEKNRLQQLKGRNKAILQDEVEAHIEWLQDRIEQLDEKIEHLSQQPSQWRKDKALLTSVKGIGPVVSTTLLADLPELGQLNSKQIAALVGLAPFNRDSGRYRGKRTTWGGRTTVRSALYMATLVAVRHNPPLKAVYQHLLEQGKEKKVALIACARKLLTCLNAMLKSRTPWQDELVTARYRPA

SEQ ID NO: 382136 - protein, 345 aa, unidentified
MHHTITGVDLAKDEIQVCVSKHNKVHSNKAMTPIEFSAWLASSKKMIIVFEACGTSNYWKQRALEYGHDARIISAKLVANVRQNQKTDKNDALAVAQAAQLVDISFINGKSKEQQELQTLARLRELAVKHKVSTKNQLTGLLLEFNIRVSSAKGGLSGVIQSLLEDADNGFSMVFRDALNTGLQQYLTNVETIQKYDRCIEKSVNQHRECKRLLALESVGPNNAINLYISLGCGDIGVFKKSRDAAACIGVTPIQHSSGGKVKLGSVGKYVKNKQIRSSLVSGAMAVINQVIKRKAKTKKDLWIQQLVERRGKRCAAVALANKTVRTAFAMLSNDTEYKAEPLTA

SEQ ID NO: 382137 - protein, 426 aa, unidentified
MNNTIRRKQFCQIVSEIKGSHEYLIVGIDVAKDKHHAFMGTAAGKSFLRRLIFENNIDGFSKLLTRAEAVRVQNGLTKIVFGLEPTGNYHKPLGRHLIRCGCNVVLVTGVAVKNNRQLLDERWDKHDTKDAANIADLVSRGRCLYYDLPSSKIDELRELLSLRRRLKKEEHSLRMRIRNNLLAKYFPELDRFYSACETESLSIVTWCLDPNKIAGMEFDKFFQMVTKTQRGIAQTLRLRKIHSLAVESIGCPMGQAAEFEAGLLVEKLKQVRQQIKETQDLIEDLSIDFAEYSWLLTIPGFGPYVSARVLASIASAWRFGNRKQVLKLVGYDLCANRSGKQSDRAIPVISKKGNAEFRYALYQAAFVASTRDQYFIAYFNKLLRGRERERGIKTKMRVKLAAKMLVIAWTLMKKQEAFNPHLLNIE

SEQ ID NO: 382138 - protein, 343 aa, unidentified
MSEVTTIGLDIAKTVFHAHGADERGRGVFSKRLTRAKLLAFFAAQPRCIVALEACGGAHHWARELTTLGHDVRLIPPAYVKPFVKRHKNDAVDAEAICEAAQRPTMRFVAVKSEEQQASALVFRTRDLLVRQRTQLINAIRGHLTEYGWVAPKGPAYVSMLGDLLEDEMGASLPPAALSMFRVMLDLLADLDERIAALDKEIAQRAREEETARRLMTIPGIGPITATALMALAPAAETFAKGRDFAAWVGLTPTQHSTGGKQKLGATSKMGERTLRRLLIIGASAVILQATRRGTGKGSWLEQMLARKPRMLVTVALANKMARIVWALLAKGGTYRAPTAVAA

SEQ ID NO: 382139 - protein, 430 aa, unidentified
MKKNNSNSQTNSDRAGKPGKARGPVQRDAKEVVAELVARLSQKLEPRSAGARAGEARQQDLPGPNRDRLTVGVDLGDKWSNFCIVGLDGETLTEGELRTTQEDFAELFQSLAAARVVMEVGTHSAWARDVVAGCGHEALVANPRQMEGPKRRKRKNDRIDAHKLARIGRMDPQSLFPVEHRSVEVRQDLVAVRARDALVAARTQLINTTRGLVKSMGGRLPKCSSPSFPHKVEESLPAEVREALLPLVRLVETLSDGIAAYDEKMEKLGSEKYPQTKLLRQVKGVGPITALAYVLTLENPQRFAQSRDVGPYLGLVPKQEDSGDSQPQLRITKMGDMMLRRLLVGSAHYILGPFGPDTDLRRYGIRLSERGGKNAKKRAVVAVARKLAVLLHSLWVSGEVYEPLRHALPKATEEEAVRHAPAEATEKEAA

SEQ ID NO: 382140 - protein, 353 aa, unidentified
MQSISTIGLDIAKSVFQVHGVDAAGQVVIRRQLRRQQVVTFFQKLPPCLVGIEACASSHHWSRELEALGHMVRLMPPAYVKPYVKRQKNDATDAEAICEAVTRPNMRFVPTKTVEQQSCLMLHRARHLFIRQQTAVINSIRAYLAEFGIVAPVGRRGVEQLLEVVANTAERRLPEVARACLAALGSQLRVLKAQILEFDRRIIAWHRSSATSKRLDAIPGVGPALATALVASITDPKAFRSGRDFSAWVGLVPKQNSSGGKDRLGSISKRGDRYLRSLFTAGALAVIRYAKIHGTDHRPWPTRLLARRPTKVAATRRERTRWRAWRSSWSWVFSRTTRRLGRSAASAIASASL

SEQ ID NO: 382141 - protein, 350 aa, unidentified
MVMIGTDSHKRTHTVVAVDDVGRRLATKTVRTNSDGHLDLVRWSTQFDDVVFALEDCRHLTRRLESDLLIAGYRVVRVPTRLMAAERRGTKEPGKSDPIDAEAVALAALRYPDLPVAELEGPAREVKLLSDHRRDLVVQRTRIASQVRWFVHELDPDRVVPSRGLRRQCVLSELQEALSGVDGVVARLARELLDRCAELNRQINQLEAELRRLVQVLAPSLLAIPGCGVLSAAVLIGETAGVHRFRNKDAYARFTGTAPIPVWSGASAGKVRLNRGGNRATNCALHMIAVTQARGIGPGHAYLAKQQARGKDKTASLRLLRRRLSDTVFAALRAAQTVAGDQPVPLPAAA

SEQ ID NO: 382142 - protein, 316 aa, unidentified
MTCYVGVDIGKNQFDVHLHHQARGQSFSNSPEGFTAFLSILPAPQTCHIAMEATGKYFFNLAQFLFNHQIKVSVVNPASIKYYAQSQLKRTKTDLQDAKLIAHYCQSQQPKLWQPPSQVIVELQEWQQFQALLIKQKTQLTNQMQTTECERLKQLQLEQIVQLEQEINEVSEQIKTLISQDEKLNEQTSLLTSIKGVGEKTAIQVRTLIKDIDGFDNAKQLASFAGVVPQIKQSGSSVNSSSLSKIGHSELRKCLYMPALAAIKFNPVIQTFAQNLQSRGITGKKKVVAVMRKLLHIMFAVLKHGKPFDPCYKIST

SEQ ID NO: 382143 - protein, 458 aa, unidentified
MGKRTKKIEEAHPFDGLSKVNPNAAGIDIGAEEIVVCVARNESTQIVKGFGNYTSDLKAIVAWLKSYNIKTVAMESTGVYWIPLFEELEREGFECLLISSRSLRRVPGRKSDISDAQWIQTLHNYGLLEGSFRPQSDLVALRMLLRHRAKLVAHRAPHILHMQKALLQMNIQLTQAVSDVTGLTGQKIIRAILSGLRDPHELAALREPGCKKSEAEIAEALTGTWREEHLFILKQSVAMYDSYSTQILECDEEIERMYALTRPDWEPGELASFRARKRNSANHSKNAPYNPEQVRKHLKRISGVDISLVDGMGVSLAQTIILECGTDMSKFPTEKHFCSWLGLAPKHEISGAKILKNTTVKTKSRAGQAFRMAAQSVKRADCAFGQFYRRLRARLGPAQATVATGRMIACVVYRMLKYQVEYDPLSVNEYQKRYEEQQIRYMKKRAAKLGYDMVPVQV

SEQ ID NO: 382144 - protein, 357 aa, unidentified
MKKTYRLQEYVVRGKEIFVGLEDSKRTWKLAVRSEKMIIHQVSMEAKYPVLIGYLRNKFPDCAIHLMYEAGFKGFNLYDALTEDGIDCVVIPPHVVTEPKVNRTKTDKRDARRLALVLENHDFKDSCYVPDKERREDRQVTRTLIAVQKDIIRTRNRIRKFLQFHGIEVSFPDRWGRGEFRALKKLELSEPLRISLDVFLTQLEELWAHQVSLRAALRKLCKKERYHKAFTIAHSLPGIGWFTAIRFVLELGEDLSRFGSGKKIASFVGLTCSEDSTGETIHKGRITGMGPGFIRATLIENSWMAVRKDPVLLAKFTRVWHASGSKKKAIVAVARMLIVRYRACMLAGTPYVIGVAA

SEQ ID NO: 382145 - protein, 408 aa, unidentified
MIEAAIETPTFDLTVFKLHFGRLTGKAYTKDEMCWGTPSVQTLVAMASVMFQELEEVPMTMVGGLDVHRQQITFDYVDDDGLVHWGQIRPATRKTLRGWLAEHFRDGDADFALEGCTGWRYVSEELAAAGLGVHLGDPAETAALRGRKKRAKTDRADARLLRTLLVEGRFPESWIPPAHVVEVRTLGRLYCTLMDERRAWQQRIHAQVFHQGCPPIRALLTRAGREALAGAELSAAGRQYVDTALRRIDELSAEIDPLRTQLISFARRQPGCRALQRHYGVGWLCAVIIWAEIGDARRFSSSDQLVRFAGLDVTVYSSDAKRAPGHLSRQGSPELRWAAFEAAKSAARRGSPDHGYYHKLAAKHDGHNGKNPTLAVERKILRRCYHTLRELGDAALALPDIRPQEVAA

SEQ ID NO: 382146 - protein, 405 aa, unidentified
MRVYIGIEWSTQKHDIVYLNEEGGLILYQTIPHSPMGFEAFDEQRMKLGVSVDDCLVGIETEHNLMIDFLSSHQYRQIYVIPPSTIRDSRGRFGASKAKTDRSDAHLIADMLRTDRARLHAWHADMLLTQQIAALVSLESFLTRTIIQITNRLRNVLWRYYPNAAKVFSSLDQQIALVFVSAYPTPEAAAGLTIEQFKSFAKVHHYPRPSKLPACFARLQKPQPDAKQQTVLAYQSEAVRLARLALQAVQDKAATLKEIQELFVDHPDYPVFSSLPGAGAILAPALLAKFGDDRQRYPTPQVMQCVAGTCPVTKASGKHKYVAFRYACDHEFRRIVQQWAKSSIDYSVWANTYFQTIRPHCDSLSHAYRRLANRWLEVAWRLWQDRVPYDEERHLRQHALRVKPN

SEQ ID NO: 382147 - protein, 393 aa, unidentified
MIPQKLVGIDVSKDSFTLAILSPEDGSFSTHTLSFSHKDLRRLPFLLNYPCRVAVESSGPYSTLLMGNLRKMGLRPLLINPLRIKRFSSSLSLRLTKTDPIDARTIALFLASDHNTASSPDPKRQSLAELSRQVEALSQSIASLKNRIRQLLHTLFPELPNHINPFSKSVLHLLLAFPSAQALSRASLESIARALRRAVSKRGRKLSLSPHQLKELARGSIGLSDPAREALLQSLIRQLLLLEEEKRLLSQELIRQARKLAPRAWETLLTIPGMGELSAATLIAEIGDISRFPGAKQLVAYAGLDPSVYESGKIRRRSRISKRGNPHLRRILFILAQHLVRRTQTFYAYFHRLRQKGKAYRQAMVAVAHKLLRVIYALLTKGSPFQDNYSPNS

SEQ ID NO: 382148 - protein, 349 aa, unidentified
MAKISMIGLDLAKNVFQVHGIDAAGKVVVRRQLRRRQLEKFFAALPAGVVVGMEACGGAHHWGRVLQKLGHEVRMMPPAYVKPYVKRNKNDGRDAEGICEAMGRPTMRFVPVKSLERQAVLVLHRTRRLLVRQRTMTGNALRSALTEFGIVAAQGVKGLRSLMELIAASASEIPERARLPLAVLARQWETLNADICKLETEIVRAAKTDEVARRLMAIPGLGPIGATAILAAVADIHVFKTARDFAAWLGLTPRQFGTGGKHSSGGISKQGDRTLRTLLTVGATAHLRYERVRDTKDPWLQALLARRPFKVAAVAYAAKMARIIWAMLVTGEHYRAPNRGHGGSAQAAA

SEQ ID NO: 382149 - protein, 355 aa, unidentified
MFSMATQARQVYGGVDTHGRAHHAAAIDGTGQVLGDREFTATPDGYRQLITWLKQMGDVVKIGIEGTGSYGAGLARAATAARIAIVEVDRPDRRARRRKGKSDPLDALAAARAALSGEAAGVPKTRSGPVEAIRALRVARRGAIKARTAAFNQLHGLIVSAPASLRTALGDLRGQQLAGRCAAFRIDEDQIGDPAVAAKAALRAVARRIIALQEEIRAADRRVAPLTAAVAPKTTAVFGVGAEVAGQMLVTAGDNPERLRSEAAFAHLCAAAPIPASSGRTDRHRLNRGGDRAANTALYMVVVTRMRRHQPTRDYVARRTAEGLSKTDIIRCLKRFAAREIYYAIRADFQATQAT

SEQ ID NO: 382150 - protein, 402 aa, unidentified
MNAVGIDVSKSKSVVAIMRPFGEIVSTPFEIKHTASDIHSLIELINSVEGESRIVMEHTGRYYEVLAHQLSEANLFVSAINPKLIKDFDNDSLRKVKSDKADAVKIARYALDKWQNLKQYNVMDELRNQLKTMNRQFGFYMKHKTAMKNNLIGILDQTYPGVNTYFDSPARSDGSQKWVDFASTYWHVDCVRKMSLNAFIDHYQNWCKRKKYNFSQSKAEEIYGKAKELVPVLSKDAITKLIIKQAVDQLNSASTTVESLRTLMNETASKLPEYPVVMAMKGVGTSLGPQLMAEIGDVSRFTHKSAITAFAGVDPGVNESGTYEQKSVPTSKRGSADLRKTLFQVMDVLIKTHPQDDPVYQFLDKKRAQGKPYYVYMTAGANKFLRIYYGRVKEYLASLPES

SEQ ID NO: 382151 - protein, 411 aa, unidentified
MYYVGIDIAKSFHVVSIIDDNETKVINKPFKVNNDYKGFDKLLSVLDSVTLNKDDFIIGIEATGIYGENLLEFLKSKGYSVKLLNPFQTSRYREQITMKKVKNDNIDSLVIALFLKDGKYSSGYITDDEYQSLRTLYRNRASIQSDMKEVKKRILTQITVTFPEFESFTNPFTISGLALLDKYPTAHHYKHSSVDRIMKIFAHIQGNNFNQDKALRLLELSKVSIYSGKAKDARAIAIRSTIRLLKMYLSELDIIETEILSLLDKKGINDSTLEELPKTDSLIENLKTIPGVSDKTIAAVISECGDLTRFPSVPKFIGYLGLFPTENSSGNSKHIGHLSKRGSSLVKHALYMSATSCLIHNKQLKQLYDTKRSQGKSKKEGLIAVSRKLATIIYSIFKYNTPYNPSRVFTN

SEQ ID NO: 382152 - protein, 457 aa, unidentified
MNFTDGQRGGSRSAGARFVGLDVHKRQITFCMLDAEGRVLRRGQIAATQQAIRAFAQEELRPEDEVALEATTNTWAVVELIEPHVARVVVSNPMATRAIAQAKIKTDRIDARVLADLLRCGYLPEVWQPDAATRKLRRLTSRRAGLSGDRTAVKNRLHAALAMRLIQVPEEEELFSNSGLAWLRNTPGLDEETRMAVDSDLRLLDGMEAELEALDSRLAQWGYHEARVKLLMTLPGVDVTTALGLMAAWGDESRFPDANHAVGYLGLAPRTHQSDRRCYHGPITKQGNTAARWLLVQAAQHLDGHPGPLGVFFRRLLKKKNRNVAVVAVARKMGLIAWHMLRNGEPYRYGLPKQTEAKLARLRVKATGQRRKCVWRVKGQACVSKSPTGGRTRTVKSLPKLYQLEGLPAVKELKPAEARMIEQAGIREFVEAIGRERIEPLRKKTAESPASGIAKRG

SEQ ID NO: 382153 - protein, 489 aa, unidentified
MSTARKQQGKKKDPMLNARAPQRKVRGSHCQQGKANQRGSELTITNPDAAGIDVGSQVHYVAVPEGRAQESVRSFGAYTGQLDELVQWLKDCRIKTVAMESTGVYWIPLYQKLEEAGFEVLLVDARQAKHVPGRKSDVQDCQWLEQLHRYGLLRAAFRPEDSVCRLRTLQRHRKDLVESAAMWIQHMQKALNEMNLHLHHVLSDISGHSGLAILDAILAGERDPRKLASLAHYRVQKSQAQIAAALTGDYRPELLFVLRQSLQNYRQIQQQITQCDLSIEKQLAKMTDCQNPNQASEPTPPSPDLGGGKPRKRKSPVILEISLAGHLKRILGVDLTTIPGLNVLAILTLVSEIGTNMTKWRNEKAFVSWLGLSPNNKISGQRVLSSRTRKVVNRAATILRLAAMIVGKTNTPLGSFYRRKRAQLGGPKAVTATARKLGCLIYRLIKNGQGYQEPDLHTYELKYKDQILNSLRKRANTFGFDLVELPKAA

SEQ ID NO: 382154 - protein, 370 aa, unidentified
MSQSSTLFIGMDVHKETIAVAYVAQEHGAEVIYLGTIGTRQCDIDHLVRKMQSKAKHLIFVYEAGPCGSWLYRYLTKKGYDCWVVAPSLIPKKSGDRVKTNRRDAVQLARLARSGDLTLVSVPKVEDEAIRDLTRAREDTISDLKDAKFRLKAFLLRQDIRYAGRANWGPAHLRWLSEVVCPTAAQHIVFQEYVRAITEYTERLQRLEQELQAQVQVWRLHPVVEALQALRGVQFTVAVTMVAEIGDLTRFEHPRELMKFLGLTPSEYSTGDHRRQGAITKAGNTHARRALIEGAWAYRYPAKVSRHLQLRLEKQPKVIQDISWKAQVRLWRRYRRLGARGKHANVVTVAIARELAGFLWAIAKQVSVTP

SEQ ID NO: 382155 - protein, 467 aa, unidentified
MTPHKDYCLDPRPLVPTPTLPPSPMLSEALQVCHPHAAGIDIGEAEHWVAVPPGCDPQPVRRFGTFTADLDALADWLIDCGVTTVAMESTGVYWIPLFELLEARGVQVLLIDPRQAKRAPGRPKTDRLDCKWLQRLHTYGLLAGAFRPEAHVCVLRSYLRHRQMLLTYAAHHIQHMHKALEQMNLKLTQVVSEITGVTGMAILKAIVAGERDPQHLAKLRNPHCHHDADDIAKALQGTWRAEHLFALRQAIELYDFYHQQMTQCDQQIKAHLATFADKSEGQPLPPKARRHKKTNEPRFDARTPLYRLAGVDLTTIEGIEEGTALVILSEIGTDMHRWPSVKHFCSWLGLCPQHKISGGKVLSRRVRPGTHRVTVALRLAARSLHHSQSALGAFFRRMKARLGTPKAITATAHKLARLVYSLLKHGSAYVQQGLDAYEAQYRERKVTTMAKQAKALGYTLVPLTAQG

SEQ ID NO: 382156 - protein, 347 aa, unidentified
MRYVGLDVHLRRSSFCILDEDGKIVKQEQVVGNHAAVNTRLGREPGPMSICYEASCGYGYLYDRLSKLAGQVSVAHPGRLRLIYGDKKKHDRVDAKKLATLLYLDVVPLVHVPSEDVRAWRMLVEYRQKLARKRATVKSQIRALLRTQGVECRRRPWARQSRAELAALPMPAGVQVSLDLMLQELADLGPKLKRAEAQLGSIAREDARVPLLRTIPGVGPRTAEAFCAYVDRVERFRRTSEVGSYFGLVPCEDSSAGRSRLGHITRDGPSTMRKLLCEAAWVAIRRDATLRAYYQRICRDDPDRKKIALVATAHHLTRVMAAMLRSGEVWLSDAALGMNGGRPSAGG

SEQ ID NO: 382157 - protein, 410 aa, unidentified
MDVIVERPGALDVHNASVVACVRLPGEKGRRQERVAEFSTTTRGLLALHDWLAAHGVTQVAMEASGAYWKPIWAVLEDDFECVLVNARHVKQVPGRKTDLKDAQWLCQLLEAGLLRASLVPPKPIRTLRNLTRYRKSQIRDRQREANRLHKVMQETGIKLDCVASDLVGKSGRSMLDALVAGTTDPALLADLARGQLRKKLPALREALAGRFSPEHSLVVGRILAHVDFLDEAIEQLSEAIEQQIAPLAPAVELLCTIPGVGRRAAEVIIAETGGDMSAFPTAKHLDAWAGVCPGNDQSAGKRRSGKTTKGSKWLRGTLMEAAKAAARTKDTYLHAQYARLRIRRGANRASVAVAHSILTACWHMLQTGELYNDLGGDYFARRDPERTTKRLVAQLERLGHIVTLEQAAA

SEQ ID NO: 382158 - protein, 348 aa, unidentified
MRIIGCDLHARQQTLAILDTTTGDVVNLQLMHEGNQVREFYSTLPRPALVGIEAGGSMPWFLNLMEELEIQCRVGDPAQIRAAEPRKQKHDRRDAELILKLLAEDRFPAIWLPSKELLDLRALLLHRHQWVRIRTRIQNALQAIALANGLRRGPSLWSNDGQEKVASLPLMPHTACRRTALQTMYRNIESQIEQLTRQVAEQAENRSASRRLMTHPGVGPVTALASDVFLGDPKRFADGKALASYVGIIPREYSSGGQQRLGGITKQGSPLLRFLWGEAGAHAVRRDPELKRFYRRKLVQKGLGKARVAVARKLGIRLWIMLRDGIDYPEFCRRGQMQRSGAACGGNA

SEQ ID NO: 382159 - protein, 348 aa, unidentified
MNYYTSETEFNCGIDLHVREMYVCVMDRAGHKVVHTNIRGNDFGHFLKKVTPFRHSMTVVSECTFNWYWLADACFESKLPFVLAHALYLKHIHGGKNKNDRIDSEKLAHLLRANLIPQAYVYPAGNRPVRALLRQRMSFVWQRGALMAHISTNQTAEGLKPAPRTGCDRDEWMEQVLAQYEHPLHRLSASCEIELVRAYDIQILKLEEEQVKCHAGNYYTLLNTVPGIGRILAMTIIYEMDTVERFPSVGEFLSYSRLVKGSVASAGKFKGLTGGKMGNAYLRWALGEAAVLGKHHHPLLAPYADRLIAKHGKFKGNAILASKLARCVYFMLQKGTAFDAEKLVSTSL

SEQ ID NO: 382160 - protein, 391 aa, unidentified
MRFVGIDIGSEKHFFAVLDSEGRVTKKATPFGEDDAGYSKLRAALGEPRDTLVAMEATGHYWQNLFALLVATGFAVAVLNPLRTRRFMEVDLKRAKTDAIDAVGLARFAYEKRPASMALPDEASLELRELVRHRDRLVQDMGDRVRQLHRIIDLGFPEITKLLGDLSGPLATTILLAFPTAKAFDKADVSSLAAMKYDRTHTVGVDLAKKLLDMAKRSVGQHHGAAYQLQARHACEDIAVLRARIRSLDEDLSALVQKHEIAKLLTTIGGIGDTTASRLVAELGDITRFESAEALAAYVGVVPSVRHSGKSTPSSQSISRIGHADLRAKLYMPTLAATRYNPWLRAFYERLCAKGKLPKVALVAAMRKLLHAIYSVAKNKRPFVPAILAAS

SEQ ID NO: 382161 - protein, 317 aa, unidentified
MKQDKIITKVAGVDVGKHHLDVAVHGLEQQIQVCNGAVGLSELVAWLKAREVGRVGLEASGGYERAAVEALGAAGFEVVLHQPLEVRLFARLKRQRAKSDRIDARVIAAATTQVEAVRAAQDTRLQGLAERLTAYEQITDQLAALKTFMEHVTLKDVARSLKAQIASLGRLKARLAANILKAIKAQPDLLARLRLLLSLPGVGPVVAMALVIRMPELGSMKRGQAASLLGVAPFDRDSGQFKGLRFIQGGRGRARRLVYLAGVTAKRFDIGFRTFAERLAERGKPPKVITVAVMRKLIEAANLVLGRGQPWVKQPQS

SEQ ID NO: 382162 - protein, 421 aa, unidentified
MRFYTTPHRYYCGIDLHARRMYICVLDAEGQIRVHRNGPATPEHFLTVIAPYREDLVVAVECIFTWYWLADLCAQEGIAFVLGHALYMKAIHGGKAKNDKIDAHKIAVLVRGGMLPMAYVYPREMRATRDLLRRRCHFTRKRAELLTHIQNTASQYLLPALGKIAYPGNRVGVAERFRDPEVRKSVETNLALVDEYDRLLSELELHLTQTAKVHDVNAFYRLRSVPGIGKILALVLLYEIHDIHRFPRVQDFVSYCRLVKCAKQSDGKHYGYSGTKIGNAHLKWAFSEAAVLCLRKNPVAQRYVARLAHKHGKGKALTILAHKLARAVYYMLRRGQAFEATKFFLVTAGGERPSRPENERVALAKDHDASRSGPTRHDLEGGRYLDPPEIKRRAARRRGHDRDGVTTERVVGAAARVTEER

SEQ ID NO: 382163 - protein, 452 aa, unidentified
MRRLNGKQGLRRSQFAKELKGADLEKVLLVPIDVSKVLQKSMILNYFGDVIETPFPFMVSQTGMSLLIQKIEEARQSCHAEKVFVGIEATGHYYEDIVRILTEEGYSVHIVNPATTHEERKQHLTYTKTDDIDLYLIAEALVGNKATNSKLASGVYKQLQNLTRARRSEINKRSRIKMELRGIHDQIWREYQGVSVLVDHKVKTTKIFSDFWGKASLHLLKNYPHASQVLELGEDGLRALSKQHNLKIRKKTIDKLLFAAKESVSKPIEQLSSELFLLKQKIKAYEWHTTNIELYDKEIERTFVQTDGLFLLTVPGIGLITATEIYCEMGDISLYNNASQLIKKAGTNPVIKQSGADGGYYGCISKQGNSNLRRAVYTAGRCLSAHNEALKPFYNRLKEKGKKARKIYIAMGNKFIKIAFAMLKNQQPFEWNHSDFNYEKEIMKKLSQPLAA

SEQ ID NO: 382164 - protein, 453 aa, unidentified
MARRNTKVSLPRGRTRSALTITHPHAAGIDVGSRSHFVAVPPDRTDVPVREFPCFTADLHALADWLQACGVDTVAMESTGVYWIPLYELLESRGFTVLLVNARHVKHVSGRKSDVLDCQWLQQLLTDGLLRGAFRPAESVCVLRALWRQRGLLLRHQARSVQHMQKALTQMNIQLATVIADVVGETGQRILRAIVAGERDGEVLAAMKNGRIQASHADLAKSLQGTWRVEHLFALKQALHAFDFVGTQLAECDEAIEAQLHTLRAHDGAPAQGKKRGRSRNAPKRDLRQHLFQMCGVDLTRIDGIDVTTALAVISETGVDMSRFPSAGHFASWMGLCPGTKITGGKVLSGRTTRCANRAAQALRLAAAALRPSRSALGAYYRRLCARMDKPRAITAAAHKLARLIYTMLTKGEEYIDQGQDYYETRYRERALRQLAQRAHKLGMTLVVAQEPA

SEQ ID NO: 382165 - protein, 408 aa, unidentified
MLEPVVKRCVGLDVHKMVVVATALVEQQDGSIKEETKQFGTFRKHRRQMVRWLKGLDVELAVMESTGIYWKSIFASLEAAGITAYVVNARDVKKVPGRKTDVSDSKWLADLVRVGLLSPSFIPPRDLRELRLITRYRMKVKGMLSAHSNRLHKCLDDAGIRLGGVVSDIRGVSARYIIRGLLEGKKPQELVAHVHGRLREKIPDLLASIDEPLSERHKWLLRSIDRQITALEQEIMDIDDYLAEQMIAYNKQIELLQTIPGVDFIAAVMLLVEIGPEMECFGNAHRLASWAGMCPGNNESAGKKKSGRTRKGNATVRKVLCEIANAAAKTNSQFKGQYKGLVIRRGHKRATVAVGHKVLRVVYALLKSLKPYMDPAIDYSQLVVKRNAPRWLSALKKYGYLPELAKAA

SEQ ID NO: 382166 - protein, 450 aa, unidentified
MQFMKKKAGFPVLYPNAAGIDIASREHYVAVNPDAAEQSIRSFGSFTDDLHEIAAWLLQCKVDTVAMEATGIYWVSLYLILEEAGFDVVLVNAKHVKNVSGKKSDVKDAEWIRQLHSCGLLSKGFQPDHFTRTLRAYMRHRKNLTEMAATHIRMMQKALEQMNIKLQNVIADITGKSGQAIIKAIIDGEHDPQNLVKLLDGRIKATKESICKSLHGIWKTENLFELKQSFDLYHTYQEMIKECDLHIKGHIEEKASYCESDQTQSLYPVKKKYKTNKNNLNFDATNMLQKIVGTDLTEIFGITDTNATEIISEIGLDMSKWPTAKHFTAWLNLAPNNKVSGGKLLSSRVPRKRNKAGQIFKMAAFAVQRSKNWLAIFYNRIKMRSGTSRAVTATARKIAIIFYKLMKEKVRFCPLDRDQYLESFKVRQLKKLKQQATRLGLVLVPDNLVT

SEQ ID NO: 382167 - protein, 352 aa, unidentified
MSHKSAQSTAVSTIGIDLGKNSFHLVGLDQRGAIVLQLKCSRAQLERRLANIPNCLLGMEACSGAHYIGRQLAALGHDVRLIPAQYVKPFLKGHKNDYRDADAIAEAVQRPTMHFVAIKTPEQMDLLALHRVRSRLVGQRTGVINQIRGFLIERGITVRQGVLPLRKALPDILSSNTQALSPRMVNLITELVQDWRRLDERIAAVSAEIESLAEQDEGCQRVMTVPGVGPIISSAVVAAIGNGAGFTQGRDFSAWLGLVPKQESTGDRTILGKISKRGNKYLRTLFVQAAHVVLARRPNAAMRGLWPWIEQLSRRLHRNMLAIALANKLARIVWAVLARGRSYQPRIAAHVA

SEQ ID NO: 382168 - protein, 520 aa, unidentified
MARTRSRLSASRRRPPTSLGKSRGVLHPRVQQVGPEHFGIVCFDCAKVRSKFLLADFYGRLLIPPTNVAHTRPALDAAVAQIREAFAEHQLRDGLVAIERTGRYHRVAQRAFTAAHFETRIVHPFVTKQYRQPVDPGNKTDDKDLAAIHRATVTGCALLEATRDEAWTTLQLLIRHRRDLVRKGAALNCQIRDHLDAALPGYAACFDQLWESAIPWHLLRHYPTAEQLRQAGVTGLCQSLRAAAIRFQQRTLQTVVDWAEQAAPGDVAAPQHLRIALALYDDRQRKTQEIQALERDIASRLTQTPYVLLLSFPGINVVSAADFAGEMGPIEHYLNAKSISGRAGLRPSRYQSDAVDKANGPLVRNANRSLRAAILGIADNLIVCNHHFQALATLWSAHGKEPRRTRVKVGLRFCRIAFQMVAGRQVFRHPSLQGRHYILDKLTAFHRQHDTGMPEVLRDLQAAIGQIPQREHAREAKPLQDEYQKIQDHRRRGPQLLGDILPLVFARLGVGVVQSNESGE

SEQ ID NO: 382169 - protein, 449 aa, unidentified
MIYCGIDCGSQEHQVLLVDEHRKPLGKSHRIAESRDGHQQLLELLRSVAGSQPLCLAFEATGVYYQNLVHTLAHSELPITFYRLNPYAAKQYAKSLMHRQHTDKTSAKSIAWMIVEHHRSLHPYHPQPASHLSTLCTEMLELKKQLTVIQNRLHKEVFIANPELSQTFSDLSCAQCLALLARYPPAAQLARAHPRTIAQVRDGAPRSRRIGEERALALVRNAQRSVASDTTPHRAHKIQHLIKHVRFLKTLLKDCNRRLHNLLAPYPFPHQPACPLPPPTDAREQLRQDVLLLDSITGIDTWSAAALLAFLEDYSRFETFEKLNAFIGTCPTYEHSGTDTFSSGTMSKQGSGKLRWLLYMATLTATKHNPVIAPHYHKQLRAGKKKSRALAASMTKMLRLIYGLLHSRIPFDPDYAQKTKRSIAAAHLTSHTHPSTHAPQTPTTPQPAP

SEQ ID NO: 382170 - protein, 430 aa, unidentified
MVAKLDIAWVGIDVGKAHHWVCVVDTNGTVLLSLKVANDEAEIDALLLRAASLAAHVIWAVDIIGAPSALLLALLARAGHTVRYASGRIVAAMSAGYAGEGKTDAKDAYVIAETARLRRDLTVIDTNTDQVRNLAVLTGHRADLIADRVRMINRLRDLMTSVFPSLERAFDYSAHKGALVLLTGYASPDRIRRIGQTRLSDWLRNRRVRGSADVAARAITAAKAQSVVLPGQDLSAAVIAELASAILTVDERVKTLDGQIQEVFVEHPQAEIIESMPGFGPILGASLLVGAGDLRAFPTAGHLAAAAGLVPVPNDSGRRTGNLHRPLRYSRPLRHVFYLSAQTSMMRDGPNRDSTSRSAAEAPHTARRSSRWLGAASTFYGLCCGRTHLEPSATITSASGGLTKPLRFPVPGDGAVGCLRGALGEHDVGR

SEQ ID NO: 382171 - protein, 344 aa, unidentified
MHIASIGIDLGKTTFHLVALGEHSKVLVRRKFSRAQLLAYTANLPCSLIGLEACAGAHFMGAALRAPGHEVGLIPAQFVKPYRKSNKNDFIDGEAIAEAVTKQNLRFVPIKTQEQLDVQALHRVRDRLVQRRTALINEIRGFLLERGITFPAQPLHLRKNLATVMEDAEQNLSPGLRWLLDRLWQEWKQTEIDIQTITDEIERISNEDERCQRLRQIPGFGPLVSTATVAAIGNGAGFHRGRDFAAWVGVVPRQYSTGGKQRLLGISKRGNIYLRRMLIHGARAVLFRIQYDTAGLGQWVHRLSQRAPRHKVIVASANKLARIAWAVLSSGRDYHHQPLPSAAA

SEQ ID NO: 382172 - protein, 420 aa, unidentified
MRNAGIHANSLLEVRRMYNAVGIDVSKSKSTVAVLQPGGTVIRKPFDISHTSQNLNELADYLSSLDGTTKIVMECTGRYHEPMVKALSEAGLFVSIVNPHLIKNFGNNSLRKVKSDPADARKIARYTLDNWTELRQYSGMDNTRTQLKTLNSQFSFFMKQKVAAKANLIALLDNTYPGVNKLFDSPTREDGSEKWVDYAYSFWHADCVRKIGLKAFTERYMSFCKKHHYIFQQDKPEKLFNASKELVAVFPKEKTYKLLIQQSIQQLNLASEHVERLRREMNELASTLPEYSTVMGIYGVGKTYGPQLIAEIGDVSRFTHREALTAFAGVDPGVDESGQHKSKSNRASKVGSARLRKTLFQIMTTLLQNAPEADPVYRFLDKKRSQGKPYYVYMTAGANKFLRIYYGKVKECLRNLEQTE

SEQ ID NO: 382173 - protein, 394 aa, unidentified
MAFKIFRKNCCGLDVHKTWIYACMGITDTNGRTEYKQARFSSFTKGLQELADWLAKYDSNDVCMESTGKFWIPVFNILEKTCWVTLAYPKYTKPQKGNKTDHKDAKWICDLYMCDMVNPSFIPPPDIRQLRDLMRYRSKLTNIMTSEKNRALNCLTVSNLKLDDVFSDVFGKSSRSVIRYILEHPGETFQVAPFIDRRCKHPVEEIQAVIDGTISHQQAVKLRECLQHLDELEVHKTNVEKEILCLVQQYPYQLELLQTVLGFSGNIMTAIALISEIGADMSVFPSAKHLVSWAGCCPRNDQSSKKVKSTRISRAGVYLKPLLVQVAIQPFTANADKLSAAGALEIRCQICDGRFLSMWAALFIFLGCPLPPCPKNLHVHNGRIVILVSVAWIF

SEQ ID NO: 382174 - protein, 337 aa, unidentified
MEYFAGLDISMKETHICVMDRDGKVALEAKAATSAAAIAAELAKAPTAQRIIFETGRMATTLYHGLAALGLPVVCIESRQAYQALKSLATHKTDRNDARGLAHLARTGFYKPVHVKSLPAHAVRALIIARKKLVGQRVTLENQIRGLALVFGVRLPRGLSPAFAEQVTSASSEVPALSGALRGLLVARDALLGAITAINRDIKRLARSSEACQRLMTIPGVGHLTALAFVAAIDEPDRFRSSRDVGPYLGLVPRRWKSGEIDYTGSISKVGDRRLRTLLYEAANVMLTRYRGDLALKDWALRIGKRSTMRKARVALARRLAIIMHAMLRDGTDFQIA

SEQ ID NO: 382175 - protein, 362 aa, unidentified
MASVSHLAPIHLGLDVHRDTISVGILTADMQVPEVDKIPHDEPSVRRLVGRFSNPGVLRACYEAGPTGFELARLLASVGVSCQVIAPSLIPKAPGDRVKTDKRDCRRLARLHRAGELVAIRIPTLAEEAVRDLCRTRGDMVEDRMRARHRLSKFLLRHGQVWRAGKAWTLAHERWLVTQRFTEPALQTTYDHYRAVLASRDAQLEAIEADLAGWYDRAPFAEQVARLAAYRGVTRLGALHLAAEVGDWRRFARASQFMGFCGLVPSEYSSGQVTSRGHITKAGNLHLRTQLVEAVWAYQHRPSVGAQIARRQQGLDPQVVAAPGLPSCGCAGASDAYAPASPPPTSSPPRSPGSWPGSCGPR

SEQ ID NO: 382176 - protein, 471 aa, unidentified
MGARDAIGIDPDSEGFVCAHVKGAQPAVVTKRYMTSDSDLKSFLRWVQGQGDVIVAIEGSNGLSRPLEKALREATVIFYSFKPADTANFRKAVLGQNKDDRKDAESVARYAMAMEAQGRLERYRRVWFADAELQLLSRCYERKTQESTAELNRLWKLIRLASPDLYLALGGKHPEVELSENALQTQGILSLLIQKPDIGQWKNLSAQQMLEAMGGGKYKGRQTLIEELGKLSSLLGPVSAAMALMIRSSAQQIQRHKSEQAEITRMLEEVSRDNKAVQALKQRPGIATITATAFIAEIVDIRRFPCDDSLACYSGLGRTERSSGQTARMVGSQLFNHRLKDTFMTAARNVVLYNPDSHLAGYYRNLVKAGMAPMEATKRCARALVRVIYRQLSAVIKEEDPAPQQAQKKGEGDMASGSLRSDQSHTSDMSPSSPIDKVTENLKARTRPAAAATAARKAVRGSRRRIAKQKS

SEQ ID NO: 382177 - protein, 351 aa, unidentified
MNATTVYGVDIAKNVFQIRWIDVTTGEIGRKKLSRAKFSEFFAQRQPARVALEACGSAHHWARTLSGLGHQVELLPAHQVRAFVVGNKDDAADARGIWLAAQQGDIRRVAVKSVEQQAVLSLHRMRAHWINVRTATINAMRGLLYEFGVVLPQGKQVGLKALREQRAKIDEQLPALMQRLVDDQLKSLADIEAHVLTMDQEINAVQKSNPAARRLRQAPGIGVLGATALAALLGDGTGWRNGREFAGCLGLSPSHTGTGGKVRMGGISKRGDPYVRTLLVNGARAVVTRDHPAAWIVAMLARRPFNVVVVAVAHKLARQAWALVAHGREYDAGWQSSPPALTAACAQAQTA

SEQ ID NO: 382178 - protein, 371 aa, unidentified
MKQQTKSSNITVGLDLGDRRHRFCALDERGEVVEQDSICNDRVSLRKLAGRYHGALGVMEAGAHSPWISRFLEALGWRVVVSNPRKVRAIYQHERKSDQRDALMLARIGRMDLALLYPVRHGTAEAQQDLLRIKLRDSLVRARVAVINSVRFTLKSLGYTVRNPSSERFHKVVMEEVPESVREMITPSAQALAELTARIKMLELEINTLAQMKYPQSAQLQQIPGVGPITALYFVLKIEDPNRFAHVRDVGAYAGLCPRRDQSGESDPQLRISKRGDAYLRRLLVSAAHYILGPFGPQSALRAYGLMLAADGTARAKKRATVAVARKLAVLLLSLWKSQQPYQPFPGACLNGKQEDRRSGTIALHRMEATD

SEQ ID NO: 382179 - protein, 416 aa, unidentified
MNAVGIDVSSRKSTVAVLRPLGEVVCLPFDVTHDIAGLASLVEKLKALDGETRVVMEHTGRYYEAVEKALHEAGLFVCAVNPLLIKEYGANSLRRVKTDKADAVKIARYALDNWADLRDFTPMDAIRYDLKTLNRQFQLASKQRTASANNLIALLEQSFPGIRKCFDSPVRSDGTQKWVDFAHSFWHVDCVRKQSFAAFCERYRKWCKRHAYLFKLSNAEEVYALAKRAVVLTPKSKVVKVLVQEAVNQLSSISRSVEVYRAEMDRLAAMLPEYPVVMAMYGVGKSYGPQLMAEIGDVRRFERKQALVAFAGIDPMPNQSGDKNVRSNKSSKRGSPYLRKTLFNVIRTYLQCAPQDEPVFQFLNRKRAEGKPFYVYMLAAANKFLRRYYAKLRDYFASLDTLQSVDPIPATLKASL

SEQ ID NO: 382180 - protein, 347 aa, unidentified
MTIMVDTQRALTGGVDTHADVHVAAVIDPQGGLLGVESFTTDLPGYKQLSGWMCAFGEIALVGVEGTGSYGAGLARHLAREGLVVVEVDRPNRQERARQGKTDSLDAIEAARAALSGRAFGVAKTRDGNVEAIRTLMVARRSARESRTKAINQIRQLVYTAPDELRERFVGVPSWRIAEGVAILRVHADLDPVRMATKSALGTLGRRAVALGEEGKRLDVLIARLVDKVAPELVELVGVGPDTAALLLIAAGDNPSRLRSEATWAKLCGVAPLEASSGKVTRHRLNRGGDRQANSALWRIVLTRMSCHEETKVYVARRTAEGKSKREIMRILKRYVAREVYHYLPRD

SEQ ID NO: 382181 - protein, 357 aa, unidentified
MHINNDNKLFVGMDLRKNSSSFCVKDYEGNILRQEKVLTDKNQIRDFMRSLGQRASIVLEPVSQWYTYADILEQLGHEVHLAHPMKVKAIASARIKTDKIDASVLADLLRSNLLPESYFATKEVRTWKELVRFRASLLNPRTQVKNKIHAILHKHALRHTFSNLFGKGGRIWLAGLALEEPFKTNLNQYLSLIDVLTKQIDEAEQKVEQQVADHPQAKLLTSIPGISYVSALTIMAEIGDINRFPSAKQLMGYAGLVPSTYSSGDTTRHGRITKTGSKWLRYIMTEAAHHQVLCKRQPGFGSYYLGLKKRKGSGTAAVATARKLLAVVWRLLKDNRPWQEVPPQRGTSGPLAPIVSS

SEQ ID NO: 382182 - protein, 360 aa, unidentified
MKYYIGDDAHKKYSVFRSINEKGIVGSPERVPHEKVLYKKYLATLPPCSPIAVESVGNWYWMIEAMEQAGHQPILVNPKKAKLLMGNINKTDKLDAKGLAMLNLNGSLPAVWIPPAELRDQRELSRMRMSLVGVRTQFKNRIHATFAKYAIAIDEVSDIFGQKGRRLVEQSLKELPPETRQSVIEQLRLLDQVSEQIEKVERHIREIVSVTPMMQLIKTLPGVGDILAIVIALEIGDVNRFASAQHLASYSGTVPRINSSGGKTHYGRVKSDVNRYLKWTFIEAANCIALQQHRNPERHVVELLQRIQKHKGYPKAAVAVARHLAEATYCMLKHNEPYHEPNFKGLVLSSQGQARCSHEL

SEQ ID NO: 382183 - protein, 379 aa, unidentified
MAGGANIRREPVVPVVSLIHRDVVHLGMDVHKDSISVGILNPGNERPDVEKIFNDAESVRRLIARFEEPGLVRACYEAGPTGYDLARLLKSLGVACEVIAPSMIPKAPGDKVKTDTRDCRRLARLHRAGELVAVRIPTPLEEAVRDLARTRGDMVEDLTRARNRLTKFLLRHSIVWRGGSNWTVKHEAWLTSLRFAEPALQTTFDHYRAVVMSRDAQLAAIEADLRVWTDREPFATAVRRLAAYRGVTTLGALTLQAEVCDWRRFGRAASFMGFVGLVPSEYSSGGSTHRGHLTKAGNTHLRAQLVEAAWSYQHHPYVGREIAKRQEGLAPDVVARAWGAQLRLSGRFRHLATRKNTKSVVAAAIARELAGFLWAEMVA

SEQ ID NO: 382184 - protein, 368 aa, unidentified
MDENITGFVGLDAHAESTVIGLAEAGRPAPRFIGKASARVPEIKRALSKLGEPASLLIVYEAGPCGYGLARELRSAGYRCEVIAPSKIPKKSGDRIKTDRRDALKLASLARAGELVSVVIPDERDEAIRDLSRARVDAVRARLKARQQLKALLLRHGRRYSGKSSWTAAHERYLAEVSFKYPAQDIAYAEYRHAVGEGEVRVQRLSQSLSQEVEGWRMRPVVNALMSLRGLDLIGASTVVAELGDLRRFAHPRELMGYLGLVPSEHSTGSSRRQGAITKTGNSHVRRILVEAAWNYRFPARVTRILQVRQEGQPAEVRMIPWRAQLRLCHRDRRLTARGLQYNKVCIAIARELAGYIWDIGQHVTANP

SEQ ID NO: 382185 - protein, 338 aa, unidentified
MSEDKQLIAEKQIFIGCDVSKYTLDFAIYQRGMDYRKFKHYQVSNDEAGFKELLKWLKSNGVKKHKDLVVGIEHTGYYSNALAEWLFRKKITFCYLHPLDVKNYISSARNKNDSEDACMIADYLYTMREKLTPSTPEPSEIKQLRALRNERALIIKSRTAFLNLLKNIDEPASIKRMQTIINELNTQVKAIEKSIMEAINSNEKIKQNYNLITTIPGIGLVNAINTIIATCNFTKFQTARQYAKFCCICPLSNESGISVRGGDHISKKGHNELKTDLTEAARSTIIHNSQMKAYYQRKRAQGKSHGCVMNAIKFKLVCRMFAVIIRQSPYVDFEKYRQ

SEQ ID NO: 382186 - protein, 344 aa, unidentified
MDNHTQYSGFAGVDLAKKVMQIHFVTGDGEITDKQVKRAEFLDFFRNRTKCLIGMEACGASQDWARKLEAMGHEVHLMSPKAVKPFVSGQKNDYNDAIGIYKAMFNGVRRVPVKSTEIRDLQTLRRIRSQVTKDKVKEINHVRGLLAEYGIVMGKSITAFNKGISSALESLKERGDVSPLVAEELQTTIESIKTKIERQKRLDREIEQLARGCKNYENFLKTPGVGPFTAAMLCVLLCDPAIFANGRQFAAYIGLAPRSRGSGGKNFIIGIPSKFNCDSESRAVFVECAQALARYKNKSPWVDGILRRKPKKVAVIAIANKLARQVWAMANKGESFKQMTILTA

SEQ ID NO: 382187 - protein, 359 aa, unidentified
MNRISRVGVDLAKNLIQVHGVNSVGATVSNRALSRDNFLIWCAKLPKECFIAIEASSSSHYWARKLVALGFDARIIAAQLVTPYRLQGKSGKNDTNDAAAICEAAGRPQMWFIPIKTTDQQSMLCVHRLREGFKIERTACINRIRGLLAEFGLVYARGTRVLSQALSEIIEDASNELSGLTRRVIGQAKNQWVELDAHILWCNSQILAHLKQDAQVRKAAQLMGVGPITASAIVATVGDFARFKNGAQFGAWLGLTPRQNSSGGKTTLGGITKHGDMYVRMLLIQGARPAVVTAHRRDDPVSKWAHRLREKSGWQKTVVAMANKNARILWAIFTSGKPFDAHHISTHPASPAVSAMSIT

SEQ ID NO: 382188 - protein, 345 aa, unidentified
MNNVPLFVGLDYHQDQIQVCVVDQAAVVRVNRACVNDAAVVAGLLRSCGGDVRAVAIEACCGSAAFGEALAALGDWRIELAHAGYVARLKQSPDKTDFSDGHLLADLTRVGYLPRVWLAPPHVRDLRQLVGHRQRLVDRRRALKLQVGAVLREQRVKIDAGPSRWSGGWVARVRDNDRLSEQARWIVNDLLEEIDHAAAKIAAVEQRLRQVTTGDAPIAPLVAKLRTIEGVGDVTAWMLAAWIGRFDRFKTGKQLSRYCGLSPRNVSSGNRVADAGLIKAANAQLRAVLIQAGHRLIRTDRRWGALASRLIARGKPKNVAVAAVANRWVRSMHHRMIEPVACVRA

SEQ ID NO: 382189 - protein, 347 aa, unidentified
MNFYHSTHRHYCGIDLHARSLYVCIIDQQGEVLLHKEIKARPEPLLALLEPFRDDLVIGVECMHCWYWISDLCEEHGIHFILGHALYMKAIHGGKTKNDRIDSFKIAMLMKGGNFPLAYVYPKEMRATRDLLRRRTRIVQHGAMLKAHVVNTTSQYNLPPNKVNLKNVGAREQVQAAFAGQDVQRNIDLDLAIIECYHRELSKLEEHLERQAKQHDPASLSVLRTIPGVGRILALTILYEVGDVQRFESVQKFASYARLIKCKAESAGKVYGTQGNKIGNAHLKWAFSEAAVLYLRGNDKAQRYLQKLQKRMSKPKALSALAHKLGRAAYFMLKHQRVFDEQRFLKG

SEQ ID NO: 382190 - protein, 323 aa, unidentified
MNKDIKYFGLDISHLVFDVTDSDGNYHQFKNNVTGFKKFIKHLDIHSHCVMEATGYYHYQLAYYLQEHSIKISVENPLAVKRFIQMKLSKIKTDKSDSKLICEYAKQVELKLWQGNSKHQTECLQMTRLLSVYTKQSTMLKNKLHGEAVLGNPSKLVVASLKRSLKQIKKELDMLESKLLILVKEVHQDVLTRLQSIPGIGNKTALMLVVLTDGFDRFNSGSELCSYAGLTPIIRQSGSSVKGRARISKIGNQKLRNLLFMCSFNACKYNKACREIYERIVAKGKSKKLALIAVCNKLLKQAFAIAKSGLIYDDSYRSVLVKN

SEQ ID NO: 382191 - protein, 356 aa, unidentified
MTTQSTKPDFTGQELFVGIDVSKNSWKVCILTQHLEHKTFTQPPKPEVLVGYLQRHFPGATCHCAYEAGYCGFWIHDHLKALGVDCIVVNPADVPTNHKERTFKTDRIDARKLARALRNGELTPIYVPNRAALEDRSLIRTRHNLVKKQTRCKNQIKGLLGFYGVPLPLEPGTKNWSRRFILWLDQLAMQSPSGTQALKALIQELKYLRQMIAETTKQIRTLAKELPYCSYTVPLLTIPGISTLAAMIFLTELVTLSRFRTLDQLSSYVGLVPGEYSSGEREITTGISQRRNPFLRGLIIECAWVAVRKDPALVLAFNKLCTRMPKHQAIIRIAHKLLNRIRFVLKHQTSYVHAVV

SEQ ID NO: 382192 - protein, 313 aa, unidentified
MEKITVGIDVSKDRLDVAVRPSGERFAVSRTGAGLADLVARLKLKPNLIVLEATGGFETVVVAALAAASLPVAVANPAQIRAFAKAIGQRAKTDPIDADVIAHFGEATGVTPRPLPDEATQQLADLVARRRQIVEMIGSEKQREKGANPRIKKSIGRLVKALERELSSVDTDIDDAVRGSPAWRDKEDLLSSVPCVGQVISRTLIAELPELGTLRHKQIAALVGVAPFTRQSGQWRGKSFIGGGRASVRTALFMGAMVARRHNPVLKAFYERLVAAGKPKKVALIAVARKLLIILNAIVRDGTPWKGTVAAVS

SEQ ID NO: 382193 - protein, 319 aa, unidentified
MEKEKVYVGIDVAKASMDIAVHSTGQRWSFLNDDTGIAQAVTRLRELAPELVVMEATGGIELPLTAALVVAGVPVVIVNPRQVRDFAKATGRLAKTDALDARVMAHFAAVVRPTPRPLPDVQAQEFSAILARRRQVVEMLTAEKNRLGTARKAVRERIRAHIAWLEQELANLNQDMRRSVQESPVWREKDNLLRSAPGVGPILSATLLSELPELGTLNRRQIAALVGVAPLNRDSGTFRGKRTVWGGRATVRATLYMAALVATRYNPVIRTFYQRLCAAGKAKKVAITACMRKLLIILNAMLKHRTPWGLAPQILVPCH

SEQ ID NO: 382194 - protein, 469 aa, unidentified
MQERNAIGIDPDAQGFVCAYVKRSETKVATRGYMATDSDLKSFLKWVHSQGDVIIAIEGSNGWSKPIEKVLREAGVIFYSFKPFDTDKFRKAVLGQNKTNAKDAESVARYAMALEGQGKLDQYKRVWFPDMELQLLTRRHKSVTEQLTAEFNCLWKQLRYASPDLYLALGGKNPEVESDRKVLKNQGILTLLSSLPDVGEWRSLGDEQILEAMGGEDYKGRRALIEQLRKVMDSFQPTSEAMALLLRTSAQHIQMLKGVLRDIEKTLEKLTAENAAVQELRQMKGIATNTAAKLIAEIVDIRRFAREDSLACYAGLGLQEHSTGQRKDMIASELYNHRLKDAFMTAAKHFVYNNPESHLAGYYRNLVKRGMSPLEATKRVARALVRVIYRRLSALTVQEETKKSGEQKRGEGSMASGLTRGGQSHISDIPPSSPANNIERGGSRVKRGTTRKGSTTNRSQRRKKLKKIS

SEQ ID NO: 382195 - protein, 338 aa, unidentified
MVLYVGIDLHSNNSVVVVQDEEDNVVGQRRLANDLRTVSAWLEPYRDDLAGVVVESTYNWYWLVDGLMDQGYPVHLANTVAIRQYAGLKYRDDASDARWLAKLLRLGQLPEGYIYPREERAIRDLLRKRSQLVRLATMNLLSIQNLFARNRGEGISANRVKQLTPETVDAAFEDSNVALAVKSNVKVLDCLLEQIVVLEKVIHGQVRLRNSYKRLLTVPGIGTILAQTIMLETGEISRFRDVGNYVSYGRLVGSSHLTNGKRKGSGNTKNGNAFLCWAFIEAANFAIRFDPTIRRYYQRKQARTKRIVALKAVAHKLARACYHMIKNDVKFDITRAFG

SEQ ID NO: 382196 - protein, 437 aa, unidentified
MTATASDCPPPPFQAPALPVGEFAALIGLDWGERKHAIALRPRSVGRAAVESLELEHSAENLHAWIQEIGERFGHQPVAIAVESSKGAVVAALMEYPWLVLYPIHPSTSRRFSTAFIPSGAKDDMPDAQILLEIIESHRQRLRALVPQDAATRRVAMLVEVRRKLVDSRTHATNQITSLLKNYYPQALELTGESLCAPMAMDFLGRWPELAVLQRAKAQTVRDFYRAHNVRRPELIEARLALIKGACPLTKDRALCEVSVLHLAALVAEVRALSAHVAKADAAIATAFASHPDAQIFQSLPGAGPALAPRLCVLFGANRERWSNASELQKYYGIAPVTERSGRQKYVHWRWSAPVFARQSLVEWAGQSIKWCEWAKAYYLQQKERKNRHSSILRSLAFKWLRILWRCWRDGKTYDDTLYVAHLRERKAPLLDFLPAA

SEQ ID NO: 382197 - protein, 302 aa, unidentified
MPQHSVTLGIDVGDRHSHLCLLDTETGEVIEESRIATTPQAFERRFVGVEPMRVALEAGTHSPWISRVLGGCGHEVLVANARKLGLIYAEGRKNDRLDAENLARLARLDARLLSPIEHRGEASQAHLAIVRSREALVGARTKLVNHVRGTVKSFGARLPKCSAEGFHRKVREHVPEALAVALDPVLETIASLTERIRGYDRRLEALSRELYPETALLRQVGGVGPITALTFVLVLEDAARFGRSRSVGAYLGLASGQRQSGESDPQERISKRGEELLRKLLVQGAHYVLGPSPKTPTSGATA

SEQ ID NO: 382198 - protein, 317 aa, unidentified
MRASAAFFVGIDVSKEQLDIAVRPSGESWTVAHEEAGLSALVARLRGLAPTLIVLEATGGWEVPVTGALAAAALPVAVVNPRQVRDFARSTGLLAKTDRLDAQLLAQFAEVLRPAPRPLPDAQAQELTALLQRRRQLVEMLTAEKNRLPLAARRIRPQLQAHIAWLHQQIAQFDEDLRQLIRSSPLWREKDDLLRSTPGVGPVLATTLVAALPELGTLSRRQIAALVGVAPLNRDSGTLRGRRTVWGGRAQVRAVLYMSTVVAVRHNPVLIAFYQRLRAAGKAPKLALTACMRKLLTILNAMLKHHRRWAPVRAQHA

SEQ ID NO: 382199 - protein, 392 aa, unidentified
MVVSVGIDVSKDKHDCFIVSSEDEVLADVFTIPNNMDGFRFLLQRIQDYTHAQDKIKVGLEATGHYSYNLLGFLLDNGLTTYVLNPLRTNLYRKSLSLRKTKTDRVDARTIASMLLSDAGLKPYTDTAYHNEELKSLTRYRFDKVKERAKLKSSIARLVCILFPELEKLVPTLHMVSVYALLEEFPGAKQIAAAHLTRLKALLETTSKGRYKRDMALEIRGAARNSIGFPMPAKSLELQHTIRHIRELDNEIAEIEEQIQAIMDELNSPITTIPGLGFRMAAMILAEVGDFTRFDSPDKLLAYAGMSPSTYQSGQLKNCYPHMEKRGSRYLRYAIYNATKYVCHWEPTFAAYLAKKRAEGKHYNVALSHAAKKLVRLIFAMEKSRQPYCLAA

SEQ ID NO: 382200 - protein, 395 aa, unidentified
MSKIVHYIGLDVHKETIAVSIAPQNSTEVRRYGIIGGTLDATDKLVKKLAKEDTELRFAYEAGPCGFVLCRHLRHKGIHCEVIAPSLIPKKASDRVKTDRRDADQLARLYRAGELTAIHVPDQEDEAIRDLVRARTSALTDQRQARNRLKGFLLRLGFRYTGKSSWNDAHKRYLSGLVMPQGPQQIAFQEYIHALNDATDRLERLAQAVEDALPGWKWEPVVRALMSLRGVQVLTAMTLVAEVGDFRRFDDPRSLMHFFGLTPSEHSSSDKRVQGGITRCGNAHCRRVLTEAAWHYRLQPKVSEAIQKRQEGQSKEVQLMAWKAQERLHKRFQQLSARKKSVVAATAVARELAAFVWAIACQVKPAEQPAVPEIIRTCRGKVYRLDPEKKFQKNK

SEQ ID NO: 382201 - protein, 345 aa, unidentified
MNITTVGIDLAKNVFQIHGVDARGKVALRRQLRREQVAKFFVNLPPCLIGMEACASAHHWGRTLERFGHTVRLMAPQFVKPYVKANKNDVADAEAICEAVGRPNMRFVPIKSIEQQGILSVHRVRQGFVKARTAQANQIRGLLGEFGLVIPKGICHVARCVPALLEDASNELPLAFRQLIDRLTGHLKDLDQQVRELERQIIAWHRGSELSGKLEKIPGIGPLAATALIASIADARSFDNGRQVSAWLGLVPRQNSSGGKSTLLGISKRGDVYLRTLLIHGARSAILAAKRHSGNKNVWLANLLNRRHPNIAAVALANKNVRTVWALLAHGRDFNPDYVPIRVAA

SEQ ID NO: 382202 - protein, 419 aa, unidentified
MIEIEAQRCAGIDIGKAEVVVAVHTPGPGGGRRRQVRSYPTMTRELLMLRDWLVAEKVTRVGMEATGVYWKPVFYLLEDAVEECWLLNPQHVKARRRGRKTDVIDAEWICQMTEHGLVAPSLVPPMPVRRLRLLTRRRATLVSERTREKNRMQAMLEDAGIKLGVVATDIFGVSGRRMLDALIAGQRDPHILADLAVGTLIKKHPALIEALTGRFDDHHALLAGQIRDHVDYLDAAIAQLDTAVDQLIDTEIAPFRHLIDLLITLPGVAYRTAQVILAETGGDMTVFPTPGHLAAWAGVCPGQHASAGQKKNVSAPKANKWLRRALGEAATASARTHTHLGARYKRLAARRGRNRAKLAVGHSILTATWTMITTDQPHHDLGEDHDTRTTNPDRRRRQLTTQLEQLGYDVNLTPKPTAA

SEQ ID NO: 382203 - protein, 386 aa, unidentified
MTFFVGIDVSKHKHDLAILNDNGEILSTNFQFANTYQGFQRLKEHLGTLEIPTSNLHIALEDTGHYADNLIAFLQKLGYPTFTYNPLLIKEFVKSLTLRKSKIDKKDALSIARKLLSDPTPERYIVESQILELKELTRYQNRLIQERSKNKTLYVRTLDIIFPELAKIVKNVHNQFVYELLSNYPTPQKIKRAHFHSLLKIKRLTADKVNQIQEAAHLTIGNSSLALQLEIIQLIEMIRIQTEQINKVQDQINTLMAKIDSPITSITGIGERLGAVILAEIKNIHNFRTPGQLQAFAGLEPSIYQSGTMDITGHMVKRGSSYLRYALIQAAKLLANYSPHFKAYLRLKISQGKHYNVAVSHVAKKLIRIIYYLLKTNQMFDERKLR

SEQ ID NO: 382204 - protein, 339 aa, unidentified
MKLIPVGIDIAKTVMHVHYVDEGTGEVVNKPIKRAAFLEHFTNRSPCLIGMEACGGAHHWARQLVKMGHQVKLMPGEFVKAFNIRNKNDAADARAIWLAVQQPSKEVAIKTEMQQAMLALHRMREHLVKFRTMQMNGLRGLLSEFGEVSAKGRASLDRAIPDILARIAERLPAVLIDTLREQWNSLTKLDEQISAIERRMREWKKDDHEVKAISEIPGVGLLTATAAVAMIGDAKVFKSGREFAAWAGLVPRQTGSGGRVRLHGISKRGDTYLRTLLIHGARSVLINAKEPGAWVEQLKSRRHTNVVIVALANKIARTIWAVLAHNRPYQKEYVSTKPA

SEQ ID NO: 382205 - protein, 341 aa, unidentified
MNVTTIGIDLAKTVFSIHGTDTHGKVVVRKRLNRPKLLPYIAQLPPCLIGMEACSGAHYWAREMTKLGHDVRIIAPRFVAPYRKSSKNDDNDAEAICEAVGRPTMRFVPIKTEDQQATLCLHRIRRGLTKERTAQINQIRGLLAEFGLIIPQGRYAARRRVPEILEDAENGLPMLARRLLNNINQRIRQLDEEILAYDREIETMARRDERAKRLMAIPGIGPQTATALLASAPDPRQFKSGRHFAAWLGLVPRQYSTGGKPRLGRITKRGDKYLRTLLIHGTRAVIAKIDAKEDRLSAWAKELKERRGYKRAAVAMAAKNARIVWALLMNQTEFKTQPVKG

SEQ ID NO: 382206 - protein, 323 aa, unidentified
MQGKITPDHGAPEAVSVGIDVCKERLEVCVHPAGPCLRVANSGAGLRRLKRALGGRAVAVIVMEATAKYHRLTQRTLAQAGFAVAVVNPLRARLFAEAAGARAKSDRVDARMLALMGAALAPQARPPAPARLEALQEFGRARSAASRDLTRLKNRRGAAQTAFLKDELGRQIDALEGAIARLGAEIERRIEADPALARRARILRSIPGLGPTVAAVLLADLAELGTLSGKAAGALAGLAPIARDSGASHGPRQIGGGRKSVRNALYMAALAAARANPPLRAFYQRLRAAGKKPKVALTAVMRKLVVLANTLLKDDRLWLPANP

SEQ ID NO: 382207 - protein, 271 aa, unidentified
MTKHTIGVDISKDHLDIHVLPSGEAMTVKNSGHGFRKIARRFRELDPAIIVFEPTGSYHRAFAQAMHAAGFAIHGVNPLYARRFAQAIGVLAKTDRVDAALLARMGVALDLQPQQPQSETIILLRELAMSRRGLMKERTATLNRQKVLNHPLLKRQCAARLRQIERQVKQLDAEIAEVIRADEHLHRRARILTSIPGISDVTAFTLMVEMPELGTLSSPQTASLAGLAPMSRESGKWKGKSFIQGGRAILRQSMYMPALVATRFNPDMRVV

SEQ ID NO: 382208 - protein, 369 aa, unidentified
MADRITYVGLDVHKEGIVVAVAASGLRGEVREYGRIANTLTALDRLLRKLGGDGVSLRFCYEAGPCGYGIQRQVSATGHECVVVAPSLIPRRAGDRVKTDRRDAASLAKLHRAGELTAVWVPDARHEATRDLVRARLDAVHSLRRARQQLSGFLLRHGCHYGRPAWTKLHRRWLAGLKFEQAVHHIVLEDYIAAVEAAETRRDRLTAQIEAMLPGWALAPVVAALQTMRGMALVNAATLIAELGDLSRFTNPRQLMAYLGLVPSEHSSGASVKRGGITKAGNGAARRLLIEAAWSYRFPARISRELLLRQENQPKPIRDIAWKGQVRLCARYRKLARTGKPANVVTTAIARELTGFVWAIARNVTVTAG

SEQ ID NO: 382209 - protein, 389 aa, unidentified
MLIEEKEYREGERTAIGIDPCKEFLQLAILSPDGKRKFKKLPLSPSITEEISKSTVPERTQIGIESYASYGKLFVFELLKKGYDVREVNPSISSKLTKLITEDHSDCLDAESIAKALVLIPDLPKVSFTEPQLLLSKLSRLRKRLSKDLNGYLNRLHAALTESYGAVYKRLFRSIFSQKALAFFDRYPTINDAFGHKKKVTAALGEEAWELLSQAGKWDQSFYLEYLKVEIRCLIAIIRSLLEAKKELEKKIQEVGTEDEDVRLLRTFPGIDYVTAATLLSEIGSVERFGKESSLSSYCGVSPVMWQSGTSGVKTKRRKKYNRHLKGILFFISLSQIRINPESRDYYWRKRQEGKSHWQAMNALSRQLIKIIYYMLTNRECYRRERIVH

SEQ ID NO: 382210 - protein, 336 aa, unidentified
MQITTIGLDLAKHVFQVHGVDANEAVVEKRRLRRGQVLGYFAKLAPCRVGLEACATAHFWARELRRLGHEVRLIPPQYVKAYLKRGKNDAADAAAICEAATRPSMRFVPIKSEEQQAVLIMHRARDLLVRQRTQLINALRGHLAEFGLIEAQGPSHVRRLLAGMRTDLTVPELARETLDLLATALEAVDAQIDAVEAKITTWHKANPTSQRLATIPGIGPLIASAITATVADPAAYRSGREFAAWLGLTPRQKSTGGKQRLGRITRKGDQYLRRLLIIGAQTVLLRSKAAKANLWIQGLLARCARLKVAVALANKTARIAWAVMIRGECYRPVAAA

SEQ ID NO: 382211 - protein, 452 aa, unidentified
MKEEVKNKSALTNDQFVLEIINKQSGAIDVGSTMMMISYTDSEGKNHLIEANAYTDDLTEVAVHLKEAGVEKIGMEATGVYWMALYEILERHGIEVTLVNPKHFKNVAGQKTDVLDCQWLHQLHAYGILRASHIAPDIYRELRTYIHERNILQKQKSDTLNRIHKLLTKMNVKFQHLISDIEGVSGMSLLREIASGITNPENLLAQIDITKLKADKADLIKSLKGIYSPSNIYILRKTLESYDFFKRQMKEYEILIESVLKKMLPPDSKKEIKKKTSYVRKNQYSINVKEYLKRITGIDLTQIDGLDEICILEIISVTGLNLNKWPTADHFTSWLNLSPRKKITGGKVVGHQKRFTNNPATQCFRMAAQSMWHNKSSLGHLYRRLSYQKGSKKAIKAVARKLAVIFYHMLKNRQEYDPKRLQIDTERQKMIKIDRLKREAAKYGLKLQNVAA

SEQ ID NO: 382212 - protein, 413 aa, unidentified
MDLLVERCAGLDVAKREVVACVRTPDPGAGGQRLQAIRTFATFSADLEALADWLAAEGVTQVVMEATGQYWKPIWYVLEERGFALLLVNARHVKILPGRKTDVADAAWLAELLEHGLLRGSFVPPPQIRQLRDLTRYRKKLIQAHTAETQRLHKTLEDAGIKLDSVAADVLGVSGRAMLAALVAGERDPVVLAALAKGKLRKKLPQLRQALTGRFSDHHGLLVGLSLEHLEHLERAIAALDDRVDAVIAPFAVARDRLDTITGVGKRAAETIIAEIGVDMGAFPTAGHLASWAGRCPGNNLTGGKRRSGKPTKGNRWLGEVLTECAWAAAHTRETYLAAHFWRLARRIGRKKAAGAVGHSILVIAWHLLSNDCDYHDLGGDWFARRSDHDRHKTHLVKQLQALGYSVTLQPAA

SEQ ID NO: 382213 - protein, 494 aa, unidentified
MIRSVGIDLSRTGGHRVRCLDEQAKPCDSFSFNSTLEGLERLEDRIFSNGGTPTIVFEPTGLSWIPIAVFLRARHPECRLVKARLQKVAALRRYLHSRTKSDRIDGMTLAKMPFIDAEQLDEAYLPPVKYHSLQRLTRQRERLMKSITARKNRIGSIIDGYLPGLRKAFSDEWSGRARAFYQHRLNPFTVVRNGQDSLEGFLLGVKARGVRAESRDVYHACLRLTELYKRSEATGMINENFFDDLQEEIACELRLMEADEVEVERVSGRIEELYIQIQPTDLLRTIPGVGMRTAQVFLAVIGDPHRFRSQAAFANWTGIVPGANQSADTESKGLRMTKAGSFMIKRALYQAGEIARRFDPQLAYLYYREMVNHGKNHKQAMGAVMSHLGARILAVLRENRPYELRDIHGQPVGYDDASAVAWDLVGGMCRLFGWRRATQLFTQLERCIGEQTPVAFGRDEDIAAMAALFDFNDAADTTYDKIVQCLRGFFFQEV

SEQ ID NO: 382214 - protein, 344 aa, unidentified
MNDNIIAGIDLAKNIMHFALTNRSGEKIKQFKAKRDDFLSAIAQLDPDTLIAMEACGSSNYWAQEITRLGYKARLIKTKDAKVYAKSKQKNDFNDALAVAKAARDPELQSVKAKSKAGQDISLMHKTRQNTIRDRIQKTNSMMSSLGEYGYLTKLSKGKFCKACGSEVEKAYQENFISKQAYEILKIDCQEITALCEKEKLIDKLIVQSNKQSAKATKLQNILGIGPINASCLSNAPMENYETPRDFAASLGLVPKQSTSGDEIVLGSITKQGDRYARTMLIQAGRSVVMRAKTIKGPTDKLLIWAQRKLAEGKHFNVVCVGVANKLARIAYSVVINNTEYKEA

SEQ ID NO: 382215 - protein, 403 aa, unidentified
MMTATPPQATRVIGGIDTHADTIHVAAIDDLGRELGDREFPTTPVGYRDALAFLIRHGTLSVIGIEGTSSYGTGITRAARTARIEVREVTRPDRATRRMRGKSDPIDAYAAARAVLSGRADAAPKDEEIDAIRALHIARNSAVKARTAAMNQIHHMLITAPATVREKYRPLKEKPLVNALAACRPSGQDPTLKAVLTALKTLALRHQFLTTQADDLKAQLRDLSAAANPHLLSIRGVGPSTAAQLLITAGGNPDRLRTEASFAALCGTAPVPASSGKTTRHRLSRGGDRAANSALHTIAMNRMTSDARTRDYVARQRATKRGTPEILRMLKRAIAREIFKSLTQGQAAPLLADLRPARQAKNITITAAAKALGTYPSKLSRTEHGTYPDYDLAHRYREWLAAA

SEQ ID NO: 382216 - protein, 418 aa, unidentified
MGIDWGSQQHQLCVLDDVGQVVRECAVPHRAAGLRQLVDWLRELTAGDLRRVAVAIETPRGAVVEALVDAGAHVYHLNPEQLDRFRDRHSVAGAKDDRRDAFVLACSLRTDLPCFRRIDPEDPLIVELREASRLDSRLLAQHTALANQLGAQLHRYWPQLLELAPGADEPWLWDLLARAAHPYSARRLTRAKLAKLLREHRIRRFDAEQLVAVLRQPPLPVAAGTLEAATMNIELLVPQLQLICRQRRQTAARLKRLLAQLSAAATADPEQPPQHRDAEILLSMPGVGKLVAATVLGEAAGPIARRDYQLLRALTGIAPVTRASGKSRHVAMRRACNQRLRNAVYHWALNSLQNDDASHLRYQALRHRGKTHGHALRLLADGHLRTLTAMLRDGTLHRSRNLVAPPSPTATQDEHVAA

SEQ ID NO: 382217 - protein, 402 aa, unidentified
MPMLSIGIDVSKGKSTVCGMKPGGEIVYTPFEVQHTREGMSELVSLLRGSGEEVRAVLESTGSYHCPVVAALLENGIFVSVVNSLRMKRFCSQSIRKVKTDRIDAMQIALYGLAYWQELQPTRLPEDTYRELQLLARQYYQMTSLLIKAKVDFNAICDQVLPGMQELMSDHAGRHKLSDFVLRYRHTTHILEMGETRFRKDYCKWAEKKGYRNCERMAVLIFATAQNGIPVLPNAPSTQIVITEAIRVLHTVEASRDAILTQMQALAKTLPEYSLVREMPCIGDTLAPRLIAEIGDVRRFHSKRALIAYAGIDAPPYQSGKFCANNRHISKRGNRYLRKTGYEVMQSYVMHKPANDPIFTFIEKKRGEGKSGKLAMVAGLNKFLRVYYGKVTELYRSLPTIE

SEQ ID NO: 382218 - protein, 359 aa, unidentified
MSSIVLERTDVIVGVDTHKDEHVAVVIDGLGGRLGEYYLSVSNSGYAELLAWAKTLGRVHAFGVEGTGSYGMGLARFLRRHAQTVIEVSRPPRAGQRRLDGKSDPIDAEQAARQVLAGQATATPKVSDGAVEAIRLTRIARNSAVKAHTQAIVTLKATLVTGSDELRAKLEPLTDYKLMTACVGLDSDGDPSDPDVAMRHLLCSLARRWLDLHKEIKTHTKRLKKLTTATAPRLLAAFGVGPDIAGELLVAAGDNTDRIRSEAAFAKLCGVCPIPAGSGKTGGRHRLNRGGNRQANAALFRVVIVRMRWHAPTIAYVERRTTEGLSKKEIIRCLKRYVAREVYNLLPPPRDNEESLSRA

SEQ ID NO: 382219 - protein, 341 aa, unidentified
MNYYAGIDVSLECSSVCVVDASGKILREARVASEPEALIAWFRSSGFEFERIGLEAGPLSQWLFAGMKTAGLAVELLETRHVRKAFEAMPVKSDRNDARGIAQLMRLGWFRPVHCKSISAQETRSLLTARKLVQSKLLDVENSLRGILRGFGLKVGKTTKREFAARIEELVAGHPHLQMIAKALLAVRAVLRTEFAAFEKQTRRMVRSDMQARLLTSVPAVGPIVALTYASAIDDPARFKSSKQAGAHFGLTPKKHQSGETNYTGRISKIGDASVRTALYEAANVMLTKPVKGCSQLKGWAMRIKRRAGTNKAKVALARRLAVIMHRMLADGTPFNAAAAA

SEQ ID NO: 382220 - protein, 315 aa, unidentified
MTQTSITTAGIDTSKAKLDIAVHGRIERWQVANALPGWRALAANLTRAGVTRVGIEATGGYERGVVEHLRAAGFTVLVLQPMQVKAFGRVHLRHAKNDALDAILIAACAAAMGPPRIAPDPRLADLAGYLTFLEQIEEDIARFKTRLEHIDEPRLRSLVGSDIRRLKARRKAQIRTIAKLLRGHDDLASRLDLVLSIPGIGERTALALIIRMPELGQVSREEAAALAGLAPFDNDSGLRKGQRHIAGGRGRLRKSLFAAALPAAFRWNKALIALYARLIANGKAHNTALIACARKLLVYANTVVQRGTPWVENAA

SEQ ID NO: 382221 - protein, 317 aa, unidentified
MTQISIATAGIDTAKDKLDVALHGDAARWQVENSTRGFNRLTALLTQAGVERVGIEATGGYERRAVKHLRAAGFTVLVLQPIQVKAYGRVHLRRAKNDALDAALVAACTAAIDQPRIEPDARLQDLADHLTFVEQIEEDIARLKTRLEHIDDARLRRLVMADIARLRARRSAEMLRIVTVLRGHGDLARRFELVQSVPGIGERTALALVIRMPELGRVSREEAAALAGLAPFDDDSGKHKGQRHIAGGRGRLRRSLYAAALPASFRWNKALVDLYGRLIARGKAHSAALIACARKLLIYANTVVQRGTPWTERATAI

SEQ ID NO: 382222 - protein, 431 aa, unidentified
MNDVARFAQFSEFRNNVRGSKTHLIVGIDIAKDKHHAFFGTANGKTLWRRLIFTNDLTGYSRFNEHVQTLLSQHQLKEVVFGLEPTSNYHKPLAHWLIEQDYLVVLVAGKAVKDNRELLDGRWDKNDTKDSANVADLVSRGKCQFYEQPEENISAVRSLLVMRKQLKKEEHRLRMRIRNGLIAKYFPEMDRHWNNCLEENLAIVRWYLDPRKIANTEFDQFVCHVTTTDRGLGQKRRLKAIYQAAGESIGMPVDASADYEAQMLVERLKGVREEILQTMQQITSVCQGLSGYKLLLSLPGFGPYISAMVLAALANPLRFSSRKQVIRLAGLDLNASRSGKKSRDSVPVISKKGDADLRYALYQAALIASYHNDCFRRLYQRVLEGRHGERGIKTKARVKLAAKMLVVAWTMLKNNEPFDAMHLLGESDQQR

SEQ ID NO: 382223 - protein, 348 aa, unidentified
MSKRSHSFQSQLSDPMMASVFCGVDVSAATLAVAVQPDGQPLEQREFANTSSGHKALIACLHKRKARARVSLEATGIYSLDLALALDAADEIEVAVLNPKVVNRFAQTLRRSKTDTADAQVLAEYSRRMPFTAWRPPNRNGLALRTISRHLDGLTVEHTREHNRLHAAQGSTATPACVVQDLKRSLASLKRRIVKLRGAALELVRQDELLRSRFELMISVPGIAEISALQLLGELASLSGDMSVRQWVAHSGLDPVHGDSGTSVHRPSRISRAGSRHLRRALYMPALVAVQHDPHLKAFYELLQRRHKAKLQALVAVARKLLHAIYGIFRSQTPYDGNKLFPALSPAS

SEQ ID NO: 382224 - protein, 423 aa, unidentified
MTKLTPTPAGAVLVAIDMSKSRQEVLIERPEGGRRRRMTVMATRQDYDGFAEQLAAIGRRIIVGFEATGNYHRTLAHRLLTAGFELRLISSVALARTREALHNGWDKNDPKDAQVILHMLRIGATQRYVDPLAAGINDLQELSKTHETISRMKTQTWHRILTHYLPLYFPEIARFAGNSRSDWFLALIERFPTPASITALDAGAFSAAAWPLIGRKVSKARLVNDIYETACASVALPVPEDSAAITMFRMVIAQGRSLIHQRDEIERLAHDRLAEHVDYKLLRNIPGIGPINALTILAEAGDLRRFNHHRQFLKFCGLDLATCQSGTFRGRTKLSKYGNARLRRTFWMAAQVAARQRDNSFRDKLGRYTAGHADDADRRRKAMTALTAKMARVAHAVVKTGTEYRPFLERSDARWKDPSLQVP

SEQ ID NO: 382225 - protein, 320 aa, unidentified
MSEVIERFVGIDVSKGSLDAFADPPSEMLPRHCGYDDAALKVLSDTLARLAPTLVVMEASGGLERRAAAELASRGVCLAVVNPRQVRNFARASGELAKTDAIDARVLCAFARAIRPAARAPRDADTIELAELLSRRRQLVDIRVQELQRQHTADSRAMKKSLSEHLAWLDKRIARLDEDMGQRLRKSDVWRAKDDLLQSIPGVGPVLSRTMLGMCPELGVLNRREISKLIGLAPLANDSGKHRGRRRIWGGRADVRRVLYMATQAAIRHNPDIAAFAKRLNDAGKLPKVVIVACMRKLLTVMNTMIKSGQPWHSRLPANQ

SEQ ID NO: 382226 - protein, 407 aa, unidentified
MKVYIGIDWSQNKHDLCFLNQAGAHLAQLIIPHTPAGFWKIDETRKKLGVGIDACQIGLETAHNILLDFLWDQGYSQVFVLHPKMVKSSRGRFRSSAARDDTGDALLIADILRTDQGHLRSWQPDTSLTRQIRSRIKYTQFLTTEIVRLTNRQRAVLLRYYPVVLDLFSSLNTLITQHFVREYPTPQAAARLSRDEFENFLKKHRYPKKGLSPRILAQLQQPYPKAAAGVIEACYPEAQSLARMLLEMISAKKKMLKELGHLFNQHPDHEVYASLPGTGAFLQPALLSKFGDDRARFPTAGCVQALAGTSPVTISSGKRRRVQFRHSCDHEFRHIAQQWAKSSLRTSIWANAYYTSIRPHCESESHAFRCLANRWLAILWRLWQDGKPYDETYHLRQRTLRSQPRIT

SEQ ID NO: 382227 - protein, 363 aa, unidentified
MLYVGIDQHRKQLTVSVRDESGNVVLRRQVSTRWEKVRAFFSETRDRAAGDGGYLAVVEVCGFNHWLLALLAELGCRQTIVVQPEEQAKHKTDRRDASQLSEVLWVNRTRLQQGLPARGLRRIQLPGAEEQADRRLTSLRHNAGRELTRTINRIKAVLRRHNLEQECPTKGIHTKTALRWLHTLQLSPVERIELDEQLHRAGLLREQVRHLQLEIEARFEKNPQAQLISTLPGAAAYSALGLASRVGDVRRFRHPRSLANYWGLTPGSRNSGEATDRLGSITKQGSALARFLLGQLVLHVLRDDPWMRSWFKAIKRRRGSKIARVAVMRRLATIVWHMLTRNEAYACGGPPRARLQPRPAGAR

SEQ ID NO: 382228 - protein, 323 aa, unidentified
MDKNTNFIGVDISKDRFDTWDPVNKHRRFGNDTKGFEQFLLSIPASSWVVMEATACYYQKLVVYLYENGVAVSVVNPVVIKRYIQMKLRHNKTDKADAKMIREYASEQPLNRWVPQPAYIESCKLIYSSVMLYNKNKTMLKNKLHSLVSRGYTTGTLVRSLKRQIKSLEKEIHTLETELEQLVKEQESTTLTNLSSIHGIGKKTALLLIITTNGFRNFNNAGQLSAYFGLAPMERTSGSSIRGVSRISKKGNPDVRNHLFLCSFTACHKNPQCNKLYERIVARGKSKKLALIAVSNKLLKLAFAVAKSGIPYDPNYKGSFAQV

SEQ ID NO: 382229 - protein, 333 aa, unidentified
MKNYLFHAGIDISKDKLDINILDSLTLQSQHLIIRNDIKSISDLIKILQKKIDLNRTLFCCENTGVYTNHLSFVLLNKELDLWVVPAIEIKKSKGISRGKNDKTDSKDISYYSYRHLDKLNLFTLADVDVQKLKILFTERAKMIKALLILQTSRENKEFTQKEIYKEISGVNGALLKQIKNSIKKIEIRIKEVIKSNDQLNKQDQLARSIPGIGAQTSAYLIIATKGFSSFDNWRKFACYSGVAPFEFSSGTSVRGKTKVNHMADKKMKSLLQMCVLTAIKYDPQLKEYYNIKKAEGKNSMLVMNNIRCKLISRVFAVISRGTPYINTYKFAS

SEQ ID NO: 382230 - protein, 316 aa, unidentified
MESQRPFVGIDISSQRLDVDTLPASQPFFKPHTEEGIASLVQHLKPLNPQIVLLEATGGYEISVAYALYEAGLPVVIMNPKALRHFAKAIGKLAKTDKLDAQVLALYARKIQPPVRPLQDQEQLELANLMTRRRQLQGMIVMEENRRRTCTPRVRGNIDRSLAHLRQLLKDLDREIHDSIRRTPLWHENSEILQSFTGVGPKVSASLIADMPELGTLPRGKASALAGLAPMNRDSGQFRGKRMIQGGRPAVRQALYMAALVASRHNPVIKEFYQRLRLAGKPAKVALTACMRKLLVILNAMLKNRTYWNPQLPLAA

SEQ ID NO: 382231 - protein, 343 aa, unidentified
MEHYAGIDVSLERSSVCVVDATGKIIREAKVASEPEALAGFFAGLGLAVTRIGLEAGPLSQWLHAGLSEAGFEAVLLETRHVKAALSAMIVKTDRKDARGIAQLLRMGWYRPVHCKSPLAQEIRALPGRRKLLQGKLVDVELSIRSILRGFGLKLGEVSKGRFAARVSELIAGQLMLERVIEPMLRARDTLRAEYQVLHRAVLAIVREDAVCRRLMSVPGVGALVAVTFVSAVDDPSRFRRSRDVGAHFGLTPKKYQSGETDVTGGISKVGDAMVRAALYEAANVMLTQAGRFSTLKRWALGVAQRRGMRRAKVALARKLATVLHRLWADGSEFRFGKEAAAA

SEQ ID NO: 382232 - protein, 477 aa, unidentified
MNVKTSKAKKQVNLDNQAINLLSKEELGKKIEVVEKELKSYTWQELETNGKFAKNDKLSFITDDMLIVGCDVGSETHYIRAIDVRGREVSRGAFEFSNTEEGFENARTWMLILAAENGKKQIVLGLEPTGHYWFALAAWMISNGISVVQVNPYAVKQSKEIEDNSQCKDDRKDPKLIANLVKDGNYGMPYLPEKIYADMRRLSMFRDQLTEDRIRNINRLHRELKIYFPEYMDAFGKIDGAFTLEVLKVSAIPTDIVALGTDGLRNIWHNAKLRGRGYSRAHEIVSCAEKSVGLTDGIDAGCEAMKWYAGQILKLDVQLAAIESTLHKKCREIPYAENILAINGVGENILSGILAEMGDISRFDDVKEIQKLSGMGLVACSSGKHKGQTKISHRGRKRLRYWLFQAAKSAVSHADEFKQLHEYYTTRADNPLKKMQSLIVIACKILRIVYTILKTGTTYDRQKMLKDIKRPVSSQAA

SEQ ID NO: 382233 - protein, 346 aa, unidentified
MEHYAGIDVSLECSSVCIVDATGKIVREGKVASEPEALIAWFGSSRLDLVRIGLEAGPLSQWLYPRMQQAGLAVELLETRHVHKAFETMLVKSDRNDARGIAQLMRLGWFKPVHCKSLAAQEMRALLTARKLVQSKLHDVQNSLRGILRGFGLKVGEATPPRFSSRIIELVTGHPNLEVIAESLLAVHEVLLREFKGFEKRLRLTARLDTRARLLMSIPSVGTIVALTYASAIDDPARFTSSKRVGAHFGLTPKKYQSGETDYSGRISKIGDASVRAALYEAAHIMLTKPLKGCTQLKSWAMRIARRAGMRKAKVALARKLAVIMHRMLADGQPFNPAVAATMAAA

SEQ ID NO: 382234 - protein, 343 aa, unidentified
MTNITTIGLDTAKSVFQVHGVDAHGEVVLRRKLKRRQVLAFFAKLPPGLVGIEACGASHYWSRELTKVGHTVRLIPPRYVKPYVKSQKNDATDAEAICEAVTRPNMRFVPTKTSEQQSILMLHRTRHLLVRQRTATINAIRSHLAEFGIVAGVGRNGVEALLKVIADEQDDRVPAVARDCLMALGAQLEMLKRQAHELDAKILATHRNNELSRRLEAIPGVGPCIATALIASIPDPRTFRSGRQMAAWIGLVPKQNSSGGKDRLGGITKAGDRYLRSLLMLGALSVIKRAKQLGYTRRPWLAQLMARRPVKVAAIALANKIIRMVWAMMVRGEKYREPVALAA

SEQ ID NO: 382235 - protein, 323 aa, unidentified
MAVVVGVDIAKRSFDLAVLQSNGKYRTKGKLSNDQAGFAVFADWLQQHAEPGAWIVMEATGIYHESLAGHFHALGYRIAVLNPAQIARYAQSQLQRSKTDKLDAKLIATYGQRHEDSLRAWHPEPVSIRTLRALTRRLEDLQSLRQMELNRLEISPEKVQDSIRAVLQRLDEQIAWTLEQIKRHIDDDPDLRGKRDLLVSIDGIADKTAALILAELGDIDRFADARAVTAFAGLNPRLQESGLARGHTCISRMGSVRLRSALYLPAVVALTYNPAIRAQAERLKARGKKGKQTVCAAMRKLLTIAYGVLKSGKPFDPALAIAH

SEQ ID NO: 382236 - protein, 397 aa, unidentified
MYIVGIDIAKRKHEAAVIDGEGTVIIKPFSFTNNCSGYNRLLAMLTKAKLPLDEVSFAMEATGHYWLALFTRLQKEGFRVQVINPVQTNSIRSFYIRQAKTDPRDALLIAEVIRFGHFSESTLHPENIYELRELCRGRHAIVSMQADVKRKVVALLDQVFPEYETAFTNMFGDTSMAILQTCPTPKELSEMPLEELCHLIEVSSHKRFRMAKAQELQVLARNSFGFAMAGDVFSTMIRLYAKHLDFLKQQVQEMDRKIAEIMDTLDTPITTITGIGPTLGAYILSEIGDISRFSSAAKLAAYAGIDPTMRQSGEYNGVRNRMSKRGSPYLRHAIWLAASSAVLHDPALKLYFQKKRDEGKPYMASVGHACRKMVSIIYAVMRDNKAYTPHIPNEISA

SEQ ID NO: 382237 - protein, 398 aa, unidentified
MTESSDYESVQVFIGVDVGKDTHHAVAINRSGKRLFDKALPNDENKLRSLISDLKQHGQILLVVDQPATIGALPVAVARSEGVLVGYLPGLAMRRIADLHAGEAKTDARDAAIIAEAARTLPHALRTLKLADEQIAELSMLCGFDDDLAAQTTQASNRIRGLLTQIHPALERVLGPRLEHPAVLDLLQRYPSPEKLASLGEKKLAAQLCKLAPRLGKRLAADIAQALAEQTVVVPGTNAAAVVLPRLALQLITLRKQRDEVALEVEQRVLAHPLYPVLTSMPGVGVRTAARLPTEVACRAFASAAHLAAYAGLAPVTRRSGSSIRGEYPSRRGNKALKRALFLSAFAALRDPLSRAYYTRKMSQGKRHNQALIALARRRCDVLFAMMRDGTFYTPQGS

SEQ ID NO: 382238 - protein, 338 aa, unidentified
MAILMGLDQHRAQITTEWVDTSTGEVSRARLAPADRAAVRRFLGRFRGQQLEVALEATTGWRFVVEELQRIGAIVHLAEPADTAALKGNKKHAKNDRADARHLRELLMAGRLPESWVPPAHILDLRARVRLRHTLSEQRGEWQQRIQSVLYHHGCPRRADLINRAGLAWLATLPMPACAREQVTVALSMIDALDHQLAPIDKELGGYARRQPGCKALMRHYGIGKLTSVTILAELGDPSRFSSSREAVRFAGLDITVYASDRRRAPGHLSRQGPPALRWALFEAAQCARRPGSPDHAYYVEAAERLGGNRACLSVARKLLKRSYHTLRQLGEEALQPA

SEQ ID NO: 382239 - protein, 330 aa, unidentified
MQVGETPITYHYIHGDFKMNHYIGIDVSKSYLDICDAHQVIHVPNTLTALKKWVKSLKKIPVTLVVCEATGGYERLLVQLLKQANISILVEHPNKIRAFSRTKGLRAKTDKQDAQLIFNYAKTIKPCVKNYNLSAEEVQIRDLLKRRDELIQDKNREAARSDKLHSKPVKRSIQSHLEYLDKEIHRIQEEIDQSAQQADIQKQVSLLSSIPGIGQQTALMLLTHLPELKGLSSKSLAALVGVAPFNRDSGQYQGKRFIQGGRKALRKALYMAAVAAIRWNQPLKIFYQRLKARNKPAKVALVAVMNKLVAMLNSVYKRQSPWVENLATFA

SEQ ID NO: 382240 - protein, 366 aa, unidentified
MKKNSTVATRSKQILKQKQLTIGMDLGDRFTYYCVLDEAGEMMVEQKLPTTRQAMKQVFGRMPSSRVALETGAHSPWVSRQLTELGHEVIVAHARNVRLIGESSRKDDRLDARILARLARLDPRLLSPVQHRSAEAQVHLTVIRARAVLVGARTALVNAARGLAKSYGERLRKCGTQQVNRNSASALSPELRAALEPLLAEVESLNQRITEYDRRIEQIATAVHPEVARLKQVKGVGTLIALTYVLTVGDPRRFRRSRDLGCYLGLRPGRRNSGSSQPQLHISKEGDRYLRTLMVQGAHYILGPFGQDSDLRRWGLKLAERGGNNAKKRAVVAVARKLSVLLHKLWVSGEVYQPLRNHNAALGEVA

SEQ ID NO: 382241 - protein, 342 aa, unidentified
MPNRPFILKIEYHHSRANRLNHKENTMNVIGFDISKDTIDVTLLRNSGQVDYIKIANACEGFEKLNDWIRSKRIRKISISMEATGIYYEEAADYFSAIYQVFVINPLKIKEYSKSQFSHTKTDKADSRLIAEYTKRYLDKLTPFKPSENPTLYKLISLLQQLKQQQNESQNRLHASKDTFIRATHEAIILLLAKQIDQTAKRIDLMIQQQDSLNTHYKNLQTIPGIGKDTAAILLNHLTDKQFKTANQFVSFAGLSPRIEQSGTSVNKKGRLSRYGHRRLKRALFMPALVAYRIKAFPKLVQNLSQKPKMIVIVALMRKLAKIAYYIHKTQKPFEKMRYQMA

SEQ ID NO: 382242 - protein, 312 aa, unidentified
MPEPLFVGLDVSKQYLDLAFSPARPPRRVPHTDDAMAALVADLRQLEPALIVLEATGGYETDIATALALAGLPVTLINPRHVRDFARAVGRLAKTDALDAEVLALFAARVQPQPRPLPDEAQQALAALVTRRRQLVEMLTTERLRLPLAKEPIRRDVQAHIHWLEQRVKETDKDLRATLKTSPLWQATTRLLQSVPGIGPTTAAVLIAELPELGHLSRQQLGALVGVAPLNHDSGQYRGVRRIWGGRAHVRRTLYMATLVATRYNPVIRTFYRHLLAGGKPKLVALVACMRKLLTILNAMIKAQRAWAPTHP

SEQ ID NO: 382243 - protein, 342 aa, unidentified
MEYYAGIDVSLECSTVCVVDGSGKIIRETKVASEPAALIGWLGSLGFGLGRIGLEAGPLSQWLYAAMKQAGLAVELLETRHVRDAFKAMPVKSDRNDARGIAQLMRLGWFRPVHCKSMAAQEVRAILTARKLVQSKLLDVENSLRGILRGFGLKVGRTTRTNFAGRIRELVKGHPNLETIGKALLSVRAVLRGEFNAFEKQVRAMSRLNANARMLMSTPAVGPIVALTYASAIDDPARFRSSKRAGPLFGLTPKKHQSGETDRSGRISKIGDAAVRAALYESAHIMLTKPIKGCSRLKSWAMRIARRAGMNKAKVALARKLAVILHRMLVTATSFNDAAAAA

SEQ ID NO: 382244 - protein, 273 aa, unidentified
MTKLVLGIDIAKLKFNVCLINDSGKLRHKVFASTSAGFEQLREWLAKQGIEQLHACLEATGTYSESLALFLYQAQHIVSVVNPAAIKAFAGSRLSRTKTDRVDAELITRFCFTQAPPAWSPLPQEVRQLQALMRRLESLVEMRVAEENRLEAGIMVEDVKASVEELIAHLSAQIKHTEKLICKHIKDHPKLREQSALLDSIPGIAQTTAATILAEIVDITHYKSARQVAAYAGLVSRERTSGSSARGRTRLSKIGNARLRRALYFPAITALSM

SEQ ID NO: 382245 - protein, 339 aa, unidentified
MKVSTLGIDLAKNVFQFHGVGCNGQTVLKKKLTRDKFLPFLMQLEPCLIGMEACASSHHFARVLRQYGHEVKLIPPQYVKPYVKTNKTDAADAEAICEAVARPNMRFVQIKTAEQQAILVLHTERNILIRERTACANSMRAILAEFGIIMPRTLSQLYKKIPEILEEYDNELSPFVRCSVARQLEHLQGVEDQITLIEQELSRWAKTQPACQRVMKVPGVGLMTATYLVASVGNGQQFHSAKQFAAWLGLVPREFSSGGKQRLGRISKRGDRYFRYLLVHGARAVAAVIERHKDNMPWLYRLLNKKAYNVAVVAQANKTARILWSMLVHHTEYRTLSAV

SEQ ID NO: 382246 - protein, 298 aa, unidentified
MDNHTQYSGFAGVDLAKKVMQIHFVTGDGEITDKQVKRAEFLDFFRKRTKCLIGMEACGASQDWARKLEAMGHEVHLMSPKAVKPFVSGQKNDYNDAIGIYKAMFNGVRRVPVKSTEIRDLQTLRRIRSQVTKDKVKEINHVRGLLAEYGIVMGKSITAFNKGISSALESLKERGDVSPLVAEELQTTVESIKTKIERQKRLDREIEQLARGCKNYENFLKTPGVGPFTAAMLCVLLCDPAIFANGRQFAAYIGLAPRSRGSGGKNFIIGIPSKFNCDSESRAVFVECAQALDRKSVV

SEQ ID NO: 382247 - protein, 412 aa, unidentified
MEILYRACAGLDVHKETVVVCVRRSGAAGQVHQEVRTFATMTRDLLALADWLAAEGVTHVAMESTGVYWKPIFNILENQFQVILVNAQHIKHMPGRKTDVKDCEWIAQLLQLGLLRASFVPPRPVRELRDLTRQRAQLVQERARTANRIQKVLEDANLKLGSVATDILGVSGRDMLEAIVAGETDAEKLAELARQRLRAKIPALRLALEGRVTEHHRFLLRTLLDHVAHLETVIGQYSARIEAVLSPFEAAVDRLKTIPGVDRRAAEVIVAEIGKDMSQFPSDDHLSSWAGVCPGNDQSAGKRRSGRTTKGSRWLRTRLVPVAWAASRTKGSYFSAQYRRLAPRRGKKRALVALGHAILVIAYHVLKDGTTYQELGSDFFEKLEPERLVRYLVRRLEKLGHKVTLEPREDAA

SEQ ID NO: 382248 - protein, 404 aa, unidentified
MWYVGLDWADTHHDVEVLDEAGKRVGTRRFAHSHQGLNELIQFLLGIAAQPEHLACIVETNHGLLITFLLEAGIPVYPVNPKTANQLRKSAGAKTDQIDAHLLAKIGRLDLAELRRLEPDSPSVAELKTLTRDQDALIQTQTRLVNQLTACLKDYYPAALHLFAKLQQRSTLVFLQTYPTPQAAQVASLGEITATLRLGKHTNPTRRAPKIVEELHRPQLVASAAMIRAKSRLMLSLVKQLLVVLEDIASYDEAIAPLFLSHDDAELWSSLPRAGKRLAPRRLSEWGDDRARYVAAGSVQALAGTAPVPFQSGNYAKAHKRFACLKPLRNALHQFAWQSTRQEGWAREYYQRKRAEGKTHSMAGRSLANVWARIIYRMWVSKTAYQSATFEAAKMTHAPRQRVA

SEQ ID NO: 382249 - protein, 313 aa, unidentified
MAKLVSEITLGIDVSKDELVICDWETEHISRLANDSIEIKTWLGTLYGPVRIAIEPTSHYHLCVVELAHSLGHDVYLINPRQLVHYRQAVNLRNTTDPADAWLLARYLAHEAASLRRFKPQCAKAQQLWALLKRRAGVVQARQQLQQSFKQIKLPSKALFSELQKVLNRIDGKLRALVRSLGWWDDYQRCLSMPGVGPLNAVALVAVFHRGAFAGSDAFIAFIGFDVRLRESGRYKGKAKITKRGESEIRRLLYCAAQPARSYHRFDIYYQQQLDKGLSKIAAKVALARKIARIAFALLSNQQSFKKQEIAYS

SEQ ID NO: 382250 - protein, 411 aa, unidentified
MNFIGVDLHKKSITICVMDEKRKILARKTVACTQTDEIVEFFRQFRPFKVVVEATASYVWFVELVEPLAEKIVLANPKKLRVIAESTKKTDNLDAQVLTEFLVLDMIPESYQATPRLRQHRALVRHRQYLQGRITSVRSKIRHILSNYNADRKDLFSSNCGLAYLKEVRLNDVDRFVMKQLWAEWQDHLAQRLAVSKKLKAFVAKAPQREAEAREILKTAPQVGSVTAEVILSELGDISRFRNAKTVCAYAGLVPVVRQSGERKSKDMKITKEGSGLLRWALVEAAWRLVGKSPKWAALFSRLRHRSGKKRAIVAVARKLLCVLYAMLRTSTPYKIVTTQTTAARTTGKESVRTSTPDQTTPTETTAPRTTGKKLVRTSTPEQTTPTETTAPRTTGKKLVRTSTPDQTITT

SEQ ID NO: 382251 - protein, 347 aa, unidentified
MEKNTTVIAVDLAKTVFQIAVSETPGEVLRCRRLNRAGFRAFVEKLPHAIVVMEACGSAHHWGRQLQALGHSVHLLPAHLVRPYVPRNKTDRADALGILEAWRNKDIHPVPVKTLDQQALGCIHRFRSGWIASRTAQVNTIRGLLREFGILIPMGVEKVVPQVRLLVEDADSQVPDAVRSSLAAACDEVELLDRRIKEAEKELESLCEHDPVASRLRSTPGIGLITGTALVARVGNVDRFRSSRHFASYLGITPREHSSGLKQRFGRISKRGDGYLRMLLIHGARSVICHARRAKSHDQLREWALKLQSRTRHNKAAVALANKIARIVWAVWKHGRVYTPAQATSIA

SEQ ID NO: 382252 - protein, 369 aa, unidentified
MKKHIPFVGLDVHKNSISVALADGDRNGDVRYYGTIGGTLADIDRLVKKLTSSSRELRFVYEAGPCGYDIFRSLTEKGYVCAVVSPSYIPKKPTDRIKTDRRDAMMLARLHRAGELTYVFVPRAEDEAMRDLTRAREDAVKAQRVARQHLGGMLLRLGFRYQGKTAWTPAHFGWLAAQKMPSPSQQVVFQEYINAIEETTKREERLTQHIEDLMPSWRMAPVVEALHALRGVSRIVAATMIAELGDLTRFENPGKLMAFLGLVPSEHSSGQKRRQGAITKTGNGHARQVLVEAGQAYSYQARITPPLLKRQEGVSQEVKDISWKCQVRLCARFRRLTAAGKNRNTVVTAIARELAAFMWAIAKQIPISA

SEQ ID NO: 382253 - protein, 432 aa, unidentified
MKAWTELTHFAALDWADDHHDLVVVDARGQVVLELTFAHNAEGWQQAQQALAAWPGLPVAIETSAGPAVDQLLQRGFVVYPVMPKAAARYRERKRPTGSKDDRHDAWSLADALRTDGHGWSALSPLDPLTGELRALCRDEITLIEQRTALVNQLQAALKEYYPAALEAFEDWTAPYTWAFVLAFPTPKALAAAGKRKWEKFLHSHKLWRPQTSSQRMEIFARAMAFSGAEAITAAKSLLAQSLARLLQTLEQQLANYRARIQALFDQHPDHDLFGSLPGAGAKLAPRLLAELAGADWSQLSQVQARAGTAPVTYQSGKIRRVKIRRACTHPLRATLHLWADLSRHYSTWAAAFYRAHRDKGQSHSCALRCLAHRWLEVIGAMSRTHTIYNAEQHLREIQKHGSYVLRLISSPDPKPLRIIFMKTPFREQRTS

SEQ ID NO: 382254 - protein, 332 aa, unidentified
MVAGTHGSLNKAGSTKMTQISKTAGIDTSKAKLDVAVHGDGECWQVENTPTGWRRLTAALISAQVKRVGIEASGGYERAVVGYLRAKGLAVVVLQPIQVKAYARLHLRRAKNDKLDAVLIAACAATIAQERIEPDERLAELAQHLTFVEQIEEDIARLKVRLEHVDEPRLRRMVVTDIARLKARRAAELQRIVTALRSHGDLARRLDLVMSIPGLGERTALAIVIRMPELGRVSREHAAALAGLAPFDDDSGKHKGERHIAGGRRRLRRSLFAAALPAAFHWNKALIDLYARLTKRGKAHNEALIACARKLLIYANTVVQRGTPWVDRPASA

SEQ ID NO: 382255 - protein, 336 aa, unidentified
MQITTLGVDLAKSVFQLHGIDESGKVVLRRKVRRGALLDVLSNLAPCLIGMEACASSHYWAREIAAMGHEVRLIPPAYVKPYVKRQKNDMADAAAICEAVTRPNMHFVAIKSAHQQAVLMLHRARDILVRQRTMLINALRAHLAELGIVAARGPHKLCFLLSELKNGDCELSGLAKSALLCLVRQVEGLESEIARLDCEIQAWHRESAVSQKLATIPGIGPLTATALAATIADPSQFRSARQFAAWLGLVPRQNSSGGKDRLGRITKMGDSYLRKLLVVGATAVLRHAIRAQTRTGQWLRHLLERKPSRLVSVALANKTARIVWAVMSKKEAYNAA

SEQ ID NO: 382256 - protein, 266 aa, unidentified
MNFIGVDLHKKSITVCVMDEKRKVLARKTFACTQTDEIVEFCRQFRPFKVVVEATASYVWFVELVEPLAEKVVLANPKKLRVIAESTKKTDRLDAQVLTEFLVLDMIPESYQPTPRQRQHRALVRHRQYLQGRITSVRSKIRHILSNYNADRKDLFSANCGPAYLKEVRLSDVDRFVIKQLWAEWQDHLAQRLAVSKKLKAFVAKAPQREAEAREILKTAPGVGRVTAEVVLSELGDISRFRNAKAVCAYAGLVPVVRQSGERKSK

SEQ ID NO: 382257 - protein, 421 aa, unidentified
MPNIEIGVDFMVKENFIYVGIDLHKETHTAVMIDCYNQKLGEITFPNRPADFPKLVTKVKKCNTDAKEVVYGLENAYGYGRPLAVWLIDKGYFVKDVNTAISHRQAKHRGAMYRKSDSDDAEAIALATLNMLDKLPDACPNDAYWSLGQLVHRRDNIMKQRTRLVNQLHEQLCIAYPSYKQFFNDISRPTALYFWEHYPSRKYLKGKSVEDLQAELVPVSHNKCSTRTCEKILDAIAGDKVKNNAYQDARDMVTLSIVSDLQHYDKQLAEVDKMLEQMYKMLGCTLTTIPGVNVITAVKILAEIGDIKRFSNANKLAQFAGIAPLHLSSSGKGKDVATKQGNRRLQATIYFLAIQMVQVSSKGTPRNPVVRAYYEKRKAEGKTSQQALICISRRLISIIYGMLKNGTEYRMPVVENAGENR

SEQ ID NO: 382258 - protein, 418 aa, unidentified
MKVVFPTCCGIDVHKSFLVATIIKTQQDSLQPSYQKKRFSTFNSDLNRFADWLHENDCLDVCMESTGKYWVPVFNILEKRGIRVVIANPKWVKAVKGNKDDTKDSKWIGDLFRIGLVKSSFIPDKDIRILRELTRYRYKLTSMRSSEKNRFQNAFTVCNVALDSVVSDMFGKSATAITDYLTSDEDFDAQHCVSLLQRSLRKKAEDVLQSIEGYEITAEQKTRIGIIRDHLHYIDALIARIDICINTMVDKYEGYIVLLRTIPGVDRSSAITILSEVGVDMTQFGSSKRLCCWAGLTPGNNESAGKKKSVRISRAGVYLKPALVQVAHAAVKDKLSPYYALKYERISKRRGKKRAIIAIARMILTAVFVMLSNLEEWNPVDLYRVDMPEHLKEKQLSKAVKQAIHFLKAQGLTVLDSA

SEQ ID NO: 382259 - protein, 431 aa, unidentified
MDSQQFEVIRPKCAGLDVHKKSIVAAICTSDPVTLTATYQTKVFNTTNSDIAALRDWLLAQDCHDVCMESTGKYWIPIFNILEPHMYVVLTHPKYVKAIKGKKTDKRDAKWIANLFRFDIVKASFIPPADIRALRELSRYRLKLSYMRTAEKNRYQNSMTISRIRIDCVLTDPFGLSATRIMDYLLSDEPFDEAKCRSLIDRRVKASKDEVMDSIHGYNILEEQKFKMLHAKSHMDFINNSIGEIECELFRRSRNYDTQIKRIATIVGITELSSLFILSEIGADMSVFESDRHLCSWAGLIPANNESANKKKSSRCSRAGQYLKPLLLQCALAAVKSKKEPYFAIKYQRLAKRRGKKKAIIAIARMMLTSIYHMLSNNEDFHPDDYEATIHPPKQKPVVLNLTNTFQFLREQGADESMLNQLKQQLSAVEK

SEQ ID NO: 382260 - protein, 326 aa, unidentified
MHTHFLGIDIAKSKFDCALVRPDGKVRNKVLSNNAQGFAQLLAWLDAHGVSSSELSQLHTCMEATGIYWEALAEFLCDQGIVVSVINPAQIKSYGASRLMRSKTDKIDANLIANFAKERCPAPWTAPAAHERVLRSLVLRLEGLQNMLTQESNRLQVANSAVQPQIQKHIDWLNAEIKALAKLIKDHINKHPDLRQKRDLLQSIPGIGERTLAIMLAYFGSTEQFDNARKAVAFVGLDPRQHESGSSVKGKPRMSKVGHAFVRKALYMPAMAALYKTDWGKRFRDRLVSAGKPPKLIIGAMMRKLIHVAVGVLKSNKPFNSALHCA

SEQ ID NO: 382261 - protein, 331 aa, unidentified
MHYSHYIGVDISKNTLDAAIYAAEMRRSDTKHLTNDKAGLKELVAWAKAAGAKPKDMLICAEHTGVYGNELQVFCEKKGIALCLESPLQIKRSIGLVRGKDDQIDAIRIAQYAYDHKDKLKLFHRPSGNIITLSNLLRERRLYVRQKATLTSQQGELGNYETAQSRNRRESLICKQDAVIKAVEKQMLEIIKGDESLKKTYDLISSVVGIGSITAIDTIVYTNNFQNFDTPRQYASFIGVAPFDHTSGTSVNGRTRVSQFCRKQQKVSITMVARSAIVNDPWMKNYYHRKMKEKGDQRNQHGVVLNAVKFKLVLRMFAVVKSGTPYKVMKY

SEQ ID NO: 382262 - protein, 411 aa, unidentified
MEAIIERVAGLDVHQGSVVACVILGAAGRRPIKEVRSFGTMRQDLAALREWLLEKGVTHVGMEGTGVYWQPVHAALEGDFTVIVGNASHMRNVPGRKTDVKDAEWIADLVRHGLVRASFVPPPAIRVLRDLVRHRKALVGTLAAERNRTLKLLESAGIKLAGVMSSVFGVSGMLMLRALAEGSAAPAAMADLAKRRLRSKIDRLALALDGSLAEHQRLLLRMHIRRLEEIGRDLAEVEAAIGAAMRPFAAQQALLVTIPGVDALTAAAIVAEIGVDMTVFGTAQRLAAWAGLCPANHESAGKQKRRGTRKGNPYLKATLVTAAVCGARTKGTYLRDKFHRLRARMGTKKAAVAVAHKILVAAFHMLQRAVAFADLGADYLDRVNKHCTAKRLVRRLDALGYAVMLRPKPAN

SEQ ID NO: 382263 - protein, 419 aa, unidentified
MSSLTQEFTAFIGIDWADTKHDICLQPANSQQREFDQLPHQIPAIEQWAYSLQKRFGGTIAVVLELSKGPIVYALQKYDFFVLFPVNPSTLAKYREAFKPSRAKDDPTDAELALDLLLCHGDRFKPIKPQSVEMRTLTYLVEQRRQLVGDKTRFVNRLCDTLKQYFPQTLDWFEHRDTVLFCDFMTRWPTLTQVKRARKASLETFFKTHNVRFDTVIATRISGIRAATPLTLDVAVLTAHQLQAMAQVNQLRTTLQAIDQFDDAIAKLAPTLPDYALFNALPGAGPHLAPRLLVAFGEQRERFTSAAQFQQYSGVAPVTERSGKKCWVHWRWQCPTFLRQTMVEWAAQTINKSFWAGAYYRQQRDKGCSHQTAVRALAFKWIRILYRCWQNRTPYDESKYLNALKRRNSPLLKQVTTTS

SEQ ID NO: 382264 - protein, 424 aa, unidentified
MAGVVIGIDPHKGSHTAVALDVHEKQLGRLRVRASSRQVDGLLEWASGWPRRRWAIEGARGLGQLLAQQLIASGERVLDVPPKLAARVRLLDSGQINKNDPNDARSVAVAALRAHELPELAAEDHAMVMRVWARRYHDLARLRTQVVCRLHAVVCELVPGGVRKYLRASQATDVLDRIVADSPVAQAKLELARELVADLERIDAQRREAKGRTARAVAATRTSINDVYGVGPIVAGTVLGYVRDIRRFPTRDRFASYNGTAPIEVSSGDRKIYRLSRRGNRQLNHAIHMAAISQIRHHDSEGRAYYEKKIAEGMTGKTALRALKRKISDALYARMIDDARRLAAKDPGGHTGNDSASSAAGSHPETPALRKSHSRATANSRTGTGQRPLRLRPAPDRRRTSRRAAGVQVEPRLGPHRGRRQDRP

SEQ ID NO: 382265 - protein, 341 aa, unidentified
MKIRSIGIDLGKTTFHLVALGERGKILLKKKLSRKQLLAFTANLPASLIGLEACSGSHFLARALREQGHDARLIPAQFVKPFVKSNKNDFLDAEAIAEAVDRENMRFVPIKTDDQLDLQALHRVRERLVSRRTSMINQVRAFLLERGITFRKGPAMLRRQMPEILENADEQLSTRIRGLLAMLWQEWKELERQIESLNSDIEGTCRDDAACQRLQQIPGVGPLIASAVVAAIGNGAAFRKGRDFSAWLGLIPKQYSTGGKAKLLGISKRGNPYLRKMFIHGARAAVLRLRREGTLIGKWMDGLEARAPRNVLIVAMANKLARITWAVLSSGESYRPATLAA

SEQ ID NO: 382266 - protein, 348 aa, unidentified
MTRVADRMVVGGVDTHKEIHVAAAVDGTGRILGTKEFPTTSAGHKAMLRWWARKGRLLRVGVEGTGAWGAGLARFLAAQGVDVVEVDRPNRQVRRRRGKSDPVDAEAAARAALSGEASGAPKARNGNVEMIRALRVARRSAVKARAQAMNQMHALVVTAPDSVRESLRGLTAVRLVERCVRFRSGAIDTPEAAMKFALLELARRHRSLTLEIKRLDTELDRLVAATAPGLVARFGVSTDTAGALLVAAGDNPGRLRSEASFAALCGSSPVQCSSGQLQRHRLNRGGDRAANQALWRVVMVRLAHDPRTRHYVEMKRKQGRSKKEAIRCLKRYVAREVFTELSRVPELT

SEQ ID NO: 382267 - protein, 407 aa, unidentified
MFYGGIDVAKHSHEICLVNDSGDIVLRMHLDNNHKGMNKLLQALERLGLKPDDVKFCLEATGHYWLPIYCYLTNQGFELHVINPIQSDALRNLYVRKTKTDQKDALLLADLLRLGRAPETRLPSETTLKLQSLSRLRFEFVRQVGGLKNRVLGILDRIFPEYPDCFSDVFIRTSRELLKSYPEPEELAEVDLSELSAFLKEHSRGRFGEERAKKIQSLAKGTFGITMALDAFTLQLRLLVEQIEFIEEQIRVIEDAINEVMEELRPSKDTPYRHVIETIPGIGPVLAAAIIGEIGDISRFPNPRALVAYAGLDATVRASGLFEGTRNRMSKRGSPVLRNSLWLAAVSARRFNPALRAYYEQKRSQGKHSNVATGAVARKLVHLIYSLWKDNRPYDPDYQWSPPGKNA

SEQ ID NO: 382268 - protein, 319 aa, unidentified
MAQNSLVVAGIDVAKDKVDVCIRALSLRRTFAATAEGLRELASWLRRQKVGKAVMEASGGYERDWAKALRNAKIEVRIVDPKRVRSFAQSAGRLAKNDTIDAEMIAWFAETFDEARGQAYDATREQLHQMVNARQALKDMQTKLESQGEHALPATVQRIHARIIRTITVELVKIEAAISALVQTTPRFTELAEIIESVPGIGRTTAAVLIAAMPELGQANNKIVAALLGVAPYDDDSGRRRGERHIKGGRRRTRNVFYMACLGAATRHNPVLKAFYDRLVAKGKEKKVALVACMRKLISILNTMIQRRQKWDASRYALS

SEQ ID NO: 382269 - protein, 343 aa, unidentified
MQSISTIGLDIAKSVFQVHGVDTAGQVVIRRQLRRRHVLAFFQKLPPCLVGIEACASSHHWSRELQALGHTVRLMPPAYVKPYVKRQKNDSTDAEAICEAVTRPNMRFVPTKTVEQQSCLMLHRARHLFIRQQTAVINSIRAYLAEFGIIAPVGRRGVEQLLEVVADPADHRLPEVARACLAALGSQLRALKAQILEFDRRIIAWHRSSATSKRLDAIPGVGPALATALVASIADPKAFRSGRDFSAWVGLVPKQNSSGGKDKLGSISKQGDRYLRSLFTAGALAVIRYAKIHGTDHRPWLTRLLARRPTKVAAIALANKLARMAWAMMARNERYKEPAALAA

SEQ ID NO: 382270 - protein, 411 aa, unidentified
MEQIFERVAGLDVHRDSVSACARVPGVRREVVTHKARYATTTAGLAELADWLGSEAVTVVGMEATGVYWKPCFYALEGRFKVWLCNAHHVKNVPGRKTDMSDAAWLADVVAHGMVRPSFVPPPPIRELRDLTRYRKRQTDTRAAEVQRLEKILQDAGIKLTSVASGVLSMSGRNMIEALIAGERDGAVLAEMAIGRMRNKLPALAEALTGHFGAHHAVTARQILDHIDFLDTRIAAVSEQVAARMAPFAGAVELLVEIPGISRISSEIIIAETGGDMGRFPSPAHLASWAGVAPGNHESAGKRRRVGTTNGNRWLRRTLIESARAAARTKTSYFGAQYRQIAHRRGPNKAAVAVAHSLTDVIWHVLSTGERFEDLGADYFDRRRDPEREARRLVHKLEALGHTVTLAATTA

SEQ ID NO: 382271 - protein, 370 aa, unidentified
MLNTTTFVGLDVHARSIKAVALDAMTGEVRSATFAYDAAAVAEWVRSLDPAAKCVYESGVTGFDLQKRLAALGVDCVVGAVSKMIKPSADRKRKNDRNDAEFLARMLSVGNVVEVWVPDDECEAARDLVRALDDAREDLKRCKQRLSKFLMRHGYAFSETTPTGRRKGNWTAAHWTWIRSISFPEKADGDALAYYVDAVRQAMEDKTRLEKLVEAEASKPRWKRRVDSVRCLKGIDVTSAADLVFEAGEFSRFKNARSFAAWLGLTPSEHSSGESVRQGGITKAGNKHLRRVLVESAWHYLGCSPHSKDLAKGQVPDPAARRHAAKGVRRLVERRRAMLERGVHKNKANVATARELACWCWAVGCMVEGA

SEQ ID NO: 382272 - protein, 311 aa, unidentified
MQITIGIDISKNTLDAYRLPDSQHIQVANDKAGHKTLLRWIGKHDLPLVVFEATGAYHRGLEAELAANDVSFAKVNPRQARRFAEATGRLAKTDRVDAAMLAKMGAVLELKGHKPKSETLHILRELISARRALMKDTVAAKTRLQTTTQTLLKSQINARIKQTEIQTRQVDAAIAREVAKDEALSHKLAILISIPGIAETTAFSMLIEMPELGTLEGKQAASLAGLAPVSRQSGKWQGKERIQGGRAFLRRAIYMPALVATRHNPDLKAKYDQLIRAGKPGKVALTAIMRKLIVTANALLRDGRKWSEIRP

SEQ ID NO: 382273 - protein, 417 aa, unidentified
MSTGDYDFFVGVDWGSERHQVCVLDPARQVHGERAVEHSGPGLAALADWLVAVAPGAPARIAVALEMPRGAIVDTLLARGLHVFSINPKQLDRFRDRHSVAGAKDDRRDAFVAADALRTDRWAFRRLEPDHPLILQLRECTRLDQEMQQELTRLANRLRDQLLRFYPALLRLAPAADDPWLWALLALAPTPVAGAHVPRARLTRLLQSHRIRRLSAEDVRAALRAPALPVTPGTVEAAARHVALLLPRLHLIHAQRAQGTRHIDTLLAAYLAEAPAAGPPRAHHDVAILQSLPGVGRLVVATLLAEAAPLLAARAYPALRAQAGIAPVTRQSGKHRSVLMRYGCNHRLQQAVYHWARVSAQCDAHSRAHYTALRQRGHSHPRAVRGVADRLLALLIAMLKSDTLYDAARPRKRELAA

SEQ ID NO: 382274 - protein, 421 aa, unidentified
MPHLPQEEFAAFVGIDWADAKHDVCLQVVGSDTREFGRLEHNPEAIDAWARALQKRFVGCPVAVCLELNKGPLVNALRQYAFLVLFPVNPATLAKYREAFTPSRAKDDPTDAELQLELLLKHRDKLQPLNPQSAAMRALEQLVEHRRRLVGDQVRITNRLTSTLKNYFPHALQWFDDKDTTLFCDFLTQWPTLKAAQLARRSTLERFFRAHHVRYANVIDTRIQAIKSATPLTTDEGVIAPNALLVQALVSPLRVILHAIADFDHAIAQRAQRHPDFPLFATLPGAGAVFAPRLLVAFGEQRERYGSADELQKYAGIAPVTERSGNKTWVHWRLQCPTFLRQTFVEWAAESIRHSFWARSYYQQQRDKGTSHQAAVRALAFKWIRILFRCWQNQTPYDESVYLNALKHRGSPLIHNLACGS

SEQ ID NO: 382275 - protein, 338 aa, unidentified
MNIVFLGIDLAKNVFQLCGLNQAGKPVFTKRTGRKELLQTLANIPACLIGIEASSGAFYWQREFEKLGHKVKVISPQYVKPFVRGQKNDGNDAQAIAVALMQPTMQFVPPKSPEQQDIQALQRARQRIVNHRTATVCQIRGLLLDRGIPIGSAVSRARRAIPLILEDAENGLSSRISRTIAELYDLFNDLERRIHFFDKEIETVFRQSEACQRIARVKGIGPKTATAVVAAIGKGTEFKNGRHFAAWLGLVPRQHSSGDRQVLMNMTKKGDKHLRTLFIHGARAVVRVATSNNDGLMNQWVNQLKERRGFNKTTVAVANKNARIIWSMLRNETEYQVV

SEQ ID NO: 382276 - protein, 352 aa, unidentified
MALPTLPHPQVLVTLGVDTHADSHVAVALDQAGRPLGTRTISTTPGGYAALLGWARRFGTVDRIGVEGTGSYGAGLARWLRAHGQLVIEVDRPDRAARRRQGKADHLDAHAAARAVQAGTATGQPKAGDGTVEMIRSLRLARRSAVKARTQAANQLKALLVTAPDGLRAQLRCLPPAELVTTAARLRAATKPATPTDAAKLALRSIARRWRQLTQEITALDTQLERLVAMAAPALVAVKGVGTETAAVLLVAAGDNPERLRSEAAFAHLCGVAPIPASSGKTTRHRLNRGGNREANWALYLIAVGRMAWHRPTRVYVQRRTKEGKTTAEIIRCLKRYIARELYGILVSRPAA

SEQ ID NO: 382277 - protein, 358 aa, unidentified
MLNSNKLDFTGQPIYIGLDVDVHKKSWSVSIHTALCEHKTFTQPPEVDILVNYLRRNFPGATYHAVYEAGYSGFWAHDQLTEKGVACTVANPADVPTKDKERRTKRDRIDCRKLARSLRAGEIEGIYVPCREKLEDRSLVRTRQSMVRKQTRCKNQIKSLLLFYGIGLPEEWAERRWSGPFVKWLESLPMKRASGEVALRIHLDELKHLRQILARLDREIRVLAQTGEYVVQVRLLRTIPGISTLTAMILLVELQEISRFRSLDELASYVGLIPDTHSSGETEHTGSITQRRHAQLRACLVEAAWVAVRKDPALLMAFQESCQRMRKTRAIVKIARKLLNRVRFVLKNQTPYRMGVVQ

SEQ ID NO: 382278 - protein, 354 aa, unidentified
MNKNHDQNEIILGVDTHLDVHVGAVVNTAGKLLGTLSISVNTQGYLDLLNWAYSFGDVKRAGVEGTGTYGAGLCSLLTDNSIAVFEVNRPDRVARRLRGKSDPIDAENAARSVLSGLSTAIPKHHSGACEAMRIASVARRSAVKARTQAINQVRAILVSAPQDIREKLLRVKASECVKACIKSRKFGDSPLMTTLHSTLKCLAKRWMMLSSELHELDKQLEQLTQKHAPKLRSRFGVGPNTAAILLSVAGDNPERLKSEAALASLCGVNPLPASSGKTIRHRLNRGGSRVANNALWTIAMVRMRSDARTRVYVERRTKEGLSTKEIQRCLKRYIVRELYPLILDDLQKTGEILT

SEQ ID NO: 382279 - protein, 416 aa, unidentified
MNDLTLSVGADVHLEDIVLRAVDQSDGHEVIEPLTVTNNLPGARSAADTIARAATELGYRHVHIGYEATGMLWIPFHRFLSTSPLLEPFNLKLVCFNPKLVADFKDALVLRGPKSDERDTFDVAARLRFGEWPESYVPGPFWQGLRRLTRYRFKLAQNLSREKMRFRSYAFLKWSDWKRARLFSDLFGATSAALLTEFTAAELREMTHDQLADLIAQRGRGHFHDPHAKARRVQRSLRSSYPIDPQADELLTATLATQLDHIRFIQHSQKRLDQHIAHAIDPVPNPIISVPGLGPVITGGLLAEIVDISRFPKDSHLAQHFGLTWERRSTGNFVSQNTRLTKVGNPYGRYYFIQGADKVRRYTMEYKAYYWRKYNEVSKYRHKRALVLTARKLVRLVHALLTKNEPYVRPQMPTNT

SEQ ID NO: 382280 - protein, 321 aa, unidentified
MGCYVGVDVSSEWLDLAMVDRSLGRFANDEEGIARLIDRLPLGAHVVLEPTSVYHQWLVRGLRSAGVPYSVINPAHTAAFAKVQGKRSKTDAVDARLLATYGETQRPQPSFATDEAQERLKMLRRHREWLDGELQGVRNRLQTAERSPWTPRAVPESLRRMIRELEEEIERVDAELRAMVEAEPRWREAVALLMTIPSVGWVTSVLLISELPPVDRCESGKAWAAFIGVCPALHESGKRATSRLSRSGSPLVRSRLYMPSIVAMSHNPPVRALNERLREKGKAGKVRIMAAMNKLVRLCFGVLRSGRPFEPARSQIALGLD

SEQ ID NO: 382281 - protein, 331 aa, unidentified
MRYFLGCDVSKLKVDVSLVDEHGVEQWIDKVPNNMVAIASLLLTITGHYEGDYLQAVVEATGEYHYPLTEAAIALGIGCRVYNPILTKQGIKQSVRGKKTDRTDALIIARIGLRGEGRLYSPEPYRVTKYYSRGQQKLGELATTLKRYENHLTGALEDELSIAAKEMLAGIQAQFKAARAQFISDTADSAPIGIMQRLRTIPGVGPFIAANLIGEIQTIERFTSAKALIAYAGFDPKIRQSGHTLNSTGRLTKRGSGHLRRSLFIAASVARQHDPYFRALYDKKRAEGKPYTVANIVVARKLLTIVRSVWLNEQDYNLDYWTKDINQKTLT

SEQ ID NO: 382282 - protein, 400 aa, unidentified
MISVGIDVSKGKSTVCILKPYGEIVSKPFNITHTHKDLSELSSMLFRLNDEVKIVMEATGIYHLPVLTYLQEKGFFVSVINPYLMKSYRNESLRKAKTDKIDSRIIANYGIDHWFKMKEFQTSGEIYEELKLLGQQYRHYMKLHLLSLAELTHLLDLTMPGIKNLLASWNETNRKDKRSNFVERFWHYDVITSMPEQEFTEEYILWAKEKKYVPSQEKAKVIYTLAQESIPTLPSETSSVKMLVTEAVRVLKEVDATLGLILSRMQEIAKTLPEYSVVREMGGVGNTLAPKLIAEIGDVRRFRNGKALVAFAGIDPPPYESGQFVGCNRKISKRGSASLRKVGYETMRSLKMRSRPEDPVYRYVVKKESEGKSKKSAKIAGLNKFLRIYYARVTELYKNI

SEQ ID NO: 382283 - protein, 334 aa, unidentified
MWHVGIDLHRETVVMAAVNDAGEVTKPVTVRCENTAAIVEVAKSLGTFRAVIEASATYRWLYDLLRPHGTVLLAHPFRLRAMVQRRAKTDKLDAQLLANLLRIGQIPLAYVPPEPYHQLREITRRRARLGRELAEAKIQLRALLGRQNRQAPFRTPFGVRGLAWFRGQDFGWIENLCRDELLARLTHFGRQAAILDQHIERLADAFPQATALTEIHGIGLYSALLIVAEIGEPERFRSAKQVGAYAGLTPRVHQSGGHCYRGSITRQGSAWLRWILVEAAMKTIRKDAALKNFYARVRKRSSAKIARVAVARKLAEICWKRLHRWECEHTKEAA

SEQ ID NO: 382284 - protein, 355 aa, unidentified
MFRTVRGYDRLRSVSNTRKKMKGSRLMIYTGVDIAKSKFDVCFDIHQKQQAKQKKKFAIFPNTEKGIEDFCVQLPEDAFVVFESTGRYSKLFYKILCGKGIPCCCVNPYRLLQFARAMGRLAKTDKVDAETAALYGDKVRPERTYFMSEKDEELRELVRTRDVLLEDIRCYKNRLEIPCVSEDVNKTYADMIDALEQGLKTINQKINEFMVRNSEHAAKRDKLVTMKGIAAVTATSLLAHCPELGTLSRQEVGALSGTSPNTKQSGTTYIKEHIYGGRPELRRALYMSAQIARRYDPEMYALYERYINKGKPPKVAITAVMRKLLIRANSILKRRVDYEVRGTLPTKEKKPKKAA

SEQ ID NO: 382285 - protein, 329 aa, unidentified
MAKVAWVGVDLAKTSFVAAQRQAGECVTQTFAMDAAGLASFGSWLPQQRGWRVCVVFEPTGPYGRPLEAWLERRSPRLGYVLANPRRVRHFARAAACASKTDAIDAQRLLEFAEAFQPAAHQTLSPTTRKLRALWRHQQELRKLLDGLRDRQQKAQADPQIAADLVRGLGELADQMAAELAKVHAQALAVVRETRQLRGRFELLTSIPGVGPRTALALLAEYGEPLAHASPRQLVRYAGLDPVLWQSGSSIRRKTRISKQGSGRLRKALYMAALVGVRRNPILRGFYERRLRLGMSKKPALIAAMRKLLHICYGVLKNDQPFRSLAATP

SEQ ID NO: 382286 - protein, 331 aa, unidentified
MKKIIIGIDVSKLTLDVAHFTSEGCVKSNHVVIDNNVTGYDDMLTWFKEKKFKLKEVLICMEHTGIYTDQLTKFLEKKKIPYTLQSPLHLSKSLGIVRGKDDAIDAFRLSEYADEKKGKIKVSKRAPENQIRLKQLASERKQAVYALAKVRQIKTEIAVHQKASSRNRKEKQIVLLKKIISDIENEIQSVIESDNELLKNYKLMLSINGIGPVNAYSTIIFTRNFTLFPDARSYACYVAVAPFPHQSGSSIHKKTSVSKIGNHYLKAILGQAARSAIIHDPQIRKYFNRKFNGKKGPDSNYGQVLNAIKFKLICRMFAVIKRQTPYISLDF

SEQ ID NO: 382287 - protein, 340 aa, unidentified
MEWTVAVGVDTHKDAHVCVALDRLGRQLERASFPASEAGYGACLAWALALGEPAFAVEGCGSFGAGLARVLTGAGLPVWEAERPRRRERRRGKSDTLDALRAARRLLSDGEGLSELRSLPGREALRVLLVERRSAVSARTQALNQLHGLALTAPTRLRERLETLAGERLAEAALRLRPAERADVDERVLVEVARRLGRRAQALTRELAALDARIAELVRSLAGKLLAEPGVGPVCAAQLVVSSGDPARLRSEAAFAALAGTSPVEASSGRQKRHRLNRGGDRRLNEALHVIALNRIRHHPETAAYHARLLERGKTRREARRCVKRVLARYFYRQLCALLA

SEQ ID NO: 382288 - protein, 359 aa, unidentified
MQTQSNKIDFKGQNIFVGFDVHLKDWKVTIMTEKLTHKTFTQPPKPEVLYHYLTKTFPGGTYHSAYEAGFSGYWIHNKLIEYGVHSIVVNPADIPTTGKETIMKDDTRDSIKIARSLRNGDLNPIYVPSLTTLEDRGLVRTRATLVKDLTRYKNRIKSFLYFHGIEFPETFSKPGTHWSNRFNKWLEDMAMTEPSGKASLNVLLAQSSHLRTYVLQTTKQIQQLAKTDRYKTRHELLRSIPGIGLLTAMAILTEIETIERFGTFDQFCGFIGLVPSTHSSGNHETIGNITPRGHSVLRTAIVESAWIAARLDPALNKSYHDYCRKMEPNKAIIRIARKLASRIRFVLKNNQPYVCSIVK

SEQ ID NO: 382289 - protein, 426 aa, unidentified
MKKADLLSTLFVGIDVSSRENVVCAIDFEAQKLLRFSVQNNHPGAVEMATKLHEFLSGNRDINRLMIALESTSFYGIHIANYLSSCELLMPFNTHVYCLNPKMIANYKKSYIDLGKNDAIDAFVIADFARVGRITTAPWRGSQFLALQRLTRHRLHIAGSLTREKTYMLSNIFLKFSEFSMLDEDKQPFSNNYGATASSVLTDFLSTEDIANMPIEALIDHICTKGKNRFVKPSHTASLLQQAARNSYRLDKCLYEPLTISIASSFNLISAYVSEMKAINKAIEKTLKGLDPNAYQSLLSIPGIGPVYAAGIIAEIGSIDAFNSHNALAKYAGLVWRENQSGNFRADDTILSKAGNSYLRYYLIEAASHVKNHVPEYAVFYHKKYDEVKTHQHKRALALTARKFVRLIFGLLANHQLYSQSRVSQI

SEQ ID NO: 382290 - protein, 311 aa, unidentified
MKTQPAFVGIDISKDRLDAFIRPQGISFSQPYTDHGISLLIERLVKLHPEVVLLEATGGYETQLVAALAHVRLPVVLINPRQVRDFAKATGTLAKTDRIDAQVLAHFAEAIHPEPRLLADQDQKELGALMSRHCQLIEMIVMEKNRTHRTTKIVKGRIEAHLSWLHTELESVDRELDDFIGKNPSLQRKVEIVTSVPGVGPALSKALISYLPELGAISRKEIAALVGVAPFNSDSGKHIGKRIVWGGRKRIRSILYMGALVASRFNPAIHIFYQRLLAAGKEKKVALTACMRKLLTILNAMVRSDTLWCEN

SEQ ID NO: 382291 - protein, 341 aa, unidentified
MNHYVGIDVSLEASSLCVVDANGKIVREGKVASEPDALIAWLRGLKLELTRIGLEAGPLSQWLYAAMRQAGLAVELLETRHVHTALETMPVKSDRNDARGIAQLMRLGWFRPVHCKSMAAQETRALLTARKLLQTKLHDLELSLRGILRGFGLKVGPTTPARLEERIRELVAGHPSLEVIADGLLAARVALRCGFDRFEKQVRDAARCDTRARLLTSIPGVGTIVSLSFAAAMDDPARFKSSKQVGAYFGLTPTKYQSGETDIDGRISKIGDASVRAALYEGAHIILTKPLKGCTALKSWAMKIGRRSGMKKAKVALARKLAVIMHRMPADGTSSRNAAAV

SEQ ID NO: 382292 - protein, 400 aa, unidentified
MISVGIDVSKGKSTVCLLKPYGEIVCKPFEVQHTEKDLEELANLLQKLDGEIKIVMEATGIYHLPILTFLLEKGFFVSVINPLMMKRFSKDNSLRGAKNDRLDSVMIASYGIEKWYKLKKYEVNDRIYTELRLLGRQYYRFMQTHVKHVQELTHLLDYTAPGLKAMFNSWNEHSNRDKLSDFVERFWHFDLITSLSREEFVEQYLLWAKEKKYHQSRSKAEKVYDLASNGIPTLSSHTPSTQMMIQGAINVLRIVNNSLYYILSRMKELAKSLPEYATVRSMGGVGDSLAPRLIAEIGNVKRLRNGHALVALAGIDPPPYESGQFVGTHRRISKRGSPILRKIGFEVMRVLKSHKEPEDNAVYNYILKKEAEGKNKKLSKIAGLNKFLRIYYVRVMEVYQ

SEQ ID NO: 382293 - protein, 339 aa, unidentified
MQDQDVSDVVTTKNRTAMKYIGIDVSKATFVVAYSSDKGGDIRTFDNTTAGIKQFIGTLPKDSSIHCVMEATGNYSALLLYMLNVVGITVSMENPLKIKNFARAMLSTVKTDKIDARLIALYGEKMNPQPFKVQGEAILRLRQKRTVIRQLTKQITAMSNLRGSLAYLPVPDKGAAHTVNETIKFLEKKRDRLQSELTDLVEVEFSRQLALLTTIKGIGITLATALIITTGGFTYFQNPKQVSRYLGICPTYELSGTSVNIRGHINRNGDAYTRGLLYVAAWPASRFNAQCKETYTRLRQNGKSGKLAMIAVANKLVRQAFAVVAHNKEYIDGFVSNRP

SEQ ID NO: 382294 - protein, 302 aa, unidentified
MGEVSTIGLDIAKSVFQIHGVDVEGAVVIRKRVNRAKVFEFFAALPSCLVGIEACPTAHHWSRRLQALGHTVRLMPPSYVKGYLKRSKNDANDAAAICEAVTRPSMRFVPTKSEQQQSILMLHRSRQLLVRQRTMLSNAIRGHMAELGIISAKGRNGTTELLDILANERDGRIPTAARFSLDVLARQYAVLMTEISVIEKRIHAWHRSCEENRRLQEIPGVGPIVATALIAEVGDWKAVSSGRGLAAWIGLCRGNIRLAARSDLAESQSRAIDICDGCSSPALWLSFAMRAGTAQRGCGWFA

SEQ ID NO: 382295 - protein, 369 aa, unidentified
MIVIGADTHKRSHTVAAVDAATGRLLGEQTTAARQRSFDALLIWARGHGGERVWAIEDCRHVSGALERFLLARGEAVVRVAPKLTAGARSSARELGKSDVIDAVAIARAALREGLDSLPVARLAGPELEVRLLVDHRERLIGQRTALINDLRWQLHDLWPETEIPPRALIRAHWQDRVAGRLARAEQSVRVRIARDELRRIRELTRAINDLERELATLTSALAPRLLAERGCGALTAAKLIGEIAGADRFATDAKLARTAGSAPIPASSGQTHRHRLDRGGNRQLNSALHRLAITKGRLDPETIAYLARKQAEGKTRREAIRCLKRHLARRVWHLLQPDPATTVPTHATRTRGRVTIHCNTPTGSLDLT

SEQ ID NO: 382296 - protein, 372 aa, unidentified
MNNTTVYVGMDVHKESFTLSAYTIEAEKASYTRRTPSNYKEVLKYLEFLKTIYGNEANFICGYEAGCLGYSLYHQLTDNNVSCVILAPTTMLEQRSGKRIKTDKRDAELISKCLAQHNYSSVNIPTATDEETKEFLRMRDDHKLALKKVKQQILAFCLRHNYRYEGKTNWTTAHLNWLESLNPEALYKEILDEYLLTYKTLSDKLERLDKRIEELAAKDEYKESVKKLCCFIGVQTHTALSVLVEIGDFNRFASANQFAAYLGLVPGEDSSGDDRTRLGITKAGNRHVRQLLTESAQCYGRGQVGHKSKALKACQRGNTPQIIAYADKANERLRRKFYKMVLSSNKKHNVAKIAVARELACFMWGMMTDNIA

SEQ ID NO: 382297 - protein, 347 aa, unidentified
MKVTRIGIDLAKSVFQVFGVDERERKVVSRQIKRGQLLAFFQSLEACLIGMEACSSAHFWAHQLQRMGHTVRLIAPQFVKPYVKGNKNDANDAEAICEALGRPNMRFVPIKTVEQLNMQALHRVRSLSVRQRTAKVNEIRGLLSEYGIVVSRGVSKLRGQLPLILEDADNGLTGEFRWLLRALQEDLTHLDERIKLMDQRMALLASENAQAKKLLELRGVGPTTATALLAALGDGRQFRRGRCASAWVGIVPGQHSSGGKERLLGISKRGDPYLRTLLIHGARSVVNSCKDKTDPLSVWVQELCRRRNKNIAAVALANKTMRLAWVILSQDTRYDPNHKRTKAAAAG

SEQ ID NO: 382298 - protein, 343 aa, unidentified
MTRKLYIGADVSAATIDVAGQCDTQRQVVGQFANSSEGFAEMMTQLASVLAQPATEIYLILEPTGGYELALVAFGHSQGWQVCLPNPKQVRDWAKGDGRRAKTDGQDAQTLAAFGAAKQPKPQADLAPEVQELADLLRRQEDLEQLLRSERNRLGSYQTHPQPSQRVLDSLQRTISAVQAELDDLNQQIEAVVTSQPTLKADRQRLRTVPGIGAKNVLPILVHLYRWQARAGQSADAKGLVAFTGVDPQPFQSGRSVRKRSTISRQGDHRIRQLLYMGALGGLRRKGHNPLRNFYSGLVRRGKAKVLALVAASRKILVWAWAVFTQRVDFDPTRFPVIEPTPA

SEQ ID NO: 382299 - protein, 397 aa, unidentified
MFYLGIDIAKHKHYASIIDSTGKPITKPFPFHNHKEGGQALLTWLYRYISSPTELSIGMEATGHYWIAVYSFLLDHGFSVIVLNPLQTNAWRKGTEIRKRKTDAIDATMIADVIRFGRFLETPLVDEKMFALKQLSRFRNSLVRNISDLKRKALVVLDQTFPEYQSIFSNVFGKTSSQLLIEYTSPSDYERLSIDDLTLIIEQASRCRLEKKTANQLMELASNSFGVTFCKDAFSFQLKMLMEQIRFIETQLRECENQMSQLLSDLDTPITTIPGIGPILGATILSEIGDIGRFDKPSKLVAYAGIDATISQSGQYESTGMSMSKRGSSHLRRALFQAAITAYKHDPVLKAFYEKKRNQGKHYYVCIGAVARKLCYIVYAILKSNKPYKIPPFPVQR

SEQ ID NO: 382300 - protein, 311 aa, unidentified
MNNTIGIDISKDTLDAHRLADGQHKQFLNGKTGHAQLVKWIGKQSDPLIIFEATGAYHRQLERVLGTHIIPFVKVNPKQARRFAQACGKLAKTDRVDCEMLAKMGAALQLVPKPFTTENLYDLKELLSARRALIKDRTAAKARKATVINALIKQQLEKRLRQIKNDIAKIDALMLDVAREDQYMSERLDILFSIPGIGVITALMILVDMPEIGALNNKQVASLAGLAPISQSSGKWMGKARIQGGRPNLRNAIFMPALVAIRHNADLKTKYDQLVTAGKEKKVAITAVMRKLLVLANALLRDNRKWAEKAA

SEQ ID NO: 382301 - protein, 364 aa, unidentified
MNKCHLNTELSSLEGTRSEFNRSKAVIKLGIDVHQDYYVVVKQESGTNPKPAQRFGKEAFSLWAAKLKSQGGEIHAVYEACGFGFSLQRQLTALGIRCYVVCPQKLDERNKRVKTDGLDAKALCLKLDRFVQGNREALALVRVPTEEEEQKRAIHRQREQLVKARKRLEAQGRSLMVNHGMEPLSHWWKARTFAQLQVSEWMKELLSNTQPILLALQEKIRALTAQLQATANPKQPRGLGLLSSVVIDREIGSWTRFKNRRQVGSYTGLCPGEYSSGNTRVQSCVTKHGNPRLRAALVETAWRLIRFQPTYQPVLKWRKILAKGALATGAARKKAIVAVARQLAVDLWRIHTGRVSAAKLGLII

SEQ ID NO: 382302 - protein, 416 aa, unidentified
MNAVGIDVSSRKSTVAVLRPLGEVVCLPFDVSHDADGLASLAEKLKALDGETRVVMEHTGRYYEAVAKALHEAGVFVCAVNPLLIKEYGANSLRRVKTDKADAIKIARYALDNWADLRDFTPMDAIRYDLKTLNRQFQLASKQRTGSANNLIALLEQSFPGIRKCFDSPVRSDGTQKWVDFAHSFWHVDCVRKQPFPAFCERYRKWCKLHAYFFKLSNAEEVYALAKRAVVLTPKSKVVKVLVQEAANQLISISRSVEVYRAEMDRLAAMLPEYPVVMAMYGVGKSYGPQLMAEIGDVRRFERKQALVAFAGIDPMPNQSGDKNVRSNKSSKRGSPYLRKTLFNVIRTYLQCAPQDEPVFQFLNRKRAEGKPFYVYMLAAANKFLRRYYAKLRDYFASLDTLQPVAPIPTILKATL

SEQ ID NO: 382303 - protein, 452 aa, unidentified
MAKKSKRRCDTLPVLHPDAAGIDVGASELYVAVSADRDPQPVRSFLTFTRDLHALADWLVQCGIRSVAMESTSVYWIPVYQILEARGLEVYLVNAQHVKNVPGRKTDVSDCQWLQYLHSVGLLRASFRPPGFICAMRSLWRHRASLIQMAAEHVLHMQKALDQMNLQIHRVLNDITGVSGLRILDAILAGERGPLTLARLCHGGVKSIEDVIAKSLEGDYRPEHLFALRQSLAAFRYYQQLVLEADREIQLQLAEMKTAATAQPTTPPPTKATAHYARHYEPRTFDLRGELYRVFGVDLTNVPGISALTAQTILREIGTDVSRFRNASAFASWLGLCPEKKISGGKVLFTKSRRVRSRVATALRMSAQSLHHAKDYLGEFFRRITRKLGRPQAITATAHKLARIVFHLLSTKEAYTESVFHKSEEETIRRAQYRLRRQAAQLGFLVIPAENG

SEQ ID NO: 382304 - protein, 345 aa, unidentified
MKHFAGLDVSLDETTVCVVDEAGAMVREARVPSEPEALVAFFRGLGLAMERIGLEACSLAAWLHEGLTAAGLPAVCLETRRAKAAMGAMPNKTDRNDARGIAQIVRTGWYRAVHVKSPACRSWRALLAARRLVLNKMRDVENGLRALLREAGLKLGRPGRKEFAARVRELVGADAVLSASAEPLLAIVAAMADQLAQLTRRVLAVVRDEPVCRRLMGVPGVGPLTALAFRATVDRPDRFRRSRDVGAHLGLTPKRYQSGETDVQGGISRCGDELARTALYEAAHSLLVRSRKWSALRAWGMQVARRRGMARARVAVARKLACILHRMWSDGSEFRWGEEGAMPAA

SEQ ID NO: 382305 - protein, 344 aa, unidentified
MANLNQFCDFMNLIGIDIAKSVFQIYSCDTQTGEITNVQVKRDKVLESFANCGKCLIGMEACGSSKYWARKLQALGHTVRLMDPKLVKPFVRHNKSDKADAEGIYHALVSGVRSVAVKTETERDIQTLLTMRALLVKQRTARINHVRGLLAEYGHVMPKSVDQFDKKVDECINSLEGDAVQLVIDMLRDTIKSIRDEHDRIKTLQREISRLASQTKNAKHFLTVPGIGETIMAYMCVLLADPTQFSSGRQFAAYLGLVPMHTGSGGKTVTTKIPGRCDKALRALLVQGAHAVARSKYRTDWVKNILAKKPKKVAMVAIANRMARQCWAVASKGQDWRRMPVTAA

SEQ ID NO: 382306 - protein, 361 aa, unidentified
MQSTTIIAFDQHAATTVAAVLLPNHRTPVLHTLTSDTATILRFVERVQRQGPVVCCYEAGPCGFELQRGLSAHEIPCDVIAPALIPRRAGDRIKTDRRDAGQLAVLYRAGALTAIHVPTEQEEAARDLLRCREDIKTDLLRARHRLSKFLLRHGRRFTATKTAWGTRHQTWLRGQTWPIPALDQTHAAYRRAVDEAVERLRAVELDLRTLLDLEPLRPRVQRLRCFRGIDDLTALTIAAELGDARRFGSAPRAMAFVGLVPSEHSSGTKRARGAITKTGNAHLRRVLVEAAWHARHRPFVGRVLRRRQQGAPATVIAQAWTAQQRLYRRYQRLAARGKPSQHIITAVARELTGFVWAALIQ

SEQ ID NO: 382307 - protein, 345 aa, unidentified
MNKISVIGLDLAKNVFQVHGVDGEGEVVVRKQLKRSQVRRFFTNVEPCLVGMEACGGAHYWSRELARLGHTVRMMAPVFVKPYLKTNKNDRKDAEAICEAVQRPSMRFVQPKTPEQQCVLHLHRARRLLVRQRVALGNHLRGILSEYGIVLPQGVKALSWRLPGLLEDAENDLPMLTRDLLAECKEEYDQLMERIERVEGRIKAWHATNRVSQRLASIPGIGVLTASALVATVGEGQDFSNGRQLAAYLGLVPRQASSGGKVRLLGISKRGDGYLRGLLIQGARNVIYHIRRRLRAGQPGGNAWVEQLLQRSHPNAVAVALANKMARIAWVLLVRNQTWCPASPV

SEQ ID NO: 382308 - protein, 330 aa, unidentified
MNYSHFVGLDVGKKSFDACLVSSDKELSHHTFPNTPGGIEELLHRVKQRGVEVETTLFCAENMGSYVIDLCLSSYQFHFPLALECPLTIKRSIGLQRGKNDRIDARRIARYACLHYRKLRLYELPDKDLVRLRNWMVIRDNLVKQKVSSLKLLELTRETSGLADLVTAMTFLEKQLSLVKEKISYVEQEMEKIISSNIALLTNYQLLTSIKGIGPINAIVLLCVTGNFHRFSDPRKFACYCGVAPFEHSSGTSIRGKTKTSNLANREVKVYLTRAAITAISWDPQIKAYYKRKTGEGKHKASVINAVRAKIIARCFAVIKRKTPFVTLRA

SEQ ID NO: 382309 - protein, 475 aa, unidentified
MARARKQVRRGAQAEPGKQVSQAVDLVITHRHAAGIDIHAAEHFVAVAPEDVPAGFVNPDRKLPPGVRKFATNTADLEAIADWLKGCGVTTVAMESTGVYWIALYDLLAGRGFEVLLVDPRQTKHAPGRPKTDVVDCQWIRRLHSYGLLTGSFRPGDEIVRWRGFQRQRETLIRYAAQHVQHMQKMLEEMNVKLTEVVSDIVGVTGMKIIKSIVRGERDPLQLAKNRHESCKRTEAEIAAALYGNWREELLFGLQQALELYQFYQKQLRDCEAQIAACLRSMKDKSDARPLPPSLRKRKPEKNEIRFGARALLFRMSGVDLTQIEGISETTALVILSELGIDLSAFPHEKNFVSWLGLCPQHRGSGGKIFKRGTRRGANRVARALRMAAQGCHRAQNALGAFYRRIQGRSGGAKAVVATARKIAERVYRMLKFGQDYVRQSQQAYEQAYQLRLMKSLAKRAAAMGYKLVPETATT

SEQ ID NO: 382310 - protein, 338 aa, unidentified
MHITTIGLDLAKNVFQVHGVTEDGTIAFNRPLRRNRIVPFFENLPPCLVGMEACASSHYWARELTKLGHDVRLMAPSYVKPYVKRGKSDAADAEAICEAVTRPTMRTVPIKSEDQQALLSQHRARELLIRQRTQLSNSIRGLIGEFGHVLRKGLKYVRDFVEDMKVEKGPNLPDIARNVITSLCEQLASLDHRIDLLDREIFAASGRDERAKLLQTIPGVGPVTAAAIIATVGDAGAFRSGRDFAAWIGLTPMNKSSGGKERLGRITRMGDQYLRKLLVIGMTSRVRSARSHPDRVDPWLAGLLDRKPVRLATVAMANKTARIIWAVLTRGTPYQRAA

SEQ ID NO: 382311 - protein, 339 aa, unidentified
MRLYAGCDLHSSNTYLGIVDEDGKRVFKKKLSNDREVILSTLAPYKDSMAGIVVESTYNWYWLVDILMEEGYKVHLANTTKIQKYSGLKYADDQHDAFWLAEMLRLGILPEGYIYPKEDRPIRDLLRKRSHFVRLRTSLILSLQNILSRNNGISLKANAVKALTIDHVTPYLAGNEDLALAGKVSKESIDFFTLQIKSLESVVEERIELRDPYNKLLTEPGIGKILGLTIMLEAGPINRFADVGNFVSYCRKVSTAWISNEKQKGKGNRKCGNKYLAWAFSEAAELARRFDKDARAYYNRKAQKTNRMVAHNALAHKLARAAYYIMRDGVSFVPEKCFG

SEQ ID NO: 382312 - protein, 345 aa, unidentified
MPIVGGLDIHRKQITFDYLDTVTGEVKRGQIAPADREHVRAWLARFAGRDDVAFAVEGCAGWRYVSEELAAAGVAAHLGEPADTATLRGRKRHAKTDKTDARHLRTLLAEGRLPECWIPPEHILEYRALLETYHDLRRAHTAWVQRIHAVFFHQGAPPLSDDALRTEPGLAKLCAAAAAHLSPAGQLQVATALDMLAATEARLGPLRHQLRDAARHLTGAKVLAARLYGVGPLTSLALTCWLGGADRFSSSRKAVRFTGLDVTVHSSDRKGPPGRLSRQGPPVLRWAVYEAGKTHARTSAPDHGYYASVKDRKNSKRACLSEARKIVRQACHILTELGDDALTAA

SEQ ID NO: 382313 - protein, 385 aa, unidentified
MAPPRMPEAVIGLDVGKLSHWACVATRDGEILLSAPVANREGDLDSLFGRFPDALVVVDQSRNIGALALARAKAAGMSAAYLPGLAAHGAARLFAGDAKTDERDAMVIAKTALGIPDALLPVGDPGPTVAAARALAAQRNFLTCENTRSKNRLRSILLESCPAFEALVDLSDGPQLRLMASLGGAWSVADAGPRRAAALTRGAARGKIEVLVRSTASSTRPDAAAIAAEDRAVRLLARRISENSAEIDVITAEISALLEGDDTYRCLLTVPGIGPKTASELAISIDIEDFPSHDRLASYCGLAPRNRQSGTSISSVTASRQGNKRLKNLLIFSCNCLTRTEGRWGDYYARCRERGMPHGKALKALARKRLKVIYAIMRDRVPYAA

SEQ ID NO: 382314 - protein, 415 aa, unidentified
MDILYPRCAGLDVHKDTVVAGVRLAGDGPVRTEVRTFSTTTPGLLALSAWLAEHGCTHVAMEATGVYWKPVWHVLSDGEFTLILANAAHVKNVPGRKTDVADALWLADLLAHGLIRPSFVPEAPTQELRALLRTRKQLVREQASHVQRLQKTLEDANLKLSSVLTQIMGKSGRAILEALVNGEADPDKLLTLVQRGVKAPPETLRAALQGRVTVRHRFLLRLHLRQFDALDAAIAEIDAEVDRDLDPFRQAVRLLRTIPGVSDLTAQVIVSEIGIDMSRFPTAGHLISWAGLCPRNDESAGKRRSTRLRKGAPWLKTTLVQCAWAGARKKASYLQAQFQRLRHRRGPKKAICAVAASILTAAYHMLRDGTFYQDLGADHFRRAAPEVQANRLARQIAKLGFTCTILPAAEMEVSV

SEQ ID NO: 382315 - protein, 360 aa, unidentified
MLYLGIDVHRKQLTVSVRNEAGEVVLRRQVSTEWERVRAFFTELTERARPEGGYVAILEVCGFHEWVLKMLTEYGCHETVVVQPTGRTKKKTDRRDAQALSETLWVNRDRLAAGQPIRGLRRIQPPAPQDAENRQLTALRVRMKQVRTRTLNKIHHTLLKHNLHQECPTKGLATQRARQWLQKLALPELDRLEMDLLLEQWTLWDRQLEKIEAQLVKRHAQSPTAVLIASVPGAGAFGSLALASRMDNIERFARPGSLANYWGLVPSVRNSGETTDRLGSITKEGSRLARFVLAQMVLHVLRRDPTMKQWYQRIKRRRGSKIARVAVMRRLATILWHMVKHHEPYHVGGLPRRPLPAAVG

SEQ ID NO: 382316 - protein, 364 aa, unidentified
MRFIGIDLHSNCFTCCFLDADGKKSKIEYKIVELKRFCEELSLDDYAMVEASTNTFAFVEQIREYVREIFVANTHKMKLISMVNKKTDKVDAEKLAIYLKMQVTSEEQLIRPVFVPEKTIQNLRSLFTTYKNLRKQVGITKNRIHAILKQNLRPYTKEYIFGMANRKMMRTLDVDDSALFQINILMDQIENCEGTISKVEDKIKLVGAEYYREIDILTSMKGISVITAIAIMADVATIDRFPNQKKFCSYLRSAPGVDSSNDTIRMKGTNKFSRKLSISLLSQSLNHFRDSNAKLNRWYLKKTETQGHKVGKIRMGVCRKVFVEIYQMLKKGEYHYWTDEKNHRSKMDAYDRFLLKEGIEKILA

SEQ ID NO: 382317 - protein, 442 aa, unidentified
MADTVVHPSEPDFVAFVGIDWGDQKHCWKLMVAGAQTIEAGELKQTPEELSSWALALHHRFGGRPIAVALEQSRGALVYQLSQYPHLWLYPVNPAAAACYRQAFYPSGSKSDPGDSKLLLELVVHHRDRLRRSAPETAETRLLRMLVEQRRQLVNEKTRWNNRLKAALKTYFPQVLEWIDIDTVLGCDLLERWPTLQLLQRAHPGTLRKFFREHNCRSASRLKERVDAIYQATPAVEDTALLEGESAIAASCVAQIRALLASIAKLDLQIATLTSQHPEAPLFAQLPGAGAALQPRLIVAFGTQRDRYASASELQAYSGIAPVTESSGHSRWVHVRWVCPTFLRQTFHEFAACSVSHSEWARAFYDTKIAAGKSHHAAVRALAYKWIRILFRCWKDGRPYNEQFFLQVLAKRNSPLNVAPGTPTKIGWKTVGGFKKLFIEKS

SEQ ID NO: 382318 - protein, 343 aa, unidentified
MEQFIGLDVSQKTTHLCIVAGDGRTVWQGQCASTPEAIATTIKARADQVIRIGLESGPLSTWHWHALKALGLPVVCLDARHAQATLGLQINKTDRNDAHGLAQMVRMGWYRAVEVKSLASHNARALLGIRAQLVGMQTKVTNQLRGILKTFGLVLGKGGGRAFDQQVEAWAPQTGLLGDSVRALLAVLRNLREQLRNLNRAVRAFGQQQPVCLHLMSVPGVGRLTAMAFVTAIDNPTRFRRSRNVGAYLGLTPRRYQSGELDLGGRISRCGDPLLRGYLYEAANVLLTRVTLWSTLKAWGLRLARRVGMKKARVAVARKLAVLLHRMWVTGEAYRWSEPAAAA

SEQ ID NO: 382319 - protein, 398 aa, unidentified
MLVGWDWASETHDVTVLDEAGMVVDRWVLRHTERELEEALRRLARHGRPGELPVAIERTTGLVVARLLTAGHPVVPVHPNAFHAARSRWGASKAKSDPGDSYKLADYLRTDGHRLRRLRALDARTRELQALCRMRDDHVAARTAATNQLGALLEAHWPGAKAIFSRLGSEIALGFLEDYPTPEAAGRLGEARLAMFCRRHSYRGGRAPGELLERLRSAPVAPVGISPETLAELVRAQVRLVRATLSTIAELDQALGAALLGHPKAPLLAPLPRVGEVSLAQLVGEVGPILERSSHVEQASAEAGAVPVTKESGKAKSVQFRLATNRHARKALTASADNSRHASPWAAALYADARRRGKRHPHAVRILARAWMRVIWACWHNDTSYDPSQHGGERRLAA

SEQ ID NO: 382320 - protein, 420 aa, unidentified
MRWIGLDVHRDFCEVAIGEKGRIRSAGRVRTRVGSLEAMAQSLAADDVVAVEATSGSDRIVSVLERHGIRVVVANTRKLKAISEAKAKTDRLDARTLVRLLMAGLLDEVWTPDERTRTLRRLTHRRERIVRARTRAKNEAHGVLSRNLCDRPPVTDAFGKAGRQWLAELELPVDERLTLDGCLRQVDFLDGEVAALDREIAKAALAWPEIQRLMSVPGVNIHTAATFMASVGDIHRFSSPRKLVGYLGLDPRVRQSGNTAARHGRISKAGASEARHMLGEAAWKVTLTPGPLRAFFHRIRARRGPQVAATATSRKLVVLFWHLLAREQDYAFGRPAMTRNKIRGLELLAGAPQQKGRHGIAGGKSKKVFEAERELSRQAEAAYRRLINDWKAVRPAKDGAGATRGRASEKALEGQSRAAG

SEQ ID NO: 382321 - protein, 316 aa, unidentified
MNNKNQLQIHVGVDVGKSKLDIALHPLDLHFTVPNDETHIQKVIQVLKQHQPKSIVVEATGRYEHALVFACDKAELPIIVVNPIQVRRFAQVIGVLAKTDKIDASVIARFAATIKPEFKPIPDEQSRLIKDLLIRRTQLLEMATMEKNRLQILPKTLHASIAALLKTLDKQVETITKQLDVLVVQAKHWRSKSEILTSVPGVGKVLAYTLLSELPELGNLNRKEIAALVGVAPMNKESGSYQGKRRIRGGRHRVRTVMFMAMMSAIQCNPVFSRYYHHLKAAGKLPKVALIACMRKLVVILNTMVKNGEKWTEKEA

SEQ ID NO: 382322 - protein, 378 aa, unidentified
MCLITVLPSLRPGTEPRPVRRRREGINSLTDLREVVDVVIGVDTHVHTHSAAVLDTATGGVLGEITVEATPGGYAELVEFANNRATLRVWAIEGTGGHGAGLSRYLLELSEIVIELDRPKRAARRNGAKSDPLDAIRAAREAMARPRLGTPRSGGERQALSVLLAARRSAINASTEAQQQVFSLVVAAPEPIRARFRGQKLAAMLATAATLRVHSSWDVETTSTVVALRTLARRAHAMLKEANELQKAMLAIIRSWRPDLLEEFGVGPIVAATVLCAWSHPGRIHSEAAFAMLGGVAPIPANSGQVTTRYRLNRYGDRNLNNALHTVVQIRIQYQQSTRDYIARRTAEGKTGREIKRCLARYVARDLYRLLESRAEPA

SEQ ID NO: 382323 - protein, 337 aa, unidentified
MEQRYVGIDLHRRRSVIYTMDAEGQKLSCIRIANEPAALIASVAPAGDAAHVVVEATYGWYWAVDLLRDNGFDVHLAHPSGNDWGKRRVKNDERDARDLADLLRLGRLAEAWIAPPAVRELRELVRYRAKLVNLRSGLKTQVHAVMAKEGVLPNVLDMFGPGGARQLDALDLAEPYTLRIASLRDLVPVYDAEILMLERKIHQRLSGNKGYEAIQALNGVGRTIAAIFCAEIGDVHRFRSAEALCSWAGLAPRHRESDTKVVRGSITKMGSRLVRWAALEAVARYHGGTWLHEDFCRIAERRGKKKARVAVARKMLTLVYYGLRDGEIRCLRDGQAA

SEQ ID NO: 382324 - protein, 362 aa, unidentified
MRIIGCDLHARQQTLAMLDTATGEIVNTTLLHEGDGVREFYSRLPRPVRVGVEATGSMHWFLNLTGELGIECQVGHPAQIRAAEPRKQKHDRRDADLILKLMVENRFPAIWMPSPELRDLRALLLHRHQWVRMRTRIQNALQAIALANGLRRGSSLWSRDGQNAIASLPLAPHTACRRSALQAMYVKIGAEIEELNRQVAEQAGHRSGARLLMTHPGVGPVTALATDVFLGDPKRFVDSKALASYVGIIPREYSSGERQRLGGLTKQGSPLLRFLWGEAGAHAARRDPELQRFYRRKLVQKGLGKASVAVARKLGIRLWIMLRDEIDYHEFCRRGQKQQKSGEACAGMPETRYGANRHRPVD

SEQ ID NO: 382325 - protein, 381 aa, unidentified
MPRISTKHERTMFQKKILKELEKDPNSQIDIGLDLHKSSIHAAIFRGGATLTDWRTTANYGDFADQILPFLPYTKTVAYEAGPTGFSLARVLQGHGFNVVVCAPAHTPRPAARQNKSDRIDSIKLAQLSAAGMLKAVTIPTEQEEQDRLVLRHRNALIGKSRRVKQQIKAEFLFVGTGEVGSWSKKEIKRLAEFKCSENQRFTLDSMLRELGMLDDEVKATTARVDLIMRERHADTKAILESHPGVGPITAATFALELFRGPQRFRNGRHVASFLGLAPGKDQTGESDQPQPLLKRGQTRLRSILIEAAWRWIRLDPAAMAAYGRITSKKKGNGKKAIAAMARRLAVRLWTMWTRGEMYNPEKEIQRQRQRVARKTEAVAS

SEQ ID NO: 382326 - protein, 302 aa, unidentified
MHQNLIVATIRRSDTDYETQSFDAYTSSLTVLRDWCKQNGVTHIAMESTGIYWKPVFNILEEGFEIILVNARHVKNVPGHKTDKKDSVWLSKLLLSGLLKGSFIPPKDIRELRDLVRYKKKIVAQAAGEKNRVIKMLEDGNIKLSSVLSNVDGAVGTKIINDIIGGTTNPAELLRHYHGKMKASKEEVKKALEGRLTKHHQLMLRLIKQSIDDKEKLIAAIESLIDEAAKQYSVDIENLQTIPGVGKDSAISIISEIGADMDVFPSEQHLSSWAGMSPGNNESGGKKKVLKPSTETSTSKQP

SEQ ID NO: 382327 - protein, 429 aa, unidentified
MSYRIAGIDVHKKMLAVVVSDVEIESEYQFERRMFGSSPEQLRSLAAWLLEQEAEEVVMESTAQYWKPVWGALERYWKPLREKREGARRRSGTLHLAQAQSNRGPRGRKKDFPDAERLVKRLVARELTLSFVPDAEQRLWRTVTRRKYQLTRNRVRLQNQLESFLEEAHIKLSSLVSDLLGLSARRMLKALADGETNPAALAALADQRLRATPAQLCDALGACAELSPVYRRLLKMALEELRLIDEQIGQLDQEMANLLSQHQDAVKRLAEVPGLGVDSAQQIIAEVGPTSATFPSEKCLSSWVGACPGDDESAGVNYSHRSPKGNRHMRRLLNQAANAAARTKGSIFEIVYRRSVPRLGHNQAIGTIAHRQCRLIWLILHQGVRYEERGPAVTKRSKQLRTSKMLRQLRSLGYRIEPPNPQPSQAQVQ

SEQ ID NO: 382328 - protein, 420 aa, unidentified
MEGLRPSYAVGIDWASNQHAVCVLDGAGQIHLACSIPHTAEGLTDLVRRLTRCRAPAALPIAIERPSGLLVDTLIEAGFPVVPIHPNALKASRPRYAAAPGKSDPGDAYILADLLRTDGHRFRPLRAPSDQTKALRAAVRTRDDLVATRVQLANQLRSLLESFWPGAAAIFADVDSPIALDFLDTYPSPDGAARLGEHRLARFLQRAAYCGRRPAAELLARLRAAPRGHAGPLERETKGQLVRALVAVLRPLVAQLRELDGLIAAQLAQHPDGPLLQSFPRTGTVNAAQILAELGEDRGRFPTAEPLAAEAGVAPVTHASGKHRGVACRFACNKRLRQALTTWADNSRHAHPWARAVYRAARARGCDHPHAVRILARAWAHVLWRCWQDRTLYDPAKHRRALPFLPPPPPAAAVACTQEG

SEQ ID NO: 382329 - protein, 348 aa, unidentified
MTMLHYIGFDVHKKTISFCVKTAAGEIVEEGSTPAERASLRRWAAARSQPWRGAMEATLFSGWIYDTLKPYGEQLEMAHPAKMKAISAGKKKSDSIDARTIADLVRCNLLPACYVAPPRIRELRRLLRYRSLVVSEAVRMKNKMAGLLMETGAVYVKEKLHRKKYFARLLEELEEVPESVIDLLRLSRGALEMFESTQKRLVRELLADPELTERIERLMTIPAVGEITALTWALEVGDPQRFRSSSDAMSYCGLTAASKFSAGKQQRGPISKQRNHWLQTTLIEAAKLAPRWNLQLAALHARELERGNRNRATLAVARKLVAYLLAVDKSGQAFQVRAPSEEPTPKAA

SEQ ID NO: 382330 - protein, 400 aa, unidentified
MSVPDRGGSPHTAPARVSRAGRAYPQHWGRAVGQDSEVFVGLDVAKARHAVAVADEGRSGEVRYLGEIDSDPVAVRRMVARLEKEARRLHFCYEAGPTGYGLYRQLTAMGHDCAVVAPSLIPKRPGDRVKTNRRDAIQLAKLLRAGELTPVWVPDETHEAIRELVRSREAAVDDLRRKRQSISSLMLRYGRSYPGKKTWGARHRQWLQAQRFEHPAQQLVLQEMILAAQHALERLKRIQAAIIEFLPSWSLAPVVDALQALRGVQLVTAATIMVEIGDLRRFDTPRQMMSYLGLVPGERSTGDSVRRTGITKAGNGRVRRALVESAWTYRHPPRTSKLKHYVHERVPTAVRDIALKAEARLCGRYRALAGRDKKLNVAVTAIARELVGFIWAIGRIVQAA

SEQ ID NO: 382331 - protein, 446 aa, unidentified
MFKDKQAPVAPEVSVAVLEMPAETRGSRREQAKRRRRVERISGKTLVIGLDVARERQALTFGRGREIIGRRRIDVAPQHLGAVIAPVARQLCEQEGLDRVVVGIEPAGCYWELAAEGLERAGLGYAVVHTLAVRREREATRYNLEKHDPRDADLIFELVSDGKFTETRLAETVERARFNALAREYLLVRKRAAGERTRMTNFWTRVLPEFFDVLKELEGVTALAISRAMLPFSELAVLTPAEWLARVRSHAEGRVLPSRTAAVQRHVQGAHQDPHRRSGEGVPVRIAMAAERHRLLSAQKQRLREHILALYAQMPEAVWLNSIPGSDPLYNALTLALVGDFSKYDSPRALVKLAGSEVNWHESGDWRGKSRISHRGRSLLRATAYQQARRLVANGNSVYGARFHHLLHRTTRPALKLKQAYTALGNSYLRVAHVLVTQKKVWQEPN

SEQ ID NO: 382332 - protein, 348 aa, unidentified
MSKRSEYRDVKVMGIDLAKNSCHVHGVDADSRKAVGKKLSRQKLKEYLVNLPPCIVAMEACAGAHYWARLSRSYGHEVRLIAPQFVKPYVKSNKNDAVDAEAICEASQRPNMRFVAVKEVGQQDILSIHRMRSLTVGQRTAQINQTRGLLLEYGIAMPAGRVNLLKRLPEILEDAENGLTDLFREELFGLCRELRHLDDRIAHYDEKIEQIAQADERTQRLQTIPGIGPKIATALLAAIGDIHAFKNGRALAAWLGLVPRQHSTGGKSTLLGISKRGDVYLRQLVIHGARSVLRTVDRKTDHTSRWAAKLKVRRHENIATVAMANKMMRVAFALLKKNETYRSQPAAA

SEQ ID NO: 382333 - protein, 355 aa, unidentified
MEGYAQRQFVGIDLHRRRSVIVRMTAAGERLETVRIENDPVALALEIAKAGPDPEVVLEATYGWYWAADVLAAEGAKVHLAHPLGVKGFTYRRVKNDVRDAADLADLLRMNRLPEAWIAPPAVRELRELVRHRAKLVALRAGLKAQVHAVLAKQGVRVRVSDLFGVAGRALLEDLALDPVYRGRVNSLLRLIDAYGFEIAAVSTRLTAQLAPEPGYQALLALPGVGPVLAGVFVAEIGDVHRFPTAAHLVSWAGLTPRHRESDTTVHRGSITKQGSTLVRWAAVEAVQKTPADAGWLVTRRHQLAARRGANIATVATARKLLTLVYYALRDGHVRALSSRPRPQSTTVAVAAASA

SEQ ID NO: 382334 - protein, 339 aa, unidentified
MPLYSGIDLHSNNLMAAIMDEAGKRILKKRLINDPEIILATLEPYRPELVGIVVESTYNWYWLVDALMDHGYQVHLANPSAIQQYSGLKYLDDNHDAFWLADLLRLGTLKEGYIYPKQDRSLRDLLRKRWHLVKLRTSLIISLKNILSRNFGLQMRSSRIKDESLGTFVSGLPGEDNITLVVRTSKASIDFLTVQIDEVESTILKQAKNKPFYVKLLDLPGVGKILALTIQLETGPVDRFAKVGNYASYCRKVQSRWLSNEKVKGKGNAKNGNKYLAWAFSEAAAHARCFHPASRKFYNRKLNQGNAAMAHNALAHKLARAAYYIMRDNVPFEEAKMFV

SEQ ID NO: 382335 - protein, 425 aa, unidentified
MNYKQNEKINQVKESTLVVGIDIGSTTQYARAFDWRGIELGKVFTFSNSREGFEAFKAWMQRLQDKYRKSDVIVGIEPTGHYWFDLGAYLEDEGILLVMVNPYAVKQTKELDDNSQSKNDRKDPKVIAKLVTEGRYSAPYTPDGVYADLRIMVTNRKRLIREMTQIKNRFARWFAIYFPEYTDVFGDYEAQSSMLLLKKVCTPEAIVELGAEKINQIWRDAKLRAVGMKRATTLCETAKRSIGLKKGSSAARYEMKLLLEDYEYKKAQLDAVMEEIEKLCRKIPESEQMLAIKGIGVITVAGFLAEVGDVRRFESPRQIQKLAGLSLRENSSGKHKGQTTISKRGRSKLRAVLFNAAIPLIATNPEFKSLHEYYTTRANNPLKKKQSVIAISCKLIRVFYAILAKGVTYDAQKLISDIHRQPQVA

SEQ ID NO: 382336 - protein, 359 aa, unidentified
MKKMLRQSVGIDVGKDELVSKYTRLHEDFQREIVSSQVVKNNPQGFSKLLSWCDKLKVKDLELRFVIEATGVYYEALACFLADQGQKISVILPNRAKAFSKTVTTKTVTDMTAAESLALMGLEKQLDDWQKPEEEINNLKQLNREREQLLQERSMIKNQLHAEQHSAWPVEQSIKRMKDRIRYVTKQIKQVDLEMQQIQEGNATLNERIGKVCTIVGVGQVTALAVVAETAGFNLIRNKRQLASYAGYDIVEKISGTSVRGKAHISHKGNKNLRKAMHYPALTAIKHDPKMKQLYVRLVSKHGIKMKALVAVQRKMLVLMYTLWKNEQEYDPEYETKIKYLGQPTKETALTELDLVRSN

SEQ ID NO: 382337 - protein, 350 aa, unidentified
MKVTTIGIDLAKNVFQVHGVDEQGKTVIKKQLKRHQMAEFFVNMPTCLIGMEACSGAHYWGRKLTAMGHTVRLMAPQYVKPYVKSQKNDAADAQAICEAVGRPSMRFVAIKNVDQQSVLALHTARRGFVKARTALANQMRALVGEFGVVIPKGLSSLVSRMPEELEDASNELTAVVRLLLQQLLEHFKEIDTQVKKLEKQIRVWSRQDEQARRIEQIPGIGPITASAVVASLGDVSLFEDGRQVSAWLGLVPRQHSSGGKTVLLGITKRGDSYLRVLFIQGARAAIQAAQRSAEGPPAWLAKLLARKHPNVAAVALASRNARTVWALLAHKRDYDPKHGLDKCISAALAA

SEQ ID NO: 382338 - protein, 346 aa, unidentified
MGIATPGIDIAKSVFQLHGVDAAGQVVLRKRLRRNQVLDVMSQLPRCLLGIEACATSHHWAREIAALGHEVCLIPPAYMKPYVKRQKNGMADAEAICEAVTRPNMHFAPIKTPEQQRVLILHRTRKLLSRQRIMILNNVRSHLAEFGIIAPKGPYHVMQLAKALRDGEHDLPDIARATLVGFADQLEALTAQIKSFDRQLRAWHADNPVSQRLQTVPGIGVITATALAASIPDASVFKSGRHFAAFLGIVPRQNATGGKERLGRISEMGDPYLRTLLVNGATAVIRRIDKPADATAIWIRWLPDKKPARVASVAIANTTARIAWAVMLREEDYRAPAIGREYVRRG

SEQ ID NO: 382339 - protein, 410 aa, unidentified
MEVLHAHCAGLDVHKDSVVACARHMADGKITARVRTFNTTTQELMNLSDWLSAEGATHIAMEATGVYWKPVWHILSDGEFELILANAAHVKNVPGRKTDVNDAMWMADLMAHGLIRASFVPDEPTQQMRDLLRTRKQMVRERSSHIQRIQKTLEDANIKLDSVVTDILGLSGRRIIEALIAGETMPKALASLAHRRIHASVDELEASLRGRLTKHHRFLLKLHLDQIDAFDTAIASIDKEVDGNVEPFRAAIEMLISIPGVSNLAAQILVSEIGIDMSRFETAGHLISWAGLCPRNDESAGKRRSNRMKKGAPWLKTTLIQCAWAASRKKSSYLQAQYLRIRSRRGAKKAIGAVAASMLTAAYHMLQNGTFYEDLGANHFDNRAQRKHVLRLVNRLQNLGFDVEITPRAA

SEQ ID NO: 382340 - protein, 341 aa, unidentified
MTLIAMDVHKNSSTIAALHPATGEIIIRKCLTDRNDIARKLADLPRPWTVAVESSRHSPPVCRWLQAMAGDVKLAHPEKLSKIADLYPAKTDAKDAETMLMLLHLNCLPECYLAPEQVVEVRDLCRGRNSLREITTKLCNLLRSGFARAGMVVNYTDLTGCGARALVPELIAQMGPLSGLMARVFWQLLELVEGAIAEVERHIHEQAHAHPVAAELCGDQHPGMREVLALALVAEIGEIERFDSPAQLHSYAGLVPRTSESGDSRHEGSLPRRCNKHLRRIAVQIAQNAVRCTDPNPAKDTYERLREERRKGPNTAKIAAARKVLTEVFFTWRRIVAASAS

SEQ ID NO: 382341 - protein, 405 aa, unidentified
MEVLYSHCCGLDVHKNTITACIITPKGKELRTFGTMTADLLNLADWIKAEGCTHVAMESTGVFWKPIYNILEHYDLKEVLVVNAQHIKAVPGRKTDVKDAEWIANLLRHGLLKGSFIQNRKQRELKELVGYRKSLVEERAREVNRIQKVLEGAGIKLASVVTDITGVSGRSMLNAIVSGVDDPAFLANMARRRLKSKKEQLEQALVGMVGRHQRMMISMQLVHIDCLDQQIAKLDQEIEEQMRPFEQEIALLDEIPGIGVRSAQTVLACIGTDMSRFLTTSHISSWSGLCPGNNESAGKRKKAKTTKGNPLLRTTLIQAAKAASRTKDTYLSAQYHRIAARRGANKAAVAVAHSMLVIIYSILKNHLPYQEMGADYFAKVNAKAIKNRAIKQLEMLGYQVKIEAA

SEQ ID NO: 382342 - protein, 409 aa, unidentified
MNVMHPRCAALDLGKDVLVAAVRVQEETRVERDCRTYGTTSHQLLELSSWLSSHRVTQVAMEATGSYWKSVWHVMEGQFELVLAHPASIRNLPGRKSDVNDATWMADLLAHGLVRGSFVPPAEISALRELTRTRKQFVREVARHTQRIQKILDVGNLKITGLITDVLGASGRAIVKALIAGEADPERLADLAHPRLRVKRERLVEALHGRLTLQQRGLLGMHLNLIETIEASIAQLDQDIERVVTPFRGIVERLKAIPGLSQVSVPALLGEIGVDMSRFKTHGHLVSWARLCPRLDESAGKVHSTRTLKGAAWTKTLLIQTAWAAVKTKNSYLQAQFLRLRARRGAKKAIVAVAASILTIVYHVIRDGTDYRDLGANYFQTRDRSKVARRFVARLQQMGYNVQITEAVA

SEQ ID NO: 382343 - protein, 432 aa, unidentified
MMDTAEGDGQVLGIGIDWAEEFHDVALGTPEKGVIEQFRIEHTPAGVGALIERALRLEPDPAEVRVVLETRHGLLVEALIDAGFTVVPVNPDLVARRRGPARKKDDAEDARICCLLALDRHAGLKALVPHGELGGELRAIARDDERAARDQRRLLNRLRADLQTTYPAALVLAGQDLGAPTVLRLLERWPTQPELAAASHAELVEFARAGRHGWPDRFADRVTAALATSSLPTRDYLVRAKAAAIRLAAVQLLALHEARRGWEARMAELLLGGRRTGRNHTVSDPDPGKAFPGGAIYLSFPGLGDRLAARVAGEIGEHIDQFDSPNALQCYAGRAPVTRRSGKSDFVVARRLAHNRYLGDAVHQWAFCSLRLSGWAREFYDQKTTAGKSHHAALRALGNRWLEILWHCLIKGALYDEALHVANRNRALGRAA

SEQ ID NO: 382344 - protein, 412 aa, unidentified
METIVERPAALDVHKVQVTACLRVPGPDGERVQEIAEFQTTVRGLLALHDWLAEHRVTQVAMEATGVYWKPVWYVLEDDFECLLVNARHVKQVPGRKTDVSDAEWLCRLLEAGLLAASFVPPRPIRQLRNLTRYRKTQIAERQREVNRLHKALEDAGIKLDCVAADILGKSGRDMLDALVAGTTDPSALAELARRQMRKKIPRLREALQGHFDAHHRLWIGSILRHIDFLDEQIEQLSAAIEVQIRPFWPAVELICTMTGFQRRGAECVIAEIGTDMSVFASDRHLASWSAQCPGNHESAGKRRNGKTRNGSKWLDMALEEAALAAIRVKDGYLAAQYHRLKPRRGHKKALGAVKHTMIRAIWHMLTTGETYHDLGGDYYTRRDPKRQTQRLIAQLERLGHHVTLQEGAAAA

SEQ ID NO: 382345 - protein, 411 aa, unidentified
MSYTIAGIDIHKKVLMVVVTEVAVEELRFVCRRFGTTASEREHVVAWLQEHQVQEVVMESTAQYWKPVWLDLEPHFGRLHLAQAHSNRAPKGRKNDFGDSKRLVRRLIAGELILSFVPDAEQRSWRTMARGKLQLVRDRVRLENQLEALLEEMRIKLSSVVSQLLGLSGRRILRALAEGETDPDKLAQWGDRRLKCSKEELQDALRGQWQAMHRQMLQLFLERLDLLDRQIEQLDRMMAEAMKDHESAVIRLAEVPGFGPNSAQQMIAEVGPDVKTFPSAGEFASWIGCCPGSQESAEENHSSRSPKGNPFVRRVLTQAAQAAIKKKGSHFQAVFRHWRPTLGYNGALWAVAHKLCRVIWKILHDRVQYIERGQESSPKAKKQRAQKMINALRKLGYNVVITSPLPQSAQA

SEQ ID NO: 382346 - protein, 373 aa, unidentified
MPKYSTAFGMDVHLRSTTVCALNADTGEAVTRRFPGNPWGEIAGWMDGFPGPSLAAYESGYLGFAPQRELAGLGVECVVAAVSKIPRSAADSASKNDRNDAARMAKAILAHDISPVWVPSPEVEGIRDLAGAHDGATARLATAKQRLLAFLARRGFVYGGTTPAGNPRKYWTYDFLRWLDKVRPEGDGGVRTLAALRNEVEAAAEARADLLSEYRAAVDASPIAAEVAALQSIKGCAFALAAAFSAEVGDFTRFRSGRQVTAYFGLAPSQRSSGGSVRLGGISGAGNALVRKLAVEGSWCYAAARHQPKLMPRDTGVPLEIRMHGRKGSERLLRRREEMLARGMPAAKANAATAAELVRWLWALGMMCREGAE

SEQ ID NO: 382347 - protein, 422 aa, unidentified
MMGKERRWFVGVDWGSQEHVVSLYDDEGEKISQRRFAHGGTGLTDMIAWLLKASGGKPGDIHVAIETPHGPIVEAVLERGFNAYSINPKQLDRFRDRFTVSGAKDDSRDADVLADSLRTDMRAFRKLSIADPIVVELREWSRIDEELKVEHVRLTNRLKHQLWRYYPQMLELADDVGANWFLDLFEVVPTPEKAANVREKTIARILKNHRIRRFDATHVLSELRKPALSVAPGTIEAATARIRGLIERIRIINNQIKDAGRQLDRLCKNLSEPVADKDEETSPGQKTEQRDAAILDSLPGVARTVLATLLAEASDTLQRRDYHALRALCGSAPVTRRSGKSCIVVRRYACNQRLRNATYHWAQNAIQHDATSRAKYDALRAKGHGHARALRSVIDRLLNVACAMLNSGTLFNPEFASKQTTG

SEQ ID NO: 382348 - protein, 340 aa, unidentified
MSIVGGLDVHRAQITYDHLDTVTGEVEVGRIVPATRVELRDWLSRFEGREAAFATEGCTGWRFVVEELQHAGVEAHLAEPADTATLRGRKKRAKTDRADARHLRALLIEDRLPESWIPPAHVLETRIKGRAYVALMDHRRAWQQRIQAQLFHQGVEKRRGLLTEAGRSHLDEAELSGAGRQLIDVALRVIDALGAEADPLRRELQGFARRQPGCRALVDELYGVGALTAAVIWAEMGDTRRFSSSDQAVRHTGLDITVYESDGKRSPGRLSRQGPSTLRWALFEAALTATRNSSPDHGYYLEVAERLGPKRAYLSVARKLARRVHHILRGLGDTAFEEVT

SEQ ID NO: 382349 - protein, 396 aa, unidentified
MFYGFDVHKEFIQVCALDKDGETRRDFRVGGTAAAIEKFARGLDRADEVVLEATFHSWAIVQILSRHVERVVVADPAQLKAIANARIKTDKVDAHILAQLLRLDFLPEVELPTDGAWALRQLMAHRRQLRRQSVAAKNTIHAVLNRSLQRYPGKFLFSEKGFRWLAELELPAAERMVLDHQAALLREVQAHLQALDRVLLEQARLHPDAKLLVTIPGVDVVVAIGFLAATDSIDRFPSPQKLAAYFGLVPRVRQSVGPPRFGHITKAGSRNARWLAIEAAHTIARSSSPMAATYHRIRRRKGHQVAVTALARKLVVVVWHVLTTQQPYRYAAPERTRLKLRRLQKHERPARRSPSSLAEVYAEAGFELDPPSRGENRAAKSNRATITRSRDAAASP

SEQ ID NO: 382350 - protein, 413 aa, unidentified
MQTLVERGCGLDVHQATVVACLLIVRKDGKVQKQMRTFGTITRELLSLREWLLSEGCTHVAMESTGVYWKPVYAILEGGEGGLEIVVANAQHVKKVPGRKTDVKDAEWIADLLCHGLLRSSFVPPKPIRELRDLTRYRRKLVESQSAERNRLLKLLETANIKLASVATDVFGVSGRLMLEALVEGKATPQEMAELAKGRLRQKIDELGPALEGKLEEHHRFLLRLQLDRLEAAEKDLAILEHRLQEKLKPYEAQLTLLDEIPGVDWTLAAVIIAEMGVDMSVFGSVSQLASWAGVCPGNNESAGKRKSSRIPKGNVYLKTALVEAANAAAKAKGTYLRDKFYRLKARRGYKRAAVAVAHKILVAIYHMFSHQVCYNELGDAYLDKRNKHHLTRNLVHRLERLGYTVTLEQKAA

SEQ ID NO: 382351 - protein, 343 aa, unidentified
MDYFAGLDVSVKETSVCIVDDTGKIVRETRVASEPEALLQVLTNTIYRFKRVGLEAGPLSQWLYSVLAEAGLPVICVETRHMRAVLKAQINKTDRNDARGIAQMMRVGLYRPVHVKTLRSQKLRMLLTHRKLLQSKAIAIENDLRATLRNFGLKVGIVGTVKFEARIKELVENLPDVAVLVEPLLVVRRVLREQVGMLHRRLLAIVRDDDVCRRLMTVPGVGAVVALTYRATVDVPARFRNSKAVGAVFGLTPSRYQSGESDRIGRISRCGDEMTRTMLYEAAQSMLVRSTKWSWLKAWAMKIARHRGMKKAIVALARRLAVIMHRIWVDGTEFRWTREVAAA

SEQ ID NO: 382352 - protein, 363 aa, unidentified
MAKVLYVGMDVDKEKIVVAKLSGSAKLSDECVIANTPQAVRKYFAALIKEGDVTAAYEAGCFGFGLYHQLTDLGATVVVAAPGLIPRKPSDRLKTDRRDARTLAFALRASQLTAVHVPTNQDESVRDYLRMCEDMRDDLRKCKQRILHFLLRRGIRYEHGGPWTVKHKDWLATLQLPSDLDRQTLDSYLARLQELECTCSQIAAQVESIAQGERYREAVKTLSAFKGIKTLTALSFVAEIGDFRRFSCAAQFMAFLGLVPSEHSSGSKHRQGGITKAGNSHLRRLLVEAAWHYRSYHPTSRVLIERRREMDPRIISYVNRAGRRLNRKYLHLLLRGKRAQVAVTAVSRELSGFIWGAMVGQVA

SEQ ID NO: 382353 - protein, 445 aa, unidentified
MHHRSLFIYARVSLPQSQGHCFIGFLIYLESEVNSMLNTLFVGIDVSKKSNVVRFTNSHGDTLTVFSIPNNHDGANKLLDKLRNALTTEDFQAVSIGMESTSVYADHLALLLRNDDFLRKWGVKVHILNAKQVKAFKEAYPELPKNDNIDTLVIADYLRFGRISKEVNLDEKFVALKNLTRARFQVAQNLSREKTRFLDTLFYKFSSLDSSNVFSDTFGATSIAVITDFFSVDDINDMPLEDLAEFLVDKGKNKFDDPERIAKDLKAAAKSSYRLSKTVNDSINQLLAVRLVGIRSLQKQIKDLDKAIESYMQLFPAILNSIPGIGPVYSAGLLAEIADIQRFKNHAALAKYAGISWSQYQSGDYQASNTRLILSGNKYLKYYFLEAANKTRMHDAEFKRYYQSKFKEVPKHQHKRALALTARKLVRLVYSLLSTNQLYIPPTSR

SEQ ID NO: 382354 - protein, 336 aa, unidentified
MDARTVNNLPPAATHDGAVRCLMTIELSKKSWIVAVNTPLSDKISKYTVKGWNGLLEVIGKIRARVGRELQRPVEVVSCYEAGYDGFWLHRLLEENGVRNFVIDPASLQVDRRARRVKTDNIDVTKLLRSLMAYLRGEPKVWSVVRVPTIAEEDDRRLHRERDRLINERVQHVNRIKGLCAVHGIYHYQPLRSDRMKRLEQLQTADGHKLPPRIKAEILRELQRLELLLQMIKAIEKERNLMALGTAPSTYVNAKKVQRLVKIASIGPEIATVLVSEVFFRQFNNRREVGGYVGLTPSHYQSGASSRDQGISKAGNPKARTIMLELAWLWYPLPAR

SEQ ID NO: 382355 - protein, 325 aa, unidentified
MSSYETVGIDVGARRLTASGEEVVLASEYENTASGRKALVAALARSKRPVRAVLEATGIYFLDVACDLVAAGIEVMVVNPKVAHHFAEAMLQRRKDDPVDAAMLGEYGRRMDFVPWTPPAPKLFALRAISREIGALGKALTAAKNRRHAVDSTALGAAVVRRALDRQIALNETLVEELLATAVEQIKGDAELKRRFDRTDSIPGFAAKAVVCVMGELVVLPPMKAAQWVAQAGLDVREEASGSSVQRKPRISKRGNKRLREALFYPAMTAARCCPEAEAFCDRLVARGKTKLQATVALMRKLLHAIHALWRNNETFNAKKLFAPA

SEQ ID NO: 382356 - protein, 337 aa, unidentified
MSTRTHARTHTLAIVDSKHGKEVDNRTFPANAAGHARAAAWLARRTSDQAVLVSMEGTSSFGLTLKDYLVRGGYRVVHARKPSRAARHVKGKSDQLDTLQAARSTLPLPLDRLLEPKGGEIATALRALATARNSMSKQRTAAINALTALMRTSALGVDARKPLTSSLVKTIAAWRTRREGLVASVQRAEAIRLAKQVTALAEELASNAAQSTQLTASIAPTLLDLPGVGGVAAAVILGSWSHPGRIRNEAAFAALAGTCPLPASSGNTIRYRPNRSGDRRLNSAIHRIAIVRMRCDDRTKEYVKRRTKEGRTKKEIIRCLKRYITRELYRTLNRIGA

SEQ ID NO: 382357 - protein, 341 aa, unidentified
MDTVSLVGIDLGKHCFHLHAQDASGRMVFRKKLTRSQMFALLGNFPSCTVVMEACAGAHWIARRLQALGHEAKLISPHFVKPFRQGNKNDFADAQAICEAASRPSMRFVSPRNEAQQVVSALHRVREALVRERTGTINQIHAFLLEFGISLPRGMAVIRRLPAVLETQALPPRLVAVLERLQAHFKYLDEQIGQLEHELLTQLHEDERSERLLEIPGIGPITASVLMSELGDARQYGSARQFAASIGLVPRQYSTGGKPTLLGISKRGDKGLRRLLVQCARVIMLRIERRTDSLGVWVRSLLARRHSNVVACALANKLARIAWAILAKGTHYRSAPAALAA

SEQ ID NO: 382358 - protein, 315 aa, unidentified
MSESLAQVAGIDISKDHLDVHLHPSGATRQVTNDKAGHKALLRWFSRLRVERIVFEATGPYHRLFERALTAAGLTFAKINPRQARRFAEATGRLAKTDRVDAAMLARLGALLQPEASVPKSDVLDELTELVAARRALVKDRTACLNRAKVLRIQLLNSQTSQRLRQIEAQIAAVDRLCLELVTSDQTLAERLVILTSIPGLGEATAVAILADMPELGEIEPKQAASLAGLAPMARESGQWRGKSFIQGGRAHVRQALYMPALVAMRFNEPLKTRYEALIQAGKPPKIAITAIMRKLIVLANALLRDARPWTPAAP

SEQ ID NO: 382359 - protein, 405 aa, unidentified
MEIFVGIDWAEAHHDICVLDGTGTVLAKRRITEGLEGVGQLHSLLADHATEPNQVVIGIETDRGLLVGALLAAGYHVYAINPLAASRYRERHVTSGAKSDPGDAKVLADLVRTDRHNHRQVTGDSELAAALQVLARAHQNLIWSRQRLANQLRNNLREYYPAALAAFGTELADPVALGVLDAAPTPAIGRTLSRAKLVAILRRAGRQRGVEEKAAAIQVQLRAPQLTPPTLVGEAYGKSVASTVRILRGMNVELARLESELAPSFEKHPDAEIYRSLPGLGIVLGARVLSEFGDDRTRFAHPKARKNYAGSSPITKTSGKSRVVLARHARNRRLANACHQWAFCALTGSAGVRNYYHALRHRGKTHHQALRAVANRLVGILHGCLDHRQTYREDIAWPGSLTVAA

SEQ ID NO: 382360 - protein, 418 aa, unidentified
MSEEENARTPRRYVALDIHKYYCVVAGVNRDGQVVLQPVRVEHADLEGWLKKNLQKTDDVVIESTTNAWHVYDLLEPLVERVVVANPIKVKQIATARVKTDIRDTLILARLLAANLVPDVWVPPVHVRQMRQLLSQRRQLVETHTQILNRMHSVVHRHHLKHERGKRFNEQNTGWQKDARLSQIEQFQLSLEMENRQYLERQIERIGAEVKKICHQKTWSDSMVYVMTLPGFGVITAMTVLAAIGEIERFETPKKLASYSGLTPGLEQSGTKNRGKGITKEGRRELRWALVEAAMQAVKSDPLLKRRFNELQKRMHRNQAIVSIARHLLELIWYVLTRRQPYRGFTQERIAYKYLTWAWQMKDAERDGLTRQQFARYYLMRLGVGKDLTRIALDPKHPRRLASEAEVLALRPELRQIE

SEQ ID NO: 382361 - protein, 386 aa, unidentified
MKRNDLSRSLAAFDQASTLVAVVELSLANWLVAGLVPHLTRQPIKKLRSDPDALLGLLLRWRDQATRAGGRIKRIVVAFEAGRDGFWLARWLRAREIEAYVIHPASIPVSREHRRAKTDRLDAGLLMRAVLGWLRGEAKHCSMAAIPSIAEEDARRPTRERETLVREQTRAVNRIKSTLIRFGIRTFKVKLRQASKHLEGLRGPEGEPLPANTMAELRRDLARLQLIRGQIREIERARLERLKRAPGQGTHPMMRMLARIMGIGIETADVLVHEVLSRKLRDQRAVARYGALTGSPDESGSKRRERGLARAGNARVRRGMIQLAWRWLMFQKNSTLAKWYRARTTGATQGLRKAMIVALARKLLIALWRYVTIGEVPAGAVLRPVT

SEQ ID NO: 382362 - protein, 365 aa, unidentified
MLKYSLGIDVSKNDIHACLSIIDFTQQVKVKASRKFVNQDQGFKDLDSWISKHKKETTIPLSITMEATGVYYESCALYLFKKNYAVSVILPSKAKQYLKALGIKTKNDKIDSVGLARMGAEQSLERWEPLDDFFYKLRSLTRHHQSLQELKTNLNNQLHADLHGIYSSKEVLKQLKKLILTFEKQIKETEEAIKKHLYSKEEVGEKVNRLLTTKGVGITTIATILAETNGFLMFKSIPQLISYAGYDVQENQSGKRNGKTRISKKGNSRIRRILHLPAFNLIRYDVGNFKPFFDRILAKHNIKMKAYVAVQRKLLILIYILWKKNEAFNPYVQTIAQEIFRNEEMEPSFAGSEEPKKQPRITELY

SEQ ID NO: 382363 - protein, 317 aa, unidentified
MAQKGTIVGIDVAKGKIDAAIRFGAEASFANSAEGRRELLAWLKEHGVCKAVMEASGGYEKSWATLLRGAAVEVLITDPNRVRHFAKSAGQLAKNDPIDARMIAWFGEVFGHASRQPHDDERQELDQIVTARLGIGRLKEQIENWGEHEQPKAVQKAQQALLKVVATQLAKLETIIAAKIDKTERFAQRAEIIQSVPGLAGTAAAGLIAFLPELGLVDRQAAAALLGVAPFDADSGQRRGERHIQGGRHKLRKLLFMPILSAATQHNPVLKACYQRLIAKGKKAKVALIACMRKLIGILNTMLARGEKWDPARHAIA

SEQ ID NO: 382364 - protein, 315 aa, unidentified
MDVAFKSFVGIDIAKRTLDVHVLPERTSLKPPNDSKGRGQLREKLPPPGECLIVVEATGGYERALVAELIDAGHQVAVVNPRQVRDFAKACGILAKTDRIDAAVLARFGQAVVPRTQTKIPEKQLELQDLVVRRRQLVELRTAEMNRKENVASKFVKKSLQESVDALTKQIRRFEKRIAALVQSDDEWKQKAEIVQSAPGIGPGTSATLIAEVPELGKLSRRKISALVGLAPFNRDSGEFRGRRAIRGGRSSVRCSLYMATLSARRSNPVIRAFSDRLKALGKKPKVIITACMRKLLVMLNAMVRDGTDWRAAAA

SEQ ID NO: 382365 - protein, 340 aa, unidentified
MKHSVVGMDIAKRVFQLHCVAADTGEIERIKLRRDEVLPFFAQRTSSLVAMEACGSSHWWARQLRALGHEVRLLAPKSVRPFVRSNKTDAADARAIWTAVQQPEARLVGVKSEQQQAILALHRVRAQLMKFRIMQTNALRGLLYEFGEVLPEGSVALAKSLPLALAALSERVPRMLIDTLHEQWARVQSINAEIATIERRLASALRESEACRQIAAIPGVGLLTATAAVAAIGEANSFASGREFAAWLGLVPRQTGTGGRVRQLGLSKRGDRYLRTLLMHGARAVIARGKHSPWVAGLLKRRPYSVAVAALANKLARTIWALLAKGRAFDPAVFNVSPQA

SEQ ID NO: 382366 - protein, 381 aa, unidentified
MLWSRRLPNDQPAIEALMDRVADMKFVVWAIDMTAPESALLRGVLAARRQQIRYVPGRVVHSMTGAFAGEGKTDARDAVVIAQTARLRGDLATVSAPDDVAIELDLLTGHRNDLVAERTRGINRLRGLLTRIFPALERCFDYSTLTGLTFLTRFATPSAIAAVSDDEIYDHLRSHGVRRPTIPKMIDKARAAAAAQTVTLPGEATTALLVQHAATSLVMLTRQIADLDKQITEVFRRHRHARILESVPGIGTRSGAELVAITGGDLTSFGSPARLAAYAGLAPVPHDSGNRRGALRRPQRYHRGLRKVFYMAALNSSQRDGPSREFYQRKRREKRSHVHALIALARRLVDVVWALIRDGRVWLPRPTVERVSVDEVGAMAG

SEQ ID NO: 382367 - protein, 418 aa, unidentified
MAFKIFRKNCCGLDVHKTWIYACIGITDTNNRTEYKQARFSSFSKGLQELSNWLAKYSCTEVCMESSGKYWIPVFNILEKTYWVTLAHPKYTKPQKGNKTDRKDAKWICDLFMCDMIKPSFIPPPDIRHLRDLLRFRMKLTYQITGMKNRALNCLTVSNLKLDDVFSDVFGKSSRSIIGQILEHPGETFDVTPFVDKRCKHPIEEIQAAVNGAICPEQAAKLKICLDFMDEQEKRISELDKEITRLAEPYSAVLELMRTVPGLSKEPLTAIRLLSEIGPDMSVFPTSKNLVSWAGCCPRNDSSAKKVKSTRISRAGSYLKPLLVQIANALLKSKEHPEFKERYCRIKARRGHKKAIIALCRMLLTAIWNVLSKCEPYSAKGYLADKLTEHSVVISKAEGLALLRQRGYIFKDEVADFS

SEQ ID NO: 382368 - protein, 377 aa, unidentified
MHSENIAAYIGLDVHKETLAVAIAAPERLGEVRYYGTINNEAQAVRRLFQKLQGLYGNILSCYEAGPCGFGLYHQLTAMNIKCQVIAPSRIPKSPTDRIKNDHRDAISLARLLRAGELTPVWIPDLTHEAMRDLIRARAAAKRDSRVARQRILSMLLRTDKRYAGKHWTGKHRTWLANQSFSQPSQQIAFQHYCQSLEQIEDRILQLDQEISRLLPEWSLCNLVCQLQALKGVGQLTAITLVAELGDFSRFSSPKQLMAFLGLVPGEYSSGNSIRPRGITKVGNSELRRLLYEAAWSYRIPAKVGAWLIYYRPDSVTQYSKDIAWKAQQRLCSRYRSLTAKGKKSQVAITAVARELTGFMWDIALAAQSSFSQQKQN

SEQ ID NO: 382369 - protein, 410 aa, unidentified
MEVLHAHCAGLDVHKDSVVACVRHMVDGKVTTVVKTFKTTTQELMALSEWLSTEGATHIAMEATGVYWKPVWHILSDGGFELVLANAAHVKNVPGRKTDVNDAAWLADLIAHGLIRASFVPDEPTQEMRDLLRTRKQFVRERSSHIERIQKTLEDANIKLDSVVSDIVGLSGRCILEALIAGQTLPQALATLAHRRIHASKAELEAALYGRLTAHHRFMLKLHLDHLDQLDAAIAGIDKEIDDHVEPFRAAVEMLTSIPGVSNLSAQVIVAEIGIDMSHFPTAGDLISWAGLCPRNDESAGKRRSNRMKKGAPWLKTTLIQCAWAASRAKQSYLQAQYLRIRSKRGAKKAICAVAASMLTAAYHMLKNGTLYQDLGANFFDNHAKGKQVLRLVNRLQNLGYDVQIAPLAA

SEQ ID NO: 382370 - protein, 304 aa, unidentified
MSVDPAYKVVRGGALAKEAKWKDRIVIDGLLGIDVSKDTLDASMSSCNKVRAKSFANSPDGWRHLLDWLISQKIRRVHACLESTGRYSLGIACKLKEAGHVVSIVNPAQIRDFARTKLGRNKTDGVDASHIREYCELFKPSPWAPPSHAHRQLGELQTIRAGIVAGLTEWKNRKNSGMVDAVAQSLADATISHFTSQLGAVEKAIAQTIDNDSDLRRKRDLLLSISGVGETLASAVLAELPGPDVLRSSAEVVAYAGLNPRQHQSGTSIDRPTRISKIGNVVLRTALYMPAMSACDIIPQSSRW

SEQ ID NO: 382371 - protein, 320 aa, unidentified
MKPASPPTFVGVDVSKQRLDVAFRPSGARASYSNTDAGVHELVNHLAGCKPQLVTMESTGGLELRLARALWKAGVPLAVANPRQVRDFAKGLGILAKTDTLDAGVIAHFGEAVRPRPKPEPSQAVHCIDALVARRRQLVAMKTAESNRLSMSEGDQGVTVHIEWLRREIRRLDKQLASAIEGDPELAEKSRLLRTMPGVGRVVAATILAELPELGHLDRKRIAALVGVAPFADDSGKRSGKRWVRGGRADLRAVLYMATLTAVRRSPQIAAFYERLTSGKDRPAKAKKAALTACMRKVVVTLNAMVKANKPWFATIPHEP

SEQ ID NO: 382372 - protein, 356 aa, unidentified
METAYDGRQVVGMDLHRRRSVLVRMTEDGQRLGTVRIVNTPQALRRELARAGKSPKVVLEATYGWYWAADTLAAAGAEVHLAHPLGVKAFAYRRVKNDARDAADLADLLRMGRLPEAWIAPAEVRELRELTRYRQKLVHLRTSCKDQVHAVLAKLGVPVTCTDIFGTAGSAWLDALALPQPYAGKVTSLRQVAGALTAEITMLSEVIADLVAGDRGYQVIRQLPGIGPVLAAVIVAEIGDVTRFGNAGQLCSWAGLTPRHRESDVKVTRGHVTKQGSRILRWALIEAIQHQPAGSRPREAKDAIIARRGTQARNIAKVAAARQLLTLVFYGLRDGQIRCLSPRSGQPATAGAEPAA

SEQ ID NO: 382373 - protein, 351 aa, unidentified
MMIIGVDYHPSFQTIAFFVEETGECGEQELNHSDGQAEKFYRGLKQRGICVRVGMEATGYARWFERLLAELGFELWIGDPAEIKAKRVKKQKFDREDARLLLRLLRENNFPQIWVPGPENRDLRQLLWHRHRLVQMRTRIMNQLQALAMNEGYRWKKKLFSEQGRVQLEKLALAPWASRRRRELLELLDRMNPTIEELTAAVEREARKRPEAMRLMTHPGVGPLTALAYVLIIGTPTRFQCGKQIGTYVGMIPCEESSAHKQRLGHISKQGNSLLRFLLVEAAQAAARIHPDWRRRYLHLAMRRHKSIAKVAMGRRLAVRLYWMWRNGCEYSQSLEFGSYVGQLGTGHGVK

SEQ ID NO: 382374 - protein, 352 aa, unidentified
MVVTVGIDVHKKTHCAVAVDGAGRQLGKPVTVRATDAGHRQLLRWARREFAGAGVEFAVEDCRHVSTRLEAALLAAAAVVVRVPPKLMAQTRTSARTRGKSDPIDALAIGRAALREPNLPRAEHTHASRKLKLLVDHRDDLVAQRTQAQNRLRWHLHELDPELDPASRGLDRTRELDRIEQRLQQLPAGTVRRIALELLGDIRALTRRINALAKELTVLVQAQAPQLLELPGCGPLTAAKLLGETANPARFRSEACFAMHAGVAPIPASSGKTERHRLARGGNRQLNAALHRIAVTQIRLDGLGRAYYQRRRTSGDTTMEALRALKRRLARVVFNLLHPTDTAARACLPTAA

SEQ ID NO: 382375 - protein, 321 aa, unidentified
MKTVLGIDQAKKKFDVALLLNGKYKSKVFENSPSGFSALLTWLAKNDVETVHACMEATGDYGAALARFLYDAGHSVSVTNPARIKAFGQSELLRTKNDKTDAKLIARFCEKMEPTLWQPPPAEIEYLRDLGRRRDALISMRTQELNRQETSNETVNSSVQTVLECLDKEIEQISKLIKDHISKHPALKHKYDLLNSIPGVGPSSIEAILSEINAFEGFETIEQVVAYMGLSPKEHTSGTSVKGKSAICKIGNARLRKALYMPALSAIIHNPIVRALYDRMKAKSKNGMVIACACMKKLVHLIYGVIKTNKPFDPAYTLKTA

SEQ ID NO: 382376 - protein, 422 aa, unidentified
MKKIQTKKLKFVNDKTLIATVDIGKGLNMGYARCPDHSVVKSFEFANNRAGFDKFWDCLEKARDSKNLDSIIVGFESTGAYGEPLQHFLKNKPVRLVQVNPMHTKRVKELQGNSPNKTDRKDPKVIADIIELGHSLTVVIPEGAAAELRRLTLARERANKRCTALYNQLQDLIFISFPEFSQVIKDVKTKTARYLLQTYPDPQDIIDLGLESLGAVIKRVSRGKMKPAKAKDLFEAARTSAGITEGRFSVALEIQATLEAIASSDDFVVRLEEEMSRHLEDIPYSHLLLSMKGIGRVTVAGLIGEIGDFNSFDTQRELLKHAGFDLFEISSGKLRGSRRISKRGRPLLRKLLFFAALNTVRKGGVMHAHYQRHLKKGMKKIKALVAIARKLLGIIFALVRTKHEYQEDYQKIQAAATIPMAA

SEQ ID NO: 382377 - protein, 313 aa, unidentified
MQYIGIDMSKMSFHAALDETNVKVFKNSIEGVHAFLKTIIDLEYAKDNTVIGTEATGVYHFLLCETLRALNWQIKVINPLLAHKVIDSTLRRVKTDHHDAIAIRKAVLLNMGYLYIDTPEILALKTLVVEREALVRMRAETKQRVRNHSIREKATGLHLHDSFGGTIKMLSYEIQKIEKKMKVYVPATQKLLQSIPGVGPVSAAALVANVGDIKRFSSPEKLVAYIGLDCRVHQSGISIKGKGYMTKRGNRYLRCVLFNAAFIGKRRNPILKKYFEKKVKEGKHYFSAVCAVERKLVHIIYAVWSRGTPFENR

SEQ ID NO: 382378 - protein, 346 aa, unidentified
MLHVGLDLSRKRIDVCLICDQGELIDRFEATPDRDGLHGLAKRVAVYKEPARGVVESMNGARFVHDELVAHGWEVLVADAQKVKGLAPLACKTDKIDSRVLAELSFRDLVPAIWLPTLELRREREISRWRLHLVKHRSTLKNRVHSTLITFGHQRHMSDLFGVAGRKLLMELDIAEPWRSHVDASLVLIDDLEARITAIAKELRRSGADHRYIPILMSAPGFGWITSFTVACEIGDISRFSSPVKLTGYTGLCPRVKQSGQMDQRGPLSKHGPKYLRWGLMEAAIAASTHPLYRERYQRTKRRLGRQRGPKVAQIDLGRQLAEAIWYMLTRNQPFAPAGATFRLAA

SEQ ID NO: 382379 - protein, 369 aa, unidentified
MSSVTCFVGLDYHQDSVQVCVLDAKGRQLLNRSCSNHWKEVAAAVGSVGVVKRAAIEACCGAADLAEELVERAGWAIDLAHPQYVARMRRSPDKSDYSDSSMLADLTRVGYLPKVHLASSYERDLRQLVNHRQALVDQRRSTKLRVGAVLREQRAKAPEAKPSFACSRWTKAWMAWARSAPQLSDQGRWIVNDLLDELAHLDRKVLAAEARLRQATANDPMIDRLMNEPGIGEVTAWVLRAYVGRFDRFNTGRQLSRYCGLSPCNASSGARQADAGLIKGCNKLLRATLIQAGHRLINTEPRWRQLSDSMKRRGKPASVIVAAVANRWMRGLWHRMLPVQGEVQVGALPQTPPHFAPPPVTRLNEVERG

SEQ ID NO: 382380 - protein, 400 aa, unidentified
MNRTRTVAGLDVHKDSIYLCIMGYDQAIIWENTYGVLTPDLREMHHDMRAHGVTEAAMESTAVYWVPVWTELCESMELRLVNPYFIKQLPGRKSDVKDARWIAECLLKNLIKGSFVPEPIVQDMRKLNRRIMDLCEDTTYNSNKLDAALQRCGFRLSNYVATTKSKSYRSVLKAIIDGQTDPDELLSLVHGRILNKHGRERVKAALTGSFSETDLIVLRQLKETLDLIEKQTAYCQQELVRLCKEHYPKPYERLQTIPGVKERAATAIIAETGVDMKMFATAASLVGWCGLKPRNDVSNGRFKSRKVTHGNRYLRQILIEIAWAASRTRNCFFSHFSYLQTTVKKKNKMKIQVAIARKILVAVWHMLSKEEDFIDIYLKRQEELKRTEGQIKLLESYMAD

SEQ ID NO: 382381 - protein, 371 aa, unidentified
MGKNLRTKFVGMDVHQNSISIALADDGPEGEVRLYGTIRNFRGAIDKVVRKLVSTGAELHFVYEAGPCGFALYRHLTGNGFNCIVAAPSMIPRKSGVRIKNDTRDAIALARLLRAGELTPIYVPDTEDEAMRDLTRARNDARIAARKAKQRLHSFLLRNECVYPGKTKWIKTHLNWLAQLTMKHPAQQVALQEYIEAVNECTERITRLDEQILKAADEWRWAPTVKALQALRGVSLLTAVIMVSEIGDFNRFQNPKELMAYLGLVPSERSSGDRIRRGGITKTGNSHARRICVESAWSYRYQARVTHYLRTRHEGLPRDILQIAWKAQLRLCTRYRRLKARGKATQIAIVAIARELVGFMWDIARRIPAVA

SEQ ID NO: 382382 - protein, 337 aa, unidentified
MKTTEIKFKTFIGIDVSKLTLDVAILNPCSRKLSHSVFDNSDVGFSKMKNWLSVHHKVGFPQALFCLEHTGLYTRGIDRFLQEREAYVWMESSLHIKKSLGLKRGKNDKIDSQRIAEYAYRFYDKAVIRDHCAAGLQTLRDLLTTRERLNKSLKSIMVSINELKRADIHQAINLEAYQLAAVRGLKTSIKEVEEAMFEAIENNKQLKMYCEMATSIPGVGKILAIKLIIYTQVFTRFESVRQLACYCGVAPFEHRSGTSINGKAGVSKFANMDLKSTLHLASLSAIQHNPEMKAYYHRKVNEGKSKMCVINAVRNKLLARIIAVIKRQTPYVVLAQT

SEQ ID NO: 382383 - protein, 318 aa, unidentified
MDQPIIGIDVAKATLDAYVHPSGERFPVTNDDKGIKTLLEQLKPFPQAPVILEATGGLEFRVAAALASTGFRVAIVNPRHVRDFARAMGRLAKTDPIDAEILALFGDRVRPEPRPIPDEALRSLEAHVARRRQIVDMITAETNRLGQASDADIKKQIKRHITWLQHELKEVDKDLGGAVRQSPIWRAKDQVIQSTPGVGRVTSFTLLAQFPQLGTLRGKQASSLVGLAPFNVDSGTFRGRRHIWGGRASIRSVLYMATLSAVRYNPVLAEFYQRLLRAGKSKKVALVACARKLLVILNAMLRDNRPWTPTHLDPQHGC

SEQ ID NO: 382384 - protein, 346 aa, unidentified
MVTGKDIILVVDYHAKNLEVRTFNRASGEERTANVPTTRGNILRLVEEAVAEAADAGGRVRWIMESTTGWARVKELIGDRVQFTLANVLQMPLPPKAYRRKSDKIDTGRMLREELNGSLPRSFQPDRWWRQARRLVDCREDLVRRQTAVKNWISSLLHHETWQDRSGLWSAKGLARLGALKLPASDRFVLQIKLERLEHLGEWIGRVEAKMKQLYDRWPDARAADAIRGIGRVTAVSVLAHIGPIGRFGSAEELISYAGLAPGHRSSDRSSRNGRIGGGGTDGRLRYLLIEAATWLQQIPRYRATHQRVAARRGKDIARIVVARMCLRSLYKMLREKVKFNQAPAA

SEQ ID NO: 382385 - protein, 367 aa, unidentified
MYSVGLDVGENRSSVEILDEHGKHFKHLEVKGRWPVLLEQIQKHAPTPFKICFEASCGYGHLHDRLSKMASRVEVAHPGRLRLIFKSKRKHNRVDSEKLAKLLFLDEVPRAWVPPVAVRSWRAMIEHRQKLLHDRVSVKNQVRSLLKTPGILAPKGLWAQKGIKWLKELKLQEVEALRRDIMVGQIEDVNKLIARVEKHLKKISDDQPAVALLMTIPGVGIRTAEAVVAYIHDITRFARIKSVGCYFGLVPCEDSTGNVSRLGHITKDGPSTVRKMLAEAAWGGIRRSKTIRGFYEQVKRDDPKRSKIALIATAHYLLRVMAAMLRSAECWREKEQAQAQENQQRQGQARSTGPDECAAPLRKTPDA

SEQ ID NO: 382386 - protein, 409 aa, unidentified
MLFIGDDWAEDHHDIEVEDEQGRRLARRRLPEGVAGIEALHALVADHLPDDAEANQVLVGIETDRGPWVQALIAAGYTVYAVNPLQAARYRDRHGVSGAKSDAGDAHVLAELVRLDRAHHRPVAGDSAIAEHVKVLARAHQSLVWSRQRQNNMLRSMLREFYPGALDAFAGELDGRDALAVLAIAPRAADGRRLSRARVETALRRAGRQRYVATRAAEIVAALRADQLPARDGVEGAYGASVRALVAVISELRHQTLALAGAVEAGFGRHPDVEIYLSQPGLGPVLGARVLAEFGDDPARYADAKARRNYAGTSPITRASGKSSAVLARHVRNRRLADALDQQAFAALQASPGARAYYDARRARGATHHQALRALGNRLVGVLHGCLRRHQRYDEARAWQQHAVVPRAA

SEQ ID NO: 382387 - protein, 415 aa, unidentified
MALKIVYKICCGIDVHKTFVVACIASTDSNGVTIYEHHRFSTYTKGLKDLLQWLLKHNCKDVCMESTGKYWIPVYNVLENDCSIVLAHPKYVKAIRGKKTDKKDAKWIADLFKHDLVAGSFMPPADIRQLRDLMRYRFKLTCFMSSEKNRLQNCLTVSNIQLGNVVSDTFGKSAQAILDKLLENPADTSFDLEPLVYKSLKKKLPELRDAIDGYITPEQAGKLKVIKAHYENLESRKAELEELILALAAPYQQELAILQTAPGIRSDFTAIGIISEIGTNMEAFPSAKHVCSWAGLTPTNNESAGKKKSVRVSKAGCYIKPLLVQCANAVVTSKKHPEIRNRYLRIKKRRGHKKAIIAIARMLLTALYHMLKNGENYNAELYRKSDLLSVDREITVEQAIIIARKQGYKIKSATA

SEQ ID NO: 382388 - protein, 371 aa, unidentified
MKKDSTTKFIGLDVHSKTISVAIADEGRKGEVRHYGTIGNTTEAIDKIIKTLTATGTELKFIYEAGPCGFVLYRYLTGNGFKCIITAPGLIPKRSGVRIKNDRRDALTLARLYRAGELTGIYVPEPEDEAVRDLGRARDDARVAERKAKQRLNSFLLRHNLIYPGKTKWNRTYFNWLGSVGIKYPAQKVAFQEYIEAVNECTGRVARLSEQIGLAVEEWRMAPMVKALQALRGVSLICATVTVAELGDLSRFNKPKELMAYLGLVPSEHSSGESIRRGGITKTGNSHARRVLVEGAWTYKHHARVTPPLIKRQRDLPKSICQISWKAQLRLCARYRKMVARKKPMQVVVIAIARELAAFMWAIAQEVKATT

SEQ ID NO: 382389 - protein, 314 aa, unidentified
MFVGIDVAKDELVVAVHEDVALETVPNDARGAQQLLARFTAMPPTLIVLEATGGYEIPLVGALSAAGLPVVVVNPRQVRDFAKATGQLAKTDAIDAQVLALFAARVQPEVRPVPDAATRELDAVLGRRRQLLEMLVAERQRLAQARGRGQRAVTVSLKKHIAYLTRELAMVDTELAQLVEASPVWRAKDQLLQSVPGIGPVVARTLLAELPELGTLDRRAIAKLVGLAPLNRDSGTWRGRRMLAGGRARVRAVLYMAGLVASRRNPTLKAFYQRLLAAGKPKKLALLACCRKLLTILNAMLRNAEPWTPTTTAA

SEQ ID NO: 382390 - protein, 492 aa, unidentified
MIGNRRIGDRRIDGRRLVGIDLGIASDHTVRVLDGGGAEVCRRRARPTVESLAAVEAAALAGAVAGVRLEVVIEPTGPAWLPIAVFFTARGHRVFRVSSAKAADLRRFLSRHAKSNGIDADTLARLPLLAPGSLHPLELPATEQAAALDRRVRGCDRLTRQAALHQRRIKDLVRQLMPATPLTGDLTKTDLAVLGRWPDPRVLLGAGRTRLLALITKASHGQQGADRAEQWRAAAAAAVELYGEHPAQAWSDLAAEVATEVRLLAAVRVELADHAAARAEAYRFTDPAGLAASLPGLAEVGAPAVTAITGRAGRFRTGRQFRSFTGLAPRTSETGQTDRKGQPMSKAGNRLLRTTLIRAADHARRQDPQLAKIYYTQMVERGADHLKACCVVAAHLAERLHAVLVRGMPYVVCDIDGTPVDPDTAKQLIAAHWTVPREVRARRRSRKPIRSIPDSRTGKAPQQVLTGHDRSDPRRGDKRGDLPRVASCSRPA

SEQ ID NO: 382391 - protein, 404 aa, unidentified
MKGPIVSIDVSKGKSDYQAFKEMNVKYTGSRSIKHTKEGFDEIVSLVREMEKKLETEVCVVYEATGVYHRVLKKVLEDNNIKQFIINPLLSAKTRKNDSLRSPKTDKLDPKSIAKTYYSHSLHNSHKTETIYHELRELSRYYEDILVHLRKDKVAFRAQLDVVFPGYDTLYDDLYGPVALAVIEKYPHPEMLQKKKINTVSKVIQSKTCHRQAMSDTMADKAIEYSKTIYSGCDKDDIEVLILQRFIKKLKEDMAEAERTIGEMIKLAQELPDFSIIKSIPGIGDNLAARIIAELGDMTRFKKKNELVAFAGLDPRISESGQNDGDHMHITKKGNKRLRCLLYLAVTCSIRLKRDDNSIKDFYIKKKQQSNPMCSKAAKTACASKLVRIIYSMCKTGELYQYNK

SEQ ID NO: 382392 - protein, 338 aa, unidentified
MFYSGIDQHKLFSYITTVDSDGIVIKEAKLNNNNFDILNYFNSIGKEHIATVETTGGWYWINDLLSSQGINLKLAHAKYVKAIAYAKVKTDKVDSHILAQLLRLNFIPEAHKISNDIRTLRDTLRARLRLSVKRTSCINFMHRMLEKFNITDPSLLNEFYKLQYQQFDIQAKLLKEQMLTLEKSLYPSLIPNDDIQRMLWIPGIGKMNAFTILLEVGDINRFLTEKNFFSYCRLTPSARNSGGKSKQRSSKDGNRYLKIVFSDAAVHALQYYPVIKRYHNSKLRKKKKQVAKAIISKEIARIVYHVLKNKSEFNNKFKGIELEHKKSVQWPRITSPDV

SEQ ID NO: 382393 - protein, 351 aa, unidentified
MNVYAGLDVSLNETSVCVVDAEGAVVQECKVASEPEAIDHALRVYAADLRRVGIEASSLGAWLQMELSARGFEAIVIDSRHTHVSLSTMRNKTDRNDARGIAHLMRLGWFKAVHVKSQDALRLRMLLGCRKLVVRKLVDVENDIRGTLRAFGLKVGSISRGRFAVRVTALAEQADPLIEELALRLLAIRATLLVEYRRMHQLVVKATLADPICRRLMTVPGVGPCTALAFRTGIDDPRRFSRSRTVAAHFGITPRRFQSGEVDYSGKISKCGDQMVRQALYDAAGSLLRRSRRASALRTWGLRIMKRSGIKKATVAVSRKMAVIMHRMWLDGTDFKPRIGEPTTPPAAVGV

SEQ ID NO: 382394 - protein, 350 aa, unidentified
MQYLGIDWAYRRAAWCARSDNGTITGEGVVPADEDGLTKLVLAVGADVKACVEMMSGAVWVRDRLAAAGWQVQVAHARKVRDVAPLACKTDKVDARVLAELCRRDLVPELWIPSLDDRALRERLRRRTHLVRLRASAMNRIFGLLTQWGLRLSLKRLRAPDAMELLAARGVEDTWRRSIAEALAVIDLLDERIAPLHEELRPFAAADPRVLLLRTIPGIGELLGLTFAAEIGDVARFGSPRKLIGYAGLAPRVNQSGDRSRTGALSKAGSRTLRWAAVEAAHQAWRPTNPWHELFSDLTKRHGKNPAKSAVARKVLIASWHVLSRDQPFKPSRPRGATSVSASSRCFLAA

SEQ ID NO: 382395 - protein, 316 aa, unidentified
MLYVGIDVAKNKHDVTALNVPGKTVLKPLTFSNNKAGFELLDLSLRQLNQDCLIALENTGHYAFNLLNFLHEQGYKVYTYNPLLIKKFAKSLSLRKTKTDKKDAHGIALKLLSDPNREQFQHDNRQVELKILARHIHRLKKKQSDWKVQYTRCLDIIFPELDKIVGKHSEYTYQLLTRYPNPQKRLEAGFDKLIEIKRLTASKIQDILSVAPHSIGTTSPAREFEIIENIKHYKRLIDKAKKCVNDLMAEFNSVITTVTGIENRLGAVILAEIRNIHAFDNPAQLQAFAGLDSSIYQSGQIDLAGRMVKRGSPHLR

SEQ ID NO: 382396 - protein, 397 aa, unidentified
MIAVGIDISKAKSTVAVIDSDGTVLASPFTMAHTQPEMEAFVTYLKGLGEPTTILMEYTGHYHYPVLKKLQDEGFPVCIVNPYQMKKYGDVEIHKAKTDKKDALRIAAYALEKSYKLVPYSSMEQKYEDLKFLSRQYSQRITYVAKLKVQLIALLDQTMPGITRILPLNSRNPEKCALLLFIKRFKSFDEIQRIGKVRFLASYDVLAKKASERSASSKGLSIYELAVDSITTRGEDPYIWLSQNQCVDLLSATQNAADEIISQMRNIAETIPEYKVLRAMRGVGDRLGPIILAEIGDIRRFHSGKALNSYAGNDAPPYQSGQFESRNRHISKRGSSTLRKACYEVMQALKLTKPQDDPVYLFMLKKEQEGKPFNVAKMAGVNKFLRIYYARAMELYK

SEQ ID NO: 382397 - protein, 443 aa, unidentified
MRAVPEEIPDADSEQVLARVCAIDVAKEFGTVCTRLPSTAGRRSSRVWQVAATTNAVTDLAAQLVAAEVQKVTVESTSDYWRIWFYLLEAAGLDVQLVNARDVKNVPGRPKTDKLDAVWLAKLTEKGLLRPSFVPPASIRALRDYTRMRVDLIRDRTRNLQRMEKLLEDALIKVTTVASSLRTLSTRDMIEALIRGEHDPNTLAELARGRMRGKRTALIEALTGRFKEHHGELARILLDQIDRLDTQIAHLSDRIDAMLAEIDPPQPSGDAKPAQDEITVSTAWQRLCEIPGISTESAQMIIAEIGLDMSRFATPAHLVSWARLCPRTIQSGTSLSAGKAGKGNPYLKGALGMAAAAAARGGDTFLAERYRRLVKRRGKSKALVAVARSMLVIVWHLLANPDARFHDLGADFYQRRVDTGRKTASLIRQLEALGHAVTLQPTA

SEQ ID NO: 382398 - protein, 388 aa, unidentified
MQDVAHRPVAATTIGSDLCAIFISLELSRSTWLVTSLSPGHGEKMSKHSVKAGDIAALLARFSKLRTKACARTGKSLPIVVIQEAGLDGFWIHRVLLSEGIESHVVDAASVATSRRRRRAKTDRIDGETLLRALLAYKRGEPRVCSMVRAPTPEDEDRRRICRERKVLIMERVQHVNRIKGLLFSQGVSGYEPLHRDRRAQLDALQTGDGRRLPQHLKAQIGRELDRLELVLEQIKAVEAERDALLNAEQTKVAAPPPMLLALHGVGPEFASVLWSEGLSRHFDNRRQVAAYAGLAPTPWQSGSINREQGISQSGNPRLRTTMIQLAWLWIRHQPVSALTLWFKDRNERTGGRRRKTTIVALARKLLVALWKFVSAGVVIEGAMMRPA

SEQ ID NO: 382399 - protein, 457 aa, unidentified
MTGAPALTDAEMRFNCHAQNLPLSPLSSPGACPRPDRGCPGDPDAMGRSGGEGVDILGRRDHAREPPMSQSFDASRSLTAFEQDSTLVAVIEMSQSKWLVAAVVPGIARQPLKKLDADAGALLKLLQRWREEARKAGREVKRIVCAYEAGRDGFWLARLLQAHAIEAYVIHATSIAVSREHRRAKSDRIDTELLMRSFLGWLRGEKRHCSMVAIPTMAEEDARRPSRERENLVGEQTRIVNRVKAVLALFGIGGFNPRLRKAVQKLETLHTAEGTPLPENAHAELRHDLERLRLVHDQICTIESERLRRLAQAPAAATGPHAMVRLIARVLGVGIETADMLVNEVLTRNLRDRRAVARYAGLTGAPDESGKRRREKGLARAGNGRVRRGMIQLAWRCLIFQKESRLVRWFRARTADGRSTTRKTMIVALARKLLIALWRLVTTGEMTEGLKLRPAGT

SEQ ID NO: 382400 - protein, 481 aa, unidentified
MSNRKMSTFERLQNGAPLNRQERRELQARLHASDPGLEIVHPDAAGIDVGNESHFVAVPAGRDPQPVQEFGSWTADLRRMAAWLKSCGIRTVAMQSTGVYWIAVQEILEQAGFEVYLVNARGTKNLPGRKSDVQECQWLMKLHTYGLLRNSFRPPEEIRSVRTVWRLRDRLVKDAGRAIQQIQKALTVMNIRLAVAISDVSGATGMAILRAILKGQRDPHELAKLRDPRIRATEKEVASSLEGNWREDVLFELQQVVEGYDFLQRQIANCDERLQQYMAVLPARPMESEEVVEEPAKGSKNRRKSKPRRKNQPGFDLESELHRVFGVDLTRIDGIKVMTAQVILAELGPDLSAFPSEGQFASWLELVPRRDISGGRIIKQLSRESKNRVANAFRMAAQSLSRSDSYLGARYRQLRGRLGGEKGVKAMAHYLARLTHRLLTKGQAYVDRGAAYFEKQRAERELTRLQRKAAELGMQLIPANA

SEQ ID NO: 382401 - protein, 349 aa, unidentified
MAEQRISYTGERIDVGIDVHKETYTVTCLCQRQMVQTATVPADPARLAESLLRWFPRARLFSAYEAGFAGFVFHRVRTTAGSTNMVVNPASVAVAANEKVKTERRDAKRLARDLADGRLRGIYVPTEAEELARLLPRTRAQLVAHRATITRQIKAKLHQFGLITPASRRLMRSRYLREIAAWELPTELRVSLTLLADQWRFATRQLLEVRRLLREQAKAQVALETVYRSVPGIGEIVARTLATALGDMNRFAHERALFSYTGLTPSEYSSGTAIRRGHISRQGVSRLRHVLVETAWWALPRDPILQAMFDRIAATRGKQRAIVAIARRLIGRIRACFRHGTTYAVGTAG

SEQ ID NO: 382402 - protein, 322 aa, unidentified
MKKITTTTASEVRKIESERLTIGLDLGDRWSWYCVLDGAGQVQLELRVRTTPEAMREAFGGMPRSRIALETGMHSPWVSRVLSQLGHEVIVAHARNVRLIGESRRKDDRLDARTLARLARIDPELLSPVKHRSAQAQVDLTVIRARAGLVRARTSLINTARGLTKSYGQRLRGCNPRNMNREKASELAPELRAALEPLLEEIKSLSERIREYNEQIKHLAQNSYPEVELLTQVKGVGTLIALTFLLTLEDPHRFAKSRDVGCYLGLQPGRRNSGQSEPQLHISKEGDPYLRTLLVQGAHHILGPFGADSDLRRWGLKLAERG

SEQ ID NO: 382403 - protein, 342 aa, unidentified
MWTIGLDVHQRMSCICILDENGKTIKEQKIVGPPALVIQELRKVAKRFAICYEASVGYGHLHDQLRRFAARVIVAHPAKVRSIFQCKRKTDRIDARKLATLLFLNQIPAVHVPSLDVRGWRGAIEFRQRLIARRTPIKNGLRAILRGHGVTMPIAKGLWTAKGLAWLQRVELPDIPALQRDMLLDDVRQMAPKIKRVEKILKKQADAHPGVILLKTIPGVGIRTAEAVVAYIDNAKRFARNKQIGAYFGLIPCEDTSVKQRLGHITCDGPATVRKLLTEAAWQAVRRDPSVRKRFERIHGGKPDRRKIAIVAIAHYLARVMLAMLRTGECWRSEEKDDKAAA

SEQ ID NO: 382404 - protein, 355 aa, unidentified
MNDAKYIGMDVHQATISVAVRDSRGNLVMEAIVETKAETILQFIRGLRGSLSVTFEEGTWAAWLHDLLQPHVTRVVVCDPRKNALLKVGNKNDRIDARKLSELLYLNKLSSVYHGEPGIRTLKELARSYIAMTRDLTRVMSRLKAIYRSWGIPCAGQQVYAPRYRAEWLAKISEAGVCRRAGLYYQQFDALAALRQQARRELLAEARKHPAMKLLRQIPTIGLIRAALLIALMQTPNRFRTKRQLWAYCGLALRTYTSGEYRFVGGQLKRSKKVLAVRGLNINHNHDLKNIFKGAATRAASTVGPFQDFYQACVARGVKPHLARLTLARKIAATTLLVWKKGVRFDPEHLKQQAA

SEQ ID NO: 382405 - protein, 401 aa, unidentified
MSKRAMGKQRAQVRSRKAQQRKVVAKAKAQKIVTLPVIRPDTAGIDIGSMEIFVAVSPHRDAEPVRSFGTFTSDLEAIADWLQACEVRSVAMESTGVYWIPLYQILVDRKLEVCLVNARHFHNVPGRKTDVCDCQWLQYLHAVGLLRGSFRPELTICAMRTLLRHRQNLVEMAAEHVLHMQKAMEQMNVKLTHVISDITGVTGMRIIDAILEGQRDARALAKLRDKRIQADEETIVKSLEGDYRPEHLITLEQSVAGYRFYQKQMTELDQKMEGFMEALPAKIDLREHPLPASTKRQKRQHNAPDYDLRSHCYRAFGVDLTEIPGFAAPTAQVMLVEVGPDLTKFPSASAFAKWLTLSPNNDITGGKVQSARTSKGKSRAALALRQAAQTVEHSENHLGQF

SEQ ID NO: 382406 - protein, 345 aa, unidentified
MPIVGGLDIHRKQLTFDYLDTVTGEVRRGQIAPADREHLRAWLARFAGRDDVAFAMEGCTGWRYVAEELAVAGIAAHVGEPADTAAARGRKRHAKTDKTDSRHLRTLLAEGRLPGCWIPPAQILEYRALLETYHDLRREHTAWVQRIHAVFFHQGAPALGEGALRTEQGLAALRAAAAAHLSPGGQLQVATALEVLAAVEVRMEVLRTQLREAARHLTGAKVLAARLYGVGPVTALALTCWLAGEGRFSSSRKAVRFTGLDITVWSSDRKGPPGRLSRQGPPVLRWALYEAGKTHARASAPDHAYYATVKDRKNSKRAALSEARKLVRQACHILTELGDDALTAA

SEQ ID NO: 382407 - protein, 342 aa, unidentified
MEERLYCGIDLHKNFSAVCLMDKEGTVFEERKLQHIGDIFKSYFRERDPMECVVEPVENWGWVVDYLAEAGHRVHLANTYKVRLIAESRVKTDRVDAKVLADLLRTGYLPEGYIAPIELRDQRAYLRYRIGLVRERSRLKNQVKRLLRVENVEEPSYKDTFGKKGWEWLEKVQLRPVNDRIKRERLEAIKYYNEHIERLDSEIKLKSRDSEVVRHLMTVPGIGQLTAHMIMAEVGDMSRFASAKHFAGYTGLVSSQRSSADKTHSGHITKQGNKHMRWLLVEAAQKAKTLDINLKLFFDRIAYKKGKGAAHVALARKLSEICWHIAVDNVPYDSSKVCRRVG

SEQ ID NO: 382408 - protein, 345 aa, unidentified
MKLYAGIDLHSSNNYTGVINGQDERVYGRRLPNHLNSILLALDPFKDRLIGVVVESTYNWYWIVDGLQEEGYKVHLANPSAIKQYEGLKHTDDKWDSFWLAHMLRLNILPEGYIYPKQERPIRDLLRRRLLFVKQRTSHILSLESMFNRNLGMRMSGREIKKLGEKDVESLFDSHHLVLAAQSSIGAIRFLKNKIKLIEKEVKSQVRLSEAFKYLQTIPGIGDILGLTIMLEVGDIGRFDQVGNYSSYCRCVKSERRSNEKKKGEGNRKNGNKYLAWAYVEAAYFARRFCPNAKRFYQRKIAKTNKIVATKALGNKLARASYYIMRDQVPYDPRKLFGPSAWVHQ

SEQ ID NO: 382409 - protein, 432 aa, unidentified
MLDQVIIGVDPRKLSVTIEARDNREILRATGRFGTDTRSYHQLLKAARQWPERTWAVEGANGIGRPLAQRLLADGERVLDVPAKLAARARVFDTGQGRKTDATDAHAVVMVALRDKGLRELRIDPELMVLRMLCDRRDELSRARAQALNRMHRLFLELLPGGAPVKKSVSQYQVLLATVRPRDLAGKTRRRMAAEELDDLHRLDAKLKAMKAELKAAVQATGSHLMDIHGIGPASAARILADAGDIARFPDRGHFASWTGTAPIDASSGQHLRHRLSRAGNRRLNHVLYMAGIVQLRHDTPGRAYYRRKRAAGKTSMEAMRCLRRRLSDAVYRQLVTDAAARDAGPGGHSGATLSSSAAGLPPGTGTSDQPLPGPAPKTLPPPPEQLKTPAAPAAATSRQRARGVNVERPTGRTTLTPTSAVAHSTAQGPRT

SEQ ID NO: 382410 - protein, 424 aa, unidentified
MKKLDYLSTLFVGIDIGARQNVVSAINFEQEFLIKMKPVPNTQFGAEQLESMLVKVLENNTFKAVIIGLESTSFYGVHIANFLSASEKLMTYKPYVYCLNPKEVANYKESFNSLDKNDGIDSFVIADFARVGRIHIEPWRGSQYLALQRLTRHRLHIVECLTREKTYMLSNVFLKFSEFALLQGEDHPFSNKYGATASSILTEFLSSEDIANTSIEELVDFVNRKSRKRISNPQMTAEILQQAARNSYRLDKCLYEPLTTSIACSFNCIQAFDKELKGINKAIEKAVMGMNPVEYKILMSIPGFGPVYSSGILAELGSVHAFPSNDAIAKYAGIVWKENQSGGFKAENTPMNKAGNRYLRYYLIEAAGSVVCHIPEYQEFYQKKFAEVTTHQHKRALALTSRKLIRMIFGLLAKNQLYSSNRVD

SEQ ID NO: 382411 - protein, 337 aa, unidentified
MAKEKAVRWVGVDVSARWVDGSRAAADEPVSARQFANTPAGHGELASWLTQGGRRARVVLEATGLYSLDLALRLQRTARIEVMVINPRASKEFAGAWGQRARTDASAAQGLREYAARMPFMPWTPPGPQALALRTIMRRVVALIEARVQERNRLHALSATEALPTVVRTDIRQHIRTLERRIARLEHEARALVEPAPALRAGFRHLCSVKGIGRRSALMILAEVAVLPGELTARQWVAHAGLDPRPIRSGTSVHPPVRMSKHGNVYMRRSLFMPALVAVRRNPAVQRFATELTARGKAPLQVLVAVMRKLLHAIYGMLKTDTDFDGEKFRRSAHAEG

SEQ ID NO: 382412 - protein, 391 aa, unidentified
MFLLGIDIAKLNHVASCIDSSTNKVVFSNFKFKNDFKGFSALLDKIKSFDAKNLIIGLESTSHYGKNLINFLFRHDFKVALINPLQTSHLRKANIRDAKNDNLDSLNIAKSLIFTKLNFVSKKNIECFSLKKLTRFRSNLIKQRSKAKIQLTSLLDLLFPELQYLFKSKIHSKAIYSLLKKYPSTEEIAALKDDEISNLLYASSKGHFKKEKSIELKSLAKTTVGIKDTSISLHLIQLIELIELYTKQIKDIEIKITDIVNNLDTTLLSVPGISVIACAIILGETNNFENFSSSKKLLAFAGLDPKIRQSGNFNASSCRMSKKGSPYLRYALIFTAWNIVRHSEKFNRYYCLKRSQGKSHYNALGHVTHKLVRVIFTLIKKNIIYQEKNLR

SEQ ID NO: 382413 - protein, 395 aa, unidentified
MFIVGIDVAKRSHEVCIITSDGQTVQRPFSIRNNCTGYNLMLEKIRKHTNIKSQIVFAMESTAHYWLALFTRLRKDGYHVILLNPIQTSAMRDMFIRKIKTDAKDSFIIAELIRFGRYAESNVAQDRLLALKELCRNRFYLVDMAGDLKRKLIALIDRVFPEYEAQFDTIFCKSSVAVLKKYPTPQKLSNAHLDKLTELLWNSSNGHFGEWKARELKELARNSFGVEDCDGAYSTLILLMLDQIQSLSGKADALEKEISRLFQSFDTTVTTIPGVGPIIGAVILSEVGDISRFSSADKLAAYIGVDPSVNQSGEFQAAHAHMSKRGSPYLRRCIWMASQVAVQRDPMFRAYYEKKAAEGLKYMTIIGHVTRKMTTVIFAILRDHKVYEPVLPTAA

SEQ ID NO: 382414 - protein, 318 aa, unidentified
MAQRVRENIVGVDVSKDKLDVFEWETNQSYSIPNEFEAIAQWLKRWAVPIRLAIEPTNRYHQTVAEAAHTLGHRVCMIDPYRLVHYREGVGQRVKADRQDAKLLARYLSREDGEIRRWAPMTQAEQRFWRLLKRRATWVRARTQLQQSLTDLGSVQSDVDTLLAQCHQTIRKRERALKAEAKRLGWTYQVRRCQAIVGPLTALAMVATYHRGQFRSADAFIAFMGMDVRVRDSGKFRGRRKLTKKGDSELRRLLFNAAMQGRRSALWEPYYLTLRTRGMSTTAAFVALGRKLARVCFALLQKNTDFNPNFPLKGCAVT

SEQ ID NO: 382415 - protein, 362 aa, unidentified
MTFFIGVDLHKTQFTVHVRTDEMTETLKQIRQYKTDKSGYAEFIERIQAYRESGACVKIGVESTGNTRFFKHQVEKAGAEVTVINTLKFKVINESAKKTDKHDAATISEFLAKDMLPESYLCSKETENIRRLLKSRERLVRSIVGQKNEVHALLVSMGLKDEQRSLQSKKGRQKILDVLESNNDYVLEAQSVKLMVEIISQMEAAVKIIEKQLSELTKNDQMVNRLLTIRGCGKITAWTIRAYTEDISRFSSAKKYAAFCGLVPWVSDSNETIRHGKITKRGPQELRVSFVQMVMGIRRCKDTANWRIMQRYDYMKTHKGSGKSIIAAARKLAEIVWAMLSNNNDFDREKMYGKYKPAPLAV

SEQ ID NO: 382416 - protein, 371 aa, unidentified
MEHTRFVGLDIHKERISIAVAESGRSGAVEYLGEISNDPVAIGKLCDRLERRGNALAFCYEAGPCGYGIHRQLTSLGHRCDVVAPSLIPHKSGDRVKTNRRDATMLARLHRAGELTPVWVPDADHEAMRDLIRLRSVVRQIVTRTRQHLQGFLLRHGRKHGRGTAWRMAYRRWLSTLAFGHPAQQIAFQDYTDAVMDAERRLKRVEEQISGLLPEWNLRPVVDALQAMRGIALINAVVLVAEVGDFTRFSNPRQLMAYFGLVPGERSSGETIRRGGITKTGNTHARRALVEGAWAYRMKARIGRHKVDRIEALPKIIRDIGWKAQVRLCTRYRRLRARGKTANVVNVAIAREMVGFIWSIACTVQSTPKTA

SEQ ID NO: 382417 - protein, 404 aa, unidentified
MHNDLGFDIWCGLDVGKQAHHACALDAAGKKVFDKPLPQDQSKLEDLFTRLSEHGRVLVIVDQPNTIGALPIAVARSMGIQVAYLPGLAMRRAADLYPGNAKTDARDAFVIADAARTMPHTLRRVDLGEETLAELKVLVGFDEDLAAEATRLSNRIRGLLTQIHPALERVVGPRLATRQGLAVIEQLGGPQGMTAASKSTLLRVITKANPRHAQNFADAITQALSEQTVVVAGTAAAEQVLPKLAASLRQTWDQRCELAAQVEKVVDAHPLAEVLTSMPGVGVRTAARILLDVGDASLFPTAGHLAAYAGLAPVTHRSGTSIRGEFPARSGNKHLKRALFLSSFAALRSDPVSRAYYDRKRAQGKKHNAALICLSRRRVDVLFAMLKNREPYRAPNPTPQPLAA

SEQ ID NO: 382418 - protein, 319 aa, unidentified
MAQNDLVVAGIDVAKDKVDVCVRSLSLKRTFASTAEGRRELTSWLRRHKVGKAVMEASGGYERDWAKALRAAKIEVRIVDPKRVRSFAQSAGRLAKNDTIDAEMIAWFAETFDEARSQVYDAAREQLHQMVNARQALKDMQAKLENQGEHALPATVQRMHARIIKTIAVELVKIEAAISAMVQATPRFAEFAEIIESVPGIGRTTSAALIAAMPELGQANNKIVAALLGVAPYDDDSGRRRGERHIKGGRRRTRNVFYMACLGAATQHNPVLKAFYNRLVAKGKEKKVALVACMRKLISILNIMIERRQKWDASRYAVS

SEQ ID NO: 382419 - protein, 334 aa, unidentified
MQYVGIDLHKETSHMVVLSESGEVLGRARVPTRREDLVRYFSGFSEPVKAAIEATRNWYWVYDTIEPMVDELKLASPPKIRIIAESTVKTDQIDAKVIADLLRSNFLPTCYVPDQETRQKRELLRHRAFLVQTRTRFKNRIHIVLDKLGIEHPFDNIFTKAGLEFLKGLELPWAYQKELSDSLEILKLLNDKEREQNKIIEKLCRESEEAKLLMTIPGIGYHNALLIMSEIGDINRFATGGKFSGYCGLVPTVHISDKTVRYGQMTDVGNKWLRWVFIEAAHIARLKSLRFSRLYQRVKEKRGPQVAIGAVAREMAVVSFYILKTAKPFRDDKW

SEQ ID NO: 382420 - protein, 378 aa, unidentified
MRMTTDQARVTAGVDAHADTHEAAALDERGRLLGTRTFRTGSEGYRELLAWLEQFGELVVVGVESTGSYAAGLVRFLHAHGVDVVEVNRPHAHTRRRRGKSDPIDAEMAARQALSGDASAIPKTTTGIVESIRQLRVARDGAVKARSAALCQLSDVIVTAPDGLRERLSQRKRTRAKASLCLGLRPRTTHLGEPAEAAKLALRSLARRIQNLDEEIAALDKHLGTLVATAAPRTTKLLGISTGHAGQLLVTAGQNIERLRSDGAFAALCGASPVPVSSGRRSRHRLNPGGDRDANRTLHMIAVVRLRYCQRTRAYAQRRSTEGKTKREIIRCLKRYIARETYRTLCADLHDLQQPPRPAAAVTIMCGAGPIGRARRRT

SEQ ID NO: 382421 - protein, 384 aa, unidentified
MQKPNDLNQSRIVLKQDSTLIAVIEMSLSSWLVAGIVPGVERQPLKKLAVDESALLKLLNRWREEAEKAGRRIERITVAFEAGRDGFWLARWLRARGIEAHVIHASSVAVSREHRRAKTDRLDTELLKRAFLGWLRGERDHCKMVAIPTTKDEDAKRPNRERQSLVGEQTRIVNRMKAALIRLGIRGFNPKLKKAAGRLEDLRTPEGEPIPPNTLAELHRDMERRRLVSDQIRQIEKARLERMEQAPGDGPHAMVRLIARVIGVGIETADMLVHEVLSRKLRDRRAVARYAGLTGAPDESGSKRREKGLAKAGNARVRGGMIQLAWRFLLFQKDSALAQWYRTRTEGGRNRKTIIVALARKLLIALWRLVTTGEVPAGVVLRAA

SEQ ID NO: 382422 - protein, 356 aa, unidentified
MKILALDIGKYKTVGCDYEAETGRHSFATVATTPQALHDLLVEREPDRVVIEICSIAGWICDLVRTLEIEIQVANTSDERWSWRKVKQKNDRRDALKAAQLSAVNQLRPVHVPQVEIRQWRALIAYRQQLVRRRTKIKNHIRDLLQREGVILARGRKAWTQLGMTALQELVKPLSESSLNELWRGELGVELAQLKELQQQIAVVEAKLDELGAADARVRLLRTIPGVGPRLAEAIVTMFDDRRRFRGGGEVSAYVGMVPKQFDSGETERSGRITRQGNRLVRSLLVEVAWASLRHNAWARECYQRISGGKKSRKKTAIVAVGRKLLVRCWGMLRHQTPWHWEIKPATPVSAELSVG

SEQ ID NO: 382423 - protein, 351 aa, unidentified
MLIIGCDYHPSVQQIAFVDSETGETGERQLLHKDGEAERFYRDLKLRGISVRVGIEATGHARWFERLLAELGFELWIGDPAQIKAARVRKQKTDRQDAQLLLKLLVEERFPRIWIPSPENRDVRQLLWHRHRLVQMRTRVMNQLQAVAMNEGVRRKKALWSKSGRAQLESFVLSPWASRRRQDLLEVLDRLNPTIDELSTAVEQEAKKRPEVLRLMTHPGVGALTGLAFVLIIGSAERFACGKQIGSYLGLIPCEDSSANRQRLGHISKQGNTLLRFLLVEAAQAAVRGDAEWRRKYVHLAMRRDPRIAKVAMARKLAVSLFWMWRKQWNYEQVIKFGSHAGQSDYVHGVK

SEQ ID NO: 382424 - protein, 309 aa, unidentified
MKPSLSQYIGVDVAKSCLDFDLPAPIDRIANTAAALAAALPGLPPGAHLVCESTGGYENALVAAAQAAGVPISVVPPQRVRSHARSTGRLAKTDRLDARLLSAYGRAHTPAPCRVPEPSRQQLKELVRVRAQLLELKKTEAGWREHPPALPLLQAQAQQREALLDAQLAEVEKAIRALVQSCPGRAELERMQQVQGVGEVTAWTVWAEVPELGQMEPGQPAALVGLAPYARDSGQQRGPRFIQQGRPQVRRVLYMAAVTACQHNPVLKAFYRRLRARGKPAKLALVAVARRLIELLNLLLRNPNFVLAR

SEQ ID NO: 382425 - protein, 400 aa, unidentified
MVVVMLVQAGGLVEKLERRRFGTTTPELEKLAARLQALGVQEAVMESTAQYWKPVWGELEGKIPTLHLAQAFSNRARRGRKDDFRDAERLVRRLVAGEWVLSFVPKPEQRNLRTLTRMQVHLTHDRGRLHNQVECLLEEMRIKVSSVLSDLFGVTGLRLLGALAGGETDPQKLAALAEHRLKCTRQELGAALTGHVQPMHQRLLGLYLERLKLIDQQIDELQHLIAEALEAHQEAVQSLAEVPGLGADSAQPMIAEVGPEAATFPSAGEMASWVGTCPGRNESAEENHRARSAKGNRYARRVLTEAANAAVKTKGSHFQVVFRRLLPRLGYQQAVWAVAHRLCRVVWKILHDKVRYVEQGVNRDPKARAHRARTLARALRQLGYKVELTLLTPAPAPTSP

SEQ ID NO: 382426 - protein, 458 aa, unidentified
MSKRSKKTKSQSFKAPSLPRHLQHINLNAAGVDIGSERHLVAVPEGRDEISVREFGTFTADLEVLAAWLKQCGVTTVAMESTGVYWIPLFELLERRGFEVKLVDARHVKNVSGRKSDVLDCQWIQQLHTYGLLAGAFRPPDEVCVLRSYLRQREMLIQTASMHIQHMQKALQQMNLLLHNVVSDITGLTGMKIIKAILAGERDPRVLAGNRHERCQNDAATIAKSLVGNYREEHLFALRQAVDLYETYQAKIADCDQAIIKQVEKQPDISDDEPPTPEKQVQARDRIRDGVDVRDLLFKKSGVDLFAIPGLAADTLLTLVSEVGFDMKPWKTEKHFASWLGLCPGTKKSGGKVLNNKTKRNPNRATQAFRMAAASLYRSQTALGAFYRRIKSRAGGQQAVTATAHKIARIYYAMLTKGTSYVELGQQAYEQRYKQRRIDHIMTQAKSLGFQLVPCVTS

SEQ ID NO: 382427 - protein, 419 aa, unidentified
MQSQAPAAFAAFVGLDWADAKHEVCLQAAGTAQREFLSLEYSPEEINAWVQTLRTRFNGQPVAVCLELTKGPIVSALRTYDFLVLFPVNPLTVAKYREAFTPSRAKDDPTDAELQVEILLKHRDKLTPLRPQSPTMRALAQLVEHRRRLVGDKVRLTNRLTSALKNYFPQVLHWFPEKDTAIFCDFLSRWPTLQAAQLARRTTLEGFFRAHHVRSTDLIATRIEAIKSARALTTDDGVIAPNVLLVHALVAQLRVTLQAIADFDQAIAQRAQDHPDFPLFDALPGAGAVFAPRLLVAFGEQRERFTSADELQKYAGIAPVTERSGKKSWVHWRLQCPKFLRQTFVEWAAESTRHSFWAQVYYQQQREKGKAHQAAVRALAFKWIRILYRCWQNRTPYDESIYLQALNRRSAPLLHNLAK

SEQ ID NO: 382428 - protein, 340 aa, unidentified
MQVSVVGVDLGKNSCSLLGLDASGRAVLRRRLRRENVVTFLAGLPKCVVAMEACCGAHHMGRALAEAGHEVRLMSPEYVRPYVKAQKNDDRDAEAIAEAATRPTMRFVTLKSEEQLDMQSLHRVRDRLVGERTALMNQIRSLLLERGVVVPQGKAKLAAAMSDLLNGDEKPLPARIRALMADLLEEWRALDERISAFDAEFADAAKANPGAQRLMSIPGVGPLNATALSAAIGDAATFARGRDLAAWLGLVPRQVTTGGKPRLVGITKRGSKYLRKMLIQGARAALPVLRASDTRLGAWLRGLLARAHVNTAAVALAGKMARIAWALLRYGQVYSAAPAA

SEQ ID NO: 382429 - protein, 407 aa, unidentified
MELVALYKRVIGLDIHQAQITACALIEEADSTTRIEQRQFGGFKRDRRALADWVASLRPDDVVMESTGIYWKSPYAALEAVGIRAKVVNARHVKNVPGRKTDVGDAHWLATLARAGLLRASFVPPAMLRELRLIARQRQKLVGQLAAEKNRLHKVLTDSGVRLGVVVSDLHGQSARAMVKAIIAGQAPHEVLKLASRRLQASREELFDALQGDLTASHRFVLDELMQHIEEIEARIARFDARLLAELESERNTLALLQTIPGVDLIGAAMLLVEIGSDMNAFGSADRLASWVGICPGNNESAGKRKSGHTRKGNFYVRRLLCEFAHAASRTRSVFKSKFQALVVRRGYKRAIIAIGHKILRTIFFMLKRREHYRDSATDYEALSVQRNAPRWIKALTKFGFITPAHA

SEQ ID NO: 382430 - protein, 342 aa, unidentified
MEEVTIIGVDLAKNVFQVHGASAGGSVLFRKKLSRPQFARFMADQPPCLVAMEACASAHHWAREMARHGHEVRLIAPHYVKPFLKRQKNDAADAEAIVEAALRPTMRFVEPKSADQQARAVAFRTREQLVKQRTEAVNALRSHLYEFGHVAPEGIGYLPRLAKVVDDPDTDVPELARDICRMLLEQIAQLTARIDALKAQFAAMSQDAEMPRQLQSMPGVGPITALAVETFAPPMGQFRRGRDFAAWLGLVPRQHSTGGKQKLGKTSKMGQRDIRRLLVIGATAVIRWASRRGAPKGSWLARMLERKPVPVVAVALANKMARGIWAMLTRGESYRGPVLIGA

SEQ ID NO: 382431 - protein, 372 aa, unidentified
MTSIIYVGMDVHTTNHTLCCYSMEDDRFFAEVQVEPDAKNILKYLARIEKQQSRDCRIVCGYEAGCLGYSLYHQLYAHGIDCVILAPTTMMTKPGKRIKTDRRDARLISKCLAFHTYSPVYIPTEVDDAVKEYIRMRDDANSALARVKQQIIAFCIRHGKIHDGKSYWTNKHLEWLSSLDLGNKILSEVLQEYLIRYYQLREQVDMYDMRINELAQAEPYRQKVEKLGCFRGIAAHTALSFCVEVGDFRRFATAQQFASYLGLVPGECSSGDKQQYTGITKAGNSHLRKLLVETAQVFGRSATKSGKSVVLKERQAKCDSLTVAYADKANARLKKKYFKIAMRSKVNIAKTAVAREMACFIWGMMTDNISCA

SEQ ID NO: 382432 - protein, 342 aa, unidentified
MQHVAIDLGGKESQVCVRAADGQILHESKIATLRLPQFLRRQAPSRVILESCAEAFRIADAATECRHEVRVVPATLVRSLGVGARRIKTDRRDAQVLSEVSCRIDLPSVHVPTDLARERRSMCGVREELIACRTALINCVRGWARTQLIKLSSGDASTFPARVRKTTLQRPDGLAEYVERALKTIDTLNEQILAADKELERLAEQDPVCQRLMSVPGVGPVTSLRFVAAIDDVARFSTSHAVQSYLGLTPGERSSSERQQRTGITKAGPAPVRRMLVQAAWNLRRFRPADPISLWAAQIEQRRGKFVATVAVARKLAGVLFAIWRDGSRYEPGHLHRSQTTS

SEQ ID NO: 382433 - protein, 462 aa, unidentified
MNEFYLGCDISKGYGDFIIMDSKKNIVESAFQLDETFEGHNELINVLTNFFKSHPNSIIYAGVESTGGLENNWLNLFYKLGNILNIKAARINPVGPFELKKASLERNSTDSISAKYIAQYLMVYPENVRYNEDDPYASLRKQWNLIEMFTKQKTQLLNQLSITIYNAFPFLVQYCKYGVPNWLLQLLSKYPTASKLARAHAETIQKIPYISRTRAQKLINYAKVSIGSADDEVTARIILNLVEHIFNLKETITKLKKQLVKQCDLPEVKILTTFKGIGVHSAIGLVLNIISIERFPSAKHLASYFGIHPVFIESGDRAGGFHMSKRGRAVPRRILFMVTRYAISNNPLIKEVYLRQIKKGKSKMSAIGICMHKITRIIYGMLKNNTEFDPEIDKKNNYRSKQKRNKKIRENAKRRFQKEADDAPISRRKSKNRKKEKQPHPENIENSGVLTSPSSLLGLVGK

SEQ ID NO: 382434 - protein, 316 aa, unidentified
MTTTPVFVGIDVSKDRLDVALRPTSDRWALANDAPGLATLVARLQGLAPTLIVLEATGGLAVPLTGALAAAELPVVVVNPRQVRDFAKATGKLAKTDALDAAVLAQFAEAVRPALRPLPDAATQALSAVLARRRQLIEMLTAEKNRLGSALPPVRPGIRAHISWLERRLADLDADLAQAIRESPVWREKDDLLQSAPGVGPVLATTLLASLPELGTLTRQQIAALVGVAPLNRDSGAWRGKRRVWGGRAHVRAALYMSALVATRFNPALRAFYQRLCAAGKAKKVALTACMRKLLTILNAMLKSRTRWHDHFALSA

SEQ ID NO: 382435 - protein, 371 aa, unidentified
MEVLVFTERTAVGLDVHARSVRAAALDTVTGELVQARLAADTSVIVPWVLGVQERFGVAAAAYEAGPTGFGLARAIEQVGVRCVVAAPSKILRPAGDRIKTDARDAILLARLLRMGELTAVRVPTPAEEAARDLARAREDARTDLMAARHRLSKLLLRHGLVYDKGAWTGVHDVWLRRVRREGLLGAGLGTLTAFDAAYDAAAAIQARKKRLEDAIEEMAATSQFTAVTTRLCCLRGISTLTGFALAVEIGDWDRFTGATIAAYLGLVPSEHSSGESRALGPITKTGNTHARRLLIEAAWHHKGSYRPGKTMKARWAKAPAPAAARGDAGNRRLHHRWQVLAAKNKKHTVANTAIARELAGWCWSLATMDT

SEQ ID NO: 382436 - protein, 348 aa, unidentified
MTLVGCDLHSRKQQVAALDTTTGEVLEQELAHDGDAVERFYRALRPPVTIGIETTGYTQWFHALMHRLGHTVLVGEAGRIRAMVVRKTKTDRRDARHLLDLLKHDRFPTVWMPDPDTRDLRALVAHRVRLVRMRTMVKNGLQAIALNQRLALRSALWTQRGVAQLRGLALPPHTTRRRDDSLELLAWINVRIDQLDAQLAAVVDADPRARRLLTHPGVGPLTALTTVLVLGPVTRFPDGKHVVSYVGLAPAINASADKQHLGKITKQGNALLRWVLGQAAPQAARADDELRRRYFAVLHRRGRPKAKVALARKLLVRLYVMLRDQIDYEEFRRRGRAGQASRAPVTVT

SEQ ID NO: 382437 - protein, 337 aa, unidentified
MDHFAGLDISMDETHICVVDREGVVVYESKTASTAEAIADKLSDAPSCHRIVFETGRMAPILFHGLSQLGLPAVCVESRQAYQALKSLATHKTDRNDARGLAHLARTGFFKPVHVKSLSAHALRSLILARKKLVGQRVTLENQIRGLAVVFGIRLPRALTAAFIDQALKASEGVAGLSAAMRGLIAARTAVMSAVAAIDADMRRMTRASEACRRLMTIPGVGQLTALAFVAAIDDPSRIRRSRDVGAYLGLVPKRYQSGEVDYVGGISKCGDRRVRTLLYEAANVMLTRYNGQLKLKEWAFAIARRSSMRKARIALARRLAIIMHAMLRNGTEFVVA

SEQ ID NO: 382438 - protein, 311 aa, unidentified
MTELTIGVDISKRRLDAACYTSGRQERFANDAAGLKALRRWIGPGRLVARLVYEATGRYHAGLEAAFAGWPLVKVNPLRARRFAEACGTRAKTDAVDARMLARMGAQLALPPDPPASPGARELQALQTARAGLVGDRIALMQRADQARLPLLRRLAARALRLVEAQLAEVEAAIAARIAADRALARRQEILLSIPCVGQHLSATLVVEMPELGAASAKEIAALAGVAPLTRQSGQWTGKARISGGRGDLRRALYMPALNAIRYHPDMRRLYERLTAAGKPAKVAIVAVMRKLLVLANALVAQDRLWEPRPA

SEQ ID NO: 382439 - protein, 343 aa, unidentified
MNVATIGLDLAKHWFQVHGVDAQGQVVIRRKLRRGEVVAFFAALPPCVVGMEACATAHHWSRELSGLGHEVKLMPPAYVKAYVKRNKNDAADAEAICEAVTRPTMRFVPAKTADQQAVLMLHRTRSLLVRQRTMLVNALRAHMAEFGIIAPQGLRHVEDLAAEIAHEQSRLPELARSILQMVVDQLRDTMARVQQIEIQLLRWHKQSPVSRLLATIPDIGVMSATAIAATVTVPSTFRSGRDFAAWLGMTPRQNSSGGKERLGRTSKRGDKYIRSLLVTGAVAVLRHTRTRTTKDAAWVRGLLARRPTKVAAVALANKTARIAWAVMTRGEAYRSKDEIVQAA

SEQ ID NO: 382440 - protein, 355 aa, unidentified
MKYYTSTTEFNCGIDLHARQMYVCVMDRHGKKLVHTNIQDNDFAYFLKLVKPYRHSLTVCCECMFGWYWLADACQDAGLTFVLAHALYLHLIHGGKNKNDRIDSEKIAHLLRSNLIPPSYVYPAAKRPLRALLRQRVFYVWRRAELLSRIHSHQLAHNRVPAKQTRRVRDSWQEALLKAENHPLRQVALQNDLAMIRHFDQQIFQLEEELQRQTKRVACREYALLQTVPGIGEGLGLTILYEIGDIERFPTVKDFLSYCRLVKGTVASAGKIKGLRGAKLGNPYLRWAFGEAAVIAKRDHFRIRPLAQRLEEKMNGNKLKANTVVAIKLARAVFFMLKNKTVFDPDRLVMTLARN

SEQ ID NO: 382441 - protein, 451 aa, unidentified
MSQGNNGLSRGDRNRNARLAALRAAVPRDHAVLGIDLAQSRQAAVLADHDSRVIARWRPRCSPWKLGELLERALRKALAAGFSGVTVACEPTGHRWMVIAQLAAERNIAMVCVQPLVVARAREAEDYTRGKSDDRDAVLIARLAGQLHCYLPEQADQGWARLRHLGARRARLTEDSTACRQQLRDLLEVAWPAVLATAADPLESATWLACVQVALARCDGDLAAVHALGQDAFTAAARAALGAFGAKRICQRIAAAVYAALAGPAGVAAQRHGALERGFQVLGDWQATRGELAEVNARMLGCLEAMGLAGVAGSIPGVSALQVAAILADSGDPSRFRTSRAMVKHAGLAPCENSSGNHAGEACISRRGRPALRLAAWRAVWAALRHNPVYAARHAELTGRANDRLTDQQARAAIAAALIRQIHAIITRRVPWDADIAAGRRRPGQEVTAAA

SEQ ID NO: 382442 - protein, 411 aa, unidentified
MEAAVITAVGIDVSKSKSTVAVRRPGGEIALRPFEVHHTNSDLKKLASTLKKLGGDIRIVMEHTSTYWRPIALTLKEAGFFVSVVNAMLIHDFSDNTIRKLKTDRADALKIANYALAFWDTLPPFNNEEETRLLLKMQSRANERITATATALRNGLIALADQTFPGVNIAFDPNTKNANGHEKWVDFFLRYWHKDCVCQYSMETFTESYRGWCKRKNYKFRTDTAHKIYLLAQDGVATLPKCESTKMLITQACKSLNAVCEAKQSTQLEMQRLAALLPEYEVVMQMEGAGPITGPALMAEIGDVRRFKNKKALVAFAGIDAPPFQSGAFESKSRHVSKRGSPHLRRTIFIVSNIILTRSNPENAVYCFMDKKRSEGKHYYVYTVAGSAKFLRVYYARVTEFLRSQPSSDAC

SEQ ID NO: 382443 - protein, 456 aa, unidentified
MPDSNIVEIDEDESERILTVAASVDVAKASGMVCVRHPHPSIEGRRTSKVWEVASTTNSILALGADLVALGVERVVLESTSDYWRPFFYLLEAAGLSVWLVNARDVKQVTGRPKTDKLDAVWLAKLCERGMLRPSFVPPTEIRVLRDYTRLRTELVEERSRHKQRLEKLLEDALIKLSSVATDLLGVSAREMIEALIAGERDPKALADLARGKLKAKRGALLEALNGRFDDHHADLARLLLDQIDACSDKVDRLTARIETLVAGLPDPQPPGDRELRPMGTSDVPVEVDPDAPRLTTVERLDEVPGIAERAAQIIIAEVGLDMSRFPTPAHLVSWAKLSPQTIQSGPKTKVGKTGKGNRYLKGVLGEVATAAAKTDTFLGERYRRLVRRRGKQRALVAVARSILVIVWHLLNDPDARYVDLGSHYYTSRVDPDRKTRDLVRQLHALGHTVTLTPAA

SEQ ID NO: 382444 - protein, 344 aa, unidentified
MDNHTQYLGFAGVDLAKKVMQIHFVTEDGEITDKSAKRAEFLDFFRNRTKCLIGMEACGASQDWARKLEAMGHEVHLMSPKAVKPFVSGQKNDYNDAIGIYKAMFNGVRRVPVKSTEIRDLQTLRRIRSQVTKDKVKEINHVRGLLAEYGIVMGKSITAFNKGISSALESLKERGDVSPLVAEELQTTVESIETKIERQKRLDREIEQLARGCKNYENFLKTPGVGPFTAAMLCVLLCDPSIFANGRQFAAYIGLAPRSRGSGGKNYVTGIPSKFNCDSESRAVLVECAQAIARCKNKSLWVEEILRRKPKKVALIAIANKLARQVWAMANKGESFKQMAVLTA

SEQ ID NO: 382445 - protein, 408 aa, unidentified
MLKIVYPVCCGIDIHKKFVVACVASTNDKGVTTYQTKRFSIYTKSLNELADWLAVNNCKDVCMESTGKYWHPVWNVLERTCRPVLAHPKYLKAIRGKKTDKKDARWIADVFKHDLVSGSFIPPEIIRQLRDLMRYRSKLTNYTTGEKNRAQNCLTTSNIQLDHVFSDVFGKSATAILNHILENPGEYFDVAPLVDRRCKTPIEEIQLSIDGNISNEQAEKLKIIRYHMDSLELCKANLESAILFLVDPLLPQVNLVSTVPGIKDFSAIAVIAEIGSDMSVFPTAKHLCSWAGLAPQCNESGGKKKSSRVSKAGAYIKPLLIQCSNAVVTSNKHPEIKNRFLAIKKRRGHKKAIVAIARMLLTAIFHILSKSEPYNPALYRNSDVSPVDSIERAVKMLEKRGFTVSKSI

SEQ ID NO: 382446 - protein, 342 aa, unidentified
MEQVTIVGLDLAKRVFQVHGATADGGIAIRKKLSRGQVLAFFADLPPCVVAMEACATAHYWAREIGALGHNVRLVPPAYVKPFVKRQKNDAADAEAIAEAASRPTMRFVEPKSPQQQARAMVFRTRDLFVRQRTQTINALRAHLAEHGLIAPQGMSNLANIRRLIDEAAAEVEPLVVETAHIYLEQIDDLSSRILKLEATLKQEAARTDASSRMMTMPGVGPITAMAIEAFAPSLCVFRRSRDFAAWLGLVPRQHSTGGKQILGRTSKMGQRDIRRLLIIGAMSVIRWATRKGTTPGSWLHSILQRKPRKVAAIALANKMARTLWAMETRKEDYRDPRLTAA

SEQ ID NO: 382447 - protein, 309 aa, unidentified
MEQFVGIDVAKDWLDVHLRPSGQSFAVARDGEALGQLVERLRTLAPQLVVMEATGGYETVVASTLAAAHLPLAVVNPRQIREFARATGKLAKTDRLDAAAIAHFAEAIRPPVRPIADAQALALGELVARRRQVIEMMVAERNRRRRATQPRVLRAIDRHLELLQSELSDLEGDIDGAIRNTPAWQADADLLASVPGIGPATLRTLIAELPELGTLNRRKIAALVGVAPINRDSGTLRGRRTIAGGRASVRSALFMAALVASRANPVIAAHYRKLRAAGKSGKQALTACIRKLIVILNAILRDRKPWQPA

SEQ ID NO: 382448 - protein, 343 aa, unidentified
MQIRSVGIDLGKTTFHLVALGTSGKVLVKKKFSQKQLLAFTANMQTSLIGLEACSGAHFLGRALRQQGHDVRLIAAQFVKPFVKSNKNDYVDAEAIAEAVERKNMRFVPIKTDDQLDLQAIHRVRDRLVSRRTAVINQIRAFLLERGMVFAQKPAKLKAAMADVLENAENALTPMMRNLIGMLWDEWKTVEEQIDELTDSLEQIAANDAGCCRIRKIPGIGPVVATAIVAAIGNGAAFRKGRDFAAWLGLVPRQYSTGGKAKLLGISKRGNIYLRKVLIHGARAAAMRIKRDRFTIGAWMNALEARAPRNVLVVAMANKLARIAWAVLSTGEDYRPAASATAA

SEQ ID NO: 382449 - protein, 393 aa, unidentified
MGMQVKVTHMGLDCHKNFSRVTARDERGRVVWRGRLEHADRPALREELSRWPKVPVVLEGTFGWGWMSDELDEAGQEPHLASSRKVAAWRDARGLAKSNKIDADLLGELWTEKGRWWEIWLAPREVRDQREWLRYRMTLVRLQTGVKNRMHATLHRHGIGQAFSDLFGKKGLAWLERLSGDPTRLRESTRGTLSGYLRLLRQLRRQIADVTRELRRQVRRSPAGEVWRSLPGVSFILAYTILAEVGDVRRFPNGRHLSSYSLLAPLADDSGEEDGPTPIGRHVGHLGRVTLKWAFIQAARRAAVKSAYFKAIFDRRSDGGRRDRQRAYIAVARELCRVGYSCVKNQRSFMEQRPPRPQGQEPRPPAAVEVHRPSRPGVRRARSPLGRCRAILA

SEQ ID NO: 382450 - protein, 357 aa, unidentified
MRQSKELNFKGQNIYIGLDVHLKSWTVTVLSEVSVLKTFSQDPNPDKLYKYLTNNYPGAEYYSVYEAGFCGFWIHHRLTELGIHNIVVNPADVPTMTSERLRKTDAVDSKKLAVGLRAKQLRGIYTPDDEAIEVRSLIRLKSTITKDITRQKNRIKSHLRYLGIDIPQEFTGPSFHWPMRFIDWLRDVSIKTTSGRQALDMHIRRLEDLHSQNLEITREIRELSRTDRFNQIHSLLMTIPGIGRTVSLILMAEIIDIKRFNSSEQLAAYIGMIPMCHSSGEHKGNGNITVRRQAALRSVVVEAAWAAIRQDPALQLCYANNCKRMPPGKAIIKVARKLINRIYFVLKRQQPYVHAVA

SEQ ID NO: 382451 - protein, 492 aa, unidentified
MDETGRMVAAMMAPAVGSEVGHHNGADEPALEFDRAVRSTLDCRHGSLSGPGARLLVFMKRTATPTAQLQLEASMEVLHERCAGLDVHKNTVVACIRVLQDDKIEREVRTFKTMTRDLLALSEWLDGHGVRHVVMEATGVYWKPVWHILSDGEFELVLANAAHVKNVPGRKSDVSDAQWLADLAAHGLIRASFVPDGQTQELRNLVRTRKQLVRERTSHTLRLQKTLEDANVKLDSTISNIIGLSGRRMIEAMVAGESHPETLAGLADRRIKASPEELAEALRGRVTKHHRFLLGLHLGHIDAINAAIDKIDQEIEAGLQPFRDAVELLTTIPGVSDLAAQGIVAEIGLDMSRFPTSGHLISWAGLCPRSDESAGKRRSTRVRKGAAWLKTLLVQCASAASKTKATYLHGQFVRIRARRGHKKAIVAVAASILTAAYHMLSTGTLYHDLGPSHSDRRRKEARARRLLASLRSLGYVANIAPPQAAPAAPVSC

SEQ ID NO: 382452 - protein, 348 aa, unidentified
MAVTIVEAAPTVVGGVDTHLDVHVAAALDGAGALLGVELFPATSAGYRKLLGWLGGFGLVGRVGVEGTGAYGAGLTRFLRGSGVEVIEVDRANRQARRRHGKSDPADAIEAARAAHNGRAQGLAKSRDGNVEAIRALLVAKRSARNTRIKTVNQVRQLTFTAPDELRERMRGLGTVALTVEAAGLRPRPGGDSVLYATKLALQVLGRRALSLDAEAARVDAALAELVAGTAPSLLGVYGVGVDTAAALLVAAGDNPERLRSEPAWAHLCGVAPVPASSGKVTRHRLDRGGNRQANSALWRIVMVRMALDPRTRTYVERRTKEGLSKLEIIRVLKRYVAREVYRQLPRD

SEQ ID NO: 382453 - protein, 370 aa, unidentified
MKNRSTEGKRTRCAAGKPKSCKLTVGLDLGDKTSRYCILDCEGEVLVERSTATTKKGLAQAFASLGASRIALEVGTHSPWVKRLLETWNHEIVVANAHRVKLITASTRKDDRLDARTLARLARIDPQLLSPIRHRSEKAQSHLAMIRARAALVEARSKLISSLRGLTKSFGERLPSCDADQMSVARLAILTPPLQAALQPTVSAVESLTCQIREYDHKIAQVARTDYPETARLRQVTGVGELIALSFVLTIDDPHRFRRSRDVGAYLGLRPKRRDSGESRPQLRITKEGDTYLRKLLVQGAHYILGWRGPDSDLRRWGLKLAAHGGKNAKKRAVIAVARKLAVLLHRLWITDEAYEPLRQSHAATSVVAA

SEQ ID NO: 382454 - protein, 397 aa, unidentified
MIAVGIDISKAKSTVAVIDSDGTVLASPFTMAHTQPEMEAFVTYLKGLGEPTTILMEYTGHYHYPVLKKLQDEGFPVCIVNPYQMKKYGDVEIHKAKTDKKDALRIAAYALEKSYKLVPYSSMEQKYEDLKFLSRQYSQRITYVAKLKVQLIALLDQTMPGITRILPLNSRNPEKCALLLFIKRFKSFDEIQRIGKARFLASYDVLAKKASERSASSKGLSIYELAVDSITTRGENPYIWLSQNQCVDLLSATQNAADEIISQMRNIAETIPEYKVLRAMRGVGDRLGPIILAEIGDIRRFHSGKALNSYAGNDAPPYQSGQFESRNRHISKRGSSTLRKACYEVMQALKLTKPQDDPVYLFMLKKEQEGNPFNVAKMAGVNKFLRIYYARAMELYK

SEQ ID NO: 382455 - protein, 420 aa, unidentified
MKVVYQTCCGIDVHKSFLVATIIKTTSGVQPSYQKKRFSTFNNSILQLKEWLLQNECRDVCMESTGKYWVPVFNLLEDAINVTIANPKWVKAVKGNKDDTKDSKWIGDLFRLGLVPGSYIPCKPIRILREFTRYRYKLTSCRSSEKNRYQNALTVCNVALDSVVSDIFGKSATSVIDYLIEQSDNSINHEEIASRLLRSLKKKSDRVIESIEGYQMTDSQKYRMRLVRAHMDYITSTINDIDTMLDSLIAPYENAVQLLCTIPGVDRNSAITVISEIGIDMAPFSSSKRLCCWAGLAPGSNESAGKKKSVRITRAGVYLKPALVQVAHAAVKSDKSPYYKQKYERIMKRRGKKRAIIAIARMILTAIYQILSTGEVWNPTDLYKIDMPEPLKEKQKEKAIKQAKKLLISEGIIFESQLVS

SEQ ID NO: 382456 - protein, 386 aa, unidentified
MQASNVSTPIAERISTIFVAIELSQKSWLITIHSPDKDRMSRHKLEGGDHASLLALVDRVRERAARALGAVPAVVSCYEAGYDGFWLHRLLTAAGITSHVFDPASIAVEQRARRAKTDRIDGEQLLRTLMAYCRGEPRVVRIVRVPSVEQEDVRRATRERDRLIKEQTAHGNRIKGLLRLLGMAVGNPRRRDWLKWLSAQRDWQGQGVPPQSLAELTREHARLMRVRDQLDELARAPARTQRTPAGTEMAQRAEHLFQLKSLGPAFSTTLVNEAFYKDFRNRRQVAGYFGLAPSPWQSGGTDREQGISKAGNPRARQKAIELAWLWVRHQPDSALTQWFLQRTANASRRIKRIAIVALARKLMVALWRYLTTGLVPEFAVLKTVKA

SEQ ID NO: 382457 - protein, 345 aa, unidentified
MWFCGIDWADEHHDALTIDEQGHRAGSIRITHTPEGLRQLDAYLEEMVGPDHEQMACIVETMLGLLIAHLLEQDWQVYPINPRTVERRHAPSVAKTDTVDAYLLVKTGWADLADLRWLAPDSEKIQELKTLTRDQDTSIQMQTRLVNQLTACLKAYYPVALELFGKLQQPSTLHFLRTYPTPQQACSASVEQLTSTLKQTLYPGAARAAQQIAEQLQQPHLKANEITTRTKSRLMLALLAQLELLMQQIADYDKEIARLFLMHADNELFQALPGAGKRLSPRLLAKVGDDRTRYVAASSLQALAGTSPVLFQSGMYCKAHRHLGCSKPLRNALQQFALLSTHSEP

SEQ ID NO: 382458 - protein, 352 aa, unidentified
MAKSKIDELMSIGIDIGKDTFHIVAFDSEGQLVMRKQIKRLALVATFEKLPRCVVGMEACLSAHFVSRTLRKIGFEPRIIPAIYVKPFIKGQKNDYNDVEAIAEAALRPNLQVVPEKSQEQLDLQALHRVRSRLVSRRTATINQIRAFLIEQGITVRKGLRALKNSFETILKERKDEISSRMRTILIGLYGDWLWLDDRIESVSKEIEQISRTEENCINVMTIPGIGPMISTAMIAAIGTGEAFSRGRDFAAWVGLVPRQYSTGGRTVLDRISKRGSRYLRMLFVQAAKVILMRANRWPDFSFGDWLAQAAERMNRNKLAVALANKLARMAWSILRYKTAFDAPRDEVAIGI

SEQ ID NO: 382459 - protein, 389 aa, unidentified
MKIFVGIDIAKLNHFAAAISSDGEILLEPFKFTNDADGFQLLVSKLESFDKNSIIIGLESTAHYGDNLVRYLVAEFYQVCVLNPIKTCQMRKNNVRKTKTDKVDTFVIAKTLMMQDDLRFITFFDLDMMDLKALGRFRQKTIKQRTRLKIQLTTYVDQVFPEIQYFFKSGLHQNAVYALLKEAPSPKEIASMHMTHLANLLKVNSHGHFTKEQAKELRVLAQKSVGANDSAISIQITQTIQQIELLDSQLEKIEAEMTDIMKFNDSVIMTIPGIGYINGGMILGEIGDMHRFSNPNKLLAFAGLDPSVYQSGNFQAKTTRMSKRGSRVLRYALVNAAWNVVRNNATFKAYYDAKRAEGRSHYNALGHCAGKLVRVIWKMLTDEVEFNLE

SEQ ID NO: 382460 - protein, 387 aa, unidentified
MSPTIAACRPAAVDYERTLILSIEVSNQNWVLAAQVPGLPHTKAKRTVDPEAEALMAAIAGYRSRAAAMGRSIERVIAVYEAGWSGFWLARWLTRHKVEVYVIQPSSVPVDRRMRRAKSDGIDAELLLRTLLAWLRGEPRVCSMVPVPDEADEDARRCIRERTELISERVGLTNRIGAVLATLGVTDYNPLLRNRHHRLSELRTGLGEPLPPNAHAKIARLLARLELVLAQIAELERERDAVVETETPDHASKMIQQLISLRGIGVQSATVLVREAFVRRFANGKALGSYAGLTSSPYSSGGIDREQGIGKGGNRRLRTVMVELAWLWTRYQPAAAQVCWFRERVGSTGRRVRKIMVVALARKLLIALWRFVIDGVVPEGAVLKPTA

SEQ ID NO: 382461 - protein, 350 aa, unidentified
MIIVGCDYHPGFQQIAFVDCETGDCGERRLEHREAAEKFYRELAAQGATVRVGMEASGHARWFERLLAELNFELWIRDATEIARKRERKQKTDRQDAQHILRLLLKDDFPRIWVANWENRDLRQLLWHRHRMVQARTRIMNQLQAVALNEGLRCKKRLWREHGREQLESIRLAPWASRRRRDLLELLDRLNPTIAELSQAIEQEAEKLPEARCLMTHPGVGPLTALAFVLIIGRAERFQCGKQIASYLGLVPLEDSSGNRRRLGHITKQGSSMLRFLMVEAAQVTVRSLPEWRSKYFHLMMRRGRKIAKVAMARRLAIRLYWMWRKGWDYEQVKKFGSHAGKLGTGDGVQ

SEQ ID NO: 382462 - protein, 413 aa, unidentified
MQILHTHCAGLDVHKKVVVATLLVSDEPGQLTKETRSFETMVSGLLALSDWLMRWGVTHVAMESTGEYWKPIYNILEDNFELVLVNAQHIKAVPGRKTDVKDSEWIAELLRYGLLKASFVPPKGQRELRELTRFRSTLIKERANLINRLQKALESANIKLASVVTNIEGVSGRAILAAIIEDKASPEEMAALAKGRLRTKREALEQALAGRVKAHHRFIFQELLTQIDNLDEGIEHFDTEIEAYCRPFEAAIERLDTIPGVARGTAEVIVAEIGVDMRRFPSADHLASWAGVAPGNHESAGKRLSGRTTKGNQALVAALTQAAWAASHTKDTYLSAQYRRLASRRGRKRAMVAVAHTILIIAYHLIQNEKTYEDLGGNYFDQRNPEAIQKRLVRRLEQLGYKVSLDRQMPLVA

SEQ ID NO: 382463 - protein, 376 aa, unidentified
MQAAQIKAYEVNTTLYMAMELSNSHWKLGFGNGMKIRRKSIDARDRQRCLEEVALAKVKLKLPADAPVVCCFEAGRDGHWIYRWLESEGFEVMEIDSSSIETARGRKHVKTDRIDVEKLLDLLIRFHCFGLRKAFRVVRVPSVVAEAGQRLHREDEYLIKQRTRVSNRIKGLLIAQGLKEVSLRGNFASYLDRVRLWDGEGLTAELKAELLRTHAQYEVFDDQIRELAKAYSQELLTDTPLAEKRRRLERLKSLGPKTSRILSAEVFGWRSFANTKQVGAFAGLTPTPSQSGDSDTEQGISKAGNRRVRRVMIELAWLWLRWQPDSELSRWFNYRFAHGGKRMRRIGIVALARKLLIALWRYTEHGVIPQGAVLKG

SEQ ID NO: 382464 - protein, 466 aa, unidentified
MENNYILYVGMDASKGKADAAILKVSDRRSVKPKFLRKKLSFKFVKSEVSSFLETVRSYSDDNCTSICFALEVTGIYSTNVYNFIKANLNDNESIRFLNTDFVNQWRKAHNIAKSDPLDAQTISTIIGTDADVQYVNDNVFENKNGYQDLKALVHRHYQIKKIYSQEINRLIAQCDCLFPELQYVFEPKSAAFIAVLSSYPTTHDIINASKFEVFSVVYEATKHRCSMDKIDKLFDLCRDTLVPDDISSYGRNIILDLVENIKNIKGQLKAIQRYIEDVVSLNPAYKLLLTMTGCGPITAATVIAETGDISRFKNADCFVSYSGASPRNKRSGTSVETMGKISKKGSRYLRHAIYMIAEFARRHNPVLKHQFERIKNGNKKRHKLANIAIANKIARYIYSIMKNKSSFVILHEHIMRLPEETRDTFFNSISLDFPKNTRKQIYQYSDINGEVHKFVYIKSEDTMIV

SEQ ID NO: 382465 - protein, 323 aa, unidentified
MNTLNQNKPTVYAGLDISKATLQLHLQKAHHVLDNDPKGHAALVKKIRAVGGVQIICEATGGYEKGVVAALHAAAQPVSLLNPALVRHFALAQGQRAKNDPIDSQVLTDYGCALRPAPTPPTEPARDEIRALVQWRDHLKEQLTRTRQTSQHGVPPFVARQQKKLVAHLEKQMEQVAEELAQALARAPQIQEQVRQMEQLDGVGLVTAVSVLSHLPELGRLSRQEAAALAGLAPWVRQSGPWEGQRHIGGGRAAVRRALYMAAVALARMKQSALGKFYGRLRAAGKPAKVALTAVMRKLLLQMNRVLKEHALQTHAKPQSQPA

SEQ ID NO: 382466 - protein, 360 aa, unidentified
MDSSKNSDTQFLVWFGLDVSKDSFTAAAYNSLDRKVLCPDEKQFAMDRDGVRCFLKWRRKVVGEIAGGACGISSGIAMEATGSSSAELAELVLKADRLAHVAVCNPCQISHYIRSFTDQKEDHTDAEYIARFGFDRQPEEWRRPPEEVARIRELAMQRNKYVSIRAALTNRGYTLKCKDAVKSNRKVIECLEKEIASLTDRMADIAGSNADIRSEVELMTTVPGIGALSAVVIYGLLGSLRQYTRRQLSALSGLSPSKRQSGKTLNTSRMSKRGPGSLRQLLFLDSTSATGGIRALVELRTRILAQENSTRMRAKCACMRKLLLIARAVVVSGKAFDPNHKSVHPANKIEEIPKKCEKTA

SEQ ID NO: 382467 - protein, 424 aa, unidentified
MNLTQNDRLKQVTSDTLIVGVDVGSQTHFCRAFDWRGFELSRRVFKFSNTGMGFLTFLRWTEELMNKTEMKKVIVGCEPTGCYWLTFQKFLQDHAIQLVTVNPFTVNRSMELDDNSPEKSDLKDPKTIALLVKDGRYSTSYLPSGVYAEIREASVCRDQIMKQHVRLSNQIQGWLQKFFPEYFECYAEWDSTSGLMLLKEAPLPQDILKIGAGGINQIWRDAKVRAAGIKRAQTLVEAAQNSVGLEAGEAARLEIWVLVNDYILKAEQLKRLDEYLEEKVKEVPNVEKLLAIKGVGMSTVIGFIAEVGDIGRFTDPKQIQKLAGLEIVKKSSGKKKGQPRISKRGRRKLRRTMYESARALMTWNPAFQDVFLYYRNRTRKSLGSMQAKIAVACKAIRVFYVVLQTGCDFDEEKFRRDIIRPEAA

SEQ ID NO: 382468 - protein, 326 aa, unidentified
MTQPATAPTRFIGADVGKAEIVIHDTRGNARHTIPNKPKDLAAFAAKADLDATCLVVCEATGGYEDTLLAALLAAECPAHRADARKVKAFIRSYGTLAKTDALDAKALAAYGQERHASLPRWQAPDPARENLQTLVLTRADFVATRTAYRNRLAAPGSTLVHAQLETLITALSEQIEALDEAMARTLSEAAALKRARKALTSIKGIGNTTTIILLALLPELGRLDRRQITSLAGLAPHPNQSGATERYRRTKGGRPEVKQALFLPAQTAARFNPVLKEAYQRLLKAGKPPIVAIVAIMRRLLVIANARLRDAYAEEAKIALAAVAN

SEQ ID NO: 382469 - protein, 411 aa, unidentified
MDVIVERVGALDVHKAQVTACVRVPGERGARAPHLAEFKTTVRGLLALRDWLAAPRVTQVAMEATGEFWKPVWAVLEDDFELLLVNARHVKQVPGRKTDVSDAAWLCQLAEAGLLRASFVPPKPIRALRQLTRYRKAQIAERQREANRLHKALEDTGIKLDCVATDILGVSGRAMLDALVSGTTDPEVLAELARGKLRKKLPALKEALEGRFDSLHALLVGSILAHLDFLDEQIDRLSDAIEQQLRPFAPAVELLRSIPGVERRTAQVIIAEIGTDMSVFPTAGHLASWAGQCPGNHQSAGKRRSGRTRKGSKWLNQALKEASMAALRTNDSYLQALYRRKKSRLGHGRALGAVKHSIICACWHMLTTGELYTDLGGDYYARRDPERQTRRLIAQLERLGHTVTLQEATAA

SEQ ID NO: 382470 - protein, 389 aa, unidentified
MEIFVGIDIAKLNHFAAAISSDGEIILEPFKFTNDADGFQLLVSKLESFDKNSIIIGLESTAHYGDNLVRYLVAEFYQVCVLNPIKTCQMRKNNVRKTKTDKVDTFVIAKTLMMQDDLRFITFFDLDMMDLKALGRFRQKTIKQRTRLKIQLTTYVDQVFPEIQYFFKSGLHQNAVYALLKEAPSPKEIASMHMTHLANLLKVNSHGHFTKEQAKELRVLAQKSVGANDSAISIQITQTIQQIELLDSQLEKIEAEMTDIMKFNDSVIMTIPGIGYINGGMILGEIGDIHRFSNPNKLLAFAGLDPSVYQSGNFQAKTTRMSKRGSRILRYALVNAAWNVVRNNATFKAYYDAKRAEGRSHYNALGHCAGKLVRVIWKMLTDEVEFNLE

SEQ ID NO: 382471 - protein, 414 aa, unidentified
MAEEETISWFAGVDWGSERHQVCLLDARGATVGEREFPHSGEGLAELGDWLLSMASAAGTVAVAIEVPHGPVVDVLIDRGFVVYAINPKQLDRLRDRFSVAGAKDDRRDAYVQADGLRTDRRLFRRLQVADPRLIELRAWSRLAEELGAERVRLSNRMRHQLWRYYPQMQKLTKDLAAPWFLELWAIASTPAKAGRLRKSTVERLLTQHRIRRMDAETVLRILREPAIKVAEGVAEAASIHIRSLVARLRIVNRELREAERKLDELCTAVSEIEQTSGESLQRRDVAILRSMPGIGRINLGTLLSEASGPLSRRDYEGLRTLSGAAPVTKRSGKSLIVVRRYAAHVRLRNTVYHWARVATQRDPRCRARYTALRKRGHSHGRALRGVADRLLALVCVLLQRQTLFDPYFGRPTA

SEQ ID NO: 382472 - protein, 355 aa, unidentified
MDSVKYIGMDVHKESIAIAVRNGAGKIVMECVIETKASMILQFIDGLRGDLQVTFEEGTSAAWLYDLLKPHVTKLVVCDPRKNASMREGHQSDKIDARRLAELLRLKHLHPVYHGEHGLRSLKELVRSYLTITKDLGRVMSRVKAIYRSWAIPCTGKQVYAPRHRAAWLGKIGEPGVRRRAEFYYQQLDALRTVRQQVRRELLAESQKHKAWKLLCQIPSIGPIRAAVLLGILQTPHRFRAKRQLWTYGGVGIETSSSADHHVVEGQLERKKKQVGIRGLNRNYNHDLKNLFKGAAIVAATKPGPFAEFYAELLAKGMRPEMARLTLARKIATIVLIVWKRAVSFDAQHLKPQTA

SEQ ID NO: 382473 - protein, 346 aa, unidentified
MLIVGCDYHPRWQQVAWLDLETGESGEQKLVNGNGEAERWYGQLPVPSLIGLEATGNSQWFIELLQRLGHEVWIGDAAAIRASYVRRQKNDRRDAGHVLKLLQEGRFPRLWVPNAEQRDVRQLLIHRHKLVQIRARVKNGLQHLAMNQGMQKKAQLWSVEGQKALRALPLAGWAQCRRKDLLELLGYLDQQIVPLDMAAKQAAQQHPSARLLLTQPGVGPITALAFVVTIGDVARFRRGKQVASYLGLIPREHSSGGRQRLGSISKQGNCFLRMLLVEAAQSVVRLDDGFRKPYQHRCHSKAKGIAKVAAARKLAVRLYWMLRTQTPYPEIVPIESSPRVPLAGKR

SEQ ID NO: 382474 - protein, 512 aa, unidentified
MQGSRTVASSTPVRISVPDRGPRATRAVLMVLKGGGDDVVTKAPEVILDEANEQIVERVCAIDVAKDSGKVCVRVPAESGSGRRVSKVWDVPARTKAVIELGDHLACQGIEKVTLESTSDYWRIWFYLLEARGLDVQLVNARDVKNVPGRPKTDKLDSMWLAKLTEKGLLRPSFVPPRQIRVLRDYTRLRVDLTAERTRHWQRLEKLLEDALIKITSVASRIDLLSVREMIEALIGGQRNPRVLAGMARGRMRLKHADLVEALTGQFDDHHAELARMLLDQIDALTVQIDTLTERIDVVLADIPVPAPQPEPDPDDHGPGTSDDAEVTAVIRPSHGGAPRPRTAARAVTALDLVDILDEIPGVGRHNAHEIIAEIGLEMTRFPTAGHLVSWAKLCPRTIQSGAKSSAGKTGKGNRYLRAVLGDAAAGAAKTQTFLGDRYRRLIKRRGKLKALVAVARSILVIIWNLLANPGMRYHDLGVDFHTKRMDTERRTRNHIRQLEALGYTVTLTTAA

SEQ ID NO: 382475 - protein, 271 aa, unidentified
MQPIYYIGLDVHKRKISYCVKDSGGKVFAEGSLPATRLDLDLWTKTLPQPWSAAMEATMFTGWIYDHLQPHAAALKVAHPLMLRAIAAAKKKNDRIDASKICDCLRCDFLPESYMASTAIRERRRTLRYRNLLVRQMVQMKIKISALRMEAGVSYNKQRLHKAGYFRELLATHPDIDEGLCSLLRLCRETVVRLGKTESALVRSLERDSLLVERVERLMTIPAVGPITALTWALEVGDVQRFSSIKKAVSYCGLCGAEKNGKHSSRASNVR

SEQ ID NO: 382476 - protein, 413 aa, unidentified
MAYTVAGIDIHKKVVMVVVLQQIAGRAEELARRRFGTATSELHRLTAWLREQGVEEAVMESTAQYWKPVWYELEPHMRLQLAQAFSNRAPRGRKHDFRDAERLVRRLLAEELILSFVPQPEQRAWRMMTRTKVQLARDRVRLHNQLEGLLEEMRIKLSSVLSDLLGVSGLRILRALAGGETDAKKLAALGDDRLHCSQEQLVDALSGTFQPMHQKLLTLYLDRLQLLDKQMAELNEATAEAMREHGEAVARLAEVPGFGADSAQQVIAEVGPQASTFPSAAQLASWVGTNPGRQESAEQNQSSRSAKGNKYVRRILTEAAQAAVKTKGSHFQVVFRRLLPRLGYQQALWAIAHRLCRLVWKILHEKVRYIEQGAQRDPKALKQRLYGMARSLRQLGYNVNLDIEPPDSAPARG

SEQ ID NO: 382477 - protein, 325 aa, unidentified
MEKLYGGIDIHKEKLAGCIMDKDGNITREHIFPSSKKAVERFLCDIPNSGITIAIEACGMWRGTYKILTDMGYSVKLANPKKTHDIACKKKTDRIDAKILADLLRTKYLPEIWIPDEQTLRFRDLTRHKANLTRLKTQVQCKVKSYLLRKGATYSKQWNKKTLAALAKEDQDIQNLINVYTQITEEEKEAMKRIKQIAQQKKDTTMLMTMSGIAEFSSLMILAEIGDIQRFNSPKELVSYAGLCRGIYQSASTERSVRNTAVNKWLKWILYECSGRAIMLDQRFQKYFYSVQKRKGYKTARRASARKMLTIIWYMLTNKEPYRSS

SEQ ID NO: 382478 - protein, 424 aa, unidentified
MAGVVIGIDPHKGSHTAVALDVHEKQLGRLRVRASSRQVDGLLEWASGWPRRRWAIEGARGLGQLLAQQLIASGERVLDVPPKLAARVRLLDSGQINKNDPNDARSVAVAALRAHELPELAAEDQAMVMRVWARRYHDLARLRTQVVCRLHAVVCELVPGGVRKYLRASQATDVLDRIVADSPVAQAKLELARELVADLERIDAQRREAKGRTARAVAATRTSINDVYGVGPIVVGTVLGYVRDIRRFPTRDRFASYNGTAPIEVSSGDRKIYRLSRRGNRQLNHAIHMAAISQIRHHDSGGRAYYEKKIAEGMTGKTALRALKRKISDALYARMIDDARRLAAKDPGGHTGNDSASSAAGSHPETPALRKSHSRATANSKTGTGQRPLRLRPAPDRRRTSRRAAGVQVEPRLGPHRGRRQDRP

SEQ ID NO: 382479 - protein, 322 aa, unidentified
MAMLSFGGIDVSKDRLDIMVLPDEQCSWVSNDAAGWAELVEQLRGSSITAIGVEASGGYERGVVRALLAAGMSVRQINPFKLRQFAKASGTLAKNDRLDARMIASFVAIMPTRPAQRQAPMIEQLAAMLTVRRQLSDHKVATENASRLLEGAMLQRLSRRRIAGLTADIDLLDQRLVEIVTADPALAHRFRLLTSMPGVGAVLACTLIALLPELGQMSRKQVAALVGLAPYDFDSGKLKGRRCIWGGRARVRHVLYMAALSASNWNPGLKAFHDRLEATGKKPKVVIVAVMRKMITTLNAMLRDGTTWVDRYSGRRSASTAR

SEQ ID NO: 382480 - protein, 318 aa, unidentified
MPEKTRVVGLDVAKSKVDACIPSEGLRLAAPSTPEGEADLIAWLRANRVGRAVMEASGGYERRWAEALRAAGVKVRIVDPKRIRHFAKAAGRLAKNDPIDAETIARFAEAFPDGGPQPHDPAREEVDRLVQARSALKDTEDRIKQQREHQPPAVVAQALATIARTIRAELRRLEAVIAARIKANPAFARRAEIIDSFPGLADQSVAGLIAWLPELGRISNEAAAALLGAAPYDDDSGGRKGQRHIKGGRRKLRNLLYVPVMGAATQHNPVLKAYYQRLIAKGKEPKVAIIACMRKLIVILNTMLARDETWNPPSRAAA

SEQ ID NO: 382481 - protein, 345 aa, unidentified
MGYFAGLDVSLEETAICVVDAAGQIVREARVASEPEALVAFFEACGMAMERIGLEACSLAAWLHAGLTQAGLPAICIEARQAKAAMGAMPNKTDRNDARGIAQIMRTGWYRAVHVKSPSCRSWRALLTARRLVLNKRRDVENGVRALLREAGLKLGTPSRKEFSARVRELAGDDPVLAALSESLLSVIEIMTQEVDRLTKRVLDEVKVEPTCRHLMTVPGVGPLTALAFRATIDQPGRFRKSRDVGAHLGLTPRRYQSGETDLQGRISRCGDELARTALYEAAHSLLIRSSKWSALRAWGMNVAKRRGMARARVAVARKLAVILHRMWADGSEFRWGKQATAAAA

SEQ ID NO: 382482 - protein, 375 aa, unidentified
MNNNNTLYVGLDVHKESITVAYAINSEPVELMGKIGTSPTDIQNLCKRLRSKSSQVSIVYEAGPCGYGLYRRLVKSGFDCMVCAPSLIPKKPGVRVKTDRRDAIRLVRSLRAGDLSAVYVPGIEDEAFRDLARAWASARDDLRHARQRLKSFLLVHGVHYVGRADWGPAHRRWLSKYSFESPWRQLAFDEHRRTIEDRQAQCERLESALKEAVTEWRLYPVVEALQAMRGIQFITAVGLISELGDLTRFEHPRQLMSWFGITPSEYSSGGSRHQGSITKAGNSYARKLLVEAAWSYRHPARISPAIQKRQENLPRPVIDRAWDAQLRLCKRYRKLQAKGKNVNITIVAVARELAGFIWDMGRIAMSVAQQPQCHK

SEQ ID NO: 382483 - protein, 382 aa, unidentified
MSSTMNPNFCVGLDVHKDSVTIAVLRNRDPEPMRVDRLPNDHMKLCRHLERLGAEGRVRACYEASGAGYVLQRSLTEWGFSCELAAPSLMPTRPGEHRKTDRRDAIRIAQDFRDGRLVLIHIPTEADERVRDLVRCRETFQREIIKSRHYILKFLRRRGFIYRDGTHWTTRHKNWIRQVLQPGVLAEEDHVVLAEYVALLEYKLGRRDELDRRIETLALTPRFNPVVDRILCFRGFKTQAAMVLATELGDLRRFESPRQLMAYLGLVPGEHSSGDRRRQGAITKAGNARVRHVLIQAAWHYRRRPAVGAALRRRQQEQDPAVIAHAWKCQHRLYKVYHRLANKKPKQVAATAVAREMVGFLWAVLKDLDVTQLQHSEVHRTA

SEQ ID NO: 382484 - protein, 348 aa, unidentified
MAMLADLVDVVIGVDTHKDTHTAAVVTAATGAVVEQATVPATPAGYRQLLQLAGQQPGQRVWAIEGTGGYGAGLTRFLSANHEQVVELDRPKRTARRHGAKSDPIDATRAAREALGRDRLAQPRAAGQRAALAVRLAARRSAVQATTDAQRQLHALVVAAPETFRGRLRNLTTVRLVSTCARLRQRSDWDPEIAATAASLRALARRIQLLEAEIADHTRAITTLVRTWRPDLLTRCGVGPIVAAIVLCAWSHPGRCPSDAAFAMLGGAAPIPASSGQTVRVRLNRSGDRQLNQALHVVVLTRLRYDPATRAYAQRRRAEGKTNREIRRCLVRYVARQLYRLLETTPAL

SEQ ID NO: 382485 - protein, 346 aa, unidentified
MALIDEVDYVVGVDTHMDTHTAAVCDARGRAVSQLQVPATAAGYADLLAWVSAAADGGTVAWAVEGTRHYGLGLARYLSAQGQQVTEIDNTRHVGKRRNGKSDPIDAVRAARELLARPQPGQMRADGDREALRLLMVDRDNVVHSCKTARTVLTSVIVTAPDELREQLRRLTREGRARACASLACPPSADRRIRVLHQTLIRLGQRIVALDQAAADIEAEIAGIVEDLAPGLVAAEHGVGALSAAQILLSWSHAGRIRSEAAFAMLSGTAPVPVSSGRTDRHRLNRLGDRQLNRALHIIAVTRMRDHPPTLAYVQRRRAEGRTDKEIRRCIKRYLARHLYRTLSQA

SEQ ID NO: 382486 - protein, 393 aa, unidentified
MICVGIDVAKDKHDCFILSSEGEVLADVFTIANNAEGFETLLQTIRRCARPEDKIKVGLEATGHYSYNILGFLLDKGLPTYVINPLHTNLYRKSLSLRKTKTDRVDARTIAAMLMSDVDLKSYTDTAYHNEELKSLTRYRFDKVRERAKLKQSVSRLVTILFPELEKLVSSLHMASVYAVLGEFPGAKQIAGAHLTHLKTLLNDASKGHYGRDMATELRNAARCSVGSVMPAKSLELQHTIRLIRELDTEINDIETAIQAIMEEMQSPITTIPGIGIRMGAMILAEIGDFSRFDSPDKILAYAGMSPSTYQSGQLSLSGAYSHMEKRGSRYLRYALYNATKYVCLWDPTFEAYLAKKRAEGKHYNVALSHAAKKLVRLIYAMEKSRRPYNRAA

SEQ ID NO: 382487 - protein, 389 aa, unidentified
MIYVGIDVAKDKHDCCILGSEADKLYPVFTIPNNKAGFDELYEKMFSVTDDKTKIKVGLEATGHYSLNLLGSLIDKGLPTCVINPLHTNLYRKGLSLRKTKTDKVDAHSIAMMLMTDKTLKPYSDTSYHSEELKSLTRYRFDKVQERAKLKSSVARLVNILFPELEKLVPSLHMASVYALLSKLPGASYITECHLTHLKNLLETASKGHYGRDMAITLRNTARGSIGSVIPAKSMELKHTIHLIEVMTEEIDEIEDSIKSIMDTCNSPIMTIPGISYRMGAMILAEIGDFTRFNYADQILAFAGLSPSTYQSGQLDSSYSHMEKRGSRYLRYALFNAAKFVCKWDENFGAYLSKKIGEGKHYNVAIGHATKKLVRTIYRMELTGEAYRR

SEQ ID NO: 382488 - protein, 351 aa, unidentified
MYTLGIDLHKRSSLWILIDEHRTELLKESVLVHPRDISIALKKIHVPLSSIQVAIEPVAGYRWVSQLLEEAGMNVHIAHPRKVELISKSTKKNDTEDARTLANLLQSGFFPEAHKASEEIYKLRLLLRERTFIVRLHTSVKNQLHGVATTQGLHNIKNGNPIHKKGKNSIMKSDNFVLKELHHLNESLEKRIIPFDDKLKEEINNYPTASLLMTIPGVGIVTALTIVAEVDDFSRFSTGKKLARFAGLVPRERSSGGIIKHGSITRQGSAPPRTALVESAMRIRSDNAPELYDFVKRLTPICGAKKARVALARKLLVIMWKMVITSTEYKSKILSFSNTMKVSELEARTDA

SEQ ID NO: 382489 - protein, 369 aa, unidentified
MTDLTLFVGLDVHKKTISVAMVEATAGAEVRFYGTIANTPDTIRGLCKKLTKDGQQLHFCYEAGPCGYGVQRQLSRLGHRCDVVAPALIPRKDGDKVKTDRRDAMMLAQTLRAGQLTAVWVPDEAHEAMRDLVRLRAQAMRDLRKTRQQLLSFLLRHGLVSPYGHWTKMHRRWLGELIFAHPAQHLAHEEMLQRIERAEALCDRLKRAILELVPQWSLAPVVQAIQALRGVSLIVASVIVAEVGCFSRFDSPRQLMAYLGLNPSEHSSGAMIRRGAITKTGNALARTCLVEAAWTYRFPARVTQIIRDRLNGLPEPIRNVAWKAQVRLSARYRKLIAAGKPAPKVVVAIARELVGFIWAIARMVEPKFA

SEQ ID NO: 382490 - protein, 430 aa, unidentified
MTKLSSTPADAVLVAIDMSKHRQEVLIERPEGGRRRRMTVMATKTDYDRLASVLADIGRPIVVGFEATGNYHRTLAHRLLTAGFELRLISSVALARTREALHNGWDKNDSKDAQVILHMLRIGATQRYVDPLAAGINDLQEMSKTHEAISKAKTQTWHRILTHYLPLYFPEIERFAGNSRSDWFLALLERFPTPGSMTALGQEAFTREAWSLVGRKVSKARLINDIYETACASVALPVDEDSVAIAMFRMVIAQARSLIRQRDEIERAAHAMLSENRDYQLLRMIPGIGPINALTILAEAGDLRRFAHHRQFLKFCGLDLATCQSGTFRGRTKLSKYGNARLRRTFWMAAQVAARQRDNSFRDKLGRYMEGPANDPDRRRKAMTALTAKMARVAHAVIKTGTEYRPFLERADTRWKDPSLLCREGATATL

SEQ ID NO: 382491 - protein, 393 aa, unidentified
MPDSSYTIYVGVDWGDTKHRVIVLNAAREPLPDWVVPHTGAGLAAFAARLAELADGDLHRVAVALEVPRGPIVDALLEHGCHAFAINPKQSDRFRDRFRAAGAKDDRRDARVLADALVTDREAFRRLAPEDPVVIHLRELSRVDEELQQEARRLTNRLRAQLHRFYVQPLALCPGADEPWLWALLQLAPTPAAAAHVRQTRLATLLRAHHIRRVTAAELREQLQRPALPVAPGVAEAASSHVALLLPRLQLLHEQRHACARQIERLLQQLAERPDPEDPHRQHRDVTILRSLPGVGRTVAATMLAEASRPLAARDYHALRTQAGVAPITKASGRRHVVLIRSACNYTAVRHRGHSHPRALRGVADRLLAVLIAMLSTGTLYDASCRHALHLVA

SEQ ID NO: 382492 - protein, 400 aa, unidentified
MNAVGIDVSKGKSTVAVIQPFGVVIAEPFDVFHTDSSLKELVRFIKSLSGETKVVMEYTGTYYEPVANALHNAGIFVSVVNPLLIDDYDTNRVRKVKTDKLDALKIASYALDKWIKLRKYEPAETVRKTLQIMNRQCIKLNKILVMQKNSFIALLDCCFPNANTLFTSPHRVSDGHEKWVDFVMKFPHVDSVAKLPLSVFRTKYQSWCKKEHYNYSESKAEQIHAYARTIVSTLPMTDAVRKMVSEAAKHLNSTLEALGTLHSEMDTLATQLPEYETVMNLYGVGKVFCSQLIAEIGDVTKLKSNKSLTALAGIDPPPNQSGKDDPKSRRISKRGSPALRRTLFLIMTIYLQHQPADEPVYQFLDKKRAEGKPYKVYMIAAAHKFLRIYYARAKEVMPKE

SEQ ID NO: 382493 - protein, 343 aa, unidentified
MKRTTVGIDLAKNSFQICQVNRAGQLVSNRPVKRAKFVESIIQLPRSRIAMESCAGAHHWGRTLTRLGHDVVLVPPQHVKPFVRGGKSDPKDALAIIEAANRPALHAVPIKSPDQQDLQTLHRIRQLQVQHATAVANQIRGIAHEYGVCFDVGIHSLLRDLRFALEDGENELTDTARLVLAYRYVDLLMLREQVKRSRDRIVERAKELPAMPRLLEAPTYGDLVASSFLASIGDGRQFQRGRQVSAWLGLVPRQHGTGGTMRLHGITKSGDRYLRTMMLHGSRAVIARARGKDTPIGRWVTPLIERRGHNKAVVALANKMARIGWHIVARGAHYDPAKAFGSR

SEQ ID NO: 382494 - protein, 348 aa, unidentified
MAVYIGVDFHARQQTISYLTTEGGEIQQLVLGHEDPARVRAFYEQFGGQRVIVGFESSGYAAWFEELLEELGCEIWIGHATYIRQYAKRRQKNDRRDADLILELLVSGDFPRIHRYSRATRQMLQQLRYRQRLVKMRTMIVNMLLFMAGSRGHSFRSQLQSKRGQARLAQLPLPEPLAQQRDELLALLAQLDQKIKTIEGWLEQATAGDAAVQRLQTHPGIGLLTSICVRYTLEEVTRFATTRKVSAFAGFDPMEDRSDERRRMGAISKQGSRWLRFFLVEAGQVAMRRDADLARVYQRVSRRGGHGKAKVAVGRRLLVRAFIMLRDEIDYAEFQRRGVAARSSRGSA

SEQ ID NO: 382495 - protein, 357 aa, unidentified
MQKKNTTLNFTGQTFFIGLDVHKKSWNVAIRSNGLLLKIFSINPDANELWKYLTKNYPKGEYRSVYEAGFSGFRSHRELIQKGIHNIVVNAADIPTSSKEKMMKTDPSDSAKLARELENGNLESIYIPDELSQELRSFCRLRYQTMQNQTRVKNRIKSYLAYYGHNLPENHQLVHWSGRFIDHLKTLEFISPLGKDQLEIYIAELLEIRSRHLLVLKTIRKYIKEYKRQDDLELLLSIPGFGYTTALTFLTELIDINRFPRFDQLAGFVGLVPSTRSSGEKDRTIGLSNRFNKYLRTILIEAAWVAVRSDPALVLSFSQLTKRMSKQKAIIRIAKKLLSRMDHVWRNRTKYVFSVVE

SEQ ID NO: 382496 - protein, 392 aa, unidentified
MYIVGIDIGKNHHEASIVSPEGKQIGRSLRFATTHKGADSLMSFIFKNIGNSPCVFGMEATGHYWYPIYSFLKAKGYTIYVINPIQSDSLRKMYIRQTKNDSIDSFLIAEVIRFGQFGTTSMADENILAMRQLCRYRDSVISSRTEIKLRIGTIMEQIFPEYEKQFSSLWVSTSMGILEKYLTPENIENAPIDELFEIIKDKSHNRLTRAKAISIKEAAADTFGIKIAQDAFSFQLKQLIDRMNFLDKQIEALDCQILEYYEKFDCYLHTIPGIGIIGAATILAEIGDISRFKNSSSLIAFAGIDPTVRQSGEFNSTHNHMSKRGSPYLRHAIFLAATTCSFHNSPLNAYYKKKRDQGKHHLTATGAVARKLTSVIYAVLRDSKPYEPKSFC

SEQ ID NO: 382497 - protein, 341 aa, unidentified
MKKFIRTGIDLGKTYFQVHGLESEGGQSISRKMKRSKMREFYQQIEPCRVGMEACGSGHYWARELVAMGHEVVLIPPAYIKPYIKRGKNDAVDAAAICEAMSRPGMRFVPIKSADQQAVLMLHKTREMFVKQRTMSVNALRGHLAEFGIIVAKGIGRVDELLALAQSDTKLPQIAKSTVAGLAQHLEGLDQSIEAVGDEIARAHKQNPTSRLLDEIPGIGVLIASVIASSVPDPSVFKTGRDFAAWLGLTPRQNSSGGKEKLGSITKQGNRYIRKMLVVGATSVMRVAGKRKGALADWINALQARKPKRVAAVALANKLARICWAIMATGEGFRVDTYIKA

SEQ ID NO: 382498 - protein, 455 aa, unidentified
MKLLYRCCAGLDIHRDSVSVCVRRRVRGSSETTIEEAVFGTFTQELERLRTWLKQHRVRQVAMESTGVYWMPVWNVLEGGRSPFTLTLVNPATVRALQGQKTDRIDARRIAEYLQYGLLRGSFIPPKPIRQLRELTRMRVHIQQDRNRVISRIARLLETVNIKLASVATNIVGKSGLAMLRLLASGVRDAEQLADCALRKLRSKMPELILALDGRPDAHSRWMLSELLSKLDWLTEELARVDQRMDNVAAPHTDPLERLATIPGVDRTTALVLLAEFGTDMTQFPTPGHLASWAGLCPGNTESAGKRFSGRTRKGDRYVRRILVQSAWAAARTKDCFLAALFFRIAQRRGLKKAAVAVAHRVLMIAWHIIAEGTVYQERGGDHFDRRNPERTAHKLSRRLEHIGFEVTLVRRQCAAERPRPSVVDPLVCPKCARWRLPRCIHVIRRTAPPNPMSP

SEQ ID NO: 382499 - protein, 362 aa, unidentified
MEKYIGMDIDNKKIICCTVQRNKKEIYQAIKPTIPAMKAFIKVQKSDGSKVHMVYEISGQAGYIYDSLIDCADSITVANPSKMTWIYRTAKKNDRMDARKMAVLLSIGEIPWVHMPSREIRKWRQMILHRKNVVQKVTQIKNRTRALLKSEGFSEPYDKGSWWKKSNRFWMEQLAKEEDNIDCFDLWRMQLSNLLEELYTLECQLKRVTDYLDKYLSQKSESDLLLSIPGVGPRTTEAILAYTDNLNRFDNYKQYCSYFGLTPKLDESGSTRRLGHISKHGPSAVRWVLCESAWKVIRKSKGMREFYERVKSGQDSRKKIAIVAVCRKMLCIMRAMLRDNEKFNEKLVCRICSKNEQRKNVA

SEQ ID NO: 382500 - protein, 442 aa, unidentified
MQTLPLLDPRAAGIDVGSETLHVSIAGDTPKVFGTTTGQLHALRDWLQANGVASVAMEATGVYWLCAYEVLDRAGLRVLVVNGRHVKNLPGRKTDLKDCQWIATLHAHGLLRSGFVPPAHIRRLQDYLRLRADHVTLAASHVQHLQKALERMNVKLHDVISSVMGVSGRKVIRAILEGQRDPAVLLGLCDAQIQKHKAAAVQEALRGTWQAEHLFALKQALALWEVYQEKIAECDREIEQVLRELAGPEPTAGTPKAGKPGGPNTPQIAHLHAMLVRLCGDKDVTVLPGLADHTLLSLVGEVGTDLKRWPTEKHFTAWCGLPPGSKQSGKRRGHTARQRNRAGRLFCLMARSVGRTVDKALGGFYRRLKARRGGLVANQALARKLAALFWRLLVRGTSYVEEGLKKYDRRVVETETRWLRKLARKHGLTLTPNPATQPQVHG

SEQ ID NO: 382501 - protein, 419 aa, unidentified
MTTNSSDTTFIRIIHPVCCGLDVHKKNISACLLTVDEHGKENYEIKEFGTFTDDLETMKKWLTDNNCPIVAMESTGVYWRPVHNVLEGFMEVILVNARHIKNVPGRKTDISDCKWLAGLLKHGLLKGSFIPEKQIRQWRELTRLRRKYTESMADYKRRVHKLFETANIKIDSVISDLFGVTGRNLICLLCNESELSESTIKANSKRGLKEKSEELYRSIQGFFEEHHRFQLIGMMEMIEAIENQIAKITKRMENLTEGHHDLLNRLDEVPGIDQKSAQAIVSELGVTLEEFPSMAHLASWSGLCPGNNESAGKRKSGRTSVRNHPFKTILIEVAWAAVKKKGSYYRVKYFKLKARRGAKKAIVAIAHRISKAIYNIIKHGAVFTDLGENYLTIQTRQREIKNIKKKAGQLGYKLVPCED

SEQ ID NO: 382502 - protein, 330 aa, unidentified
MKTVLAGIDVASQTLAVALERPGRNAKMFEVPNTRVGHRRLLRRLTLSNLPVRVCMEATGVYGFELAWTLHRTQGLEVQVTNPRAVRDFARAWLQRSKTDAIDAQVLLEFARRMPFEPWRPPSLAVLEIRAITRRIEALLRSRTREKNRLHMAERCPEISTTVRQDILQHLKQLDASLRHLKQAALRLVRKDVVLARRFELLVTVRGIAEASALQILAELAPLPSDMTPRQWVAHAGLDPRQYESGSSVAKPARISRIGNNHLRRALFFPAMVSAREEPRVRAFYQHLLVRGKKPMQANVAVMRKLLHAIHGMFTTQTSFCGEKFYSMSA

SEQ ID NO: 382503 - protein, 407 aa, unidentified
MEVLHPRCAGLDVHATSVTACARIASGTSIAYDHLTVPTTTRGLLALDEWLTGHACTHVAMESTGVYWKPVWHVLEDHFTLVLANAMHIRNVPGRKSDVNDATWIADLLAHGLIRGSFVPPAPIQALRDLTRTRRQLVHEMSRHVLRLQKTLEDANLKLTHVISDIVGTSGRAILTALIAGETDPERLVDLTSGRLKAPRATLVDALHGRMTDHHRFMLHLHLTQVDAVQHAIDEVEARIGAALGPFQSAVTLLTTMPGISETTARVLVAEIGTDMTRFPSVGHLISWAGLCPRLDESAGKPRSTRTRQSAPWLKATLVTAAWAASRKRDSYLHAQFLRIMNRRGAKKAIIAVASSMLTAAYFMLRDGAVYEDLGPHHFAHQDKERLTKRLLQRLQQLGVVVKVAAA

SEQ ID NO: 382504 - protein, 381 aa, unidentified
MEILPAPAAPATDMEPATLFVALELSKAKWLVGLHSPTADKISRHTIAGGDAPALLRLIEVARRRAEANLGGEVQVVTCYEAGYDGFWLHRLLLAHGIANQVVDPASLLVNRRARRRKTDRIDLAGLLRTLMAWHRGESQVCSMVRVPSLEQEDQRRRGRERERLVKERVQHLGRIKGLLMTQGIRDFRPARRGWQEGLEALRTGDGQPLPGCLKAEIARECRRLVLVDEMLGELEREREAASDGKAPQQVALLSKLRGIGPISAHLLAEEVFHRDFANRRQVAAYLGLDPSPWQSGQRDHEQGISKAGNRRARHVAIELAWFWLQHQPDSGLSRWFKERVGIAKGRVRRIMVVALARKLIVALWRYLASGTVPEGALMRA

SEQ ID NO: 382505 - protein, 354 aa, unidentified
MRCSTKYVGLDVHQATTVATVRNSSGKIIARSIVPTEDAALLEFFAGMRGAVHVAFEEGTQAQWLHDLLAPRVARVVVCNRRGAPRQGNKGDQVDSAQLSELLRTGQLRSVYHGRADRRDLKELTRTYDNLIEDSVRAMLRMKALFRARAIRTPGRQVYEAETRGRWLDRLPDRGCRFRADTLAAELDLLRQLRRDAKTAMLAVARKDPAYELLCSVPFLGPVRVAQLLATMQTPWRFRTKRNLWAYAGLAVVTHSSADYTIVEGRPVRRRRQPMTRGLNRNHNRVLKNVFKGAANAAVARPGPLKVFYDAMLARGMREELARVTLARKLAAVVLRLWKKGEPYDATKLTMQAA

SEQ ID NO: 382506 - protein, 328 aa, unidentified
MNFKETLGVDISKNEIDAALHQGKEHKVFENNKKGFDNMLKWLDKHISVELNELLICFEHTGVYTRLLVEYLSNKGLHYVLEPSLKIKRSMGLVRGKNDKIDAQRIAEYAYMRRGSIQTTPIEDEVVSKLKDLLTLRDRLVRQKAGHQSTLKEQKKIIKKKDNPILFKAQEQVINYLTKQISKVEKEIKSTIKENQELERIFDLITSVIGVGWIVATNMIVTTNCFKRFEDPRKYACYCGVAPFSHSSGTSIKGRTKVSHLANKRMKALLDLAARSAIVYDPELKKYYTRKVENGKNKRGTINAVRNKIIHRVFSVVRRGTPYVSLQR

SEQ ID NO: 382507 - protein, 576 aa, unidentified
MSSSTSCEAVAIGVGLDTARYGHHATFLREDRQPAAKPLEFLECRDGYQQLEKSLSKLAQQHHEVHFHIRVDAASQYATNLLSFLHRLPWPKTISEGQPTLNKRYREVHFPKRKSDATESHACARFAIVERPQSSASFTPELLALREVASRLEFQVKHSTRNVNRLHNLLSRVFPELATLQNDLQARWVLHLLKKYPTAQRIANARLSSLTAIPRLPVAKGQQVHQAATQSIASESGPIMEEVVRESVRALQASLDAEKRLEKLLIEAFRDLPDERAKQVATIKGIGERTAAVLVAKIGSIDRFPTASHLTSYFGVFPEEKSSGVDREGNPNPSVSKRMSRKGNDLVRKQLWMSAWSAVTFNPAVAALYARLRQRGRRGDVALGHCMKKLVHQVFGVWTSGKPFDANHDAERTCGSSCSEKVVAEKTEAEGRKTGNTPVRKTVTSTSTDIATAKQQVVKPTTPSNNSDGSIDFAYLRSQITMERMLRHLGYFDRLRGNGSQCRGPCPVHGTKRARGRTFSVHLGKDVFQCFHPPCGAAGNVLDLWCAIHHLTPYEGARHLAETFDLELTRTEKRNP

SEQ ID NO: 382508 - protein, 353 aa, unidentified
MPSTLFVGIDISSQSNSVFFIDQDGNNLIKKPFSVSNDIPGADSIISEVISHAKAIDASCVKIGMEATSHYAWHLHLHLASSPDLAPFNPKFFVMNPSVVSGFKKAYTHLPKTDDFDARVIADCVRFGRVNPAPTPDFKYAALQRLTRFRYHLVQTISSEKSRSLNLLYLKFSSYKEDCPFSDVFGSASTSVFDSFTPDEIAVMPMEDLVDFVLSHGNNRLSNPKEIAKTLKSAANRAYRLNPDMCDTVSMTLTMTLENIRFLESQLKKLDKEISKQLNAFRQTLTTIPGIGDVLAAGLVAEIGDVKRFKNECAVAKFACLVWNKYQSGNFSAEDTSSAKKFPSIIIQYMEVY

SEQ ID NO: 382509 - protein, 315 aa, unidentified
MVDVPCFVGIDVAKAQLDIALRPAGERWTVPNDASGIASLVDRLQALHPTLIVLEATGGLERAATAALAAAGLPVVVVNPRQARDFARATGQLAKTDALDARALAHFADVIRPTPRPLPDAQTQELRALLGRRQQLIGMRTAEQNRLAGTSERLTQDIAAHITWLNAGIATLDDDLETMLRASPLWRENDDLLQSAKGIGPVCARTLLLELPELGTLTRQQIAALVGVAPLNCDSGTLRGRRTIWGGRAHVRTVLYMGTLVATRYNPQIKAFYERLLAAGKVKKVALTACMHKLLTILNAMLKHRTPWQPQEVQN

SEQ ID NO: 382510 - protein, 347 aa, unidentified
MNFYNNTHPYYCGIDLHARSLYVCIIDQEGNSCCHKEISAAPDKLKDLLEPYIGNIVVGVECMHCWYWVSDFCDDIGVDFILGHALYMKAIHGGKAKNDKIDSFKIANLMRGGNFPLAYVYPKTMRATRDLLRRRMKIVRHGADLKAHVVNTTSQYNLPPNKVNLKDVRAREQLKKTFSDRSVQKNIDLDIVILDCYAEQLSKVEWYIQQQAKQHNPKHFHLLKSVWGIGPILSLTIIYEIGDIKRFESVQKFASYARLVKCKAESAGKSYGTQGNKIGNAHLKWAFSEAAVLYLRGNKKAQNYLLKLQKRMSKAKALSALAHKMGRCVYFMLKNETVFDESRFLTG

SEQ ID NO: 382511 - protein, 359 aa, unidentified
MWPRLRSVRSPVAPNGLEAREMIVIGLDVHKRSVTAVAVDEAGRPLEERVIPVGSDELLEWAAALDAERLWAVEDCRQLTRWLERQLARASEELVRVPPKLTVPERRAGRTRGKSDPIDALAIARAALREPDLSRPRPDEGVYREIKLLVDHRDDLVDQRRRTQQRLRWHLHQLDPTFEVPLRMLGRASHLERVRRWLARQDKELQVRLARELVSTIGQLNRTIAALDKELEQRTAEIAPALLELPGCAAVTAAKLLAEIGPVDRFKTDAQLARHGGVAPLEASSGRTQRHRLDRGGNRQLNAALYRIAITQARYHAPARDYLERKRSEGKSKREALRCLKRQLVRVVFQTLKTSPALT

SEQ ID NO: 382512 - protein, 353 aa, unidentified
MVYSPNEYDIFIGIDVDQKSFSFTVKNHDTMSNSYKIPANPENLYQHIRNRYNNQRVICAYEVGVTGYHLHDYLTSQNIRCLMVPPQSVPKASNDRTKNNRLDSDRISQHLKNGDMEPIRIPDYDYRELRQLLRSREEYVDLRKVSKQRIKSLLLFAHLHTLLKDTTQYWSYAHIKRIKELPCSPATRKRLDFLLNDLNYSRNQTVIIIKELKSFSDQNASLKRNIHYLRSIPGIGFITAITILASIGDPQRLRNPRELSAFVGLVPSEYSTGERITRGRITHLGSSVLRCLLVEAAWANIAKDARLRQFYDRIRSKHHPQVGARKAIVAVARKLTLIIYRVLKEQREYISNI

SEQ ID NO: 382513 - protein, 485 aa, unidentified
MAAEEKGKDADGLGGAAGAAGGHGGDGAEVSEDQVRVVERAAAIDVAKGSGMACTRVPGSRSGRRLQKVWRVEATYREVTALMDHLRCEGIQRLVLESTSDYWRIWYYLAEAAGLDVWLVNARDVKHLPGRGKSDRADCVWLCKLNERGMLRRSFVPPQPVRDLRMLTRTRSRLAQDQARHQARVEKILEDALLKISVVISDLFGASGRRFLDALVAGERSPRALAALGDKRLKATREQLVEALTGQFRDIHAIEISTHLRILDVINAEISRLDEEIGKQLALVPRTAPACTSCGEIGGGHAPGCDAGGTSLLGLAGRLDEITGVGERNAQVLIAELGTDPSQFPTPGHAAGWARLTSRTRQSGETAKPGRTGKGNPYLRGALGQCVMAVARTDTRLGAMYRRIARRRGKQKAIVAVSRVICEIAWILICDPGARYQELGPDYYTPRTPERQTRDKIREIQRLNPGKKVILVPEDAAVPDAGTAA

SEQ ID NO: 382514 - protein, 383 aa, unidentified
MNYSAIDYHKKNSFISTCNEQGERIAEAKICGNDPSAFARYFARLGEGPGKVVVEACWNWSWLHDVLSELEPIEEVVLAHPYKTRVIAEAQIKSDKLDARILSQLLRTKLIARAHVPSKQTRQRRLLLRQRMFWVRLRTMVRNRVHALLARQHGLTLPQRADLFGSGGMKFLRSVQLEGSEAKLLGQDLEVLEQLELQIKQSEKEIRRQMGQEPEVERLQSIPGVGILLSAVIAAEFDGAERFQSNTKLWAYCGLAPSTRSSDSHTWHGPLLFRCNKWLRWAFIEAAWIGIQHSAYFAAIYQRQLTRGKIPNKAIVVVARRLCEIAWKVLREKRSFSAQPPPRQANPFSRSPSRHSGGAYCKQYRLAPSLSIGDRESNPLPCG

SEQ ID NO: 382515 - protein, 318 aa, unidentified
MLIHYIDIAKRNFVIAVSSLSKTKTETNNPKGIAHTIEYLKKHKVALVVTESTGGLEIPAAKAIRRAGIAVIIANPRQTHQFAQSQPLTKTDAKDAKMPAFFAQMTAQKEDSQTMPYQPPTEAEEVLEALVNRRNQSADMRTAEKNRLHQVHETQVGSVKQLIAHFDRLIDESDKQIDDHTHTHFDGKAQVAEQIKGIGSITTATLMAMLPELGRLSHKRIASLVGIAPHPRESGETKFKSRCFGGRSAVLKALYMATVAATRFEPLIRDFHQRPLSEGKPYKVAVTACMRKLLTISNARMRDYFAENDTAENGIRTA

SEQ ID NO: 382516 - protein, 457 aa, unidentified
MYRELDSLRQALREELKGTLPPLLGVEPDKMLETYLNQLTLYVGLDVADQTVTLLAMNANQEEVGHLLDAPNTPDGYGQIGDWLENLRRQHHLRIIAVACETTGVFYWGVWDFLAQRPNVVRVLFNPRTTEHMGEVLSKRVRTELVDALLLAEQLRLGSTPEVVLTENVELLSARLCSRAARDAAQAINRKKNQLRSLVRGYNPVISQVFPGQKFHHPAVYAVLQQHVFPDEFVAVGVTALTTLLTEHSRSAFSAEQAQKLVDLCRGYLTRPIRREIVRQRVQDLIEEITLTRKHQQAMLKVGYALIKDRPEAKVLKASTGAGISNTLALVSEIGDIKRFPDGEHAASFLGLTTSKHISGTSIYHSKHITKQGSPNGRYAAVNMALHLAVRVPKYQAMYKTIKSRKPPRKGHFVALVAIARDFVTNVLYDMWRYNRPFFIKVEDYRQYRKENPHDKT

SEQ ID NO: 382517 - protein, 445 aa, unidentified
MSDASTAAPLEPEWAAFAAIDWADQKNFWRLLPAGSGRSEAGELENTPEAVEAWAAGLQQRFGGRPIAVILEQSRGALVYMLTKYPHLVLFPVHPTTAARYRETFAPSGAKSDPGDTDSLLDLLLRHRERLRPLQPDTVETRLSHFLVEERRQTVDDKTRQGHRLTDCLKLYFPQILRWFDDVTSPVVGALLERWPNLEQLQRAHPGTLRKFFQQHNCRSAEKTEERIAAIYQATPATQDPAVLEACALIASGLVAELATLRTSVAAFDKRIAELVAAHPDTAIFGSLPGAGAVLVPRLIVAFGTCRDRYQDAHEMQCYSGIAPVTQASGDSEWVHFRFACPKFLRQTFHEFAGCSIAQSEWAKAYYDHQRNDQNKEHHAAIRSLAFKWIRIIFRCWKDGKPYDEEIYMQSLRRRGSLLVDALGPATGAGWKSVAGFQKLSANKT

SEQ ID NO: 382518 - protein, 361 aa, unidentified
MRIIGCDLHARQQTLAMLDTETGEVVNLTLMHEGNQVREFYSQLLRPVLVGIEATGSMQWFLNLMEELGIECRVGHPATIRAAAPRRQKNDRLDADLILRLLAEDRFPAIWLPSKELLDLRALLLHRHQWVRIRTRIQNALQAIALANGLRRGPSLWSYDGQAQIAFLPLPPHASYRRSALQAMYKKMEEEIKPLTQQVAEQASQRSDAQLLMTHPGVGPVTALATEVFLGDPERFADGKALSSYVGLIPGERSSGRRQRLGKITKQGSPLLRFLWNEAGVHAVRHDPELKRFYRRKLVQKGLGKARVAVARKLGIRLWIMLRDKIAYQEFCRRGQKQQSGAACAGMPETGYGANRHRPID

SEQ ID NO: 382519 - protein, 348 aa, unidentified
MERMLERCAGLDVHKKTVTACVRVPGTHGDRTQHVRTFDTTTAGLLVLRDWLAAHAVTHVAMESTGVYWRPVYYVLEDAFACILANAAQIAQVPGRKTDVKDCVWIAQLLEHGLIRASFVPPAPIRELRDLTRYRKVLIQERTRHANRLHKVLEDAGIKLTSVASRLLGVSGRAMLDALVAGTTDPEVLADLARGRLRQKLPALRQALVGRFRSHHAFLVSQLLAHVDYLDEAIQTVGGHIDEVMVPFTDELARLDTIRGINKRTAEVIIAEIGVDMTVFPTAKHLASWAGLCPGNNESAGKHRSGKTRPANRWLRAALIEAALAASTRAAPGAFAARYRRIMPHRGH

SEQ ID NO: 382520 - protein, 379 aa, unidentified
MKKHSTLFIGLDTHKDSIAVAYATDSRTEPVTYLGAIGTQHYAIRKMVRQFESRHPGCQLQFVYEAGPCGYWLYRLLSSWDYPCFVVAPSLIPKKPGQQVKTDKRDCMQLAQLLRNGDLDPIYVPEPEDEAIRDLSRARETAMWDLKNAKSQLKAFLLRHDIRYTGSANWSAAHIRWLSELVMPTPAQNTVFREMLYTIVERHKRLERLDNELTYQVRRWRFYPLVKAVQALRGVQLLVATSVVAELGDLQRFDNPRKLMAYVGLTPSERSSGSRRRIGPLTCAGNKRARRMLIEAAHAYRYPAKTSKILQLRQEDLPKVIVEKAWDAQVRLCRRYRTLMQRGKHRNVVVAAIARELVGHIWAIAREVVIAKPDPRLML

SEQ ID NO: 382521 - protein, 364 aa, unidentified
MNYRTSIGLDVHARSIKAAAFIPETGEIVEKGFAYDPAQLLSWVETLPKPAQAVYESGPTGFDLARALNKQGLSCKVGAVSKMFKASGDRIKTDRRDAIFLARMLAVGNVVEVFIPSLALEAARDLSRAREDTRKDLMRARHLLSKFLLRKGIAYDKGKTAWTKAHKAWLGSLAFDYEEERLVFASYTEGVAFFECRKASLDKEIARRAALPEYAPLVDALCCLRGVSTVTAFAIATEIGDFMRFPGAKGFMSYLGLVPSEYSTGENIVRGAITRTGNIHLRTLCVESSWHHKRTYRPLSQTSMTAFGKVPGDVVLVAQKANRRLHERYCYLLSRNKKPAVANVAIARELAGFIWAIGRLVQGS

SEQ ID NO: 382522 - protein, 402 aa, unidentified
MNSVGIDISKGRSTVAVMRPFGEVVISPFEVRHTDSELSELAKQLKSLNGETRVVMEATGNYHAPVAKLLHDAGLYVSVVNAKLVHGYGNNDLRRVKTDKKDSVKLANYGLDRWLTLPRYVPEEDTRLLLKNCYRQYRQYSKVQTVLKNNLISLLDTVFPNVNRLFSSPIRGDGSEKWVDFVAEFWHCRCVSEKSEKAFTSKYQRWCRKHGYNFSEDKALDIYASACRHFGVIPKTDTAKLLVEQAISQLQTTSSALAALKQEMQSLAASLPEYPVVMGMFGVGPTLGPQLLAEIGDVRRFHSKKALVAFAGIDAPPYQSGQIDVRSRSISKRGSASLRRTLFLVMSVILQCAPIDEPVYQFMDKKRSEGKPYRVYMMASANKFLRIYYASVKAYLESLEHD

SEQ ID NO: 382523 - protein, 320 aa, unidentified
MTILDSQVVVGVDVAKDEIVVYRCDEESTLIVANERSALKRWLKLLPDNCALALEATNTYHLDTAEIAHELGHDVYVIDGSRLNKYRDGIGVRAKTDALDAVLLARYLGKESDKLRVWSPPPKAYTQLKSLLRRRAELVRHRVAIKQSWRDEPLLEEALGEYLRCVEQIEKGIQKALKNIVSEAGMDAQVKRCQAVEGIGVLTATAAVTAFMRGEFSDSDGFIAFLGMDPRVRQSGKKDQRRYLSKRGDSEFRRLFHNSAMAASRSPTWRPFYQRYLDRGLKGTQALVILARKLARVVFALMKNQSEYQPNSMFGGSPQT

SEQ ID NO: 382524 - protein, 458 aa, unidentified
MSKKSHNKRSNRKIVSLEALKQINLNAAGLDIGDQEIWAAIPEGRLDTSVREFPTFTADLHALADWLEAAQVDTVAMESTGIYWIPTFEILEARGFEVLIVNARHIKNVPGKKSDILDCQWIQQLHTYGLLRGSFIPTPEIRSLRAYIRHRDNLIKMRATHIQHIQKALQLMNIKLTSVISDITGLTGMSIIKAILNGERNPNVLAQFRHGKCAKSEEEIAKSLHGNFSPEHLFSLQQMVQMYEFYNHQIQACDDQILAQFSVFKPQVDLDEHSLPKPKHSGKRSRNQPIFDLRSELYKMTGVDLTSIDGIHVLTAQTVISEIGLDMSRWPTVKHFTSWLGLCPHNDISGGKVNKRFSKKTKNRAAQALRNAARALSHSQSSLGSYYRRMRARKGVMKANVATAHKLARIIYFMLKNKTPYYDPGVQAYEAKQNAYRLKQLRRQAARLGMKLEPIAAA

SEQ ID NO: 382525 - protein, 325 aa, unidentified
MTHSDENINKEFIGVDIAKDKYDVRYCDDSTRIFPNNKTGHKSFIKSLAKTDNPLIAMEPTGGYEQSLIFALQDAGHDTVLTNGFRVKNYAKAMGYFAKNDKIDSLVIRDFAKEMYPKGKLQILMEKSANFRKLEQWLNRRAQVVKILISEKQRHEKCTQKELKTLIKKSIAFHEKEQKLIDKKIEELSQKEELINRAAKFKEVMGIGNVCANALVIYLPELGHYSNKVISAMVGTAPFCKESGKYKGKSKIKGGRNKLRSILYMGILAATSHNTIIKKFYDRLIKRGKHHNVAMIACMRKLLCILNAMERNNTHWDDDYCSANN

SEQ ID NO: 382526 - protein, 387 aa, unidentified
MSPTIAARRPAAVDYERTLILSIEVSNQSWVLAAQVPGLPHTKAKRTVDPEAEALMAAIAGYRSRAAAMGRSIGRVIAVYEAGWSGFWLARWLTRHNVEVYVIQPSSVPVDRRMRRAKSDGIDAELLLRTLLAWLRGEPRVCSMVPVPDEADEDARRCIRERTELISERVGLTNRIGAVLATLGVTDYNPLLRNRHHRLAELRTGLGEPLPPNAHAKIARLLARLELVLAQIAELERERDAVVETETPDHASKMIQQLISLRGIGVQSATVLVREAFVRRFANGKALGSYAGLTSSPYSSGGIDREQGIGKGGNRRLRTVMVELAWLWTRYQPAAAQVCWFRERVGSTGRRVRKIMVVALARKLLIALWRFVIDGVVPEGAVLKPTA

SEQ ID NO: 382527 - protein, 325 aa, unidentified
MDDTGRIVREAKVASEPDALLTVLTNPAYRFKRIGLEAGPLSQWLFSTLAEAGLPVICVETRHMRAALKAQINKTDRNDARGIAQMMRVGLYRPVHVKTVRSQKLRMLLTHRKLLQSKAIAIENDLRATLRNFGLKVGVVGTVKFEARIKELVENLPDLVVLIEPLLIVRRVLREQIAILHRRLLVIVRDDDVCRRLMTVPGVGPVVALTYRATVDVPARFRNSKAVGAVFGLTPSKYQSGESDRTGRISLCGDEMMRMMLYEAALTMLVRSAKWSWLKAWAMQIARRRGMKKAVVALARRLAVILHRIWVDGTEFRWTREAAAA

SEQ ID NO: 382528 - protein, 342 aa, unidentified
MYYIGLDVHKKTISYCVKDAAGKIHQEGKIGSTRRELDAWIKTLPQPRMIAMEATIFTGWIYDHLLPHAEKVKVAHPLMLRAIAAAKRKNDKIDASKIADCLRCDFLPECYMTSTEIRDRRRTLRYRGLLVKQMVQMKNRISGLLMETGASFNKQRLHKVGYFTELMSGNEEIDCVRPLLKLSRETINRSQKLDYALVSSLERDPLLSERLERLRTVPGVGPITALTWVLEIGDVARFQSIKNAISYCGLCGAEKRSADKVVRTPISKQRNKHIQQVLVEAAKLAPRYSHELSLIYEKEKQRGNRNRATLAVARKMVAWMVAVERRKQDFVPAEKRGGTVAA

SEQ ID NO: 382529 - protein, 340 aa, unidentified
MRELYAGSDLHGNNNLLGIVDGQGKKIFKKSLPNDPLLIGEVLKPFKEEIVGVVVESTYNWYWLVDALMDEGYKVHLANPSAIQQYSGLKHADDKHDAFWLAEMLRLGILPEGYIYPKEERPIRDLLRKRGHLVRLRTSLVISLQNILSRNLGRKVNVNDVKALREDRITPLLEGSEDLALAGRVSKEVIDDLTHQIYRIEEWVRKRIALKEAYRYLLTLPGVGKILSLTIMLETGPISRFATVGNYASYCRKVPSQWMSNGKRKGSGNRKNGNKYLAWAYSEASEFARRLYPEPRAYYNRKMQKTNAAVAHSALAHKLSRAGYYLMRDQVPFRPEKLFG

SEQ ID NO: 382530 - protein, 425 aa, unidentified
MTYRIAGIDVHKKMLAVVVADVAGEGEFQFQRLLFSTTPEQLKALAQWCVDHEVQEVVMESTAQYWKPVWETLERYWQPVGRKQTGASPMTGSLHLAQAQSNRARGGRKNDFVDAERLVRRYVAQELVLSFVPSADQRLWRTVTRQKQQRVGARVRLRNQMEAFLEEAHIKLSSLVSDLLGQSGRRMLEALGEGKTDPQEIALQADRRLRATQAQLCDALSAARELNPVYRKLLKQSLEELGLLDRQIQELDREIARLLAQHEDAVQRLAEVPGLEPDSAQQIIAEVGPAAAVFPTAKNLASWVGVCPGDNISAGESHSTKSPKGNRNMRRILNQAAHAAVKAKGSIFEVMFQRLRRSLCYKEAIWAIAHRLCRLIWVLLHKTVRYEERGPTVSAASKRVRTSRMMRELRRMGYRVDPPTELQDA

SEQ ID NO: 382531 - protein, 432 aa, unidentified
MLNRQKCIFIGVDTHKFTHTAVIVNCWGDKLGAITFENKPSAFMSLLEEVKKHTKRGFKAVYGLEDCGGVGRALAVFLLQNEKTVKEVLPSLANIERKGLPIYHKDDHFDALCIARVMLNRLNDLRDASPNDLYWTINQLCMRRESLVKTSSILKRQLHVHISIHYPSYSKFFSEIDGKTAMAFWEKYPSKASLKNATLEELFELLSTQSHNFFPIAKAGEILEMVESDGTLEVPEFQHLRDFIVTGIVKEIKYIEEEIASVDAKLKTIVDGLDFKLKSMNGIDTVIAANLIGEIGDIRRFPTPDKLAKYSGVSPITYSSAQKERQYKSRQGNRRLYGLFHLVAIQQIMTDRNTNKPRNPVFYEYYKKKISEGKTSGQAVVCIARRLVNIVWGMMMNKTEYIMPTVETPTPERKKEIYTYSGRKAIPNLKPK

SEQ ID NO: 382532 - protein, 317 aa, unidentified
MTQTNITTAGIDTSKLKLDIAVHGRTERWQVANALSGWRILATNLINAAVVRVGIEATGGYERGVVAHLRAAGFTVLVLQPIQVKAYARVHLRRAKNDALDAVLIAACAAAVDQPRIAPDPRLAELAGDLTFLEQIEEDIARFKVRLEHVDEPRLRRIVTSDIARLKARRTAQMRTIAKHLRDHDDLAQRLDLVLSIPGIGERTALALIIRMPELGQISREEAAALAGLAPFDDDSGLRRGQRHIAGGRGRLRRSLFAAALPAAFRWNAALIALYTRLTARGKPHNSALIACARKLLIYANTVVQRGTPWTEKPAML

SEQ ID NO: 382533 - protein, 326 aa, unidentified
MQNSLIFIGIDISKLTLDICALEKDDVKHYQIQNHTPSILLFFKKAIFKNSLICFENTGKYGWELINVLSKLKLTFYQVNALHLKRSIGLVRGKDDSIDAHRIAQFIQKNYKETPAYQPKDKEVERIQILISKRNLLVKQRSQHKALKKENKLLNNLGLPSLDKQTDKIIDLLNKQILEIENLIDQIIEQNDELLKNHKIVTSIPGVGKIVSWNMIVKTNAYEKISNPRKFACYAGIAPFSQRSGTSVNRKAKVSHLADKTIKKLLHMAAMRAIQLDNDLRDYYIRKVEEGKNKMSVINAIRNKLVHRIFAMVKDQKLYDFNLQMS

SEQ ID NO: 382534 - protein, 367 aa, unidentified
MRKHNTAKESAATRKRAKRKLTVGIDLGDRSSRYCILDEQGEVLAEGSVATTKRGFAQIFGSKPRSRLALEVGTHSPWVSRYLSDLGHEVIVANPRRVRLITDSTRKDDRLDAKTLARLARIDPELLSPIRHRSAQAQADLMVIRARAVLVEARTMLVNAARGLTKSYGERLGSCGTGQIREELAMSLSEPLQNALKPLLGEVESVSERIRAYDEQIENIAKSRYPETALLQQVHGVGTLTALTYVLTVDDPHRFRRSRDAGAYFGLRPRRRESGDSRPQLRITKEGDAYMRKLLVQCAHHILGPLGPDSDLRRWGLELAAHGGKNAKKRALVAVARKLAVLLHKLWVTGEVYEPLHVRKGSKAVAA

SEQ ID NO: 382535 - protein, 363 aa, unidentified
MIIIGCDYHPGFQQIAFVDTETGDCGEQRLEHSEAGRKFYRDLATQGMKVRVGMEASGHARWFERLLAELKFELWIGDAAEIRARRVRKHKTDRQDAQHILQLLVEDRFPQIWVPSGENRDLRQLLWHRHRMVQARTRIMNQLQAVALNEGLRCKKKLWREHGREQLESFRLAPWASRRREDLLKLLDQLNPTIAELTHAIEQEAEKCPEARRLMTHPGVGALTALAFVLIIGRAERFQCGKQIACYLGLVPVEDSSGERRRLGHITKQGNSLLRFLLVEAAQVTVRTIPQWRSKYFHLAMRRGRKIAKVAMARKLAVRLFWMMRQEWNYEQVQKFGSHAGQPENRHGVPENTELLTGASRSS

SEQ ID NO: 382536 - protein, 342 aa, unidentified
MTQFTFFVGVDIASVAFMACVGTAPWKLTLKPVKFDNEEDGFASFLNWLTNNNLPPEKTVVCMEATGVYSEGLAYFLFASGYTVAVEPPLNIQRKFPANASKTDELDCQYIAEYACRYVDKLAFWKPRADLLEKVKVLLTTRQHFSVQLTGHKNALIAVNRKKVTSELAQQVHQAMIQQINQHIKAIDQEIRRLIDDDPTFKQTFLLLMSVPGIGLQLAAHLLIHMQETLDPKVLAAFIGICPIKHESGTSVYSAPTSRHYGPPVMRKLLYLGACSVRTHKKQFQLYFFRKVAEGKHKKVVLNNIENKILKIACAVVRSQKPYIPNYVSVNPLVFQKTLTLS

SEQ ID NO: 382537 - protein, 365 aa, unidentified
MNATAALPVVGIDVANSVFQLAVADGAWHVTEEHRLTRTQMERWFANRSVGLVVMEACGSAHHWGRWLNALGIEVRLLPALYVRAYVKRNKTDAADACALLQAARCADIVPVKVKSIEQQALQGLHRTRSLWMGTRTSRINALRGFCREFGIVIAQGARLGVERIARVLADPHSAVPELIRGTMKLLIEEIRLLEARIAQLERELTLVARASGACTRLLTIPGVGLLTATAMVAATSGSVQHFRDARHFASWFGLTPKERSSGNVRHLGRISKRGDRYLRMLLTHGARSVLNAAGRAVQIGKNVDALRHWALAVQARANHNKAICALANKLARICYATLRDAQPYGEPVRRPNKKIERSSFPIAA

SEQ ID NO: 382538 - protein, 356 aa, unidentified
MSSHQVRQLPANLTVGLDLGDTTSRVYALDAQGHRVAEATIPTTRPGIRRYFGQGQRWCVVLEVGTHSPWVSRELAALGHDVVVANPSAVYGKRRRRKRNDRLDAEFLARQGRADRKLLYPIQHRGEAAQQHLEVVRARDQIVQTRTKLVNHVRGAVKAMGSRLRSCSADAFAKRAAAELPEALRPALTPLLEVIADLTRRIAAFDRQITALITAHYPIAQHLQQPAGVGDLTALTYVLVVEDPTRFRKSRDVGPYVGLVPRLDESSESQPQLRITKAGDSLCRRLLVSAAQYIMGPFGPPCDLRRHGEGIARRGGKNAKKRAVVAVARKLAVLLHQLWVSGAVYDPDYLLTRRAA

SEQ ID NO: 382539 - protein, 478 aa, unidentified
MARKEQTQPHLKAVPMLLHESLYVGVDVGKRRHVAGFVSQTLLQRYERFEACPALAFEQSREGFRTLIDRIRELVPLEQAYLLLESTGHYHRALVQYLQELDIPVYIMPVQKRPVGLIKTDKRDALGLANQLYNQLELGVQLADKTHLVRRLLPASESALQLKGWMRHRYELMHESTQRKNKLTAICDELFPELTWVLKDPNGTAALKLREHFPTPHAIATTPLTALAQHRVSSHPSMEQLVELQRLASQTIGTKDIVRQRGLVLEQQQLIRELRMLQEHVQQLDVEIVKLVEQSREGQILTSMPAIGPIAAAAIMAAIGNVLNFENGATLKAYFGWAPKREQSGTTLDRDQLARTGTRTMKQTMFLVVANAIQRKECEWAKLYERLVPRMCSYDERKRAYRGKLKVLVRIAGQMTEMIYALLKQDAEILSKVPPGQEPPPPILYDPELHRRHRNGEYRPLKHTPPQRKVLRLPERTT

SEQ ID NO: 382540 - protein, 410 aa, unidentified
MDVVVDRVAGLDVGKASVTVCVRTPGSGRSRNSETRTYSTMTAHLQSMADWLVECGVTLAAMESTATYWKPVFYCLEEHVETWLLNAAHIKAVPGRKSDVRDAEWIARLVEHGLVAPSFVPPPEIRRLRNLTRYRVQLMGDRTREAVRVEKLLEDASIKLSVVVSNITSASARDMLTALVAGERDPVVMADLARNKLRWKMPQLTESLVGRFDDHHALLIGGMLQRLAQVEASLKDCDAQIAAEIAPWAHQMELLQTIPGVGVKTAQVLIAETGADMSQFHSAAHLAAWAGLAPAVHESAGRTWSMGTRRGNKWVASMLVESAHSAARMKNTYLAAQYRQIAARRGAKRAAGAVAHSILVSAFHMLDRDEPYRDLGPDWFTRDIDPAVRTRRLVTQLERLGHTVTLAPAS

SEQ ID NO: 382541 - protein, 332 aa, unidentified
MEFTSFVGIDISKLTIDVALLDVDGKHQGVKKFTNSKDGFERMFAWLKSQSVLKECLFCLEHTGIYCLPICVFFEEVKLAYSLQPGLQIKRSMGIQRGKNDKADAQVIGKYAYLNRKDIQLYKLPSKIILKLKQLVSYRERLVKTKVALKTSSKELKAFSDKDLHELIVTDSTKHIEQINSSIATIDKTLRQLIAEDKELDRLFELASSVKGVGLQIATNMLVITHGFTRFKNWRKFSCYCGLAPFEYSSGTSIKRKTKVSHLGNKKIKAMIGNGTASAIQNDPEIAAYYKRKIAEGKHKMVVMNAIKNKLISRVFAVIKRGTPFVPLYQHA

SEQ ID NO: 382542 - protein, 421 aa, unidentified
MLPFAALTHYAGFDWAQEHHDVCVVDQAGRRCAAFRLAESAEGWADFRKRCREFPALGVAVETSRGWVIERLLEAQVTVYAVPPQKTADFCGRHSTSGAKDDARAAFALADALRVDGTHWRALAPEDPLTMELRLLCRDEVTLIEQRSAFVNQLRAALHEYYPTALAAFDDWTVPSAWQFLSAFPTPQALAQGGKRKWEKFLHAHRLARPEPYARRLALFARATELCGGAAVTAAKCLLAASLVKLLQTLDAQLKTYRERIAALFRKHPDHFIFESLPHAGEKLAPRLLSELGEERGRHPAASSLQCYAGTAPVTERSGRKCWVHFRQGCNKHLRHAVHLWTSLWITERNWGQVYYHRHRELGCSHADALRRLGNRLLKILWKMWQARTAYDAEVHQRNQLKHGSWVLQLKTETQTVKAGV

SEQ ID NO: 382543 - protein, 384 aa, unidentified
MQDVIIAVDPAKRSHTIEVLDQRERTLATLRIENTTTGYRELRAFVKRWPSRRWAVEGAQGVGRQLAQRLIADGERVIDVPAKLSTRVRVLDTGHGRKNDPADAHAVGVAALRHHDLVEMTLDDETVALRLLSDRRRELVRTRTQTLNRTHQLLMELIPSGAPKRLSATKAKQLVATVKPREIAGRTRRAMVVELIDDVVILDRKIKAITKQIREAVDATGTHLTDIVGIGPVLAAVILGEVGDVRRFPSRHHFASFTGTAPLEASSGEIVRHRLNRLGNRQLNHALHTAAVVQLAHDERGRAYYQRKKAVGKGSLGALRCLKRRLSDAVYRALNADRTAVSPGGHLGATLTASAADQIPTVSTSDKPLTGLTADPTPALAAMS

SEQ ID NO: 382544 - protein, 318 aa, unidentified
MFIGIDVAKDTLVVAARPTGTLETVANSAAGLQPLLTTWREHPPTLIVVEATGGYEVLVVLTLSLAGLPVSVVNPRQVRDFAKGTGQLAKTDAIDAHVLAHFAELMQPPVRPLADAETRALEALVARREQLRLMLEAERQRLTQPAAHAPAVRTSLEHTIAFLQQQLAHTDDEIGTAVAAHPVWAARSALLQSVPGVGPMIAQALLGWLPELGQLTRQQIGKLVGVAPFNRDSGRYRGTRRIAGGRAAVRAKLYMGALVAVRYNARIKAFYLRLLANGKPKKVALVACMHKLLTILNQIVRTAMPWDASHHMAAPQLA

SEQ ID NO: 382545 - protein, 345 aa, unidentified
MIIGCDFHPSWQQVSWLDTETGATGEQKLVQSAGDAERFYRQVPAPALIGMEATGNCHWLVDLLADLGHELWVGDAAQIRASYVRQQKTDKRDAAHILKLLVEGRFPKLWTLDREQRDQRQLVLHRHQLEQIRSRVKNELQHLCLNKGVQRKHKLWSKAGQQVLRELPLKPWAGRRREDLLQLMAMLDQQIEPLDVAVKAEAQRDKMALLLQTQPGVGPITALAYVLTMGDVSRFPRGKQVASYLGLIPREHSSGGRQKLGAITKQGNRMLRMLLVEAAQTAVRLDPEFRKAYLHRCHQKPKGVAKVAAARKLAVRLYWMLRTQKPYPEVVRIESSPRVPLVGAS

SEQ ID NO: 382546 - protein, 437 aa, unidentified
MEMEEKKMHPKMKHLYVGIDTHKATSTAGIINCFNEKLGSITFNNDREGFTSLLKFIKGIIKSHFTPEENITPIYGLEGTNGLGHSLAMFLLRNRQAVKSVDANYTYSERRNKAIVSKSDEIDALCIAKVTLDKLNELPSFSPDDVFWTLKQLVKMRNTVIEMNISYKNKLHAQLSHHYPNYKEFFHNFDCKTALSLWETYPSPNLLKRISVTELANFMRKTSSKMHIVKAMEIFALIDKYDYDSLDFQPERNHLIKMLVRQIRRNSEELAELDAEINSLMDRIDYKLETFIGINKILAAKIASEVGNINRFNSPDKLARYCGVAPVEFSSGAKDKTVYNKYGNRQLNSYLFNVASLNLCKGMYRNRPVSPIFLAYYNKKLSEGKTKMQAISYVMRRIVNILYGMMKNKTEYRHPEKLSNECMERFNETFRDENDSS

SEQ ID NO: 382547 - protein, 343 aa, unidentified
MKIIGCDFHPSFQQIAMVDTETGEHEEKRLTPGEAVQFYGQLQGQRVLIGMEACGNTLWFERLLADLGHQMRLGDASKIRAMEVRKQKTDRRDAELLLKLLLEGRFPEVWVPSLEMRDARQLLLHRHKLVGMRRQVKNQLQHLALNQGVQKKWKLWTRAGRQLLEELPLSGWTARRRKDLLRWLDELDQEMAELDRAVEQESKKNAVAQLLQTHPGVGPVTSLAFVLTLGKVERFPHSRQVVSYLGLNPAENSSGGRQRLGGISKQGNPMLRSLLVEAGQSASRGDKELKRAYQRLKQKKHSAIAKVMVARKLAVRLYWMWRTQQPYSATRMQGSPSHGVAAV

SEQ ID NO: 382548 - protein, 354 aa, unidentified
MIIIGADYHPTFQQIAFVDTETGELQERRLDHPEAAEKFYRELAAQGKKVRVGMEASGHARWFERLLAELNFELWIGDAAEIHRKRERKQKTDRQDAQHILRLLLKDDFPRIWVPSWENRDLRQLLWHRHRMVQARTRMMNQLQAVALNEGLRCKKKLWREAGRKQLEAFRLAPWASRRRHDLLELLDRLNPTIAALSQAIEQEVEKCPEAQRLMTHPGVGPLTALAFVLIIERADRFQCGKQIASYLGLVPLEDSSGNRRRLGHITKQGNSLLRFLLVEAAQVTVRSLPEWRSKYVHLTMRRGRKIAKVAMARKLAVRLYWMMRKEWDYEQVKKFGSHAGQPGHRYGVKSNIE

SEQ ID NO: 382549 - protein, 351 aa, unidentified
MLIIGVDYHPSDQYIAFVDTETGEYGERQLSHSEGEAEKFYRELAARGVSVRVGMEATGYSRWFERLLAELGIEVWIGDAAEIKTKRVRKQKTDREDARLLLRLLRENNFPRIWVPSPENRDLRQLLWHRHRMVQMRTRIMNQLQALAMNEGQRRKKKLWSEAGRAQLEKLLLAPWASRRRKDLLELLDRMNPTIEGLTATIEQEARKRAEVLRLMTHPGVGPITALAFVLIIGTPERFKCGKQIGSYVGLIPCEDSSAGHQRLGHITKQGSSLLRFLLGEAAQAAARWDADWRRRYMHLALRRQRNIAKVAMARRLAVRMYWMWRNSWEYSEWVKFGSHAGQLGLRHGVN

SEQ ID NO: 382550 - protein, 366 aa, unidentified
MTSVPSAAELIHLGMDTSVNEIVVAVLRPGQEIPVVDRIPSDEESVRRLIGRFPDRRLLSACYEAGPGGYELHRLLTSMGVACDVIAPSLVPKGSSDRVKTDKRDSVRLALTHRAGLLTAIRVPSPAEEAVRDLVRARGDLLDDRKRMQQRLNAMLLRHGRVWRGGAKWSYAHRVWVDRQVFDEPALAEAFSLYRGGLEAREAELAAAEARLAAWAGREPLAGPVARLGGYRGIAQLTGLTLAAEVVDWRRFACARAFMGFAGLIPTEYSSGSRSRRGHITKAGPEGVRTALVEAAWAYRYRPAIGATLRRRQAGLPPETLARSWKAQQRLHAKYKKMIARGKPPGVAVVAVARELAGFVWAEMIT

SEQ ID NO: 382551 - protein, 341 aa, unidentified
MAIVGGFDVHRAQITFDEVDTETGEICTGQIRPATRTNLRKWLEPLAERADVAFAVEGCTGWRFVAEELGRAGIEVHLAEPADTATLRGTKKRAKTDRADARHLRELLSQNRLPESWVAPEHVLEVRALGRLYVGLMDERRQWQQRIHATLFHHGAPPIKHLLTESGRQALDATVLSAAGHRVVETALSVIDHLSTQIDPLRSELADLGRHHVGSRALMSHYGIGTLTAPIIWAEMGDCRRFSSSDKAVRHTGLDITVWSSDNKRSGPGHLARQGPPALRWALVEAAQCAARPSSPDHGYYLEVKARAGANRAALSVARKLARRVHHHLRSLGDEAWLEAA

SEQ ID NO: 382552 - protein, 419 aa, unidentified
MSFKILKFNCCGLDVHKTWIYACIGITDSNNRTEYKQARFSSFTKGLNELCDWLAKYNCKDVCMESTGKYWIPVFNILEQHNLWVTLSHPKYTKPMKGNKTDRKDAKWICDLYMCGMVKPSFIPPADIRELRDLVRYRFKLTCMITGEKNRAQNCLTVSNLKLDDVFSDVFGKSSRSITEQILKHPGETFDVTPFVDGRCKTPIEEIQAAVDGAISKEQAVKLRQCLDHIDELNKHISEVEQEILCLSDKYEAALNLIRTVPGFNKNPMTAIQVLSEIGCDMSVFPTDKHLVSWAGCCPRNDKSDRKIKSTRISRAGSYFKPVLVQVANALIKSKKHPEFITRYKRIKVRRGHKKAIIAICRMILTAIWHILSDLKPYTPEGFLESRPVKKEKILTTSQALNLLKLRGYVIKDDPLPTS

SEQ ID NO: 382553 - protein, 346 aa, unidentified
MTIVETRAITGGVDTHADMHVAAALDPVGGLLGVQEFPATAAGYASLLGWLGGFGTVCLVGIEGTGSYGAGLSRHVTAAGIRVVEVDRSDRQDRRRQGKSDPLDAVSAARAAQSGRARGAPKGRDGAVEAIRSLMVAKRSAAGERTQTIGQARALVLTGPEDLRARFTGHTVAALTAELASLRPRPGSTVGYATRIALRELGRRAQFLDAQIERLDELIGPLVTAHAPGLLALYGIGPNTAALLLIAAGDHPGRLRSEAAWTHLCAAAPIPASSGKTIRHRLNPGGDRQANHALWRIVFTRMGSHPPTRAYVERRTAEGKSKKEIIRCLKRYVAREVYPHLRPPAG

SEQ ID NO: 382554 - protein, 379 aa, unidentified
MQTAADSSPTVLLAAIELSKSKWRVATTEPGSSKVSHHCLPGGDAAGLLTLLRRLQERAVARLGCPVRPVTTIEAGFDGFWLHRFLVGHGVDSHVVDPASVLVNRRARRVKTDRSDAQSLLRALAAHLRGEGHACTMVRVPSVEVEDLRRQVRERDRLVGERNQHANRIKALLFGQGIQNFNPRRPGAAEQLACLHTGDGRLLPPCLLAELRREIDRLALVERHLGEVEAERDALVEQGASQGSAEARILTLSKLKGVGRTAAAVLVREVFHRDFANRRQVASFLGLAPSPWSSGTTNVEQGISKSGSRRARSVMVELAWLWLRWQPATRLAKWFQERSGAARGRARKVLITAVARRLAVDLWRYLAAGVVPEGATAAA

SEQ ID NO: 382555 - protein, 394 aa, unidentified
MYAIGIDVSKGKSTIAINVNGSLLERPFEISHTEEGIKMLLEKIKGIQKDEIKFVMEATGIFHLPLLTKLLELEYFVCVENAFLIKKYFDVNLRKMKTDKKDAIKLANYCSDKWNVLKKYTMQDTIYEDLRFLSRQYSQQISLKVKAKIQLSNLIELTFPGLSKLFNVENQYLFLLDVYEKYYHPSLIEKKQEKNLIEEIQEMAQKRGHRTGLRVGLELYELSKQSIPTRPNNKYTQLAVTSCVNSLRSIEKATENIISQMNELAKELPEYDIVTSMVGVGKKIAPRIIAEIGDVRKYKNANSLIASAGIDTPPYQSGIFKADNIHISKRGNKYLRKCGYEIMKSLKVIKPINDSSVYDYIVKKETEGKPPKVCKIAGLNKFLRIYYARVKEIY

SEQ ID NO: 382556 - protein, 366 aa, unidentified
MTSTCGVVQAAAAVDPTVGSSVEVTGGVDTHLNTHTVAAVDGAGRMLGSAQFPADRAGYAGLLSWLRSFGTLVLVGIEGTGAYGAGLTAFLQAEQIELVEVDRPDRKARRWQGKSDPVDAEAAARAALGRVRTGTPKRRDGRVEALRALRVARRCAITHRADLQRRLKMLLVTAPEPLRAALRDLPTRQLLETCAALRPDPELVDDPTTAAKVALRSLARRHRHLTIEIDDLDTLIAPLVKRINPRLLATPGIGTDVAGQLLVTAGQNTNRLRSEAAFAMLCGAAPLPASSGKTIRHRLNRGGDRQANCALWRIVITRMATDPTTRAYVARRTSEGLSKTEIIRCLKRYLAREVHALLTANDLDEP

SEQ ID NO: 382557 - protein, 394 aa, unidentified
MILVGIDIGKLSHMFCVMDSSTGEFLVNPISFKNNKQGFDSFMDSINSFSKKDVLIGMEDTGHYHFNLLKFLLDSGYAVALINPITTDMTRKMQLGATKDDDLDARLICDVLASNQRRKGYRISKIDSFDLYEQKRLTREHHDLKEQLNVYTNKLQKCIDIVFPEFNSLFRSKYGSVYMNVLKTFGSADSIAHADIRNIRKCFEANRKGRRISLTPEELKEAARNSIGFPSKAEVIELRHLIDIIELINVQISEVDKKIEEFSVQNNSPILTIPGISHFSGTSILAELGDLRNYSKASQVIKFAGVSPSKYKSSQYEAQHTAITKKGSRYLRKTLYQVILPVIRYNPGFNAFYRHKLSQGKGHRCAQGHCVRKLLRIIYHLVTTDQSFDPKLLR

SEQ ID NO: 382558 - protein, 325 aa, unidentified
METKKLCCGIDVSHTKLDVCYQNNLGELFHLQTGNNNQGFKKILEHTGKDYHFVMEATGVYYIRLAFYLHEQGCKLSVVNSLSIKRYIQMHLERNKSDKKDAGWICRYAMEQCPPYWEMPDSAYFESKQLYNTIREYTEQIKRFNNQLHSLRLLPVPSKDTIKSLEKIKRQLEKEITTLEEKLYTLLQQWHPAQLKSIGSIKGIGKRATAMLIVFTQGFKNTHSYRQLISFAGLSPTEYSSGSSIQGKPRIYKRGGKNLRDVLYMCSMNAMKTNTACKTLYERLRANGKTGKQALIAVCNKLLKQVFAVVKNNSLYQPNYCSARP

SEQ ID NO: 382559 - protein, 376 aa, unidentified
MREKLRFLGMDVHAETIAVAVAEPGGEVRSLGTIANREDSIRKFIKRLGSPEQLRACYEAGPTGFVLYWQLTQLGVKCDVIAPSLVPKKPGDRVKTDRRDALKLARSHRSDDLTAVWVPDEASEALRDLVRAREAAKQDQLRALHRLTKLLLRTGRRPPHGVKVWTERHAEWLQQVGYTHPAQEATLLDCLHEVQHMDERVKRLEKAIVEVIQLAPASMQEVVRGLQALRGIAHLSAVTIAVELGNITSRFECARDLMGYSGAFPSEDSSGKRIRRGGITKSGNAHLRRIVVESAWSYRHRPAIGARLRRRQEGLPAEITEIAWKAQNRLHKRYMMLMARGKDQRKTMTAVARELLGFIWAIGIKAEAGCKQQMAA

SEQ ID NO: 382560 - protein, 468 aa, unidentified
MQGKPRQRRKNRGSLRLPKQLKHVNLNAAGIDVGSETHFVAVPEGRDPQPVRQFSSFTADLHRIAQWLRACGIDTIAMESTGIYWIPLYEILESYGFEVKLVNARHVKNVPGRKTDVLDCQWLQQLHTYGLLAGAFRPTPDIAEIRAYLRQRENLIRYAASHIQHMQKSLALMNLQLHNVISDVTGVTGMKILRAIVAGERDPQVLAQHRDHRCKADTDTIARSLEGHYREEHLFALGQAVELFDTYQQKIADCDRMIEATLNKVNAASKTDPSAIPKPRRTARPRDNQPAFDVRSHLYRLTGVDVTQIDGISAYTALRVISETGPDMTPWRSEKHFTSWMGLSPGNKISGGKVLNSATKKISNRAATALRLAALSLSHSQSALGAFFRRLRSRLGAPKAITAVARKLACLIYTMLKNRTNYVDPGADQYEQKYRDRFLRNLKRKAEFFGYSLIPTPTSSVPSDGSVS

SEQ ID NO: 382561 - protein, 420 aa, unidentified
MKPLKTKKRSFVKGRHLIVTADIGKDNHFGYWRCPDGSDVKPFCVPNNGAGFGEFWERVSRAQKLHNLDGIIFGFESTGPYGEPLAHFMRARGAELVQVNPLHTKRFKEVTDNSPNKTDQKDPKVIADIIAMGRFLTVVIPEGPAAELRRLSQARERSTRRHTALANQIQCLMASIFPEFLQVMKGIKSTSAQYLLKHYPTPQEIAAYGLPELTRTLRKVSRGKLGADRAEALYEAAQSTVGVAEGQASMVLEIQELLALMEASQRFTESLEREMIKHLAQIPYSNTLLSLKGIGAVTAAGLIGEVGDFRQFRTLGEVMKLAGLDLFEVSSGRHKGQRHISKRGRPLLRKLLYFAAINTVKKGGAMHQWYRSACDRGMLKTKALVAVSRKLLGIVFALVRDHSQYVPNYSETRCQLKDAA

SEQ ID NO: 382562 - protein, 450 aa, unidentified
MGRPQVIDDEERERVYEKVAAVDVAKDSGMVCTRLPHPSRAGTRQSTVWTVQARMGAIRELGRQLARGGIQTVTLESTSDYWRIWFFVLEGCGLAVQLVNSSQAKNLPGRPKTDKLDAMWLARLTEMGLLRASFVPPAPIRALRDYTRARIRLTQERTRCWQRLEKLLESALIKLSSVASKLTTLSAQDMVRALIAGERDPQVLAALARGKMKAKHDDLVEALDGMFGDHHGELAQLLLDQIAFLDSKIAELTARIQEQAAAQPGAWGVNADGTTGPGAGTSPGDPVLPVVQRLAQVPGISEDLARSIIAETGLDMSRFPDAAHLVSWAGLCPRAHQSGPRARNGKKGRGNGYLRGYLGQAAIGAAATATFLGERYHRIARRRGKAKAQVAVARSILVIIWHLLASPEARFTDLGYGYYQARTDKDKKIKNHIRQIEALLGHPVTIAKAA

SEQ ID NO: 382563 - protein, 372 aa, unidentified
MASIIYVGMDVHTTNFTFCCYTVDSDRGFAVAQTEPDYRQVIKYMERVQKQRGEECKFVCGYEAGCLGYSLYHQLTRCGVDCVILAPSTMHQEKGKRIKTDRRDAENIARCLAFSLYSPVYVSTTEDDAVKEYIRMRDDIKADLKRVKQQIIAFTTRHGFAFDGKSYWTQKHLKWLETLVFEHPLYKETLQEYLILYYMLDEKVAVYDTRIEEMSHLEHYEENVQKLCCFRGVAAHTALSLLVEVGDFQRFRSAKHFAAYLGLVPGEHSSSDKQIRTSITKAGNTHLRRLLAEAAQSYNRGAIGKKSAALKARQGGNPAEVIAYADKANERMQRKYYRIAFKSRHNIAKTAIARELACFVWGMMTGNISNAA

SEQ ID NO: 382564 - protein, 346 aa, unidentified
MIVVGIDPHKQTHTAAAIDANSGESCGELTVSARPGGHAQLLAWARGLEAERLFALEDCRHVSVSLERFLLASGERVVRVPPKLMAGARRTGRQRGKSDPIDALAVARAFLREPSLPTARLDGPEREIRLLADHRDDLVQERTRIQQRLRWHLHELCPELELPAGCLDRPTRLESLSRRLARHEQTAQIEICRELLRRCRELSRRAAQLEHRLAALLTTHAPALLKLPGCGPLTAAKLLGETAGANRFPTEAKLAMHAGTAPLPASSGARHRHRLNRSGNRQLNLAIHRIAITQARWHPPARDYLARKQHEGHSRKEALRCLKRHLTRTVYHTLREIDQTTTPPLT

SEQ ID NO: 382565 - protein, 372 aa, unidentified
MREKLRFLGLDVHAETIAVAVAEPDGEVRSLGTIANREESIRKLIRKLGPADQLRACYEAGPTGFVLYWQLTQLGVECAVIAPTLVPKKAGDRVKTDRRDALKLARSHRSDDLTAVWVPDGDSESLRDLVRAREAAKQDQLRARHRLTKFLLRTGQRPPLGLKAWTEKYVEWIQQVHYTHPAREATLLDCLNEVQHMEQRVKRLEQSILEVVKLAPAPVQAVIQGLQALRGVAHISAVTIAAELGNISSRFENARKLMGYSGVFPSEDSSGQRIRRGSITKSGNAHLRRIVVESAWSYRHRPSIGARLRKRQEGVPAQITEIAWKAQNRLHKRYMKLMAAGKDQRKVMTAVGRELMGFIWAIGVKAEAACMQ

SEQ ID NO: 382566 - protein, 339 aa, unidentified
MQVTTIGLDLAKTIFHVHGITSEGSVAFNRALRRSQVLAFFEKLAPCLVGIEACSTSHYWARELSRLGHQVRLIPPAYVKPYVKRGKSDAADAEAICEAVGRPTMRFVEIKSEEQQALLSLHRARDLIVRQRTQTVNMLRGLVAEFGHVTARNIERASALAKDIMTGDGPELPEMAQAVIESLCQQLLLLNDRIRWFTRQIVAASRCDQRIRLLQTIPGIGPITASAIVATVGTADQFRGGREFAAWLGLTPLNRSSGGKERLGRISKMGDRYVRRLLVTGMTARIRAARTRPDRADPWMISLLERKPVRLVTVAMANKTARIIWAVLTRNEAYRSAAA

SEQ ID NO: 382567 - protein, 311 aa, unidentified
MTIICGVDVSSTHLDARIGRDGPAARFSNTPAGIAALAAFCRAHAAALVVMEATGGYERQPFALLWAEGLPCAILNPRAVRRFAEAMGVLEKTDRIDAGLIAWFAAVKRIAPQEPARAAQARLAALVTRLRQLTALRAAQANQRRLVTEPDVLAAIDEMTALAARQIRSLEAKVAALIDADPLWRALDQAFRTIKGIADRTIARLMAEMPEIGTLSGKAAAKLAGLAPIARDSGKLSGKRPVRGGRAGVRGILFVVAEVVRRFEPDLAAFHARLRQAGKPKKVIRIALAHKLLVRLNAKARDARQELAKPA

SEQ ID NO: 382568 - protein, 320 aa, unidentified
MAMAVRAQLVGIDVSKAELVICQGPKSPPRIVANEKPAIRAWLSEFAQQACLALEATSTYHLEVLEQAYQRGHTVYVIDGFRLNRYRESVGGRAKTDASDAQLLWRYLDREQDQLRPWSPPSAGYRQVQQLLRRRATLVRAKVALEQSLSGLPELKQASRTLYRQLAHLDALIQKRLFQTLRDHGWEADLQRCQAIEGIGPLTAAALNMAFRRGQFASSDAFIAFMGLDVRVRDSGKSRGRRRLTKQGDPELRRLLHLAAMQASRSATWRPFYQRHLDRGLSKIQSLVILARKLARVAFALLKNQSEYRPNIPHEACVET

SEQ ID NO: 382569 - protein, 337 aa, unidentified
MKFCGIDLHSNNSVVVVTDEMDRVLVSRRCPNELTPILSLLEPHRAELVGVVVESTYNWYWLVDGLKAAGFEVKLANPVAMKRYDGLKHSDDKDDAAFLAHLLRLGILPTGYIHPPQERALRDLARKRIQLVRTRTQHILAVENIMARQFGRRLSCNDVKGLSATSVDRLGLSTDVALAMKANVAIIQAVQAQIDFLEDRLQQEASLRPEFSLLKTMPGIGEVLATVIMLETGDIERFADVGNFASYARCVKSAHYSNGKKKGEGNTKNGNAYLIWAFIEAANFARRFSDDAKRFFEKKKAKTNAVVATKALAHKLARASYHILKEKQPFDAKRCFA

SEQ ID NO: 382570 - protein, 343 aa, unidentified
MKLSRVGVDLAKNVYQLHGIDRHGETVWKRRLRRGQWLQALVDKAEPGCEIGMEACTGAHHWAREFQARGYTVKLIAPQFVKPYVKSNKNDANDAEAICEAMSRPHMRFVTVKSVEQQDIQATHRVRSEIKDQRNAKANQIRGLVAEYGLVAPTTLLALRRAIPGWLEDADNGLTDYFRSLLHGLWGDLIALHDRMTELDKQIKTLADSNEVTQRLQQLRGVGPLVATALVATVGTGEQYQKGRQMAAALGLTPRQCSSGDKQRLLGISKRGDVYLRTMLIHGARAVVSQAKHREDRLSQWVTSISKRSHPNVAAVALANKTARMAWAMLRNEANYDPDFAIS

SEQ ID NO: 382571 - protein, 421 aa, unidentified
MKNKAARKLKQVPAGYLAIGVDPHKKVHAAVAITEDLTVRTKFKFSNSRAGFEQALENARAEMIKACCRGVIFAIETGGHYWRNFAYFLDERGIPFRLISQITLKRMRDGRDINRRKSDFRDAEMAADILRTGDFTETRLPQGVYADLRSTHSAYFRLVKERSRIVNLMKGLLDGLFPEFTQVFKDPCGRNAMVVLLTCPSPAVIASIEEDVFIARIRDRRQGRLMLKKLRALHQAAKTSVGVKPGADSVATEISLLAGRYGLIEEQIDKLVKSLISLVCMTEEGKYLLSIPGISYLSAAALLAETGPLKQYQNAKQVIKMAGTNPIESESGGKRLGETPMSKKGRPRLRYSAWNAVIPLFRHNPDFRCWAKRLRERPVHAHPLNGKEVVGAALNRLLRLVFALVKKQEFYHSPEIALVAN

SEQ ID NO: 382572 - protein, 410 aa, unidentified
MERVIERCCGLDVHKKTVVACVRVPGRTSVREQHVRTFGTTTAELLALRDWLGGYGVTHVAMESTGVYWKPIFYVLEDAFTCVLANAAQIAQVPGRKTDVKDCAWIAQLLEHGLVRGSFVPPVPIRELRDLTRYRAALIGEHTRETNRLQKVLEDAGIKLASVASDVLGVSGRAMLDALTQGTHDPDVLADLARGALRRKLPALRQALTGRFRPHHAFLVSQVLAHLDYLDEVIEALSTHLDEVMAPFAEEVSRLDTIPGVNKRTAEILIAEIGVDMSVFPTAGHLASWAGLCPGNNESAGKHRSGKIRKGNRWLRGALIQAALAGGTRATKGAFAARYRRVMRHRGHKKAVVAVAHAMLVAAYHLLARHTTYQEPGADYYERRHAERVRQRAVQLLERQGYRVTLEPAA

SEQ ID NO: 382573 - protein, 381 aa, unidentified
MSSPARPIITLGMDVHKESITVAVLPDGAPAPTRLDRLPNDLVKVRRYCDRLAAQGELRACYEASGAGYVLYRAMHEWGYACDVIAPSLIPTKPGVQRKYDKYDAAQLARLHRAGELTAVRVPSEAEERVRDVVRCRETLQRETLKSRHYILKFLARRGFIFRDGQHWTPKHMAWLRALAAVSSPLAREDALVFREYLSLLDYKLGRRDELDREIATLAALPAYATAIGWLQCFRGFQLHAAMVLATELVDWRRFERPTQLMAYVGLVARERSTGDRERKGSITKAGNRHCRHILVQAAWSYRHRPQVGTHLKGRQQGQPASVIAHAWKAQHRLHKLYTHLAYRKQPQIAAVAVARELVGFLWAIMRELPAPQAAVTSSMG

SEQ ID NO: 382574 - protein, 368 aa, unidentified
MSKTENGRLCVGVDLHKTQFTVCAINEDGEYLLERKYPTTEEGYEEFSQEMHGREEEGYSIELAVETTGNARYFKNRMEKEYFAVKVVNTNRFKVITMSTKKTDANDAATLAYYLMKEMLPEANLCSQTSEEIRRMLKTRTILVQSTVKIKNQIHGMMLGYGIETKAAQFQSKKKRQELMNDLADHEYSAFTASSLKVMLQIIDDLSEEIKRVEAQLVEMVKENEDVELLMSIPGVGINTATTIAAYTENLERFDGNYKRFASYIGIVPSVHNSNETKHLGRITKHGPQELRTAFVQAALGMVRLTKVTSEWRLIKDYHRKKDDKGSGRAIIALARKISRIVFVMLSKRETFNPDLMRINEQHFQQTA

SEQ ID NO: 382575 - protein, 271 aa, unidentified
MSKNKEFFGIDISKDVFDVVDASEKHHQFKNDPSGFKEFSKLLCEKSHCVMEATGSYYQGLATWLYDSFINVSVVNPLSVKRFIQMRLKTSKTDKLDAQMIRMYGESEQPKLWSPPSKLIIEASELHKLIELLVRQRAGLKNRLHALESKGITRSLVLTQGFEKFESSRQLISYLGLNPTIRESGSSVRGKSRISKTGDKQVRKLLFLCAFTAGKHNKACRKIYQRLTTKGKSKKLALIAVANKLLKQSLAIAKSGLYYDENYRSVNVNIG

SEQ ID NO: 382576 - protein, 394 aa, unidentified
MFFVGIDVAKRKHEAVVIDDKGRIVQKSFSFPNSLSGYNSLISCVKRITSTRKDIVFGMESTSHYWLALYSHLIKDGYTAHVINPIQSDAFRGLFIRQTKTDPIDAVIIAEVIRFGKYSSTHFPQHKILALREMCRNRLYMVDAISDLKRKTIALIDQVFPEYDQLFSDTFLVSSIEVLYRYSTPKKLLHIRRNTLTNLLIKTSGGHFGSAKADEIMDAAKNSFGIDDPYDVYANLIKTYLKQIKFIQKNISEMEQKITEIMDEIGSPITSIPGIGVTLGAVILSEIGDISRFKCADKLAAFAGIDPSIKQSGDYSSIRNHMSKRGSPYLRRALWMACTPAVQFDPMFHAYYLKKRSEGKSHMKTMGHVAKKMICVIYAVLRDNKEYQPILTVA

SEQ ID NO: 382577 - protein, 374 aa, unidentified
MKEFTKFVGLDTHQETIAVAVSDAGGDKPRYYGTIPNKPAAIAKLVKTLSAKKATVSFCYEAGPCGYAIYRQLTGLGQTCVVVAPSLIPTKPGDRVKTDRRDSESLSRLHRAGELTAVWVPEPEQEAVRDLTRAREDMKAVERMTKQRLSAFLLRYDCRYESGKSRWTKAHGRWLEGLKFDGPVQQLVFQEYVDAVRQAEARVAGLEQEMVKVQQHWAWAPVVEALMALRGVKLITAMTVIAELGDLSRFASPRQLMAYLGLVPSEYSSGQTRHRGGITKTGNRHVRRVLVEAAWCYRFPARKTAHLQRRATQTSEAVQTIAWNAQKRLCGRYGHLLATGKLKVQVCTAVARELAGFIWAIACEVMPQPVVRTP

SEQ ID NO: 382578 - protein, 346 aa, unidentified
MKYFAGLDVSLEETAICVVDEAGAMVREARITSEPEALVAFFQGSGLVLERIGLEACSLSAWLHESLVAAGLPAVCIETRRAKAAMGAMPNKTDRNDARGLAQIIRTGWYRAVHVKSPACRSWRALLTARRLLLNKMRDLENGLRAVLREAGLKLGTPTRKEFAARVRELTAADPGLSVLAEPLLTIIAAMTRELAQLTKRVLEIVRDEPVCRRLMGVPGVGPLTALTFRATIDQPERFRHSRDVGAHLGLTPKRYQSGETDVQGAISRCGDELARTALYEAAHSLLVRSRRWSALRAWGMQVAKRRGMARARIAVARKLATILHRMWADGTEFRWGKEGPMPAAA

SEQ ID NO: 382579 - protein, 326 aa, unidentified
MEHELHYIGIDTAKEKLDVDVLRPDGRHRTKKFANTTKGHDELVSWLKGHKIDHAHICIEATGTYMEPVAECLYDAGYIVSVINPALGKAFAQSEGLRNKTDTVDARMLAEFCRQKRPAAWEAPHPLERALRALVVRHQALTDMHTQELNRTETAREVQRPSIDAHLLWLEAELKRLEKEIKDLTDDDPDMKHRRKLLESIPGIGEKTSAVLLAYIGLKDRFAHARQFAAFAGLTPRRYESGSSVRGTSRLSKAGHVSLRRALYMPAMVATSKTEWGRVFRDRLAANGKKGKVILGAMMRKLAQVAYGVLKSGVPFDAARHNPVAA

SEQ ID NO: 382580 - protein, 451 aa, unidentified
MRSKRQASSQLEPINTNAAGIDIGSQTHWVCVPADRAEENVRSFGSFTTDLYALADWLQECKIKSVAMESTGVYWIALFQILETRGFEVRLVNAHHVKTLPGRKSDVLDCQWIQQLHSYGLLSASFRPNDQICVLRSYIRQRDNLVRSACVHVQRIQKALTEMNVLLHQVVSDITGTTGMTIIRAIIAGEHDPQTLASLRHPRSRRSTTEIAQALQGDYRREHLFILQQELALYDAYQVQLAACDVQIEQCLANFEVTSEIALPNPGSPRRKPQDNQPAFDLQTHLQRISGIDFTQIDGMGALTVQTILSEVGLDASRFPTVKHFTSWLGLCPGSCITGGKVKNSRTRRVVNRAANAFRMAALAAGKTRSALGAFYRRLRTRLGTPKAITATAHKLARLFYQLWRNGGTYNDPGITYYEQRYQEQIVKGLRKKAQAMGFELVATPSTQIVS

SEQ ID NO: 382581 - protein, 326 aa, unidentified
MEHELHYIGIDTAKEKLDVDVLRPDGRHRTKKFANTTKGHDELVSWLKGHKIDHAHICIEATGTYMEPVAECLYDAGYIVSVINPALGKAFAQSEGLRNKTDTVDARMLAEFCRQKRPAAWEAPHPLERALRALVVRHQALTDMHTQELNRTETAREVQRPSIDAHLLWLEAELKRLEKQIKDLTDDDPDMKHRRKLLESIPGIGEKTSAVLLAYIGLKDRCAHARQYAAFAGLTPRRYESGSSVRGASRMSKAGHVSLRRALYMPAMVATSKTEWGRAFRDRLAANGKKGKVILGAMMRKLAQVAYGVLKSGVPFDASRHNPVAA

SEQ ID NO: 382582 - protein, 368 aa, unidentified
MKTILYVGLDVDDKAFHVTIINSLSGELTYLKSRPNLSHLKEKLLQYHSNPTVFKICYESTYIGFSLCRKLRSEGFECDVIASGLIPETAGHKVKTDRTDSEKLAKFYMKDLLTPLNIPNEEDEAERDLVRSRSLVSKQVVKTKNHIQSLLRRHGIDYRDEEKSLNLWTDKYRKWLYGKTSSLNESLNLNLNLLLSQLEFLESSLKTYNQKIEELASSPKYKTKVEALVAYRGIETLTAMKVITELGDIKRFTHPRKLMSFLGFDIREYSSGGKERKFGITKYGNKVVRTALVEATQRCSTPPKVSYKLKHRRKETPVELVLVADKCMQRLYNKSKRLLAREKNRNKVKVACAREMCGFIWESLMKAS

SEQ ID NO: 382583 - protein, 344 aa, unidentified
MPSIAGGMDIHRKQVTFDYLDLVTGEVKCGQIAPADRASLRAWLQRFAGVRGVAFAVEACTGWRYVAEELRRAGVEAHLAGPADTATARGRKKRAKTDRADARLMRDLLAGSRLPECWIPPPQVLEYRALLETYHALRREHTAWVQRVHAVLFHHGAPAFRDLSRADAPRELAALARAHLSPAGQQQIGLYLRMLEVTAGEIDALRRQLVSAAGRLRGARALAGQLYGVGPVTALALCCWLGGAGRFSSARKAVRFTGLDITVYSSDGKRSPGHLSRQGPPVLRWCVYEAGKTHARAGAPDHGYYAAVKDRKGGKRAALSEARKIVRRACHILGELGDDAFAAA

SEQ ID NO: 382584 - protein, 366 aa, unidentified
MRRPKDRLIAGIDLHGNNVVIGIINQAGKRIEQKKVGTELAEVESVLKPYKAQLSSMAVESTFNWYWLVDGLQARGYSIDLANPAKIEQYHGIKYADDTHDAFHLAELQRLGILPKAYIYDAQLRPVRDLLRRRSLLVEHRTALFVSFKSLYTRTTGGQMALRELKSMNPAQAAQLYEHPANQLIAQIQVEQIQALDQSIRRIEKAVLARARAIPLYAKLLTLPGVGPILGMTITMEVGDIQRFKTDGNFASYCRAVDSRRMSNGKQKGQNNQKCGNRYLSWAFVEAANFAKRYDAPSRRWYDRKQARTSVVIATKALACKLAKAAWHVMAHGTDYDPGRMFPGEQKHWENRRQPAEGLEPKSPKN

SEQ ID NO: 382585 - protein, 374 aa, unidentified
MEHHSEAFVALDTAKLRNAVAIADAGRNGEIRYLGEIDNTEAETRKLVAKLASKHARLTFCYEAGPTGYGLYRLIKSIGHDCIVVAPSLIPSKPGDRVKTNRRDAVNLVKLLRAGELTAVWVPDERHEAMRDLVRARDAAVKDYRIKRQNVSSLLLRLGRHYPGKKTWGRTHINWLTGLKLEHREQRIAFEEMLLAVRQVRERIERLEQAMREAVADWTLAPVIEAVQAMRGIDMVGAIAFLAELGDLSRFENPRQLMAYLGLTPSERSTGENVKRGGITKAGNARARRLLIEAAWSYRFPPRVSKDMQTRIGAAPRTAREIAWKAQMRLCGRFRTLTRKGKRPTIVVTAIARELSAFIWAINREVAGSHATAN

SEQ ID NO: 382586 - protein, 348 aa, unidentified
MSKHSVPASDVPGLLHRFAELKRKAAARSGRDFPIIVIQEAGLDGFWIHRVLQSEGIESHVVDPASILTSRRARRAKTDRIDGETLVRTLMAFKRGEPRVCSMARAPTPQEEDRRRVCRERRILVGERVRHVNRIRGLLFAQGVFGYEPLRKHRRERLEELRTGDGRPLPVHLKAQIIRELDRLELVLAQLKTVAAERDTLLKTASDEMPSPPAMLVQLKGIGPETAAVLWSEGLFRRFDNRRQVAAYAGLAPTPWQSGSIDHEQGVSKAGNPRLRTTMVELAWLWLRNQPTSALSLWFHERVQSLSGRMRKTIIVALARKLLVALWRYMTAGVVIEGAVMKPASATI

SEQ ID NO: 382587 - protein, 364 aa, unidentified
MPNVKKHFVGIDVAKDWFDVAVLGEKRTKQFANTKRGMAEVIKWMRAHQPQLIVVEATGGYEEALVLALFEASLPVALVSPQRVRQYARAKGHLAKTDQLDAQLLAEYGRAIQPRLFVGKSEERKRLSALVARRHQLNDMLQAEKNRLRTSSLEVKNSLKRVLACLKAEMKEVEQEIRQVLKAHDELGEQEKLLRTAKSIGPVTAATLLADLPELGQLDRQEIAALVGIAPMNSDTGRKRGYRKTKGRRPDVRRTLYMATLTGVCHNPILKPHYEQLVKRGKESRYYRLYAQAAHHSQRHDARPATLSLPGDCLSLLPSHPKYTTTALTHKTVAARGVSHLLLSISRHRDWFSDINGSAISLDC

SEQ ID NO: 382588 - protein, 335 aa, unidentified
MLYAAIDIHKRSFQAAVLDSESGEICEQRFGASREELSQWAMSLQGGVAVVAIEATTGWRWVWRELVALGFDLRLADPSEVKALRGTGKRAKTDRLDARWLVLLLAKELLPLSWLPPAEIQQLRDKTRLRKALAEDRTRWAQRLQAFLQHEGWPCARGRLLTAQGRRWVSGLALAPVARAHVETLLRLIDLVEDEQRALESELRRFARSDRRCQALETIYGIGPILACHILAELGEAKRFRRARSAVRAAGLDPVVADSGETTRRGHLAKHGSPELRWALVQAAHQARYRRSPDRALYGSIKARRKAAQPAVLTVARKLARRSYHVLHELEREAA

SEQ ID NO: 382589 - protein, 338 aa, unidentified
MIHVGVDLHQRFCYMTALEARGKILQAGTVTNEKLALRRYFRQFRGKEVQVAVEACGFWPAFREVVEPEVKRLVLVHPQRVKAIASAKLKNDRVDSATLAHLLRCDLLPESWKADRGTQARRQQVRLRATLVRHRTRLKNQVHAVLHQQGLRSPVTDLFGKRGRLWLAEVKLPVQARESVNVCLRLLDGYSEEIQKQNLQLSEKAKQDKPAEWLMTIPGIGECSAMMLLAEIGDIGRFQDKEALCSYAGLVPRVRESAGKAARGGITRQGSPWMRWILVEAAQVATRCSPAAKRYYERLARKKHKHVARVALARKLLIAVYALLRDGVVFDEQKFATV

SEQ ID NO: 382590 - protein, 403 aa, unidentified
MNSVGIDISKGRSTIAVMRPFGEVVISPFEVRHTGSELSKLAKQLKSLDGETRVVMEATGNYHASVAKLLHNAGLYVSVINAKLVHGYGNNELRRVKTDRKDAVKLANYGLDRWLTLPRYIPEEDTRLLLKNCYRQYRQYSKVQTVLKNNLISLLDTVFPNANRLFSSPIRGDGSEKWVDFVAEFWHCRCASEKSERAFTSKYLRWCRKHGYNFREAKAHTIYAEASGHIGVMPKSETTKLLVKQAVSQLRATSTALAALKQEMQSLASVLPEYPVVMDLFGVGPTLGPQLIAEIGDVRRFYSKKALVAYAGLDAPPNDSGDVTGRHKSMSKIGASSLRRTLFLVMSVYLQTAPLDEPVCQFMDRKRAEGKLYRVYMMASANKFLRIYYATVKAYLESLEHTA

SEQ ID NO: 382591 - protein, 394 aa, unidentified
MLFVGIDVSKSKHNCYIVDFEGTIYEDNLQIKNNIQGFKTLSQTITSICKNNNLIKVKIGLESTGHYSTNITNYLYDEGFEVTNFNPIITNNKRKGNTLRKTKTDITDAKVIATMLFTDNSKSYSPITISYQIIELKSLTRYRFRVVRQRSKAKQSIVRLVTIIFPELTSLVWSLHQKSIQALLLELPTAKDIANCHLTKLTNLLKKYSKGKYSKDKAIKIKKLAAESIGSFNRAIAFELQQTIKLIQYLDTEIKTIDQKIKEIVDEIDTPLITIPGIGYTLAAIIIAEIGNIHRFVNPAKLLAYSGLDPSVYQSGQYNASHTRMVKRGSKYLRWAILQAVKTVAMRDRTFKDYLNKKLAEGKHYFVALSHAGKKLIRVIFYLLKNNTTFVPQS

SEQ ID NO: 382592 - protein, 341 aa, unidentified
MEEVTTIGLDLAKQVFQAHGADGSGAVVFRKTLRRHKVLTFFAAQPPCLVAMEACGGAHYWAREIGKLGHDVRLIAPAFVKPFVKRQKNDAADAEAICEAAQRPTMRFVAVKSEATQASATIFRTRDLLVRQRTQNINALRGHLAEYGLITGQGVGQVSKLIVMIESPACELPEAARSMLKVLSGMIAVLDEQVKLLDQEIARRAKTEDVPRRLMTIPGIGPITATALAALAPPPEVFGKGRDFAAWLGLTPLQKSTGGKQKLGATSKMGERTLRRLLIIGASAVVCQATRRGAQPGSWLARMLARKPRMLVITALANKMARTVWALMAKNEIYRAPVAAG

SEQ ID NO: 382593 - protein, 365 aa, unidentified
MNTITIGVDLAKSVFSVCEVDGSGHVLRRLDLKRDAFAVWLAQVPAGTVVAMEACSGAHHWGRLCLEYGLQPRLMAAQFVTPFRKNRTAKNDRNDAEAIATAARQGNMRFVPVKTIDQQARLSWHRVREGYKVESLAIGNRLRGLLAEFGVVVAKSDHALRVALADLDQHTALPPEMRELLRDLSAHWAQVRTAVDACSARIDAHARADERCARMRAIIGIGAITADAVIATLGDAKEFRNGRQVSAWLGLVPTQHSSGGHARLGAISCRGDGYLRTLLIQGARSSLQRAKAVSVEKSTPEQVWIRQLACRMPFGKVLVAIANKHARQLWAMLADDETYDADAWLKHPMLQRPAGKHAITMSAVA

SEQ ID NO: 382594 - protein, 402 aa, unidentified
MNAVGIDVSKGKSMVAIMRPFGEIVSAPFEIKHTASDIHSLVELINSVEGESRIVMEHTGRYYEVLAHQLSEANLFVSAINPKLIKDFDNDSLRKVKSDKADSVKIARYALDKWQNLKQYNVMNELRNQLKTMNRQFGFYMKHKTAMKNNLIGILDQTYPGVNTYFDSPARSDGSQKWVDFASTYWHVDCVRKMSLNAFIDHYQNWCKRKKYNFSQSKAEEIYGKAKELVPVLPKDAITKLIIKQAVDQLNSASTTVESLRTLMNETASKLPEYPVVMAMKGVGTSLGPQLMAEIGNVSRFTHKSAITAFAGVDPGVNESGTYEQKSVPTSKRGSADLRKTLFQVMDVLIKTHPQDDPVYQFLDKKRAQGKPYYVYMTAGANKFLRIYYGRVKEYLASLPES

SEQ ID NO: 382595 - protein, 363 aa, unidentified
MLYLGIDQHRKQLTVSVRNEAGDVVLRRQVSTEWARVRAFFAEVRRLAEPAGGFVAIVEVCGFNDWLRKMLAEYGCREIVLIQVEKRSKKKTDRRDAHQLSGILWVNRQRLLAGQRVEGVRRVQPPTDREAEDRQLTALRQRLGQLRTRTINKIKHLLRKHNVEQEQPAKGIDTKRTRKWLAALPLGSIDRMELDLLLEQWLVWDVQMEKLETEITERQAQSQTAAVVATIPGCAAYGSLALASRIGAIERFPRPASLANYWGLTPGCRNSGDVTDRLGSITKQGSAMARFILGQLVMHVLRRDPWMKAWYGRIKRRRGAKIARVAVMRRLATVIWHMVKNNQPYVIGGPPRRKLRSKTVEVA

SEQ ID NO: 382596 - protein, 315 aa, unidentified
MSEEIIGIDVSKARLDVALLQAGQSFSVANDQGGVGELIEALKARELSLVVLEATGGYEALAAGTLAQAGFAVAVVNPRQVREFAKATGLLAKTDRLDAQVLARFGLAVRPPVRPLPGPEQRALDELLTRRRQILGALVAEKNRLPLAKQKRVRRSVREAIAFYQRQLAAVDAELDRFIQASPLWQAESDLLRSVPGIGPAATRTLVAALPELGALNRRQIAALVGLAPVARDSGSRHARRHIAGGRGDIRPVLYMATLAAVRANPTIAAFYRRLIGAGKPKLVALVACMRKLLTILNAMVKTHTAWNEHRLAEG

SEQ ID NO: 382597 - protein, 349 aa, unidentified
MEIETIGIDLGKTVFHLVGLSAAGEVVVRRKFSRAQLLRFTANLRVRLIGMEACGGSHFLGRALREQGHEVRLIPAQYVKPYVKTNKSDYIDAEAIAEAVGRPQMRFVPIKTDDQLDMQSLHRVRDRWVGRRTSVINQIRGLLLERGITFRKGRRHAEASLPGILEDPDNSLSGPLRMLLAQLQSELRQLQSQIDEADTLVGKAANNHEACRRLMAIPGVGPLTATAVVASIGSGAEFRKGRSFAAWLGLVPEQHSTGGKQKLLGISKRGNSYLRRLLVHGARAVLQCREKQPPGLSAWLAQLASRAHTNIVAVALANKMARIAWAVLSKGEAYRPPLLAGSVDAMACC

SEQ ID NO: 382598 - protein, 440 aa, unidentified
MLHTIKPNAAGIDIGATEIYVAVPHERDTKPVRHFNTFTADLHKAAKWLKACGIDSIAMESTGVYWIPVFQILESYGFDVVLVNARHVKNVPGRKTDVQDCQWLQYLHSVGLLRGSHRPPQEICAVRSLLRHRDGLVRTSASHIQHMQKALTQMNLQIHNVISDITGVTGLAILDAILSGERNPKKLAALKNGRIKASKTTIEKSLEGDYLPEHVFTLKQSLQAYRHYQQMMAECDQEIENHLNNIDSRIDVDKNPPPPPTPSSRRGQGNEPSFDLRTHMYRILGTDLTQIDGISAVTAHVFFSEVGNNVSKFSSAGNFASWLSLCPGNKISGGKVLSSRTLPGSNRLAKALRMSAMSLWRSQSYLGNYYRRKRARDGAPSAITDTAHKLARIIYHLVKTGKQFDESIFNTQEEAHQKRVFRSLANKAKKMGFQLVPCQQ

SEQ ID NO: 382599 - protein, 318 aa, unidentified
MAEVVAFEQIVQRGCGLDVHKQTAVATIDGAGLTRETREFRTTTSSLKELREWLERSEVTHAVMESTGVYWKPVYHVLEPSGMTVWIVNARHVKYVPGHKTDRRDSKWLCKLLLAGLLKPSFIPPREQRELRDLTRYRRKMIEQIASEKNRVIRILEDCNIKLSSVLSDTHGVVGTKLIDKLCASGKISMEDIEEVYHGKLQASREEIYEACEGFVTGHHVFMLQAIRKDISSCEAIISELNARIKKMLAPYGNVLELLKEVPGLSDKSIQDLIAEIGLDMSVFPTEKHLASWSGVAPGNNESAGKKKVDALRMATNR

SEQ ID NO: 382600 - protein, 353 aa, unidentified
MKYVGLDWAYRTAQWCALAPGGEIAGEGRIAADRDGLARLVLELGDEVTACLEMMSGALWVHDQLVDCGWQVEVADARKVKTVAPLAAKTDKVDARLLAELSRRELVPALWLPSLDERALRERLRRRMHLVRLRTSAKGRIFGLQTQWGVRVSLARLRRADGLTLLERAGVPEVWRRSVGECLALIDFLDARLEPLDAELRPFAKADPRAVLLDTIPGIAELLALTIAVEVGEISRFASPEKLVSYGRLAPRVRQSGQARPRSGPLSKSGSRLLGWAAVEAAQQAWRESNPWHRLYVDVSARSGNRNSAKAAVARKILIAVWHMLSRNEPFNPAPRSTRGDSVPASSRLALAA

SEQ ID NO: 382601 - protein, 341 aa, unidentified
MEQVSTIGLDIAKNMFQAHGADASGRVVFRRKITRGRLLAFFAAQPACLVAMEACGGAHHWGRELAKLGHMVRLIHPAYVKPFVKRHKNDAADAEAICEAAQRPSMRFVPVKSEEQQASAVAFRARDLLVGQRTQCINALRGHLTEYGWVVPQGVPHVARLIERIEDPAEPLPEMARASLRVLITTLRALDEQIAGLDAAIARRAKADPVVRRLMTIPGVGPIIATAIVALAPPPEAFQAGRHFSAWLGLTPLQKSTGGKQKLGATSKMGERTLRRLLTIGAAAVVKQAVRRGAPAGSWLAQMLARKPKMLVTVALANKIARIIWALLAKGDVYRARVATA

SEQ ID NO: 382602 - protein, 320 aa, unidentified
MTILDSQVVVGVDVAKDEIVIYRSDLEKTLNIANKRSTLKQWLKTLPAHSAIALEATNIYHLDTTEMAHEMGHDVYVIDGSRLNKYRDGIGMRAKTDTLDAELLARYLSRESDRLRIWNPPPKAYTQMKSLLRRRAQLVRACVALKQSWKNESLLKEHFNQLLAAIAQFEKMIQKTLKEIAEEGGIDDQVKRCQAIEGVGLLTATAAATAFMRGEFANSDEYVAFLGMDPRVRQSGQKDQKRRLSKRGDSEFRRLFHNSAMAASRSPTWKPYYERYLDRGLKGTQALVILARKLARVMFALMKNQTEYKPNSMFRCSPQT

SEQ ID NO: 382603 - protein, 347 aa, unidentified
MKRTTIGLDIAKRVFQAHAVDPVSGEVTRRKLQRAEVLQYFAQLQPSLIVMEACASAQHWGRQFGQLGHEVKLIAPQFVRPFVKTNKNDVADAQAIWTAAQQPEMRAVAVKTEEQQAVLALHAIRERLKKARTAAVNQLHGLMGEFGIELPKGWRTMLPRAAAELDQADSAVPALLQPQLQRQIREVRSLTEQMTEVERQIASWKRHQEGCERIAAIPGVGLLTATAAVATMGEASTFRSGRQFAAYLGLVPRQSGTGGRVQLLGISKRGDKYLRMLLIQGARSVLARSRASKDPSTWLGRLSQRRPRNVAAVALANKMARQIWAILAHHRTYEPNYRLPERSATPA

SEQ ID NO: 382604 - protein, 341 aa, unidentified
MKIHSIGIDLGKTTFHLVALGEHGKILLKKKLSRKQLLALTANLPASRIGLEACSGSHFLARALREQGHDARLIPAQFVKPFLKSNKNDFLDAEAIAEAVERENMRFVPIKTDDQLDLQALHRVRERLVSRRTAVINQTRAFLLERGITFRKGASSLRRQMPEILENGDAPLSPRIRSLLAMMWGEWKQLDEQVESFNTQIEAICGGDAACQRLREIPGVGPLIASAVVASIGNGAAFRKGREFAAWLGLIPKQYSTGGKVKLLGISKRGNRYLRTMFIHGARSLVLRVNRERSPLGGWISSLEARAHRNVVIVAMAHKLARITWAVLASGERYCPTLMAA

SEQ ID NO: 382605 - protein, 361 aa, unidentified
MTKSSVSALQQFVSGFESQSFWLGIDVHKQSYSFALRRADQRCFTWKGPADPKAVVAQVTRLGISLAAAAYESGPTGFGLARTLERANIAVIVAAPSRIPRSVTAGAKCDRLDCIKLADYAAKGMLKAISIPTPEEESRRSLLRRRHNLVDAIRRVKQRIKSQLLFLGLPEPDAVKHWSNEAADALLRLPVDQAARLTMESYLRELTFQHTELRTVERQLQQLLMETKEERHRVINLRTVPGVGPTVATTFALELYRPHRFQKAEEVASYLGLAPMVRHSGGKTPAGRLMPVGQKRLRSLLIEAAWMWKAKDAGAAELYNRLLGRTGIAQKAIAALARRLAIILWRIAVEQRPYRATAKAL

SEQ ID NO: 382606 - protein, 313 aa, unidentified
MIEIGDVAIFLGLDVGKGEHHARGLTPAGKTVFDKRLPNSEPKLRALFDKLSAKYGTVLVVVDQPANIGALPLAVARDAGCLVAYLPGLTMRRTADPYPGEAKTDARDAFIIADAARTMPHTLRDLATTDETVAELDMLAGFDDDLAGEVTRTANRLRGLSQRAALERQIAVLLEAHPLSQLLTSTPGIGVRTGTRILIDVGDAGTFATAGHLASYAGLAPAPRISGSSIRGEQPSRHGNKQLKQTFFLALSAPLADPAPAPTTTANAPRAKPTPTPSPASPDAVSTSWSPCSATARSPNPSQPDQAEPAKTH

SEQ ID NO: 382607 - protein, 404 aa, unidentified
MKEQITHGWAGIDVGKGHHWLCLIDEAGTAVWSTKVVNDEAAILDAVDGVLTRAEKVVWGIDVTGTMSGLLLALLAAHGQPVRYVPGRTVNQMAVAYRGEAKTDARDAYVIAETLRHRSDLAEVEVATSLVTELRLLVTHRSDLVGDRVRMVNRLRDVLSGYFPALERSFDYAHSRGALTLLTGYQSPQAIRRVGESRLRAWLVKRKVRSAEQIATAALVAAKTQHTDVPGQEVAATIVADLASQLLAIGSRITELNARITDTFRAHPQAEIIESLPGMGPILGAELIAAAGDLGGYANAGRLASAAGLVPVPRDSGRRTGNLHRPQRYSRKLRRVFYLSASAAMMREGPNRDYYLKKRGQGQRHVQALIALARRRVDVLWALLRDNRLFQPAPPKLEPIPQTA

SEQ ID NO: 382608 - protein, 388 aa, unidentified
MIYVGIDVAKGKHDCFIVNSDGEVIKDVFTISNNLEGFNTLLAAIPNVQKNKIKVGLEATGHYSMNLMRFITNNQLPLIVLNPLQTNLFRKAHTLRKNKTDKIDAKLIALMLQSGNFKPHSDVSYHLRELKSLTRHKSRLKENLAKYKISLHRILDIMFPELTSVVYSINQKSTYELLRAFPSADAIASAHLTKLTTVLSKNSRGKYGKEKAILIKETAAKSIGSGSHSLSFELLQTLTFIDFYSSEIERLEAEIKSIMDELKSPLLTIPGISYGLGSVILAEIGDINNFDSPSKLLAFAGLEPSTYESGKFIATGMKMVKRGSPYLRWALLEAARLIAMRDTTFKIYYQKKKAEGKHHYVANSHVAKKLIRLIHHLLTNNLEFIAQS

SEQ ID NO: 382609 - protein, 363 aa, unidentified
MFTERTSVGLDVHARSVAAAAIDGVTGEVMQTRLTPSYEHIRSWISELPGPVAVAYEAGPTGFGLYRALSDAGVRCEVVAPSKLQRPAGDRVKTDARDALHLCRLLRLGEITSVSIPGVDQEAARDLVRAREDCRGDLMRARHRLSKLLLRYGIVYYGGKAWTGAHDRWLRTVAAPQLTTPATKMAFDADYDHVLTMQARRGRLDAAIEDIAKDCEFPPIVRRVSCLRGVSTLTGFALAVEIGDWNRFTGNTIGSFVGLVPSEYSSGSSRVQGPITKTGNTHVRRLLVEAAWHHRSRYHAGEVMRKRWDLAPAAARARGDEGNRRLHGRWVGFLERRKRPVVANVAIARELAGWCWSLAVMAD

SEQ ID NO: 382610 - protein, 393 aa, unidentified
MIQRKNAESEPVRIKKFASFIAISGLPACLNPDPDSRLASIVKVIGLSSSPFFLKSVKDKRMENFYFIGVDVLKKKLNFCVMFEGKVVHEEETSNHQGAIMSLLHHLEEDYGIASGQMLVCAEHTGQYTFPLACACKAVECRLWLENAAEIKYSSGVQRGKSDKVDAKRIAIYASRFQDKVRYYERPTEDIERLKQLESERTLYVTDFAKYKGQMKDQKEYMPKSLYERKMKRLQALMDDLEEAIQSITDEMDEVIASCPVLFRQRELLMSIDGVGRVVATNMIIATEAFTRFDDPRKFNCYAGVAPFSYSSGSSQHSKARVSHRADKVMKRLLHLAAVAVTHRIGGELEKHYERKVAEGKNKMSVINALRAKIVARMFAVIKRNERYKPILS

SEQ ID NO: 382611 - protein, 462 aa, unidentified
MTVPTTKGRRTKATPLPTSLPAIRPLVAGLDVGSSEHWVCGPARADGTPNVRGFGTTTDQLQALADWLADHGVESVAMESTSVYWIPIYELLESRGIEVVLVNARQLHNVPGRKTDVSDCQWLQLLHSCGLLRGSFRPGEAITRLRALQRQLANLVAERTRCVQWMQKALDQMNVQVHRAVTDLTGATGLAIVRAIVGGERDPARLARHRDRRCGKSATEIARYLTGTWRDEHLFNLASALRLFDALETEIAAYDAQLLQEIQALPPPERQTEPVPPHPNPAKEKAIKARGEQAARTTLWRFAGVDLTRVDGISAGAAQVVLTEVGPQLAAFPSEDHFVSWLRLCPRTPISGGKPLKKRRNGLGAHRIAGVLRMAATSLQRSKTALGAAFRRIARHKGGAVAVFATARHLARLIYRMLRYGHDYVDIGEQAYDHRFQVRRLAALTETARALGYTLVPNVAAE

SEQ ID NO: 382612 - protein, 373 aa, unidentified
MNYSTVYVGMDVHKENFSLCCYTNEKEKAEYAQKVEGHYSKVLNYLEAMRFHYGNDALFVCGYEAGCLGFTLYRDLTAHNVKCVILAPTTMAVPAGKKRIKTDKRDAALIARCLAHHDYSEVHVPTEKDEQIKEFIRMRDDHKLALKKVKQQILSFCLRHGIQYDGSKSHWTQAHINWLRSLKLDGVDQETLDEYLLSYDYLTKKLERIDDRIKELAEEKDYKENVHKLECFLGVKTITALSVIVETGDFKRFASAPQYAAYLGLVPGEDSSGGDQNRLPITKAGNRHLRMLLVEAAQCYGRGQIGFKSKTLAARQSGNPSAAIEYADKANERLRRKYYRMTLKNGKKANVAKTAVARELACFLWGMMTENYT

SEQ ID NO: 382613 - protein, 354 aa, unidentified
MKRTTKYVALDVHQATTVASVREESGRVIARSVLPTDGPALTEFFRGMRGAIHVAFEEGTQAQWLHNLLAPRVDRVIVCDRRGQSRQGNKGDELDADELSEQLRRGGLRAVYHGSGPGAGLKELTRSYQNLVEDATRVMQRLKALFRARAIRTSGEGVYHPARRAQWLAQLPDGGARVRAEALYAELDALRALRPKAKAAMLVAAQQDPACAVLRTIPFFGPVRVALLLATMQTPWRFRTKRHLWAYAGLAVVTRSSADYAIVAGQPVRRRRAPLTRGLNRNHNRVLKDVFKGAATAATTRPGPLLDFYEGMIARGMRAELASVTLARKLAAITLRLWKKGERYDPTQLTTSAR

SEQ ID NO: 382614 - protein, 313 aa, unidentified
MTLKQQTVAGVDVSKDTLDIYLLPSKKAWKVNNDKASIRKLVKAFQKQGVDLVVMEPTGKHHWELMTQMVEGGIGTAVANPKKVRYFAKGLGIIAKTDKVDAVVIAKFGSLVEPRKLQQIDRKMLELKELVSRRRAIVKAIVAEKNRASSAILPLVKSSIRQSLAGLKKQLIRIQDAVIEAITLDDQRRQTFELLQTVPGIGVVTAAVLVAELPEIGSLNSKEIAALVGVAPFNKDSGTFQGHRMITGGRFFVRQALYMAILSAIKFNPKIRKFYNHLLEKGKLKKVAMVACMRKMVIMLNSMVKTNSEWRAE

SEQ ID NO: 382615 - protein, 313 aa, unidentified
MSQNNTNILYVGLDVAKLSLQLHLAGTFHLLANDAKGHAQLLKRLRGYPNAHVVCEATGGYEQVVVRALQSAEVPVSIVEAGRVRYFARAQGQRAKTDPIDAAVLSAYGTTFQPAATAPASPQQQQLAELAQRRRQIIQLLVSERNHAEHYTDSFRVRQSRQLVKALEKQITQCDEAITTLIAQDTELARKAERLKAIPGVGPVVAATMLAEMPELGKLTTQTAAALAGVAPYNRDSGDQTGTRRINGGRAAVRCALYMATLSAVRHDRILKEFYLRLRAAGKKPLVAMTACMRKLVILMNRLLKNYDFHLAN

SEQ ID NO: 382616 - protein, 315 aa, unidentified
MDAQAPVVVGIDVSKAELAVAVHPSGEVWTSGTTPVALESCVARLAALQPHLIVVEASGGYELPLVAACAVAQIPVAVINPRQVRAFAQALGRTAKTDAIDAGILALFGARVQPLPRALPDAETQALAALVARRRQLLEMLHAERLRLTHVATGPVARDLRNHIRWLERRVADVDDEIGGAIQRSPIWRVQDDLLRSVPGIGPTVARTLLADLPELGHLDRRAIAALVGVAPFNRDSGQWRGRRMIWGGRAPVRAALYMAALAATRHNAVLRAFYQRLRSAGKPAKVALVAVMRKLLTIVNAMLKNQTTWHDQVA

SEQ ID NO: 382617 - protein, 437 aa, unidentified
MKTLAVLDPRAAFVDVGSEHMHVSVAGEEPAVFGTVTSQLHALRDWLKSQDVRFVAMEATGVYWLPLYGVLEAAGFEVRMVNGRQTRNAPGRKTDMKDCQWGATLHMHGLLNAGFVPPADIRRLQDYLRLRADHVASAASHVQHMQKALERMNIKLHDVIASLAGMSGLAVVRAIVAGERSPEALLALCDQQIRRAKAEQVKEALRGTWAAEHIFALRQALQSWDHYQLQIAECDHQIQAVLPPHDPDQPPLPRPKTPKRAGVNSPDIPKLREILAQMCGGRDLTQLPAHTHYGVLQIVGEVGTDLTKWRTEKHFTAWTGLAPGNHDSGKRKGHVKRGRNRTGRLFCMMAQSLVRSKHIALGGFYRRMAARRGGLIATMALARKLAAWYWRVMVKGDDYVEQGLAHYDAQVLQTKQRALKRLAKELGQQLVPIAQPA

SEQ ID NO: 382618 - protein, 370 aa, unidentified
MKKGLLYVGLDVHKMSVDVAIAEAGPAGEVRFYGRIGGDLEALDKVTRKLQAKGAELRLAYEAGPCGYQVYRHLTARGLKCLVAAPALIPRRPGDRLKNDRRDALALARLLRAGELTPIKVPDEDDEAMRDLTRAREDAICVERRARQRTVAFLLRHGRVYQGKTTWGRGHWAWLLRQVMDHPAQQIVLQEYLDAVREASARVLCLTGQIRDLVPQWRQAPFVTAYQALRGVSLIVAATVVAEVGDLDRFNNPKELMAYLGLVPSEHSSGASVRRGRITKTGNSHARRVLVEAAWAYRLQARVTRHLLKRQEGLPECVRQLAWKAQLRLCARYRRLLARGKARQTIVIALARELAAFLWAIGRAVAPATA

SEQ ID NO: 382619 - protein, 347 aa, unidentified
MEEKVTYVGLDVHPETTFAVWGRPHEPVKRLEFPTTEEGFRILNRRIGRQGLWAAYEASSCGFVPYEILRKMGWAVSIVPPTHLPRSLKRQKNKADPKDAEAMRDVVMAHGELGTEMAEVAIPDPELRDDRELTRQRLQLGEKISAVKAGVLQLLRRHGVDRPKTIKSRWTKAHVAWLRGLDGAHSPIPPGARQVMASQLRMLDFLEKEKEAMDKALDELSRKPRYAGAVGRMRRHKGVGLLTAMVLLLEMGNPGRFRNRRQVGSFFGLVPSRRDSGNQVNHLGHITRLGSSRARKALNQAAWAFLRTHDKWKAWFKRLAGRRGKKRAVVALMRKLAIILWHEAVAA

SEQ ID NO: 382620 - protein, 353 aa, unidentified
MQIVGALDVHRRQITHKTLELASGDVRRGRLSPANRQSVREWLERFRGCEAEFALEGTTGWRFVAEEIARAGHMAHLADPAETAAKRGRKRRAKTDRADCDLQLKLLLAGELPESWIPPAHILELRTRVRTRKTLVDQRSAWQLRLTAQLFHQGVPAGINPRTRAGREALARVELSPAGRELVSLALRMIDVLDLEIVPLDRELRAFAARQPGCRALSERLYGVGPVTATAVLAELGDCRRFSSSDDAVRHAGLDVTVYQSDSKRAAGHLSHEGPPVLRWALYEAGQQATRQTSPDHAYFLQVRERTDHKSASLSVARKLCRRAFHILRELGEQALAPVDVDAHLEEAIHAAA

SEQ ID NO: 382621 - protein, 322 aa, unidentified
MYEKKTFDASLMSADEKELSHKSFDNTPTGIQSLLDWIAGYHLSLSKLLFCAENMGSYVTELSVSSVSMGFSLALVCPLTIKKSIGLQRGKNDRIDAKRIANYAVLHYRKLELYKLPDKDLVRLRGWIIIRDNLVKQKVSSIKLLETFSQMAKLADVTESISFLEEQLKSIKERILEVEEDMEQLIAASTSLYTNYLLLRSIKGIGIINAIVLLCTTDNFQRFDNPRKFACYCGVAPFEHTSGISIRGKTQTSSLANKEVKVYLTRAAITAISWDPQMKAYYKRKIAEGKHKAAVINAVRAKIIARSFAVIRRQTPFVTLAV

SEQ ID NO: 382622 - protein, 365 aa, unidentified
MKKSSTAATRSNKNLQGKLTIGLDLGDRSSWYCVLDEAGEVVSEKKLGTTPKAMKEVFAAMPHNRIALETGMHSPWISRLLSELGHEVIVAHARNVRLIGESRRKDDRLDARTLARLARIDPQLLCPVRHRSAQAQADLTVIRARASLVRARTALVNTARGLTKSYGERLRGCNPRNMDTEKAQALSPELQAALGPLLQALESLSERIAEYNQQIEAIAQQSYPQTALLKQVKGVGTLIALTYMLTLEDPHRFRKSRDAGCYVGLQPGRRNSGQSEPQMHISKEGDPYLRTLLVQGAHHILGPFGADSDLRRWGLKLAERGGKNGKKRAIIATARKLAVLLHRLWVSGEVYEPLRNTKRTISVAA

SEQ ID NO: 382623 - protein, 358 aa, unidentified
MPVYIGVDFHARQQTISYLTTEDGEIQRLRLEHSQEDLRQGDVRKFYSQFTGEVIVGFEAGGYSQWFEAMLEQLGHEVWIGDAHEIRLLSKRKQKNDKRDANHILELMVSGRFPRLVRRTAESREVLRQMGYRHKLVKMRTMAKNSLQAIALGAGLSLRSRLHSKRGRATLKELNLTAATACQSDKLIELIDYLTTEIERVETWLIERAKSDERVKLLQTHPGIGLLTSLALVHTLHPVERFSNSRKVTAYVGMDPVEDSSADRKRIGSISKAGSRMVRFLLAEAAQVAIRTDRDLRELFNRVSNRRNTPKAIVAISRKLLVRSFIMLRDRIDAEEFLRRGVEARSSRIAHRPTMPEP

SEQ ID NO: 382624 - protein, 447 aa, unidentified
MIQASIERCAGIDVGKKWLSVCIMTGPLQGEPRAEVRRFGTNRAELIQLRQWLQKEEITDVVMESTGSYWKPVFNELENAVKVYLANPQEVKNRKGHKTDDKDGWWLAHLLRHAMIHPSFIPPRPIRELRDLTRYRKRLIGHGTSERNRLQKILEDANVKVGNVLSDVFGVSGQLMLEGLLKGESPEQIAQYARRRARCKIADIAAAVEGHQMNDHHKRMIGYHLEHMQEIEKQLQKLDRDIEEHIRKAGLEKAWQLIQSVPGIQATSAATVLAEIGADMSVFPSEKHISSWAGVCPGNNRSAGKSRGSRNTGGNPWLRAGITECAWAASVKKGCFLKEKMWRITAKHGGKKPPALFAISHTMLILIYNVLRTGTPYQERETVSLTEPQRERAIRHHIRRLGKLGVSVRSPRATGKPATPAKRPRRRGVPTAPLDSQVKIGKVKKEK

SEQ ID NO: 382625 - protein, 524 aa, unidentified
MVVVGTDAHKYSHTFVATDEVGRQLGEKTVKATTAGHATAIMWAREQFGLELIWGIEDCRNMSARLERDLLAAGQQVVRVPTKLMAQTRKSARSRGKSDPIDALAVARAVMRETDLPLATHDETSRELKLLTDRRDVLVAQRTSAINRLRWLVHELDPERAPAARSLDAAKHQQALRTWLDTQPGLVAELARAELTDIIRLTGEINTLAQRISARVHQVAPALLEIPGCAELTAAKIVGEAAGVTRFKSEAAFACHAAVAPIPVWSGNTAGQMRLSRSGNRQLNAALHRIALTQIRMTDSRGQAYYQRLQDAGKTKRAALRCLKRRLARTVFQALRTVHQPSSEHTQPAAACHRSYCSSHLGEPPRLTDMTQKTRIQPLPPKRAGLLIRALYRIAKRRFGEVPEPFTVTAHHRRLLIANVVHEALLQRASRKLPPSVRELAVARAAEPHLQPPAQRRPTPHRTDPNPDDRQPGPGLLPKAARRRENQTRSTTLPQTPPSPHRLPGPAHRPPAQLRTHPTRGRLP

SEQ ID NO: 382626 - protein, 358 aa, unidentified
MTKFSEKLASVTRIGLDLAKNVFQVHGVDAAGNVVVTRKLRRSVVLEFFGQLPRCLVAMEACGSAHHWGREIAALGHEVRLIPPAHVKPYVRRNKTDAADAAAICEAAMRPAQRFVPVRSLANQASLMRHRVREQLVGQRTALLNALRGHLSEVGIIAPQGAQYVYELKQFAESGVDGNGEIVVCDEVRAALAPLAAQIDALDKEIAAIDAELEGVAKADDRAKRLMTIPGVGPITATALAATVVEVGAFANGREFAAFLGLTPRQHSSGGKERSGRISKMGDSYLRKLLVIGATSVLYRAGGHKDALRHWATGLLNRKGGFKYAFKLTAVALANKLARIVFAILRSGGVYDDRPVAA

SEQ ID NO: 382627 - protein, 406 aa, unidentified
MKHVVAFDVSMGKSTMVIYDRYRQCEYEGEITHNRYSFEKLNETLISLTQKDAQAPDIVFEATGVYSKPLERFLGDQGYMYYRVNPLEANIQMASMRRQKTDKSDAHELAKTHFRVEREQTYQEGEYYKQMRAMTRYYDELSSEMTHLYSRLHAILQLSFPELEKLFSKRSALFLNVVQLYPHPDHVLVCSKTVIRNRLKANTRKNLSLARAEEKGIALIEAAKEAYPAISKDDIRCEQVRDYAKRIADLKEKRDQLVQKMVKLSKDKQEYQILISFPGIGETTAVRLIGELGDIRRFKNHKQLNAYVGIDIMRYQSGNTFYKDKINKRGNNKLRKILFYMIQTMIQLRKNTQNHIVDYYDKLKTQPQRKPHKVASIACVNKFLKSAYHLITHNLKYDYEKATMHQ

SEQ ID NO: 382628 - protein, 423 aa, unidentified
MAGVMIGIDPHKGSHTAFVIDGREKPLGQLRVRASCEQAEALLGWAGRWRQRTWAIEGARGLGQLLAQQLIAAGERVLDVPPKLTARVRLLESGQINKTDENDARAVAIAALRARQLPQLTVEDQTIVMRVWARRYHDLGRLRTQAVCRLHTVLCELVPGGVRKQLRTSQAIAVVDSITAESPVAQAKLELAHDLVADLQRLDAQRREVKRRVSRAVAAAPTSITEVYGVGPIVAACVLGYVRDIRRFPSRDRFASYNGTAPIEVSSGDRKIYRLSRRGNRQLNHAIHIAAVSQISHRGSEGHAYYQRKRAKGMTGKCALRALKRKISDTLYERMLHDIRPRKDPGGHSGNDAVSSAAGSHPDGPALRTSHSRATANSKTATTNQRPLTSPPAPDKRRTSRSGTGVKLQPRPRPRRGRGQERA

SEQ ID NO: 382629 - protein, 323 aa, unidentified
MQGQIKSETRNAPSVYAGIDVSKDRLDVYIHPVGCSFDVTNDKCGIKRLRRELMEHQVSGVIIEATGKYHRLAHRSLSQSGIAVSVINPLRARLFAEARGTRAKTDRVDARMLAALGEALMPMATPLAPETLEELQEFVHARHAATVQRTAVKNRLKASQSPALTREFRRMLTTIENHIKRLEKHAAKLIASDPALAHRRDILMSVPGIGPVVAATLIADMPELGTVSRQAAACLAGVAPFADDSGNSEGIRHIKGGRSKPRQALYWASMSARKYNPDMKTFYDRLIDKGKKKKLALTAVMRKLIILANTLITENRLWQPVRP

SEQ ID NO: 382630 - protein, 315 aa, unidentified
MPIVGGLDIHRKQITFDYLDTVTGEVKRGQIAPADREHPRAWLARFAGCEDAAFAVEGCCGWRYVAGELAAAGIGAHLGEPADTAALRGRKRRAKTDKTDARHLRALLAEGRLPECWIPPAQILEYRALLETYHDLRRAHTAWVQRIHAVFFHQGAPPLAEGALRTEPGLAGPRAAAAAHLSAARHLTGAKVLAERLYGVGPLTGLALTCWLGGKDRFSSSRKAVRFAGLDITVHSSDRKGPPGRLSRQGPPVLRWAVHEAGKTHARASAPDHGYYAAVADRKNTKRAALSEARKIVRQACHILTELGDDALAAA

SEQ ID NO: 382631 - protein, 367 aa, unidentified
MKKVSTARAKKVEKSESQKLTIGLDLGDRWSWYCVLNEAGEVVLEQKVATTPKAMKEVFGGMPRSRMALETGMHSPWVSRLLSELGHEVIVAHARNVRLIGESRKKDDRLDARMLARLVRIDPQLLAPVKHRSAQAQADLMAIRARAGLVRARTSLINTARGLTKSYGERLRGCNPRNMNAEKAQELSPELQAALGPLLGEIESLSERIREYSERIEKIAKESYPEVGRLTQVKGVGTLIALTFVLTLEDAHRFGKSRDVGCYVGLQPGRRNSGQSEPQLHISKEGDPYLRTLLVQGAHHILGPFGVDSDLRRWGLKLAERGGKNGKKRAVIAVARKLAVLLHRLWVSGEAYEPLRNQREVALTATA

SEQ ID NO: 382632 - protein, 547 aa, unidentified
MLGPYAAAQPYNGKELGRSARYTSQVAVGRVRPSTPVVPCARLLGWSREPAATSVVTGSVLIPFGRVLQSRCSRARCSAPPPTIVEMTMAPRKQKQAPSQTTLPPQLAAANLHAAGIDVGAEAHYVAVPPSDDPQPVRGFAAYTADLEALAAWLAQCQITTVAMESTGVYWIPLFELLEARGFEVLLVDPQQVQKIKGRPKSDVHDCQWIQRLHTFGLLASAFRPTDQICVLRSYLRQRAMLLTYAGQHIQHMQKALTQMNLKLQHVISDITGVTGFAIIRAILAGERDPAKLAQLRDYRCQHDEATIARALQGNWREEHLFALAQAVALYDVYHQQITACDRQIEAYLQTFADRSDGHTLPPAPRPRKRGRNQPAFAVREPLYRLTGVDLTQIEGLDETTSLVILSEIGLDMTRWPTVKHFTSWLGLCPHQRVSGGKVLSRRTKACANRAATALRLAASGLHHSQSALGAFFRRMKARLGAPKAITATAHKLARLIYTMLKHGTAYVRRGMDEYEQQYRDRVVKSMTRRAKALGYTLVKAPEGAPV

SEQ ID NO: 382633 - protein, 325 aa, unidentified
MRQPQSQLKPLTQVGLDVSSQTLDAHIRVDGKAFSVPNTDAGFDQLCEMLSAYDVSMILMEATGGYEDRAACYLQLQGYDVVVINPRHARRFAQSMGRLAKTDRIDAAILAHMAFMIDSGPDRERYIKPVTDEQRKQLSRMSSRRRQIVDLITIEKQRLTHADDYARESINDIISLLNARLKRIDSDILRYVKKNFSELASRLLSIPGVGSQAMTVLIADLAELGHVNRRRISALLGVAPFNHDSGKFKGQRRIRDGRSSVRNVLYMGVISATRFNPVIRAFYDSLLLRGKPRKVAIIACMHKLIRIINAMMRTGKPFDMSLHGV

SEQ ID NO: 382634 - protein, 419 aa, unidentified
MYYLGIDVSKGKSDYLLMDEAGQKIAKAFSLENSKSDLETLLEKLFSFGISPKDLLAGLEATGPFWEGLFNFLSKKGMKIVLLNPYQTRQYHKTIKNKIKTDKSSAFVIADLLRSGRYLPCCVPEEDVETLRELVKFQYQQAKQKKNLLRRLASIMQIVFPEYEKTPLANLSAIASRQILKRWPTAIDIATASPKKIEKVVRSIKGNNFPAEKIEALVKTASESIYSGRARQARALTIKSLLAELETVLSSLAKVNEKIDEIFSSKQPDDPSFPGGNLLSIPGVGKKTTASFLAVTGFNGEYFHSTIQLTGYLGFFPKINQSGKTEKEPVISHQGPRFLRHSLYIAAVSCIRHNLELKTLYNKKISQGKSPKEALICVAKKLAHIMLSLAKSGENYKPERVFVPPTALRHFQNAASTAF

SEQ ID NO: 382635 - protein, 425 aa, unidentified
MQPTVYRNVAGIDVHKKILAVVVRREEDGQVRYEQRKFGTMQADIRHLAAWLQQHQAGEVVMESTAQYWRPVWHGLESHFPLHLCNPLKVKARRGRKSDFRDAQRLADRWHSGDLEESFIPGAEQRDWRELTRARVQLKRMMVVVRNGVEGLLEAASIKLSSVASDIFGVSGWAMLNLMAEGETDVKVLSAQARGALGKKVAAVEEALAGKLRPAQRLRLKQRLEQVKLLREQVKEISDALAEAMRAHTVILHRLTKIPGIDLAAAQELLAEIGPQAAAFASASQFASWVGICPGSQESAGVCYSRRSAKGNCYLRRVLCQVAWAAIRTKDTFFAGLFARLLPRIERKGAAWAVAHRIAKVVWLVLHNGVEYQEKGPAQPNPRTLTRKLRRLAAELARVGLDAKALLNEQLANPLSTPEPSTGLA

SEQ ID NO: 382636 - protein, 381 aa, unidentified
MTKIIRIGMDTSKSVFVLHGVDAAEQPVLRKRLRRRQVLESFGKLEPTKIGLEACGGAHYWARALRALGHEAVLLPPQYVKPYVKRNKNDAADAEAICEAMSRPTMRFVPVKTAEQQAALMLAGMRDQLIRRRTQLSNAIRGYAAEFGLTAAKGLSKIEPLLARIAEDTALPELAGELFADYGQEYAGLQVRIAKIEAQLMAWHKGNELSRRMVEIPSIGPIGASLLAMKVTDPQAFRSGRDFAAWLGLTPKDHSTAGKTRLGVITRAGDENLRSILVAGATAVIQQVQRGRGHASPWLVELVKRKPPKLAAVALANKTARIAWKLMVSGEHYDRTRSVGRGEAPVADREERRAALCGGSAQRSSLRSRATPPQRTEMAKA

SEQ ID NO: 382637 - protein, 346 aa, unidentified
MKLIKKVIGVDVSKDSFTVRFGTLDQELNQTISKPFKFTNNLKGFKQLLKTIGEVHYFNSQDISSKNIPVWFVMEATGVYYENLAYFLAENKFSLSVVLPNKVKNFAKTLDNKSKTDDIDAANQTQYGLEKKLKPWLAPPKIFKELKELAREYQSIKQSISSLKNKLHAKSYSYEANKETVKRLNLHKKFLEQQLKQVKDQIKKLIKSDNELNERINTVTTIKGVGLITVVTAVTETNAFASIENKNQLASYAGYDIIHDQSGTHKGKTKISKKGNSNLRTAFYMPALSAARYNNNLKSLYIRLCKTKVNKKIALIAVARKLLILVYCLWKKNEKFIQNYPNIKTA

SEQ ID NO: 382638 - protein, 409 aa, unidentified
MRIIGMDIHRVFAEAVALEDGETKRLGRIGMTREHLEDFARTLLPSDHVVVEATGNATAVVEILAPRVARVAVANPLQVHLIAKAKIKTDAIDARVLAQLYAAGFLPEVWIPDAAALARRRQVTRRTQLVRQRTRLKSIVQSILHANLIPPCPFADLFGGKGRIWLRAQYLPDDEREAIERHVEEYDRQSDALKGVERDIARAALSDPNVTRLMTIPGIDMVVAVGLMAAIGKIERFDNPDKLVAYIGLNPSVHQSGDGPAHHGRITKRGRANARHLLVEAAWQTVRSPGPLRAFYERVRSKRGNHIAAVAVARKLAVIIWHLLTKGEDYSWVRPSLHAKKLRDLELRAGHPPRRGQKGAGYDYNITQRRREERNRAQQAEGAYRRMTDGWRQRGARSKPTDATNEERR

SEQ ID NO: 382639 - protein, 319 aa, unidentified
MAKEKVYVGIDVSKEQLDVALYPQDTCRKFSNDDNGIGDLIIYLKDLTPAIVVLEATGGYEMPAVATLSTTGIPVTLANPRQIRDFAKATGRLAKTDGIDARVIAHFAAAIQPSPKSIPDDQTQEFKELLMRRRQVIEMITAEKNRLDKGGTAVKNLIETHIQWLQQQLDDINHRLDRTVKQSPLWREKDTLLRSVPGVGPVLSATLLADLPELGMLNRHKIAALVGVAPFNRDSGMMRGKRTVWGGRSKVRVALYMSTLVATRYNPVIRTFYLRLCSYGKSKKSAITACMRKLLIILNAIARTGLPWSYTSPQNSPEN

SEQ ID NO: 382640 - protein, 448 aa, unidentified
MSQIKRRRPYRTVVVKPEMSVALLRRTKSEQLVVAIDVAKEKMVAAVMDHEESVLVTVKWSHPRQSEAFYDFVEELASERQIDVAMEPTGTYGDALRFHLNERGIAVYQVSPKLVHDARELYDGVPSSHDAKACGIIGMLHLGKRSRRYQPMDASRRNMKAATATLYRYERQFIRERSQLDAMLARFWPAVTEVLGLGTKSLLALLAEFGCPEAVQAKPDESRELLTRASKHKLSEKRIEAVLKSAGSGHGEKPCSAEVEAVKSLATDALRTRLSVAQAKKQLERWANENDAAKPLIAVVGKVSAGALIADVGDLRQFESPASLLRCVGLNLKECSSGQFKGKLRITKRGAPRARHYLFYAALRLIYSDPVVRAWHAKKRSRSSESGLLAVVAVMRKLTGALWHVARGATFDASKLYDTTRLCVDADRSLPKPHFGADKLIIDATTLA

SEQ ID NO: 382641 - protein, 350 aa, unidentified
MLIIGCDYHPGFQQIAFVDTETGELQERRLEHREEAEKFYRELAARGKDIRVGMEASGHARWFERLLRELQCELWIGDAAEIRTKRVRKQKTDRQDAQLLLKLLLEDRFPRIWVPDAENRDLRQLLWHRHRLVQMRTRIMNQLHVVALNEGVRRKKALWRPAGRSELESLVLAPWALRRRQDLLDLFDQLTPKIRELTRALEEEVEKRPVARRLMTHPGVGVLTALAFELVIGTPERFGCGKQIASYVGLVPTEESSGDRRRLGHISKQGNALLRFLLVEAAQVTVRSQPQWRSKFFHLAMRRGRKIAKVAMARKLAVHLYWMWRQGRDYGQLEKLGSHAGEPGNPHGEQ

SEQ ID NO: 382642 - protein, 368 aa, unidentified
MGIEFKIQIIMKKQILKLSLGVDVSKDNLAVCLCRLTARLAKEFEDPFEISNNLPGFKKLVKWLLKNASSPEDIFIVMESTGIYHEALVYHLYMEGFPVSVMQSGRVKRYAQSLDQRSKTDALDSRMLAMLGCERELALWSPPDPILRQLKGLSRERSFLLKEKQIERNRLHALEHSVYKSKRELKRYGQRLKLIEKQLIEIEKEMEILVKNDPQMHQRIKHLESIPGISFKSAATVVGETLGFTGFTNAKQLTSYAGFDVVLKESGAYKGKTRISKKGNKHIRSALYMPVMSAIQWNPTLRKFYERVQPTKVKPMIALVAVERKLLVLMYSLWKNEIDYDPEHEQKKTARTEVLAAQDRSNLTLTSS

SEQ ID NO: 382643 - protein, 310 aa, unidentified
MEDIIVGIDVAKDRLDVAVRPSGEAFVVERNAAGLEVLVARLRELSPYLVALEATGGYETVVAAGLAGAALPVVVVNPAQVRAFAKALGQRAKTDPIDAAVIAHFAQATRPEPRPLPDEATQLLADLVARRRQIVEMIGAERQREKRVTIVHLRKSIARLIKTLEKELASLDRDIDDAVRGSSAWREKEDLLASVPGVGPTIARTLIAELPELGQLGRKQIAALAGLASFTCRSGQWRGRSFIGGGRTTVRTALFMGAMVAKRHNPVLKAFFDRLVAAGKRRMVALIAVARKLLTILNAILRDNRPWQSA

SEQ ID NO: 382644 - protein, 342 aa, unidentified
MQITTIGLDIAKNVFQVHGIDVAEKVVVRKQLRRGQVMKFFEALSPCLIGMEACATAHYWARELTKLGHEVRLMPAKDVKAYVKRNKNDAADAEAICEAVRRPTMRFVRIKSAEQQGQLMQHRTRDVLIRQRTQIINALRAHLAELGIVAAKGDNGVKELLSIVADEKDARLPIDARASVIVLAAQLQALQTLIGSIEKRIKTQHRSNEASQRVETIPGIGVLGASAITATVADPAIFRSGRDFAAWIGLVPRQDSTGGKQKLGPISKQGDRYLRRILIVGAISVLRRARENPGKYPWLTQLLARRPFKVVAVALANKMARMAWALLAHGGTYRAPVLAAAA

SEQ ID NO: 382645 - protein, 342 aa, unidentified
MEYYVGLDVSLKQTSICVVDQTGSVVREGVVDSDPEAISVYVRSKAPDAVRIGLETGPTSTWLWTELKQLGLPVICIDARHAKAVLRMQINKSDRNDAIGIARIMQTGWFKEVHVKDIESHSVRALLASRALLVKIKRDLENHVRGLLKNLGLVIGRAKFNVFAARAEELIEGRPELVAAIRPLLEARNAVGQQVSELDRKVMKLARHDAQVRRFMTVPGIGPITALAFKATIDDPARFARSRSVGAYVGLTSRRHASGEVDWSGRISKCGDAMLRSYLFEAAGVLLTRVPKWSAVKAWGVRLAKRNGLRKAKVAVARKLAVILHRMWIDGTEFNWSKEIVA

SEQ ID NO: 382646 - protein, 387 aa, unidentified
MYYVGIDIAKLNHFASVVSADGEVLVKPFKFTNDNDGFCTLLSALASYERGSLIIGLESTAHYADNLVEFLVSKRYQVCVINPIQTSTMRKNNIRKTKTDKVDTLVIARTLIAQPHRFFSQEDIDLMHLKNLGRFRQKNIKERTRLKIQLTAYVDRVFPELQYFFKSGLHQKTTYVLLKEAPTPELVASMHLTHLAHLLEVSSHGHFNKEQAKELRILAQKSVGSSDRALSLQVTQSVEQIELLDRQINDVESEMTKIMLGLDSVIMTIPGIGYINGGMILGEIGDIHRFSKPCQLLAFAGLDPSIYQSGNFNASHTRMSKRGSRILRYALINAAHNVVKNNNTFKAYYDAKMAEGRNHYNALGHCAGKLVRILFKMLTDDVAFNLE

SEQ ID NO: 382647 - protein, 412 aa, unidentified
MKDLLEISCGLDIHKEKIVACILTGPLGKPTHSEIREFTTLIPDMLALRDWIISENCHHIAMESTGIYWIPIYEILEDAFSGDITLLVVNARHMKNVPGKKTDIRDSEWISTLLRAGLLNASFIPEKRIREFRDLNRYRKSIIRDITSQKNRVEKFLQSSGFRLSSFISDIFGASGRNIILHLMEHGQIDKMSLDSYLKTKTRKRIDEILMSVNGTLSEHQKSFLKILMCHYDSMKEHLIEIETHLQEDMLPFALQIEQLNTIYGISTTASCAIIAEIGTDMKPFKTAEHICSWAGLCPGNNESAGKRKSTSITKGNPYIKSMLCEIAWVIAGKRNTYLSAWYWRIKQKKGAKKAIVALARKLLVIIYTMLKQGTLFDENCFETRRKNCEQKQVSHYIRELEKRGYHIEASA

SEQ ID NO: 382648 - protein, 385 aa, unidentified
MLSEGGEKAQNRQGRGRSNDLEVKQLGGEQDRRATTNPVESPNSRKGRKDEPALRKAGCGREKQWVKVMSQYPELYVGIDVAKRTLEVALSSGESFTVDNDDAGVSQLSGDLVRRAPALVVLEASGGYERKLWLALLEAGIATARVNPRDTHHFAQAHRQLAKTDRLDARGLMLFAAQVRPAPEVAPAAADERLKEMVGRRQQLTTMLTAERNRCQQALTSANRRSIETVIRFLERRRKALDQAIEKHLSKNVQVRELNELLQTAKGVGGVVAAILIARMPELGSLSRGQVAALVGVAPYDHKSGQWDGRSRIFGGRAEVRCALYMATLGAVRGDPHLRACYRRLREQGKEKKVALTACVRKLAIMLNAMVKNRTPWRPSCPTLT

SEQ ID NO: 382649 - protein, 373 aa, unidentified
MNYNTVYVGMDVHKEKFTLCCYTNEKEQAEYNQKVDAHYSKVLNYLEAMRFHYGDHVTFICGYEAGCLGFTLYHQLTDHNVKCVILAPTTMPKQSGKKKIKTDKRDAALIARCLAHHDYSPVHIPTEQDEQVKEYIRMRDDHKLALKKVKQQILALCLRHNYCFNGTSNHWTQAHLKWLRALKPEGLYREILSEYLLTFDTLTDKLERLDQRIEELSSKEEYHENVHKLTCFLGVKGHTALSTLVEVGDFKRFSSAQHFASYLGLVPGEDSSGDSQNRLGITKAGNQHVRMLLTEAAQSYTRGQIGYKSKALKQRQSGNAPEVIAYADKANERLRRRYYKMVLGNNKKSNVAKTAIARELACFMWGMVTGNYA

SEQ ID NO: 382650 - protein, 417 aa, unidentified
MDLDEVIYNVACGLDIHFAFVTACLVVSVPKKRPRIEEKQFPTTQKGLRSLLAWLEANHCEAVGMEATGVYWIPVYSALEGSQMKLIVGNPQHMKNARGQKTDRKDARWIAGQVRHDRIKPSFVPTPEFRGARKLARARRQMVHAQTSIRNEIQRNLAEAGITLGAVVSDVFGVSGRAILEALAEGRSVQDELPTCLKAGLKKKLAPVAAALEAPLDEISRSLLAILLKRLEELEQKVEDVETMLFQQLAPHAEKLALLVQIPGISKISAAIILAEIGVDMTAWPTEKHFSVWAGVAPGCKQTGGRNKRAPVRKGNPFLCSILMECAGAAARTKSCHLQGKYYKLVAQLGSKKKARMAIAHKLALIVYRNLGANRAYEEPKPKPLSEKTKRKILKTRLRDIEKLGYRVSIELMEVAG

SEQ ID NO: 382651 - protein, 358 aa, unidentified
MNRSTGMNAGQIIGTMGGRQVIGLDISKHVFQVHTVDMDTGEIINVPIKRAKVLEHFANKQPGLIAMEACGGAHHWARELSALGHSVRLLHAKAVRPFVSGNKTDASDARAIWQAVQQPGVKFVGIKTTAQQATLTLHRQRELLMKMRTMQTNALRGLLYEFGATFAQGRKALFKDIEQTLEELSSQLPQMVTDSLREQLARIQAMSQDMLTIEKRLGLQLKADPQMQRIAQIPGVGLLTATAAIATMGEARAFKSGREFCAWLGLVPKQTGSGGKVRLGGISKRGDTYMRTLLIHGARSVLSHAKEPGPWLAQIKARRPANVVIVAQAAKMARTIWAVTAKDQDYQRGFKSVRPQAA

SEQ ID NO: 382652 - protein, 357 aa, unidentified
MRCVPTDAQGITLGVDTHKDFHVAVALDALGRRLGTLSIPTTPSGYEKLAEWANGFGPLEAVGIEGTGSFGAGLTRFLRAEGTRVFEVDRPRRRDQYRSGKSDPIDAELAARAVLAGTATTQPKDADGEVEMIRTLRVTRRSAVKARAQAVNQLKNLLITAPEGLRSELRGLSTAKLVGKVSGFRPGANPSDVEAATKFALRSVARRHRRLSEEICELDEQLNRLVAEAAPELVALEGVGTDTAASLLIAAGDNPERLKSEAAFAHLCGVAPIPASSGKSVRHRLNRHGNRDANRALYVIALCRMSREERTRAYVAKRTTEGKTKKEIIRCLKRYIAREIYRILASVSLSKPPILAP

SEQ ID NO: 382653 - protein, 350 aa, unidentified
MKAKLVAIDLAMRSSQIYVLGPDGKVLLNRKLTRERFGLWLKDLEPTRVAMEACATAHYWGQRLQAMGHEVRLVPAQHVKAFVRVHKSDRDDALAIAEAAQRPGIHFVPVKTVAQQDLQLLGRIRNAKTAERTALINQARGHAAEYGVVMPKSRAEFMTALPEVLADAGNGLSPTARQALADLYDDIRAVDARIDALLRQLVALAEQQPAFERLLTAPGLGAIVAAAFLAALGSGRQFRRGRDVAAWLGLIPRRHGTGGSVTLQRITKNGDRDLRVALIHGARAVLRWVDRHEHARSQWLLGLRQRRGKHRTIVAFANKMARIGWAIVTGEGAYERSRAFRPQPPRQAAA

SEQ ID NO: 382654 - protein, 410 aa, unidentified
MQMYCGSDWATEHHDVAVVDDDGRVVARGRVSNDAAGLAQLLTLLAEAGDSAADPIPVGIETDRGLLVAALRETGRVIYPINPLAASRYRARYAVSGAKSDATDAVLLANIVRTDPGAHRPLPADTEAAQAIRVLARAQQDAVWARQQIGNQIRDLLKDFYPAALTAFAGLSEGGLARRDARTILAAAPTPAQAAKLTPARLRRLLVKAGRQRHLDRDVERLREVFTDTYLHHPPTVENAMGIHLAALLGQFEAACTAADELAEAAIAHFERHPDAEIITSFPGLGMLAGARVLGEIGDDRSRFADARGLKAFAGSAPITRASGKKTVVLHRHIKNRRLAAVGPIWALGSLRASPGARRHYDTRRAAGDWNHQAQRHLFNKFLGQLHHCLQTGQLYDEHLTFPPPLLLAA

SEQ ID NO: 382655 - protein, 314 aa, unidentified
MSSLATPYVAFDVSKRTLQFDGPCRQSTGKIPNQAEPLVRELQRLRARYPALQLVCEPTGGCERLLLATAQALQIPLTLVDAWKVRHFAFGLGWLEKSDPIDAALLRRYALTAVVAPTPPADAQHARLRDWVQLREHYVERLGQEETFRQTLGHAQFQARVQQECDHLATLIQELDAQIVAFLQAEAPELNDKVQTLCLVTGVGLRSATALLAHLPELGRYRDAAIAKLAGLAPIVDDSGQRTGNKHIARGRANARRALYLAALVAAQHNEHLQPFYRRLRLAGKPAKVALIAVARKLLVFLNSLLKPAHLQPT

SEQ ID NO: 382656 - protein, 364 aa, unidentified
MKIVGCDLHARQQSIAMLDTETGEFTEKIIRHEGNTVREFYAALKGPVLLGIEATGSMQWFLELLEELGIKYRVGHPAKIRAAETRKQKHDRRDARLILDLLVMADRFPEIWMPSTEQRDLRTLLRDRHQWVKMRTRLQHTLQAIALNHGLRQGHRLWSAAGQRALHVLPLAPYTRQRRSALLSLYAQLQKRIQELDKAVEAQAQQRPQAHRLLTHPGVGPVTALATEVFLGDPSRFSTGNQVASYIGMIPCEHSSGKRQRLGKLTKEGNALLRYLWTEATMHAVGKDPELKRFYRRKLIQKGMGKARIAAARKLGIRLWIMMRDQIDYEEFCRRGKLRQKGEAHAGMPAFNSGPAHAVTGLTE

SEQ ID NO: 382657 - protein, 351 aa, unidentified
MKTTIKQVLGIDVSQKELVTCLGIGYDDFTMVLKAHKVFANTTRGFVLLLSWIAKQTDSSLSVRYVMEATGVYHEKLAYFLEEQHKEVSIVLPNKISNYARSLTVKTVTDKTASEAIARFGLERHLEIWKKPSDNYLKIRQLTRERDQLIVERNTAKNQLHAEKSSARPSEKSIERTHNRIMFLTKQEQEIRNEITELIQSDQQVGQQVELLCSLPGVGQLTAAIVLAETNGFDLIRNKRQLISYAGLDVKEKQSGTSIKGQSRISKRGNRYLRKAMHLPALSAVRHDDRYKNTFIRLVGRHGLKMKALVCVQRKLLEMCYIVFKNNAKYDKDFIKKQEATEMEEKKLEMA

SEQ ID NO: 382658 - protein, 373 aa, unidentified
MSTVRRGRARHPWFQKTANQQASSRRNSGEPEQLSGQLKPVSCKEGPRRREKEMEKERVYVGIDVAKASMDAAEYPSRRQWRFTNDENGINQTVGRLRELSPALVVMEATGDVELPLVAASAVAGLPIVVVNPRQIRDFARAMGRLSKTDAIDAQVIAYFAATVQPELRPLPDTQTQELSAILARRRQVVEMIVAESNRLGVASKAVSEGIQDHIAWLEKELANIDNNLTQSVQRSPVWREKYELLRSVPGVGPVVSATLLGDLPELGTLNRKQIAALVGVAPLNRDSGTFRGRRSAWGGRAKVRAVLYMATLTATRHNAVIKGFYQRLCGAGKEKKVALVACMRKLLTILNAMIRSGTSWRYVSAPVFGPCS

SEQ ID NO: 382659 - protein, 422 aa, unidentified
MNESSNIGQAEFAAFIGLDWGDQSHAVALRASGDANVQLLTIKHSPEELWSWLQKLEKRFGGRPVAVALETSRGPLIHVLAEVAWLVVYPVHAATSARFRKAFRPSGAKDDQPDALVLLELLTRHRDKLRPLAVEDPATRLLGRLCELRRKTVDRRTQLGNELRAALKEFFPQALELVGETLHSPLALDFLERWPDLLSLKMARAATVHTFYFAHNVRRPQTVQQRLELIARARPLSNDEVVVSVGVRLVRRLVQEIRVVQKHIVGDDKAIQAAFKEHPDAPLFRDLPGAGAALAPRLLAGFGSDRARYRSATEFQRYSGVAPVKEKSGGRVWVHWRWSAPRFLRQSLVEWAGQTVLYSPWARNYYDQQKGRGKRHWMILRALAFKWVRILWKCWITNEPYDETRYMQSLIRRKSPLALNAL

SEQ ID NO: 382660 - protein, 342 aa, unidentified
MFIVGIDIAKRSHEAVIIAEDGQIVRKAFNFRNNCTGYNLLLEQVRKLTNVKSQIVFAMESTAHYWLALYARLLKDGYTVMILNPIQSHSLRELYIRKAKTDARDSLIIADLVRFGRCKASNVPQDKLLALRELCRSRAYLIDVAADLKRKLIALLDRIFPEYESLFDPIFGKASISVLRRYPTPQKLKNANLEKPTQILWENSGGHFGEWKARQLKEAAYNSFGIEDSCGVYSALLEIFMEQILSLTERADVIEKQIASLLKEFESQLMSIPGVGTVLAATILSEIDDISRFSSADKLLAYVGLDPSVKQSGEFKSSQNRMSKRGSPYLRRAIWLASTVAV

SEQ ID NO: 382661 - protein, 430 aa, unidentified
MKSNTQNAKIEAITEKTLVLGIDVGSETHYARAFDYRGIEYSKKPFKFSNTEAGFVTFKEWILDLKEKHEKDKVVPGMEPTGHYWFNLGKFLQDNEMKPVLVNPHHVKKSKELDDNNPTKNDRKDPKVIAGLVREGRYMIPYLPDGVYADLRTASNIRFQLQAELTRIQNRISRWFNIYFPEYKTVYGKPDAKSGMLILKQAPLPEDILTLGIDGVNQIWRDAKMRAVGKARAKTLIEAAEHSVGSKEGAVSARMEIRMLLEDYESRNIRLQEVMTLIEELVNQIPMAEKLLGIKGVGIKTVSGFLAEVGDISRFNNPKELQKLAGLALVENSSGKHKGKTTISRRGRKRLRYLLFEVAMSLVAKNPEFRELHTYYTTRRLNPLKKMQSLMAVAAKLIRVFYAMLTKGVDYDPKKMVGDIRRPVVYLPAA

SEQ ID NO: 382662 - protein, 344 aa, unidentified
MKYYVGLDVSVKTTSVCIVDEAGKIVKERSLATEPEVIAARLGKTDIAFERVGHEAGPMSSWLHEGLSRLGLPVVCVEARHMQTALAAMRNKTDRNDARGIAQMMRTGWFRPVHIKSIASQELRLLLVARRALIGRRRDIENVIRGTLKVFGIRVGQTSRLNFSKRVRELVEDRAAIAEVIGSLLTVRDTLMDQTQVLHRKLMSVVRADDVCRQLMTAPGVGVVVAASFKAGVDAPERFSRSRNVGAHFGLTSRRYASGEMDRMGRISKCGDELVRTSLYEAANVLLTRVKQWSTLKAWGLKVAKKAGLQKATVAVARKLAVILHRMWADGSDFQWGKAQEMTA

SEQ ID NO: 382663 - protein, 427 aa, unidentified
MSKSQNSKFNAIENTDAIVGIDIAKNVHWAGIILPNGKEIKKSFSFNNNKKGFESLVETVKNVLTMLNFKKAIIGMEPTGHYWKSCARYLKKIDWIKVVTVNPYHVKNSKEFDDNCQTKNDKKDCMTIARLIKDARFFEPYLPEGIWAELRNLSNTRAELVGKQNAVKNRLIATMDEYFPEYTKVFKKILSRTSEEILKECPFPEDIKSKGKEELLKHIKKTVKRGYSKKQVETIYELANESIGTTEGTEGAKFQLNMYIEEAKLLEKQIKMTEQELERQLKETGFYESLTSIQGIGIVSAATFVGEVGDINRFDSYEQIRRYAGLNLVENSSGNHKGKTTISKRGRSLLRSILYRMAFTMVNKNKEIKELYKYLTTRKENQLKKKQAIVAVIGKILQIIYAVVTKNEEYKATRVFSQDRLEQLKVA

SEQ ID NO: 382664 - protein, 371 aa, unidentified
MDESSKTIYVGLDVHKESIAVAYAPEDRGAEVVSLGAIGTRQSDIDTLIRKLQSKGATLVFVYEAGPCGYWLYRYLTRKGLSCHVVAPSLIPRKPGDRVKTDRRDAVLLARLMRSGDLTSIYVPGIEDEAIRDLSRGREDAMRDLKATKYRLKAFLLRQDIRYAGRAIWNAAHLRWLSEVVCPTPAQQIAFQEYVRGVTEQHERVQRLESALHDAVTRWRLYPVVQAIQALRGVELTGAIILIAELGDLTRFDTPRKLMSYLGLTPSEYSSGERRRQGGITKAGNTHARRALVEGAWAYRDPAKVSRHLQLRLEKLPAEVQAIGWKAQVRLCKRYRQLIARGKHVNQVVVAIAREMAAFAWAIARIVPLAP

SEQ ID NO: 382665 - protein, 334 aa, unidentified
MEQITTVGIDLAKRVFALHGVDGDGRVVLRRTVRRDQVLEVMATLPPCVVGMETGSGAHEWARQLQALGHTARLMAPKFVSPYRTRGKNDGNDAEAICEAVRRPGMRFVPIKSVEQQALLSLHRARQGFITERTAVINRIRGLIAEFGVVLPARADTIRRQAGAAAECIPLLARRVIADLLAHVRLLDARIGEYDKELDEQAKLSESAQRLMKIRGIGTLSALAIVATIGNARDFSSGRQFAAWLGLTPRQHSSGGKARLGHITKYGDAYLRCLLVQGARSVLHTAARHADRMSCWAQSIESRRGYHRALVAIAAKNARIAWALLNRNEVLRTA

SEQ ID NO: 382666 - protein, 346 aa, unidentified
MDATTVAVDLAKTVFEVAIANAQWRVVDRRRLNRAQFTRFLVETAPTHIVMEACGMAHFWGRVAQQHGHRVTLVPPAYVRPYVRRNKTDRADAEAILEAVRSGEMPSVPVKRIEQQALVALHRVREQWMTTRTARINTLRGILREHGILLPAGAQTAVRVVPAMLEEAATQLPMHLRMVLASVHEEIRAIEARVADLERELRALAEADPVVTRLRTIPGIGLLTATALVGAVGNIHAFRRARQFASWLGLTPREHSSGQRRRLGSISKQGDVYLRCLLTHGARAVLVTAHRRAASGQSLTRLQQWAMTLRQRRGHNKATIAVANKLGRIVWAVWHHDQPCVLPEAA

SEQ ID NO: 382667 - protein, 343 aa, unidentified
MDHYAGIDVSLEASSVCIVDATGKIVREGKVATSPGALIAWFGEAKLKFVRIGVEAGPCSQWLFPELKKAGLPVELLETRHVRNAFKTMAVKTDRKDARGIAELMRVGWFKPVHCKSMSAQETRVMLNARSLVHEKLKDVEASMRGMLRNFGLKVGRTTHSRFAARIKELVEGHPTLEIMAEALLAVQTALLEQFKNLEKRVRIMARHDAQARLLMSTPGVGPIVSLTFAAAIDDPARFKNSKTVGPYLGITPKKYQSGEIDITGRISKIGDKSVRLALYQAAHIILTKPVKSSVLKDWALRLAKRIGMSKAKVALARKLAVIMHRMLVDGTLFNPAEGAAKA

SEQ ID NO: 382668 - protein, 412 aa, unidentified
MDLVYARCAGLDVHKATVVGCVRVPGPRREDRQTKTRTFATTLRGLEELTAWLTSHGVTHVAMESTGVYWRPVYAGLEGTVQVLLVNARHVQMVPGRKTDVRDSEWLAQLLECGLLRGSFVPPPAVRDLRDLTRLRKALIRERGHHVNRIEKTLELANIKLGPVVTDIMGKTGRAILEALSAGRDAPEQLAALAQGSIRTKKQAALREAVAGRLTPHYAFLLHQHLSLIEALDAHIVTLDARIEAAMAPFAEAAALVQTMPGVATRAAQAILAETGVDMGSFPTAAHFASWARLCPGTHESAGKRRPTTTGQGAVWLRATLQEAAWAAARTKRSYYRALYHRLKGRRGAKKAIVAVQHAMLVALWHMLKRRVPHHDLGADYFDRRNTARLRHHHVRRLRQLGYQVVLVEAAA

SEQ ID NO: 382669 - protein, 402 aa, unidentified
MNCVGIDVSKGKSMIAVMRPFGEVVVSPFEVRHTANELSELAGLLKSLDGETRVVMESTGNYHAPVAWLLHGAGLYVSVVNAMLVHDYGNNSLRRAKTDKKDAVKLANYGLDHWLTLPRYVPEEDARLMLKTCYRQYQQYSKVQTMLKNNLISLLDTAFPDATRLFTSPPRADGSEKWVDFVATFWHCECVCGRAEKAFTTQYQKWCRKHGYNFSEDKALDIYASACRHFGVIPKTDTAKLLVEQAISQLQTTSSALAALKQEMQSLAASLPEYPVVMGMFGVGPTLGPQLLAEIGDVRRFHSKKALVAFAGIDAPPYQSGQIDVRSRSISKRGSASLRRTLFLVMSVILQCAPIDEPVYQFMDKKRSEGKPYRVYMMASANKFLRIYYASVKAYLESLEHD

SEQ ID NO: 382670 - protein, 349 aa, unidentified
MEATTIAVDLGKNIFEIAVANESWQVTERHRLSRARFGRFFAARSSCRVVMESCGTAHFWARRLVAAGYEVSLLPAQYVRAYVRRNKTDRADASALIEAFRCSDIQPVPIKSVEHQQIQALHRVRAQWVQTRCSRINTLRGVLREFGIVIPLGPSMAKARVAEALEDAENELPFGVRSSLAQMLEEIRELESRVASIELQLRELTRSDEVVRQLQTLPGIGLLSSTALRAAVVDIQRFPSGRHFASWIGLTARETSSAGRRRLGRISKQGDVYLRTLLIHGARSALVAAHLARRRDRPLHRLQEWALECEKRRGRNRAAVALANRIARVVWATWKYQRAFNGNWTAKAA

SEQ ID NO: 382671 - protein, 326 aa, unidentified
MTEHYIGVDLHKVFFQACAVTTSGMREWEDRFPRTAAGIAAFVARCDAQTAVAVEASTPTWHFADAIHDRVGEVRIVDSVKTRLKAGYAAKTDRLDARRLADALRRDSVVGIYYPPMAVRELRELCRGRHTLVQMRTRLLQRLRAVLLRQGIVEARRLVRRDAVLDTLLLPPRAAASVMSLRHLLAGVRAEITTVEHEVHAVAATDPIATRLQQIPGIGPVLSLMMRAEIGEIRRFPTGRHLASYAGLVPRVDGTAGRYRYGRITRRGSPWLRWALVEAAMHGPRRHDPAGRWARRLAIRKGALKARVACARSLCDEIFAVWMTGL

SEQ ID NO: 382672 - protein, 342 aa, unidentified
MFYIGCDVSEKSSYVYVTDGKGRKVESQEIPTDKDGYRQYFKRWMNKPVKVAVEAGGHSRWIHDTLKKLGISVYIVNPNKVKIIAKNKKKTDKVDAIFLAKLLRIDELPERVYVAEGDSRELRDLLRSRHQLLKSSTCLKNHLRGMLRQEGIKLKTKAFDDESIFTRLQENKSVPQHLNPIVESYGKAIAELRKQKDELDDVIADYQNKDVALLKSVPGVGEVSSKTYYAAISTIKRFKRAKKLTSYCGLVPSVFSSGERADYGHITREGRSEVRHVAVQSAHAILRSTNSESKPLRKWYERIARRRGNKTAVVALARKLTEIIFYVLRDRKPYDASLLRTN

SEQ ID NO: 382673 - protein, 470 aa, unidentified
MGKKKEKSQKSITPKKVVVKMKEGLAVEHPFAAGIDIGDTEIAVAIRGRDGYEVSTFGTFSEDLDSIVSYLKKNDITTAAMESTGVYYVPLYIKLQEAAIEPYLVNARHAKNVTGRKQDDTDAIWLQKLHTCGLLQKSFQPDAEGRVFRDYVRHRKNLVTISSDSVRRMQKALELMNVKIHTVISDILGKTGIAMIEAILNGQHDPVELSKFKDPRIKASDEIIIKSLKGIWREEHLFALRQAYETYQFHQKQIEVCDERIRLQLDKQTAIINDGEIYCENNECLSLEKSKDEKKKKSKKKAKKNQYKFDVKSYLVKLLGVDLCAIPGISEITVMELIAETGINMREWKSAKQFCSWLNVCPNTKVSGGKVLSSKTMKKKNHAGQCLRMAAVTVAKTKTPLGDYYRRIRAKQGGKGAALATANKLARIIYTMIKEKKEYDLSLYEKAQENFKAKQIKFYQKKILELSRVA

SEQ ID NO: 382674 - protein, 361 aa, unidentified
MKKVSRELPKMEAGLVKPEMTVGLDLGDRYSHYCLLNSDGEVVEEGRLQSTEAALRRHFEGEDCLRIALECGTHSPWVSRLLNVLGHQVIVANARKIPAITGSESKNDRNDAEKLARFAAFDPKLLSPLEHRSEERQVDLNLIHARSTLVRARTMIVNALRGLVKSAGGRLPACSTESLPARVLAAISPTLSAVATPLVEQIGLLNAQIDGMGKQIEKLSAKYPEIVLLRTAPGVGPIVAAAYVLTLGQPDAASNRSAGAFLGLRPAQSQSGAADPQRRISKTGDSFLRSLLVQSAQYVLGSFGPDSELRRWGLKLAATGGKRGKKRAIIAVARKLAVVLHALWRSGQRFQPFPQQVALAA

SEQ ID NO: 382675 - protein, 338 aa, unidentified
MKGSATVAKLWIGVDIGKTHHHVAAVDGDGHLVYSRRVANDETALLTVMAEVSTHGRPVCWAVDVTTGLSALLLTLLWRRQVQVRYVSGTVAFHMAAAFAGENKTDARDAVVIAQTIRMRPDIPILEPSDRLLAELTVLTGYRADLVGQRVATLFRLQELLTGMSPALERAVDLNRKGPMMVLACWQTPAAIRHAGVDRITALLRRGHVKNAVHVAEAMVAAARQQTVTLPGQRAAAVVVGQMATEILALEQRIAAVDDLIADQLDQHPLAPIIGSLPGMGPLLTAELLVHTAGMTEYDSPAKLAAHAGLAPVSRDSGTVSGNHRQPRRYHRRLSLSA

SEQ ID NO: 382676 - protein, 344 aa, unidentified
MAIVGGLDIHRRQITYDWIDTDSGETCRGQLSPATRLELRAWLARFTGQQADFALEATTGWRFVAEELQRAGAGAHLAEPADTRALRGPKRRAKTDRTDARHLRELLRGGTLPESWPPPAHIADARTQVRLRRALVGERTGWYQRIHAILFHHGLPERSQLLTADGRAWLARAELPAVARQAVELALRMIDHLEVELDTLDAQLAGIARAQPGCKALMGRYGVGWLTAVAIWAEFGDVRRFANARQAVRFTGLDITISESDGKRARGHLARQGSPVLRWAFHEAAMCAARPTSPDHAYYLQVKQRLGGKRAALSVARKLAREAYHTLRELGDQALVPAEFPTAA

SEQ ID NO: 382677 - protein, 411 aa, unidentified
MTKEDFIYVGIDLHKEIHTAVMIDCYNNKLGEITFPNRPADFPKLVTKVKKCNTDAKEVVYGLENAYGYGRALAVWLIDKGYFVKDVNTAISHRQAKHRGAMYRKSDSDDAEAIALATLNMLDKLPDACPNDAYWSLGQLVHRRDNIMKQRTRLVNQLHEQLCIAYPSYKSFFNDISRPTALYFWEHYPSRKYLRGKSVEDLRKELVPVSHNRCSTKNCEKILDAVASDKVKNNAYQDARDMVTLSIVSDLQHYDSQLAEVDKMLEQMYKMLGCTLTTIPGVNVITAVKILAEIGDIKRFSNANKLAQFAGIAPLHLSSSGKGKDVATKQGNRRLQATIYFLAIQMVQVSSKGTPRNSVVRAYYEKRKAEGKTSQQALICISRRLISVIYGMLKNGTEYRMPVVENAGENR

SEQ ID NO: 382678 - protein, 341 aa, unidentified
MKGKTIGIDLGDKNNWYCVLGKKAEVEDRGKVACELGAMKEFLKKHKGSEVVIEAGTHSGWVSDLCGSLGVSVLVANPREVASIWKSSNKTDERDAEQLARLARADRKLLKPVETRERKHRLDLTLIKSREGLVRARVELVCLLRSLVKNFGYRLKETSTKCFSNQIQLPEELRGHLKGVLESIESLSKRIQEYDVAIQKQEENYPEVKKLQQVPGVGKITSMAYVLLVESPHKFKTSRDAGAYLGLKPKRDQSGKIDKELGISKTGNSMLRRLLVNCSQYILGRFGPDSDLKRFGHKLIQRGGRSAKKKAVIAVARKLAVLLHALWKSDQPYQPLRTQKI

SEQ ID NO: 382679 - protein, 387 aa, unidentified
MEPMFDAHRPAAAFDHDSTLVLALETSGKAWDLGAVVPGVNRRPKKHFEPRAVKEILAQVDKLKGDAVRAGRTVTRVVLTYEAGRDGFWLARYLSGLGIEVHIMQPSSVAVERKGRRAKTDKLDLDMLLGAFLCWLRGEPRACTMVRAPSVEEEDGRLPGRSRDDLVKDRLAIENRIGNLLCLHGITDFRPRLKKATEKLETLRTFAGDAIPPKMLDELRRLMALHRLLTEQIAAIETARDQVVTEANPDRIEKMIQLLVQICGLGIETATILVREVFCRPFKDRRALAGFVGITGTPFQSGGTDRELGISKAGRPRVRGILQQLAWRWPRHQPGSILSKWFIERTGNVKGRLRNVMAVALARKLLVALWRYVDTGVLPEGVRLAVA

SEQ ID NO: 382680 - protein, 341 aa, unidentified
MKNLFIGVDFSKEKVDVAIIFADGLTETAARVFNEFKTTVSGYKQLVKWVEQNSYGIDSSLWLFCGENTGDYSKGLCNFLYGKGYDMWLENAKSIKDSSGLRRLKSDRADASMIAEYAMRNYDRAIMYEPLSESLAQLRELFLYRQMVIRHRCSFQVRRGEKRLTMEKSPVKTMISQSGRHIVSELNKEVEKIDKRIAELIKSDEELTEVFTIVTSVPGIGTQNAVCLMVYTDNFRRFNYDSRKISCYYGIAPFGKDSGTSVHSDPHVHFMANRQIKAMLTQAALAAVNFNPIMARYYMRLVERGKKKQVALNNVKNKLVHLITAMVRNRQTFTPNYKISA

SEQ ID NO: 382681 - protein, 401 aa, unidentified
MLHSLLIAPAAREEVATLFVGFELSKKTWLIGLYAPELGKTISRHKVDGGDVNTALRLIATAKLRLEKLGRPVRVVSVYEAGYDGFWLHRRLTAAGIENRVIDAASIPVDRRSRRAKTDRIDLELLIRMLLALERGETRICRVVQVPSPEEEDAKRQHRERATLVAERTGHSNRITGILMALGIRDVHPRRRDFVARLEKLVTATGEPLPAHTKRALVREHERLCVVERQVKEIEAAQATAMRAAAAKLLCEKQEEAREADAAERSAAQAAALVRFKGIGQVSAVPLCREVFYRRFDNRRELGGYVGLAPSPYNSGSKQVDQGISKAGNRHARTLAIEIAWLWVRHQPDTALTRWFVKRVGDAKGRIRRIAIVALARKLIVALWRYLTTGLIPEGAVMTEA

SEQ ID NO: 382682 - protein, 370 aa, unidentified
MKFVGIDIHTNRFTCCYLFDNPKEKQMETFELDGKGLSSFYSTLDKDTYVLVEATVNTFGFIDKFMDLVKEVIVANTYQLKSVGIPGKKTDKLDAAKLAEKLKAQVVSGVQQIVPVTIPPREIRELRALFATYRTLRKKIGCTKNRIHSLLKENLYPFTKEYIFGKKTRVEIRKISPNYTLSFQINLLMDTLEQLEAAFDSLVVEIKKAGIKFMPTIEILTSMSGISVITAIAIIADVIDVSRFKNSKHFASYLRSAPRVESSNDKTIIKSTTKAGRKLSITLLSQSLNHFRDSNRALNQFHEKMSTYKKKGIVRMALCRRVITQIYQMLKKQEYHYFYNPVLHRKKIIEYKRFLRGENIIFPENLKISA

SEQ ID NO: 382683 - protein, 392 aa, unidentified
MILVGIDIGKKQHIFSIIDKQTGEILSNPSVFHNNQEGFLLLIGKLSYYAKSELLIGMEDTGHYHFALLKYLLDRHYTVALINPTTTDLTRKLQGGITKNDPLDSLCDVIGSNQRKKPYRITKVNRFDLYEQKQLTRHHHNLKEELNTYKNRLQKCIDIVFPELNSLFRSKYGIVYMNVLRTFASAEKIANSDIRILRKCFEYEGRGKRIHLSAEQLKTTAKASVGISSVAEEIQIRHLVCQIEMIEEQLSEIDKKIEEFSLQNNSPILSIPGISHFSGTSILAELGDICNYTKASQIIKFAGVAPYHYESSQFIAQHTAITKKGSRYLRKTLYQIILPVINHNRVFTVYYDKKLAEGKSHRCAQGHCIRKLLRVIYHLLSTGQSFDPALLI

SEQ ID NO: 382684 - protein, 325 aa, unidentified
MIGIDVSKATLAVCVRLADSGIELDHEFPNTATGHHKLHAWLKKHGEQTGWVCMESTGPYHLNVAQFLHQHRYRVSVVNPKRIKAYGESRLSRGKTDKADARLIAEFGEKETLPVWQPPAQERVALKDLQDRLDELEESLRQHRQRREHCQNPSVLASLEREEAFIKQEIDALKREQGHLCDKTPCLREEIELLCTIPGVGELTATRLVARIDISLFDHAASFAAFFGVTPREHSSGTSVHKKARMSKLGSKRLRTALYFPAMQATRYNAQVQALYDRLVAKGHPKKSALGAAMRKLAQQIYGVWSSRRPYNATHGLPSLESFTA

SEQ ID NO: 382685 - protein, 319 aa, unidentified
MNMSCVGIDIAKKTFVAAVEVSDKVKIKSFNNSVLGFNEFIHWLNEFRLSKLYFCMESTGKYGDELALYLYEQNYSISVVNPARIKYFAKSQLTRNKTDSIDAKVIMQYCKFFKPSLWKPAPIEIKNLETLVKRVDSLNEMIIQETNRLEKCDIAIKSSIEKHIQYLKKEVDEMERQIAQHIDSHPKLKKDAELLDTIPGIGKRTANKLLTILGGNQKFNSAKEVAAYVGLNPEHSQSGTSLNSVHLSKTGSSEMRKMLYMPALTAIKYNPILRKFYEKLISKGKPKKLAICAVMRKFWHIIYGVLKNQSAFNEKILDV

SEQ ID NO: 382686 - protein, 293 aa, unidentified
MTITTVGIDLAKNVFAVHCVDQHGKTVLVKPKVSRAALPELIASLPPCVIGMEACSGAHYWARLFRQYGHEPRLMAAKFVSPYRMAGKSGKNDAADAQAICEAVRRPHMRFVPVKDESQQAMQCLHRIRQGFIEEKTATYNRLRGLISEFGVIAPQSTDALRHMVSEQKSSLPLQVQQCVNDLLEHIDRIEDNITEYDRILSRMAKTDHRSQRLMELKGIGPTTACALVASIGNAHDFKNGRQLAAWLGLTPSQYSSGGKSKLGRITKAGDSYLRYATGSGGSFGSDWCREKD

SEQ ID NO: 382687 - protein, 355 aa, unidentified
MTGTKYIGMDVHKESISIAVRNAAGKIVMECVIETKASTILEFVDGLRGDVQVTFEEGSWSAWLYDLLKPHVTRLVVCDPRRNALLQQGNQNDRVDARKLAELLQNNQLRSVYHGDHGLGTLKELVRSYLTITRDLSRVMTRVKALYRGWAIPCTGKQVYASRHRAEWLGKISEAGVRRRAEFYYQQLDALRSLRQEVRRDLLAESRKHQVWKRLCQIPSIGPIRAAMLLGILQTPHRFRTKRQLWTYSGLGIEVHSSADHQVVEGQLQRKKKPVEIRGLNENCNHDLKNLFKGAAVVASIKPGPFEKFYAALLAKGMRPEMARLTLARKIATIVLIVWKRGVCFDAQHLKPQTA

SEQ ID NO: 382688 - protein, 367 aa, unidentified
MKQVKTLSFAGQDIYCGIDVHKKAWSVCIRDDERELSSFSQPPQPAVLTDFLGRNYPHANFHAVYEAGFCGYWIQQALSHQGIDCIVTHAADVPTSDKDRRQKTDAVDCRKLAKELSEGSLKGIYIPSRQIIEDRSLVRGREQLVQDQTRYKNRILSWLHFFGIIIPEGYKKNTHFSRRFISWLEQLQLNESTKLALQVKLGGLQCIRQQLLLANRNLRKLALSDRYQKQVELLRSIPGIGITNAMIFLTELDNIARFETFDHLCSYAGLKPDIYSSSDTIIIKGITHRCNSLVRESLVESAWKAVAKDPALLMAYKQYKKRMNYNNAIIRITKKLLSRIRYVLLHQTCYVTGVVGYNEFFRHQLLD

SEQ ID NO: 382689 - protein, 386 aa, unidentified
MGQKAFIPQEYDVFAGLDVDKKSISVTFSNHQQGFVRSLHMPYSVENLLSHVRKHFPDQRVAFVYEAGPTGYGLYDGLTAQGHNCLVAAPSMIPRAPGQRVKTNRLDSRGLSENLRGGQLKSIHVPSPIYRELRHLTQLRDTLVSEATGMKQRIKSLLLFEGIDFPSAPAGSQWSLKVKAQLRKIECSRSVRFKLDQLLDNMEFTEKQVVKVTQEIRRFCQSDPELAQCIKYMMSVCGIGWIVASQLLARIGDWRELQNVRQLGGFLGLVPTENSTGDKTDRGSITHTGDGRLRSKLIQASWSAIRQDGELREFFRSVCQRHPRGVGPRVAIVAVARKLSARISAVLMEQRPYVVRQKVHSAPLTQEETSPQGTTRRLGEPGEKNS

SEQ ID NO: 382690 - protein, 455 aa, unidentified
MAKKGKQNTPTPENMPILHPHAAGIDVGAEEHWVCVPADRDAQPVQKFSAFTCDLHRLADWLTTCRITTVVMESTGVYWIPLFQILEARGFEVALVNARHVKNVPGRPKTDRFDCRWLQKLHTYGLLASSFRPPEDICQLRSLLRHRDNLIQMTVKHIQHMQKSLDQMNLHLHHVISDVTGVTGMRILRAIVAGERDPRTLAQYRDYRIKSSPDTIAKALEGDYRPEHVFTLTQSLALYDFTHQQIAACDQEIERVLSTLDSLVDLEAHPLPPPTTTHRQPQRNEPAFDLRAHLYRITGVDLTQVPGLQAPTIHIILAEVGLNMHKWPTDKHFASWLGLCPDNQISGGKVLSTGSRRVQNRASRALRMAAQSLRTSPTYLGAFFRRMRSKLGPAKATTATAHKLAKIIYHMLKEQTPYRARGAEEYLHKDHERQSRQLRKQAKHLGFDLVPQTTN

SEQ ID NO: 382691 - protein, 336 aa, unidentified
MTIIRIGLDTSKHVFQLHGVDENEKPVLRRQLQRRAVEKFFAKLPSARVGIEACGASHHWARVLCGFGHEVVLIPPQYIKPYVKRGKNDAIDAAAICEAMSRPTMRFVPVKTAEQQAALTMLGVRDLLVKQRTMLINALRGHAAEFGVTVAKGPQQMRELLQRLTTAEGVPALAREMLGMLAAQIEAVNGKLRAIEARLMAWHRHDQTSQCLATIPGIGPIGGVSFALKVADAKAFRSGRHFAAWIGITPREGSTAGKHRPGRISRAGDEDLRRLLVLGATAVIQQAQRGRASPWLLGLLARKPKKLAAVALANKMARIVWAMMVSGETYRCPQAA

SEQ ID NO: 382692 - protein, 448 aa, unidentified
MFLMHYKRLLTLIDSVSSYLSVGLDVGADFTWMSIALPNGSFIGKPFKILHSDPSSRDLAVTKIKEAQEAYSLKSRCFLESTGIYHIPLLYFLRDKGFDCSVINPIITKNSTNINIRKLHNDKFDSKKAALVGLNVSLKTSILPDDSVVDLRNLVRDYYYFKDLQSAVVLKLTAELKVSFPSYAKVFSKITTQSSLKLLSSYPLAADMLTAPKADIVKIIRNTAHFGEAYALCKYDAILAAAQDAAVFGRALPSNAVRIRLYVDTYQQYQKHLDELLKTLHETVEKLQDTPIYNQICLLQSLRGIGFLSAVVLIAEMGDFKLFSSPKKLYAYFGLDPAVKQSGKLNGDKVHMSKRGSSLARRILHMIALNNVKIDKGSGTPVNPAVYDYYTRKCSSKKKTVAMGAVMHKICNIIFAMLRDSKPFEVITPEEHCRRFAAEHPDKVRKTA

SEQ ID NO: 382693 - protein, 366 aa, unidentified
MKKISTVQVFGNEILKEQKLTIGLDLGDRWSFYCVLDEAGKLILEQKVATTPEAMKQTFGKIPRSLIALETGTHSPWVSRLLTELGHEVIVAHAQKVELITKSNRKDDRHDARTLARLARIDPELLGPVRHRSAKAQIHLTVIRARAELVSARTALVNAARGLVKSFGERLPKCGTYQVNEKLAEGVSAELRDVLVPLLREVESLNERIKEYDERMEKIAKEVYPEVALLKQVKGVGTQIALTYVLTIEDPYRFPKSREVGCFLGLRPGRRNSGESEPQKKISKEGDRYLRTMMVQGAHYILGPFGEDSDLRRWGLKIAERGGKNAKKRAVVAVARKLAVLLHRLWVSGEVYEPLRNSQKAMRAVA

SEQ ID NO: 382694 - protein, 346 aa, unidentified
MEHYAGIDVSLECSSVCIVDATGKIVREGKVASEPEALIAWFGSSRLDLVRIGLEAGPLSQWLYPAMQRAGLAVELLETRHVRRAFETMLVKSDRNDARGIAQLMRHGWFKPVHCKSLAAQEMRALLTARKLVQSKLHDVQNSLRGILRGFGLKVGETTSPRFSGRITQLVTGHPNLEVIAEALLAVHAVLLREFKGFEKRLRLTARSDGRARLLMSVPSVGTIVALIYASAIDDPARFTSSKQAGAHFGLTPKKYQSGEIDYSGRISKIGDASVRAALFEAAHIMLTKPLKGCTQLKSWAMRIARRAGMRKAKVALARKLAVIMHRMLADGQPFNPTAAATIAAA

SEQ ID NO: 382695 - protein, 412 aa, unidentified
MTATNQFAAHVGLDWADKKHDVCVQFKNGERVFHVIEHTAEALDVWLTELHQKVKGRIAIAVELKKGPVVYALQKYPFITVFPVHALSLARYRQAFSPSGAKDDPEDAELALELMLRYPQKIKAIEPANADIRLLQQLVEQRRQLVEDKRRFVNRIINTLKQYYPQPLEWFSHRGSLLLCELIIRWPSLQQLKRARRETIRNFLNAKGGRAIALTEQRVASIDNAIPLTTDPSVIEANALMATALATQIKVVSEIIKTYDERIEALFDTLPDAGLFKSLPGMGPCMGPRMLAALGDNRDRFNSAEEIQNYAGIAPVTERSGQKSWVHWRWQCAKFVRQTFVEWAAKTVNSSYWARLYYQGQRDKGKSHQSAIRALAFKWIRIIYRCWKTRTRYDEAKYLLALEARHSPLLRP

SEQ ID NO: 382696 - protein, 372 aa, unidentified
MGHHTEAFVGIDTSKLRNAVAIADSGRGGEVRYLGEFPATEAAIQKLVAKLAAKYRHLTFCYEAGPTGYGLYRLLKSLSHECLVVAPSLIPKKAGDRVKTNRRDAVSLAKLLRAGELTAVWVPDERHEAMRDLSRARQAVKKDLQGKRQQISSLMLRLGRIYPGKTTWGPAHMRWLTSQKLEHREQRIAFEELLEGIRQESERMERLEGAIREVVPEWSLAEVVAALQAMRGIDLIAAVGVLAEIGDLSRFQNPRELMGYLGLVPTENSTGDKVKRGGITKAGNGRARRILVEAAWSYRYPPRVSRDKQPKVEAAPRRAREIAWKAQTRLCGRFRSLERKGKRRTVIVTAIARELSAFIWAINRELTPLRQA

SEQ ID NO: 382697 - protein, 382 aa, unidentified
MQASTVDTPTAGDNGTIFVAIELSQKTWLVTLHSPDRDRISRHKIEGGDHAGLLALLESVRARAAGKLGSAPKIVSCYEAGYDGFWLHRLLQAAGILNFVFDAASIPVEQRGRRAKTDRIDGELLLRTLMAYLRGEPRVVRIVQVPSVEQEDARRASRERDRLVKEQTAHTNRIKALLRLQGMAVGYPRRRNWLHWLAQQRDWQGQPLSPHLLSEVTREHARLMLVREQLAALEQARATAASPVPAGMAKRQELLHRLKALGPTFAATLTNEVFYKDFRNRREVAAYCGLTPSPWRSGGIDLEQGISKAGNPRARLKAIELAWLWLRHQPESELSRWFRARTANAGKRAKRIAIVALARKLIVALWRYLSTGLVPAEATMKA

SEQ ID NO: 382698 - protein, 387 aa, unidentified
MSRNARVPVPVTTLDQDSTLVVVLELSARSWLVGARVPGIGRMSRYALAPSAEALAAWLGTAKARAGAAGRTAVRVVLAYEAGRDGFWLARYLEARGVEVYVIQPSSVLVDRRARRAKTDALDVEMLMRTLLAWLRGEPGVCSMVPIPDVAEEDGRRPVRERQGLIGERLALLNEIDGLLATLGITGYRPLRQDRRARLAALRTPEGDPLATNAAARIGRILDRLELVMQQIAELEQARDAVIAKAAAASEAETMIRGLARLKGIGAELATVLVWEAYVRSFPNRKALGAYAGLTGTPFASGSTTREQGISKAGNRRLRSSLVELAWLWLRYQPDSKLAAWFRSRTGSVGSRMRKVMIVALARKLLVALWRFCRAGVLPEGAALKAA

SEQ ID NO: 382699 - protein, 327 aa, unidentified
MKQFLIAGVDVSKATLDVFFKPGSYGVETSNDTKGFKQLLKELKKNAKHATPLVVMEYTGRYSVKFETFLRTHSIGYCKLSALQIKRSLGVVRGKSDKVDAERIAEYGWLRRDQLQCDMVLPDKLVQLQEVVSLRLKLVKDRSGYINRFKELRSTGCCTKTDHVGKVHLQVIAFFTKQILDLEARMKMLVKSDEKLYKDCRLLISIKGIGWIIACYMICKTRDFTSFASARKFNCYAGIAPFAHQSGSSLKGKSRVSHLANKTAKTLINLGASSAIQHDPELKAFYQRKIAEGKTRMCCLNSVRAKLVARMFAVIKRQTPYQIHLAA

SEQ ID NO: 382700 - protein, 337 aa, unidentified
MKSYLFIGIDISKATLDVCVLSPSDITDSHHHPFCNNAKGFSQLMKWLKQNSEGLAPEEWRVCMENTGVYSFELNFFLHEKGIWQSMENALQIKRSMGVVRGKTDKADSKIIAMYAYRFIDKLKPYVLPTSTLLRLRALFAQRERLVGMHSQLLVASQSIKGYPKELVKDIQDQNEMLLKNLTVQIKGIDKSIKECLQEDKDLQRKSKLIQSVPGIGQQTAAYLLIVSQGMKGFTSARQFACYSGCAPFAHQSGASIRGKTKVHFIANRKMKVLLHMTAMNAITFNDELKAYYQRKVAEGKNPMSVLNAVRFKLICRIYSVVKRNEEYQKEYGKIAA

SEQ ID NO: 382701 - protein, 407 aa, unidentified
MIFAGVDWAEARHDVLLVDEQGRRLGGGRLPDGLEGIARFHELAARHAEDPAQVVIGIETDRGLFVAALAAAGYQVFAVNPLATSRYRDRHSVSGAKSDPGDAKVLADMVRTGRHNHRPVASDSQLAAAVKVLARAHQPMIWSRRRQASQLRSALREFYPAALAAFDDLTSPDALEVLRAAPTPAAGAALSKTQIAAALRRGGRQRRITERTAAIQAVLRAPQLAPPPVIAAAMGASVSASAAVITEMNAQVIRLEAALAADFEQHPDAVVVRSLPGLGTILGARVLGEFGDEPDRYATAKSRKNYAGTSPITRASGTRRAVLARHVRNQRLADAIYLWAFAALTASPGARACYNARRAAGDTHHQALRALGNRLVGILHGCLAHHTTYSETTAWAHRSKPEIIQAA

SEQ ID NO: 382702 - protein, 310 aa, unidentified
MACYIGIDVAKATLDVAALPSGESWTVTNDEAGLRELLPRLLALAPTLVVLEATGGFESLTVTALAKAGLPVVVANPRQVRDFAKALGRLAKTDALDAAILAEFAQRGQPEPRTLPDETAQLLDSLLTRRRQLIDMLTAEKNRLGFARGVVKRDLLQHIRWLEKRLGDIDDDLHDVLRTSSLYQAKRTLLQSVPGVGPITALTLIAAVPELGQLSRREIAALVGVAPLNRDSGTSRGKRMIWGGRAPVRAALYMAAFAGVRWNPVLRQFYTRLRTAGKPFKVAVTACMRQLLTILNAMMHEQQPWSAQHA

SEQ ID NO: 382703 - protein, 346 aa, unidentified
MLYAGLDLSRKRLDFCLLDGAGFVVGEGAAPPDRDGLRAFAARVGRQRQPVFAAVESMNGARFVHDELERHGWRVEVADAARVRGLAPLACKTDRIDARVLAELCRLELVPAIWLPDQAARGARERARFRLHLVKHRSSLKNRIHQTLLSFGQPCPPSDLFGVRGRRPLERLELPQPWAGTLEASLRLIDELDAEIATLERQLQQLGADHPYVRLLVTVPGIAWVLGYTIAAEIGDINRFRHPAKLSGYTGLCPRVYQSGEHDRRGALTKHGPRYLRWALLEASTHACRHPLYAERYQRTKQRLGRQRGPRVAQVDLARRLAEAIWHMLTRNQPFAPKGAAQVLAA

SEQ ID NO: 382704 - protein, 458 aa, unidentified
MSRSNTHPHPRVAEALPHLNPDAAGLDIGAEEIWACVPADREAQPVRRFGTFTPDLHALADWLAQCGVKTVAMESTGVYWIPIYEELETRGFEVYLVNARHLKTVPGRKSDVQDCQWIQRLHSYGLLTASFRPAEEMRVLRAYLRQRALVVEHRAAHIQHMQKALQQMNVQLPQVVSDITGHTGLQIIRAIVAGERDPHVLAQLRHGRGHASQAEIATALSGQYRPEHVFALKQALALYDCYTQQVQDCDAYIEQHYAAIRPTYDDTTPPPPLGPAPKPTAHAKNAPSFDVRGCLYRILGIDLTAVHGLEASTAQTLLSEIGTDMSPWPTEKHFASWLGLAPHNDISGGKVLRSHPLKVRNRAAQALRLAAQALGRTQTALGAYYRRRRARQGPKAAVTATAHKLARIVYHLLKHRDPYHPLSPEAYEHHLRQRELALLKRKAARLGFTLLPRPATAA

SEQ ID NO: 382705 - protein, 402 aa, unidentified
MNAVGIDVSKGKSMVAIMRPFGEIVSAPFEIKHTASDINSLVELINSVEGESRIVMEHTGRYYEVLAHQLSEANLFVSAINPKLIKDFDNDSLRKVKSDKADAVKIARYALDKWQNLKQYSVMDELRNQLKTMNRQFSFYMKHKTAMKNNLIGILDQTYPGVNTYFDSPARSDGSQKWVDFASTYWHVDCVRKMSLNAFIDHYQNWCKRKKYNFSQSKAEEIYGKAKELVPVLPKDDITKLIIKQAVNQLNSASTTIESLRTLMNETASQLPEYPVVMAMKGVGTSLGPQLMAEIGDVSRFTHKGAITAFAGVDPGVNESGSYEQKNVPTSKRGSSNLRKTLFQVMDALIKTHPQDDPVYQFIDKKRAQGKPYYVYMTAGANKFLRIYYGRVKEYLSSLPES

SEQ ID NO: 382706 - protein, 357 aa, unidentified
MQTQSNHLDFKGQNIYVGFDVHLKSWQVTIMTEKLTHKTFSQPPDPKLLYQYLDRNFPGGTYHSAYEAGFCGYWIHHQLKALGFNSIVVNPADIPTTDKEKVQKEDSRDSRKIAKTLRSGDLVPIHVPSLKTLEDRCLIRTRAMMVKDATRNKNRVKSYLHFHGIAIPEAFKDSRWSNRFIIWLEGLKLGEQSGTYSLQAIVTTTKYLRTSTLEITGKIKSLSQTDNYLEDVKLLKGIPGIGLITAMTILTELETMDRFEKFDNLCGYIGLIPSTHSSGEKDVIGDITRRGHGVLRAALIESAWIAARLDPALSKSYHDYCKRMESNKAIIRIAKKLLSRIRFVLKTNKPYICSVVK

SEQ ID NO: 382707 - protein, 307 aa, unidentified
MFVGIDVAKERLDVHVRPAGEAFTVARDGEGVAALVERLKAMAAGLIVLEATGGFEITVAAALAAAGLPLAVVNPRQIRDFARALGRLAKTDPLDAEVIARFAEAIRPTPRPLPDDQARALGELVARRRQIVEMMTAERNRRHQMTVRKRLKAIERHLDWLQKELSEIEQELDQTIRGTPAWRDSEDLLKSVPGVGDTLARTLIAELPELGRLTGKQIAALVGVAPFNRDSGQWRGRRMIAGGRASIRSVLYMATLSATRCNPPITAFYARLIEAGKPAKLALTACMRKLITILNAILRDRRHWQNA

SEQ ID NO: 382708 - protein, 337 aa, unidentified
MEYFAGLDVSMEETHICVLDHEGVVVHEAKAASRPEAIADELARAPSCRRVVFETGRMAPMLFHGLSHLGLPIVCVESRQAYQALKSLATHKTDRNDARGLAHLARTGFFKPVHVKSLPAHAIRSLIIARKKLVGLRVTLENQIRGLAVVFGVRLPRALTAAFIEQALGASEGIAGLSAAMQGLAAARAAVLAAVVAIDADMKRMVRASEACRRLMTIPGVGQLTALAFTAAIDDPERFKRSRDIGAYLGLVPRRYQSGEVDYTGSISKCGDRRMRTLLYEAANVMLTRYRGQLKLKDWAFAIAKRSTMRKARIALARRLAIIMHAMLRDGTEFKPA

SEQ ID NO: 382709 - protein, 387 aa, unidentified
MARKRTLSTLDTSIAYEAVGLDLAKEDVALAAFDSEHKEPYLIDRISYDKLYELLADMAPTLVAMEPCSGAHQICEQIEALGHEVLMISGRHVQAWVKDHCNGQKTDLNDAFAILNLAYDRWLTPIRGKTREECRLLALQASYRQLKGQRTKTLVHVKATLHAWGFPIRTGSFNQKVLHELIDANREAFGDEMAETLHLMINRVRDLDHDIATVLKLLTEATKRDPRASLLRSIPGFGILTTSRWCAVIGDIARFDSPKQTMAFVGLVPNNRITGHHTETSSGREARGQGRMSKRGDKMLRSLCILGAASLCLMVRNDRLPDCPFVASIKERLASPRPWFKVLVYVAAKLVRIATALLKYGETFSYEKAGISKAVLKQWELEQAKAA

SEQ ID NO: 382710 - protein, 343 aa, unidentified
MDHFAGLDVSVKDTSICIVDDTGRILREVKVASEPDALVAVLTNRSYHFKRIGLEAGPMSQWLFSALAEADLPVICVETRHMQAVLKAQINKTDRNDARGIAQMMRVGLYRAVHVKTLRSQKLRMLLTHRKLLQSKAIAVDNDLRGTLRNFGLKVGIVGAAKFEVRIRELVEGFPDLAVLIEPLLIVRRVLREQIGILHRRVLSVVRDDEVCRRLMTVPGVGPVVALTYRATVDVPARFRKSKSVGAVFGLTCSRDQSGERDRPGAISRCGDEMMRTMLYEAAQSMLVRSTRWSWLKAWAMQIAKRRGIKRAIVALARRLAVILHRIWVDGTDFRWTRDAAAA

SEQ ID NO: 382711 - protein, 428 aa, unidentified
MDYTTQNKKIELITEDTIVIGVDIGSETNFARAFDWRGREISKKVFKFSNTIGGFNFFDGWMTDVLQRTANMQIIVGCEPTGHYWFPLAGHLKDKGILLVTVNPYHVKQTKELDDNSPTKTDLKDPKTIAKLVIGGNYGIPYIPEGIYADLREAVSSRDRINKELNASANRIQRWLKIYFPEYLDVYKNFDSTSGLMVLEQAPLPEDVIGLGIEGVVKIWRAAKLRAIGRKRATTLVESAHNSIGIKGGNCARLELQMLLEDYKTKKRQLEMIEEVLTKETMKVPNVEKLLAIKGIGIITVAGFIAEVGDIRRFDSPKQIQKLAGFELKRNSSGKHKGQTTISKRGRKRLRRVLYQVVLPMLRSNPEFREVYEYYTHRVKNPLKGKQAVIAVSCKLIRVFYALLNNGEEYDAAKLRADIIRPTMLKAA

SEQ ID NO: 382712 - protein, 422 aa, unidentified
MLEQTLDEQEIIERVAALDIGKAELVCCVRVPDPKGGSRRVQEVTTYSTMTRSLQVMADRLMDLGVTRVVMEATSSYWKPPFYLLEAHGFEAWLVNARDVKNLPGRPKTDRLDAVWLCKVAERQMLRPSFIPPIPIRRLRDLTRYRIGLVSDQTREKNRVEKLLEDSQIKLSVVASDIFGVSGREMLAALIGGERNPQVLAQMARTRMRAKIPQLEEAFVGHFTDHHGFLLTKMLARIDALGADIADLDTKIEDQIAPFADAVARLDEIPGVGATAAAVIIAEVGVDMTRFPTPAHLSSWARFAPGVKESAGRKKGTGSTGHGDRYLARILGEAAVSAAKTDTFLGERYRRIARRRGKKKAIVAVGRSILVIVWYLLSDPETRYHDLGSGYYDSRINPERKKRNHIRELEALGYKVTLEPAA

SEQ ID NO: 382713 - protein, 365 aa, unidentified
MMQETVVVLDVHADSITAAILSPKSDTPEVVKLSGDLMQVRRLFRRLSAEGSLRSCYEASGAGFVLQRLLSYDGFPCEVIAPSLIPRRPGDHRKTDRLDAVMLARLYRSGHLTPVHVPDEDHEALRRLLRLRETYHAYCTATMHRISGILRNHGHVFKQGKSTWTKKHRRWLTQLHHSLQGPLQTTLAAELQHLEYLETVQTALDAELERYASLPCYRNTVEALCCLRGVKTLTALTLLVEIGDIRRFRSPRSLMAYFGLVPSEYSSGNREYRGSITKAGNVHVRRLLVEAAWNNRHNAGAALVLKRRRQGQPPDIVAIAQKAQLRLVNKFLRLDKRKHRHVTITAVARELCGFVWAILMALPEH

SEQ ID NO: 382714 - protein, 369 aa, unidentified
MGDRISYVGLDVHKDTIVVAVADGGLRGEVREYGRIANTAAALDRLARKLGGDGVMLRFCYEAGPCGYGIQRQLSARGHECVVVAPSLIPKRPGDRVKTDRRDAASLARLHRAGELTAVWVPDPGHEAMRDLVRARLDAVHALRRARQQLSGFLLRQGRHYGRPAWTKLHRRWLAGLKFEQAVHHLVLEDYLQAVEAAAARRDRLTAQIAAMLPDWTLAPVVAALQSMRGMALVNAATFIAELGDLSRFTNPRQLMAYLGLVPSEHSSGASVKRGGLTKAGNSAARRLLIEAAWCYRFPARISRELLLRQEELPKAIRDIAWKGQVRLCARYRKLARTGKPANVVTAAIARELSGFVWAIARQVTIPAG

SEQ ID NO: 382715 - protein, 457 aa, unidentified
MENYYMGIDVSKGYADFVILDAKKDVVEPNFQLDDTFGSHCKLFEILKRFFDCHSGSVLFAAVESTGGYENNWLHSLGGFQGTLDIRSARLNPLGVRANSKASLRRVITDKISARDVAEYLIAHPEKVTYQQEDSLAGLRRQWGFVRLLVKQKTQILNQFESLLYTANPELIAYCQSGVPAWLLKLLKQYPTAAKLAKARATSVARIPYVTAGRAKELIEQAKKSVASATDETTGSLITAMAEQIIRMEETIRIQSQQMAKRCAIPEVTLLKTIPGISDTSAIGLMLEIQSVKRFSSVKKLAAHFGLHPAFKTSGDGTSGVRMSKQGRKEPRKILFMVAMVSLTANPHIRKIYEEHTEKGMEKMAAIGLCMHKILRIVYGMLKNNQAYDSQVDQKNRENRMARKATHTVKNVNRRYEIFDQQAPISRRQSNKRKEWKQSQGDNITQHGIGVPIPSAA

SEQ ID NO: 382716 - protein, 381 aa, unidentified
MQATQGRDFTREETVLAVSLELSKKSWKVALQDGKREKPAVYTVSSEVAAQRLSEAVTVIEKVKRQWGYEAGIRVVVIYEAGQDGFWIQRALWGLGYEVLIIDPASIPVERRARRVKTDRLDAIKLVLALRAWLRGERDRMHVIRVPSVEAEAQRQLARDRGELQKEVGQHRDRMRKLLRTVGCWDAVGDGFGERLSKGLMKCHDGSGLPPELHERLLRECERLALVKKQLAEVEASLVTKLPNDVRGRIGQLTRLKAIGPVGAMRLILELFWRDFDNRRQVGSCIGLTPQPYDSGNSRVDQGISKQGNRRVRALLIEMAWLWLQYQPDSALAQWFAQRTQGANKRSRRIAIVAVARRLAIALWRYLKDGVIPEGAKLKTA

SEQ ID NO: 382717 - protein, 401 aa, unidentified
MQDTQQRDAVDVFVGVDVGKGHHHAVALDRNGKRLYNKALPNDEAKLRALIAELKTHGRLLFVVDQPSTIGALPVAVARAEGVLVAYLPGLAMRRIADLHAGEAKTDARDAAIIAEAARSMPHTLRSLRLADEQLAELTMLCGFDDDLAAQVTQTSNRIRCLLTQIHPALERVLGPRLDHPAVLDLLERYPSPAALAGTSEKTLANRLTKLAPRMGKGLAAEIVQALSEQAVTVPGTQAATIVMPRLAQQLAALRKQRDEIAAEVERLVLAHPLWPVLTSMPGVGVRTAARLLTEVAHKAFASAAHLAAYAGLAPVTRRSGSSIRGEHPSRRGNKVLKRALFLSAFAALRDPVSRAYYSRKIQQGKRHNQALIALARRRCDVLFAMLRDGTIYQLKSAPSA

SEQ ID NO: 382718 - protein, 336 aa, unidentified
MDTICAAVGIDVSKKKLDIALLVNGKTKTKVLGNCAEGHRALVDWLNKSKVPLSAMHVCMEATGVYSEPVALALHQAGLVVSVVNPACIKGFGHSENIRNKNDAIDAGLIARYCAAMKPSPWTPPPLEQRQLRAWSVRIQALKDIRQQEQNRLEALSISGLDEVAQHVRQHIAWLSAEIEKLEGDINDHIDRHPGLKHDADLLTTIPGVGMTTVAKILGHLGDIRRFDSAKAFAAFLGVTPKQRSSGSSVKGRTTISRTGNTSLRAALLMPSLVARRRNPILHQFAERLAATGMARKAVIGAVMHKLAHLIYGVIRNDKPFDPNYLSKGLVIQDGI

SEQ ID NO: 382719 - protein, 373 aa, unidentified
MKKRSSSQKSQKVTVKPKGAQERVTIGMDLGDKTSRYCMLGNEGEILREGQVATTKAGIVEAFGSLGRVRIAIEVGTHSPWVSRLLLKLGHEVIVANPRQVKLITESSRKDDRLDAQTLARLARIDPQLLRPIQHRSEKAQGALMIIRVRAALVAARTSLVNTARGLVKSMGERLPQCDADQMGVARAISLPPQLRQVLEPLLKEVESLTEKIKNGDREIEQIARKDYPETALLQQIGGVGPLIALTFILTIGDKNRFQKSRDVGCYVGLRPRRSDSGQSQPQLRITKEGDPYLRTMLVQGAQYIISRRGPDTDLKRWGLNLAKHGGKRGKKRAVVAVARKLGILLHRLWVTGEVYEPLRNHNARQEQKKAAA

SEQ ID NO: 382720 - protein, 371 aa, unidentified
MRSILYVGMDVHKESFTLCCYSFDEDKTQYQQVIAPDYKMVLRYLEQVRSRHDGEVEFVCGYEAGCLGYVLYHQLNDNGVKCVILAPTTMAITNKNRVRTDKRDAGNIAKCLAFRTYSEVYVPTDEDNAVKEYIRMRDDQKKALKIIKQQILALVLRHGYRFVEGKNYWTQRHVMWLKSLQLGGVLQEGLDEYLVTYDYLVNKIERFDQRIEELAGGERYQEKVKKLSCLIGVKTHTALSVVVEISDFNRFAKAENLAAYLGLVPSEDSSGERRRRGGITKAGNSHVRRLLVESAQSYTRGAIGHKSKDLKRRQNGNTPQVIAYADKANERLRRKFYRMTLKNNTNRNVAATAIARELACFMWGLMTDNIA

SEQ ID NO: 382721 - protein, 475 aa, unidentified
MTSKRRTSKGKQTRVQKRHQKRTPPRQASAKSMPVMEANAAGIDVGAREMYVAIPPDRDTERVRVFPTFTSDLEALADWLVEQGITTAAMESTGVYWIPLYQILEDHGIRVCLVNARHMKNVPGRRTDWHECQWLQYLHAVGLLRAAFRPESEVVAIRSVMRHRKRLVETAGVHIRHVHKALTQMNLQIHHIINDITGVTGTAIIESILAGQRDAAELAKLRQPEIRADKETIRKSLEGDWRREHLFALRQSWELYGTYLSSIKACDQEICEMLGGHKPKVDPAKKPLPNETKRRTKRKHKRTGDFRFDVRTEAYKQFGVDVTRIPGLEGIALVLYSEVGNDMSRWSSASQFASWTALCPDNDKSGGRVLWTGVRQVKNRAGQLFRQAANSLHHSQTQMGEYLRRMKAKLGAEAGITAAAHKIARIFYAVVKNQVEYDDTTWHQQDLARQRRFEAKVRRQARGLGFELVPIQPVP

SEQ ID NO: 382722 - protein, 353 aa, unidentified
MISELTASPKLYIGIDIHKKTWSVSMRTDLFDHKTFSIPPDSHNLFHYVESHFRCHEVHVTYEACCCGFVAAQDFLNFGWRVTVVNPADVPTSDKHHYQKTDSIDSRHLCKQLSLGNLRPIYIRTEQEDLLRSLLTQRDQITKQLRKVKTHIKSYLLLHGIQVPEEYDNSNWSKGFISWLKRLECTHSTGLISLQSKLRSLEFHHKEYLLIGNELRSYCRKYHKKDYYLLKSIPGIGGFLSAAIIAELGDIRRFQNESQLASYIGIIPGIRQSGNSETKLGITPRSRELLRSYLIEAAWIAIRKDPEIQSYYRKHAHKNPKSVIVKVAHKMVRRILSIIKQEKTNEINTNQND

SEQ ID NO: 382723 - protein, 410 aa, unidentified
MEVLYQRCAGLDVHKKSVVASVRLATENKLVTEVRTFATTTTGLLALSDWLSENGCTHVAMEATGVYWKPVWHVLSDGEIELVLANAAHVRNVPGRKTDVNDAAWMAELMAHGLIRASFVPDGQTQELRALLRTRKQLVRERTRHIQRIHKTLESANIKLDGQLADVLGKSGRSILDAMVAGESDPVRLAALAHPNVKCSRASLEEALRGRVTRHHRFLLQLHLGQIDGLDIAVAAIDREVEANLAPFRVAVDLVRTIPGVNTLSAEAITAETGIDMNRFPSAGHLLAWANMCPRNDESAGKRRSTRMRKGGNWLKTTLIQCAWAAKRKNGSYLQAQFLRLRSRRGEKKAICAVAASILTAVYHILKNGTPYEDLGADHFQRRSKITHTQRLVRRLESLGYAVDIKPITA

SEQ ID NO: 382724 - protein, 339 aa, unidentified
MALYGGIDLHSSSSYFGIIDGKDKRVLKKKLRNEPQLILKTLEPFKEDLVGVVVESTFNWYWLVDLLSEEGYRVHLANPSAVKRYEGLKHSDDNHDAFWLAHLLRLGILPEGYIYPKEERPIRDLLRKRGHLMKLRTSLILSLQNIVERNCGCRINANTIKRIKENHVAPLLNGQEELELSGSVSKEAIDFLTRKIRQIENVIEAKVKLKEQFVYLNTICGIGKILSLTIMLETGSIDRFPNVGNYVSYCRKVPSTWTSNGKTKGKGNKKNGNKYLAWAFSEAAEFARRYDSNARAYYQRKAARTNFMVAHSALAHKLARAAYYVMRDRVPFDPEKLFA

SEQ ID NO: 382725 - protein, 392 aa, unidentified
MVVSVGIDVSKDKHDCFIVSSDGEVLADVFTIPNTLDGFTCLLQRIRECTTPQDKIKVGLEATGHYSYNLLGFLLDNGLATYVLNPLRTNLYRKSLSLRKTKTDRVDARTIAFMLLSDAGLKPYTDTAYHNEELKSLTRYRFDKVKERAKLKSSVSRLVCILFPELEKLVPSLHMASVYALLEEFPGAKQVAGAHLTRLKALLETASKGRYKRDMALGIRDAAKNSIGSRMPTKSLELQHTIRLIRELNAEIAEVEEQIRSIMEELHSPITTIPGLGFRMAAMILAEVGDFSRFASPDKLLAYAGMSPSTYQSGQLKNCYPHMEKRGSRYLRYALYNATKYVCHWDPAFAAYLAKKRAEGKHYNVALSHAARKLVRLIFAMEKSRMPYRLAA

SEQ ID NO: 382726 - protein, 400 aa, unidentified
MRTVFGIDVSKASSEVAILVNGERVYGYTMSNDIIGFSRLLEDLKTVSNPEIIFEATGVYSRRLQAFLEEYSYDYTRLNPLEAKKQLDGLRVRKTDKIDAEKLASSQFVLNRKPTYVQEEVYQNLHDLSRFYQNLTEDIVRTKNRLHKVLQIAFPEIENLLSTPTGEQYWNLVSIFPTKHWVLELSEAELKEAIRNSTSKRISENRVGNLTEKLVGLAKQSYSGISKTSPMVEEVKYDAQELIRLTNRREQVLQQLIALAEPLPEYEILLSIPGIAETTATSIIGELGDIRRFKSANQINAFIGIDLKHYESGDFLGQEHITKRGNPYARKILYKCIHNIASASHTNPCHIADFYEKRKRQSQITSTKPHTIASIHRLIRTMYYLIMHNKLYDYTLAQSH

SEQ ID NO: 382727 - protein, 344 aa, unidentified
MQVITFGIDLAKNVFQIHGVDAAGHTVVKKQLKRDQLAPYFANAAPATIGMEACSSAHYWARKLQSLGHSVKLMAPQFVKPYVKGNKNDANDAEAICEAVARKSMRFVPIKNVEQQALLSLHCVRQGFVAERTAYANRIRGLMGEFGFVIPQGIHHISERVHDLIEDASNELPGLFRVTMERLLEHFKELHRQVRELELQIQAWHRSNDASRKLEAIPGIGPITASALIASIGDAKNFKSGRELSAWLGLVPRQHSSGGKQNLLGISKRGDMYLRMLLVQGAHAVINACCRKGVEAGWLAGLLKRRNHNVAAVAVANKNARIVWALLARERQYETGYIRDTALA

SEQ ID NO: 382728 - protein, 348 aa, unidentified
MLHAGLDLSRRKLDVCLLSAGGEIVEEFASPPDGDGLRGLTRRVGRHGLAVRGVIESMTGARFVHDRLEELGWDVLIADAAKVKGLAPLACKTDRIDARVLAVLSERDLVPEIWLPDPRVRREREQARFRMHLVKHRSMLKHRIHATLISFGHPCPVSDLFGVAGRQLLERLAIPQPWRDTVDASLELIGDLDGQIDQINKDLRCSGADHPYVPLLLTVPGIGWVLAFTIAAEIGDIRRFASAKKLCGYTGLCPRVHQSGDRDRRGPLTKQGPKYLRWAMLEATMHALRHPAYAERYQRTKHRLGRQRGAKVAQIDIARKLTEAIWHMLTTEQPFTPAPGGSTYRLAA

SEQ ID NO: 382729 - protein, 327 aa, unidentified
MNTAGIDVGARALSLVIRKNGKAGKERCFENDGKGHKQILAALKKAKVDRVCLEATGVYHFDLAVSLSDAGPFGLMVLNPKAANNFACAIMSRTKTDPIDAGILAEYAERMEFIPWARPKDAFLAIRACARRLAALTKQSTQSKNQYHALNSVESTPDFILKDVALTIRQLKAQIEQMRSSTLALISEDQELSEILVILKSVTGIAEVSAIQIMGEILVLPEDMQAKQWVAMAGLDPKHHQSGSSVNKKARISKVGNRYLRIALYMPALSASTHDRHIRGYYLHLIEDRGLKKMQAICAVMRKLLHAIHGMLKNRTTFDNTRFYVMD

SEQ ID NO: 382730 - protein, 391 aa, unidentified
MTVVMLGVDPAKHSHALAVLDRDEHQLAALQVPNSNDGYRDLLHLARRWPDRTWAVEGAGGVGAQLAQRLVADGETVLDVPPKLSTRARMFDQGHGRKNDPGDARTVAVVGLRTRRLRQVEPDGELVALRLLSERRRELVRSRTETVNRLHQLLLELIPAGAGRNLTAAKAKALLASVRPRDIAGRTRRQLSVDLLDDLTALDRKLKDVDKRIKPAVDATGSRLTDIVGIGYATAAVILGEVGDVRRFPSRHHFATYTGTAPLEVSSGDVVRHRLSRAGNRQLNHALHIIALSHKRYDDRGAAYYAKKLTDGKGRKGALRCLKRRLADQVFRVLVEDLQPALETGPGGHSGATLQSSASGPTPTASPSDKSLPGPATPDATPALKALSAPA

SEQ ID NO: 382731 - protein, 386 aa, unidentified
MIIIGVDPHKRVHTASAVEPMANRQLAALEVEASLAGYRRLLRWADGFRERRWAVENARGLGRHLAQWLVARGEVVDDVPSTATARVRELSRGGRRKNDVIGATAAASVAALQGDSNRVVAEDLSTVLALLDERRDNVVTQRTRLVNQLHALLRDLVPGGAPIDLTSATASRLLTSVRPAGPVETARKQLARDLVAEIRNADQRLKALTAQIANTVAATGSRLTEVDGIGPIIAGRLLGRTRRASRFATASAFASYAGVAPVEVASADRARHRLPRGGDRQLNHALHIVALTQVRMRGSSGRGYYDTKIAAGKTANEAMRCLKRRLADHVWRLMIRDERAQATGPGGHSGATLRSSAAGSTPAASSSDKSLPEPANTDSTTSRSAA

SEQ ID NO: 382732 - protein, 341 aa, unidentified
MLIIGCDYHPSMQQVACLDTETGEFICQRLAHRAEAEQFYRKLAKEHIQVRVGMEATGHAHWFERLLGELNIELWIGDPAQIRATMVRKQKNDKRDAEHILKLMRQDNFPQIWVPNPKNRDLRQLVWHRHRLVGMRTRVMNQLQAIAMNEGLRRGRGLWGKRGRMQLESLPLAPWSNRRRQELLQLLDRLDPTIEELSQAIEGEAEHWPEVQRLCTHPGVGPLTALAYVLVVGTPDRFHCGKQVGSYLGLIPCEDSSAEHWRLGHISKQGNALLRFLLGQAALNATRSDEQWRRQYVHISMRRNHAIAKVAMARKLAVRLFWMWRHNWDYEQLKKFGSHSG

SEQ ID NO: 382733 - protein, 409 aa, unidentified
MEVLYASCCGLDVHARTVVACLIRKGRKVIRTFGTMTADLLALRDWLVGEECTHVAMESTGVYWKPVFNILEGAMEVMLVNARHVKAVKGRKTDVRDCEWLGDLLRHGLLKPSFIPKPSIRSLRELTRYRESLVRDQTAISNRIEKLAESGNIKLGQVATRTLGTSGRAILTQLAQGETDAERLADLAQGRLKRKRAELEKAVVGRLTQTQRWLLTELLARYDQVEAALARVQERIDQQIREDQDPFVPEAVQLLDTIPGVAEAIAETIISEIGVTMTAFPSAAHLSSWAGICPGNDESAGKRRNTRVNPANRYLKTALVEAAWAASHTKNTYLAAQFRRLARHMGSKKALIAVGHSILVIVYHVLSRRTPYKELGANYFDSQNPDALKRRLIRKLESLGLKVTVEVAA

SEQ ID NO: 382734 - protein, 355 aa, unidentified
MDNRKYIGMDVHQASISIAVTDAAGKLLMECIIETKAATILDFIHGLSGSLWVTFEEGTSAAWLYDLLKPHVTKVVVCDPRKNALLKAGNKNDRVDARKLSDLLRAELLTPVYHGESGVRTLRELGRSYVTVTQDLTRAMNRLKAIYRSWAIPCGGQEVYSPRHRAAWLEKLREAGVRRRAQQLYQQLDCLLGIRKETRRELVAESRKHPASALLQQIPRLGPIRVALLIALIQTPHRFRTKRQLWSYCGLGLRTRISSEYRYTGGQLQHARKPPALRGLNVNHNHELKNIFKSAATQASASRDPLGEFYQNLLARGMEPPMARLTLARKIAAIALKIWKKGERFDPAKLKQQAA

SEQ ID NO: 382735 - protein, 317 aa, unidentified
MAKVPPTYIGIDVSKARFDMASSPCRTMKSFLNDRSGTDELVKYLCAVKPVLIVLEASGGIERALVRALVAAELPVAVANPRQVRDFAKATGKLAKTDALDAQTLARFAEAVRPALRLLPNEMTLELRALVGRRRQIIEILTAEKNRLSRASRRIQTRIQAHIDWLESELERSNEDLDEAINQSPLWREQQDLLKSVPGVGYVISRTILAELPELGCLNRKQIAALVGVAPLNWDSGLMRGRRVIWGGRAHVRTALYMAAVTASRCNPVIRDFYKRLRAAGKPANVALVASIRKLLVILNAILKHHVRWRPVVNQLD

SEQ ID NO: 382736 - protein, 345 aa, unidentified
MEIRTIGIDLGKTVFHLVGVNARGEVVIRKKCSRLQLLRFTSNLRECLIGMEACGGSHFLGRALREQGHDVRLIPAQYVKPYVKTNKNDYIDAEAIAEAVTRPSMRFVPIKTDDQLDLQSLHRVRERWVVRRTAVINQIRGMLLERGITVAKGRRRIEAALPGILEDPDNKLSGALRVLLTQLRLEMQYLHGQIEESDKLITRIAGELEPCRRLVAIPGIGPVIATATIAAIGNGSAFKKGRGFAAWLGVVPGEHSTGGKQTLIDTSRRGNKYLRKLFVQGAHALLQNKTKLAPGLSTWLSQLTSRKRIQVAAVALANKMARMVWAVLFKGEAYRPPSLPQAIAV

SEQ ID NO: 382737 - protein, 353 aa, unidentified
MKRVVKGPEAGQDVWIMVDVSRSKWAYNVRWDGQEQRRLTTPGEIGHLQRLAAEYGGSRLHVGYEACGFGYEIAWWCQEQGIAVTVVPPSTVERAPGSRVKTDALDAATMNVKHEKGDLKRVYIPTRAEHEQRQLSRTYGQVLKDRKRAQARVRSLMQEQGRLGPLPGQGWKVYEQWLKTQTLPVAVTICVQQLQASRAVALVATRRLKAELLELAKSPAYKTVVDRLSGQAGVGRFTAIRLLLEIGDIRRFTTADSFTHYLGLTPSEYSSGEIVHRGHVLKCGPGFVRGWLLQCAWASVRGKQADRGLRDCFLRIQARAGKKRAIVAVARRLAMRLRARWLEALEQPQTQAA

SEQ ID NO: 382738 - protein, 418 aa, unidentified
MNQLKYDFFVGIDLGQWLHMASVVDAKGEFLGETGFPHSREGLSRTIDWLLEVTSQDTARIAVAIEKPHGAVVELFLDNAIAIFSINPKQVDRFRDRHSMSGAKDDRRDAFVLADSLRTDGHRFQRLHLPPPDILAMRGLLSTRDQLVKNHVALSSQIRELLTRCWPHLVSLAPKGKALDAFFCELLQLFFESSPNPLSSHTIETLAQKHRIRRLKPEKILDTLKQKPLRVAPPTTQVTSEHIELLLQQLLLVRQHRRASDQHLDKWFKRVKALTDEPCSDPAILASLPGVGAYVLASVLCYAHDPIRLRNLNAFRTLGGIAPVTKKSGKRGQLRPTILMRRARSLPLNNALHHWARTAVLHDPHFKEHYDRLRDRGHSHARALRGVMDRILPIAIAMLRQGTLYDPSRWPTQKANRG

SEQ ID NO: 382739 - protein, 337 aa, unidentified
MEYFAGLDVSMEETHICVVDRDGAIVHEVKAVSSAVAIAAALAQAPPCARVVFETGRMAPMLYHGLAELGVPVVCIESRQAYQALKTLATHKTDRNDARGLAQLARTGFYKAVHVKSLPAHAIRALIVARKKLVGQRVTLENQIRGLAVVFGIRLPRGLSPAFVDEVVRMSDGITGLAGAMRGLVAARNAVLGAVAAIDADMRRLVRASEACRRLMTIPGVGQLTALAFTAAVDDPARFRRSRDLGAYLGLVPRRYQSGEIDYVGSISKVGDRRMRSLLYEAANVMLTRYKGELKLKDWALAIARRSTMRKARIALARRLAIIMHAMLRHGTEFRPA

SEQ ID NO: 382740 - protein, 320 aa, unidentified
MKSEDRYVGIDVSKERLDVAIRPGEEQWSADNEEEGIGGLVSRLQETRPALLVLEATGGLEVALTAALASAQLPVVVVNPRQVRDFARATGQLAKTDRLDASVIARFGEALKPSPRPLPDAQSQALAALLTRRRQVVTMLTSEKNRLHTASRPVRRQIQQHIAWLEKSLTKLDADLGDSLRESPLWRESDNLLRSVPGVGHVLSVTLLAELPELGTLDRRQIASLVGVAPLNRDSGTMRGKRTVWGGRARVRAALYMGTLVATRYNPVIKAFYQRLCAAGKPKKLALTACMRKLLSILNSMLKHGTQWGPPQMQTTALLI

SEQ ID NO: 382741 - protein, 311 aa, unidentified
MQHCITTVAGVDTGKAFLDLAVSPGQAHLRVGNDRTGWVQAIDWLHQAGVERIGIEASGGYERGVIAALREAGFTVILHQPVQVRLFARLRLQRAKNKLDARVIAAFTALPQTVRPAADPALQTLGEHLVFLDQLGQDIARLKTRLEHQRDPRLAGLLKADIAALKSRQREERRRLEQAVRTHKTLDRRLDLLLSIPGIGLPTALALVIAMPELGTISREQAAALIGLAPFDHDSGKHRGQRHIAGGRARPRQAVFAAALPAAYRWNSQLIALYQRLTAKGKPHKVALVACARKLVIFANTVLQRDRPWTQ

SEQ ID NO: 382742 - protein, 420 aa, unidentified
MSFKIFRFNCCGLDVHKTWIYACIGITDSNGRTDYKQARFSSFSKGLKELCDWLAKYNCSEVCMESTGKYWIPVFNLLEKANISVILAHPKYTKPQKGNKTDRKDAKWICDLFMCEMIRPSFIPPADIRHLRDLVRYRFKLTCMITGEKNRAQNCLTVSNLKLDDVFSDVFGKSSRSITEYMLTHPGELFDVAPFVDGRCKTPVEEIQAAVDGAISPEQAIKLRQCLNHIDELEKHLEEIEREILRLSDKYQDALDLIRTVPGFGKNQMTAIQILSEIGGDMSVFPTAKHLVSWAGCCPRNDKSNKKIKSTRISRAGNYIKPILVQVANGLLRSKKHPEITDRYKRIKSHRGHKKAIIAICRMFLTAIWHILSDLKPYTAEGFLESRPVNESKVLTTSQALNLLKQRGYTIKDDVTPAMN

SEQ ID NO: 382743 - protein, 415 aa, unidentified
MALKIVYKICCGIDVHKTFVVACIASTNSKGITTYERHRFSTYTSGLKDLLQWLLKRNCKDVCMESTGKYWIPVYNILENDCTIVLAHPKYVKAIRGKKTDKKDAKWIADLFKHDLVAGSFMPPADIRQLRDLMRYRFKLTCFQSSEKNRLQNCLTVSNIQLGNVVSDTFGKSAQAILDKILENPEDTSFDLEPFVYRSLKKKLPELRDAIDGYITPEQAGKLKVIKAHYESLESRKAELEELILALAAPYQQELAILQTAPGISSGFTAIGIISEIGTNMEAFPSAKHLCSWAGLTPTNNESAGKKKSVRVSKAGCYIKPLLVQCANAVVKSKKHPEIRNRYLRLKKRRGHKKAIIAVARMLLTALYHMLKNGENYNAELYRKSDLPPIDCEITVEQALIIARNQGYRIKSATA

SEQ ID NO: 382744 - protein, 364 aa, unidentified
MSQSAWLVAAVVPGFKRQPLKKLDADAEALLKLLHRWRKEAGTAGRQIKRIAVAYEAGRDGFWLARWLRMRNVDAYVIHPTSVAVSREHRRAKTDRLDTELLMRAFIGWLRGEKRHCNMVAIPTVDEEDARRPNRERGNLVTEQTRIVNQIKAILARFGIRTFRPTLRRAEEKLQDLRTAEGMVLPHNTRAELCRYLARLGVVRQQIRAIEQGRLRQLAMAPAEQEGPHAMMRLIARVLGVGIETADMLVNEVLSRHLRDGKAIARYAGLTGSPDESGKRRREKGLARAGNARVRCGMIQLAWRFLRFQKDSDLAQWFRARTADGRGSTRKTMIVALARKLLIALWRLATTGEVSDGIVLRPAS

SEQ ID NO: 382745 - protein, 420 aa, unidentified
MKPAKADYAAWIGIDWGSERHAISVQTSESSRLECCFLEQNPESLQAWFMNLRARFGGRKVAVAIEQSKGAVINFLLCLDFAHIFRVHPKSLKNYREALYPSGAKDDPTDADLLVQFVRLHQDRIRPWTPDDVDSRLLLRLVEGRRKVVNKRVRLSNELTQVLKEYFPQALEWAGDLDRVMACDFLMKWPTLQKLQKSKPETVREFYRSHGCRSKERTESRVEEIHSSVALTTDKAIEQSSVLMVRTIIMQLRSLIEAVTEFDDRIAEVYAKLPDAEIFGSFPGAGAVLAPRLQAAMGSDRNRFDSAQEVSQYSGIAPVTERSGKKSWVHHRLACSRFVKQSFHEFAGQSIHQCTWARAFYESKRACEMGHHAAVRALAHKWIRIIFRCWKDHVPYDEQKYMQSLKKKEPAWLTLMPTEA

SEQ ID NO: 382746 - protein, 343 aa, unidentified
MQTVTTIGLDIAKSVFQLHGVDAAGQVIIRRQLKRRYVLAFFQKLPPCLVGIEACASSHHWSRELQALGHKVRLMPPAYVKPYVKRQKNDATDAEAICEAVTRPNMRFVATKTPEQQSCLTLHRTRHLFIRQQTAVINAIRAHLAEFGIVAPVGRNGVDQLLGVVADANDKRLPEIARACVAALGAQLRMLKERILEFDRMIRTWHRSSEMSMRLDVCPGVGPALATALVATVADPKVFRSGRNFSAWIGLVPKQHSSGGKDRLGSISKQGDRYLRGLFVAGALAVIRYAKIHGTKHRPWLTALLARRPTKVAAIALANKIARMAWAMMARGERYKEPVALAA

SEQ ID NO: 382747 - protein, 379 aa, unidentified
MYRILKIGMDVHTTNYTLCALESKFGEEDQILANITVGPDHKNVLDFIKRIKEKMDPKGQDEIDIECGYEAGCLGYSLFHTLTACKLKCRILAPTTMLSEQGPRIKTDRRDAKLIAQCLSNGGYHAVHIPTAEDNAVKEYVRMRDDHKLALKKVKQQTNALCIRFGFIYDGTHWTGMHLRWLRALKLPEMIRETLNEYLATYDELTAKIDRYDQRIQEIAVQSKYREKVRKLECFLGIKTHTALSLIVETGDFIRFRKGNVYAAYLGLAPGEHSSAESGGRLGITKAGNSHLRRLLIEAAGGICKGQIGKKSKDLIARQKGNPADVIAYADKGNVRLRSKYYRLTRHGKKRNVAVAAVARELACFVWGMMTDNIHGNAA

SEQ ID NO: 382748 - protein, 353 aa, unidentified
MDTFAGLDVSVQETALCVVDGEGNVLLETTVTTDPQRIAKALAPYRASLRRVGHEAGALSPWLHPALQVLGLPVTCLEARRVRAALSAQRNKTDAADARGIAHILRTGWYGTAHIKQESTYRLRLLLTQRRNLKRKFLDLENTIRHSLKAFGVQLHKVGRGGFDEAVRKAVADDALTRELMDSMLTARAALWKEYLRLHNLVVRYVAIPGVGPVTALSFMTAVEDPARFKRSRDVAAYFGLTSKRWQSGTSIDIQGRISKAGDPDVRRSLYEAATVMLKRYRGQDKVREWGLQLARKSCHHKAAVAVARKLAVVMHAMWRDGTTYVGNAADDEATRAARQRDKDVRLLGAALA

SEQ ID NO: 382749 - protein, 405 aa, unidentified
MNAVGIDVSKGKSTVTIRKPGDVVLMSPCDIPHTQSAINDLIKQIKSLEGETKVCMEHTGRYYEPVATWLSDAGIFVSAVNPILIRDFGDDSLRTPKTDKADSKKIARYTLDRWAKLKQYGIMDKTRNQLKTMNRQFGFYMAQKTAMKNNLIALIDQAYPGANDFFDSPARNDGSQKWVDFIHTYWHVDCVRSKSLNAFTEHYQNWCKRKNYNFSAEKAAKIYQISSDLIAVFPKNDITKMLIWQAVALLNTASKTVESLRSKMNELASTLPEYPVVMDMNGVGATLGPQLIAEIGDVSRFTHREALTAFAGVDPGKNDSGKHIQNSVRTSKKGSPYLRKALFQIMDSLIKRSPVDDPVYAFMDKKRSDGKSYYVYMTAGANKFLRIYYGRVREYLSNLSNNEII

SEQ ID NO: 382750 - protein, 415 aa, unidentified
MSHPLFVGLDVHSQTNRVCLMDQAGEPWGRRFSVANNRPGSQLLIVRLLEALRQGAFDSLRLAVEATNWYWLPLFQTLQQDPQLSQWPVALFTFNPRLIARYKETFSDQDKTDDSDAFLIADRLRMGRDLPAPFQLEAQYLALRFLTRYRFHLVKDLVREKNHCLSILYLKASEYRQDHPFADVFGATSLALLQEFATLEEIAAMPLAELVTWLDAKGKGRFPDPAKVARELQQVSQDSYPLASQLQQPVNYVLSWSFQLVTFLERQLQRVNTASAEAVGQIPHTLDTIPGIGPVFAAGIIAEIGDVARFDHDEAKVAQFAGLHWRKTASAKFEAEDTRLTKRGNAYLRYYFCEAANAVRMRDADYAAYYQRKHDEVRTHQHRRAVVLTARKLVRLVVRLLTTNQPYRPRSVPSG

SEQ ID NO: 382751 - protein, 383 aa, unidentified
MRIVCGLDVHKDSVFVCILNEKGEKFEAKYGVLTPEQEELHQLLLTHEVKEVTMESTSIYWYPIWRILSDIECLKLVNPYFIKQLPGRKSDVRDAAWIAECTMKDLIRGSFVPDEIVQRMRQYNRRIFDLNKEKVYKLTKLDALLQRCNIRISNYVSSTDSKSYKDVVKLLSEGIVNAEKLTEAIHGRTVNRVGKEVITAALTGVVNEVDIDLIRQYREEILMDDKHLKECQEKLTEICRKEFPREFDNLQTIPGVKERSATSILSELGADMKMFITAAALVSWCGLKPRNEESAGKIKSRRITHGIKYIRKTMIECAWGASRTQNCFYSNFSYTQTVVRRKNAMKVKVAIARKMLVVIWHVLSDGVPYNDYKKPEAIAEGNS

SEQ ID NO: 382752 - protein, 345 aa, unidentified
MPVASDPVSSSARLYIGIDIAAATFTAVWMELGAAPRRPVTLDQTPQGFATLQARLLATGHTAANTLVVMEATGSYWVALATMLAQAGFAVAVINPDQAHSFAKALLQRAKTDAIDARTLARLAATLQPAPWTPPPAIYTELQQRLTQRDALLNLRQQVRNQRHALGYLPVVVEAVRARMDDLIATFDAQIVAIEREIAQVLPQDAAWAASAALLVSIAGVGLLTAAWLLVATLNFTSCASPEAATAYAGLAPNPKESGTSVRGRERIGHGGNKRLRTALYLATLSAARYNPLIKAFYDRLRAAGKPKKVARCAAARKLLHLAWAVVRKGRAFDPLYQQQRQQAA

SEQ ID NO: 382753 - protein, 387 aa, unidentified
MNYVGIDIAKQTHFASIMNSEGEILVEPFPFSNDHSGFLKLLKHLSAFSQEDVLIGMESTAHYAENLTSFLFTRGFNVCIINPIQTSSLRKSNIRKTKTDSVDTYLIIKALSLNHYRLFTERDYDSLQLKNLCRFRQKLMKARTKVKIQLVTYVDLLFPELQYFFKSGIHGKACYELLKTQPNPDRIAKMHLTRLTNLLSKSSKGHFKQSHAVQLKELASHSVGIKNNTLSLQILQSIQQIEMYNKQLAEVEASLHEIMDKMDSVIKTIPGIGYLNGAMIIGEIGDISRFEKPCQLLAYAGLDPSVYQSGNFNAARTRMSKRGSKLLRYALINAAWQTTLVNKTFKDYYNLKVSQGRRHYNALGHVAHKLVRVIHKMMTDNVEFNLA

SEQ ID NO: 382754 - protein, 302 aa, unidentified
MYVCIIDQKGKTRVHKNIKTDPELLFDLVFPYIDDMVIGVECVFCWYWVADLCSEHKVTFVLGHALYMKAIHGGKTKNDKIDSYKIAALLKGGNFPIAYPYPAKMRATRDLLRRRTYIARRCSELVAHIQNTNTQYNLPAFAKKISRKYNRQGVAERFEDPSVKKSVEVDLAIIDSLNPILAQLEWYIEKTARQQDYQTLYLLRSIPGVGQILALVILYEIHDIKRFPRVQDFSSYARPIKPVKESNGKWAGKSNKKIGNAHLKWAIKEAANGSLVKTSWVKTEIGFFIHLPIYRRSFFLTS

SEQ ID NO: 382755 - protein, 321 aa, unidentified
MIQPTIPADQTFWVGVDVGKEDLAIYGAKDPSTSTVPNQPSAIKRFLRHNSGAILVLEATGGYEAALIEAALAKGHIVYRVNARRVRAFMESKGIYAKTDAIDAKALAAYAQANASELRPFEPPTPESKKLRQLTRRRDELIALRTQEKNRLQAPDNHCLRQSITAVLTCLDKQVGLVEDQMRALLEEAPLLKEKVAVLMVVKGVGLVTAINLLACMPELGQLDGKQIASLAGLAPHPRDSGKKKGYRRTKRGGRADVRRIIYMAALVASKHDPHLAKVYNALLQNGKKPLVALIAIARRLLVILNAKIRDSFFPIAPQES

SEQ ID NO: 382756 - protein, 315 aa, unidentified
MIQTSITTAGIDTSKAKLDIAVHGLTERWQVANALPGWRALAANLVKAGITRVGIEATGGYERGVVEHLRSAGFAVLLLQPLQVKAFGQVHLRRAKNDALDAVLIAACAAALDPPEVAPDPRLTELADYLTFLEQIEEDIRRFKTRLEHIDEPALRRIVNSDIARLKARKSTQIRDIAKRLRAYDDLAKRLKLVLSIPGIGERTALAIVIRMPELGRVSREEAAALAGLAPFDSDSGQHRGQRKIAGGRSRLRRSLFAAALPAAFRWNRALMALYARLMARGKVHNAALIACARKLLIYANTVVQRGTPWIEKEA

SEQ ID NO: 382757 - protein, 442 aa, unidentified
MKVLYERVAGIDVHKDMIKVAIRSPGEKPWTRTTEIFEYRTFYGVLQQMAADLRKRGVTHVVMEASGVCTEPVYYALCEQDFEQVAVINPAHAKALKGHKTDAKDCARLAELFECGLLRGSYIPPAELKEVRDLTRYRMKTVQARTSEIQRLGKALESAGIKLGSVASSITGASATAMIEALIDGERRGGVLADLARGRMRDAGKLADLSMALTGRFTEHHALLCRLHQDRIAGFDAAVAGLDERIAGKVTRWQRQAGLLTSVPGFGDVVAQAWLGEIGPAPHRHFATCEKLASWVTLCPGNNISARKRKHGRTGDAGTYIKPMLVQAAWSAIRVRGRLQARYSRLVRRFGGDKNPAAKKKAITAIAHTLLKIAYQVLKSGTPYQDLGADFYTRRESPEHKHAWLERQLQRLHPGCTVTITISPPEAALTPSYVGVSLQFRV

SEQ ID NO: 382758 - protein, 314 aa, unidentified
MGAFVGIDVSKEHLDWAMHGENAGGRLAYDEEGLQELVRRLREVQPALIVLEATGGLEMAVLAALSVASLPVAVVNPLQIRNFARATGRQAKTDRIDAKCIAHFAAAVQPPLTPMPEATTMELGLLLARRRQLVAMIVAEKNRLSGLLGPRKVARVVASIELMITMIEKELQNLDDELKIKIEQSPVWQAKDKLLRSVPGVGPGTSRTLLLDLPELGTLNRKQVAALVGVAPFNRDSGNVKGRRAIWGGRASVRSMLYMASVTAVRCNPVIRAFYDRLRAAGKPYKVAMTACMHKLLTILNAMAKAARPWQVAA

SEQ ID NO: 382759 - protein, 349 aa, unidentified
MTTIAEARPVVTGGVDTHLDVHVAAVVTAVGGVLGTEQFPTTAVGYRRMVAWMRSFGPLDRVGVEGTGTYGVSLARHLRAEQVSVVEVMRPNRQVRRRHGKTDVVDAIAAARAVLSGEANATPKTHDGPVEALRTLKVLQRSATKARTQALNQLRALLVTAPDELRARLRDLTQRDLLATCAAFRVSDDDDRLAAVTRFGLRELAQRALFLAERLEQVKLRLKRITEQIAPALTVLKGVGPDVASTLLLAAGDNPERLVNERSFASLCGVSPVQASSGKTHRHRLNRGGDRQANAALWRIALVRLNCDQRTKDYLTKRVSDGKNKTEAIRCLKRYIAREIFAALPVPAA

SEQ ID NO: 382760 - protein, 403 aa, unidentified
MNAVGIDVSKGKSMIAVVRPFGEVVVKPYEVPHTTSELRKLAGYLKSLDGETRAILEHTGRYYEPVAQILHNSGIFVCAVNPKLIKDYGNNSLRRVKTDKADSMKIARYGLDNWIELRQHTPMDTIRYQLKTMNRQYGLYNKSKIAMKNNLIALLDQTYPGANALFSSPTREDGSQKWVDFAASFWHVDCVRCMGQTAFIKRYHTWCQRHGYNFNSVKASEIHTQAKNLIAMLPKDSLTKLLLRQAIDQLNVTARTVELLRTEMKRLAQQLPEYPVVMSLYGVGESLGPQLMAEIGDVMRFERRNSLTAFAGVDPGANQSGRYEAKSSPVSKHGSPELRKTLFLVMDVLIKKAPSDDPVFCFMNKKRAEGKPYFVYMTAGANKFLRIYYGKVKEYLASLTTTE

SEQ ID NO: 382761 - protein, 317 aa, unidentified
MTGCYDTNKKLQIVNRPYTDAGIELYIESLPQDSHIVMEHTGNYEQRLAQALINAGHKVSILPGATIRNYAKTKGMGNKTDKQDVKVMLMYSEKHLDSLPIYRIQSDNIANAKQLRSLLEGLTKRLQATKNQRDAHLLIPNASKVVTQSYDRQVESIEEEIALVTTELDDLNINQADFNRAVPQSIDGVGKKTVDEIQLLFNTTTGLTIENIPQFIKLTGLAPSSNDSGSSVRGSRKISKGGFGKLRSTLYMVGLGICTKSKKDSVFKDMYLRLRRKGKCFKVAITAVMGKLLKVILTLVIRNEMFDPKKHISSIAK

SEQ ID NO: 382762 - protein, 441 aa, unidentified
MIRRNVAGIDLGSERHWVCAPTADESGREIASFGATTAELIRMAEWLKARRVESVAMESTGVYWIAPHEVLEAQGLQVLLVDTRQLARVPGRDKKTDPTDCEWIQRLHSCGLLQGSFRPEEAVCMLRTLVRDKANLVAERGDWLRRMQKSLDQMNVRVHRAVSDLDGVTGMAILRAIAGGERDSQKLAKLRDPRCSKTEQEIAEQLRGHWREDHLFSLLQALQMYDAVEERIAAYEKEILRKLGDMEREEHRGQTAPPLQNANKAKAIKKRGQEPMRQALYRMSGVDATHIDAIGVETLEVVLSEYGPDLSRFPTEKQFVSHVTLAPHVPTSGGKPLRKRKRNSASTRVAAALRMAALSLRHSQTALGAYYRKMAQRLGGDIAVFATARKLATLIYRLLRWGQPYLDEGATAYEARYHQQRIGRLAATAKQLGYQLAPINA

SEQ ID NO: 382763 - protein, 350 aa, unidentified
MQNKPNYIGLDLHKKYTYFTVVGSEGEILEQSRINNNKSLIQQKFNRYFGNSIATVESTFNSYWLIDCMKDCRINTVMAHPLKLKAIISTSNKNDKIDSYKLANLLRINMLPQGYISTEEERKLKDIIRYRFSLVDERTKIKLKVKNLLLRNCIFEYPIRDVFCMKGIIYLKSLKTELKDHEYLMMLDYLDLIEHFNEKIKKVDLEIDLMAKSSYEAKLLMSIPGVGSIVAMTVLSEIGTIERFEDSRRFCSYIGLTPRVKSSGDKTVYGGIKKEGGSLVRRVLGQGVIHLIKEDQLVKDFYERIEKKKGKMVAKVASMRKMGAYIFRVLKNKQNFEELTRGSLTAEVSI

SEQ ID NO: 382764 - protein, 344 aa, unidentified
MEISTIGLDLAKSVFQVHGVDAAGEVVVRKTLRRSQVLPFFGRLSPCLLGMEACGTSHHWARALSALGHEVRLMPPAYVKPYVKRGKTDANDAEAICEAVTRPTMRFVAVKSPEQQAALALHRTRDLLVKQRTQLVNMIRGMLAEFGVETPRGLHHALALSAKLAEGDTAAVPTLAQRVVAALARQIEALQAELIAIEKEILAWHRSSEVSQRLATIPGIGVISATALAASVTNPQQFRSGREFAAWLGLTPLHNSSGGKERMGRISKMGDKYLRRLLVVGMTSLVRRARVSPTSVDPRITDLLARKPVRLATVAMANRTARIIWAVMARGETYRRPTAMALAA

SEQ ID NO: 382765 - protein, 342 aa, unidentified
MKFYCGIDLSARDCHVCVIDEQLQIMVQQKLRNELPKIIKLLAPYQADLKIVVESTFNWYWLVDGLKAAGFEVVLAHTLGLYLITGAKVKTDRRDAYSLAKLLLIGAVPKAYIYPVETRPVRDLLRRRMQLVQVRAGEYGSLRRLLLRQGILSSRQQEIKTATEAELEQWFEHPLVRLHASQELQRIELYSEQIAELEKTILALAKTAPTYELLLKLPGVGQTIALTILYEVGELTRFANVKVFSSYCRVVPGIAQSGNVSKRGRASKQGNHYLKAAFSQAAVHAVRCYPKVRRYYERQVKRHQGRGRQMICYNIIAHKLAQAAFHILKEQTEYREELLFGR

SEQ ID NO: 382766 - protein, 347 aa, unidentified
MNFYNNIHPYYCGIDLHARILYVCIIDQEGNTCVHKEISADPDKLLKLLKPYIGNIVVGVECMHCWYWVSDFCNDIGIDFILGHALYMKAIHGGKAKNDRIDSFKIANLIRGGNFPLAYVYPKKMRATRDLLRRRMKIVQHGADLKAHVVNTTSQYNLPPNKVNLKNKDAREQLRSTFPELSVQKNIDLDMTILDCYACELSKIEWYIQQQAKQHNPNHFHLLKSIWGIGPILALTIIYEIGNIDRFESVQKFASYSRLVKCKAESAGKSYGTQGNKIGNAHLKWAFSEAAVLYLRGNKKAQKYLLKLQKRMSKAKALSALAHKLGRCVYFMLKNETVFDENKFLKG

SEQ ID NO: 382767 - protein, 406 aa, unidentified
MNYLGIDVSKSTSRFIILDNDGERFTKAFTLQNNKQDFQKLLERLKELGISSDDLLIGIEATSIWWENLYCLLSDKGFKVIVLNPHQTNKFREALRKKAKTDDIDAYIIAGLLRSKEYASSYVPEELIQTLRELTRLRYELIKDRRNYERQACSLLSLVFPEYEKTAIKNPFAVASTAILKIYPTAKDLALAKPKHIEKIVRSIKGNNFNIEEIQRLVDTAKDSIYSGRARDARGLNLKILLSHIEHIDESLKELEVNIENLLSPTKADDINSFPGSNLLTIPGIGPKTLAVILQAVGSNGQVFSSGTKLVGHLGFFPQIYESGETRTDNKISKRGPKMLRWAFYIAAVACLRHNPEMRTLYHKKLSQGKTQKQALICVAKKLAHLCLSMLKSGQSYRPERVFVYA

SEQ ID NO: 382768 - protein, 367 aa, unidentified
MEQDTTTYVGLDDSKRKLVVAILRPGEREPEQREMPKEPHLIQRVFRRLTREGAVAVCYEAGVSGYDLYRQITACGAACQVIAPALTPRRPGQRIKTDRRDAVKLVRLFRAGELTAIHVPDEAEEAVRDLTRCREDVRRDVLRWRHRLLKFLDRHGRLYVTGKNWSQRHWTWIRAQRFDLAPLQRTFDATLFALEQALAHQAELDKEIAALAEQPPSREPVGRLRCFRGIDTLSAMILLAEIVDFQRFTHPRELMAYLGLVPSEYSSGETQRRGAITKAGNTHARRVLVEAAWHYRHRPTLGRALAIRAEGQPAACRAQAWRAQQRLHRRYRHLVGHGKRPPVAVTAIARELVGFLWAAMTQRAPAA

SEQ ID NO: 382769 - protein, 326 aa, unidentified
MTLSFPLDNTFIGIDVGAAALDVAWHRGDSAHYANRPDAIAALVKRLRAQPAITRIVIEPTGGYEKTLVKALRQAGLPIEIIHTTRFKAFRALVGVKAKSDTSDARLLAAYAAAPDEVRGRKADYVELPEDAIREELAELASRRDQLKHMIHAETCRLGTVRLAELHERISAHLEALRAEDKQMHQMMLALVRRRADLQRDQRLLKTIKGIGMKSALAFLASVPELGRVDNKAAAALVGVAPFVRQSGAMNAPARIHGGRAAVRSILYMAAVAASRHNPVLRPFYERLLAKGKPAKLALIAVLRRLVVFANAVLKSGQPWRGAIVS

SEQ ID NO: 382770 - protein, 387 aa, unidentified
MKKSNPRVVGLDVHPDSFAGAILAGRDPASARVLSTSTRVELPELERWAGRHTSPEDVLVLEASGNAFAVAGRLRTLGRQVAILDSHQAGKIGKVYCANDRVDAIKIARIYLSGLSAQVWQPDEKTAERREVFSAYQGVVKENTRLQQQIKSMLNEHCVRLPKGFRLSHPSALTRLSKMKAWTPVQRMLLEQLHSGLVAARGRRQTLRRHMAGEILGEEPLLRLARLCGLSLVTIYGLQAAIGDIARFAQSNKLVAYLGLNPSVSQSGDYAGATALKRHGRGALRALLIQSAKKLLQVKNPLQKWGLAVAARRGRNKAAVAVARKLCVAIWHVLKGHAIGALEPLLRLRTKLGKLATELGVPAIKALGYKSKTALIEQKLYLLKSYP

SEQ ID NO: 382771 - protein, 355 aa, unidentified
MSSEKYIGLDVHQATISVAVMDSQGKVVMESILETKASTILEFLAGLRGSLFVTFEEGTWAAWLYDLLKPRVTEVLVCNPRKIPLLKQGNKSDKIDARKLAERLRLHDLKPVYHGETGIRMLRELARSYLTVVKDLSRVMNRLKALYRSWAIPCAGRDVYYTRHRSQWLEKIPEAGTRRRAEQLYEQLDMLQHLRQQARRELLAEGRKHTITAKLRQIPALGPIRSVLAVALIQTPHRFRSKRQLWTYSGLGLETRDSGEYHYVDGQVRRRKKQATIRGLNKDYNHDLKGLFKGAATRASVQPGPFQDFYQRSLAKGIKPTMVRLTLARKIAAITLTLWKKGEDFDIDKLNSQAA

SEQ ID NO: 382772 - protein, 338 aa, unidentified
MKLYGGIDLHSNNSVIALIDKQDQVIYRQRLPNDLTLILTELKPYKRGIEGLVVESTYNWYWLVDGLMEAGYRLHLANTAAITQYNGLKYSDDDSDACWLAKLLRLGLLPEGYIYPRAERAVRDLMRKRSQLVHQHTSNLQSVQNLLARNCGYSLGANQIRQLTYEAVDRLLPDTELALAVKSNLAVMRTLDELIDQIEKTALRKIKLRKEFKPLLSVSGIGNILGLTIMLETGDIGRFARVSNYASYCRCVGSEYLSNEKRKGRGNTKNGNKYLAWAYLEAANFAVRYNPQIKRYYQRKRARTNGIIAIKTVAHKLARACYYILRDQVSFDVNKAFV

SEQ ID NO: 382773 - protein, 399 aa, unidentified
MTNAAGRVAGVDSHKDTIQVAVITGVGQPVADREFPTTVAGYRRAVAWLVEHGPIEAVGIEGTSSYGVGITAAIGALGVRVIEVNRTRPAERRKQGKTDRLDAYRAARSVLSGEASTDPKNASIEPLRALNVARRSAVKAQQAAWRQILALLVNASPHLRDRYRALPGAKLVATLAATRPDQLGDSDAADTLSALRALARRHHALEREIAELEQRMHTRATMANPALMAIKGIGPVIGAQLLITAGDNPDRLRTSASFAALCGTAPIRVSSGRTDRHRLCRGGDRQANAALHHIVKVRLSYDPATRAYRDTHLAKGWTINAVFRALKRAVAREVYRALTGRCALPDYSDLRPARRAKNLTLTAAAEHLGVWPSRIGELELGRRPNDELATRYRAWLTAA

SEQ ID NO: 382774 - protein, 315 aa, unidentified
MVDMPCFVGIDVAKAQLDIALRPSGERWAVPNDASGVTTLVDRVQALHPTLIVLEATGGLERAVTSALAMAGLPVVVVNPRQVRDFARATGQLAKTDALDARALAHFADVIRPTPRPLPDAQTQELRALLGRRRQLIVMRTAEQNRLAGTSERLTKDIAAHMTWLNAGIVTLDDDLETMLRASPLWRENDDLLQSAKGIGPVCARTLLLELPELGTLTRQQIAALVGVAPLNCDSGTLRGRRTIWGGRAHVRTVLYMGTLVATRYNPQIKAFYERLLAAGNVKKVALTACMHKLLTILNAMLKQRTPWQPQEVQN

SEQ ID NO: 382775 - protein, 407 aa, unidentified
MDLLKTVFGIDVSSRKSNVCIMVNGQKVNDYAISNDMVGFNRLLGDLKQVTKPQIIFEATGVYSRRLQAFLDMHELRYVMMNPLEAKRKTKDDLHQNKTDKLDALYLAKLQSEHPQRLAYVQNKEYQELMANNRIYEQASHDLITNRNRLHKAIQLTFPEIEHLMVNPRGKNYWSIALRFPHPDIVLETKEADIIDFLKGLSGIGKKRANDITQSLIRLAKVACPAVKKNSAHIRGLKMAINNILSAEEECQTALQEMAKLAPKRDLEILTSIPGIGENTALRIISELGDIRRFNNPSQLNAFVGVDPQVYESGNLTAHLSISKRGTAIGRKVLYLTINQIQSAKKAGNPCHIADYYEKRKRSSETASHKKAAIASIHKLLRTIFALIKNDQLYSYDVAKHNQRLLS

SEQ ID NO: 382776 - protein, 451 aa, unidentified
MKTKNANKSIDKMISMPVVNLHAAGIDLGSKSHFVCVAQDNVKEFGVFTTDLHAIAMHLKEHEAQTVAIESTGFYWRPLYLLLLDYGFEVILVNARHLKNVKGHKTDVVDSKWLQLLHSIGMLSNSFQPDVTTHELRVLTRHRKSLIEDASRYISKMNKVLVLMNIQLHVVLRDITGQSGLNVIAAILQGERDAKKLTELVSFRVKAKREDIEKALTGDFRKEYLFELNQCYQLYKVYWQKIEETDKQIEDLLKIQIADKPDDKMYKAPKNKQYQKNDPNFDVGRYAYQMSGGVELLEINGVGAATILTLISETGLDMSKFKTAKHFASWLGFAPNRKISGGKVLSSHTRKKTNPLAKVIRDAANAAGNSKSRLGDCFRRLAYRKDRMVAIGAISRKIAVIIYKMLTEGKAFCYEYAQNETQNLKANKLKNIVKTLKNYSISKSELELAMG

SEQ ID NO: 382777 - protein, 291 aa, unidentified
MHQATIIGIDLAKRTFQAHGATSDGKVAFRKKLSRSQLLAFLTQQPRCVVAMEACATAHEWGRAARELGHEVRLIPPAYVKPFVKRQKNDAADAEAIAEAASRPTMRFVAVKSEAQQARAMVFRTRDLLIRQRTQLINALRGHLAEHGIVAPQGPANLKLLADAISDMKISLVPIVRDLGLLYLEQIKGLGEKIAALDRTLRRESKSATTACLQTMPGVGPITAVAIEAFAPAMTTFKRGRDFAAWVGLVPIQHSTGGKQRLGRTSKMGQRDIRRLLCVFRSNVMADSGRT

SEQ ID NO: 382778 - protein, 355 aa, unidentified
MSQEKYIGMDVHQATVSVAVVDSGGKLIMECILETKAGTMVEFIKGLRGTLSVTFEEGTCAAWLHDLLKPRVSRLVVCDPRKNALLKDGSKSDRIDARKLAELLRGNQLTPVYHGDHGLRTLKELGRSYLTITGDLTRVMSRIKALYRSWAIPCSGTTVYAARHRSEWLAKIPQPGVRLRAERFYQQLDLLRPLHQQARCDFVVESHKHPAVKLLRQIPFIGPIRAALLVALLQTPHRFRTKRQLWAYSGFAVETHDSGEYRYVRGKLLRNRERISVRGLNDNYNHDLKNLFKSTAISASTRPGPLRDFYVALLAKGMRPTMARLTLARKIAAITLTMWKKGVDFDAKQLDQQAV

SEQ ID NO: 382779 - protein, 405 aa, unidentified
METIVERPAALDVHKAQVTACVRVPNECGEREERIAEFATTVRGLLALRDWLSAHAVQQVVMEATGVYWKAPWAILEDEFECLLVNARHVKQVPGRKTDVSDAAWLCRKASFVRPKPIRQLRNLTRYRKTQIQERAREVNRLHKALEDAGIKLDCVAADVMGKSGRDMLDALVAGETDPDVLAQLARRQMRKKIPALREALAGHFDEHHRLWIGAILAHIDFLDEHIERLSEAIEEQLRPFAPAVELLCTIVGIQRRGAECILAEIGTDMTRFASARHLASWAGQCPGNDQSAGKRRSGRTRDGSKWLDFALEEAAMAAIRVKANYPAAQYQRLKPRRGHKRALGAVKHTLLNAIWHMLSTGETYRDLGADYFTQRDPERQAKRLVKQLERLRHHVTLTERAAAA

SEQ ID NO: 382780 - protein, 320 aa, unidentified
MMYIGIDVSKDTFVAAYPRKSGYTTKTFKNDTKGVRSFITSLPEDCHCVMEATGNYSMLLLYLLQQAGIPTSMENPQKIKHFSRAMMTVTKTDEIDAKLIAMYGEKMTPEPYKIPTESILLLKQKRTVLRQLKKHLTATKNLQQALAVLPKQDLASKRTVEKTIKFLERQIAELEDEITNLSNKEYARQMSLLTSINGISDTIASALIVATGGFTYFSCAKQISRYLGLCPTYQQSGTSVNVKGHINRNGDPHLRGQLYVAALVCIRYNKACKDTYEKLRAKGKSAKVALIAIANKLIRQAFAVVTNNQPYIDGFVSSLA

SEQ ID NO: 382781 - protein, 366 aa, unidentified
MEKIYIGVDFHARQQTICYLKTETGELVIAALKHQDKEQVRAFYQQFQGPVIVGLEASGYSPWFENMLEQMGCEVWVGHATEIRRRARWRQKNDRRDAELIWDLMAHDEFPRLHRPAVQSREILRMLRYRQKLIKLRTMTKNSLQAIALQAGLAKGPQLFSAAGQEQFQAAAMSPVLHWQREHWFELLKPFNQQLLETMVWFKAQSKDDVSLQRLRTHPGIGLLTGLCLLHTLQPVSRFRNARKVTAYAGFDPVERSSAERQRFLGISKAGSRMLRYLLVEAVHTTVRYDEDLKRFYQRLAARRGRPKAKVAAARKLLIRAYIMMRDEIDYAEFRRRAVAARLARHSQGPINVPAVLIEQPASPSA

SEQ ID NO: 382782 - protein, 331 aa, unidentified
MINKTAQFAGIDVGAEELVLVVRKNATSMKAQKFANTPADRARLVAKLAKLPGLRVCLEATGAYHLELAVALHDGGVELNVVNPKAAHNFAKALMKHSKTDAIDADTLAQYAERMPFTAWVRPTPQAFTVRSFARRINALTRQKAMTKNQLHALAFGPELPKAVLDDAKLAIAQLEKRLARLSREAQAFIGEHEDLKRVFTLLLGIKGVAETSAIALMGELLLLPKGLTHKQWVRYAGLDPRVFDSGKSVHKAPRLSKAGNRHIRQALYMPALSAKQHDPYVKAFFQHLIEKGKKPLQALCAVMRKLLHAIHGMLRDNQPFDNTRFYATAA

SEQ ID NO: 382783 - protein, 387 aa, unidentified
MARKRILSTLDTSIAYEAVGLDLAKTDVTLAAFDSDHKEPYFIDRIPYDKLYELLANMAPTLVAMEPCSGAHQIAEQIQALGHEVMMISGRHVQAWVKDHCNGQKTDLNDAFAILNLAYDRWLTPIRGKTREECRLLALQASYRQLKGQRTKTMVHVKATLHAWGFPIRTGSFNQKALRELIDANREAFGGEMAETLHLMIDRVRGLDHDIATVLKLLTEATKRDPRASLLRSIPGFGVLTTSRWCAVMGDIARFDSPKQTMAFIGLVPNNRITGHHTETSSGREARGQGRMSKRGDKMLRSLCILGAASLCLLVRKDRLQDCPFVASIKERLASPRPWFKVLVYVAAKLVRIATSLLKYGEKFSFEKAGISKAVLKQWELEQAKAA

SEQ ID NO: 382784 - protein, 425 aa, unidentified
MSKDLPVLDAKAAFVDVGSERMHVSVGGEVPMVFGTVTTQLHALRDWLLAQGVRSVAMEATGVYWLPLYGVLEAAGLEVRMVSGRQTRNAPGRKTDMQDAQWGATLHMHGLLRAGFVPPVDIRRLQDYLRLRSDHVNQAGSCVQLMQKALERMNIKLHDAISSLAGASGMAIMRAIVAGERDPAALLKLCDVQIRRAKADLVKEALRGTWSDEHIFALDQALQSWDHYQRLIADCDRRIERVLPPHDPSQPPLSKTTKRGGTNSPEIGMLREILAQMCGGRDLTQLPAHTQYSVLQLVGETGTDLSKWPTEKHFTAWTGLAPANHDSGKRKGRVKRKRNRAGRLFCMMATSLVRSKNMALGAFYRRMAARRGGLLANKALARKLAAWFWRVMVKGDDYVENGIAHAYHSSWSSTVERASGPAMER

SEQ ID NO: 382785 - protein, 359 aa, unidentified
MREQRNKISFRGQKIYVGIDVHLKSWSVTVLSETSVLKKFSQNPDPEALYGFLKKSYPEAEYHSVYEAGFCGFWIHERLTALGIDNIVVNPGDVPTKSSEKLRKSDAVDSSKLARSLRANELKGIYTPDSASLEMRSLIRLKNSITKDTTRQKNRIKSQLRYLGIGIPQEFLEPFSNWSKRFVAWLKEVETLTPSGRQALDIQIRHLEELRRQKLEMTRALRTLAKTDRFREPLRLIMTVPGFGQATGMAFLSEICDIARFRNAEQLAAYIGMIPMCHSSGEKDGTGDITVRRHAVMRCNLIEAAWVAVRQDPAMNLFFTEQCKRMPKSKAIVKVARKLVNRLYFVLKHQTDYVNSVMS

SEQ ID NO: 382786 - protein, 423 aa, unidentified
MRAVALDIHRDFCEVAIVEAGRLRSAGRIKSRPEELKLFAQSLDPRDWVALEVTGNAWAIAGILEAHVARVIVVSPNDTGIRQARAKTDRLDARTLAKLLWAGELDGVWTPDERVRTMRRRLARRAQLVRARSRVKNEIHAVLMRCLKDRPPASDLFGVKGRAWLADQQLALCERETVDAGLRQVDFLDSEIAAVDQLIAAEALSWPEVKRLMTVPGVNVIVAATFMAAVGDIRRFADRRKLTAYLGLDPRVRQSGDAPAAHGHISKQGSNSARHALVEACWSTVRQPGPIAAFYARIRARRGHSIAIVAAARKLGCLFWCLLTRGEDYAYAQPSLTTKKMRRLELAAGAQRRQGGRDVWSINKAMRQAERELALQAQRAYERTVADWQANKVGAGATPGRASQRPSSGTAARQTSKPQRSAL

SEQ ID NO: 382787 - protein, 368 aa, unidentified
MIVRIMTYERSTLVNDEKYIGLDVHQATISVAVMDATGKVVMESILETKAATILEFFAGLRGTLWVTFEEGTWSVWLYDLLNPRVDKLVVCNPRKNALLKDGNKSDRIDARKLAELLRGNQLKPVYHGETGVRMLRELSRSYLTIVKDLSRVMNRLKAVYRSWAIPCAGRDVYYRRHRAQWLAKIREAGVRRRAERLYEQLDMLQHLRQQARRELLAEGRKHAITAKLRQIPYLGPIRSVLAVALIQTPHRFRTKRQLWAYSGLALETRTSADYRYVEGQLRRSKKLVSIRGLNKDHNHDLKGLFKGAATMASVRPGPFQDFYHAALAKGIKPTMARLTLARKMAAITLTLWKKGENFDAEKLKSQAA

SEQ ID NO: 382788 - protein, 350 aa, unidentified
MIIIGCDFHTRYQQIAMMDTETGELVERRLEHENGEARAFYASLPKPVVVGMEATGYAQWFERMLAEFGDELWIGHASEIRAGVVRKQKTDARDALHLLHLLLEKRFPRIWIPSPAERDTRQLLRHRHKLVCFRVSVKNQLHALAMSQGVCRKKRLFTARGREVLEKLSLGPWARRRCQELLGMLDQLNTVIEELDRAVQQQAESHAEAARLMRHPGVGPVTALAFVLTLGPVTRFRRSKHVVSYLGLNPKERSSGGKQRTSTISKQGNTMMRWLLVEAAQTAARYDPELLRLYQRLKFRRGANVAKVAIARKLAVKLYWMLRATATCVQRAPMQGSSRGTLVPQAGSSF

SEQ ID NO: 382789 - protein, 462 aa, unidentified
MPRRKLKTTTRPRQARLVYRADAPTLQVQNPHAAGIDVHTDNHVVCVGPGLVQTFGAYTADLQAIADYLRQAGVTTVALESTGVYWIPLFEHLQALGFECYLIEPGQLRGCGARPKTDVLDCQWMQRLHTYGLLKASFRPPESVRALRAYHRQRQMVIRHAAAHVQHMQKALEQMNVKLTEVLSDITGVTGLRIIRAILAGERDPHTLAGLASPICAKSRDEFALALQGLWQPEHLFELRQAHDLFQTYQRLVDECDRQIKAELAGQPDRAGDKPGPGPRPRRSRKKNDLRFEATGPLFRALGVDLTEIEGIDVGTALVVLAEIGVDVSRFPTEKHFAAWLGLCPNTARSNRREKRQSPRQGASRLKQALRMCAQSVGRTQTPLGMFYRRIKSRIGGMGACTATAHKLARLVYRLLKYGRAYVKQGMDEYAAKMHTNAERILRKKAAALGYELTPRAAGATT

SEQ ID NO: 382790 - protein, 408 aa, unidentified
MVTPIVKRCAGLDVHKMVVMVTVLLEQEDGSIAEETREFGTFRKHRRQMCRWLKGHEVELAVMESTGIFWKSIFTSLEEVGINTYVVNARYVKKVPGRKTDVGDSQWLATLGRLGLLKPSFIPPKDLRELRLITRHRVKLQGMVAAQTNRLHKVLDDAGIRLGGVVSDINGISARALIEGLIDGKAPGEIVPHVRGRLKEKIPQLLDALDEPLGERHRFLLQSIAQHLCYLEQEIDNLDKYLFAAMIPYQRQWEILQTIPGVDAVSAAMLLVEIGVDMTCFGRAERLASWAGMCPGNNESAGKRKGGRIRKGNWALRRLLCEISNAANKTKSQFRGQYQGLVIRRGHKRAIIAVGHKVLRVVYAMLKSLQPYRDPEIDYTGIVVQRNAPRWLAALKKYGFLPDMIKAA

SEQ ID NO: 382791 - protein, 482 aa, unidentified
MKKRNIYPNQSQQLLNLFEQAANNAKVMCVPIDYAKKDHVVMFCNGYGDILRKPFSVKNSPQGVDYLTDQVMRSCRQRAISEKHVFFGGEEVGSFADNFVSTLRSQGWLVAGVNAHEAKTQRENLQASTDRLDLMGIAKSLLNRRANCSPAQSGIYLNMRTVVRHRRKLVDITTEVRNRIHAVVDRLFPGFLNEKKSGITPFSKSSLWLMEERFSAPQIRRRRRSTLIEALRRLGTRKPECTADTLQQYATQVLKPPQEYVHMLQLSLAQHVKHFCCLQESIGQLETEIAVNLAQTQGAFLTSVRGIGIVLAAGVSAEIGNPFEQKPLNNLVSYCGIIPRVKQTGGPQGQTKTGKVAKRCNRILKDYIVKSASHLGLHGPEDLKSDYQRRDAAEQHADFGMARRYLRMAMCLMRTSQTYLPSQLRKAQAQIQQRADYYVMTWPQLRDKWQKSGALETAFKADQPLGQWRKIVQQFYGIKLTL

SEQ ID NO: 382792 - protein, 347 aa, unidentified
MAHFVGLDVSVRQTSVCVVDDAGKVILEQKVPTEPADIIAVLASLHVSLSRIGIEAGPLSQWLVNALTAAELPVVCVETRHMKALLTAQQINKTDRNDARGIAQIMRVGLFKPVHVKTLVAQEQRMLLTSRKLLQRKLLDVESDLRGTLRNFGLKVGTVSGSRYEARIRELVAGFPRLAAIAEPLLNVRRVMRQQLAVLHKMLLDTVRGDPVCRQLMTAPGVGAVVALTYRATVDQPQRFIHSRAVGAHVGLTPKRYQSGETDFDGGVSKCGDALLRTMLYEAAQVLLVHSEKWSWLKAWGMRVAQRRGMRRAIVAVARRLAVVLHRMWVDGSEFRWSRDGAVPAVA

SEQ ID NO: 382793 - protein, 430 aa, unidentified
MTLDVEQDGCGPPARQVIIGIDWADAEHAFHLLDNNLAGSFEQTPVDIARQVSDWRQRFPGATFCIAIEQSRGPLITALVECVDVLIYPINPAALASYRKAFAHGGGKNDPADAKLLANFLGHYRERLKPLVRDLPLTRELASLGEDRRGLVDQRVALANELRAILKLYLPCILLLDADKLYAHFIVRLLLKYRTLDELQNAGKTKLRKFFFGIGVAAKAEQRIELLMAAKPLTTDEVTIRSGARRVQAIVAQLDALNKSIDIYDAAIKLLVKEHANYPIVASLPGAATKTQCRLLAALGDDKSRYQNAAALQAATGIAPITSQSGKQKIVACRWASTKFLKQTFHEYAGLSIRKCRWAKAYYDMQLAHGKSAQMAKRALAFKWQRIIFRCWQSNTLYNDEKYLKRLQAEKAPLLQFITQSATEASSNSK

SEQ ID NO: 382794 - protein, 368 aa, unidentified
MDNVITGYVGLDVHVGSIAIAVAESGRAAPRFVGTTGPALAEVLKALSHLGRPDQLLLAYEAGPCGYTLARELAARGYHCQVIAVAKMPRKPGERVKTDRRDALTLARYLRGGDLTPVCIPDERDEAIRDLSRAREDAVVARLKARQQLKAMLLRHGLRYSGKTSWTAAHERYLATVSFAHPAQDLAYAEYRSAVRDAHDRVERITAALREQVAGWRWAAVVQALMSLRGIDFVAAVTLVAELGDLSRFAHPKQLMGYLGLVPSEYSTGESRVQGRITKTGNGHVRRVLVESAWTYRYPARMSRELVVRNQGQPKAIRDIAWRAQLRLCGRFRRFTARGVTQNKICVAVARELAAFVWNVARHTPGPH

SEQ ID NO: 382795 - protein, 412 aa, unidentified
MKEAPVAGFDISKSSSDICVLAPGNEVVWRSKMAHTSQSMAQVARRLTDIGVQYGAAPVIIMEATGHYHRIVLQFMKNEGFDVVVVNPIQSGALKNISIRKVKNDRVDAYRIALLYRLKAAKRTNLPTDLIADLRSLCRQHYDLTQDLIAYRSRLHAQLDQCFPGFAGVFSSLVNLSALSVLERFPLPSLILSASDQDIEGAILSVVTRKSAYLQKKIHALRQAARNALPIAISTPSCAVIMKNLVSMLQILKKSIREVDLQIRALIRSDAGLRTDAELPKSIPGIADYAAAVILSEIGSVSSFQSAKQLVAFCGLDPTERQSGQFTGTRSKISKRGSKYLRCILNMSAHISIQPGCKGTYANPVLAEYFQRKRQSKPYKSALCAVMHKIVNIIFAVLRDQKPFPPNCIAKL

SEQ ID NO: 382796 - protein, 339 aa, unidentified
MRVIGMDIHRVFAEVVAWLDGKTTRLGRVDMRRDQLEEFARSALTHDDHVVVEATGNAAAVAEVLAPHVGRVVIANPKQVRLIAHARIKTDAIDAAVLAKLYASGFLPEVWVADERTGALRRQVSRREQLVRQRTRLKNIVQSILHAHLVPPCPHADLFGRSGRAWLAQQVLPEDERQAVERHVRTLDRLLEDLRVVERDIARHALEDETVRRLMTIPGIDMIVAVGLEAAIGDVARFASAEKLVAYLGLNPSVRQSGEGPARHGRIAKQGRGQARGLLVEAAWAPQGLLRAHRVPPRSARRGGGHGPQARGPGLAAAEPGRGLRLGAPGAAGQEAAQS

SEQ ID NO: 382797 - protein, 320 aa, unidentified
MTYIGIDVSKDSFVVAYPGKCGYTTKSFPNTTSGVRKFLQSLPEESHCVMEATGNYSMLLLYLLQESNITVSMENPQKIKNFSRAMMSVTKTDEIDAKLIAMYGEKMNPAPYKIPSESIILLKQKRTVLRQLKKQLIMMTNLQHSLSVLPKQDPTAKVATEQTIKFLRKQISKLEDEITNISNKEFKRQMELLTSIKGIGESIASALIMATGGFTYFSSAKQISRFLGLCPTYQQSGTSVNVKGHINRNGDTHLRSQLYVVAIASIRCNTACRETFERLRERGKSGKVALIAVANKLIRQMFAVVTNNRPYIDGYVSSFA

SEQ ID NO: 382798 - protein, 402 aa, unidentified
MNCVGIDVSKGKSMIAVMRPFGEVVVSPFEVRHTASELSELARLLKNLDGETRVVMESTGNYHAPVAWLLHGAGFYVSVVNAMLVHDYGNNSLRRGKTDKKDAVKLANYGLDHWLTLPRYVPEEDTRLMLKTCYRQYQQYSKVQTMLKNNLISLLDTAFPDANRLFTSPPRADGSEKWVDFVATFWHCECVCGLSKKAFTAKYLKWCRKHGYNFSQDKALDIYASACGRFGVMPKTNTAKLLVEQAISQLQTTSAALAALKQEMQSLAASLPEYPVVMGMFGVGPTLGPQLIAEIGDVRRFHSKKALVAFAGIDAPPYQSGQIDVRSRSISKRGSASLRRTLFLVMGVLLQCAPMDEPVYQFMNKKRSEGKPYRVYMMASANKFLRIYYASVKAYLDSLEHD

SEQ ID NO: 382799 - protein, 316 aa, unidentified
MICGVDVSSKSLDARIGRDGAAACFTNNPKGIAELAEFCQCHKVHLVAMEATGGYEKKPFALLWAAGIQVAVVNPRAVRNFAHGMGLLEKTDRIDAGVIAWYAQTKGCVAISPASAEQQQLKAMVTRLRQLTELRAAQRNQRLLVTDKMVLKSFRKLLDLVQKQIRDLEVAIAGLIDADAVWHKLDQSFRSIKGVADRTVARLMAEMPEIGTLSNKRISKLAGLAPLACDSGQWKGKRSVRGGRRTIREILFVVAAGVSRYNADFGAFRERLAAAGKAKKVIRIALAHKLLVRLNAKARDVLQQLREAPPAAVLLS

SEQ ID NO: 382800 - protein, 345 aa, unidentified
MQVSTIGIDLAKNVFQVHGVDEQHKVVLVRQLRRSQVFDFFGKLAPCLVGMEACATAHHWARELTKLGHTVRLIPPAYVKAYVKRQKNDAADAAAICEAVTRPSMRFVPVKSTEQQATLAVHRTRALLISQRTQLINALRAHLAELGIVAEEGRDGLAKLIAIISQNSTLQSLPSAMLDALQCLVAQLAALQRQIGELDRCLQAQHRASDTSRRLESVPGIGVIGATALAATVTDASVFKSGRDLAAWIGLVPRQNSTGGKQRLGSISKQGDRYLRRLLVAGAMAVVQHARRHPEKHPWIIKLLARKSAKLVAVAVANKLARIAWAIMAKGGTYRAPTPALVAAA

SEQ ID NO: 382801 - protein, 317 aa, unidentified
MERSELTTRVAGVDVGKLKLDVAVHGLDELSVVANDQAGFKTLAAWLHDRGVGRVGLEATGGYERGVRSALEQAGFEVVVHQPIEVRMFAKLKRLRAKNDRLDAKVIAQATAQTQAVKAAQDPRLIELADHLTVYELITDKAASLKTALEQVRLKDLVACLRAQIRSLERLKAKLIAGILMRIKAEPDLLDRFKLLMSLPGVGPITAATLVIRMPELGAMNRGQPASLAGVAPFDRDSGQLKGLRMIAGGRAKPRRMLYLAASVAKRHDPGFKAFAQRLAANGKKPKVVTVAIMRKLIEAANLVLARGQPWVRTVAT

SEQ ID NO: 382802 - protein, 400 aa, unidentified
MISVGIDVSKGKSTVCLLKPYGEIVCKPFEVQHTEEDLEELANLLQKLDGEIKIVMEATGIYHLPILTFLLEKGFFISVINPFMMKRFARDNSLRGAKNDRLDSVMIASYGIEKWYKLKKYEVNARIYTELRLLGRQYHRFMQTHVKHVQELTHLLDYTAPGLKTMFNSWNEHSNRDKLSDFVERFWHFDLITSLSREEFVEQYLLWAKEKKYHQSQSKAEKVYDLASNGIPTLSSHTPSTQMMIQGAINVLRIVNNSLYHILSRMKELAKSLPEYATVRSMGGVGDSLAPRLIAEIGDVRRLHNGHALIALAGIDPPPYESGQFVGTHRRISKRGSPILRKIGFEVMRVLKSHKEPEDNAVYNYILKKEAEGKNKKLSKIAGLNKFLRIYYARVMEVYQ

SEQ ID NO: 382803 - protein, 403 aa, unidentified
MIFVGVDWAEDHHDVCLLDEQGANLGKRRVPEGLDGSRQLQELIAEHTEGPEQVVIGIETDRGLLVRSLLAAGYQLYAINPLAVDRYRDRHATSGAKSDIGDAKLLADLVRTDRHNHRPVAGDSELAEAIKVLARAHQNLIWSRQRQLNQLRSTLREFYPGALAAFRDDLGSADAIALLERAPTPYRGRSISQAKILSALRKAGRERNLEQKTAEIQAQLRAPQLQMPNSVAQAYGHTLSALVLVIKQLNLQLRELEQELNQGFEMHPDAEIYLSLPGLGNVLGARVLGEFGDDRTRYSDAKARKNYAGNSPITKASGTKQVVLKRFACNRRLADACHLWAFCALKASPGARRYYDQLKARGKTHRQALRALANRLVGILHACLQHRQPYREEVAWPPLAAAA

SEQ ID NO: 382804 - protein, 391 aa, unidentified
MKALLDCCCGLDVHKDIIQACILRGDDDNRELTRERFGTIRSELHKLCEWLRQNGCRHMAMESTGVYWQPIYDYIEEEYPEKESLLVVNAQHMHNLPGRKSDVKDAEWIAQLLQYGLLSNSFIPEKRIRLLREMTRLKRTYINDHTANYNRLEKFLQRHGFKLSSVVCDILGVAGRNMLDMLVIKGSLTPADVQSAIRRRMKHTAEEIHAAIAGNLDPLERPVLKMMLDWLDQLDAQIERINTQMMIAAKPDEAQVEILCSIPGINVNAGLEILAEIGPAPHQSFANSGRLCSWAGLVPRNDESAGKIKSRRILKGNPYLKSLLVQTAWAAVSHRKNEFASWFWYRQGALGRKKAIIAVARKMLVLIYTLLQSGEFYDSNRGLHLPLCDNG

SEQ ID NO: 382805 - protein, 468 aa, unidentified
MKRKSRHAKQQKASLLSEDLQLIEPDAAAIDIGSRSHWVAVNPQRASEPVREFGTFTTDLNRLADWLTECRASSVVMEATGVYWVTLYELLEERGFKVYLVDAHTVRHLPGRKKSDVVDCQWIRRLQSYRLLQGSFRPPQQIRRLRTYLRSRSKVLECAAQQQLRMQKALTLMNIQLHHVISDLDGVTGMGIVRAIVAGERDAKQLARLRDPRIRASRETIEKSLQGNWQEELLFDLKIALESYDHFQTQIAAYDEQIRQELKALPSKVDLQKQPLGAPRPKSCRTRPGTTQQQQFDLRQELYRISGVDLTRIDGVSLQTAQKVLFEIGTDVSAWSDERKFSSWLGLSPNHHISGGKVLKRKSRKVINPLSIALRLAARTLRNSKSALGANFRRLIAKIGMPKAITAMARKLAVLIYRMLKYGSDYVDKGMQHYERKYQETKLQYLRRQAARLGMQLVPNQGVATSVH

SEQ ID NO: 382806 - protein, 323 aa, unidentified
MPHVTSIGLDVHARSVAAAAFNPFTGEVVHRDFGTDAAEIAEWALGFEEPRACYESGPTGFHMARELRALGLDCAVAAVSKMQRPAADARRKNDRRDAEFIARMLATHNIVEVPLPDAAVEAARDLDRALDDATVEYRRARQRLNMFLIRLGHVWDERNADGARKGSWTRAHWRWISGIRLEGPQRDVLEYYVTAARCAESDRRQLEKKVLALARTDRWRPAVEALSCIKGIDTLTAFRLAAEAGSFTRFRTAPAFASWCGLVPSERSSGETERRGGITKTRNRLASVSVNLFFTSFAKQARRSRKGGFTGCANVFSPIPVTA

SEQ ID NO: 382807 - protein, 303 aa, unidentified
MKAQRFANTLADRKRLVKKLAPFPGIIVCLEATGVYYLDLAIALHAAGIRIMVLNPKASHHFAQVLLRHSKTDAVDADTLAQYAERMPYQPWARPADEALALRCLARRINTLTRNKAAAKNQRHALTFSPQTPKAVLRDLKLSITQLEKRIDGLTEEAKTFIQAHPALARPFALLLTVKGIGEASAIALLGELLLLPKGLTHKQWVKAAGLDPRHFQSGKSIDKRARLSKAGNRAIRQALYMPALSAKAHDPYVRGFFEHLIANGKTPLQAVCAVMRKLLHAIHGMLTHHQPFDNTRFYTFPA

SEQ ID NO: 382808 - protein, 366 aa, unidentified
MTTMTQSAMDDSGGGVVGGVDTHRDTHTAAVLDARGRLLGTAEFPATQDGYARVLAWLRGFGPLSRVGVEGTGAYGAGLARSLAGHGITVLEVARPDRRARRVRGKSDPFDAENAARAVLSQDGTRVSTPKDRAGATEALRAVRVARRSAVAARAIVLNQIHTLLVTAPEPLRSQLRGLAPARVIAVCAGEDPAQLTDPAHIGDPATATRLALYHLARRHHHLCGEITALDQVATALVERINPALLQLPGVGPDCAGQLLVTAGDNPDRLHSEAAFAHLCGVAPIPASSGHTHRHRLNRGGDRQANAALYRITLSRLRWDPRTRDYQQRRTHQGLTNKDIIRCLKRYIAREIYNTLTNPTTSTNTP

SEQ ID NO: 382809 - protein, 374 aa, unidentified
MATIARLGIDTSKSLFQLHGVNEREEAVLRKQVRRGQFLGFIAKLAPTKIGVEACGASHYWARQLQALGHEVVLLPPQHVKPYVGLNKNDKIDAAAICEAMSRPRLRERFVAIKSAEQSAAQMLLGTRDGLLHRRTQLGNTIRGHAAEFGLVTPKGLAHIKPLLERIAVDQTVPALAKELFATLGEEFTELGPRIARLDKKLKAFQRSDELCRRLVEVPTIGPVIASSMVVKISNPAAFRSARRCAAWLGLTPKDHSTAGKMRHGGITRAGDEGLRAALVSGATAYIQQVKRGRTRPSPWLAQLLKRKPEKLAAVALANKTARIAWKLMTSGERYDRARAEAREGLGATQYQGSTPNPSLHPHSADHASAMTAA

SEQ ID NO: 382810 - protein, 346 aa, unidentified
MLHAGLDLSRKRLDFHLLDEQGETVEVGAAPPDADGLHGLAARLGRHGQPLRAAIESMTGARFVHDQLELHGWEVEIADAVKVKGLAPLACKTDRIDAWVLAELSRRELVPAIWLPDPEVRAERERARFRLHLVRHRTMLKQRVHATLLTHGKPCPVSDLFGVRGRELLGRLALPEPWAGTVEASLRLIDELEREIDACERELAALGAEHRYVPLLITVPGIAWVLAYTIAAEIGDIARFSSPAKLSGYSGLCPRVYQSGESDRRGPLSKMGPRYLRWALIEATTHASRHPAYHDRYQRTKTRLGKQRGPRIAQVDLARRLAEAIWHMLTRNRPFAPAGAPAPMTA

SEQ ID NO: 382811 - protein, 297 aa, unidentified
MKIMTGIDLHSNNAVCGLVDMEGRRLLHKKLPCNLSKIVQTLAPYKEQIDTIAVESTFNWYWLVDGLQDHGYKVVLANPAKMEQYDGLKHADDTSDVFFMAEMLRLGILPCGNIYDRKTRPVRDLLRRRLGLVHKRSSLYISFKSLYTRTTGEQMSLARLKTLKPEEAAKLFKHPCDQLIAREMIELIERLKQSISLIEKTVLETASQGSYYHKLQSIPGIGKILGLTITMETGDVGRFPDAGNFASYGRCVKSQRLSNNKKKGKNNDKCGNKFLAWAFVEAANFARRLMLFSTLAS

SEQ ID NO: 382812 - protein, 324 aa, unidentified
MKLYLGIDMGKSGFTAALCSEDQTFQIIHPEVRNQIDGWQAIRDWVLKQSKEKPAEVHLGVESTGGYEKPLVGWFRCNTEFAITVLNPVRVKKFAQSELSRTKNDRNDARLIARYLAIRKPEPTLVTVPEIEELKLMVRHLEHLIRKQADEKIYLDSVTETAIRRQTQDIIQTYQKQIEKVQAQIRKHIDSHPNLRNQSGLLQSIPGIGEKTSAILLCECIPALTPKQQVAHAGLAPRHNQSGKMNGKTQLCKTGNKRLRTALYLPTLCAIRCNPVIREFYQRLIARGKLKMVAVGACMRKLVHIIVGVLKSQISFNPNYALLT

SEQ ID NO: 382813 - protein, 345 aa, unidentified
MPNPVAPHVIGLDIAKSVFQAHGADASGRAVLRRRLRRAEVLGFFARLSPCVVGIEACPSGHYWARELIALGHEVRLIPPQFVRPFVKTNKNDAADAEAISEAVLRPSMRFVPVKSAEQQAAMMIHRTRALLLRQRTQLINALRGHLAEFGLVASRGTRNIRQLADLVEETDSATLPDAARAMLVIILEQIREVAVRVAGIDRTLDSWAKSSEECRRLMAIPGVGTISATALVLAMGDPARFRSGRHFAAWLGLVPRQNSSGEKERLGRISKRGDGYIRTLLIHGARSITRWHRESWSWLAGMMARRPTNVVAVAIANKTARTAWALLARGRAFEARGSRSAAAA

SEQ ID NO: 382814 - protein, 359 aa, unidentified
MIVIGIDPHMKTHTAVAVDSVTGRSLGTRTVTGDGTGHDELLAWARGLGPERYFAIEDCRHVSGRLERHLLGHSERVVRVPPKMMAGARSSARTYGKSDPIDAACVARAALREPGLPEASLCGPEQDARLLVDHRDDLVDERKRMQKRLRWHCHDLEVDLDMPPRVLDRYVWLDRLEAILDSLPESTRRRIAVSELRRIRELTVEVKGLEREIAGLMRELAPDLMEVPGCSAILAAHLIGQTAGFSRFSGEAAFAMHVGVAPLPVSSGKSCRHRLNRCGNRKLNSVIHMIAVTQARMHPPAMAYMERKQSEGMSYREALRCLKRLIARTVFKTMLRAEKAAMGTVVRADFGAVPTAVAV

SEQ ID NO: 382815 - protein, 357 aa, unidentified
MNQEKYIGMDVHAATISAAVMNAEGKVLMECVLETKAATILEFIEGLRGTLALTFEEGIMATWLHDLLKPHVSRLVVCDPRKNALMRDGNQNDRVDARNLAELLRTHHVHGVYHEKHGTRALKELGRSYLTLTKDSTRVMNRIKSVYRSWAIPCAGTSVYSRRHRAEWLAKLVEPGVRMRAEHLYEQLDSLQPVRQAARRELLRESRKHAAVKLLRQIPAIGPIRSALLVAILQTPHRFRTKRQLWAYSGFAVQTYDSGEYRFVRGKLQRNRERITVRGLNHNHNHDLKNLLKGAAITAIERPGPLQDFYAALVDKGIRPSMARLTLARKIAAITLTIWKKGARPTPLGWLCHSETV

SEQ ID NO: 382816 - protein, 325 aa, unidentified
MSTYLGIDVSSDFIHIAYEADNAWVYNKVENQLKAIDEWISTMPADIHVIFEYTGTYSLRLAYSLSLRERTFSIITPSQSKGFAASLKNKAKTDAQDAKVLSLYGSKMQPEPTTLTDQTVHQKKQTYKHYNDLIAQKQAVTNKIHALTFDPRAAKEVIESLKIISQVYQQQIDTFQQQLFDLNDDEFNQLKDKLMEIKGIGEKAATGIIIQTNGLKNFHSAKALAAFLGLVPTTKQSGTSLKSRGSLVNTACKQLRTILFCAAQSAARFNLDCKELYTRLIAKGKTKKAAKMAVAHKLIRQAFAIIKNNTVFQNDFKANKIALAK

SEQ ID NO: 382817 - protein, 313 aa, unidentified
MTGLVYAAGIDVGRDYLDVAVAPAGRARRMSNEANGIASLVRHLHAQGVRRVVLEAIGPYAARLIRALADAGFELGVVDPRRIKAWRAVEGRRAKNDRLDAELIARFALAMSDVVRPVPELQTMRIRALSSRRRQIVEMIAVEKTRLKQAADETIMASHRQIIALLGKQRQDIEIELASSLETAGLTSRGHVLQTAPGVGPAVSMTLLADLPELGSLDRRAIASLAGLAPHITQSGLDRGHAAIAGGRPCVRSAMYLAALSAIRLERGFKAEYQAMRAAGKPAKVAIIAIARKLLVALNQMARNNTPWKAKNT

SEQ ID NO: 382818 - protein, 389 aa, unidentified
MKPSNAEFTAFVGLDWADAKHDVCVQAAGCEEREFDRFAHHPEHIEQWAHSLHQRFGGRIAVALELAKGPIVYALQKYDFLVLYPINPSTLAKYRQAFKPSRAKDDPTDAELALDLLLRHRERFQPLKPQSVPMRKLCLLVEQRRRLVGDKTRSVNRLCYTLKQYYPQALEWFEQRDTVLFCDFISRWPTLKQVRRARQTTLIIFFKAHNVRFERVIEARLCAIKAATPLTQDAAVIEAHQLQAEVLVEQLRLTLKAIARFDQEIAATAAKLPDYALLFEPLPGAGPVLAPRLLATFGEDRQRYAGAGQLQMYSGVAPVTERSGNKTWVHWRWQCPTFLRQSLVEWAGQTVNKSFWAGAYYRQQMAKGSSHQAAVRALAFKWVRILYRC

SEQ ID NO: 382819 - protein, 411 aa, unidentified
METIHERVAGLDVHKDTVVACVRVPGGRGRRESHVHEFSTTTPGLMALRDWLVSHQVGLVGMEATGNCWKPVYYALEDASECWLLNARHLRNVPGRKTDLADAAWIAQLLEHGLVHPSFVPPPEIRELRDLTRYRKAQIEERVREAQRLDKVLQDAGIKLSSVASHLLGVSAQAMLRAMVAGERDPQILAELAKGKPRRELPELAEALEGRFRGHHALLVGEILAKLDHLDEAIERLSDEIERVLGPFAPQVELLRTIPGVDRRMAEALIAEIGVDTSRFGSSARLASWAGVCPGQHESAGRQRHGTTRKGSKWLRMHLTQAAKAAARTKGTDLAAQYARLRGRRGGSRATIAVAHSILAAFHILGRGTPYEDLGADWFIRRHSPERHARKLVHQLETLGFDVRLEERAAA

SEQ ID NO: 382820 - protein, 321 aa, unidentified
MNKEQNYIGVDISKDNLDIAVYGSKNRWRFTNNMPGIKQAIDLFKNMLPVLVIFEATGGLELSFWAALTEADIDAVLVNPRQIRDFAKAGGKLAKTDTLDAEIIAHYGQAMQPKPQPFPDTQDLKELVARRNQIVEMISAEKNRFKAARSADIKQDITVNIEWLESRLKNLDQDLKKSIKENPVLQEKDQLLRSTPGVGHALSATLLACLPELGKLNRHQVAALVGVAPLNRDSGLMKGKRAVWGGRGRVRKALYMATLVATRYNPVISSFYHRLCDGIKVKKLALIACMRKLLTILNSMLKTHSYWNRQLIQEPPILMNN

SEQ ID NO: 382821 - protein, 353 aa, unidentified
MIIIGVDFHPEFQQIASVDTETGEFQEKRLAHREDAETFYRAVAGQKVRVGMEASGHARWFERLLAELQFELWIGDAAEIQSKRVRKQKTDRQDAQLILRLMLKDDFPRIWVPSWENRDVRQLLWHRHRMVEMRTRIMNQLQALALNEGLRCRKRLWREHGRQQLESFRLAPWASRRRRDLLELLDRLKPTIAELSQAIEQEAEKYPQAQRLMTHPGVGPLTALAFVLIIGKAERFQCGKQIASYLGLVPLEKSSGNRRRLGHITKQGSSMVRFLLVEAAQVTVRSLPEWRKKYAHLMMRRGRKIAKVAMAGRLAVALYWMWRKGWNYEPSKSSVRTRASSEQAMVCSKTPSN

SEQ ID NO: 382822 - protein, 411 aa, unidentified
MQEKSKRVVSPGTGHREVWYAPSTERKEERMEPKTTRKKNDTPVSVYLYLALELSREEWKMGFTIGFGQAPRLRNLRGGDLVGLLNEIRQAKERFGLVEEAIVRSCYEAGRDGFWLHRYLVAEGIENVVVDSSSIEVNRRARRAKTDRLDVGKLLSMLLRYHQGEPKVWSVVHVPSVEVEDRRQLHRELQALKRERTHHINRLKGLLASQGVRMEVKADFRLQLEEVRLWDGSPLPAGLRACLVREHERLLYMQEQIRQLEQQRKELLRTSTDPAMEQVQCLLRLRGIGINSAWLYVMEFFSWRAFRNRREVGSLSGLTPTPYQSGENARERGISKAGNRPVRAMAIEIAWAWLRFQPQSELSRWYEQRFAHAGKRMRRIGIVALARKLLVALWQYLETGIPPQGAILLHD

SEQ ID NO: 382823 - protein, 409 aa, unidentified
MEVVHERCCGLDVHKKTVVACLVTPGRGGQPTREVRTFSTMTRELLALSDWLLEAGCTHAAMESTGSYWKPVYNLLEGSFELLVVNAQHMKAVPGRKTDVKDAEWIADLLRHGLLRPSFIPSRPERELRELTRYRTSLLQERAAEVNRLQKVLEGANIKLASVATNVVGLSGRAMLAAMVAGEYEVEAVAGLARGKLRNKIGALKEALEGRLQPHQRFMLAAQLRHIDSLDSLIEEVSGEVERRLATLRAELKRLSTIPGVSTRISQAMLSEMGADMGRFASAGHLASWVAICPGHDESAGKSRSGRTRKGSPWLRSALVQAAKAAGRTQTYLGAQYRRIAARRGANRAAVAVAHSIIVIAYYMLKRSEDYRDLGSNYFDERQEEQVKKRLTRRLEALGFSVHLTPKEA

SEQ ID NO: 382824 - protein, 340 aa, unidentified
MDITTLGIDVSKNSFHVIGANRAGKPVFRQKFTRQKLTEFIANHPPCLIGMEACPGSQHFARKFEELGHQVRLMPAQFVKPYVKSNKNDFNDAAAIAEAVCRPTMRFVTTKTTEQHDLQAMHRVRERLVRTRTSIICQIRSFLLENGITVRTGRAALARALPAILEDPDQRLSERMRSLICRLRDQWRFIDEDINAVSKELEAIARSRDDCRRLLTIPGVGPLVATALVASVGNGRHFKRGRELAAWLGLVPREHSTGGKQRLLGISKRGSSYLRKLMIHGARSCYLNMNREPHRMGQWIDQLSQRGAHRNIVVVALANKLARICWAVMRDGSVYHCVKA

SEQ ID NO: 382825 - protein, 376 aa, unidentified
MSSYEDITFVGLDAHAKNINVAVILPGSGEVDEQWQITHDERSLRRLSRKLLKMAPGEVHAVYEAGPCGYALKRNLEALGLCCEVVAPSLIPVKPGDRVKTDRRDACKLASLFKADLLTIVHPPNEREEALRDLMRAREDAKKDLLSARHRLSKMLLRYGLQFLETKNWTLKHRAWLKGLRFEQAYAQQVFDNYLLSIEQVEERLKMLDAHIEEAAADDAYAEQVGWLRCLRGIDTVTAMTILAELHDFRRFAHPRDLMAYLGLTPSEYSSGGRTKRGSITKAGNSHVRRVLIEAAWNYRHRPAVTAPLRKRRAGQPTAVIAIADRAQHRLYKRYYRLKEGYRKPHNVVAVAIARELVGFIWAVLHHQDAAQAAHH

SEQ ID NO: 382826 - protein, 354 aa, unidentified
MKTYYVGMDVHRASIWIVVLNGAGKLVMQSVIETGAERVRGYLKQLRGKVYVTFEEGTQATWLHDIVRSLVTEVVVCDPRHNKLLQSGNKNDRVDAQKLAELLRNGALKAVYHGDHGMRTLKELVRNYDCLVSDSTRVMLRLKAIYRGRAISCAGHDIYRSDRRAQWLEKLREPGARQRASFLYAQLAALKPLRHEAKLVMVKEARRQAAYPWLMSVPQLGSVSVAQLMAVVGTPHRFRTKRQFWPYVGLAVVTRSSADHEIVNGVLRRSRRPLATRGLNRNHNHLLKKVFKSAATSACHSGPFKAGYDARVAQGMDPSLARLTIARQLAAITLAVWKRGEKFNMQMMKQQLAA

SEQ ID NO: 382827 - protein, 452 aa, unidentified
MIMQVQTSRAGIAERYYVGIDIGYREHVAAAISKSTFLQGAVRWKKAKAIHFASSRSGLDKLHQYLLGFSNDPKAFLILCEPTGGHYGVSLYQDLLKNKYSPMLVDNSTTRHMREKIFGSLPKTDEMDARVMARIAYLHDVVGEEFTLKVLRLPDPDQEELLALCRNNWKLNGMVTRVRNQFAQLMAVVFPELKFFFEGSVSSPTPIRLMASYPSPAEIANAMPEELYNFLWKARSYQHAKRVQELQDLARNSSGSLPDPGRAWRLAWTSQFLLSNFELLSQLDKQIEHVCSNHPNYTLLMDIPYSGPNTLGTILSITGNCTRFRNYRQYVAYTGYFAGLERSQTIDHTRMSRRGNRNLKRAYFQIVAPMVWFDHGENFYKNLYKRKVAEGRAWYVAMPFACAALARHIYHCLKFQEPYQLEKAFGRVLASHVEDLAKSKFQADLEGTCTVF

SEQ ID NO: 382828 - protein, 450 aa, unidentified
MKKEKVNKGVIKMGSGLPVFNHFAAGIDIGDTLHCIAINDGNGGHEVKTTSAFTCDLTEIVDYLKSNGITTAAMESTGIYWLPLYIMLEEAGIEPYLVNAKHVKNVTGRKKDDTDSIWIQKLHTCGLLQKSFQPDNEIRLLRSYTRQRKNLIILGSDAVRRMQKALELMNIKIQTVISDILGKTGMDMVKAIIAGEKDPQILATLCHPGIKASQEEIIKSLQGIWKEEYLFMLEQAVENYEFHQKQIKNCEEKIKQQLLKQVAIIKEGDITSLEVLKKKVKSKRNQFDFAISPLLIAIAGVDLCRIPGISEVTALGFISEVGVDMSKWSSAKHFAAWLNLTPNTKITGGKIISSKMMKKNNKAGQYLRQAASCLSTNKTPIGDHYRRMRARLGGKGAALTTAHKLSRIIYTMLLKKTAYNPGMMIDNQEKIKADKIKKLEKQLARLKQAA

SEQ ID NO: 382829 - protein, 395 aa, unidentified
MLYLGIDIGKNNHEAGIVDGEGKQRGKSLRFANDQQGFSALTSFLEQKVGPGEELRVGMEATGHYWIPLYSFLHGKGFRLHVINPIQSDSLRNFTIRGAKTDSIDCFLIAHTIRFGDFSETRLADEDVLTLRNLARFRESLKDSCANYKRQVVTVLDQVFPEYDALFSNMFGESSKAFLKTYGTPEQTMELDTKSLAALLRKASRGRHGTKKAEEIKALAGRSIGVPFCKDAFAFQLKILIEQIEFTEKQIGEIDKKLAQLLKKLNPVILSIPGVGPATGAVILGEIGDINRFDKPKKLVAFAGIDPTVMQSGNFSGSHNRFSKRGSPYLRRAIWLAAVVAARFDPVFKAFYEKKRGEGKAYGTAIGAVARKLAYTIFAILKTNKPYEVRLNPEA

SEQ ID NO: 382830 - protein, 376 aa, unidentified
MHEGKDIILVVDYHAENIEFRWFNEATGEERTGKYATARDGILRQVEQARREVSPGGEVVWIMESTTGWARVKDLIGSNTRFLLANVLQMPLPPKARRRKTDKIDTGRLLREYLHGDLPLSFQPTAWWRQVRRVVDCRQDLAERQTAVKNWINSLLQHETWEDRENLWSGKGRRRLDRLGLGASDRALVELRLQQLDQLAAQEVEVEKRMQAIYDGWPEAQWVDQVRGVGMVTAVSVLAHVGPIERFATAEDLISYAGLAPGVHQSDGTRRDGRIGGGGTDSHLRYLVIEASVWLRDIPRYRPTYERVMKKRGKKIARIVVGRLFLRSLYKMLKDHVRFNPAGLRRTPAGATTIMTHALEPEATTARLSHGAAGIM

SEQ ID NO: 382831 - protein, 343 aa, unidentified
MLYTGLDLHRSFSYITTMNEKGEIVGQKKLPSNGEVVEFLKEFNDTMEVAIEATPSWYWLYDHLEDEGFKVKLSHPLKTKAIAYAKVKTDKVDSATLAHLLRSDLLPLSYVPEKPVRLNRELLRYRARLVRVQTRIKNNIHTILAKNNVSHSYSDLFGKEGMAFLYSLSLPENYKIALEGYLSVLETLRHEIRLASKRVQALAEENQDAVLLMTIPGVGYYSALMIKSEIGDVKRFPSAKQLCSYAGLVPSTYASGNTCYHGHITKQDSRWLRWILIEAAIHAVKRPGPLRRFYFKVERKKGGKVVKVATARKLLEWIYHMMRDNKSFKEVERLAELQVRVSP

SEQ ID NO: 382832 - protein, 412 aa, unidentified
METLVERGCGLDVHQATVVACLLIVRKDGKVQKQVRIFGTTTRELLSMREWLLSQGCTHVAMESTGVYWKPVYAILEGAFQIVVANAQHVKKVPGRKTDVKDAEWIADLLCHGLLRSSFVPPKAIRELRDLTRYRRKLVESQAAERNRLLKVLETANIKLASVATDVFGTSGRLMLRALIEGKATAQEMAELAKKKLRSKIPQLELALEGRLEDHHRFLLKLQLDRVERVEGDLAVLEQHIQEKLAPYAAQLALLDEIPGVDWTLAVVIIAELGVDMSVFQSVSQLASWAGVCPGNNESAGKRKSSRIPKGNVYLKTALVEAAHSAAKTKGTYLRDKFYRLKARRGYKRAAVAIGHKILVSIYHMVSQNVSYNDLGDLYLDKLNQNHLTRNLVHRLERLGYTVTLTLEQKAA

SEQ ID NO: 382833 - protein, 343 aa, unidentified
MPHYVGLDVSQKTTAICVVDEQGRQLWRGACVTDPAAISALVLRHGGSNAKAGIETGAMTPWLVHGLRSAGLNVECLDARRVKAALQMRLNKTDENDAEGLAQIMRTGWYRPVHVKSLDAHRARALLGARVQLVGMTTRLSNMIRGVLKTFGLLPGAGRGLRFDQSVEALLEGAPEIALIVRPLLATWRQLRQQITVFDKAVRRQVKTDPVCRLLMSVPGIGALSSLMYVSTVEDPDRFSRSRAVGAHLGLTPRRYQSGETDRTGHISRCGDGLARTLMYEAATVILYRVKRSLHLKDWAEAIERRSGAGKARVALARKLSVILHSIWRSGEPFRWASPAITA

SEQ ID NO: 382834 - protein, 443 aa, unidentified
MNSLPQHLRHINVNAAGIDIGSDRHLVAVPEGRDEVSVREFGVFTADLNRIADWLEKCGITTVAMESTAVYWIPLFELLEQRGFEVKLVDTRQTKNVSGRKSDVLDCQWIQQLHTYGLLQGAFRPPDEICVLRSYMRQREMLTQVSSMHIQHMQKALQQMNLLLHNVVSDITGATGMKIIKAIIAGERDPNVLADNRHEQCRNTKETIAKSLVGNFRDEHMFALKQAVDLYETYQAKIAECEQAIIEHLATQPDVTDEEPPDGGKRVPPRDRIRAGVDLREKLFKLTGVDLFAIPGLGADTLLTITGEVGVDMSPWKTDKNFTSWLGLCPGTKISGGKILSRRTKRNANRAAQAFRMAAASQARSQTALGAFYRRIASRSSRIQALTATAHKIARIYYSMLTKGTTYVETGQQAYEQMYKERRINALKKQAQSLGYLLLACGS

SEQ ID NO: 382835 - protein, 391 aa, unidentified
MTFFIGIDIAKYKHDCLILNHEGEVIRESFSFTNDRAGFVYLKEILSTLNSNQTMRIGFEATGHYAMNLKVFLDENGLSYMQFNPFLIKRFAQATTLRKTKTDKVDARVIATYLLSVDYKPYPIQSYHIKNLKSLTRDRDDLIKLRSRQLVKLTNLLDLIFPEFKPFFGHSLTSSTCLYLLDHYLIPSKMCHMNLDSYQKMRFKLRRTISYARFCTLKQLAHDTIGSEDQTLTYLLKKALELYHTLDDQIIQIEAFIQQEYEQIESHIHTIIGISLQSAACILAEYESFDRFETSDQMLAFAGLEPSRKQSGELESKGKMVKHGSSLLRQTIMNVAATSIIHNPILYDYYHKKRTEGKLHRVALSHVAKRIARIIFHLEKHHLDFDLAKMR

SEQ ID NO: 382836 - protein, 482 aa, unidentified
MKKKNIYTNQSQELLALFEEAGNGVKVMCVPIDYAKKDHVAMLCNGNGHILRKPFSVKNSPEGIEYLIEQVTRSCSHRQMDLKHVFFGGEDVGSYAENFVNTLRSGGWIVAGVNAHDAKEQRANMQASTDRLDLMGIASMLLNRRGNCSPAQSGIYRNLRTVVRHRKKLVAMSTEVKNRMHTVVDRLFPGFLDEKKSGILSFSKSSLYLMEDRFSPRQIRRRKRKKLIEILKRYGTAKPESTTAKLQEYAARVLNTPNEYVDTLQLSLAQHVKHFKCLQDSIDQLEHEIAVWLAQTQGAFLTTIRGIGIVLAAGVSAEIGNPQEQKPLNNLVSYSGIIPRVKQTGGSEGKTHTGKVAKRCNHILKDYVVQSGNHMGLHGPEELMADYKRREAADQHADFGIGRRYLRMAMCLMRTSQIYMPEQLRNTEVKPEERAGYYLTIWPYLRRKWKKAGALEAAFEKDRPLGQWRCMVQELYGIKLKL

SEQ ID NO: 382837 - protein, 427 aa, unidentified
MNSTQNKKIEQVKETTMIVGIDVGSEKHYFRAFNWRGIELTRKPVPFSNSMEGFNSFYNTVVELMQKNKLEEAMVGIEPTGHYWFDLGQFMGEKDIKLVMVNPHHVHKTKELDDNSPSKNDRKDPRVIAGLVKDGRYFYSYMPTGVYAELRNASNRRFVLVEEQTRAKNRLQKWIAVYFPEYKGIYTHIDSKGGLLVLKQAPTPDEIVKLGVEGIIKIWKDAKLRGNGQKKAKLILNAAMNSIGLKTGLIEARMEIQDLIEDYELQTKRLERVNDLIKELCQQIKHVDKLLEIKGIGITTVAGFIAEVGDITRFDNTKELQKLAGLELVADSSGKHNGKTKISKRGRKRLRYLLFEAAISVVGKNEEFREIHKYYTTREKNPLKKMQSLIAVACKLIRVFHVILTKGICYDASKMLGDIKRPQTTKT

SEQ ID NO: 382838 - protein, 386 aa, unidentified
MERNDLSRSLVAFDQNSTLVAVVELSLKTWLVCGLVPGLTRQPLKKQDADANALLALLHRWRDEAIKFGGKIERIVVAFEAGRDGFWLARWLRTRGIESYVIHPTSIPVSREHRRAKSDRLDTGLLMRALLGWLRGEAKHCSMVAIPTLTEEDARRPNREHEHLVGERTRILNRLKATMIRHGIRAFNVKLRKAAERLGDLRTPEGVALPANTLAELGRDMERLRLIREQIKAIEQERLERLRTAPHAGPHPMVLMLAKVLGIGVETADMLVHEVLTRELRDGRAVGRYAGLTGAPDESGSKRREKGLARAGNARVRRGMIQLAWRWLMFQKDSALAQWFQARTAHAGRIGRTKMIVALARKLLIALWRYVTPGEVPAGAKLRAAI

SEQ ID NO: 382839 - protein, 337 aa, unidentified
MDGEFRTNPSFWAGFDLAKATFQLGRWGHEEDIRKLKVAGFYRTKKGCKEALKLLHQEAPTGARIGIVMEATGTFAEEVGFWLLKLDPSLHIAIVNPMQTNAFIKSLGLRNKTDDLEARALAQYGAQRKPPAWVPPSPEQMVLRDLTRIRADMVQARVAMAMRLKDHKRSSPVATHAMKEVIRIQSKQIKVLEAEIEAQLKGSNDLEQQAKRLASIKGVGLITAVTVLAEFGDLRRFARSRQLTAFAGLSPKLNQSGTSVHGNSPICKQGSARVRAVLYCAAACAARFNPDLAKVYRQLVASGKHKRSALGAVMRKLLVLMRAVLVAERNWMPIKAA

SEQ ID NO: 382840 - protein, 347 aa, unidentified
MSDFVGLDVSLSAISICVMDEEGEIIARGKTPCDPSAVVDFIASHSRHVQRVVHETGQLSTWLHRELAELGVPIVCIDARMAKKALSARLNKTDRVDAEGLAQLARTGWYREVHVRSESRDVIRAMLGARDRLVRIRKDIEGHVRGVLKSYGIRLQTVTDARNRASFREQVRQLVVGNAALETIADALIAAHETVCAEFAVLDAAVNRMARANKVARRLMTIPGVGPVVALSFIATIDDADRFSKSTQVGAYLGLTPRRIQSGEVDYSGRISKCGNPAMRSLLVEAASTLIARVRRFSSLKAWAVRLAARKGFKKAAGATARKIAVIMHRIWRNETTFIWSKEGLAN

SEQ ID NO: 382841 - protein, 346 aa, unidentified
MDQIIRIGMDTSKSVFQLHGVNAAEAVVLRKRLHRRDVVKFFSRLDPTVVGIEACGGSHHWARVLGDLGHEVRMMPAQYVKAYVKRGKNDAADAEALCEAMSRPTMRFVPVKTAQTQAALMLMSVRERLVGERTRLGNMIRGHAAEFGLVTPKGLHRIEPLLARIAGDETVPELAREMFAVLGRDYGRLQGEIKKIEARMMAWHRQDERSRRLAQIPGVGPIGAMMLSLKAPDPHLFRSGRLFAAWMGLTPRDHSTAGKTRLGVITRAGDAALRSVLVVGATSAIRQVRRGRGLRSPWLVDLLRRKEPKEAAVALANKTARIAWKLMVSGETYDPHRASPALAEAA

SEQ ID NO: 382842 - protein, 471 aa, unidentified
MNNHRRRPGKHRRHRPGKPCTSPSVLERINPNVAGIDCGSAEHFVAVPPDRDPCPVQSFRTFTGDLVRLADWLVACGVMSVAMEATGVYWIPVYDILEARGLNVLLVNARHIKNVPGRKSDVSDCEWLRELHSVGLLRGSFRPTATIVALRTYLRHRQTMIEDASTYIQRMQKALVQMNVQLPLVVTDITGVTGMSILRAIVGGQRDPERLAECRDPRCQASKAEIIEALTGHYQADHLFVLQQNLALYDACQQQIAACDRAIEAHVQILVATVEPPSTPLPPARARTGLKNEPAFEIRSPLHQLTGGVDLSQIEGIAPYSALKLLSEIGTDMTRWSTEKHFTAWLTLAPKNRISGGRLLSSKTQSSANRAAQILRMAAMSLGKTQTALGAFYRRLALRIGKPQAITATARKLAVLVYRALKGELVYRDPGADAYTAKQRTRIVRHLRQRAGSFGFDLVNRETGEIVSAVS

SEQ ID NO: 382843 - protein, 401 aa, unidentified
MTSVRSRAWIGVDIGKTHHWVCAVEETGKRLLSCKVLNDEAQIIEVIAEVSELAAGRVWAIDILGTPSALLVALLAKAGEQMRYASGRVVAAMSTAYAGEGKTDAKDAYVIAETARIRADLSVVDTDTDLVRTLGVLTGHRADLVADRVRMINRLRDLLTSVFPALEREFDFASCKGALVLLSGYATPEAIRRMGEARLSRWLRQRRVRAYADVAARAVAAAQTQHTVLAGQDVAASIVAELANSILAQHERLKLLEQQIQDTFAQHPQAEVIESIPGFGPVLGASLLVAAGDLSAFPTAGHLAAAAGLVPVPNDSGRRAGNLHKPRRYSRPLRHALYLSAQSSMMRAGPNRDYYLKKRDQGRTHSQAVIALARRRIDVLWALLRDNRTWTATPPARAQAA

SEQ ID NO: 382844 - protein, 354 aa, unidentified
MSRKLHAAIAVIGIDIGKNSFHIVGHDHRGAIVLRQKWLRGQVETRLANLPPCLIGMEACVGAHHLSRRLQMLGHDARLMPAKYVRPYSKGQKNDFRDAEAIAEAVQRPTMKFVATKTADQLDLQALHRVRDRLVGQRTGVINQIRAFLLERGIAVRQGPHSLRSELPGILATRADVLSPRMLRIIEDLAGDWRRLDARIEGLSGEIETLARQDNACERLMTVPGIGPLISSAMVAAIGTGDVFSKGRDFGAWLGLVPKQISTGDRTILGKISRRGNRYLRALFVQAAWVVLVKVKCWERYGLKSWIETAKKRLHHNVLAIALANKLARIAWAVLHKGRAFDCVKTEETASRPA

SEQ ID NO: 382845 - protein, 345 aa, unidentified
MELHTIGIDLGKTVFHLVGLNQRGEVVVRKKFSRKQLLHFTANLQVKLIGMEACGGSHFLGRALREQGHEVRLMPAQYVKPYVKTNKSDHIDAEAIAEAVERPKMRFVPIKSDDQLDLQSLHRVRERWVMRRTAVINQIRGLLLERGITLRQGRGHVDAALPGILEDASAMLSGALRMLLSQLKLELDHLQMRIDEADAMINKAAGENEACRRLVAIPGIGPVTATAIIAAIGNGAAFKKGRGFSAWLGIVPGEYTTGGKQKLLGISKRGNSYLRRLFVQGARAVLQQSAKQSSGLSAWLAQLTTRTHSNVAAVALANKLARMAWAVLAKNEPYRPPMLVGAATA

SEQ ID NO: 382846 - protein, 340 aa, unidentified
MYAVGIDVSKGRSTVAVLEPLGKTVAKPFEVRHTKSGMNDLVNYLNTLDGECRVVLEHTGRYYEPMIRWLSGAGLFVSAVNPKLIKDFDNNSLRRVKTDKADAKKISRFALDKWYMLRQYTAMDNIRAQLKIMNRQMSFYQKQQTAYKNNLIALMDETYPGANKFFTSPKRPDGSEKWVDFIEKFWHVDCVCNISLKSFTEKYQKWCKKRGYIFQPDKPAEIYNASQELIPILAKDDMTKLFVQQAVTQLNAISKAVEELRQQMNSLASKLPEYPVVMSMFGVGTTLGPQLIAEIGDIHKFSKRSQLTAFAGVDPGVNESGDYAQKSVHTSKHGSPYLSL

SEQ ID NO: 382847 - protein, 426 aa, unidentified
MSERDYSKQVARRQRIRNTTLVVGVDIGCASNAVGFMSKEGKVLGSNPNMPNSREGFEQFVKMTEGLKAKHGLTDVLIGLEPTGHYWRKFAYFAKGKGCEVRFVRTTALKHHRELDESSSGKSDKQDALTLTNITREGKYIDTVIEDGKMRHLRTLVKVREKIQKRNVSAKNSLHAALDDYFPELMEIFWSMHSRGLWALLQRCPFPADVVSLKVSILKEIIARASRRRAEASRKATAVSRAAKESIGLKQIGSADRYRLRMCLDEVKRTELMIKDMEGEIKRMLKEIPQAEYLLSIPGIGPISAAVFLGELGNPSYFQSARQVVKYAGYDPQESDSGYRVSRRFISKKGRWLLRKHLFLMSMRVVVLSRYFQEYYQRKLQTKNRFGQLPRKKEILCAVAIKLIKVIFALLRDKRNFEDTVACSVD

SEQ ID NO: 382848 - protein, 370 aa, unidentified
MLDTTTFVGLDVHARSIKAVSLDVMTGEVRAATFGYDAGAVAEWVRSVDPGARCVYESGVTGFDLQKRLSGLGVDCVVGAVSKMIKPSADRRRKNDRNDAEFLARMLSVGNVVEVWVPDDECEAARDLTRALEDARDDLSRSKQRLSKFLLRHGLVFDERTPTGRRKGNWTRAHWSWIESIGFAEGADNDALAYYVDAVGRAAEEKARLEGLVEAEARKPRWRRRVDSLRCLKGVDTASAADLVFEAGEFSRFRNARSFAAWVGLTPSEHSSGESDRRGAITKAGNKHLRKTLVEAAWHYLTCSGRPKDLAKGQAPDRGARRHAAKGVRRLVERREALLARGVHGSKANVATARELACWVWAVGLMAEEA

SEQ ID NO: 382849 - protein, 330 aa, unidentified
MKYSGIDLHSNNSVVTVTDENDRVVAEKRLPNDLAKILGILTPWRDELAGVVVESTFNWYWLVDGLQAAGFTVDLAHTAAIKKYEGLKHRGDETDVRYLAHLMRLGILPTGAILPPEQRAVRDLARKRMQLVRSRCQHILAVENITARQHGTRITSNQAMGLSAETIDQMRLQEGVALAIRANAAVIATLSAQIEILEKRLQEKVTAQAEYALLTSVPGIGRILATTILLETGPIERFASAGNFASYARCVDSQRISNGKKKGEGNARNGNKYLSWAFIEAANFAQRYCAEARRFYERKKARTNPIVARKALAHKLARAVLSYSEGAQTV

SEQ ID NO: 382850 - protein, 391 aa, unidentified
MSMYFIGIDISKYKHDCCIISAANQKVVSKVIIKNNKAGFNELLTIIHSLANPADIRIGFESTAHYALNLELFLENSLLTFMEVNPVLISEYKKSKTLRRTKTDSVDCESIARWLMTVEYKPHSKGFCHAYSLKSLTRLRDKLIRQRSFYLVKITNVLDHTFPEFKPFFNERLSKTALYLLENYGSAEKMARMNSASYEKLRSVSRGKFSPQQFLRLKELAANTVGVNNSIFDVELNSLLSLYKSLVKEIDTIKKEINQLIEEVHPHYMSVPGIGPLSAAVIYSEYGDISNFTNPGQMLAFAGIEPGINESGTESHGGKMVKRGSSQLRYTLINCCLPLIRFDMTFATYYAKKRGEGKPHRVAITHVAKKLIRVIYALESQDIDFNAQELR

SEQ ID NO: 382851 - protein, 377 aa, unidentified
MKRIKFVGLDVHAETISVAVAEQGGEIRSLGVIPNREESIRKLVKKLGPEEELRFCYEAGPTGYALYWQLTRMGAQCEVVAPTLVPVKAGDRVKTDRRDALKLARNYRAGELTAVWVPDAAHEALRDLVRAREAAKKDQLRARHRLSKFLLRHGRRPPMGVKAWTMKYLGWVKRDVHFEQLAQEATLLDYLHEVEHGAARIARLDGAITEAVKSAPPQMRSVIEALQALRGIAHVSAATVVAELGELSRFARAKQLMAYGGIVPSEDSSGERTRRGNITKTGNAHLRRVVVEAAWAYRHRPSVGATLRKRQQHVSEEVQEISWKAQQRLHERYRKLLAKGKNKGVVVTAVGRELLGFIWAIGIQVETAQKESLQRAA

SEQ ID NO: 382852 - protein, 380 aa, unidentified
MTNEMLRTNDTKAMRLLVALELSASKWQLAAGVEGQPRKRVKTVAGGDYVALAEAIVEIKERFKLTVDAPVVFCYEAGRDGFYPYRRLQESGHTVWVVDSASIEVSRHARRAKSDGIDAEKLLELMQRKAGGEHRALRLVRVPELKDEDLRHLPREREVLLKDRVRLLNQIESALFLHGYREIPQSSRALRPWLEERRDMGVQLRERLEREVERLTLVESQILAVEKRLKERMYEEDSGAIGRVALALMQLCSIGLISAWVLASEIYGWRLFHNRKEVGAVLGLTPTPYSSGNDQREQGISKAGNRRARALLIELAWLWLRYQPESAISLWFQERFGGAGKRSRRVGIVALARRLAVALWRYSTQGIVPEGAKMKHVVSA

SEQ ID NO: 382853 - protein, 457 aa, unidentified
MNQKRSKPKIDRTMPTVHPNAAAIDVGATMHMAAVRADRTPEPVRSFGTFTTDLHRLVNWFKECGVETVVMESTSVYWIPIFELLDARGFSVFLVNARDAKHVPGRKTDVSDAQWLQRLHSYGLLRASFRPKGQIAELRAYVRQRERLLEYAASHIQHMQKALTEMNLQLHHVVADITGTTGMRIIRTILAGERDPKVLARLRHYSCHSSIETIEKALTGSYRAEHLFALEQALTLYDAYHEKVSACDVRIEAVLKELSVRRGRQSGSLPSSRRRTDQVNGLAFDARAALFTLLGKDITQIDGLGPYLSLKLIAECSDDLSAWPSAKHFTSWLCLAPSNKISGGKVLSSRTRRSGSRAAALLRLAAVTVGRTDTALGAFYRRLSARIGKAKAVTATARKIAVLFYNALRHGMEYVDPGSSFYETRYRKRVVDNLRRRAKAFGFVLQPLAPTPSVTVS

SEQ ID NO: 382854 - protein, 346 aa, unidentified
MEYIAMDVHKKYTWARVENTQGDRLYESRLAHSHGTIKNFVSRWTAGSPVAVETVGNWYWVVDEIEAGGGKAQLVNARLAKLMMGMVNKSDKLDAKGMNRLQRAGTLPTVWIPPSSVRDARELPRTRMVLSRQRTQLKNRVHATLGKYGFVVEGATDAFGKKGRRIVAELMAKLPPHTEQALSRILDQLDHVCENLQGIEEQMMEIFAPCSQTTWLKTLPGVGDILAVVIWTEIGTIERFGRAEQLASYCGLVARENSSGGKIRFGAVRRDVNVYLKWAFVEAANSAVLNAERCGYDHIGRLYQRIKTRRGHGKAKVAVARHLSEASFWMLKKGESYREPMSSTQR

SEQ ID NO: 382855 - protein, 483 aa, unidentified
MKSKPEEQNKRATNHPTQHHWHEMNRKQRREMTRQIQSEDLSLEVIHPDAAGIDIGNESHYAAVPPSRDSQPVREFGCTTAELKAMAAWLKKCGIRTIAMQSTGVYWVAVYDILEQAGLEVYLVNARDTKNLPGRKSDVQESQWLMKLHTYGLLRNSFRPSQEIRVMRTYWRQRNDLVQSAGRHILRIQKALTQMNLQLANVLTDISGATGQAIIKAILAGEHDAHKLAEFRDPRVKASEEQIAQSLEGNWQPDLLFLLKQEQDGYEFCHKQMAECDRQLAQYLQQREDRSHGAPLPEEKRKGRLKKKKGNAPQFDLREGLFRMTGTDLTRIDGIDVMTATTVISEAGYDMSKWQTENHFVSWLRLCPDNRISGNKVIGKGRLPTNNPISIALKMAATTLRESKTYLGAQFRRLRTRLGAPIAIKAMAAKLARLVYRMLRYGMKYVDQGAAFYELRHRELQIKRLKAKAEKLGYRVTPIPVAA

SEQ ID NO: 382856 - protein, 361 aa, unidentified
MASIALVRSDVIVGVDTHKDQHVAVVLDGLGGRIGELSVPATLAGYTTLLGWARDHGRVIAFGVEGTGSYWAGLASFLRRHAHKVIEVNRPARQADRRLAGKNDTIDAEHAAREVLAGNATNTPKTADGAIEAIRLIKIARDGAVKARSKAMITLKSCLVTGRDDLRAELEPLTDHKLVLACAEFADTLDDPADPVAAMRYLLGTLARRWLSLHDEIKVHFKLLDQTTKAAAPDLVEAFGIGPDVAAEMLVTAGDNTDRVRTEAAFAKLCGVCPIPAGSGKTNGRHRLNRGGNRQANAALYRTVIVRMRWHEPTIAYVERRTAEGLSKKEIIRCLKRFVAREVFALLPALAALSIVEEVAA

SEQ ID NO: 382857 - protein, 419 aa, unidentified
MKNSKSKKVKFINTKTMIAALDIGKSTHYAYFRSPNGKDIEPFPFGNSIKDFNKFWARLCQFKREQDLEDVVIGFESSGPYAEPLFHYLTKKPVKLVQINPMHSKRVKELTGNSPNKTDKKDPRVIADVISLGHALTLVVPEGAAAQLRRLTHARERALKKRTAAINQLQDLVFIIFPEFLAVMKGIATETAFHLIKRYPGPESIVSLGLESLAAEIRRVSRGKLKRERAEELFNAARESVGINEGKGGILLEIEHLLFQIRSDNKFISDLEKEMKERLEEIPYSRSLLSIRGVGIVTVAGLIGEVGDFRKFNTISEVMKLAGLDLYEVSSGKHKGRLRISKRGRPLIRKLLFFASINIVKSNGIMNKPYQRMLDRGMLKMKALVAISRKLLGLIFALVRDNTEYIESYSNIHHFKLAA

SEQ ID NO: 382858 - protein, 397 aa, unidentified
MYIVGIDIAKRKHEAAVIDGEGSVIIKPFSFTNNCSGYNRLLAMLAKAKLPLDEVSFAMEATGHYWLALFTRLQKEGFRVQVINPVQTNSIRSFYIRQAKTDPRDALLIAEVIRFGHFSESTLHPENIYELRELCRGRHAIVSMQADIKRKVVALLDQVFPEYETAFTNLFGDTSMAILQACPTPKELSEMPLEEFCHLIEVPSRKRFRTEKAQELQALARNSFGFAMAGGVFSTMIRLYAKHLDFLKQQVREMDRKIAEIMETLDTPITTITGIGPTLGAYILSEIGDISRFSSAAKLAAYAGIDPTMRQSGEYNGVRNRMSKRGSPYLRHAIWLAASSAVLHDPALKLYFQKKRDEGKPYMASVGHACRKMVSIIYAVMRDNKAYTPCIPNEISA

SEQ ID NO: 382859 - protein, 345 aa, unidentified
MVIGVDTHKEIHVAAAVDWQGTLVGEECFPTTRQGCRLLESWARSLGDVLRVGVECSGSYGSGLTRHLAKNGFTVLEVAFPDKTVRRKRGKDDFIDAEMAAEAAFTGARTVTPKSRDGMVEALRMLQKARSTAVAARRAALQMIRADIISAPEELRDRLRGMTRMQLIRHLVATRPDSTDFKTPLGAARIALKRLAKRYVDLDDEISELDDMIDAILADAAPLLVRLKCVGAQSAAQLMVTVGDNPERLRSEASFAMLCGVAPVPVSSGMTYRHRLNRGGDRQANSAIHIIAIGRLRTDERTKEYIARKMSEGHTKMEAIRCLKRYIAREVYYVIKRQSELVNCS

SEQ ID NO: 382860 - protein, 453 aa, unidentified
MVQRKRKISLKPGKSREPLTITHPNAAGVDIGSSSHYVAVPPDRDDEPVREFPSFTVDLNALADWLDACGVDTVAMESTGVYWIPLYELLESRGFKVFLVNARHVKNVSGRKSDVLDCQWLQQLMTYGLLSGAFRPTEDVCVLRALWRQRGMLLRGQGRQVQHMQKALAQMNVQLANVISDVAGETGQKILRAIVAGERDGQALAAMKNVRIRATAEEIAKSLQGNWRGEHLFALKQALDMFDFIGTQLAECDNKIEEQLQNLQVHDGEPAKGKKRGRARNAPKFDLRTQLFKMCGVDLTRIDGIDVTTALAVISETGTDMSRFPTAGHFASWLGLCPGTRITGGKVMSGKTKRVANRAAQALRLAAAALRSSQSALGAYFRRMCGRMDKPKAVTAAAHKLARLIYTMLTKGEEYTDQGQDYYEERYRERVVRQLALRAEKMGMKLVVNEQPI

SEQ ID NO: 382861 - protein, 345 aa, unidentified
MQKIYIGVDFHARQQTICYLTTDSGEVRLHQLKHQDKAAVRAFYAQFSGQVIVGLEASGYSPWFERLLEELGCEVWLGHAAEIRRRARWRHKNDRRDAELILDLMLHDEFPRLYVPPLQSREVLRMLRYRQKLIKMRTIGKNSLQALALQSGLAKGPHLFTKAGLQELRSVPMTPAMQWQREQWLQLLEPLQQRLLETMLWLKQQGQADERISRLRTHPGIGLLTALCVVHSLEPVSRFANTRKVTAYAGLDPLERSSAERQRFLRISKGGSRVLRFLLVEAAHIAIRSDAELSRFYCRLAERHGRSKAKVAVSRKLLIRAYIILRDEIDYAEFQRRAVAARPAR

SEQ ID NO: 382862 - protein, 412 aa, unidentified
MTTTNQFAAHVGLDWADKKHDVCVQFKNGERVFHVIEHTAEALDVWLTELHQKVEGRIAIAVELKKDPMVYALQKYPFITIFPVHALSLARYRQAFSPSGAKDDPQDAELALELMLRYPQKIKAIEPDNADIRLLQQLVEQRRQLVEDKRRFVNRIINTLKQYYPQPLEWFSHRGSLLLCELIIRWPSLQQLKRARRDTIRNFLNAKGGRAMALTEQRVASIDNAIPLTTDPSVIEANALMATALATQIKVVSEIIKTYDERIETLFDTLPDAGLFKSLPGMGPCMGPRMLAALGDNRDRFSSAEEIQNYAGIAPVTERSGQKSWVHWRWQCAKLVRQTFVEWAAKTINSSYWARLYYQGQREKGKSHQSAIRARAFKWIRIINRSWKTRTCYDEAKYLLAVEARHSPLLRP

SEQ ID NO: 382863 - protein, 382 aa, unidentified
MDSTCSWSRIIGLDLSKATFKGCILSGEGFVQRKNFSGEMRQDKSGYVLINNTIQDGDIVLMEAGSSTFNLARYLLRNSKAMDVVVLNPANLRIIWDSQKKNDKADAMKIACIARDMRPESWPRVTVPSEQEQSERSVIMHWVFLRKQETMLFNRFFALFNSLGYPEIDKPKLKRESEFRTETINNLLSLNELAFTDALMLDEQITVIQSQLSFMEDRLRTICLNHPKQALSWLSLPGIGLVNAATLIAYIGDGSRFTKPDQLLNYAGMVPKQNQSGTVDIKGKITKRGCTAIRRNIVQGAHVVMQLPVSCDITKFAYRKKKECPFNGKVAVAVANRMLRTGLALLHHNDLYRPMVQDGFDRFQRKLVGNKLQALVHYLPSK

SEQ ID NO: 382864 - protein, 433 aa, unidentified
MLKLNYMSTLFVGIDVSSKTNAVYAMDFEENKYISSSFGNNQPGADQLVTMIAECMHKHKNLDTVLIVLESTSVYSVHISSFLSTSEVLMPYKPYVFCVNPKATSNYRKSYIGMEKTDPTDAYLIADFGRVGRTKKLEPWRGGQFISLKRLTRHRMHLSECITREKTYMVSNLYLKFSELQLLEGDDKPFGSLYGATSSAVLTEFLSPQEIIDMPEEDLLTFLAGKSRNRISDLSKTSELLRKAARDSYRLDKCMYEPLSISLASSFNCIHAYQKEIKLIEQAIEKCINGMNPNALLILQSIPGIGPIWASGILSEIGDITVFHSSDALAKYAGLYWPKGDSGDFTSEDNKMSKAGNPYLRCYLGEAANSVRKHIPEYADFYARKYAEVTKHQHKRALALTSRKLVRLVFGLLVKNQLYTGEKLDAEYNIESN

SEQ ID NO: 382865 - protein, 387 aa, unidentified
MSTLPCFVWRGLVTASKGEGSVDVSDGICFAGLDVHARKTAAAAIRLGSGEVWKAQLAGSPAAAIAWLHTLPGPVRAVYEAGPTGLGLARASRAAGLEVMVCAPGAIPRQPGDRIKTDVRDALKLARLHAAGQLRAVTVPSVELEALRDLVRAREDLRGDLMAARHRISKLLLRRGLVYDGPGHPWASKHHAAWLSAIDVGEPLGRVVLGEYLACHEVLLARRDRLDGLIAEHAHEPQWAALVGRLRCLRGIDTLTAVGLIAEIGDFSAFAHPKQLASFLGLVPAESSSGEKRRQGSITKAGSSHARRLLIEAAWHYRRRPAVSLALRRRQHGQPPAAIEAAWRGQLRLSARWAHLDARRAKRRTTVAVAVARELACFVWEIARQPD

SEQ ID NO: 382866 - protein, 348 aa, unidentified
MTVYCGVDFHARKQTISYLTTEDGEVQQAELHHEQDNIRGFYAKLLRQGPVIVGFETSGYAAWFEELLEDLGCEIWIGMPAAIRRQARRRQKNDRRDADLILELMLRGDFPRLHRYTPASREVLQQLRYRHRLVKLRTIVVNSLQYLALSRGVSLRTKLLTGRGQQRMKELKLPSHLAKQRDEMCELLQELTAKIETAESWLELKAKQDAQVERLMSHPGIGPLTGLCLVYTLEQVERFANPRKVTAYIGFDPVEDSSGERQRIGAISKQGSRLLRFLLVEAGQVAVRTDPDLKAAYWRVQLRRNHQKAKVAVARRLLVRAFIMLRDEIDYAEFQRRGVAARSTRRTA

SEQ ID NO: 382867 - protein, 359 aa, unidentified
MKIVGCDFHPSWQQVAVCDPETGELTEQKLVNTDGEAERFYRALEAPALVGIEACGNSQWFIELLERLGHLVWVGDAAQIRASYVRRQKTDRRDAGHILRLLMENRFPRLWVPSAAQRDLRQLLIHRHKLVEIRTRVKNGLQHLALNRGVQKHSRLWSVRGRAYLEELPLEGWTARRREDLLKLLAELDRHLGELDEAASRAAEEHPQARLLMTQPGVGPITSLAFVLTIGDVGRFKHSNQVASYLGLIPREHSSGGKQRLGAISKQGNRFMRQLLVESVQTVNRLDEGFRKEYAARCHHKPKGVAKVAAARKLAVRLYWMLRQNVGYPEIALIESSPRVALTGSSQVVTLNGRSRIQQ

SEQ ID NO: 382868 - protein, 427 aa, unidentified
MTRISVGVSKNRSTVCIMDQDGKVIMRPFLVWHSTEELDFLADTLKRLNGEVRVIMESTSVYQYPIALQLKERGLFISIVNAYKVKKFANTDFRGGKTDKKDSRTIASYGISYWDKLVEWQIPKDTYFNLDLLNRTYMNAKKHRQIILQELQHYIDCAMPGMDKELHPLNLSTKKDFMLDFVEKFWHRDEIVNMTEAEFTEVFTAWAKKKGYRPVEGKAAKIYAIAKSCIPYYPANPTVKTILQCIVDKLSGVNRTLVTIVTQMIEEAKKLPENQIVREMPGVGDPLAARFFGSAGDIRRFKNSKALVAYAGIDSPPDESGDFSSTHRHITKKGSKVFRDTGYEIMMALRAQKRTWEKVRKNPEVYDYMLRKEAEEKPRKVAKIAALNKFLRIVYARIKELYDNMALAERAKAKTKSKTKAKTKATA

SEQ ID NO: 382869 - protein, 330 aa, unidentified
MKKPVLVGIDVSAKTLDVAIDTGRRVAVELFDNDASGHRKLIRRLERSGRRVRVGLESTGVYHLELALALHKAPRIDVMVANPRAVKDFARAEMRRSKTDRTDAGSMVEFVRRMDFVAWQPPAPEILVLRALSRHLEALAGMRAQERNRSHASQRIPELTAPVREAIAGHLAFLEQSTKELEAKALAVIAGSERLQRAFDHLVSVKGIAATSAIAILAELEVLPPDMTPRQWVAHAGLDPKHEQSGTSVLARVRISKVGNRHLRRALFMPAIVAVQHEPRIRAFYEKLLANGKKPMQANIAVMRKLLHAIHGMIHHDQDFDGQKFFATEA

SEQ ID NO: 382870 - protein, 348 aa, unidentified
MTIVDAPRAVTGGVDTHLDLNVAAALDLVGGLLEVAEFPATAAGHRRLLGWLAGFGPVARVGVEGTGSYGAGLARHLRAAGVEVVEVDRPNRQARRRAGKSDPLDAIEAARAALSGRACGAAKTRDGNVEAIRALVVAKRSARSAKIQALNQIRHLSFTAPEELRARLKDVSRHQLAARAAALRPRQREGADPDMAATKTALQILGRRVLALDEEKARLDALLAGLVTQTAPQLLTLFGVGVDTAATLLVTAGDNPGRLRSEAAWAHLCGTAPIPASSGKVTRWRLNRAGDRQANAALWGVVITRLRNDPRTQAYMTRRLAEGRSKPEVIRILKRYVAREVYRHLPRP

SEQ ID NO: 382871 - protein, 356 aa, unidentified
MHSMKQELRRVIGGVDSHADTHHAAALDDRGCLLGTRSFAVSAAGYRELLAWLASFGLIDRVGVESTGSYAAGLTRHLLAAGVRVLEVDQPHAHTRRRRGKTDAIDAELAARHALSLATAVTPKQTSGIVESIRQLRIARDSAVKSRSVAIVQLGDLVCTSPSELREQLATAKTLKGKAALCRRLRPDTDQLRQPVNAAKLALRSLARRIALLDDEIAELDRQLTPLVATAAPRTTALLGISTGHAGQLLITAGQNIERLHSEGAFAALCGASPILVASGKRSRHRLNPGGDRQANRALHMIAVCRLRHCPQTRAYAQRRTTEGKTKREIMRCLKRYIARQAYATLRDDLRSLAPS

SEQ ID NO: 382872 - protein, 367 aa, unidentified
MIYVGIDVAKDKHDCFIINSDGEILFHTFTISNNHEGFNTLFQRIESVSDDFTKVKVGLEATGHYSYNLLGFLLDKGLPTYVINPLHTNLYRKSLTLRKTKTDKVDSRTIATMIMSDMNLKSYSDISYHNEELKSLTRYRFDKVKERAKLKTSISRLVNILFPELEKLVPSLHLSSVYALLSEFPGAAQIAASHLTKLTNLLSQASKGRYGKETAILFRETARSSIGSVMPAKSLELKHTIKLIQELTAEIDEIEVAIKQIMDEEIHSPILTIPGISYRMGAMILAEIGDFNRFDSADQILAYAGMSPSTYQSGQLNNCYSHMEKRGSRYLRYALYNATKYVCQWDESFSAYPVSYTHLTLPTILRV

SEQ ID NO: 382873 - protein, 430 aa, unidentified
MTKRSSTPADAVLVAIDMSKHRQEVLIERPEGGRRRRMTVMATKADYDRLAHDLAEIARPIVVGFEATGNYHRTLAHRLLAAGFELRLISSVALARTREALHNGWDKNDSKDAQVILHMLRIGATQRYVDPLAAGINDLQEMSKTHEAISKAKTQTWHRILTHYLPLYFPEIERFAGNSRSDWFLALLERFPTPASMTALGQEAFAREAWALVGRKVSKARLLNDIYETACASIALPVEEDSVSIAMFRMVIAQARSLIRQRDEIERTAHAILSDNRDYQLLRMIPGIGPINALTILAEAGDLRRFNHHRQFLKFCGLDLATCQSGTFRGRTKLSKYGNARLRRTFWMATQVAIRQRDNSFRDKLGRYVAGYGNDPDRRRKAMTALTAKMARVAHAVIKTGAEYRPFVERADTRWKDPSLSCREGATATL

SEQ ID NO: 382874 - protein, 333 aa, unidentified
MNYSGFVGIDVSKDTLDVSLCRVLSDQLPLVHQVFENAPKGFKAIIKWLKENQAKPNELLFCLEHTGVYSLKVSYWLEEKEYSYVLENPLQVKRSLGLVRGKNDKTDSRHLARYAARHHEELKLCKMPSKLLSSLKTLLSHREMLSRQKKELLQNEKRLEILSKTTDVKLIRKQNHQHLQLLETQLSGIEEKLEESSKSDQTIAENVELIRSIPGIGLIIALNMIVQTNNFIGFGNGRQFACYCGSAPFEYSSGTSVRGKTKVHPMGNRHMKGLLSNGAHAAIKHDKQIKKYYERKISEGKPKLLVLNAVRCKLINRAFSVIKRRTPYVSMNF

SEQ ID NO: 382875 - protein, 430 aa, unidentified
MSYKIAGIDVHKKILAVVVSDVEVENEYKFERRMFGSSPDQLRSLAAWLLEQEVEEAVMESTAQYWKPIWEALERYWKPIRQKREGASRRSGTLHLAQAQSNRGRRGRKRDFPDAERLVKRLVAQELTLSFVPDAEQRLWRTVTRRKYQLTRDRVRLQNQVESLLEEAHIKLSSLVSDLLGASARRMLKALAEGETNPAALAALADQKLRATPEQLCDALGACTDLKPVYRRLLKMALEQLQFLEQQIGQLDQELASLLHPHQDAVQRLAEVPGLGVDSAQQIIAEVGSTAATFPSEKQLSSWMGACPGDDESAGVNYSHRSPKGNRHMRRILNQSATAAVKAKGTIFEIVYRRTVARLGHQQTIGAIAHRQCRLIWLILHQGVRYEERGPAVTKQSKQRRTAKMIRQLRSLGYRIEPPNPQHPSPAQGQ

SEQ ID NO: 382876 - protein, 461 aa, unidentified
MKGKSRRRSAQRVRREQRILERIHLNAAGIDIGSESHWVAVPDDRDEQPVREFKSFTHELLALADWLEACGIETVAMESTGVYWIPLYEILEERGIEVLLVNARHVKGVPGRKTDILDCQWLQQLHTFGLLRGSFRPDAPIAALRSLLRHRDQLVEAAASYVQRMQKAMVLMNLQLHNVISDVTGVTGIAILRDIVTGQTDPTVLAHHRHPRCKATEAEIAASLTGHYRGEHLFVLRQALEIYDLYQGKLRACDTEIETRIHALEACCDPVEGRLPASRAKTRSANEPGFDIRSPLFTLCGGVDLTQLPGIGAYGALKLISEIGLDMGRWPSEKHFASWLTLSPQNQISGGKLLRTRTQPSANRAAKILRMAAMSLGRSDHALGAFYRRMGARVGKAKAITATARKLASLVYRMLRDRIVYRELSAADYDQQQRSRVLRGLRKRAASLGFELVDTRTGLVT

SEQ ID NO: 382877 - protein, 429 aa, unidentified
MNYKQNERLNQLTDETLIIGIDIAKEFHVARAQDIRGIEFGKSIKFNNSLSGYLEFENWINEIKVVEEKEQVIIGMEPTGHYWLNIARYLKANDYTVVTVNPMHVKKIKELDDNLQTKTDKKDAKIIAQLVKDARYSTPNLLEGEYEELRNAKNLRQVVIKDLNRTKNQIHNWLDRYFPEYKEAYASWESKSFIKIIKKYIFPSVIERIPPNEIYEMLPPKMRRGVGLGKIERLVTASKNSIGIKEVLSFAKLEISYLLEKYEGFLQQIEEIDNHVTDICNNLDETSKITQIKGVGIVTASGIVAELGDIRKYKTPKQMIKMAGLSLIEDSSGKVKGTTSISRRGRKDLRRLLYQAILGMIRTNAAFKEMYIYYTTRRKNQLTGKQAIIALCRKLLRIIHTIILKDVDYDEAQMMSHIKYPDEFLNSAA

SEQ ID NO: 382878 - protein, 446 aa, unidentified
MDVLYTHCAGLDVHKKQLTACRWVPDPTGQCAEGLTEIETFGTMTIELLGLVDWLTEAGITHVAMESTGEYWHPVYNLLEGHCTVLLVNAAHVKNVPGRKTDKADARWLAKLLRHGLLQASFIPPCGQRDVRDLTRYRTKLVQERVREVNRVQGVLERANIKLASVVSDVMGVSSRAILAALVDGRADPVTMAELARGRLRSKIPLLERALSGLVRDHQQQLLAMQLAHIDFLEEQIATLNTTIAERLSALTPPETVAVPVATDEPAVGRAPHVDAAAPLTFDQAITLLDTIPGVDRRGAEMIVAEIGTDMSRFGTAARLAAWAGVAPGNDESAGKRRSGKTRKGNRALRTGLVQLAHSATHTKETYLATLFRRLAARRGKQRAIIAVAHSILVSVFYILVRHEPYRELGATHFDRLRHSQSVERLTRRLEQLGYAVHLEPRPAAA

SEQ ID NO: 382879 - protein, 340 aa, unidentified
MKFVGVDLHKHVIKLCVMAVVQGKRNVVLRKGFACSEIAEIRTFFEALGRFQVVVEATAAYEWFFLLIEDIADRLVLAHPKKLRVIAESTRKTDKIDAEVLATFLALDMIPEAYRPSPRVQQHRVLVRHRHWLQGRISAIKCKIRHKAAMYNADIAEMFQRRGQTHLARLAMNDADRYEVNALLDQLALLTNQLSAADRQLCGFAESASASEREAREVLATIPQIGPVTIDVVLSELGDWRRFGSSKAAVAYAGLDPGVRQSAKKRLDLHITKEGSRILRWALIEAAWRLVAHLRRWRSLYEGLQANTGSKKKAIVGVVRHLLCVMFGMLQSGKGYCYAA

SEQ ID NO: 382880 - protein, 358 aa, unidentified
MKLFVGLDVSLEKTAICVISEHGKIVKEAQVASEPEALSCWICDQDGAIAAVGLEAGPLSQWLHRGLSDAGLPVVLMETRQVKGALKAMPIKTDRRDAEGIARLLHLGWFRPVHCKSVSAQEVRSVLSARKAVQQGFITLEMSLRGLLRNFGLKVGTISRGRFEQRIRELAAGNPMLEAATEPMLRARSALRRELAGLERNVRQLSQEDPVCRRLMSMPGIGAVVALTYRSAVDDPARFTSSKKVGPWVGLTPSRNQSGERDVSGGITKAGDVNLRRALCQAATVMMYEEGQKTVRGTVFPTIDGRASWLRTWAAKLARRRGAKRAMVALARRIAVILHRMWKDDTDFRFDIPVLHAG

SEQ ID NO: 382881 - protein, 403 aa, unidentified
MNNVAGIDVSKGKSMVSVLRPFGEVVAKPFSIGHTGSELKELADYLKSLDGETRVVMEHTGRYYEPVARFLHDEGVFVSAVNPKLIKDYGNNTLRKVKTDKADSRKIARYGIDNWAELRQHTPMDTIRMQLKTLNRQQSLYTKTKTMMKNNLIALLDQTYPGVNALFDSPVREDGSQKWVDFATTFWHVDCVRNMSLTAFAERYRKWCKRHGYNFSQSKAVEVHAGAQDLIAMLPRDALTKTMVRQAIDALNAISASMERLKAEMQALAAQLPEYPVVMAMHGVGDSLGPQLMAELGDVTRFTHRNAITAFAGVDPGADQSGTHEAKSTRVSKSGAPELRRSLFLVMDCLLKTQPQDDPVYRFMDKKRAEGKPYLVYMTAGANKFLRIYYGRVKEYLASLEGN

SEQ ID NO: 382882 - protein, 311 aa, unidentified
MDAVYVGIDVSKDRLDVHVLPSGAAFAVARDGAGIADLCARLVPLAPGTVALEATGGFETVVAAGLAGAGLPVVVVNPAQVRAFAQALGQRAKTDPIDAAVIARFAQATKPAVRPLPDAETQLLADLVARRRQIVAMIGAEHQRERRAPARVQRSIRRLVKALEKELASLDGDIDGAVRGSPVWREKEGLLTSVPGIGPTIARTLLAEMPELGSLDRRQVAALAGLAPFTRQSGQWRGRSFIGGGRASVRAALFMGALVGARHNPVLKAYRDRLVASGKPKIVAIVATARKLLTILNAILRSNTPWHTQNP

SEQ ID NO: 382883 - protein, 347 aa, unidentified
MGDGIAGQQVVGIDLHLHRSVIARVDERGNELGWVRIDNDPRTLVAECRKAGRGASVAIEATYGWYWAVDSLLAAKFDVHLAHPSGMKALRKRKRVKTDPRDAYEMATLLRLGSLPEAYIAPPDLRELRELVRHRRQLVKLATSLKGGVRALLAKHNIRLAASDLDGDSAVALMDALDLPGTYATRLASQRRMLLVIADEIASVEVDLHTRLRHHPGYCSLLKVKGIGPILAAVFVAEIGDVSRFPTAAALSCWAGLTPRHYESDKTVHRGHISKEGDTLIRSAAIEAIQRQTEPAVKAAKDGIIARRGKNVRNIAKVAAARKMLEVVYYVLRDGQARCLTAAVGAA

SEQ ID NO: 382884 - protein, 406 aa, unidentified
MEEKRKRYIGLDVHKHYLVALGMDAELNIVLPLRRVELSHLESWMKKNLRKQDEVVLEMTTNTWQMYDELSEHAGSVTVVHPPHVALITRSQVMNDKIAASILARLLAKGLLVGIWVPPQEVRELRGLVAQRQKMTRLATQAKNRLHAVLQRHHLKPPAGNPFAKTNNGWWQALTLGKLEKMNMQSDLETLQFAEQQEARVEKEMTLIAAEDEKIGRLLQISGFGVISAVTVSAAIGDIARFIEPKKLVGYAGLGARVHDSGMTTRTGKITKAGRRDLRVALVEAAHVAANKHPHWKAELARLQPRLGYNKAIVAIARKLLITVWYVLQGKADKYAEPKAVAQKMLKFAYSVGKTNRAGKTAAQFARERLDRLEMGKDLTNIPWGAKKPIPLPPSKLKGESAVPNK

SEQ ID NO: 382885 - protein, 373 aa, unidentified
MKKVRFLGLDVHAETIAVAMAEPEGEVRSLGIIPNREESIRKLVKKLGPAEQLQACYEAGPTGYVLYWQLTALGVKCEVVAPSLVPVKAGDRVKTDRRDAMKLARSYRAGDLTAVWVPNEEHEALRDLVRAREAAKQDQLRARHRLSKFLLRHGRRAPAGIKVWTQKHEEWIKKQVHFEPPAQEYTLLDYLHEVEHMGDRIRRLEQAIAEAVKLAPPRMQEVIQSLPALRGIAQISAVTVVAELGEISRFEGARQLMGYSGAVSSEHTRGKRMQRGPITKTGNAHLRRIAIEAAWAYRHRPSIGPRLRKRQEGLSEEVKEIAGKAQHRLHKRYRTLSAAGKEKQKVITAVGRELLGFIWAIGVQVERNRKPVA

SEQ ID NO: 382886 - protein, 371 aa, unidentified
MEQPTRFIGMDVHKETIVVAVTAAGGAGKATPYGTIPNTTAALEKLVKRLRKAGTGAVKFCYEAGPCGYGVYRTLTRIGEDCLVAAPSMIPRRSGERQKNDKRDAGSLAVLHRGGLLTSVWVPDAAHEAMRDLVRARLAAVRAVRTARQQLSAFLLRHERLYAAGRRSWTGAHRGWLADQRFERPAQQIVLEECIEAVRLAEQRCDRMDAHLCAELPNWSLFPLVQRLCALRGFDVIAAAGAVAAMGDPTRFINARDFMAYLGLVPSEHSSGQRRRLGAITKTGDVHARSVLIEAAWSYRFPARITRAKLPAIEAVPETVRQIAWKAQTRLCHRYRRMVARGKPKPLAVTAVARELAGFVWAIAQLPDDAV

SEQ ID NO: 382887 - protein, 340 aa, unidentified
MKGLYAGSDLHGNNNLVGIVDEQGKRIFKKRLQNEPQLILEVLKPYKEEIVGVVVESTYNWYWLVDALMDEGYKVHLANPSAIEQYSGLKHADDKHDAFWLAEMLRLGILPEGYIYPKEERPVRDLLRKRAHLVRLRTSLVISLQNILSRNLGRKMNVNDVKALKEDRVSPLLERNEDLALAGQVSKEAIDHLTHQIYKIEWVVQKRVALKPEYRYLLSVFGVGKILSLTIMLETGPIGRFPTVGDYVSYCRKVPSQWTSNGKWKGSGNRKNGNKYLAWAYSEASEFARRLHGEARAYYQRKMQKTNAPVAHSALAHKLARAAYHVMRDQVPFDPEKLFG

SEQ ID NO: 382888 - protein, 355 aa, unidentified
MDSIRYIGMDVHKETVSIAVRNQTGKIVMETVIETRANAILDCIRGIRGELHITFEEGTWAAWLYDLLHPHVARVVVCDPRRNALLTEGNKGDKIDAGKLAALLRDGGMLRPVYHGEHSLRSLRELARSYLVITQDVTRVMNRTKALYRGWGIPCGGQQVYAANHREAWLSKLPETGVRRRAEHFYQELDALRALRQQARHDLLVEARKQPATRWLRQVPYIGPIWSALLVALLQTPHRFRTKRQLWAYCGLAIRTSSSADYRFVDGELKRSKKSPLLRGLNTNHNHALKNIFKHAAMGASFGSGPLREFYDAQVAQGRKPAMARLTLARKIAAVTLAVWKQEGGFDAAHLKLQA

SEQ ID NO: 382889 - protein, 431 aa, unidentified
MLCLEHCSISSSLLSLGSVSTRASEEMPMVFVGIDWAEAHHDVCVVDEEGQVLAKRRVPEGLDGIGKLHALIAEHAEDPSRVVVGIETDRGLLVGSLVAAGYQIYAINPLASSRYRDRHATSGAKSDPGDARVLADLVRTDRHKYRPLAGDSNLAEAVQILARAHQGLVWTRQRQVNQLRNVLREFYPGALSAFDDLDAADAVAILERAPTPIRGRALSQAKIISALRHGGRERNLEAKAAQIQTQLRLPQLEAPPLLAQAYGHSVAATVAVIKQLNLQVAALEQELAASFELHPDAEIYLSLPGLGVVLGARAMAEFGDDRTRFLHPKARKSYAGTAPITKASGTRKVVLARVARNRRLADACYQWAFSALTRSEGARHRYDVLRARGQTHHQALRALANRLVGILHGCLVSRQAYSEQLAWSALVEVAA

SEQ ID NO: 382890 - protein, 331 aa, unidentified
MIYCGIDWAERTHDVALVDDSGQLLAKRHITDDAAGYKILLDLLAEYGDTAENPIPVAIETSRGLLVAVLRTGKRKVFAINPLAAARYRDRHSVSRKKSDPGDALVLANILRTDMHAHRPLPEDSDLGRAIAVLARAQQDSLWNRQQLANQLRSLLREYYPAALAAFEPWRTGLCRPEARELLRAAPTPTRAAKLTRTQLTAALRRAGRKRGIEEEVGRLQDVLRADWAHQPPLVEEALGKQMLALLVQLEAACTAADDLAEAVEEAFPQHPDTEVILSFPGLGIQLGARILAEIGDDRKRFADARGLKAYAGASPITRASGEVPPLCGSG

SEQ ID NO: 382891 - protein, 389 aa, unidentified
MIYVGIDIAKDKHDCYIVSSEGVLIRDNLRIQNTLKGFNTLYSAISSNCQASESVRIGLESTGHYGINLENFLRTKGYGITIFNPLVVASFRKSQTLRKTKTDKVDAKFIATLLFNSKKAQATPVSNKIRELKSLTRHRYRLIGQRTKLKVSVSRLITILFPELETLVWSIHQKSSYAMLLELPGAYEISHCHLTKLTNILSKNSKGKYGKEKASSLKKLASNSIGTKCSATSFELQQTIRLINFYSEEITLLDSKIKDLLIKIKTPLLSIPGISYTLAGIILSEIGNINRFKTPAKLLAFAGLEPSIYQSGKLQSSGSIMVKRGSTYLRWSILQAARLISMRDSTFRKYQNKKKNEGKHFLVAISHTAKKLLRVIFYLLKNNTNFVPQ

SEQ ID NO: 382892 - protein, 330 aa, unidentified
MTHYIGIDISKAKLDLAWLKDIDKLKVKTKVFKNDSKDFSNLIQWLKSNVTDDLSVIHITLEATGVYHENIAYYLHDQGLSISIVNPAFVRSYADSLGSRHKTDKQDSILLARFAHSAKPDLWTPPPAEARHLKSLLSRLDALQQDLMREQNRQEKADATDTAAIVKASIEQMISALKEAIAKLNDDINNHIDEHHNLKQDQVLLQTIKGVGPATSRQMLSLMHNKSFTKASQAAAFLGLIPKQVQSGQFRGKTRLAKNGSSAIRAKLYMAAVVSTRWNPDIKAQYERLLANGKCKMQAICAAMRKLVHICFGVLKHQMPYQPQTSKIAA

SEQ ID NO: 382893 - protein, 470 aa, unidentified
MHRKIRNAQQRVKKVSAKATAAAATGAKLVPAPEVKNPHAAAIDVHSDNHVVCVGPDQVQTFGAYTVDLHALADHLKQYGVTTVVLESTGVYWVPLFELLESRGFEVFLIEPSQARHCGARPKTDVADCQWLQRLHTYGLLRPSFRPPESVLALRGYWRQRQMQVRYAASHVQHIQKALEQMNVKLTEVAADIMGLTGRRIIEAILRGERDARLLASLRDPTCKKSEEEYAKALQGTWRPEHLFALKQAYALYRFHHEQITECDQRVAEELARLPNRAADKPFQPRLRRCGRKSNEVRFAATEPLFQALGVDLTLIDGIEINTALMILAEIGVDVSRFPTEKHFASWLRLCPQLEESNHTRKKRSPRRGKNRLAQALRMAAQAVSRTKTPLAVFYHRIKGRLGGKGAITATAHKLAVLVYRLLKHGADYVRQSMEEYAAKLKEQMERSLRRKAAQLGYDLVPKTPAAQPS

SEQ ID NO: 382894 - protein, 417 aa, unidentified
MFKIFRKNCCGLDVHKTWIFACIGITDTNGRTEYKQARFSSFSKGLNELSDWLAKYSCIEVCMESAGKYWIPVFNILEKNCFVTLAHPKYTKPQKGNKTDRKDAKWICDLFMCDMIKPSFIPSPEIRHLRDLIRYRFKLTNMLTGEKNRAQNCLTVSNLKLDDVFSDVFGKSSRSITNYMLDHPGETFDVAPFVDGRCKTPIGEIQAAVDGAISPEQAIKLRECLSHIDELEAHKEKIEQEILIVVKPFSAALNLLRTIPGFDSNPMTSIAVMSEIGPDMSVFPSSKNLLSWAGCCPRNDQSASKVKSTRISRAGCYLKPLLVQVANALLKSKKHPEFKERYHRIKTRRGHKKAIIAVCKMLLTAIWNILSKLEPYTSKGFSEHRPVNESKILTKAQALDLLRKRGYIITDGSAVNT

SEQ ID NO: 382895 - protein, 430 aa, unidentified
MKSNTQNAKIEAITEKTLVLGIDVGSEMHYARAFDYRVIEYSKKPFKFSNTEAGFATFKEWVLDLKERHEKDKVVPGMEPTGHYWFNLGKFLQDNEMKPVLVNPHHVKKSKELDDNNPTKNDRKDPKVIAGLVREGRYMIPYLPEGVYADLRTASNIRFQLQAELTRIQNRISRWFNIYFPEYKTVYGKPDAKSGMLILKAAPLPEDILTLGIDGVNQIWRDAKLRAVGKARAKTLIEAAEHSVGSKEGAVSARMEIRMLLEDYESKNMRLQEVMVLIEELVKEIPMAEKLLEIKGVGIRTVSGFLAEVGDISRFNNPKELQKLAGLALVENSSGKHKGETTISRRGRKRLRYLLFEVAMSLVAKNPEFRELHNYYTTRRLNPLKKMQSLMAIAAKLIRVFYAMLTKGVDYDPKKMVSDIKRPAVYLQAA

SEQ ID NO: 382896 - protein, 401 aa, unidentified
MQYIGVDIAKHTHVAASELDDGAPHGRPFSFPNTEKGFAGLLQRFDELGATPDDCLIIMESTGHYWMALWEFLDAHGFKVAVVNPVLTDAFRKADTLRKTKTDGIDALLIAEFARFKRLGPSRISPEAAEGLKQLTRYRHHLVTERTSLKNRLTAACDRIFPELASLFSDKHGATAMALVREIGSARAIAATDIRTIERVVRTASRGHHGRAKAEEVKHAAKHSVGCSFAEGALSFEAKHIAALIGHLDAEIDALDEEISRAVDPEIDELLRSIPGIGSVCAATIAAEVGDPDRFGDPRKLMAYAGLDSSTCQSGKFKGDEQHMSKRGSAPLRNALMTAADKARMRDPYFGDYYGQMRSRGKHHYVAVSGCARKLCGVILAVLRERRPYERRPSIQSQDRG

SEQ ID NO: 382897 - protein, 356 aa, unidentified
MNKSNQLDFSDKTIYAGLDVHRKDWKVCILLEDISYKEFTQPPKPEVLGKYLKKHFPNGIYKSVYEAGFCGFWIHDELEKQGISNIVVNPADVPTTDKERKQKTDKRDARKLARSLRSGELEGIYVPSRELLEHRSLVRLRDRQVSDIVRTKNRIKAHLHFFGIEIPESYKGCNWSKNFVNWVSESPMETEVGKSVKESLVSQLNLQRKILLQSNRQLRALCQTESYKARADLLLSIPGIGLIGAMKILTELGDISRFKGLKRLCAYIGFIPCTDSSGEHERIGNMTNRGNRQMKKMLIEASWIAIRNDPALALKYGELKKTMKAQKAIIRIGRKLLNRIRFVLIKKEKYVIGIVQ

SEQ ID NO: 382898 - protein, 422 aa, unidentified
MNYLSDNSFTAYVGIDWADSKHDICVQAAGGQQREFDCISHQVDQIDQWAQSIHERFGGVIAVALELSKGPIVYALQKYDFFVIYPVNPSTLAKYREAFTPSRAKDDPTDAELALDLLIRHPERFTPLNPQSVEMRTLACLVEQRRNMVNDKTRITNRLRSALKQYYPQMLEWFEHLDTVLVCDFITRWPTLTQVKRARKNTLVKFFHEHNMRFSHVLDVRLKSIKAATPLTLDAAVVMPYSLQALVLTDLLRASLQAIRRYDDEIAALAPKHPDYGLFSALPGAGPSLAPRLLVAFGEQRERFASAAALQKYAGIAPVTERSGKKHWVHWRWQCPTFLRQTFVEWAAQTINKSYWAGAYYRQQRDKGCTYQAAVRALAFKWIRILYRCWQTKTPYNESVYLKALKRRGSPLLNPPTAVKMT

SEQ ID NO: 382899 - protein, 338 aa, unidentified
MPMYCGIDLHSNNNFVAIQDGERRDIVCRRLRNNLETVLSFLEPHREELEAIAVESTFNWYWLVDGLMNAGYDVRLVNTTKASKYSDMKFTDDRHDARWIAHLLALGILPEGYIMPPDERGLRDLLRRRSFLVKKRTSLYLSIKTIFTRSTGNRVVIQDIQHWDSETVLGFFDDPHVAESIIVMLPVVRVITAQVKEIEKIVLTEGKIRDEFQLLLTVPGIGYILALTIMCETGDISRFAKVGNYGSYCRCVMSEHTSNSKRKGKGNRKNGNKYLSWAYSEVAHHATRYEPGAKRYFERKKLRCHQMVAARALANKMARACYYVLRDQVPFDPSRTFC

SEQ ID NO: 382900 - protein, 339 aa, unidentified
MNFYFIGLDIAKDTFVASIFHKPKETVLTKENLSNDKCGYDELILWLKEHGITRSNCQVCLEATGVYSQGVSYYLLAQGYKVSVECPLKVKRAFHPAGHKSDPVDSRQIAEYAYRFQDELIPWQPKGELLEKIRQLLTLREQFTRQKCATKCSMKAYTLERVQLQLIKDAQEETLKGLERQIARIDKELDKLIKEDPHIKNRFDNLKSIPGFGMLLSTHLLVMTDNFNRIEEYRPLAAFVGIVPYEYTSGTSVYKRPHIRHYGPMAGRKLLRLAAQSVATHDTSFRRYYLRKLAEGKAKALVLNNIANKLLKVACAIVRDNTRYIKEHRSIHPMYVKST

SEQ ID NO: 382901 - protein, 357 aa, unidentified
MKEYIAFDSHKRFTLAEREDRETGRTRQMRIEHGPGAIKGFLKHCEPGTPVALEAMGYWYWIVEEIEAAGFIPQLVHPREAKLMMGMINKTDKLDVHGLNRLQRNGTLPTVWVPPRELRDQRELTRGRMVLSHHRTRLKNRIHATLTKYARGIEGPSDLFGKKGRELLQKELGHLPGHTRWMTELLLNQLDQTERQIAEVEKRLDGVLKTTPEMKLLRSLPGIGPILSAVIMLELGQIERFPTAEHYASYAGTTPRVKASAEKRQYGKLRADVNHYLKWAYAEAGNSVALNSQQVPDRHVSRLYSHLKQSRGHAKAIGAVARHLAEATFHVLTRKDCYRDPALRRGRAKQGLSANLS

SEQ ID NO: 382902 - protein, 350 aa, unidentified
MQKIYIGVDFHARQQTICYLTTDSGELLLHQLKHEDKAAVRAFYAQFSGQVIVGLEASGYSPWFERLLEELGCEVWLGHATEIRRRARWRHKNDRRDAELILELMLHDEFPRLYLPPLQSREVLRMLRYRQKLIKLRTMGKNSLQALALQSGLAKGPHLFTKAGIQELRTATMSPAMQWQREQWLQLLEPLNQQLLETMLWLKHQSQADQRISRLRTHPGVGLLTALCLVHSLEPVTRFANTRKVTAYAGLDPLERSSAERQRFLGISKGGSRVLRFLLVEAAHTAIRKDADLGRFYRRLAERHGRPKAKVAVSRKLLIRTYIMLRDEVDYAEFQRRAVAARPAPSAHGH

SEQ ID NO: 382903 - protein, 420 aa, unidentified
MGRLKIVYPVCCGMDVHRDFLIACIAATNAQGVTEYQSRRFSTYTGSLRELRDWLLANDCKDVCMESTGKYWFPVHNILEESCHVVVSHPKFVKAIKGKKTDKKDAQWIADLFKHDLVRGSFIPPKDIRQLRDLCRYWVKLSSYMTGEKNRAQNCLTVSNFKLDDVFSNVFGKSASAITTQLLEHPGEQFDVAPFVDGRCKTPIAQIQEAVDGIFTYEQAEKLKIIRGHMDSLERHKAELESLILEIAQNYLPQIELLLTVPGIHDAFTAIRILAEIGADMTVFDTSKHLCSWAGLTPQNTESAGKKKTTRIGKSGAYLKPLLIQVALAASRGEKHPEIYGKKQALQKRRGKKKAIVAIARRLLTAIYHILSKNEPYNPAAYIQEDRNPMARQISQEKAFEMLARMGFIVSNPSPLSSSG

SEQ ID NO: 382904 - protein, 436 aa, unidentified
MTSHCPSYNYKFQEVTLLSFKILKFNCCGLDVHKTWIYACIGITDSNNRTEYKQARFSSFTKGLNELCDWLAKYNCTDVCMESTGKYWIPVFNILEQHNLWVTLSHPKYTKPMKGNKTDRKDAKWICDLYMCGMVKPSFIPPADIRELRDLVRYRYKLTCMIAGEKNRAQNCLTVSNLKLDDVFSDVFGKSSRSITEQILQHPGEKFDVAPFVYGHCKTPIEEIQAAVDGAISKEQAVKLRQCLDHIDELNKHISEVEQEILCLSDKYEAALNLIRTVPGFNKNPMTAIQVLSEIGCDMSVFPTDKHLVSWAGCCPRNDKSDRKIKSTRISRAGSYFKPVLVQVANALIKSKKHPEFTNRYKRIKARRGHKKAIIAICRMILTAIWHILSDLKPYTPEGFLESRPVKEDKILSTSQALNLLRQRGYVIKDEPLAVS

SEQ ID NO: 382905 - protein, 411 aa, unidentified
MEQIDRRVKLVPNKLWAGIDIGKEHHHCVVIDEAGQRLFSSRIANDETALTTLIDEALTLAAGGELLWAIDLNRGGAALVIGLLAARSQPVAYLTGLMMHRAAAGYRGEGKTDARDAFVIADQARVRRDLGLLRPGDDIAVDLRILTGHRLDVVFDRTRQINRLRAQLLEVCPTLERALTLTNQGPLMLLTRYQTPSAIRRAGVARIEAWLRKQHVRGAAALAQKASVAAAQQSISLPGETVAAQMIARLAQAVITLDAEIAELDTAIEERFRRHRSADIIVSLPGFGPLLAAEFLAATGGDMAAFTSVDQLAGFAGLAPQPRDSGRINGNLRRPRRYHRGLLRTMYLSAQISTRRSAQSHAFYHRKRSEGKTHKQAVLALARRRVNVLWAMLRDTTIYHDSPPATGVVAA

SEQ ID NO: 382906 - protein, 417 aa, unidentified
MPALKELTLKKKGVAMHYLGIDVSKASHQCVILDAEGEALGKSFTIQSSKDDFANLVKKLSDLNIPQTDITAGLEATGNLWENLYVYLKEQGFNIALLNPFQTSKFHQAMLKKAKTDSIDALVIAGLLRSGCAAGSYIPDEEIQSLRDLIRLKDGYLKDTKNYKRKAYSLLNLVFPELLTLIKDPFNISCTEILSKYQTASDFKKLKPKDLLKVARGHQGNNYDEAWADKVIQAARDSIYSGKASRARGIVVKSLVLNIKNLKEQMIELDNEIQNILKTDDDSSNNDIDNLLTIPGVGPKTIAVFIAEVGDITRFASCKDFIGFVGLYPKIEQSGSSLNRAKLTTKGSRLLKHALYMASVASLIHNPYLKSVYNDKISQGKCAKQALIVVARKIASIMYSMLKNNTVYNPGRVAIAV

SEQ ID NO: 382907 - protein, 345 aa, unidentified
MKHYAGLDVSVKETSLCIVDETGRICREVKVESHPEDLLAVLNDPTWRFDRIGLEAGPLSQWLFSGLAEAGLPATCIETRHAKAFLKAQVNKSDRNDARGIAQMMRVGLFRPVHVKTLTSQKRRVLLAGRKLLQEKAIAIENDIRGLLRNFGLKVGIVGVIGFEQRIHELTVGQPELTELMEPLLVARRVLREQFTRLHRNVLLLARESEVCRRLMTIPGVGPVTSLAFISTIDVPARFKSSKAVGPSLGLTPVLNQSGESHRIGRISLCGDQAMRALLYEAAQVMLTRVQKWSWLKAWAMQIAKRRGQQKAIVALARRLAVIMHRIWSDGTEFRWTREVSPAAQ

SEQ ID NO: 382908 - protein, 337 aa, unidentified
MKTTTHTPTTPSFFLGIDVGKKDLFCHIISPDQTCSERFDNSEAGIKLLLKWLRKVSSPAQLSACLEQTGHYGDQIAAALYKLRINSLHLVNPHRIKAYGMQKLRRNKSDTADAKLIARFLQAEHAELRPWHPRSVEQQRITSLSRYADTLTQDTASLKTRLHAVSEKSIVTSIKQRIAFQEKHLKEVRKTIAGIIKADPEMLAKSKLLRTIPGIGAVAAQAVLAELPDLSEFEDARQVSAWAGLTPCHRQSGTSGRTQTPITKIGSAHLRRGLFMPAMTARMNNPLLKTFGDRLKKNGKKPKPIIIAIMRKLLHQIYGILKSGQPYNPEKRGFAGA

SEQ ID NO: 382909 - protein, 386 aa, unidentified
MQKLNDLSRCLTPLEPDSTLIAVIEMSLSSWLVAGIVPGVERQPLKKLAVDESVLLKLLHRWREEAEKAGYMIKRITVAFEAGRDGFWLARWLRARDIEVHVIHASSVAVSREHRRAKTDRLDTELLKRAFLGWLRGERDHCKMVAIPTIKDEDGKRPNRERESLVGEQSRIINRIKATLVRLGIRGFNPKLKKAAERLEGLRTPEGEPIPPNTLSELYRDMERRRLVRDQIRQIESARLDRLEHAPGEGAHAMVRLLARVMGIGIETADMLVQEVLSRNLRDRRAVARYAGLTGSPDESGKKRREKGLARSGNPRVRRGMIQLAWRFLLFQKDSALAQWFRARTENARGTRKTMIVALARKLLIALWRLVREGVVPDGVILRPAQ

SEQ ID NO: 382910 - protein, 433 aa, unidentified
MNGQEQIVAWIGIDWADETHQVWEYNVGTGGKQNYAVKHSGESLQEWLIELRNRYGGKRVAVVLEQARGGLIYALMSTDFLAIYPVNPQSLAKYRKALYPSGAKSDPADAELLGEMVRQNPDRFRAWVPDDAQTRTLQLLTEGRRKLVEDMTARTNQLTSVLKSYFPQALEWGGNLGSEQACAFLEKWPTLVELQKSRPFRIREFYQKYGRPNREALDERVEQIQKAQPLTLDAAVVMASVMMVQALVAQIRPLRLAIENYDQEIERLFQQHPDRVVFESFPGAGKVLAPRLLAAFGADRDRFQTALEVQEFSGIAPVTERSGKAIWVHRRLACPKFLLQTFHEFANCAWRFCAWSKLYYQQQRGRGNDHHAAVRALAYKWIRIMFRCWKDRTPYVDSVYVKSLTKRGSHLAKGLNHPDSVVEMLSPVCESRG

SEQ ID NO: 382911 - protein, 442 aa, unidentified
MRVMVKCGAGIDVHKKNVVVNCRRVEDKEVETETRTFGTTTPDLLEMTDWIASWGVTDVAMESTGVYWHPVYNLLEGSYKVMVVNAKHIKHVPGRKTDVKDAEWIAELLSYGLLKASFVPEKPQRDMRDLTRYRTKMVQERAREVNRVQKLLEGANIKLASVATDVLGVSGRLMLKALIEGNVDEKEMAEMAKGRMRSKIPELEKALTGIVSDHHRFMLGEQLAHIDFLDGQIANVSQEISVRLEKMSRKQQPPTPSDGADKAEVVEDGKTSLTWQTAVELLDTAPGINQRSAEAILAETGIDMNQFPDDKHLTAWAGLAPGNNESGGKRYSGRTRKGNQTLKTTMIQVAHAARRKKGSYASALYKRLVGRRGEKRAIVAVARSMLVSIYHMLTRQEVYKDLGSDYFQERRKENKVDYLTSQLSKLGFEVQLMPQLDPLPAG

SEQ ID NO: 382912 - protein, 346 aa, unidentified
MEYIAMDVHKKYTWARVENEKGDKLYECKLSHSHGTIENFVKRWTGGSAVAVETVGNWYWVVDEIEAGGGKPQLVNARLAKLMMGSVNKSDKLDAKGMNRLQRTGTLPTVWIPPSSVRDARELPRTRMVLSRQRTQLKNRVHATLGKYGYRVEGASDAFGKKGRQIVAELMAKLPPHTDQALRRVLDQLDHVCENLKWIEEKMIEVFVPCPQTLWLKSLPGVGDILAVVIWTEIGTIERFSRAEQLASYSGLVARENSSGGKVRFGPVRRDVNVYLKWAFVEAANSSVLNRERCGYDHISRLYERIKARRGHGKAKVAVARHLSEASFWMLKKGEPYREPMSSTQR

SEQ ID NO: 382913 - protein, 321 aa, unidentified
MDTPEHAAAAAIVVGIDVSKAALDVALRPGRDAWRCANDEAGIAELLDQLRPLGPSLIVLEATGGLERLVVAALALAGLPVAVVNPRQVRDFAKATGQLAKTDALDAAVLAHFAEAIRPEPRPLPDAQSQALAALVERRRQVVGMLTAERNRLQQALPPVRPKVAEHIAWLEQALKELDRELDQRLRASPVWRERDQLLRSVPGVGPTVSRTVLAHLPELGQGSVKHIATLVGLAPLNRDSGAWRGTRAIWGGRRQVRAALYMAALVGVRHNPVLRAFYGQLIARGKPKKVALTACMHKLLTILHALLRDRTSWQPTLMAT

SEQ ID NO: 382914 - protein, 466 aa, unidentified
MENNYILYVGMDVSKGKADAAILKVSDRRSVKPKFLRKKLSFKFVKSEVSSFLETVRSYSDVNCTSICFALEVTGIYSTNVYDYIKANLYENESIKFLNTDFVNQWRIAHNIAKSDPLDAQTISTIIGTDSDVQYVNDNVFENKNGYQDLKALVHRHYQIKKIYSQEINRLIAQCDCLFPELQYVFEPKSAAFIAVLSSYPTTHDIINASRVEVFDVIYEATKHRCSMDKVDKLFELCQDTLVPDDISSYGKSIILDLVENIKNIKGQLKSIERYIRDVASLNPAYKLLLTITGCGPITAATVIAETGNIRRFKNADCFVSYSGTSPRNKRSGTSVETMGKISKKGSRYLRHAIYMIAEFARRHNPVLKHQFERIKNGNKKRHKLANIAIANKIARYIYSIMKNKSSFVILHDHIMRLPEEARDTFFNSISLDFPKNTRKQVYQYSDINGELHRFVYIKTDEMIPA

SEQ ID NO: 382915 - protein, 341 aa, unidentified
MQIHSVGIDLGKTTFHLVALGAAGKVIVRKKFNRKQLLAYTANVPASLIGLEACSGAHFLGRALREQGHDVRLIPAQFVKPFVKSNKNDFIDAEAIAEAVERKNMRFVPIKTDDQLDLQGIHRVRDRLICRRTAVINQLRAFLLERGMVFAHRPANLKAAMADILENAEADLTPQMRSLINMLWDEWKLVEEQIKKLDLERISAADSGCTRIRQIPGIGPVVATAIVAAIGNGAAFHKGRDFAAWLGIVPRQYSTGGKAKLLGISKRGNIYLRKILIHGAPAAVLRIKRDRAPIGPWLDALDARAPKNVVVVAMANKLARIAWAVLSSGEDYRPMGNTVAA

SEQ ID NO: 382916 - protein, 391 aa, unidentified
MTKPQTKTVNDLSRCLDPLDMDATLIAVVEMSQSSWLVGGLVPGVERQPLKKLTIDEHALLSLLNRWRTEAEKQGHRITRIAVAFEAGHDGFWLARWLAAQGIEAHVIHASSVAVTREHRRAKTDRLDTELLKRGFLGWLRGERGHCKMVAVPTLAEEDAKRPSRERETLVGEATRIITRVKAAFVRLGIRSFNPKLKAAAARLGTLRTPEGKPIPPNTLAALKRDLERHQIVKKQIREIEQTRLDVLKQAPEKGPHAMVLLLARVIGIGVETADMLVQEVLSRTMRDRRAVGRYAGLTGAPDESGSKRREKGLARSGNARVRRGMVQLAWRFLRFQEDSALARWYRQRTADAPSMRKTLIVALARKLLIALWRLARDGVVPEGVRLRPAA

SEQ ID NO: 382917 - protein, 391 aa, unidentified
MVCVGIDVAKDKHDCCILDSDGMVRADCFTIPNNMDGFKQLLQTIRNCTKKSDKIKVGLEATGHYSYNILGFLLDNGLPTYVINPLHTNLYRKSLSLRKTKTDRVDARTIATMLLSDVDLKSYTDIAYHNEELKSLTRYRFDKVQECAKLKQSVSRLATILFPELEGLVSSIHGTSIYALLSEYPGAKQISEVHLTKLTNLLTTASKGRYGKEKAIQIREAARASIGSVMPAKSLELKHTIKLIQELASEIDEIEDFIQKIIDELNPPILSIPGMGVNSAAVILAEIGDFSNFSSPDKILAYAGCSPSTYQSGKLTNCYAHMEKRGSRYLRHALYNATKYVCYWNPVFAEYLAKKRAEGKHYNVALSHAMKKLVRLIYALQKSGKTYLTAA

SEQ ID NO: 382918 - protein, 428 aa, unidentified
MTAQRECSEEVVRVAIDVAKAWNVVLMETAAGKRQRFRVANNRSDHDRLVQLLKDQNVRCQIALEPTGNYHRPLAHRLLSEGFEVYLVSSVAAARFREAMFNSWDKNDPKDAAVILELLKQGRVQHYHDPVAVGIHDLQEISKTYVQVTMARTRLQHSLLTHHLPLYWPEFGRYWHSSRADWFVRFLIRFPVPAAVRRLDREAFIQEAGPLVGRKVNKRAQLDEIYELAGETIALPIDPGSFAIQAFRLQLERYLSLNGLRKRLEEWAEEALAASEDFVLLRTIPGIGSVLALIILAEAGDLRRFGHHRQFLKFCGLDLAKSQSGASRGREKLSKRGNARLRYAFWLAGTVAVRMRENSFREKYQRYIGSDPTDADLKRKALTAVMAKMARVAYAVVKTKTPYRTYFEAAVPSGSIPLSRAVEAVRTS

SEQ ID NO: 382919 - protein, 346 aa, unidentified
MEYYAGIDVSLECSSVCVVDGNGKIFRESKVASEPAALIGWFTSLGIGLGRIGLEAGPLSQWLYAVMKQAGLAVELLETRHVHDAFKAMPVKSDRNDARGIAQLMRLGWFRPVHCKSVAAQEVRALLTARKLVQSKLLDVENSLRGILRGFGLKVGKTTGTDFAGRINELVKGHPNLEVIAEALLKVRTVLLSEFKAFEKRAGRMSLMNAKARLLMSTPAVGPIISLTYAAAIDDPARFTSSKQAGSHFGLTPKKHQSGETDRSGRISKIGDASVREALYQAAHIMLTKPIKGCSQLKSWAMRIAKRAGMNKAKVALARKLAVIMHRILKDGAPFNPATKANAATA

SEQ ID NO: 382920 - protein, 388 aa, unidentified
MLLDHPSDGPAAIRTQFGAIFVSLELSRSTWLITSLSPGQGEKMSRHSVKAGAVAELMKLFAELNGKAQVRTGLSYPIITIQEAGLDGFWLHRVLKQEGIESHVVDPASIATPRRKRRAKTDRLDGETLLRALLAYKRGEPRVCAMVAVPSPEEEDRRRLCRERQTLIAERIEHVNRIMGLLFAQGISDYAPVRRDRRARLMVLRTGDGRQLPPHLKAQIGRELDRLELLLDQIAAVEREQDALLVASKPAGAKSAPHPVTMLLALKSLGPNFTAVIWTEAFYRQFANRRQVAAYAGLAATPWCSGSIAREQGVSKAGNPRLRTTMIQLAWLWVRHQPQSALTMWFKAHSQRGRKRAIVALARKLLVALWKYVTQGVVIEGAVMKSAA

SEQ ID NO: 382921 - protein, 323 aa, unidentified
MFQITVGVDIAKKKFDVTLLIENKYKHKHFSNDEAGFEAFIAWLLTFNLFAQPLICMEATGAYSLPLADFLVVNGYSVSLVNPAKINAFAKSELSRTKTDKADAKLIARYALAMQPGLWTPPPLEIRRLQALTRRLEHLLEIQQMERNRLETADASITDSINTLLKTVEDEIKAIRQAINDLINNNPDLDKRRELLESIPGIGAATIAHLLIAFSSHQGFTNAKQVVAFAGLAPALRQSGQWSGKTRIAKNGDPILRKVLYMPALCAWKHNPIIHDFCIRLKANGKNGKAIACAAMRKLIHIAFGVLKSGEPFDPLWAYSNKH

SEQ ID NO: 382922 - protein, 336 aa, unidentified
MPIVGGLDIHRKQVTFDYLDTETGQVRRGQVSPADREHLRAWLARFAGHRDVAFAVEGCTGWRYVAEELAAAGIAVHLAEPADTAFARGRKRHAKTDKTGCRHLRMLLAEGRLPECWIPPGHILECRALLELYTGLRRERTAWAQRIHAVLFHQGAPQLSQSALRTEQGVAELRAVAAARLSPAGQLQVATALEVIDALEARLHVVRHQLLDAARHLAGARALAARLYGVGPVTALAITCWLGGAVRFAGLDITGYSSDRKGPPGKLSRQGPPVLRWAVYEAGKAHARTSAPDHGYYAAVKDRKNSKRACLSEARKILRQAHHILAELGDDALAAG

SEQ ID NO: 382923 - protein, 334 aa, unidentified
MQFDYFIGIDVSKATLDFAVAKANQILFHQQVSNDKKGITEFLKALRQQTKATMDQCLFCLEHTGIYNNPLLKALHQLSTNIWVERAVHIQESMGMTRGKTDQVDAKRIALFAYKNRDEARLWTPPRTVIAQLDRLTAQRARLVKVIKQLQTPLTDSKGFIDKAERKAEQQACAGSLKALKADLKSADKAIVELAQADPELKRLFERVTSIIGISQTTAAEIIVTTNEFKSITDPKKFACYAGVVPFERSSGQRKGRPQVSHMANKKVKSLLHLGAMSAIQHCAQLKAYYQRKVKEGKNKMLVLNNVRNKLVLRVFACVREDRNYDKKYTPVLV

SEQ ID NO: 382924 - protein, 280 aa, unidentified
MKYIGLDCHKRYDFATLIDSETGEIRSKKLAHKKDEFKAFIGDRGKSKMVIESCWNWSKTYELAKDLVDEVILAHPLKIKAIASAKIKTDAIDSRTLAQLLKADLIPQAHLREADNRAKQKVIRHRAFMVAMRTRVKNKVNDLVNNRLLPPTVEETKPKNLFSKRGKEENGVAWLKLLEWSVEDKEIFESAMRLIEQLSHEISVSNRMIDEIYKRDKDAQLLYTIPGIGKTLAVLISTEIDGIGRFKSPSRLCSYAGLVPSIHSSGGKVYHGKMILEGNR

SEQ ID NO: 382925 - protein, 334 aa, unidentified
MKKRYFMGIDVAKATFDFCLLSSAGACLWRGRFCNDARGIERFLAQLRARSWKLSQIHFALEATGVYGKALVAALHRADLAVSVLNPAQVKYFAFSVLRRTKNDTVDAEIIARFCRERKPLATRPLRPIEEQLKVLVHERESRVGEQTRERNRAKKDPFQIELPSLISRQRQQRLKQLAKEIAQLDAAIDSLIASDECLRTQSQLLCSIPGIAELTAAKLLSELAGKEFQSARQLAAYAGLTPAEFRSGYFLYGKTHLSKIGNAFLRKALYLPAAVARRWCKPLKPWIAILESRKLHDLAIRGAIMRKLLHIAFGILKHQKPFNPLLLSFPKTV

SEQ ID NO: 382926 - protein, 387 aa, unidentified
MSRNARVPVPLITLDQDSTLVVVLELSARSWLVGARVPGIGRMSRYALAPSAEALAAWLGTAKARAGAAGRTVVRVVLAYEAGRDGFWLARYLEARGIEVYVIQPSSVLVDRRARRAKTDALDVEMLMRTLLAWLRGEPGVCSMVPIPDVAEEDGRRPVRERQGLIGERLALLNEIDGLLATLGITGYRPLRQDRRAQLAALRTPEGDPLATNATARIGRILDRLELVMQQIAELERARDAVLAKEAASGEAETMIRGLARLKGIGAELATVLVWEAYVRSFPNRKALGAYAGLTGTPFASGSTTREQGISKAGNRRLRSSLVELAWLWLRYQPDSELAAWFRSRTGSVGSRMRKVMIVALARKLLVALWRFCRDGVLPEGAALKAT

SEQ ID NO: 382927 - protein, 408 aa, unidentified
MYYAGIDIAKYNHEASVIDADGQALADSVSFSNTREGCMKLFKLLERLGIASDALVVGMEATGHYWLSVYAYLTEQGFSVRVINPIQSDAFRKMYIRQTKTDSKDSFLIAQIMRFGQYASTSLADENMVALRQLSRFRLSLVDTVGDCKRRVIALLDQVFPEYERLFCDVFGTTSRELLLRCQTPEDILEIPTGELTALLSKASRGHFGENKAREIQQFASGTFGITYAKEAFAFQIRQLMEQICFSEKQLTQLESQIAELLHRTNSVISTIPGVGDTLGAVILSEIGDIQRFDSPSKLVAFAGLDVKVNQSGEFTGTKNHISKRGSPYLRRAIWLAASRAAFCDPVLSEYYQSLKNRGKHHLTAVGAVARKMCNILFVILRENRPYEPMPPKRTQPQLSEPEPTGRR

SEQ ID NO: 382928 - protein, 338 aa, unidentified
MVYGAIDLHMRYSQIRIIDADGQVVREQRVITDAARLGAVFGGHGPMRILMETGTESEWVAQALETAGHEVIVADPNYAPMYGEIRRKVKTDRRDVAALAEANRRGWYRATHRVSASQRAVRQQLRSRRLLVQMRSSTIALMRSLLRQSGYRLASCSSRGLPRQLARLVLPAALTETIAPLGRMVSMLTTEIAEMDARLQTQADADPIVPRLQSVPGVGPVVALTFRAFVDDVARFSSAGQVSAAIGLVPREDSSAERRHRGHITKAGPRELRSLLVQAAWACWRSHASASLRAWVERLAGRRGKRIAVVALARRLSRILFALWRDQSVFDAAMLAAA

SEQ ID NO: 382929 - protein, 419 aa, unidentified
MKNSNTKKVKSISKGTLLVTIDMGKVKHTGYYRFPDGTEGKTFEFFNSRKSFEEFWWRICQAKRSINLVEVVVGFESTGPYAEPLLHFLRKRDVRLVQVNPLHTKRLKELQGNSPSKTDQKDPKVIADIIELGHALTVIIPEGTVAELRRLTQARERSIQRMSMLMSQLQDLIFLIFPEFMTVMKDITIKSTQYLLKNYPRPQNIVEQGVDGLTQILKKVSRGRLRKERATMLYHAATESIGIGEGRESIALEIKETVSSIENIEIFVKELEKHMSKHLKDIPYSRCILSMKGIGEITTAGLIGEMGDFRKYSTISEVIKHAGLDLFEISSGKHKGKRRISKRGRPLLRKLLFFASINVVRKGGILHKQYQHHLKKGMPKIKALIAISRKLLSIIFALVRDHSVYITEYSKTQQLKEAA

SEQ ID NO: 382930 - protein, 423 aa, unidentified
MDILYERVAGLDVHKDTVVGCVRLAGGTQTQRECRTFATTTEGLMALAAWLEESRCTHVAMEATGVYWMPVWKILGRGDFELIVANAAHIKNVPGRKTDMNDAMWIADLLACGLIKASFVPPEEMQELRSLTRTRKQLVREQTRHAQRIQKTLAEANIRLDSVISDIMGASGRRIIEAMIVGVRQPRKLAELASNRIKATPKELYDALHGRLTDHHVFLLELHLRQWDGLDATIRNVDREIGQRIAQMDAQVEAGTPPFRDLIDLLCTVPGVSTVSAPAILSEIGHDMSRFPTAGHLVAWTGLCPGHNESAGKRKSSRLRKGAPWLKTMLVQCAWAAKRKKGSYYRAQFFRLQSRRGPQKAICAVAASLLTAIYHILKHGIEHHDLGADHFDRRPTELKAKRLVAQLAKLGFTAQLQPIVQAA

SEQ ID NO: 382931 - protein, 456 aa, unidentified
MDTYYLGIDVSKGYADFMILDRTKQPVEDSFQLDDTFSGHCLLYERLVEFFDNHPGCLLYAAVESTGGYENNWFNSLVKFQGTLNIQTARLNPLGVSANSRADLKRNITDQISAQNVAEFMIAHAEKIIYQQQDALANLRRQWSFIKLLTKQSTQLLNQLESLLYIAHPELLAYCQDKTPKWVFRLLEKYPTAANLSKAKAKTVASIPYVSMQRAEKLIADAKNSVASATDKTTGQLITTCVKQIVHINQTIEAQTKMMAEQCRLDEVDLLKTFTGISDYSAIGLILEIQSIKRFSSVKKLASFFGLHPVFKLSGDGSGGFRMSKKGRKEPRRILFMVTIVAIIHNPLIAGIYKERLEKGMSKMAAIGYCMHKILRIIYGMLKTNRAFDPQIDRTNRTKNTQRQKKTRKDRSRRYQDYDAKAPVSGRQRKKRKERKESQSDKITENGIIVSAPNHT

SEQ ID NO: 382932 - protein, 326 aa, unidentified
MEHELHYIGIDTAKEKLDVDVLRPDGRHRTKKFANTTKGHDELVSWLKGRKIDHAHICIEATGTYMEPVAECLYDAGYIVSVINPALGKAFAQSEGLRNKTDTVDARMLAEFCRQKRPAAWEAPHPLERALRALVVRHQALTDMHTQELNRTETAREVQRPSIDAHLLWLEAELKRLEKQIKDLTDDDPDMKHRRKLLESIPGIGEKTSAVLLAYIGLKDRFAHARQFAAFAGLTPRRYESGSSVRGASRMSKAGHVSLRRALYMPAMVATSKTEWGRAFRDRLAANGKKGKVILGAMMRKLAQVAYGVLKSGVPFDASRHNPVAA

SEQ ID NO: 382933 - protein, 410 aa, unidentified
MLVPPKVYVSVDVGCRRHSVAIGLSSGELLEAFDIDHRPEGFEDFFSRIERHHRRYPSAAPMVAMEGYNGHARPLDTLVQDRGWQLLNINNLKLARFKQVFPAAAKTDPIDARRGLELMQLGEHLPQARRALQEVHAPTPENAMLKRLMRRRRALVDEKSRVLSRMQGDLRAVCPGLLDITGDAENLWFLKLLTHSEDLAKLAGLREKTLLSIRGIGAKYAARIRQWQGQAQFSHETPYAGPMIIDDARRILALGKAIDALERQCEGLAEASDMARLIDTLPGFALICSCELAGEIGTLDRFTGEASLAVYIGMANLDNSSGERKGARAPGQVNKRAKAAMMTGVDRHRKQVPESQRYYEKKRAEGKTHNQAIRALGRHLCRVLYRMLKHGEAYRIREPASVATEQALAA

SEQ ID NO: 382934 - protein, 342 aa, unidentified
MTFVGCDLHTRMQQVAVLDTGTGEVSEHRLPHEGTAVEEFYAAVPRPVTVGIESTGYAVWFHTLLQRLGHTLLVGDAAKIRAMVVRKTKTDRRDALHILDLLHHDRLPAIWVPDPATRDLRALLTHRMRLVRIRTMVKNGLQAIALNSRLACGSKLLRQAGVAQLQALALPPHTARRRDQSLELLAGLTTQIRELDDAITTAALGHPDAPRLITHPGVGALTALTTIVVLGPVRRFHDRKHGVSDVGLAPARHASADKYHLGRITKQGSPLLRFVLGQAAAHAARRDPDLKRTSGALVHRRGRPKAKVAVARKLLVRLFIMLRDRIDYDEFRRRGRAALAAA

SEQ ID NO: 382935 - protein, 415 aa, unidentified
MEIIVARCAGLDVHKDTVMACVRRWGPAGQREQEVREFRTWASALRELRAWLVAEGVAQVAMEATGVYWRPVWAELEGVAGVELLLVNAHSVKKLPGRKTDVGDAAWLAQLLECGLLRGSFVPTPALARLRDLTRYRKKLIEDRSREILRVQKVLETAGIKLDSVVSDVMGKSARAMLAALVEGERDVEVMADMALRRLRPKIGELRLALEGRFSDHHALMLSMHLAHIDHLTAAIERLDAETDREIAPFAEAVRQVKTIPGIAERTAQVVIAEIGVDMARFPTAQHLASWAGLCPGNRESAGKRRPARTPFGSPALRAALCEAAWCASRTNNTYLGAQFRRFARRFGKNNQNKAIVAVAHTMLVMIWHLLANGSDYTELGADYFERRHDPGAQTRRLVAQLERLGHVVTLTPAA

SEQ ID NO: 382936 - protein, 340 aa, unidentified
MGEQYVGIDLHRRRSVIARMTPDGEVLETVRVDNDPVALSLELAKAGPDPEVVLEATYGWYWAADLLQACGARVHLAHPLGVKMFGYQRVKTDARDAANLGDLLRMGRLPEAWLAPPAVRELRELVRYRAKLVALRSGLKAQVHAVLAKQGVRVPMSDLFGVAGTRLLEELRLPRAYGLRVASLRELLGALDQQIAMLGREIGSALAGDVGYLAIQAIPGVGPVLAAIFVAEIGEVGRFAGAPQLCSWAGLTPRHRESDTTVRRGPITKQGSKLVRWAAVEAVQRLPGTTKQAADFHRIADRRGKGIGRVAVARRLLTLVYYGLRDGQVRCLAPAPAEAM

SEQ ID NO: 382937 - protein, 391 aa, unidentified
MILVGVDVAKDKHDCYIMTSEGEVLFKSFTIANNMEGFNQLYEKILSVIDNFDNVKIGLEATGHYSYNILGYLLDKGLTPYVINPLHSNLYRKSLSLRKTKTDKVDSHIIASMLMSDVSLKPYSNTLYHNEELKSLTRYRFTKVQERAKLKISISRLVTILFPELEKLVPTLQMNSIYALLYEFPSAHAISKAHLTRLTNLLNTTSKGHYIKDKAVLIREAAKNSIGSNMPAKSLELKHTIKLIKELTSEINEIEEEIKIIMNKINSPILTIPGIGLSTGAQILAEIGDFKNFSSPDKLLAFAGLSPSTYQSGNMYSSNAKMEKRGSKYLRFALFNAAIYVSYWEPTFSQYLKKKRVESKHYYVAISHVVKKLVRLIFHLEKTNERYSTVV

SEQ ID NO: 382938 - protein, 445 aa, unidentified
MHIPQKLIHIREGVVAAGFTGAVVGFINLSESEVKIMNLTTLFVGINVGKKSNTARFMDGGGETLSLFSFPNNNDGAEKLQSKMRHTLLHTDYSKIVIGMESTSVYADHLAIYLRNDEFLRKWEREVYVLNAKLIKNFKKSYPELPKDDNIDTLIIADFLRFGRLPKSTVHDEKYLALRNLTRARFQAAQNLSREKTRFLETLFHKFSTLDSAKVFSNTFGATSIAVITEFLSVDELIYTPIDELAEFINRKGKGKFADPEAVAVELKAVAKGSYRISQTVNDSLNQLLAIRLIGIRSIEQQIKSLDKAIASFMGAFQNVLISIPGIGKVYSAGIMAEIGDVTRFKGQASLAKYAGLMWSKYQSSEYEASNTKLILSGNKYLKYYILEAANQARMHDAEFGRYYRLKYREVPKHQHKRALALTARKMVRLVYCLLSTNRLYQPPR

SEQ ID NO: 382939 - protein, 422 aa, unidentified
MEEITEEATELVARVAGLDIGKASLVCCVRVPHESRPGRRQQQVRTFATVAGQLLQLRDWLAAEGVTRCVMEATSAYWKPPFYVLEDAIAECWLASARDVKNVPGRPKTGKLDAVWLARLAERGMVRPSFVPPPWQRELRDLCRYRRTLTQERTREKQRAEKLLEDTQIKLSAVISDIFGVSGRAMLEALIAGQRDPRVLAQLARGSMRGKISVLTEALTGHFRDHHGYLLAMMLGRVDALTAQIEQLTTRIGEAIAPFAHQVAQLDEIPGIGATGAQEIIAEIGIDMARFPTPGHLVSWAKFAPTARQSAGKSKPGATGKGNPWLGGALGEAVIGAARTKTFLGARYHRLARRRGKRRALVAAGNSILTIAHRLLSDPAARFSDLGPHWHDQIAPLRRKRQLIAELERLSGKKVILHEAAA

SEQ ID NO: 382940 - protein, 333 aa, unidentified
MKKKSFKESVGIDVSKLTLDVFIYTKNLHKQFSNNKKGFENILKWVKRESKITNEIIWCFEHTGWYCVLLSHFMHENDLYYCCVNALEIKRSMGLKRGKTDKQDAKEIARFAWLRKDELERSTPMPIKLIELQRLMSLREQLLKQTTALKNLHKGMLATLEKTAGDTAISIIKQSLKQMKVQITKVENEMDALIKTDDQLYCNYKLSKSVKGIGNVLAIQMLLHTHNYTRFKTWREFSAYCGLVPYPHQSGTSINFKPRIHSISDRKMKSLLTMSAISAIQSDKELKAYFKRRIEEGKHKMIVINIIRNKIVSRVFATVKRGTPFVELNKFAA

SEQ ID NO: 382941 - protein, 347 aa, unidentified
MDTIGVDLHKRESQLCILALDGTATEQRILTSRERFTAVLGDRPGARILLEASTESEWVARHLENLGHEVIIADPNYAPMYATRARRVKTDKRDARTLAEACRLGAYRVAHRVSPARRHVRAELAVREALVRTRTRYVSLAKALVRREGLRVPSSESHLVMQRIAALELSETLAAELAPLVRVLGPINTEIAAAARRIAALLDDDPIVALLATVPSIGPITASAVVATADDITRFETAHRFEAFLGLVPGERSSGEKRRIGRITKAGNSRVRYLLVEAGWRILRSKGDDTAALRAWALGIARRRGQRIAVVAVARRLAGILYAMWRDHSAYEASRIRAPRARLGATG

SEQ ID NO: 382942 - protein, 326 aa, unidentified
MEQVTTVGIDLAKKVFSLHGRDAAGKTVLRRTVRRDQLVELVATLPPCLIAMEACSGAHEWGRRFEQHGHTVKLMAPKLVAPYRKSDKNDSNDAEAVCEAVTRPSMRFVPVKSVEQQALLTVHRVRQGFVVERTAVINRLRGLLSEFGVVLPLRSVTVRRQAAQAAEALPELARGAIADLLTQLRLLDERVDAYDAQIHAQARLSEPARRLMHIRGIGATTALAIVATVGNAREFKNGRQFAAWIGLVPGQHSTGGKPRLGHISKRGDAYLRNLLVQGARSVLQSAPMHQDRLSRWALELQERRGYYRTLVAIANKNARKVLIVSA

SEQ ID NO: 382943 - protein, 427 aa, unidentified
MVRSDRAILAIDLGEDKQVAALLDHDGRVLGRRVARDKAHALGGLLRWAVEQAGRHGFVGVVVGCEPTGHRWRSVMQLADAAGLGFVCVQSLRVHLAREADDYTRDKTDHKDAVLIGKLIARLDCYLPERAEEDWARLRHLGQRRFRLVGEMVACRNQIDDLLSCCWPAALECAVKPFDSTTWLACLAVTVDRCNGNPAKLRGLGRGRFSAAVRRELPRFGAQRVCHKVADRFFAALTDGRGVTVQRRGALERVGMLIDDWRSAIARLGEVEARMVAVLDGLGLTTLVTSVPGVSAVGAAVILAETGDLSRFATARSVVKHAGLNPAENTSANFRGQTRVSHRGRPALRAAAWRAAWGALPHNPVLGARFTHLTTRERDRLAPGQARVACAATLLRWLYAIVTTRESWNPDRAAGIRAGQAGEAAAA

SEQ ID NO: 382944 - protein, 354 aa, unidentified
METILAIDLGKNKSVVCQMDCSSLKTQYRTVRTCPELFHDIFAELDADHSVVLFEVCNQAGWIADMLRAMGLHFKVANTNDPAWRWGNNPNKSDKTDAQRLAMMYHHGFFPEVYIPCKEVRQKRSLIYSRQKIVSRLTQIKNSIRALLCTVGIGLPAGRHCWTKKHLQELAGYAVSLETLRDSCELWRGQLYAELQMHAALEEQLDNVTDKLDALGKQQEAVKMLQTVPGVGPRTAEAIVAVIDTPHRFKNCRQVCNYVGFTPRRYQSGDMDRSGRISKRGNPLLRMLLVQASWIALQYTWARQIYQRVSRGSVKRRKIAIIAVARHLLMRCWAMLRDHKPWQYQVESVASVNN

SEQ ID NO: 382945 - protein, 372 aa, unidentified
MKQNILHIGLDIDDTQYHGSALNQSTGEILDFKCRPNLKGLLGQLNKLGKYFPGSSFRICYEASYIGYTLQRDLVENGYHCDVVAPTSIPSPRGKQVKTDRIDATQLVQFYANDLLTLVAIPEPEQEQDRDLIRSRQKLLEQQTELRKHIQALLRRNGRYYKAETQNKTHWTLHHYGWLERTIEASSGSFKINLELLLRQLKGVNSILTEYRQQIEALAKTPRYEQLVQALTCYKGIKNLFALTMITEIGNVKRFPHPRQLVSWIGMDIREYSSGGKHNRFGITKHGNRYLRTAFIEANQRGYRTARITKDLKARRKNTDPEFISIADRCLRRLNKKGNRLLLAGKHPNKVKVACAREMVGFVWESLHKAAA

SEQ ID NO: 382946 - protein, 404 aa, unidentified
MDSPTRYAGVDWASRSHAVCVVDERGEPVERFEVEHSEPGLRALGRRLVKAGVTRVAIERPDGPVIEAIFAAGLEVVVIASRHVKALRTRYGTAGNKDDRSDAFLLADVLRTDGQRLRPLQPDAPATVTLRATVRARKDLVQTRTRLSQQLRAQLELAFPGAVGLFADLDSPIALRFLLRFPSATKAAWLSPKRLASWLHAEGYPGRTSAEVLYQRLTTAPAGISGPEAEARAAVSLAFVRALLAVRDQIGELESRIREQLELHPDGVIFRSFPRAGQVRAAALLAEIGDVRERFPTPESLACLAGAAPSTRQSGQHLAVTFRFACDKKLRDALIDFAEDSRRVNPWAADVYGRAIERKKTHPHAGRILARAWVYVLWRCWQDRVSYDPARHRGYQRVALAKAA

SEQ ID NO: 382947 - protein, 344 aa, unidentified
MPIVGGLDIHRQQITFDCFDTETGELWRGRIAPADRAHLAGWLAQHMAGRGEVHLGFEGCTGWRYVAEELARAGVIGHLAEPADTAALRGPKRHAKTDRADSRHVRQLLIDGRLPECWIPPAHILECRALLETYHDLRVEHTAWVQRIHAVLFHQGARCCSGLRTAEGQAELAAITATELSAAGQLQVGTALAMLTATEDHLQVLHRELLAAAGHLRGARVLTARLYGVGPITALALTCWLGGAGRFSSARKAVRFAGLDVTVHSSDGKRSPGHLSRQGPEVLRWCVYEAGKTHARTSAPDHAYYAQAQERIDGKRAALSEARKIIRQACHILTELGDDALTAT

SEQ ID NO: 382948 - protein, 429 aa, unidentified
MPSLKQETEGFSLATVEIVYPVCCDIDVHKNFLVACIATTGKHSNTTHLIRRFSTYKGDLRRLADWLASHNCKDVCMESTGKYWIPVFNTLEKTCNVCLTHPKYVKAIKGKKTDKRDAKWIVELFKCDLVRSSFIPPEDIRQIRDLCRYHAKLTNMNTSEKNRGQNCLTMCSFKLDAVFSDMFGKSATRVLDKLLECGNSDFDVAPLIHGRCKASLEEIQAALDGELTLAQAEKLKLIRLHMETIDKLKDDLECLILKLAERFQLQINLLLTAPGIGSPLTAIRILAEIGADMSVFETAKQLCSWAGLSPQNNESANKKKTTRISRAGAYLKPLLVQIVLAICKSNKHPELKDKYQALKKRRGHKKAVIAIARKLLTAIWHMLSKNESYNAELYHKADKPPVNRVLTPEQAFALLRSKGYHIIEPDSAA

SEQ ID NO: 382949 - protein, 402 aa, unidentified
MAYDFVIGVDVGKYFHHACVLDPQGRQVLSKRINQHEGSLRKLFGQFLADDASVLVIVDQPNNIGRLTVAVAQDMGADVRYLPGLAMRQLSRIHVGNSKTDVRDAYVIAHAGLNLPDSLRSVDRVEKVFIQLKVLNGIDEDLARAYTRLINQMRSALVGTYPAFEHVLRGQMIHRKWILNLLAKYGGPTKIRRIGRTRLAAFARSHKARNPEPVIDAMLAAIHGQTVSIAGAEYAELGVAMSAKDALAKLEHRKEIEAQVLKLIQDIPQTEILLSMPGIGPRSAAQILMTVGDMSDFPDAAHLASYAGLSPRTNQSGTSIMSNSPNRAGNKKLKNALWQSSFASIRFHERSRQFYERKRKEGKRHNAAVVALARRRLNVLFAMMRSGELYRDIPTVQEAAAA

SEQ ID NO: 382950 - protein, 390 aa, unidentified
MESPGGTVSVIIGMDPHKRSATIEVIDEQATVLAVGRYGTDKAGYAEMLAAARKFADRVWAVEGCNGIGRHLAHRLVHDGEIVFDVPPKLSAQVRVFATGNGRKTDPVDAHSVALAALRAPGLVQVRVEEDLVVMGMLADRRDELGQARTQVVNRLHRLLLELLPGGARKFLSARQARTLIATVRPRDLAGKTRRRLAVELISELEAIDKKTRALDKELTGLVIARGSTLMDLHGIGPSGAARLLADVADVHRFARRDRFASWNGTAPLDASSGSQSRHRLSRAGNRRINRVLHIMAVVQLRNQTKGRAYFDERRAGGMPSMMAMRALKRRLSNVVFARMLADQKRREAGPGGQSGTPADSSVAGPDPRTPALRTSHVPGPLHSLNGVLT

SEQ ID NO: 382951 - protein, 480 aa, unidentified
MAHPSKLRPDLKAVPMLKSESVYVGIDIGKTKHVAGFLSKTLLERHGRFEACPALLFENSREGFRRLIERLRELAPLEHYFILLERTGHYHRPLQQYLQELDLPIYVIHVQSRPAGMLKTDKRDALMLANTLYNQLELGVQVPNKLQLVRRLAPPTKAAAQLKGLIRHRYELVRESTQRKNKLTAICDELFPELVRVVKDPNAWVALALREQFPTAQALAATSLTVLQQIRGGARSLSDMKLQELQRLAAESIGIKDLIRQRGLVLEQGQLIKELRLLREHIDQLESEIVTIVEQAREGQILMSFPGFGPITAATIIAAIGSIHNFSSASALKSYFGWAPVVAQSGSTLDASYLTRGGTRTMKQIMFLAVMQVIRLRDNEWARLYERLVKARCPFDERTQSYTGKTRVIGRVAGQMIEAIYALLMRDAELLSRTPQGQEPPPPLLYDPEVHQRHRQGHYRPLKSTPPPNVITIAHLSSPE

SEQ ID NO: 382952 - protein, 335 aa, unidentified
MKYIGLDVHSTHINCAVINERGTLIHRDCFKTSLKNLINLSENLKHPLSIVFEEGELADWLYQELLPYFDKIVVADPIENRLIYGSDQKRDQLDPFKLATLLRGGFIHPVHHTWDHQRSQFKQLIFAYHDMAKQVTRIKNKIKAYYRKQGVIIQTTSVYHHTKRSLFMERCRHTEILKQYYHFLDLFQKQKDLFERTLKHEARKYPIIGRFLKIPGVGIVTASTFFTIVDDPRRFDRKQQLWSYAHLGKASHQSGDKIIIKKQKKGNRLLKGVTVTAVNCALRQKPNTFNKLFTHMVLIQHKDTRIAKRILERKLLTTMWTMWLKNQPYRPVPFP

SEQ ID NO: 382953 - protein, 393 aa, unidentified
MLLDHPSDGPAAIRTQFGAIFVSLELSRSNWLITSLSPGRGEKMSRHSVAAGDVAGLMTLLADLRRKAAARTGQNYPIITIQEAGLDGFWLHRVLRQEGIESHVVDPASIATPRRRRRAKTDRLDGETLLRALLAYKRGEPRVCAMVVAPSPEEEDRRRLCRERQALIAERITHVNRIKGLLFAQGISDYGPLRRDRRKRLEALRTGDGRELPPHLKTQIGREFDRIELLLEQIKAVEAERDALLAAVSKPAEKPADGKAAPEPVAMLLALRGVGANFAAVLWSEAFYRQFSNRRQVAAYAGLAATPWQSGGIRHEQGVSKAGNPRLRTTMIQVAWLWIRHQPRSALTHWFKERSPQGRKRAIVALARKLLVALWKYVTQGVLIEGAVMKPAD

SEQ ID NO: 382954 - protein, 341 aa, unidentified
MQIHSIGIDLGKTTLHLVALGAAGQVLLKKKFTQKQLLAYTANLQTSLIGLEACSGAHFLGRALRKQGHEVRLIAAQFVKPFVKSNKNDFIDAEAIAEAVERKNMRFVPIKTDDQLDLQAIHRVRDRLVSRRTAVINQIRAFLLERGLVFAKRPAQLKAAMADVLENAEADLTPMMRNLINVLWDEWKIVDRQLEELGDELERISAADAGCTRIRKIPGIGPVVATAIVAAIGNGAAFRKGREFAAWLGIVPRQYSTGGNAKLLGISKRGNVYLRKILIHGARAAVLRMKRDRAPIGAWLDRLDARAHKNIVIVAMANKLARIAWAVLSSGNEYRPAAVRA

SEQ ID NO: 382955 - protein, 312 aa, unidentified
MTEHCYCGIDVAKDRLDVQVLPHRQRFSMDNNATGWDELVERLHALPIAAVGIEPSGGYERGIIRALLAAGLSVRRINPSKLRQFARARGILAKNDRLDAQLIAEYVSIIPTRAVQRAATAERLAEVVTMRRQLCDEHVTIENQAAHVEDAILRRLNKRRLARLKADIHLLDKRMAEIVAADAILAQRYELLTSMRGVGPTLAFTLIALLPELGQMSRKQIAALVGVAPYDFDSGKLKGHRCIYGGRMPVRNILYMAALSAARYNPALKVFHNRLAAANKKPKVIIVAVMRKMITTLNAMVRDKAAWQPRAA

SEQ ID NO: 382956 - protein, 346 aa, unidentified
MLHAGLDLSRKRLDFDLRDDDGVLVEAGATRPDAAGLAALVRRVARHGQPVRAAIESMTGARFVHDQLEQGGWDVAIADALKVKGLAPLACKTDRIDARVLAELSRRALVPAIWLPDPTVRAERERARFRLHLVKQRSQLKHRVHAALLAHGIPCTVSDLFGVRGRAVLATHDVPAPWRAHIETAVSLIDELTRHIGALERELRNQGADHRYVPLLMTIPGVAWVLGYTIAAEIGDIDRFPSPQKLTGYTGLCPRLYQSGAHDRRGRLSKLGPRYLRWALVEAAIHACRHPIYRARYQRMRRRLGKQRGAKVAQIDIARRLTEAIWHVLTRGRPFAPAGATTPLTA

SEQ ID NO: 382957 - protein, 409 aa, unidentified
MDVILDRVCGLDVHKDSIKACVRVPGEGRKRDQHIATFGSKTEDILALRDWLEQWKITDVAMESTGEYWKPIYYLLEDRFQVLLVNSAQIKNVPDRKTDAKDGAWIAQLLECGLVAKSFVPPGPIREIRDLTRYRKTLIRQRTEEVLRLHGVLQRAGIKLSSVASNIMGVSGRAILKALVKGEKDPEAMAELARGQLRVKIPLLKRALEGQFTKHHGQLVSHMLSHIDYLEEMIADISKELAELLVPYEPQLALLETIPGVQRRTAEMIIGEIGVDMSQFPEDRNLSSWAGVCPGNRRSAGKRKPEKIRKGGQWLKPALTEATWAAVKENNSYLSAQYHRLVPSKGKKKAAVAVSHSMLVCVYHVLKKATAYRDLGSDYFLRRNQEATKRRCLRQLEQMGFGVTLQKLA

SEQ ID NO: 382958 - protein, 288 aa, unidentified
MRNDEPGLSILVERMRALQPHLAVLEATGGLEVAVVAALAAASVPVVVANPRQVRDFARATGQLAKTDRLDAQILAQFAATVRPIPRPLPEAGTQELAALLTRRRQLIDMLTAEKNRLSSALKSVRKGIQAHITWLERRLAETDHDLSTTIQASPVWREQDDLLQSTPGVGRVLSTTLLASLPELGTLNRKQIAALVGVAPFARESGAWRGKRMIRGGRAPVRVALYMSALVATRYNPVIKAFYRRMRDSGKPAKVALTACMRKLLTILNAILKHHTPWRAATCVQHA

SEQ ID NO: 382959 - protein, 327 aa, unidentified
MLIIGCDYHPGFQQIAFVDTETGEFGERRLTHREEAEQFYDTLRERSVRVGMEASGHARWFERLLRDLQFELWIGDAAEIRTKRVRKQKTDRQDAQLLLRLMVEDRFPRIWVAGAENRDLRQLLWHRHRLVQMRTRVLNQLHVVALNEGLRRKKALWRPAGRNQLESLILAPWASRRRRDLLDLLDQLTPKIQELTRALEDEVEKRPVTRRLMTHPGVGPLTALAFELVIGTPERFHCGKQIASYVGLVPSEESSGDRRRLGHISKQGNSLLRYLLVEAAQVTVRSQPHWRSKFFHLAMRRGRKIAKVAMARKLAVRLYWMWRQGCD

SEQ ID NO: 382960 - protein, 356 aa, unidentified
MSEKFNSEIAVIGIDIGKNSFHIVGQDRRGSIVLRQKWSRGQVEARLANLPPCLIGMEACTGAHHLSRKLQALGHDARLMPAKYVRPYSKGEKNDYRDAEAIAEAAQRPTMKFVATKSADQLDLQALHRVRERLVGQRTGIINQIRAFLLERSIAVRQGLHFLRAELPGILAKRTDVLSPRMLRVIEDLARDWRRLDERIDALSDEIMMLARQDKGCERLMTVPGIGPIISSAMVAAIGSGDTFSKGRDFGAWLGLVPKQMSTGDRTILGSISRRGNRYLRTLFVQAAWVVLVKIKPEGWERYGLKSWIETAKQRLHRNVLAIALANKLARIAWAVLHKGRAFECVKTNATASRPA

SEQ ID NO: 382961 - protein, 436 aa, unidentified
MRGCRCSMIMGFTKPIEHFNIQRKKVITMNTLYVGIDVSSKSNVVYLMLPNGDKHSNFSVANSHEGSTQLVKRILSVLTSHSLDTVLIGLEATSVYGDNLVYFLREDATLAPFNRKIHVLNPKQVKKFHDAYNDLPKNDYVDSFVIADCLRFGRINKEVYMGDYRYKALQNLTRARFFAVQNLVKEKQRFMNVLFKKYSTMTQEKVFSDTFSTTALAVYDAFESAEALANMDLHELTDFIMEKGKNRFPDPDAVAKAIQKAARSSYRLPKTMNDSVNQVLSISITSMKALESQIKEFDKAIKAQMELLPNVLISIPGIGPVYSAGIMAEIGEIDRFNSQAALAKYAGLAWKQHQSGGFEAEVTRLIPSGNRFLKYYLCEAAFSLVRCDKEYSDFYHLKYKEVNRCQHKRALALTARKFVRLVFRLLKDNRLYCPAK

SEQ ID NO: 382962 - protein, 333 aa, unidentified
MSRFWVGIDVAKRKLDVALLDEAGKVKSKVLANDPIGFAALQTWLKERGADTASTHVCMESTGVYSDGCATALADAGWKVSVVNPALPKDFGKSELKRNKTDAIDAGLLARYCSKMDPPAWQPPPLEYRKLRSLVERRQALQDMHQQEANRLESSLEAAARVSISEHLTWLEARIAEMERDIDDHIDGNKETLGKDAELLASIPGLGRTTAAKVLGLLGDLRRFESGKALAAFIGVTPRRHESGDSVRGRSSISRAGHTSVRHALFMPTLVATRHNPTIKAFRDRLVAAGKPKKSAVLASMHKLVHIMYAVVRKGINFDPRFGQLALDVQDGI

SEQ ID NO: 382963 - protein, 428 aa, unidentified
MTYKVAGIDIHKKVLMVVVATAAAEVKDAAGEALEFECRRFGAGAAERAELVRWLQERGVSEVVMESTAQYWKPVWLDLEPHFGKLHLAQAQSNRAPKGRKNDFRDAKRLTRRLLAGELMLSYVPGPEQRSWRTLTRGKCHLVRDRVHLQNQLEALLEEMRIKLSSVISDLLGVSGRKILEALSKGETDPGKLADLGSGKLKCSRKELIDALNGSSSPIQLTLLKQHLDRLKMLDTQIKELDESVAEAMRQHQAAVIRVAEIPGFGADSAQQIIAEIGVEAEAFPSADEFSSWVGVCPGSNISAEKNGSSHSPKGNPFVRRLLDQAAQAAVKKKGSRFQSLFRRFLPKLGYAGAIWAVAHALAKVVWLILHKGVKYIEQGTEPSLKAKKRRAQKLAQALRKLGYSVILTPVDVKPVTPITEDPAWDPA

SEQ ID NO: 382964 - protein, 386 aa, unidentified
METAVGKLAERSVARFPTAAGDRSFNPRSNKTGEKLDRRRFHEISPNSRKSRRGAGRRASSHSQGRDIVMDVAFTSFVGIDIAKRTLDVHVLPERRSLPHSNDSKGRRQLREQLPPPGLCLIVVEATGGYERALVAELIDAGYHVAVVNPRQARDFAKACGHLAKTDRIDAAVLARFGEAVELRIQAKIPEKQLELQDLVARRRQLVELRAGEMNRKEKATSKLVRKSLQETIDLLTKQIRRFEKQIAALVQSDDEWKQKTQIVQSVPGVGSQVSACPLADVPELGQLNRQQIAALVGIAPFNCDSGQFRGRRTIRGGRISVRCALYMAALTARRANPVIRAFADRLAALGKKPKVILTACMRKLLVILNTMVKNKTCWNPTISIT

SEQ ID NO: 382965 - protein, 431 aa, unidentified
MHNRLQVGIDFCQKRADFCLLFPEGQPLESHVAFDNSYLGYSGAKQLLLDALDDYAFDGIDVSGEATGYLWLPFFLQLAADPDLQLHDLRLHLLNPRWVKWFKKCFAQDDKTDQKDPYYIAERTRTRPPQVAWSAHPGILALRFYTRLRFHLVQNLAREKCYFSAFLFLKASAYRRLKPFSDVFGATSRLVLTQTPSLDELAALPVEDLAMHLHELSGHHLPDPFDNARKLKRVTQQSFPLDEVLALPVQRILDLTLAHIRFLEDQVEQVNRWIAIEVQAHPAILQLTTIPGVGPVFSSGIAAEIGDIQRFLQGTKWDRKRKRFRSRNLRDAEDAVAKIAGLWWPRSSSGDFEAQDRRMAKSGNRYLRYYLIQAANKMRQSIPEYAHFYARKYRQAAKHHHKRALVLTARKSVGLIVGLLHRNEPYRSKET

SEQ ID NO: 382966 - protein, 426 aa, unidentified
MAKVEHTSDARVLVGIDISKHRHEVLIAVPGKTRRRRLTITNCTEDFVRLIAILQEYGLPVRIGFEATGNYHRVLMYHLGVAGFDLKLVSSVALARTREALHNSWDKNDPKDAQVILHMLQIGAVQIFQDPMVAGTNDIQELSKTHDAVSRAKTELWHRILTHYLPLYFPEADRFHRSSRTDWFLAFLEMFPSPHMISALTKEEFTNAAWEVVGRKVEKSLLLSDIYETAKASAGLPVSPDSDAIRMFRLMLAEGRSLIRQRNTIEDRAVELLGERADYQLLRTIPGIGPINALTILAETGDLRRFHHHRQFLKFCGMDLATVQSGMFRGRSKISKYGNARLRRTLWLAGQTAVLKKANSFRDKFERYIAQDRHNPDLRRKAYTAIAAKMARTIHAVIKSGEPYRPFFEGVSPGGRTSLSKGRGGA

SEQ ID NO: 382967 - protein, 429 aa, unidentified
MNSTQNKKIEQVKETTMIVGIDVGSEKHYFRAFNWRGIELTRKPVAFSNSMEGFNSFYNSVVELMQKNELKEALVGIEPTGHYWFDLGQFMGEKNIKFVMVNPHHVHKTKELDDNSPSKNDRKDPRVIAGLVRDGRYFYSYMPTGVYAELRNASNRRFVLVEEQTRAKNRLHKWIAVYFPEYKGIYTHIDAKGGLLVLKQASTPEEIVRLGVEGIIKIWKDDKLRGNGHKKAMLILNAAMKSIGLKAGLTEARMEIQDLIEDYELQTKRLERVNDLIKELCQQVRYADKLLEIKGIGITTVAGFIAEVGDITRFDSTKELQKLAGLELVADSSGKHNGKTKISKRGRKRLRYLLFEAAISVVGKNEEFKEIHRYYTTREKNPLKKMQSLIAVACKLIRVFHVILTKGISYDASKMLKDIRHPGEQLKAA

SEQ ID NO: 382968 - protein, 342 aa, unidentified
MDIVGGFDVHRKQITFDYAQTQTGEVFRGEIRPATRENLRCWLSGFSSDNRTAFALEATTGWRFVVEELQRAGIEAHLAEPAETKALRGRKKRAKTDRLDARHLRELLLIGRLPESWIPPEHIQELRTLVRLRKSLLEDRTAWQQRIHAQLFHNGYPQERNLLARESRERLERLEVPPSARKMVDHALSMIDHINEELAPIEKDLRSYARRQAGCRALMEHYGIGELTSVAMLSELGDSRRFSSSRKAVRYAGLDVTVSESDDKRAPGKLSRQGAPVLRWAAFEAAQVARRTGSPDHDYYVHTKERLGSSRACLAIARKLIRRAHHTLRELGEEALSKPLAC

SEQ ID NO: 382969 - protein, 353 aa, unidentified
MANPMANLTIGVDLGDRYSELYVVDAAGACVETGRIRTTVAGLEQWFGGRPPARVVLEAGTHSPWASRVLPRLGHEVLVANPRKLRGLYENDSKDDRVDAEYLARVGRLDPALLKPITHRGEAAQADLAVLSSRDVLVRARTLLINHTRGVVKALGGRLPRCSAEAFARRVGPHVPPAVRPALAPVLEQLQQLTTTIRGFDRAVEHRCAQSYPETARLRQVTGVGPVTALAYVVVLDDPTRFRRSRAVGAYLGLRPRRSQSGEQDPQLRITKAGNPFLRRLVVQAAHYILGPHGPDCDLRRHGERIAARGGKNAKKRAVIAVARKLAVLLHVLWISGEVYEPLRQRLVLAQAS

SEQ ID NO: 382970 - protein, 340 aa, unidentified
MKLKTLAIDLAKNTFYLVGFDLDNQPVWRKKQSRRQLEIFIAKQEPHLIVMEACASAHHWARRFSQLGHQVKLLPPQHVKAYLRGQKNDYNDAQAIGEASLHGVTRSVPVKTVEQQDKQAFHRIRRQLMGEQTRIINQLRGLLGEYGIIIDTGIHQANKAIPLILEDAENGLTPKLRELVYRQYQRYLVLREELAWYEQQLEQVAKTDPDVKRLQDVPGFGPVNANVLCSWLGDGTQFSRARDASAALGVVPRQHTTGGHDRLYGITKRGDSYVRSMVVHGARAVVSRAKGKTDALSHWINQLVARRGFNKAAIALTNKMIRIAWVLVTRGERYKPALSM

SEQ ID NO: 382971 - protein, 361 aa, unidentified
MNGTMTWVGLDVHARSTHAAAIDSLSGELRRARFGGGTEEVVEWLGGLEGPVRAAYEAGPTGFGLMRAASAAGIDMQVVAPSKTPRASGDRVKTDRKDAELLARLLLAGQLHPVTVPPAWLEAIRHLARTREQVRHDLMRARHRVSKLLLVHGRVYPGKTAWNKTHKRWLAQQSFEHEPAELAFIDLLAAVDGLSARREALDERLSRLAQDERLWPTIARLRVFRGIDTLTALMLHLELGGDWGRFSSPRKLSSWLGLTPSLAQSGESASQGSITKTGSGIARRLLVESAWHYARVPRIGATLANRQTGQPDHVLQIAWRAQTRLHRVGKRLRERGKPGNVATVAVARELAGFLWAAATAP

SEQ ID NO: 382972 - protein, 350 aa, unidentified
MKITAIGLDLAKEVFQLHGVDSDGRVVLKKQLKRAQLAAFFANLEACLVGMEACAGAHYWARKLRAMGHDARLIAPQFVKPYVKSQKNDAADAQAICEALTRPSMRFVAIKSVDQQSVLALHTSRSGFVKARTALVNQVRGLLAEFGVVLPKRLAAFHAGVPQAVQDLGNELTALMRQLLSSLHQQVSHLDELIGKLELQIRQWASQDESAKRLQQIPGVGPITASALVASLGDVHQFDNGRQVSAWLGLVPRQHSSGGKNVLLGITKRGDSYLRTLLIHGARSAMQAAQRRKDGPPAWLQALLGRKHPNIVAVALASRNARIAWALLAHKRDYKVGYESPNPLRLSASA

SEQ ID NO: 382973 - protein, 429 aa, unidentified
MNYTQNNKIKQVDEKTLVVGVDIAKETHYARVFDNRGIELGKVIKFKSNIEGFRKLEEYIKEIKRREKKEKIIIGIEPTGHYWYTLANYVNKRGMKLVQVNPYHVKQAKELDDNTPSKSDRKDPKTIAMLVKDGRYNIPYMPVGIYAELRKTNEIREVIKKKIYAIKNRIERWLDIYFPEYKKVFKGIYGKASMITLQTMATPTQVLNYTAEEILEIWKKDVKRAVGIKRANKLINIAKESVGITEGLLMAKYEILYLVKEYKKVEKELNEIEEKLKILVYKIPGIEKALTIKGIGIITISGFIAEVGNINRFSHPKQIIKLAGLNLKETSSGKHKGKTTITKRGRKRLRSLLFKAILPMVAKNNEFKLIHKYYTNRTKNPLKKKQSLIALMAKLIKIIYTLIKKNIEYDPSKLINDIHGNKKIQFLTV

SEQ ID NO: 382974 - protein, 350 aa, unidentified
MLIIGCDFHSRFQQIAMLDPQTGEMIERWLEHENGEARKFYAGLATPARVGMEATGYAQWFERMLAEQGHQLWVGDAAEIRAAMVRKQKTDSRDACHILDLLLRDKFPRIWIPSTEERDVRQLLRHRYKLVCLRTSLKNQLHAMAMGQGICRKKKLWTAVGRKELEGLSLGPWASRRRQQLLEMLDQFEPVIDELDRAVIQEAEKRPAAVRLMTQPGVGPVTALAFVLTIGPVSRFQRSKQVVSYLGLNPTEESSGGRQRLGSISKQGNSMLRFLLVEAAQTASIYDPELRRDYQRLKFRRGSGVAKVAIARKLAVRLYGKLREAAQPVPPAPMQGSPAVSVVGESLSCF

SEQ ID NO: 382975 - protein, 348 aa, unidentified
MSQRTDFVVASTIGIDTGKNTLHLVGLDDQGTIVLREKVARGRIRTRFANVAPCLIGIEAGMATHYVARELIALGHDVRQVPPAYAKPFRQTHKNDFRDAYAIAEAVRRPTTRCVPVKTDDQLDLQALHRVRSRLVGQRTAVINQIRGFLLERGIAIRQGLRFLRQQLPEILARRIDVLSPRMIRIIEDLSGDWRRLDERIEHVTEEIEVLAQSSESCRQLMTVPGIGPLIASAMVAAIANGAAFAKGRDFAAWLGLVPKQMSTGDRTILGRISKRGNRYLRMLFMQGARVILLRPANWAKHSFGPWLTAAAKRLHHNVLATALANKLARITWTVLAQRRNYETRVAA

SEQ ID NO: 382976 - protein, 414 aa, unidentified
MEEPLTVKRYYMGVDWGDRLHQVYVGDQEGKKVKEIKVPETVEGLTEFGRWLDEKRAEGFELWAAIEKPAGRIVDFLLDHGVEVYPVNPKAVDRVRDRYRMSGSKSDAFDAYVLAEFLRTDQAHLRVLRPSSEKAQELKMLCRDQRRVGRHKTRLLHQLTTTLKEYYVRPLETFEDIETEVALDFLTRYPTPAHLQALKPKEFKRFATKQHHLSQQRCEELWEKLSQPQLKVPEHVVRAKAQLLEVLIDQLRAAIKAVNTYNHKVESFFASSPAAQIAKTLPGGKSGTLVAAIWAELGDAQGRWESFRHLQAEAGAVPVTKASGKSRVVQFRFACNKHLRYAMYWFSFVSLNHSEWAKLYYRQQRAQGHTHPEALRALGAKWLKIIFVMWRDHKPYDENYHLANIARQRMRQAA

SEQ ID NO: 382977 - protein, 346 aa, unidentified
MMIIGCDFHPSWQQVSWVDTDSGECGEQKLVHAAGEAKMFYQQLGAPGLIGMEATGNSQWFIELVEDLGHEIWIGDAAQIRASYVRKQKTDKRDAAHILKLMVEGRFPRLWTPDREQRDLRQLVLHRHKLVEIRSRVKNELQHLSLNKGMQKKRTLWSQAGQKMLRELPLKPWASCRREDLLGLLGMLNQQVGTLDGAVQKAAEQHAQARLLMTQPGVGPNTALAYVLTIGDVTRFGRGKQVASYLGLIPREESSGGRQKLGAISKQGNRLLRSLLVEAAQIAVRFDPGFRKQYLHRCHQKPKGVAKVAAARRLAVRLYWMLRTQTAYPEIVRIESSPRVPRVGAS

SEQ ID NO: 382978 - protein, 411 aa, unidentified
MNKEICGSEQHQNKYTGGIKMVCVGIDIAKDKHDCCILDSDGTVRADCFTIPNNMDGFKQLLQTIRNCTKKSDKIKVGLEATGHYSYNILGFLLDNGLPTYVINPLHTNLYRKSLSLRKTKTDRVDARTIATMLLSDVDLKSYTDTAYHNEELKSLTRYRFEKVQERAKLKQSVSRLVTILFPELEKLVPTLHIASIYSLLSEYPGAKQVSEVHLTKLTNLLTTTSKGRYGKEKAIQIRDAARVSIGSVMPAKSLELKHTIKLIQELTSEINEIEDSIHKIIEELNPPILSIPGMGVNSAAVILAEIGDFSNFSSPDKILAYAGCSPSTYQSGKLTNCYAHMEKRGSRYLRYALYNATKYVCHWNPVFAEYLAKKCAEGKHYNVALSHAMKKLVRLIYALQKSGKTYLAAA

SEQ ID NO: 382979 - protein, 347 aa, unidentified
METYIGVDYHLSYSYMTVMDQTGRIRARGRVANDREAVEEFLNRSRNGGRRAAVMEATRNWTVMYDLLEELVGEVHLAHPLKVKAIAEARIKTDKIDSEVLAHLLRCDLLPEAHVPGEAARVARNVLRQRMFFVRVRTMVKNRIRGLLDRYPELARSRPCKHLFCKEGLVWLKGVSLKAEDQRLLAEELELYATLERRIERSNGIVQKLAEGDERVKLLQTIPGIAEFFGVLIAHEVDDVSRFSNEKKFFSYIGIVPSTHSSGGRTYHGRLTKQGNKYLRWAFVEAVWPAVRADPELAAYYSRIKVRSGPNPAKIATARRLATIAYRVLSQRRPYYFSRGRSRAALG

SEQ ID NO: 382980 - protein, 360 aa, unidentified
MELEEVPMQIVSALDVHRRQITYKTLDRETGEVRRGRVAPAARGDVREWLARFAGCEAEFVLEGTTGWRFVVEEIERAGHGAHLADPAETAAKRSRKRRAKTDNADCDLQLRLLLAGELPESWIPPAQILELRTRVRMRKTLVDQRSAWQQRLQAQLFHQGVPAGLKPRTRAGREALATVELSPSGRELVLLALRMIETLDRELAPLDRWLQAFARRQRGCRALIERLYGVGVVSATAIVAELGDCRRFTSSDDAVRHTGLDVTVYQSDSKRAPGHLSHEGPEVLRWALFEAAQAAARRSSPDHTYFCQVRERIDYNRACLSVARKLCRRAYHILRELGADAVAPVEDAADTEEAIAAAA

SEQ ID NO: 382981 - protein, 348 aa, unidentified
MVADSLDVVIGVDTHRDAHALALVATASGALLLEAVVEASREGYRDALELARAHAPGRRAWAIEGTGCYGAGLARFLLARGERVFEVDRPRRERRAQRGKSDALDALRAARSLLGGERLARPRQAGAREALRGLISTRESAVDARRAALNQLRALIVTCPEPLRAELRPLTRARLLRRLRGTRPRRHADRQLRGALLAMRLLAVRIEALTLEQRELEGEIVALVRELAPQLLAQPGVGPITAAHVLLAWSHKGRLRNEAAFARLAGAPPIPASSGKVVRHRLDRGGDRKLNRALHTIILTRRRTDPDTIAYIQRRVSEGKSDRDAVRSLKRYLARSLFRQLEAHPQPA

SEQ ID NO: 382982 - protein, 352 aa, unidentified
MPKHKYVGMDVHSATTTIEILNEKGKSLATSTIETDGGVIEDFIRGLTGTIHVTFEEGVHAAWLYEIIQPLVAEVVVCDPRRNKLIQSGNKSDQKDAQKLAELLRLGSLKPVYHGDCGTRRLRESVRAYNTLSRDCLRVMNRIKAMFRGRGIDCKGTEVYRALHRQQWLERVGDPGAIARLELLYQELDCISSLHELARREMVNQVRSHNAYKILKQIKTLGPVRVAQIIGVVRSPFRFRTKRQFWPYCGLAVQTASSADYEIVNGKARRKAKRPATRGLNRNYNRELKNIFKGAAMLGTVTEPFKQFYDGLIAGGMKPEMARLTLARKIAAITLAVWKKGERFDATKLTKS

SEQ ID NO: 382983 - protein, 372 aa, unidentified
MQSYYVGLDVHSRESVFVVENEAGAIVARGSVPTTVNGLKHLRASCGLPAATGVALETGTSAFFVARELARLELKPVVIDAHEVRRKAQRPEQKSDTRDALELCEGLRRGFYRSIVHVPSPAISDLRTTLSRRRHFIRIQTAEVNAVKRLLRGVGRNSGRRGSLRTDAHWQSLLAGDLVPEQLQEHVRHHYAVWRQAAERVRALDLSLGDSARQRRDTVKRLETVPGVGPIVALTAIAVFAEVSRFESAKHAASYAGLVPSTFQSGERDAHGHITKRGSAELRAMLCEAAHHARRPVHPLHPHFARVCARRGYKTAVVAVAHRLCRILFAMLRDGADFSVTRMGVEEGDFQRTTTYKYRLRPKPAGRLPAAD

SEQ ID NO: 382984 - protein, 384 aa, unidentified
MKKNISRFVEMKATVIETEGDRTTPPRRTISQRPDYRAVVGLDVGDRQTHYCVLDLDGELAVEGAVATREASLRVQFEGKARMRIALEAGTHSAWIHRLLVELGHDVIVANPRKVRLISSSDSKNDPADARTLARLAHVGPELLSPIQPRSEKTQVDLALVRARDVAVQSRTKIVNAVRGIVKSTGHRLPKSSTLTFARKAKDACPEALQPALLPLLRVIEELTREIELYEKLVSQKAETEYPQTKAIRTIHGVGPITALTLVLVLNNDRNRFRNSRDVGCYIGLRPKQRDSGQRAPQLGITKAGDSLLRRLATQCAQYILGPFGKDSALRRWGLSLALRGGKNAKKRAVVAVARKLVILMHRIWITQEVYEPLRGVALKSTAA

SEQ ID NO: 382985 - protein, 344 aa, unidentified
MDHFAGLDISVNETSVCIVDDTGRILREMKVASEPGALLPVLANPAYHFKRIGLEAGPLSQWLFSALAEAELPVICVETRHMQAVLKAQINKTDRNDARGIAQMMRVALYRPVHVKTLRSQKLRTLLTHRKLLQSKAIAIENDLRATLRNFGLKVGMVGKVRFEARIKELVEDLPDLAALVEPLLVVRRVLREQIVILHRRLLAVVREDEVCRRLMTTPGVGPVVALTYRATVDVPARFRKSKAVGAVFGLTCSKYQSGEIDRSGRISRCGDEMMRAMLYEAAQSMLRSKKWSWLKAWAMQIAKRRGMKKAIVALARRLAVILHRIWVDGTEFRWTREQATAAA

SEQ ID NO: 382986 - protein, 445 aa, unidentified
MAPKLGLHNPAAAGLDIGAEEIWACVPAERDVQPVRAFGTFTPDLQALADWLVQCQVTTVAMESTGVYWIPIYEILEARGFEVSLVNARHLKNVPGRKSDGQDCQWLQRLHSYGLLRASFRPADDIRVLRSYLRQRALLVEQRAGHIQHMQKALQQMNVQLTQVLSDISGTTGLQILRAIVAGERDPQGLARLRHGRCQRSEAEIAKALSGHYRPEHVFALKQALALYDVYTVQVQECDTYIEQHYAAIKPTYDERTPPPLGPDPKPNSHAKNAPAFDVRACLYRILGLDLTATEGLEASSAQVILSEIGTDLSKWPTEKHFASWLGLAPHNDISGGKVLRSKPLKGNRRAAQGLRLAAQTLGRTQTALGSYYRRMRARKGPTHAVTATAHKLARILYHLLTHRTPYQPQSQELYDQHLRQRAIRHLKRTATRLGFTLLPQPVAA

SEQ ID NO: 382987 - protein, 407 aa, unidentified
MLFVGDDWAEDHHDVHLMDEAGTQIARRRLPEGLAGMRSFHELVADHAEDPDEVVVGIETDRGLWVQALVAAGYQLYAINPLAVARYRDRHNVAGAKSDAGDAKVLADLVRTDRHNHRPIAGDSHDAAAIKVLARGHQNLIWSRNRQTNALRNALREYYPAALVAFDDLASNDCLAVLTKAPTPTAGARLSIGQISAALKRGGRQRNIDRRANQIQEALRAEQLSAPDPIADAFAATTTAAIGIIAELNRQITRLEQTLTDRFEQHPDADIYRSLPGLGVILGARALGEFGDDPNRYANPKSRKNYAGTSPLTIASGKRRAVLARHIRNRRLYDAIDQWAFCALTNSEGCRTYYDQHRAAGDLHHQALRALGNRLVGILHGCLHHRTNYNEQTAWSHRQPKETEQAA

SEQ ID NO: 382988 - protein, 428 aa, unidentified
MRVDYAFYVGVDWGSQTQQVCVLDPRGAIVREDVVPHREAGLRQLLTWLRELCHGDLSRVAIGIEMPRGALVEALVEAGAHVYHLNPKQLDRFRDRHSVAGAKDDRRDAFVLGDSLRTDRVCFRRVRIDDPSIIELREASRLESQLLQQHRRLANRLYGQLHRVFPQLLELSPGADEPWLWDLLTQTAWPEVVRQWTKAQATKLLRAHRIRRFDAERLLDVLRQPALPVAGGTIAAVTKHVGMLVEQLQLVQRQRRECIAWIERLLAQLSLPEDDEGQPRQHRDAEILLSMPGAGKLVAATVLGEASQAVADRDYQLLRTLSGVAPVTRSSGKSRRVTMRRSCNPRLRYALYHWLFNSLQHDAPTRARYDELRGRGQTHPHALRTLADRHLRILVAMLRDGTLWSPPGAAPPLAASSLTAPLADKEAA

SEQ ID NO: 382989 - protein, 392 aa, unidentified
MIYVGIDVAKEKHDCFLTNSHGEVLFKSFTIPNNRAGFETLFQRIEAVSDDLTKVKVGLEATGHYSYNLLGFLLDKGLTTFVFNPLHTNLYRKSLSLRKTKTDKVDSRTIATMMMSDMNLKSYSDTSYHNEELKSLTRYRFDKVKERAKLKSSVSRLVCILFPELEKLVPTLHMASVYALLFEFPGADAVANAHLTRLSNLLSESSKGRYGKETAVMFRDTARHSIGSHMPAKSLELKHTIKLIQELTIEIDEIEAAIKRIMDEEIQSPILTIPGISYRMGAMIIAEIGDFSRFDSADQILAYAGMSPSTYQSGQLDNCYSHMEKRGSRYLRYALYHATKYVCHWDKSFGAYLEKKRSEGKHYNVAISHATKKLVRLIFAIEKSGKAYLPAT

SEQ ID NO: 382990 - protein, 355 aa, unidentified
MTSTQYIGMDVHKESISIAVRNAAGKVVMECVIETKTSTILQFFDGLRGDVQVTFEEGTWAAWLYDLLKPHVTEVVVCDPRRNALLQEGNQNDRVDARKLAELLHHNQLRSVYHGDHGLRTLKELVRSYLTITQDLSRVMTRVKAIYRSWAIPCTGKQVYAPRHRAEWLGKISEPGVRRRAEFYYQQLDALRTLRLEVRRDLLAESKKHQAWKRLCGIPSIGPIRAAVLLGILQTPHRFRTKRQLWTYGGVGIETSSSADHRVVDGQLERKKKQVEIRGLNRNYNHDLKNLFKGAAIVAATKPGPFAEFYAELLAKGMRPEMARLSLARKIATIVLIVWKRGVSFDAQHLKPQTA

SEQ ID NO: 382991 - protein, 339 aa, unidentified
MTVVVVLDADGKVILETMVATEAAPIIRLVQSLSGPLHVTFEETTQAAWLHDVIRHFVTEVVVCDPRRNKLLAEGSKTDKVDARKLADLLRTGMLRSVYHGHEVTRKLKELVRAYETLSGDSRRTMTRIKAIFRGRGIRTAGRGVYQPKQREQWLEMLTEPGIQQRAAWLYEQLDQLRVLRRKAKQVMLEESRKHRAVGLLKTIPELGCIRAAFIVATVDTPHRFRTKRQFWSYVGLAVVTHMSSEYEMKAGQVVRRRKPLATRGLNHNCNHRLKEVFIGAATSASQHKSYESVRERLNHNGMRAEMARLTLARKIAAIALMVWKKGVEFDPKKLNATT

SEQ ID NO: 382992 - protein, 330 aa, unidentified
MKNEFIGIDVSKGTLDVHLYCANRHQSFKNNGVGRQSLIDWVIEKTNLKLVELRFCLEHTGIYSQPLCELLEQMDLTYYLISGLELKRSMGIKRGKNDKVDAKRIAQYAFLRRDDLIAYKMPGQTVITLKKLLGQRSKLVRQRAGYKASIKEEKQMYPSTQKSFVIESSGAIIGFLTLQIKLIEKEIVSLIKSDQEILKTYENIQTIKGVGPILATTMIAHTNNFKSFQNWRKFACYAGIAPFEHSSGTSYRGRTRISVLGNRDLKTILSSAAATAILHDSQLKMYYNKRLKEGKNKMSTLNIIRNKIVSRIFAVTKRQTPYVETFKFAA

SEQ ID NO: 382993 - protein, 328 aa, unidentified
MGIDVSKPFFDASLMAVVDHQKQPIDTARFENSTDGMKSFEKWLKTHNAPLDENALLVIENTGIYHRIIWSFCSKKNLPIHIGNAAHIKWSFGIARGKNDTIDSIRLCQYAQKHYDEIKATPALDPVLMQLKDLVTSRSNLLSQLTSNKTYLKELKNVSDITVQKHLEKAYKTAIEGIAKSIKSLEALVAKIIADNTAFKTNYNLLTTVPGIGHITAVYLICCTCNFAGKPSGKQLACYAGVVPFENKSGISLKGKNRVHKMANKDLKKLFHLCALSAIQHCDELKTYYNRKKDEGKHPMSILNAVRNKIALRAAAVVNKQTPYVENA

SEQ ID NO: 382994 - protein, 407 aa, unidentified
MSISTDVFAGLDWAVHTHAVCIIDASGTVRDRFEVAHDRQGLAELMRRLARFGASVRIAIERPSGLIVDALVEAGHQVFPIHPNAVKASRPRYRSHGAKSDASDAYLLADLLRTDGHRWAALSPQSDSIHALRALVRSRDDLVTTRVALGNQLHSTLEAFWPGAACIFADITSPIGLAFLRRYPSPASAARLSQAQLLRFCRAQHYSGRRSPAELLARLRAAAQALPGKLTTESMAQVVRSLVAVLNPLVAQIAGLTRRIENFVQSLPDGQIIMSFPRAGRVCAAQILAELGDVRERFSTFDRLAAEAGTVPVTYQSGKTRSVTFRWACNHRLRQAITCLADNSRHANEWARGIYLAARSRGCDHPHAIRILARAWLRVIWRAWTDRKPYDPKLHIGALKLASDTGG

SEQ ID NO: 382995 - protein, 357 aa, unidentified
MSTQIREISFRGHQIFVGLDVHKNSWQVSIALKEVIQKTFHMSPGSPQELKAYLNRHYPDGTYHCAYESGFCGFWIQEALTRLGITTWVYHAIDIPTSNKEKRQKTDKRDSLKIVKALRQGDCEPIYVPDKDQQKMRSLVRQRASIVKDRQRIMHRIKSHLSYYGIKCEALEWRQEWSGKHMEWLKRQAEGGQDQALDWMLRELALMRNMEKEILQQLRQISKTSTYKSAVDLLLSVPGVGLKSALVILTEIGLDFNRFSKFDRLCAYCGLMPDTKSSGETQRVGDLTHRGNRRLRCILIECAWAAMKGDPELALCYNEYKKRMTGQKAIIKIARKLLNRIRRVLNKKEIYTLVQAQ

SEQ ID NO: 382996 - protein, 355 aa, unidentified
MDSRKYIGMDVHKESISIAVRNDAGKIVMECVIETKASMILQFIDGLRGDLQVTFEEGTWAAWLYDLLKPHVTKLVVCDPRKNASMREGNQSDKIDARRLAELLRLNHLNPVYHGEHGLRSLKELVRSYLTITKDLGRVMTRVKAIYRSWAIPCTGKQVYAPRHRAEWLGKITEPGVRRRAEFYYQQLDALRTVRQEVRRELLAEGKKHTAWKRLCQIPSIGPIRSAVLLGILQTPHRFRTKRQLWTYSGFGIETQSSADHRSVDGQLQRAKKQVSIRGLNRNGNHDLKNLFKGAAIVASSKPGPFQEFYTALLTKGIRPEMARLTLARKIATIVLIVWKRGACFDAQHLKPQTA

SEQ ID NO: 382997 - protein, 466 aa, unidentified
MSIVMGVDQHRAQITAAWIDLDTGEISRARVSPADRDGVRRFLARFAGKQLEVALEATTGWRFFVEELRAVGAGVHLAEPAQTAALRGRKQRAKTDRADARHHRELLMAGRLPESWIPPDHILDLRAQVRLRHTLIEAHTEWQQRIQAVLYHHGAPQRRKLMVGDGPDWLSAQPLPDAAREQVTVARAMIDALERQIAPLDRELRPYARRQTGCKALIDAHYGVGELVAVTVLAELGDCRRFSNSRDAVRYGGMDITVYQSDRHRAPGHLSRQGPPALRWALYEAAQAARRPTSPDREYYLQAAEQLGGNRACLALARKLLKRCYHTLRELGEDALTPPADEPSGSGSARRASSGSPAPTNRPATPSARGCSGRLTRASAPLSGNERRPGPAHPDNKLHLASRSFAYVKPLFTLMRRGQLPNCRCRHVRVDGLERLSGRNASPSGNNTTSTSCRRPRSQPEGRGPK

SEQ ID NO: 382998 - protein, 346 aa, unidentified
MEHYAGIDVSLELSSVCVVDGQGKIMKEAKVASEPEALVCFFKELGFQMKRIGLEAGPLSQWLHAGLAQAGFETVLLETRHVKAALSAMTVKTDRKDACGLAQLLRMGWFQPVHAKSIGSQEIRALLVARKQLLGRLLDVELSIRGILRGFGLKVGQVTRKTFEARIRELVTGQATLERIAGAMLSARATLKVEYEKLHKAVLAIVREDAVCRRLMTVPGVGAVVAVTFKSAVDDPSRIAKSKAVGALFGLTPKKYQSGEKDVTGGITRTGDEMVRTALYEAANVLLSRITRFSKLKRWGMDVAKRRGSKRAKVALARKIAVILHRMWIDGTTYRWADAKPIAAQA

SEQ ID NO: 382999 - protein, 411 aa, unidentified
MDVLFPACAGIDVHQKNVVACRLYTGVDGQLHYDKRTFRTMTTELLQLSDWLAEVEITHVAMESTGDYWKSVYNILEGNFEVWIVNAHHVKNVPGRKTDVKDAVWLADLMRHGLLRPSFIPNQEQREWRDLTRMRLTLVRERASLCNRLHKALEGANIKLGAVATDLLGVSSRRILRELATRPEATPTDLADLALGTLQKKRDDLTLALEGRMNEHHRFMIGQLLDHIEELDRRIATFETRIEALSAPFAEAVVRVDTHVGVSQTAAHAIISEIGADMSRFPTAGHLASWLGLCPGNNESGGKRLSGRTRKGNRYARAVLVQVAQVVCRMSGTQYYALYCRIAARRGKKRALIAVAHAVVVTLYHMLTKGVDYTEPGPDYLVKRNPERELSQLRRRAVQLGYDLVAQPQAA

SEQ ID NO: 383000 - protein, 360 aa, unidentified
MQIIGCDLHARQQTLAMLDTETGELVNRTLLLEGGEVREFYSQLPRPALVGIEAIGPMQWFLSLLEELGIECQVGDATKIRAAEPRKQKHDRRDAELILKLLVEKRFPAIWRPSKELLDLRALLLHRHHWVRLRTQIQNALQAIALANGLRRGPGLWSYDGQAKIAFLPLPPHASYRRNALQTLYRKMEEEVKNLTAQVAEQAEQRSRARLLMTHPGVGPVTALATEAFLGDPQRFADGKALASYVGLIPREYSSGERQRLGALTKQGNPLLRFLWNEAGVHAARRDPELQRFYRRKLVQKGLGKARVAVARKLGIRLWIMLRDQIDYEEFCRRGQKHSGAACAGMLETRFGGNRHRPVD

SEQ ID NO: 383001 - protein, 368 aa, unidentified
MPTTNLSETIDFNGQEFFVGLDVHKKSWSVTVRSLNHQVAHFTQPPSAKALHKTLQTKFAGGKFYSAYEAGFCGTGYHEQLCKMGITNIIVHAADIPQTDKQKKNKTDLHDSRSIAGHLEKGNLHGIHVLSREQQELRSLLRLRESAVKDVTRSNNRLKSFMLYYNIEIPKTATTSSFLSKKALEWLDNLELTSTAGTLTKENLIQQLQHQRTRLGSITKLLRKEMQTQHSKAYELLLSVPGYGAITAAALLAETGCFERFDDPDDYTGYLGIMPWNDSSGETIRTKGIQPRCNKHLRPLLIEAAWTAIRTAPEIFAYYSRHAAKDNKHAIVKVARKLALIGRGVVLKGEKYQADYLQKKQQGKQKQG

SEQ ID NO: 383002 - protein, 346 aa, unidentified
MDQQQHYVGLDVSLETTSICVIDEKGTAVWRGKCASTPEAITEAVHTYAPAVVRVGLETGQLSNWLTLNLRRRGLPVVCLDARHAKAALSLQINKTDANDAFGLAQIVRTGWYREVAVKSMDAHTLRMLMVARAQLVSQRQTIANTIRGLLKTFGLVIVRGSGGLFAVRVREQIAGNDVLVAIVEPLLVVWHAIREQVKMLDRQILARARADAAARRLMTIPGVGVVVALAYTAVIDDPARFRRSASVGAYLGLTPRRYQSGEADTSGHISKCGDGLLRAYLFEAATVLLQRHSRASTLKTWGLALAKRIGMRRAKVAVARKLAVIMHRVWSDRSEYRWGDVPVAA

SEQ ID NO: 383003 - protein, 491 aa, unidentified
MANRKISTFERLQRGKLSRKQCKELGRRLQSPNPGLEIIHRNAAGIDVGSGSHFVAVPPDRDTQPIREFGSWTAALHEMAAWLKSCAIDTVVVQATGVYWVVLSDVLEGAGLKVWVVNAQGTKNLPGRKSDVQECEWLRKLHTYGLLRNSYRPPEEIRGLRDLWRLRERLVADAGRAVQQMQKALTGMNLQLTNALSDISGVSGMAIIRAIVGGERDPWKLAQLRQPGVRASEAEIAENLRGTWREELLFELRQVVAHYDFLGKQVVELDQLLEKRMAAMPSREVATKGSPVAEKEEVPEGKRRGRKPKTKVKPPPKNAPAFDIGRELTRLLGVDLRTIDGVNIHIAQTVYTEVGPDLSAFPTEGNFTSWLGLTPMRSVSGGKVIKHEKKRVKNRLADALRMGASTLERSQSYLGARFRHLKARLDGRRAVKAMARYLACLIYRLMTKGQAWIDRGEAYFEQKKAERELRTLQNRAQKMGLQLVPLATVNA

SEQ ID NO: 383004 - protein, 367 aa, unidentified
MSKNTSKKTALPATDITACTTLAVDLAKNVFQVAGEDQLGRVIYEKRIRSREAFITFLQQLPAGMAVLMETGPGAQAWGRMLLKQGQRPSILPARHVAGHRSGPKNDRNDALAILRAGRDLRIHAVPVKTEAAQQMQALHRVRQRYVKEHTAMGNQMRGLLLEYGIAIPLGKAAIDREVGRLLEHSSPLVPEPLHELMAELLQEWKSLEARIEVITGRVKRAAAENETTKRLMTVRGIGPILSSAVVAKQTEPERFANARDFAAYFGTVPEQHSSGNAVRLGKMTKRGDAYIRSLAIQGAHAVLRQLTPSSEHPDDRRLQRWLSRHGQKGAAVRLANRNLRIIWVLLQNNETYRRQPGDTQEAAMSL

SEQ ID NO: 383005 - protein, 415 aa, unidentified
MKYARTVLPTEPANGLTCGIDWARDDHAVSVVDSRGKEVLRSTIDHSAMGLQTLLSILTRTGVEEVAIERPDGPVVDVLLDAGITVVVISPNQLKNLRSRYGSAGNKDDRFDAYVLADTLRTDRIRLRPLVPDGPATVALRTSCRARKELIGHRVSMANQLREHLNRAFPGAVGMFAELDSPISLAFLTRFDCQDRADWLTPKRLGTWLAKVGYTGGKSPAILHARLTAAPRGVTGEHGTAHAHITHALVATLSALVEQIKALSEQIADQLATHDAHIFTSLPRSGKIRAAKLLAEVGDCRGRFPTPEALACLAGVAPSTRQSGTMRSVGFRWSCDKHLRDAVTDFAADSRRANPWAQDLYRRARARGHDHPHAVRILARAWLYVIWHCWQHGVGYDPAQHRALQALLHDEQPAA

SEQ ID NO: 383006 - protein, 371 aa, unidentified
MSFLGIDLHSNRITVATLAVKDESFETITKTYNFERESFKRFLDSLSENDYVLVENTFNAFWFYDQIAGRVKECLVYNTNMARSRGNKTDKIDSRHLAHKLGYYFMMGERKEYLPTVYVVDAEIREIRGLFTTYQLYKKTKVQLKNRIHSILKQNGICIERGKIDRKEFEARIGGFNISEIWKFQIRSALKTLKSVHEEQKEIKDQIHLLGYKLFKEEIELLMSIRGISAFTGIALMSDVVDVNRFSSARKFCSYLRATPKVTASNQSIHIGHINRQSRPLTCSLLTQSIVQFSRAGEHMSEFYGRVKIGKSAGKSRIALIRKILVSAYYMLKRKQKYHWVEEELYSKKLKDFQGKMEKIKTSAEEERKSA

SEQ ID NO: 383007 - protein, 386 aa, unidentified
MTYPTTASEQTYIEVTGGVDTHKDTHTAAALDASGRLLGHREFAATAAGYAALLAWLGTLGQLVRVGVEGSGVYGAGLARFLQAAGVELVEVDRPDRKTRRWQGKSDPVDAEAAARAALAGRASGVPKTRGGKVDALRALRVARRSAVAARADAQRQIKALIVTAPDALRVTLGGLGDRELIAYCATRRPDRAAAGDPTVATMLALRALARRHQQLSVEIDELDALIGPLVTAINPTLIGLSGVGTDVAGQLLVTAGDNPQRLRSEAAFAMLCGAAPLPASSGRTHRHRLNRGGDRQANAALYRIVLCRLRWDPRTRAYAQRRTTEGMSKPEIIRCLKRYLAREIYTALLDPQPSSVPAITSTAPEASTWSARSAARTNEVDTDKR

SEQ ID NO: 383008 - protein, 427 aa, unidentified
MGAMAENEVLGQEPQFAALVGIDWADQKHAWCLQAAGTTQRESGEVEHTPEAVEAWVGQLCQRFGNRPIAVAVEQVKGALVFMLSKYEPLHLFPVPPAMSAKLRAALYPSGAKDDPRDADLLVDLLLQHRDKLRRLSPDSEATRRVQNLVEERRHLVEEKTAQSNRLTNHLKIYFPQMLEWFDRLDTELVCALLEQWPTLEELQKVPPARLRTFFRKQRCHYPELVERRLVGIRQAMPAIRDRAVIEAKSAVVKVSVQVIRSLIRGVAELDRKIEEAAAAHPDFFIFDSLPGAGAVLAPRLLAAFGSQRERYANAAEVQAYSGIAPVTEQSGKKKWVHFRWACPKFLRQSFHEWAGHSIAHSPWARSYYQQQRERGKGHHAAVRGLAFKWIRIVFRCWKDRVAYDESRYLAALAKRNSPLAAAGTIL

SEQ ID NO: 383009 - protein, 403 aa, unidentified
MGPVPHGWAGVDVGKGHHWVCLIDEDGTTLWSSKVINDETAILEAIGEVRARADQVTWAVDVTGTMSGLLLALLAAHDEMVKYVPGRVVNKMADTYRGQAKTDARDAYVIAESVRQRGDLTEVEVSATLVAELRLLVTHRTDLVADRVRLLNRLRDMLSGYFPALERAFDYAHSRGALTLLTGYQTPQAIRRIGQSRLQAWLVKRTVRSAEQIAADAVTAAAAQHTVVPGQDVAATIVVDLATQLLTLDERIKDIDARVTTTFRAHPQAEIIESLPGMGPILGAELIAAAGDLNGYANAGRLASAAGLVPVPRDSGRRTGNLHRPVRYSRKLRRVFYLSAQSAMMREGPNRDYYLKKRSEGDKHVQALICLARRRVDVLWALLRDNRPFELAPPARKPTARTA

SEQ ID NO: 383010 - protein, 315 aa, unidentified
MEDSQVFVGIDVSKSCLDLASRPTGEVWQVPNDAEGISALAQQLTGMSPSLVVLEATGGLEWALTAELAAAGLPVAVVNPRHVRDFARAAGILAKTDVLDAQVLAHFGQAMEPEPRPLPDAEAQELQAMVGRRRQLVEMITAEKNRRRTVIARIRPQVEEHIRWLEKSLEDLDQDLDGFIRSSPLWRTKERVMRSVPGVGPVLSATLLANLPELGELSRGQIAALAGVAPFNRDSGTLKGKRTVWGGRRRVRAALYMAALVASRYNPVIKEFYQRLCSMGKPKKVALTACMRKLLVILNSMVKQGREWQPNTETP

SEQ ID NO: 383011 - protein, 340 aa, unidentified
MKKVFIGIDFSKLKFDAAIYLCDTKEIVSSNEFENESSGYKQLLKWVKKSIHCAQSEILFCGEHTGYYSSNLSVFLHDSGYDLWLVSGLEIKLSQGIKREKTDKVDACHLAQYACRYEDKVKLFIPVSSTLEQIRDLLSYRERLVEFKKILVTSAGELKRVRKTDSGEYIYQESLTQIKELMAKIRNCEKRIESLIKQDMSLSTNYKLMNTVKGIGLVNAVLILVATANFTLFDDARKFGCYCGVVPFEYRSGTSVRGRTRVSHMANKKIKTALTQAAQNSVMYDPVLKEYYQRKMAEGKNRYLVLNNVRNKLIHRIFAVVRDGQKYDLNYTHPLKQQAA

SEQ ID NO: 383012 - protein, 414 aa, unidentified
MDAAVWVGIDWGHDEHQVCVLDEKRNVVLEDRMRHSPEGLRALVAKVLSFCAPERIAVAIETPRGPVVDAFVDRGVSVYALNPKQLDRFRDRHSVAGAKDDRRDAYVLATSLVTDSACFREVRVKDARVVELRELVHLHEELRAERIALGNRLRDQLLRYYPQVLELGSVYNDVWIWKILGAAPCPGSARKLSRTRVAQILKKHRIRRLTVDEVLSILRAGALIVAPGVTAAATRYIAALLPRLQIVAEQTEACSNDMERLLDEMQEAPSEGTDMVRVEPRDVQVVRSLPGVGTHVGATLLAEASTALHERDYHALRTLAGAAPVTKATGKRSGPFALVIMRKACNERLRDAVHHWAFATLTRDAKARAHYARLRARGHSHGRALRGLADRLLAMLVAMLRQGELYDPSRRQAA

SEQ ID NO: 383013 - protein, 360 aa, unidentified
MDVHKDSIAVADVAQEHGAEVMSLGAIGTRQCDIDQLVRKMPSQAKHLVFVYEAGPCGSWLYRYLRKKDYDCWVVAPSLIPTKAGDRVKTARRDAVQLARLARSGDLTAVSVPKVEDEAIRDLTRAREDTISDLKDTKFRLKAFLLRHDIRYTGRANWSPAHLRWLSEVVCPTPAQQIVFQEYVRAVNEHTERLQRLEQELQEQVKSWRLHPVVEALQALRGVQCTVAVTMVAEIGDLTRFDTPRELMKFLGLIPSAYSSGERRQQGSITKAGNPHARRALVEGAWAYRYPAKVSRHLQLRLENQPKVIQDISWKAQARLCKRYRHLVARGKHANQVVVAIARELVGFMWAIAKEVPVLP

SEQ ID NO: 383014 - protein, 423 aa, unidentified
MEVMHRRVAGLDVHKETVVACVRVMAGRRPTRECRTFATTTQGLLELLGWLTASRVTHVAMEATGVYWTPVWKILSEGDFTLIVANAAHIKQVPGRKTDINDAMWIADLLACELLKASFVPPEEIQELRSLMRTRKQLVREQTRHVQRLEKTLEEANIKLGTVLSDLMGASGRRMIEAMIAGECDPHRLAGLAERTIKASHKALYDALHGRLREQHHFLLQLHLQQWDAIDAAIRRIDQRVAEQIERMDAETADGQPPFRELIPRLCAIPGVSFLSATAILAEIGRDMSRFPTAGHLIAWAGLCPGQNESAGKRKSSRLRRGAPWLKTMLVQCAWAAKRAKNSYYSAQFHRLRSRRGPQKAICAVAASILTAIYHMVKSGAPHRDLGADYFDRRAPEAKAKRLVAQLAKLGFAAQLQPLADAA

SEQ ID NO: 383015 - protein, 324 aa, unidentified
MTVTNQFAAHVGLDWADKKHDVCVQFKNGERVFHVIEHTAEALDAWLTELHQKVKGRIAIALELKKGPVVYALQKYPFITVFPVHALSLARYRQAFSPSGAKDDPQDAEMALELMLRYPQKIKAIEPDNADIRLLQQLVEQRRQLVEDKRRFVNRIINTLKQYYPQPLEWFSHRGSLLLCELIIRWPSLQQLKRARRDTIRNFLNAKGGRAMALTEQRVVSIDNAIPLTTDPSVIEANALMATALATQIKVVSEIIKTYDERIETLFDTLPDAGLFKSLPGMGPCMGPRMLAALGDNRDRFNSAEEIQNYAGIAPVTERSGQKS

SEQ ID NO: 383016 - protein, 386 aa, unidentified
MPRQDDLSRSLVALQQDSTLIAVVELSQSSWLVAGIVPGLARHPLKKLEPDQEALLRLLRRWQEEATEAGRTVTRIAVAFEAGRDGFWLARWLRARGVEAHVIHPTSVAVSRERRRAKTDRLDTELLKRAFPGWLRGEPGHCSMAAVATLEEEGARRPNREREGLVGERARIVNRIKAGLLRLGVRGFKPTLRNAAERLEALRTPEGAPLPPNTLAELRRDMARLRLVAEQIGQVEETRLERLERQPAAGQNATARLLARVVGVGIETADMLAHGILSRGLRHRRAVARHAGLTGSPDESGSRRREKGLARSGNARVRRGMVELAWRFPLHQKDSALARWYRARTADARSGTRKTLIVALARKLLVGLWQLATTGKLPEGLVLRPA

SEQ ID NO: 383017 - protein, 353 aa, unidentified
MYYSGIDLHKDMSVITTINENGAILSQRKVPNHEAHIITYFNQVSPIGTDHKAVVESTANWYWLSDLLIGQGIDLTLAHAKYLKAISYAKVKTDKVDSHTLANLLRMDMVPEAHQISQDLRPIRDLMRARLSLVVKKTSCRNSMHRLLAKYNLKLPRYPRPSDFALLKSHLLPEPKLQLSILEEQLNLIVRQIKSLEQSIQPKLIPNPDIQRLLYIPGIGKILAFTIYLEVDGIERFASVNRFFSYCRLVPGANNSNKTIKHKTSKDGNKYLKMAFMEASVRAVQYFKEIKSFHQSKARKKHKNIAKALVAQELARITHHVLKTQTDFNHMFRGVPLSRHKTTKWPRLASPDA

SEQ ID NO: 383018 - protein, 381 aa, unidentified
MTTTAPHNANSNIADVPLFVAFELSEKTWKLGFTTGHGHKPRERSIPARDQERVLNEIAQAKRRFGLPATAPVVSCYEAGREGFWLHRFLLAQSLTNHVVDSSAIEVSRRQRRAKSDGLDVRKLLSMLMRYHQGERHVWQVVKVPSVEAEDQRHLHRGLETLKQERASTTTRLKGLLSSQGIRLTSLTNVPDQLDALRLWDGSPIPLGLRRRILRVYAQHTFLSQQIAEVEAERRTQLQTSSEASIAKVRQLMLLKGIGINGAWLLVMEFFGWRAFKNRREVGGLAGCTPTPYQSGESAREQGITKSGNRHVRWMTTELAWSWLRFQPDSTLSCWFRQRFGNGGKRLRRIGIVAVARKLLIALWRFLETGELPEGAALKVG

SEQ ID NO: 383019 - protein, 332 aa, unidentified
MWYVGIDLSWRSAVVAAVDDESRRVAPRSLKCSDEDGVVEFFRAHRPFKAVIEASGTYRWLHDLLSPEGEVVIAHPLRLKAIWSGRAKTDKIDARVLADLLRADLIPESYVPPERYQALRDITRSRARLVREHVHARNSLKMLLARHNVRSPWKTPFGVRGLRWLAELELPAVSALARDELVERARYFDSAISRVDAELSRVAEDFPETEAIIDIHGIGLYSALLIVAELGEPWRFTNARQVGAYTGLTSRVWQSGSREVRGSISHQGSPWLRWILVEAAMKVVRRDEALKRFYLRVKRRSGFRRARVAVARKLAEICWKRLRAWYGKRQAA

SEQ ID NO: 383020 - protein, 340 aa, unidentified
MDCIGLDLHKRDSQLCVLTEAGEVIERRVRTDPARFAAVLGGRPAARILLEASTKSEWAARCLEELGHEVVVADPSYAPVYATHARNVKADRRDARALAEACRVGAYRQAHRLSEARRHVRAELMGREALVRTRTRYAILIRTLTRRDGLRLPSGSAEHLAARAAALAMPDALRAELVPLVALLAPLQAEIDAAGRRLAALVAAGPVMRRLTSVPGVGPVTAAAFVAALDDVGRFGRAHEVEAYLGLVPRERSSGERQRRGAITKAGNPRVRWLLTEAAWNVLRSRRPEAEPLRAWARRIAARRGAGVAVVALARRLAGILFAMWRDGSAFGQRRRRAAA

SEQ ID NO: 383021 - protein, 345 aa, unidentified
MEQDMKQKVNNVGIDLAKNVFHLVGTDTRGTILWRKRLARNALMPFMAQLPPVTIGMEACGGSHYWARQFRQQGHDVKLMAPQFVKPYVKSNKNDMRDAEAIAEAVTRPTMRFVPIKEVDQQDIQALHRIRARLMKERTALINEMRGLLGEYGIVLPKGVTQLRKGLLGKLEEEQAKLTPLIEELFHRLFNELVKLEEQIAYYDAKLKAMATSHPECLRLLTIPGIGPLSATALVAAMRDASAFKNGRQFAAWLGLVPRQHSTGGQTNLLGISKRGDSYLRKLLIHGARATLRWADLKTDRRSQWIRELIARRGSNRAAVAVANKNARIVWALLSRGGVYQEAAD

SEQ ID NO: 383022 - protein, 343 aa, unidentified
MDYFAGLDVSVKDTSVCIVDDAGRITREVKVASEPDALLAVLTNASHRFKRIGLEAGPLSQWLFSALAEAGLPVICVETRHMRAVLKAQINKTDRNDARGIAQMMRVGLYRPVHVKTLRSQKLRMLLTHRKLLQSKAIAIENDLRATLRNFGLKVGMVGAAKFEARIKELVENLPDLSVLVEPLLVVRRALREQIGVLHHRLLAVVRDDEVCRRLMTVPGVGPVVALTYRATVDVPARFRKSKSVGAVFGLTCSRDQSGERDRPGAISRCGDEMMRAMLYEAAQAMLLRSAKWSWLKAWAMQIARRRGMKRAIVALARRLAVIMHRIWADGTEFRWTRKVAVA

SEQ ID NO: 383023 - protein, 339 aa, unidentified
MTEITRVGLDLAKNVFEVHAVNAQEQVVVRRSLRRSQVLTWFAKQPLCLIGIEACGTANHWARELTTLGHTVRLIPPAYAKQYVRRNKNDAADAAAICEAVSRPSMRFVPIKTVEQQADSVTHKARQILIKQRTMAMNSLRSLMAEFGIVVPPGPQHIGKLLAILADPEDTTVAAVARTALNTMSELLSTLEMQIGILDKDIRARARTDVTARRLDTIPGFGPILSSAIAAIVTDPRHFDSGRDFAASLGLVPRQDGTGGKVKLGPISKRGNGYLRRLLVNGATAVLNGKNARNDPWRAKMLDGKPRKLAAVALANKMARIAWAVMTRQEDFRPRAVPA

SEQ ID NO: 383024 - protein, 398 aa, unidentified
MITSDVDIFLGLDVGKTDHWACAVTKDGTKIWNKTLPNDEAKLVSVYQKLMTQGTVLVVVDQPATIGALAVAVAQHLGIPVAYLPGLTMRRIADMYPGTAKTDEKDAFIIADAARTMPHTLRSIQVSDEDEATLGMLTGFDLDLARQITQTSNRIRGLFTQIHPPLERILGPWLEHDAVLEVLASWPTPAQLKHAGKARIDAKLKKQGARRHTAWAGAIMDALYEQTVVVVGTDAAGLVIPHLARQLISLHAQRVDVATHLETMVEAHPLYQVLTSMPGVAVRTAAIIIAETSGKTFPSAAALSSYAGLAPTTRQSGTSIKSERVSHSGNKRLKRALFLSAFASIRFDPTCRAYYDRKRAQGKRHNQALIALAHRRLTVLFAMIRDGSLYDVPELKIA

SEQ ID NO: 383025 - protein, 346 aa, unidentified
MDTETGDCGEQRLQHREEAEKFYRDLAAQGMKVRVGMEASGHARWFERLLAELNIELWIGDAAEIRTKRVRKRKTDREDARLLLRLMREDRFPQIWVASWENRDLRQLLWHRHRMVQARTRLMNQLQAVALNEGLRCKKKLWREHGREQLESFRLAPWASRRREDLLKLLDQLNPTIAELTQAIEQEAENCPEAGRLMTHPGVGALTALAFVLIIGRAERFQCGKQIASYLGLVPLEDSSGERRRLGHITKQGNALLRFLLVEATQVTVRTIPQWRSKYFHLAMRRGRKIAKVAMARKLAVRLFWMMRQEWNYEQVQKFGSHVGQPENRHGVQENTELLTGASRSS

SEQ ID NO: 383026 - protein, 411 aa, unidentified
MLEVKVERCAGIDVGKKFLAVCIMIGLAHQKPTVEVRRFGTNVMELERLRVWLKEMGCTEAVMESTGSYWKPVYNVLEGTVKIILANPMHVKVLRGKKTDSKDSRWLAGLLRHGLVEGSFIPPRDIRELRDLTRRRRTLLSDGAAERNRVQKILEDANVKIGNVLTDVFGVSGQAMLEALVEKKLNAAEIAELAHGRLRQKMPQIAEALEGHRMTDHHRFLIGQCLKHMQYIDEMIGDLDKQIQEKLRSYSKQVQLACTVPGIAPVAAASILAEIGMDMSPEGPFPDCHHLASWAAICPGNNESAGKIKSGHTRRGNRWLRATLAQTALAGAAKKNSRFQTRYQRLKLRRGAQRAATAVAHAQLIAIYWALRMGTSYQEQLRQTEDQRRDDQIRHHLRQLTKLGYQLEQGS

SEQ ID NO: 383027 - protein, 346 aa, unidentified
MKIIGCDFHPSWQQVAIFDSSTGEVVEQKLVHGNGEAERLYRSLPVPSLVGLESCGNSQWFVELLEKLGHEVWIGDAAQIRASYVRKQKTDKRDAEHILKLLIEGRFPRLWVPDAGVRDLRQLLIHRHKLVEVRARVKNGLQHLAMNRGMQKQSRLWSEAGQKAFQELPLEGWAGCRREDLQRLRALLDVQIGKLDVAAQRAAQDNEGARLLMTQPGVGPITSLAFVLTLGDVGRFQRGKQVASYLGLIPREHSSGGKQHLGGISKQGNRFARMLLVEAAQTATRLDEGFRKQYQHRCHSKPKGVAKVAAARRLAVRLYWMLRSKTPYPEIVRIESSSRVPLDGAS

SEQ ID NO: 383028 - protein, 384 aa, unidentified
MSDTTASSQPTFAACIGIDWGDKKHAWALQVAGSSQVEKGELEHTPEAIQEWVAQLRQRFPAGWLAIALEQSRGPLVFALSKYERLVLFPIHSTSAAEYRKVFRPSGAKGDGPDAALHLDMLVRHRDKLRPLNPDTPETRALQLLTADRRQLVDERTRFCNRLRDNLKSYYPQFLQWFEDPYAPVALDFLQRWPTLEELQKAKPATLRKFFQEHRCTDEAKNETRLEAIRSAVAATTDFAVITAGRAAACAAVGTLATLHESIREYDRQIAQIAKAHPDFAIFSSLPGAGEVLVPRLIAAFGTQRDRYAHASEIQQYSGIAPVTVDSGQQHWVHWRWSCPKFLLQTFHEWAGHSILHCDWAEAYYRAQRDDKNKSHHAAVRSLA

SEQ ID NO: 383029 - protein, 370 aa, unidentified
MSEAIMCGVDVHDNSLVCRVAIGKSEPETKRYSNTVRGRQLLFGNLQGLGRSKGAERVIVGYEASTQGFCLYDDCRDRDVECFILAPTKMRKSRKDRKNKDDDRDAQLILEVLRGYVLAGNELPSIWIPDDETRADRQTVRARLDLGHKLTATKTQVQTLLKAGRVCKPKEVGKGWTKPYRRWLKSLCMGEATWPALATLVRQIEALESEIALLDKAVKRLSETKRYAEPARALVEQIKGVGLLTAMVFLTEMGDLSRFANRRKVGAFLGLVPTSNESGESDDRKGHITREGSGRVRRVLCQASWARVRLDPAESEVYGRIVKRNPKHKKIAVVASMRRLGIRMWHVGLKAQTEAGVFPASESEGVGKAA

SEQ ID NO: 383030 - protein, 391 aa, unidentified
MAKVIIGVDPHKLSATIEVVDRHEKFLGSGRFATDQAGYTAMRNYAKTWPERIWAVEGSNGAGRPLAQRLLESGEHVMDVPAKLAARVRLFDTGHNRKTDARDAHSIAIVAVRTKSLRVLGPDGELEALRMLCDRREELTRLRVQTVNRLQRLLAELVPGQAKKDLTALQAKAILATVRPRDIAGKTRRRIAAEELADLIAVEAKMKKATAELKVLVKARDSRLMDLPGVGPVVAARTLADVGDIARFTDRNRFASWTGTAPLDASSGEQNRHRLSRAGNRRMNHMIHIAAISQIRLDTPGRAYYRRKQAAGKTKLEALRCLKRRISDALYRQLLADAARAALASAPRGDGTGPGGHCGASQESSAVDLPPHIDTSDQPLPGPARTLRPTG

SEQ ID NO: 383031 - protein, 470 aa, unidentified
MAAVMIGVDPHKASHTAVAINAAEEPLGELRVRACAAQAERLLGWAAAWPQRTWAVEGAGGLGHLLAQQLLAAGERVLDVPPKLGARVRLLAVGDVNKNDPNDARSVAIAALRSAGVRGVTPDDHAAVLKIWSRRYRDLGRTRTQVVCRLHAVLCELIPGGVSKAITAGQAARILGSIAPPDAVAAARCELAAAFLGDLRGIDARIRETRKRLALAVQAAGTSLTGLFGVGPVVAAAVIGDVRDVSRFPGRDHFAAYNGTAPIEVSSGPRKIYRLSRRGNRRLNHAIHMAAVTQIRHSHSEGRAYYDTKLAEGQTRKEALRSLKRQVSNAIFACLQADARRAAAQTEGPGGQQGNDSAASAAGLHPRNRLFGQAAPGPGHHTMTAASNPAPGPASARGGAGHSSIAATLPPAKPGSRWSARSEARTNDLEARRDDGHTRAARKAMGPGSLVKPQRRKGTSPAAKRTDGTP

SEQ ID NO: 383032 - protein, 390 aa, unidentified
MNTDGARLASRRLPEGLAGIRGFHELVATHAEEPGHVVVGIETDRGLWVEALTAAGYQVYAVNPLAVARYRDRHHVSGAKSDAGDAKLLADLVRTDRHNHRMVAGDTPIAEAVKVLARGHQNLIWARIRQTNALRSALREYYPAALEAFDDLSDRDALAILGRAPTPAEAAHLSLSKIRSALKAAGRQRNLDTRAQQIAALLRTEQLTAPAAVTAAFGATTRAAVGIIVELNCQIAELETELAAHFEKHPDADIYLSLPGLGVVLGARVLGEFGDDPNRYTDAKSRKYYAGTSPLTVASGKKRAVLARHVRNRRLYDAIDQWAFCALSTSPGARSYYDHRRAAGDLHHQALRALGNRLVGILHGCLRHRTIYNEHKAWAHRQTTHDTQAA

SEQ ID NO: 383033 - protein, 377 aa, unidentified
MSKVRWIGLDVHADTIAVAVAEPGGEVRALGVIPNRPESLRKLVKKLGPAEQLRVCYEAGPTGYVVYWQLTALGVRCEVVAPTLVPVKAGDRVKTDRRDAQKLARSYRAGDLTPVWVPDAAHEALRDLVRAREAAKKDQLRARHRLGKFLLRHGRRPATGITAWTQRHLVWVKRDVHFEQPAQEATLLDYLHEVEHVADRIERLERAIDVAVTTAPAQMRAVIDALQALRGIAKVSAVTIVAELGELSRFARARQLMGYSGLGASEDSSGARTRRGGITKTGNAHLRRIVIEAAWAYRHRPSVGGALRKRQATLNDEVKAIAWKAQHRLHARYHRLVARGKCKPQVITAVGRELLGFIWAIGVTVETAQRTPQSVAA

SEQ ID NO: 383034 - protein, 323 aa, unidentified
MTRTICGVDVASKSLEARIGRQGAAASFPNLPEGIAALAAFCQSHHVDLVAMEATGGYERQAFAQLSAQALPVAILNPRAVRQFAQSMGSLEKTDALDAGMIAWYAEVKQSPPAWLAPPSQLQLRALVTRLRQLTEVRTAQLNQQRLVTDRAVQASFKKLLAVIERQIAALEKKIAALIEADPLWRELDHAFRAIKGVADRTVARLMAEMPEIGALSNKTISKLAGLAPLANDSGQHQGKRRGRGGRAAVREILFIVASVVGRHEPDFAAFQQRLRHAGKPPKVVRIALAHKLLVRLNAKAREVRQRLAAIPAEPVALPAAAW

SEQ ID NO: 383035 - protein, 357 aa, unidentified
MSSENNILNFNNQRFYIGIDVHKKSWKVTIRSGAIALKTYSMNPSSQELSKYMHEKYPGGIYHSVYEAGFSGYWTHRQLEQLGFKNIIVSPNNVPTNAREKVYKTDSVDSRKLARELESGSIKGIYVPDQLHQELRSIVRLRYQIMKSNVRLKNQIKSYLNFYGHKFPENYETKHWSGIFIKYLRTLSFEYTMGKEQLEIYLSELTEKRELMVEIIKRIRHYCQGYGFDKEIQLLMKVPGIGFITAVTIYSELIDINRFPRLDNLASYVGLTPSVRSSADKEKNLGLKMQHNKYLRSMLVEAAWIAVRKDPALTACYNEYIKRMSKQEGIIRIAKKLLNRIRAVLMGNREYVCSVVK

SEQ ID NO: 383036 - protein, 400 aa, unidentified
MLSIGIDVSKGKSTVCGMKPGGEIVYTPFEVQHTREGMSELVSLLRSSGEEVRAVLESTGSYHCPVVAALLENGIFVSVVNSLRMKRFCSQSIRKVKTDRIDAMQIALYGLAYWQELQPTRLPENTYRELQLLARQYYQMTSLLIKAKVDFNALCDQVLPGMQELMSDHAGRHKLSDFVLRYRHTTHILEMGETRFRKDYCKWAEKKGYRNCERMAVLIFATAQNGIPVLPNAPSTQIVITEAIRVLHTVEASRDAILTQMQALAKTLPEYSLVREMPCIGDTLAPRLIAEIGDVRRFHSKRALIAYAGIDAPPYQSGKFCANNRHISKRGNRYLRKTGYEVMQSYVMHKPANDPIFTFIEKKRSEGKSGKLAMVAGLNKFLRVYYGKVTELYRSLPAIE

SEQ ID NO: 383037 - protein, 390 aa, unidentified
MYVIGLDLSKYKHDCFIATETGHVIKETFSFNNDSSGFSLFLSVLNSLDPTQEKRIGMESTGHYGNNLMRFLSENNLSFMVFNPFLTDKYRKAFSLRKTKTDKIDAKIISKMLLSVDYQTYSSKSYHISSLKSLTRFRFRLIESRTKLKMRVQNILDLTFPEFPRFFTNIFGVLPLKILKTYPSAEKIASLDPYSSFDELTKDLRGSYSFQKFKCIIDTAKNTIGKSNLINEFELTSTIDIIECLNDQIEKIEAEIESIMNQYNFKLLSIPGIGVLSAAVIISEFSDFSLFKGPNQLLSFAGMEPSVSQSGTQSFTGHMVKRGSPHLRYTLMNVAMTIVNNNKVFSDYYYKKRNEGKYHRVALSHVVKKLLRIIYYLETTNKEFDANLIK

SEQ ID NO: 383038 - protein, 339 aa, unidentified
MDIAVLGIDLGKNSCSVVGLDGSGKVILRRRMQRKTIMELASKFSPCIVAMEACCGAHHLGRVLSAQGHTIRLMSPEYVRPYVKAQKNDDRDAEAIAEAATRPTMRFVTLKSEEQLDMQTLHRARDRAVGERTSLMNQLRAILLERGIIMPQGRAKLRLRVTALLRQGTEELSARIRLLIDDMVKRWQALDERIAAFDSEFAAEVKHNEAARRLTSIPGIGALNATALVAAVGDAQTFTRGRHLAAWLGLVPRQATTGGKPRLLGITKRGSKYLRKMLIQGARAALPTLSRSNTRLGQWLRGLLARAHSNTVAVALAAKMARIVWALLRYGTTFKLRAV

SEQ ID NO: 383039 - protein, 345 aa, unidentified
MVGPNVFVGCDLSDKRASLCVVDARGRVIGRADLRLRERELSAWFSRQPRARVVLEVGSHSAWVSRLLRRLGHEAIVANPRRVELIARSQRKTDERDAELLARLGRADVTLLAPVQHRSEQVQLDLVTIRSRDMLVKTRAKLVSHLRGIVKPFGARIPRATPPVLPDRAEAAIEGPLQQALQPILECLRLMNEKVKLYDRMVEQRARDAYPEAERLSRTLPGIGPVTSLAYVLTIEDPTRFKKSRAVGPYLGLTPRRRQSGQRDPEGHISKAGDPLLRRLLLQCAKCVLRRCPDSDLQRWGRGLAARGRKAAANRAAVAVARKLAVLMHKLWVSGEEYRPLRAAA

SEQ ID NO: 383040 - protein, 403 aa, unidentified
MYAVGIDVSKCRSTVAVLEPLGKTVAKPFEVRHTKSGMNDLVNYLNTLGGECRIVLEHTGRYYEPVVRWLSGAGLFVSAVNPKLIKDFDNNSLRRVKTDKADARKIGRFALDKWHKLRQYTAMDNIRTQLKIMNHQMSFYQKQQTAYKNNLIALMDETYPGANKFFTSPKRADGSEKWVDFIEKFWHADCVCNLSLKSFTEKYQKWCKKHGYNFQPDKPAEIYNASKELIPILAKDDMTKLFVQQAVTQLNAISKAVEELRQQMDSLASQLPEYPVVMSMFGVGTTLGPQLIAEIGDVHKFTKRSQLTAFAGVDPGVNESGDYAQKSVHTSKHGSPYLRRTLFLIMEVLIKNQPEDDPVYRFMAKKRDEGKPYYVYMTAGANKFLRIYFGKVKEYFNNLPPEE

SEQ ID NO: 383041 - protein, 359 aa, unidentified
MKTQRNEISFKGQSIYVGIDVHLKSWSVAVLSQTSVMKKFRMDPNPEGLKTYLTNNFPEADYYSVYEAGFCGFWIHDRLTSLGINNIVVNPADVPTTGGERLRKTDAVDSVKLARNLRANELKGIYTPDAASLEIRSLIRLKNSITKDMTRQKNRIKSTLRYLGVEIPKEYTEPFSNWSKRFILWLHEVQMNTPSGRDALNLQIEQLEALRKQKLMMTRKLRALGRSDKFKDDLDLIMSVPGIGMTTGMALLAEICDVSRFTDGAHLAAYIGMTPMCHSSGEHDGTGDITIRKNAIMRCNLIEAAWVAIRQDAAMNLYYTECCRRMVASKAIVKVARKLVNRIYYVLKRRKKYVNNVVS

SEQ ID NO: 383042 - protein, 416 aa, unidentified
MKIVRPICCGMDVHKNIIVATIGITNKKTRITEYIQETFSTLNPDLLNLKQWLINHKCFDACMESTGKYWIPIFNILEDEINIYLTHPKYVKAIKGKKTDKKDSKWICDLFKHDLIKFSFIPPKEIRALREISRYRYKLVGMRSSERNRYQNCMTVSNIGIGSVFSDPFGKSAQAIMKEVLESDIIEDEKILKCIHRSCKNKDKILDSIKHCNIETDQRFKMNESMTHMEELQVHINNCEIEMMKRAAPMFDRFMHITQLPGISTLSAILIISEIGVDMKQFESDKQLTCWAGLAPANNESANKKKSVRISKAGQYLKPLLVQCALGAIKDKEGYFGIKYSRIKKRRGHKKAIIAIARMMLVSIYHMILTGETFNPSDYESFKNPKPPIKQQVLTEESAIEFLKKSGFDVSKLTKP

SEQ ID NO: 383043 - protein, 366 aa, unidentified
MDEITYVGLDAHAQTTAIAVAEGGGAAPRFIGTAGARFAELTKVLGKLGKPGHLRVFYEAGPCGFAMVRQLRQAGYHCEVVAPSKIPRKPGDRVKTDRRDALSLAGLARAAQLTFVTVPDERDEAMRDLSRARVDAVRARLKARQQLKALLLRHDRRYTGKTSWSAAHERYLAQMSFAHRAQEIAFVEYRRGIGEAQARVELLTQALSQELVGWRMRPLVQALMTLRGVDELSATSLVAELGEMKRFAHPRELMGYLGLVPSEYSSGQKRALGAITKTGNSHARRLLIEAAWNYRFPARITLPLQKRQEGQPAAIRDIAWRAQLRLTQRYRRLTARGLQHNKVCVAIARELAGFVWSISQQVSIAN

SEQ ID NO: 383044 - protein, 329 aa, unidentified
MATFTVLLKGQIIKYKGTKKFQNNCKSFEVFLKWCEKFGDRNILVNFTMEATGVYYESLAYFLFEKKHVIHILLPNKAKKFAESLNIKSKTDKIDSKMLGRMGVERVLEKWALSSKIYRRLRTLSRERQQLVKERGRIKNQFHTEEHKGDLIKTTIRRMKNHIKYLDKQINSIEKEIKTVVSKNTYISKKVEKITTVPGLAFKTVVGVIAETQGFVNIPSIRQLSSYAGYDISIKESGKWKGKARISKKGNSHIRQIMYMPTLATIQNSETYKSFYERLNEKKQNGLISGTAVQRKLLGLIYTLWKNDSEYIENYEMKSTSYKGVKNFG

SEQ ID NO: 383045 - protein, 385 aa, unidentified
MYCLAAETGEIIFLPVKYPHTRDGFHQVLKRLDGISHKDITVIMESTSTYHLKVERFFRENTVCEIVILNPMISKGHKRNLRKTKTDKEDCLNLIDIFFKGEYNFQFQHDGIYVEMQFLSRQIEHLQEGATRTRNRLKQLLTMLNPACFEAFRNDFLYSETGLRFIAAWPHCDMLAGATVDEIAASMASTHNRSPNYYLKKAISVKCFAENSYPSAPQNSVMTACLSETALYLLDQQIEINRLKERLVALASTTDLYELFCSIPGIGPYLSAALIAELKDIRRFDNHKKLIAYCGFDPTIIQSGKSVHYNGPISKRGNSTARKVVFYTVSTLLIVARKINPQMPLLLYYEKKRGEGKHHHACIVACCTKLLRILLAMSKQNTPYK

SEQ ID NO: 383046 - protein, 454 aa, unidentified
MRRKKANTKADIDSGFPLLRPNAAGLDVGSREHYVAVPVGRDTRSVRSFGCTTSELKEMAEWLKTCGVDTVAIEATGVYWVPIYEVLEDAGIEAFLYDGRQTRHVSGRKTDVLDCQWSQKLHSHGLLTRAFRPDKQIATLRSYWRQRGGIVESCARQIHLMHKALEEMNVQLHKAVTDITGVTGMRILRAIVAGERDVHALAALRRGRIKATTEEIARALEGTYRQEHMFALAQALEAYDFFQRQLADCSQALERHLAQMRSGSDTPPETPPPKQRKNQPNFDLRNELARIAGVDVCLIEGIDAMTAQTLISECGTDMTAFPTEKNFASWLGICPNNRKTGGRIRSRRSRRVKNRAATALRMAAQTLYKSDSALGSYFRRMKARLGAGKATTATAHKLARLYYRLMKHGEAYVTQSQAEYEALQRQRTLKSLQRRARHLGLQLVDTSTGELLDA

SEQ ID NO: 383047 - protein, 389 aa, unidentified
MHAAGATPVAYLGIDVGKSSHSACALDAGGGVAFRAELANRPDDIDRLLERAGSGALVVVDQKRNIGALVLARAHAHGNPCAYLPGYAEKQARGMFPGIAKTDAIDAEVIARTALGVPGALRPAPEEPEGAASLRILSSQREFASSARTRAKNRLRATLLEADPALEGQIDPSSRWQVSLLAEFGGAAGCSAAGWRRFSRAAGRAGAPSAGARRLWEALLASSRSGRRLPAGEDVAVRMLAREIASLDAEIEELDSLVADSLAGDEVYECLLTVPGIGPKTAAALVTSVDISAFRGHDELASYCGVAPSDRRSGTSVRSTSPQRGGNRRLKNLLIFSCNSLIGTDNRFGRYYGECRARGMRHGKALKAVARKRLKVIYAIMRDAVPYAA

SEQ ID NO: 383048 - protein, 350 aa, unidentified
MSLKLNSEIAVIGIDIGKNSFHLVGQDRRGALVLRQKWSRGQVEARLANLPPCLIGMEACVGAHHLSRRLQALGHDTRLMPAKYVRPYSKGQKNDFRDAEAIAEAVQRPTMKFVATKTVEQLDLQALHRVRERLVSQRTGVANQIRAFLLERGVAVRQGLRFLRTELPMILGSRADVLSPRMIRIIEELAGDWRRLDERIDGLSNEIEALAHQDAACKRLMTVPGIGPIISSAMVAAIGNGGAFSKGRDFGAWLGMVPKQTSTGDRTILGPISKRGNRYLRVLFVQAAWVLLVRVKNWERYGLKAWIEAAKKRLHHNVLAIALANKLARIAWAVLAKEREFECKVRAIAS

SEQ ID NO: 383049 - protein, 367 aa, unidentified
MKDSSTVVGLDVHRNSIQMVTADTDGAMEVRHFGRIGGPMDALDRAVRKLVSRGSTLRFVYEAGPCGYEIYRHLTGKGFSCKVIAPSKTPKKSGDRIRNDRRDAETLARLERAGELTGIYVPREEDEAMRDLTRAREDAVKAQKTARHQLNAFLLRYGKRYPGKGSWTPAHMRWLSDIALPHPSQQIVLQEYITTVRVCTERTTRLTDQIAKLLPEWRLNPVVKALQALRGVAPIVAATTLAEIGDLSRFENPRQLMAYLGLVPSEDSSGESTHRGSITKTGNGHVRRALIEAAHAYGFPARVSRHLLKRQEGLPEPVRAIAWKAQVRLCGKFRRLMARGKLKNKIVTAIARELSGFMWAIAREVEV

SEQ ID NO: 383050 - protein, 455 aa, unidentified
MKHEPEEIPDAEHELVIERVAAVDVAKASGKVCVRLPGKAGRRVSRVWDVAATTAAVTELAEDLVELGVERVTVESTSDYWRIWYYLLEAAGLEVQLVNARDVKNVPGRAKTDKLDAVWLAKLTEKGLLRPSFVPPTEIRRLRDYTRLRADLTHDRSRQVQRLEKLLEDALVKLSTVATDIIGVSGRAMIEALIAGQRDAKVLAGLARGRMKTKRAALIEALSGRFDDHHAELARMLLDQIDALTAQIDTLTARIEQLLAAMPEAQPVDPRRDGPTSGHPVGVTADTLAECARLTTVERLDEIAGIGEHNAQVIIAEIGLDMSRFPTPAHLVSWAKLCPRTIQSGPVTRGGHSGKGNPYLKGVLGDAAAAAAKTNTFLGQRYRRIVKRRGKLKALVAVARSILVIVWNLLNDPTARFHDLGPDYHTNRIATERRMRNHIAQLTAMGYRVTLEPAA

SEQ ID NO: 383051 - protein, 337 aa, unidentified
MNSPAPVYRLFVGVDIAARSFAAAWSAHRSPPERAHTFAQTPDGFAAFQAALASSGVEPAQTLLVLEATGSYWITLAVTLHQAGYAVSIVNPAQVHAFARSLPRRAKTDLLDAQLLAQFACERQPPCWVPPEQVYHELRQRLLVRDGLLTMRGQARNQRHALSQWPVHIASALDQLDAVIADLDTRIATLEAELTTVLRDGAWAESAALLGSITGIGLVTTAWLLVATLNFAGCASAESAAAYAGLVPLAHESGTSVRNRARIGHGGHARLRTALYMATLSAARCNPLIRAQYQRLRAAGKPKKVARCAAARKLLHLAYAVVTKREPFDPDYGKAQG

SEQ ID NO: 383052 - protein, 350 aa, unidentified
MEHHAGLDVSLKETSVCIVDGAGKIIRETRVASEPEALVGYFSSLEIKVVRIGLEAGPLSQWLYAALTQAGFEVVLLETRHVKAALSAMTVKTDRRDARGIAQLLRMGWYRPVHCKTLPSQEVRAIITARKTLLGKLIDIELSMRGILRGFGLKVGSVTRKSFEIRVRELMAGQVTLTTIMEGLLNARATLVAEVTKLHRELLAIARADEVCRRLMTVPGVGALTALTFKTAIDDPTRIAKSRDVGPLFGLTPGRYQSGETDIIGKITKVGDVMVRTALFEAATVMLTRTTKTSRLKAWALDLVKRRGTKRAIVALARKLGVILHRIWVDGSTFRCAKEGAAMPALITAK

SEQ ID NO: 383053 - protein, 402 aa, unidentified
MDDIDDVGVFLGLDVGKTAHHGHGLTPAGKKVFDKQLPNSEPKLRAVFDKLAAKFGTVLVIVDQPASIGALPLTVARDAGCKVAYLPGLSMRRIADLYPGEAKTDAKDAAVIADAARTMPHTLRSLELTDEITAELTVLVGFDQDLAAEATRTSNRIRGLLTQFHPSLERVLGPRLDHSAVTWLLERYGSPAALRKAGRRKLVEVIRPKAPRMAQRLIDEVFDALGEQTVVVPGTGTLDTVIPSLARSLAAVHEQRRALEAQIKTLLEDHPLSKVLTSMPGVAVRTAAVLLVTVGDGTSFPTAAHLASYAGLAPATRSSGTSIHGEHAPRSGNRQLKRAMFLSAFAALHDPASRTYYDKCRARGKTHTQALLRLARHRISVLFAMLRDGTFYEPRTPETAPA

SEQ ID NO: 383054 - protein, 311 aa, unidentified
MNSPAWFVGIDVSKGTLDVFVRPSGEAKTFVHTEEGLAQMADWLQSFPQALIVLEATGGWEMGAVRILVARGLSPVVMNPRQIRDFAKATGILAKTDKIDPQVIARFAEAVRPEVRPLPTLEAQELEALNARRRQIVEMLTAEKNRLSLAPRWIRKEIQAHIRWLEKCLEKVNKELKDRIQKSPLWREKDEILRSARGVGPVTSTTLLCDLPELGSLNRKQISALVGVAPLNRDSGLFRGRRMIWGGRATVRSALYMSTLVAIRFNPVIRAFYQRLRAAGKPFKVAATACMRKHLTILNSMIKYRTRWQTA

SEQ ID NO: 383055 - protein, 341 aa, unidentified
MDISVLGIDLGKNSCSVVGLDAIGKVVVRRRMRRETVITYAATLPACVVAMEACCGAHHMGRALARQGHAVRLMSPEYVRPYVKAQKNDDRDAEAIAEAATRPTMRFVELKTEEQLDMQTLHRIRDQLVGDRTSLMNQIRSLLLERGYIVPQGRAKLALRLGEMLDGDEPVLGSRIHRLVSDMRLRWSALDERIADLDAEFTDAARADERTRRLLTIPGIGALNATALVAAVGDARTFGRGRDLAAWLGLVPRQATTGGKPRLLGITKRGSRYLRKNLIQGARASLPVMSKSDTRLGAWLRGLLSRSHHNTVVVALAAKMARIVWALLRHERTYDPVAQAA

SEQ ID NO: 383056 - protein, 405 aa, unidentified
MNAVGIDVSKGKSMVAIMRPFGEVVTSPYEIAHAGSELNDLAASLKKLKGETKVVMECTGSYYQPIAYALQEAGLFVSAVHAKLIHDYGNNSIRKVKTDKADAIKIANYGLSNWMDLPQFVPEEDMRIMLKTFSRQYSKYIDLKTMLKNNFIALTDRTFPGVNELFTSPARKSDGHEKWIDFALKFWHCECVCGLAPKEFANRYQKWCKKEGYRFSSEKADDIYTSSCGHCSVMPKNDTSKLLVTQAIGQIVAISENISIIAREMKQLAESLPEYPVVSQMFGVGDILGPQLMAEIGDVFRYRNKGALVAFAGLEAPPHQSGKFESSNRSISKKGSPHLRRTLFQIAKVYLQHVPVDEPVYQFIDRKRAEGKHYYNYMTAASAKFLRIYYARVKEFLLSHDQDLA

SEQ ID NO: 383057 - protein, 464 aa, unidentified
MMAGKKLWRNRKERKEWARRLQSEDPGLEVVHAHAAGIDVGNSAHYVAVRPDRDPEPVRRFECFTADLHRLADWLQSCGVKTVAMQSTGVYWIPLYEILEERGLEVYLVNARHTKNLPGRKSDVQESQWLLKLHTYGLLNNSFQPVSEIRVLRTYWRQRGEHVRGAATCIQRMQKALTQMNLQLANVISDISGLTGQAIIRAIVAGERNPLKLAALSDPRVHASQEEIAKSLEGNWRPELLFVLQQEVDMFDTYQKRIAECDQRLQKHLASLTHPLQVQPSMQKPKTKKPAAKNAPRFDLSSELQRVTGVDLTRIDGIDVMVAQTLLSEVGLDMSRWKTESHFASWLGLCPDNRISGDKVLSRGTRRVVNRAATALRQAANTLMRSRSYLGAQYRRLRTKLGAPKAITAMAHRLARLVYRMLKYGQTYVDKGTDYYEERFRQQQIQLLRKRAAKLGLQVSEIHA

SEQ ID NO: 383058 - protein, 340 aa, unidentified
MRELYAGSDLHGNNNLVGIIDGEGKKVFKKRLPNDPQLVREVFEPYKEEIVGIVVESTYNWYWMVDALMNEGFRVHLANPAAIQQYSGLKHADDKHDAFWLAEMLRLGILPEGYIYPKEERPLRDLLRKRGQLVRLRTSLILSLQNMLSRNLGVRVRVNDVKGIREDRGSGLLGGDEDLALAGRVSKETIDFLTHQIHQIEGVVEKRVRLQEAYRYLLTLPGVGKILSLTIMLETGPISRFATVGEYASYCRKVPSQWTSNGKKKGCGNSKNGNKYLAWAYSEASDFARRDYPEPRAYYQRKMRKTNAAVAHSALSHKLARAAYYVMRDQVPFRPEKLFR

SEQ ID NO: 383059 - protein, 452 aa, unidentified
MAKRSKKRCKQLPILHPHAAGIDVGASELFVAVSADRDPQPVRSFPTFTRDLNALADWLQQCGIRSVAMESTSVYWIPVYQILESRGIEVCLVNAQHVKNVPGRKTDVSDCQWLQYLHSVGLLRASFRPPGFICAIRSLWRHRSSLIQMAAEHVLHMQKALDQMNLQIHRVLSDITGISGLRILDAILSGERDPVTLARLCHGGVKNSEDTIAKSLEGDYRPEHLFALRQSLAAFHYYQQLVVEVDQEIQRQLGSLKTAITAEPTVPKRTKASHYQRGRYEPKAFDLRHELYRIFGVDLTNVPGISAITAQTILSEIGTDVSRFRNASAFASWLGLCPENKISGGKVLYTKSRRVRSRLATALRMAANSLHHAKDYLGEFFRRITRKLGKPQAITPTAHKLARIVYHLLSTKEAYNETVFHRCDEEVLRRAQFRLSRQAAQLGVQVIPLQNG

SEQ ID NO: 383060 - protein, 343 aa, unidentified
MDHFAGLDVSVKETSLCIVDDTGRIVREAKVASEPEALLQVLENPAYHFKRIGLEAGPLSQWLFGALAEAGLPVICVETRHMRAVLKAQINKTDRNDARGMAQMMRVGLYRPVHVKTLRSQKLRMLLTHRKLLQSKAIAIDNDLRATLRNFGLKVGMVGRAKFEARIKELVEDLPDLTALVEPLLIVRRVLREQVAILHRRLLAIVRDDDVCRRLMTVPGVGPVVALTYRATVDVPARFRNSKAVGAVFGLTPSKHQSGEVDRTGTISRCGDEMMRMMLYEAAQIMLVRSAKWSWLKAWAMKIARHRGMKKAIVALARRLAVIMHRIWVDGTEFRWTRDVAAA

SEQ ID NO: 383061 - protein, 402 aa, unidentified
MFDTEDVGVFLGLDVGKTAHHGHGLTPAGKKVFDKPLPNSEPKLRAVFDKLAAKFGTVLVIVDQPASIGALPLTVARDAGCKVAYLPGLAMRRIADLYPGEAKTDAKDAAVIADAARTMPHTLRSLEVTDENTAELTVLVGFDQDLAAETTRTSNRIRGLLTQFHPSLERVLGPRLDHVAVTWLLERYGSPAALRKAGRRRLVEVIRPKAPRMATRLIDDIFDALDEQTVVVPGTGTLDVVIPSLARSLTAVHEQRRALEAQISELLEAHPLSPVLTSMPGVAVRTAAVLLVTVGDGTSFPTAAHLASYAGLAPATKSSGTSIHGEHAPRGGNRQLKRAMFLSAFAALHDHASRTYYDKCRARRKTHTQALLRLARHRISVLFAMLPDGTFYELRTPETAPA

SEQ ID NO: 383062 - protein, 412 aa, unidentified
MAMEALVERCAGLDVHQASVVCCILLGPPGCRPRKLLRTFGTTTHELGKLRAWLAEHGVTHVGMESTGVYWKPVYAALEGHFDLTVGNAHHIKNVPGRKTDVKDAEWIARLVRHGLIGKSFVPPPPIRDLRELVRFRRALVEARTAERNRLLKLLEGAGVKLAGVASDVFGVSGTAMLKALAEGAAEPAAVADLARGRMRRKLEALAAALDGQVREHHRFLIAVQLRRLEAIARDLGELDARIEAQLEPFRAQHRLLMQIPGVDRVVAAGIIAEVGVDMDVFATAQRLAAWAGVAPGNHESAGRRKGAATRKGNVFLKATLFAAASAAVRTKGSYYRDKYHRLRARRGPVRALVAVAHKLLIAAFHMLRTGSPFRELGEDFLDRVSRKRSTTKLVRRLAALGYDVLLVPKAA

SEQ ID NO: 383063 - protein, 418 aa, unidentified
MRKIRNKKRIFNEKTILATVDIGKEYNYGYIRCYDGAEVAPFKFQNTYRGFTIFWHAIESIQRDKHVPDIIIGFESTGCYGMPLIHFLHDKPVTLVYVNPKHTKKVKEISDNSPNKHDKKDPKVIADIIELGNWLRVVVPCGTAADLRELVHARDGELKLLTELYNKLHAHVFRIFPEFQRVFTHLDTKTAHYLLTHYPTPEAIVSLGVEKLADIIHLKSRGRMPRDRAKHLYQYALTSVGIKEGQHCVADRIHRLLHIIEEHEQWVAIYEQRIAHVLSRVPESHLMLSIKGVGPITAAGLIGEIGNFHDFSSYAELEKFIGLNLYEVSSGKRRGQKRIAKRGRPLARKLLFFAAINVVRQGGIYHAHYQRYVARGMKKIKALTAISRKLLRLIYALVHHQCEFDLQYFQKQHASNAA

SEQ ID NO: 383064 - protein, 419 aa, unidentified
MERSRSKVCGIDVHKRFLVATILERSGPKKTEKFQNNLEQLLKLREWIITEQCQAVAFESTGEYWVSLYDVLQGYVEIIVANSYHIKWIPGKKTDTIDAEWIAELALNDLISPSRILSKEKRDIRALTRLREKLVNERTDHKNRVHKVLDSACIRLSAYFTDLFGKSGLRILKCILAGVPPEEVVRKLPKRLHTKSDAILDAIQTQLSAHQLLQLQTSVTMIDLLTDKIKDLEQTILNDMQKDRRKLQILMSVPGIGTIGATTLLAEIGEVNDFSSPDKLTKWVGITPRVYQSANTLHTGSITKQGSKHIRWILVEIAHSCIRTKDTALRIFFDRIFNRSGYKKAIVALARKILKLVWHLLTNDELYQETDTLLTKSARLPNPHEAKSFSVSAAIELLVKAGFQIINGDEHHTKSDLGT

SEQ ID NO: 383065 - protein, 313 aa, unidentified
MDPISVGIDVSKATFVVAVTPTGERWASDTTATAIDALVTRLQGLTPTIIVVEATGGYERALVAACAAAGLPVAIVNPRQVRAFAQALGHTAKTDDIDANVLATFGARVQPPPRALTDAATQALAALVARRRQLIEMIGMERQRLEQAPPTGRITRDLRNHIRWLERRVSDVDDEIGTAIQASPVWRVHEDLLRSVPGVGPITARTLLAELPELGTLDRRAIAALVGVAPFNCGSGQHRGQRHIWGGRASVRATLYMAAVSAARHNPALAIFYRRLRTAGKPTKVALVAIMRKLITILNAMLKHQARWNAATA

SEQ ID NO: 383066 - protein, 368 aa, unidentified
MTRKTFPPRRQLLSRDIKYIGMDVHKEAIVIAVLNGSGKLVMETIVETKASSILQFIHGLRGELHVTWEEGTWAAWLYDLLQPQVEQVLVCNPRRNALLKEGSKSDQVDAQKLADLLRTGMLRPVYHGENGLRTLRELGRSYQTISKDLTRVMNRLKALYRGWGIPCAGTQVYGPRYREQWLNKIPQAGVRRRAELLYQQLDGLQALRRHLRPEFLAESQKHKASKLLRQIPCIGPIRAARLIALMQTPHRFRSKRQLWTYSGLGIETHDSAQFRFVSGQLQRSRKPQQIRGLNRNHNHEMKEIFKSAATRASWGRGPFHDFYAGLLAKGMKPEMARLTLARKIAAITLTLWKKEERFDAEQLKPQAA

SEQ ID NO: 383067 - protein, 292 aa, unidentified
MEHELHYIGIDTAKEKLDVDVLRPDGRHRTKKFANTTKGHDELVSWLKGHKIDHAHICIEATGTYMEPVAECLYDAGYIVSVINPALGKAFAQSEGLRNKTDTVDARMLAEFCRQKRPAAWEAPHPLERALRALVVRHQALTDMHTQELNRTETAREVQRPSIDAHLLWLEAELKRLEKQIKDLTDDDPDMKHRRKLLESIPGIGEKTSAVLLAYIGLKDRFAHARQFAAFAGLTPRRYESGSSVRGASRMSKAGHVSLRRALYMPAMVATSKTSGDGRSATVWRLMARKER

SEQ ID NO: 383068 - protein, 458 aa, unidentified
MTLGIDLACRAAHVASLAGPDGALIWRGRVLFTRPADLDKLWRDIDCPPGELTVVMEPTRNVWIIVAAWFRRRGARVVLVPTTQSADLRAYYAKHTKNDRLDSAILARLPLLHPEGLREYAGDGPADPLRRIVKQRSSLAKRRAAIFHRLDAQLELLGPAWYDALGTDYGHATLQFLARYADPNLVIRLGQARLGRFLRRYSHGHWREGKAAELIAAAHQSLQLWDGDGMDFAELAADIAVEAEQAQVLTAQMADLDARIANLYAEADPDGIIRSAPGVGPVIAGVIAGRLGDPHRFTSLAAVRSYAGLVPKVNQSGTSDNPGGLTKAGDPLLREAAWMAAEQARRFDPQLAAKYKRLMAADRHHDSAVCHIATMLLTRIATCWRRGEPYQIRDLDGAPLTMAEGKKIVTEQQQVAKKKSKARQYRATNHKADRELQESQSAPTSRPAKHQPKPPQAA

SEQ ID NO: 383069 - protein, 478 aa, unidentified
MIRSVGIDLSRTGSHQVRCLDEQAKPCDSFSFESTLGGLEAFEKRVFSEGATPTIVFEPTGLSWIPMAAYLRARHPECRLVKAKLQKVAALRRYLRSHAKSDRVDGVTLAKMPFIDAEQLDEAYLPPAEYHALQRLTRQRERLMKGLTTRKNRIGSIINGYLPGLRKAFSNEWSVRARAFYRQRLNPYGVVREGERALETFLTSVKARGALTESHHLYQACQKLVEFYNRSKAAGMVNEGFFDDLQDEIACELRLMETEEAEVERVSKRIEELYRHLHPSDHLRTIPGIGVRTAQVFMALVGDPHRFRSQAAFANWTGVVPGARQSADTEGKGLRMTKAGPSMMKRALFQAGDIARRYDPQLADLYYREMVHHGKTHLQAMGAVMSHLAARILVVLREGRPYELRDTQGRPISDRGARDLIRSEHKVPEETRQARRHRKSNAGRLTVPERARQLSSSFWTDHNLPEGSLLLRRPAIND

SEQ ID NO: 383070 - protein, 390 aa, unidentified
MQAISDRPEAPSAIRTDIGAIFISLELSRSTWLITSLSPGGGGKMSKHSTPNGDISALLARFSEFREKAFARTGKWFPIIVIQEAGLDGFWIHRVLQNEGFESHVVDPASIAISRRRRRAKTDRIDGEALLRGLLAYKRGEPRVCAMVKAPTPEEEDRRRLCRERKVLTNERSLHVNRIKGLLFSQGVSGYEPLRRDRRQRLDDLRTGDSRPLPPHLKAQISRELDRLELLIEQIKAVETERDALLNSVAKTEETPAPPTMLLAIKGVGPEFAAVLWSEGLFRHFDNRRQVASYAGLAPTPWQSGSVDREQGVSKSGNPRLRTTLIQLAWLWLRHQPQSALALWFKERVGRNGGRFKKTTIVAMARKLLVALWKYVTFGVVIEGAVMKAL

SEQ ID NO: 383071 - protein, 310 aa, unidentified
MDIIAIGIDVSKDRLDVAVHPGGEAFVVERNGAGLEQLVARLKPLAPTIVAIEATGGFETIVAGAIGGAGLSLVIVNPAQVRAFARALGQRAKTDPIDAAVIAHFAAATRPEPRPLPDDATRLLSDLVTRRRQIVEMIGAERQREKRAVSRHLRKSIARLVKALEKELVSVDTDIDDAVRSSPAWRDTEDLLSSVPGVGPIISRTLMAELPELGHLNRKQIAALAGLAPYTRQSGQWRGKSFTGGGREPVRTVLFMGAMTARLHNPVLRAFFERLVAAGKPKKVALIAVARKLLTILNAMLRSKTPWQAA

SEQ ID NO: 383072 - protein, 418 aa, unidentified
MSQQSSSSLTPVFIGIDWADRQHDVCIIDAGRSVFQVVKHDPSEIADWLDQLRKKFPERPILIALEQGRGGLIHALQEAEGIVIYSINPKQLASFRDAIYPAGGKSDPKDAELIATFLRNHQQKLRPWQPDDAQTRKLAYLSELRRKLVEERKRLGLRLEGTLKNYFPLVLSFGKTISSLLLELLSKWPTLAELKRPHPKTLRQFLEEHGVRNEEQQTKIVTAIRSAKPLTTDKALLEAHALYVQSLVRQIQELNRSVAQFDEQLKQTLAKHEDEPIFRSAPGAGDTLVPRLIAVFGTDRERYQAAEDVQSYTGIAPITKKSGQSRVVLQRHACPKFLKQTFQEFAEQARRWSSWSKAFYDYKRSRGVKHQAAVRELAFKWVRILFRLWKSRTLYSENVYIEQLRRKQSPLLAFLPNP

SEQ ID NO: 383073 - protein, 343 aa, unidentified
MSNQEQTVTIMKTQIKTNVNDQVIETYIGVDVAKQTLDAYRTHDHATTQFPNSKEGFKQFLKWCKETPPTLVLCEATGGYEKNFVIALAEAEVHFRVVNPARARDFAKSLGILAKTDKLDAKVLAKFAAERKFTPQQIPDETQRRLKELIVWRRQLIATRTTHKNQLEHASYKTIIKGTKSLIEQVNKRIEMVEAEINKLIENDEHWSTINEILQTIPGVGPETARTLIVECPDLGKGDPAELCSLIGLVPFNRDSGKFRGQRSIRGGRSLARTALYMAAQSVVKCVKADNVFKQLYLRITKNRPHKVGIIAVAHKILIIAHSLVKNNVRWQNKLIENVPTPP

SEQ ID NO: 383074 - protein, 438 aa, unidentified
MNKLISKKTVIESSQYVKRNNMEQKFGSYLYCLMKYCVESPIVSIDVSNGNSHYMCFIKNNKRFGKVKKIDHDIEGFKRLLEDIQKLEAETNEKVCAVFEATGVYTKPLERFLSKNSIKTYIINPLESARKRKEEIHNKKTDKLDPISISKVYYDKEEMMELKKKDETYNWLRKKNRLYEDQLNHLRKYKVTFQNQLSICFPGYLDLFKDGYSDIPMTILKKYPHPDLLKNKKAETVARYLEKNTCHTHKVSLEYALKIIEFAKKTYPGCEKDDVEVEIFKILLDKVIETQRECEKTLNEMITVASTLEEYRYISSIDGIGPNLAARIIAEIGDIEEFKSREALVAYAGLDPHIYQSGDQDGKHLKISKKGNKYLRCLLFLAVGCSIRGAKDNPVNRFYQKKKQQSNPLNSKAAKTACTAKLLKIIYGICKNKTTYER

SEQ ID NO: 383075 - protein, 398 aa, unidentified
MVFVGVDIGKDRHAAAAVGTAGEVLMPPRFVTQDAGGFASLSGALGALGGAAGVIVGMEATGHYWKPLRHNLAAQGYRVDVINPLITSREASADVRGRKTDKLDAIAIANVVRRGGYSPAPTEDVQTDATKAFARQRRYLVGRRSDAKRRLAAALDVVFPEAAQMVDDLCGATSLAVIAAFPSARLMAGVDIRKLTSLFAKASRGKLGRAAEEIRTAAQRSVSRTIVNEGEEFIAIQTVEEIRSLSVQIETAEERLLSTAAQPAARILASIKGAGKIQPRVFAAELGDLSRFAGPDMSSKIIAFAGCEPRVRESGTWKGRSKMSKRGSAPMRTALYLMACTCRLHTPYFNEIYKRHIARGKHHNVAISHVMRKIVEVMCGMYKTDTTFAAPQLQAKPC

SEQ ID NO: 383076 - protein, 316 aa, unidentified
MSDASVFVGIDVSKDNLDVAVKPGNESFAVPNTSKGHDELCKRLRPFKPKLLVVEATGGMELDAVIALCDAGIVVAIVNPRHVRDFAKACGQLAKTDCIDAAILADFADKIRPEPRPMPSEETRALDALITRRRQLVDMLAVEKNRLTTARKAMKKDILRHLAFLEKAIGQMDNDLQKSVEDSPIWRVNDDILQSVPGVGPTCATTLMAQLPELGMLDRKKIAALVGVAPLNRDSGYKTGRRIIWGGRAPVRAVLYMSTLVATRHNPVIRTHYEHLINQGKLRKVAMTACMRKLLTLLNAMIRDQSRWQPEMAMPK

SEQ ID NO: 383077 - protein, 336 aa, unidentified
MYSVGLDVHQRRSSLEILDPNGKRVNRLEVRGPWPKLIEQVGRLPRPFSICFEASCGYGHLYEQLARHAEHVAVAHPAQLRLIFRSKRKSDRVDAAKLAKLLYLGEVPQVHVPDKDVRQWRASIEWRQALLGRRVRAKNQLRAMLRTHGLAASAPKSLWSKKGLAWLAEQPLEEFEQLRREMLLDELAEVNRKLALVERHLAKVAARHPGVALLRTIPGVGIRTAEAFVAYVDDVRRFARVGQVGAYFGLVPCQDSSADVRRLGHITKDGPATVRKLLCEAAWQAVRRSPSLRARFERIAGGKPDRRKVALVAVAHHLCRAMAAMLRSGACWSERT

SEQ ID NO: 383078 - protein, 348 aa, unidentified
MQVTTVGIDLAKNVFCLHGCDANGKPVLRKQLSRRQLLSFVANLPRCLVAMEACASAHYWAREIEKLGHQVRLVAPRFVRPFVKANKNDASDAEAICEAATRPSMRFVAVKSTSQQDIQAVHRVRQQLVKTRTALVNQARGLLAEYGIVVAQGVSRLRRALPAILEDGDNGLSGVMRELLAEIGERLRFIDDRLHQYDLTIQRLFRQDERCQRVAAVEGVGPLTATALVAAVGNASDFKSGRELAAYLGLVPRHRASGGRTIMLGISKRGDRYLRMLLVHGARAALRTVERRPGARSLWAARLKLRRGANVAAVALANKNARVIWALLSRAQNYRPAPFSARVPQTGG

SEQ ID NO: 383079 - protein, 410 aa, unidentified
MPSPLFVGIDVSCKDNKVQLLHSDGAEITRFSVPNNHPGAKSLSEKITGVMGKNKFDSLVIGLEATSVYGHPLVYFLRQEPSIKALNPRIHVLNPKQVANFKKAYPELPKNDWVDAWVIADNLRFGRITKEVCMDEKFDALQKLTRERYHVAKNLTREKNRFLSNLFLKFSALAQEDIFSDKFGATSIAIIEDFFSVDDIAYMDVDKLAEFLNKKSKGHFADPHELAETIKKAARSSYRLPKTVNDSVNQVLAVSLVAIKALKKQLETLDKAIETQFALIPNTLQSIKGVGPVYAAGIVAEIGDIKRFPNHAALAKYAGLAWSEHQSGQFKAENTHMIRSGNRYLKYYLLEAANKVRVHDPEFKRFYELKYARTPKTPHKRALALTARKFVRLVYALLHSNRLYTPPKGE

SEQ ID NO: 383080 - protein, 316 aa, unidentified
MNKSKSEPSPAYVGIDISKDALDISLAGESPSRSTNDTAGIAQLVKVLEKLPESAWVICEPSGGYERDLLEALWAAGIVVSLVNAARIRAFARARGLLAKTDQIDAAVLRAYGELLTPAVVAAPSLLRERLSALGRRREQLVEILATEQQRLNQSRNDSVQKMGRQLGKILGKQIAQLDAMIAALIASDETLQKQDARLQQVQGVGPVTSATLLAELPELGELEDKQIGALAGLVPYNRDSGQQRGRRVIHGGRVQVRRVLYMAALTATRYNPILKEFYQRLVAAGKPKKLALTAVMRKLVVLLNRLIKNPKFNLA

SEQ ID NO: 383081 - protein, 365 aa, unidentified
MAEVTRGAAARVGVDLSKRVFQVHAVDRLGHKVLARAMSPERFLAWCAELPSGCLVAMEACGGAHHVARRLRLLGLDARLIAGHFVTPYRMAGKSGKNDANDAAAICEAAGRPHMRFVPVKTAEQQGQLSVHRLREGYKAERTALINRIRGVLQEFGMSFPQSPEALRRVLADVIEDGSNELTGIARLVLQRAQLHWIDLDLQMKWCNERIEVHTRSDARAAKAAQLQGIGPIGASALVASVGDFKQFASAKQFGAWLGLVPSQNSTGGKASLGRITKRGDDYLRTLLIQGAKSAVMTAHKRSDRISQWLVQLKERVGWQKAVVALANKNARILWAVLTRDATFDPNHVPEAPAPHCALSQRPAL

SEQ ID NO: 383082 - protein, 394 aa, unidentified
MILIGIDIAKNQHTFSIIDKETGEILSNPSVFNNNHEGFLLLIKKLSSYAKSNLLIGMEDTGHYHFALLKYLLDNRYTVALINPTTTDLTRKLQGGITKNDPLDSLTICDVIGSNQRKKPYRITKVNRFDLYEQKQLTRHHHNLKEELNIYKNRLQKCIDIVFPEFNSLFCSKYGIVYMSILKTFSSAKKIANSDIRTIRKCFEYNGRGKRITLSAEQLKTAAKTSIGIPSVAEEIQIRHLVCQIEMIEEQLSEIDKKIEEFSLQNNSPILSIPGISHFSGTSILAELGDICNYTKASQIIKFAGVAPYHYESSQFTAQHTAITKKGSRYLRKTLYQIILPVINNNKVFTAYYNKKLAEGKGHRCAQGHCIRKLLRIIYHLLSTGQTFEPALLI

SEQ ID NO: 383083 - protein, 513 aa, unidentified
MATIGIDIGGHTHVAARCRDGQAQAERKILRVSQSRAGFISLDAWLAAEPEPIELVVMESSGHYWMPLAAHLRRSGVPVAVVNPLAARYFAKSRLERTKSDPADARSLAEMAMRDSPPARDPLAGVELRQAARFAMTLVTEQAKVCQKLYRLVELGFPELRELFEDPTCRTARAVLRLAPTATAATRRRTSTLANANGGAGHRRLGQAKAERLVAAAADSIAVPELDAEVSFEVGLLLDQFDLLERQIEAAEARVGELLDGKLARRLRTIPGVGPAIVATLIAEIGDIFRFDDFDQLLAFAGVHPAERSSGRKGVSPETSWHMSKAGNSYLRAAAYRMAVVGVQHNPVIAAHYARKRAAGKSPMNALGHCMRKLSRSSGESGETVRTSTPTGDSRLDKALWDLAAAARGAAVEAFVAAAVADHDRAAVGAGGGIGLGAEGDLGSADAEGVEQRAGAGGAGDRAAPVALPGAVGLAVVGPGALQRRRGGLRGVRRRLRRRRGRHGAWSCHGGRG

SEQ ID NO: 383084 - protein, 416 aa, unidentified
MKLFVGIDVSSEKLDTCYLTDEMVVLLNHTYGNDTQGAWKLKEQVLAFYETYSFDQIVIGMESTSMYSYHPAVNFHQDEQLQAIHAITTIENPHRIKQYIKMFDEDKTDPIDAFMIADYLRIQRYTNSPIKEEKYMALQRLTRTRYQFVRQLVEVKQHFIENLSYKCNTLKKELREAEGSTTVFSAIIMELFTQDLSLDDLANLPLKDFAEWLQTKGRGRFKDPEGLAKTIQRAIRSSYRLDQVVSESVDMILGILVREIRSLEKAIKDCDQGIEDLVQTVPEYQCLTSIPGVGPVYAAGLLAEIGQIQRFPDQASLAKYAGLTWPRHQSGRHEAEDTPLTKKGNRYFRYYLIEAANSVRRHLPEYQAFYRKKYQETPKHQHKRAIVLTARKFVRLVDTLLRNHQLYTPPRSVIEK

SEQ ID NO: 383085 - protein, 401 aa, unidentified
MQETQQHDAIDVFIGVDVGKGQHHAVALDRHGKRLYNKALPNDEAKLRALIAELKTHGRLLFVVDQPSTIGALPVAVARAEGILVAYLPGLAMRRIADLHAGEAKTDARDAAIIAEAARSMPHTLRSLRLADEQLAELTMLCGFDDDLAAQVTQTSNRIRGLLTQIHPALERVLGPRLDHPAVLDLLERYPSPSALAAASEKTLANRLTKLAPRMGKNLATEIVQALSEQAVIVPGTQAATIVMPRLAQQLAALRTQRDEIAAEVERLVLAHPLWPVLTSMPGVGVRTAARLLTEVAHKAFASAAHLAAYAGLAPVTRRSGSSIRGEHPSRRGNKVLKRALFLSAFAALRDPVSRAYYSRKIQQGKRHNQALIALARRRCDVLFAMLRDGTIYQPKSAPNA

SEQ ID NO: 383086 - protein, 400 aa, unidentified
MTAVWAGIDSGKRTHHCAVIDAAGRMVLSQRVANDESALLELITSVLALAGEDHVVWATDLNAGGAALLIALLADRGQQVLYIPGRIVHHAAATYRGDGKTDAKDARIIADQARMRLDLQPVRGGDQISTDLRLLTSRRTDLVCDRVRAINRLRATMLEYFPALEAAFDYSKKAPLILLSGYQTPDTIRRVGTTRLTAWLKKRGCRGSATGAGKAVDASNAQHTVLRTAPVAAQLVAQLAWQVAAIDTEIAQLDEQISERFDQHRDAPILLSMPGFGPVLAATFLANTGGDLNAFETVDRLASVAGLAPTPRDSGRITGNHHRPRRFNRRLMRTCYLAALSSLKNSPASRAFYDRKRAEGKSHKQALIALARRRINVLWAMLRDRTTYREPLPAALSPAA

SEQ ID NO: 383087 - protein, 417 aa, unidentified
MALKIVYPVCCGIDVHKSFVVACIAATDGKGVTTYKQRRFSTFTGDLRLLAQWLVDNQCRDVCMESTGKYWIPVYNMLESTCKVVLAHPKYVKAIRGKKTDSRDAKWIADIFKHDLISGSFIPPFAIRQLRDLMRYRVKLTSFAVGEKNRAQNCLTVSNIKLDDVFTDVFGKSASAITDQILLHPDGNFDVMPFVDRRCKASTEKIQAAVDGLLCSEQAEKLKIIRSHMDSLELCRTNLESVILSLAEQFRLQMELVMTVPGVQLFSAISIIAEIGVDMSVFPTAKHLCSWAGLVPQNDESAGKKKSTRIARAGAYIKPLLVQCALTVCNSDKHPEIKNRYLALKKRRGHKKAIIAICRMLLTAVYAILKKSEAYNPDLYRKVVSLPANRAFTVEQAVAFVQRHGFIVVDSDGVIAS

SEQ ID NO: 383088 - protein, 310 aa, unidentified
MKTKVFVGVDVSKDSLDVAIGAEKDIITFANDQKGVNALVKKLSRIDAELTVFESTGGYELLATSSLAEAGLPVVIVNPRQVRDFAKATGILAKTDAIDARVIAHFAQAVKPDVRPLKDRATSELTALVTRRRQIVEMIVAERNRLKLANKRNIKDIKDHIRWLQKRLDKIETDIGKTIQNSQIWRCKDNILRSVPGIGPITSASLICDLPELGVLSPKKIAMLAGLAPLNCDSGKFKGRRRIWGGRASVRSGLYMATLAATRCNPAIKGFYQRLTAAGKCHKVAITACMRKLLIIVNAMLRDQTLWQQN

SEQ ID NO: 383089 - protein, 310 aa, unidentified
MEQTFIGIDVSKDQLDVHVRCSDEAFAVTRDGEGLTILIERLGALDPYLVVLEATGGFEQTVAAALVGAGLPLAVVNPRQIRDFARATGQLAKTDALDAKAIACFAERVRPEPRPVPDEQARALSELIARRRQVIEMMTAERNRRRQLTRRRLIKSVDRLLAVLQKELSELDQDIGEGIRGTPAWRERDELLRSVPGVGNVVARTLIADLPELGYLDRKQIAALVGVAPLNRDSGKMRGKRTTWGGRAKVRAALYMAALVASRRNPVLAAFYQRLLRAGKVKKLALTAVMRKLLTILNAMVRDNTRWQNA

SEQ ID NO: 383090 - protein, 412 aa, unidentified
MNAVGIDVSKGKSMVTVRRPFNETVAKPFEVRHTGSELKHLADYLKSLDGETRVVMEHTGRYYEQIAQYLHDAGLYVSAVNPKLIKDYGGGNSLRHVKTDKADAKKIAGYALDRWAELRQHTTMDTIRYQLKTLNRQCGLYSKTKTMMKNNLIALLDQTYPGVNALFDSPVREDGTQKWVDFAASFWHVDCVRGMRQTAFVQRYAKWCKQHRYQARAGRAEEIYEHSKDLIAMLPKDTMTKLLVKQAIDALNAVSATLERLKAEMLKLASQLPEFPVVMAMRGVGDTLGPQLMAEIGDVTRFAHRSAITSFAGVDPGANQSGAHEAKSVRASKSGSPELRKALFLVMDCLIQTKPQDDPVYQFMDKKRAEGKPYLVYMTAGANKFLRVYYGRVKEYLATLEGNSAPNSGEHI

SEQ ID NO: 383091 - protein, 412 aa, unidentified
METIVERSGALDVHKAQVTACVRMPAAGGRGREQQVVEFATTVTGLLALRDWLSAHGVTQVAMEATGVFWKPVWAILEDEFELLLVNARHVKQVPGRKTDVSDAAWLCQLAEAGLLRASFVPPKPIRTLRNLTRYRKTQIQERQREANRLHKALEDTGIKLDCVASNILGVSGRLMLDALIQGTTDPEVLAELAKGSLRRKIPALREALEGRFDRHHALWVGAILNHIDFLDEQIDGLSQMIEEEIRPFALVVELLCSIPGIQHRGAECILAEIGVDMSVFATEKHLASWAGQCPGNDQSAGRRRSGKTRNGSKWLDFTLEEAAMAALRAKDNYLAAQYQRLRPRRGHKKALGAVKHSILCTIWHMLQTGELYRDLGGDYFHTRDPERQTKRLIKQLEALGHHVTLQQAVPA

SEQ ID NO: 383092 - protein, 409 aa, unidentified
MKSQLETLHKRVAGIDVHRMKHVVTVLIEDAAGNLTRETREFGGFKRDLKALAAWLCELQVELIILESTGIDWKSVYARLEDVGLRIWVVNAHHVKHVPGRKTDVADSEWLAQLGRYGLVRPSFIPPKDLRELRLVSRYRQKVQANLAAETNRLHKILDDAGIKLGGRVADINGRAARAMVDGLIDGLAPCELIKLSGRLKAPKEDLLAALEGDLSARHRFVLQEIREHMQPLEARLEKLDATLRTAMAPYAWAWTLLQTIPGIGEIAAALILIEIGDDLSHFGSADRFASWAALCPGNNESAGKRKSGKTRKGNSMVRYLLCEAANGAIRTLSVFREKYRSLVVRRGHKKAIVAIAHKMIRTIYFMLTRRQTYHDSGFDYAAANVKKNAPRWIKALERHGYTVNPSAA

SEQ ID NO: 383093 - protein, 330 aa, unidentified
MSTFAGIDVSAKKLDVACLSGEKKPIFAQFEQSPAGHDKLATYLKKHRVEAIVMEATGIYYLHAAMVLVRAGLPVSVINPRSAHHFAKAVLEHSKTDRIDARLLADYARRMDLTPWQPPREDWLALRDIARRINQLTGMCTAEKNRLHALKAQRHTRRSLIEEVEAHIELLDASIERLTTSALELIERDTELAHYRSCMKAAKGIADASSVALLGELCLLPLELRSAQVSRQAGMDVRQTESGSSVDQPGRLSKAGNAYLRAALHMPALSLITHDPWAKAHYQALVARGKKRMQALCAIQRKMLTGLWASMKTGQPFDSSKLFAIEPQKA

SEQ ID NO: 383094 - protein, 349 aa, unidentified
MEHYAGIDVSLELSSVCVVDAKGKIVKEAKISSDPVALVTFFRGLGIAIERIGLEAGPLSQWLHAGLTQAGFEVVLLETRHVKAALSAMTVKTDRKDARGIAQLIRMGWFRSVHCKSVGSQEVRALLVGRKLLLGKLLDVEFSIRGILRGFGLKMGVVTRRNFEARVRELCAGHSMLEQICAAMLAARSALQTEYTKLHKAMLTIVRKDEVCRRLMTTPGVGPLVAITFKTGIDDPSRIGKSKAVGALFGLTPKKYQSGETDVTGGITRVGDEMVRTALYEAANILLSRVTRFSALKRWGMDIARRRGTKRAKVALARKIGVILHRMWVDSTNFRWTKEAPNAPRLIQA

SEQ ID NO: 383095 - protein, 387 aa, unidentified
MARVRGCDPARCLVVPVDVGKSMAMALVADHYGEIVVAPFEFGLTETGFASLAAAVARAEAVRGPEIVRVGVGSAGHYHRTLVARLRAGGFEVVELNPAAVKEARSQQLLRRLKSDARDLGAMAELMVRGAGRAPAVKTDALAAQAAWAAHRRRKVAARAALANQVIGQLDLVFPGLDGCFSDVLGAKAGRVIVSEICDPDRALRQGVAGLRRFVGRRGVALSTPKAAEVIEAARVALRLPAPERAVLGRVLAADLSLLSKLEAEVAAAEVALGEVLADTPAGVLTSLPGIGVVRASNYGAGIGDPTRFANAAGAYRAAGLVPTSYEPARRARPGQHISREGSVELRQAIIELGRGLSQHEPNFVAYRRALLDAMMLVARSVGQRAG

SEQ ID NO: 383096 - protein, 310 aa, unidentified
MSNIFVGIDVSQDHCDLYVYPSAQQDTFRICDMEDVIARLRDLQPAMIVMEATGGLEIPVVAELVAADLPVTVVNPRQVRDFARALGILAKTDAIDARVLALFAEKVRPPSRPLPDARMRALRELVTRRQQLVEMRTMESNRRRMLRSERASTSIRLMLDTIEDEIHKLDLEIKKHITKSPIWQKKADLLKSVPGIGNTTAPLLVVALPELGKLNRRQIASLVGLAPMNRDSGTLRGHRTIIGGRRMVRTALYMPTICAIRFNPIIKRFYERLRTAGKPPKVAITACMRKLLIILNAIVRKNVPWVPYIA

SEQ ID NO: 383097 - protein, 409 aa, unidentified
MDVVNPRCAGIDIHKRSVTVCRIVPGTDGQPTKEVRSFPTYTRDLLALADWLDSGGVTIVAMESTGVYWKPLYNLLEGRFTLVVANAAHIKAVPGRKTDVRDAEWIADLLRHGLLRPSFIPARAERELRELTRYRTSLVRERSAELNRLAKVLEGANLKLGSVLSALDGVSARAMLEAVIGGETDPARLAGLADPRVRASRETLEAALAGRIGPHQRFLLATQLRHLTELDRLITEVSAEIERRLRPFAHELELLVTIPGFSLRTAEVVLAEIGPDLSRFGSARQLASWAGLCPGNHESAGKRHGGTTRKGSPWLRSALVLSAASAGRTKTYLGAQFRRLAARRGLMRAKVAVAHTLLVIIRAMLVRDEPYRDLGVNYFDERDRRHVERRLTHRLEALGYSVALTPTSA

SEQ ID NO: 383098 - protein, 342 aa, unidentified
MEDHTTIAVDLSKSVFEIAVSQSPGRVSERKRLSRGQVVKFFANRPPATVLLEACGSAHHWARQIEPLGHRVLLLPPHQTRRYVLRDKTDGADANALLEAHRNEQIFPVPVKTLHQQALAALHRIRSGWMGARVARLNAIRGILRELGLFIPVGAKHVLPWLGTFLADSRQPIPGEFHSTLLALVAEVRTLDSNIRDAEKQLAATAADSPDATRYLTVPGIGLITATALVAFVGPLQRFRSGRRFASSLGLVPRESSSGLCRHLGSITKRGDPYLRTLLIHGARSVLLAASRVKRPDRLQAWALSVLHRRGYNRAAVALANKLARILWAVSVHQTDYHSSAA

SEQ ID NO: 383099 - protein, 367 aa, unidentified
MKKNSTTTQRGKRAPAGTEATVIGMDLGDKTSRYCELDRDGKEREEGSVATTKQALTERFAGKKRCRIALEVGTHSPWVSRLLKNLGHEVIVANARQVRLIAHSSRKNDRLDARTLARLARADPRLLSPIQHRGEQAQQHLAMIRVRAALVEARTKLVNAARGFSKAQGERLPACDAAAIGVKEMAELPAGLKAVLRPLLEQVESLTGQIKKADVELEQIARTQYPETALLRQVKGVGVLIALTFVLTLDDPERFQKSRDAGCYVGLRPRQRESGASQPQLRITKEGDRYLRTLLVQGAHHILGWRGPDTDLRRWGLKLASRGGKNGKKRAIVAVARKLAVLLHHLWVTGEVYEPLRNSGAATTQAA

SEQ ID NO: 383100 - protein, 424 aa, unidentified
MREEGLSMAEEIEWFVGIDWASQSHRVCLVDARGECLGERAVAHGGPGIEELCNWLIARTGATPEVIGVAIELTQGPVVEALLERGFCVYGINPKQLDRFRDRFTVAGAKDDRRDAHVLGDSLRTDRHAFRRLSNDEPVIVKLREWSRMADDLQQERARLASRMREQLWRYYPQMLELADDLAADWFLDLWNQAPTPAKAARLRQTTIERFVKAHRLRRWQAPEVLSILKQKPLSVAPGVVEAASDHIRTLTVRIRLVNQQLKAAHRQLDELCAQLIPSEENEPGQQCEQRDVVILQSMPGLGRIILAVLLAEVWQPLRRRDYHALRSLSGVAPVTRRSGKTSVVVRRYACNKRLANALYHWARLATQHDALSRRRYAALRQRGHSHGRALRTVADRLLSVACTLLEQQTMFDPTYKVHEAAGA

SEQ ID NO: 383101 - protein, 358 aa, unidentified
MAGKVTEAAVVGGVDTHKDLHVAAVVDQNNKVLGTRFFSTTRQGYRQMLVWMTSFGALKRIGVECTGTYGSGLLRYLQNAGLEVLEVTAPDRMERRKRGKSDTIDAECAAHAAFSGIRTVTPKTRNGMIESLRVLKTCRKTAISARRVALQIIHSNIISAPDELREQLRNMTRMQLIRTLGSWRPDASEYRNVTNVYRISLKSLARRYLELHDEIADLDVMIAAIVDELAPELIKRNAIGYESASQLLITAGDNPQRLRSESGFAALCGVSPVPVSSGKTNRYRLNRGGDRAANSALHIIAIGRLRTDDKTKEYVARRVAEGHTKMEAIRCLKRYISREVYTLLRNQNRQINSIPITA

SEQ ID NO: 383102 - protein, 341 aa, unidentified
MKNTTTITIDLAKEVFQVAVFSKFGKQIINKAVNSKKLQLLVIQYPEASIYMEACGSAHYWGRRFTQLGHQAHLIPPHLVAKYRTGNKNDKNDAVAIYEASKNPTIYFVSIRTLEQQDLATQHKLRNGYVKQRTQLGNRIRGFAMEYGVKFPLGITRLRQLIPSALEDAENELTPVARACLNHLYQQLLSLNDIIEETTNTLVNHAKQIDACVRLEKIPGVGWLVASMLYARLGNGSAFRRGRDASASLGLVPSHSGSGGKNRLGSITKRGDKYLRCLLVHGARSTLHRVNNKEDGLSQWVRHQLVTKHANNTAVALANKIVRMAWSILRTGNDYKVPVAQ

SEQ ID NO: 383103 - protein, 387 aa, unidentified
MVRSAREREAVLGLDVGKSSHWACLVTKEGEIAANRPVQNSERELDELFAQVGPGTLVVVDQVRNIGALAIRRARMAGLDVAYLPGIAAHGAARLFAGDAKTDERDATVIAKTALGIPDALLPVPREDARLEAARSMAAQRDHMVTCATRDKNRLRSILLESCPPFEALADLSDPRWVNMLEKLGGPWGIADAGKAAMGAVTRGADRSEMDAAWDAIAASTRPPECMVEAENPQVMTLARRIREASAEAGELDARIAELLAGDATYECLLTVPGIGPRTASELVIGIDIADFPDHHHLASYCGIAPRNRRSGTSISSISASRQGNKRLKNLLIFSCNSLVRSKNRFGEYYRKCRGRGMCHGEALKAVARKRVKVIYAIMRDRVPYAA

SEQ ID NO: 383104 - protein, 350 aa, unidentified
MNAIGIDMSKDTFHACFDTDEVEIFENTKRGIKKFISRLGYFSFGLSDTTIGVEATGAYHLLFAETLRKKEWNIVVINPLLTSRLNKTSLRNVKTDRADARSIRQAVIIGYGYRYTDTPGILRLKTLVQERLGLKRMHTECLQRRHAHTYKARAVDIPVPDCFQSVEANLRREIKALERQIEVVAPETQKLLRSIPGVGALSAACLVAYVGDINRFESPEKLTAYIGLDCRVHESGTSIHGKGYLTKRGNKYLRATLFNAAFVAQKRNPELKKFYDKKIKEGKHHFVALCAVERKLVHLIFAVWKRGTPFEHRLLKKSDHGDGNATTTVSPPDSLPATTTVSMTTITSGV

SEQ ID NO: 383105 - protein, 449 aa, unidentified
MKKSSSERHGLPVIHDRAAGIDIGSRFHVVAVPADITEEPVQTFKAFTADLERMADWLVDLRITTVAMESTGVYWIPVYEILETRGLHVVLANARDARAVPGRKTDVNDAQWIQRLHACGLLRASFHPDREIAALRSYLRLRERHLDYAAAHIQHMQKALIHMNLQLHHVVADVTGATGMRIIRAIVAGERNAATLATMRDTRCKSSIETIQSALVGNYQPEHVFALAQALAMYDAYQAQLEICDQQIAQSLIQLSQQRPSPSDPLPKPRHRTRQPNALNFNVRALLYQLVGVDLTQIHGIGPYLALRLVAECGTDLSRWRTAHHFTSWLTLAPGCRISGGKVLSAHTRKTKNRVTALLRLAAVTIGKTSTALGAFYRRLSARIGKAKAVTATARKIAILFYNAMRFGMAYQDPGADHYEQKYRERVVKGLHRRAAEFGFTLQAVEGVS

SEQ ID NO: 383106 - protein, 336 aa, unidentified
MYYTGIDLHKLTSYLTTVDSKGNIIKQENIKNVDHNFVQYFKSMRGKHITTVESTMTWYWLNDLLTSLKIPLVLAHAKYVKAIAYAKVKTDKVDSHILAQLLRMNYIPEAHKITGEKRVLRDALRARLKIVQRHTSVTNSMHLLLAKYNLTEPNQLNGIAKYQFDQLAEVESLLKEQILDLEKQLYPSLIPNEDIQRLLWVPGIGKMNAFNILLEVDDINRFADVKNFFSYCRLVPSARNSGGKSKQRSSKDGNKYLKVVFSDAAVHAIHYYPVIKKYHSSLLRKKNKQVAKAIIAKEIAKIVYHVLKDEANYNQKFKGIEIEKKKSVQWPRITNP

SEQ ID NO: 383107 - protein, 343 aa, unidentified
MECYVGLDVSLKQTSICIVDQAGLVVREGVVDSDPEAISVYVRSKAPDAVRIGLETGPTSTWLWTELKRLGLPVICIDARHAKAVLKMQINKSDRNDAIGIARIMQTGWFKEVHVKDIDSHSVRALLASRALLVKIKRDLENHVRGLLKNLGLVIGRAKFNVFAVRVDELIEGRPELVAAVRPLLEARNAVEQQVSELDRKVMRLARHDAQVRRFMTVPGVGPITALAFKATIDDPARFVRSRSVGAYVGLTSRRHASGEVDWSGRISKCGDAMLRSYLFEAAGVLLTRVPKWSAVKAWGVRLAKRNGLRKAKVAVARKLAVILHRMWIDGTEFNWSKKEIAA

SEQ ID NO: 383108 - protein, 367 aa, unidentified
MKKVSIAAARQSRNISRQKLTIGLDLGDRNSWYCVMDEAGHIQLEQRVRTSETALREVFGAMPQSRIALEIGTHSPWISRLLTELRHEVIVANARKVRLIGESRKKDDRLDAQTLARLARIDPQLLYPVKHRSAQAQADLTMIRARAALVRTRTGLVNTARGLAKSYGERLLGCNVRNMNPEKAEGLSPELQRALEPLLSAIEEVSERICQYDDQIEALVQESYPQVKLLKQIKGVGPLIALTFLLTLEDPHRFRKSRDVGGYLGLQPGRRKSGQSEPQLHISKEGDPYLRTLLVQGAQHILGPFGVDCDLRRWGLKLAERGGRNAKKRAIVATARKLAVLLHHLWVSGEVYDPLYNSSRRTVAAAA

SEQ ID NO: 383109 - protein, 324 aa, unidentified
MQSDSNAKCWVGIDVSKDWIDVAVLVEENKIEQLRCDRSAGALAGLAQTLLPYCPQGIVLEATGGLEGSVIAALAGAGLPVMRINPKRVRDFAGAHGLLAKTDALDAYALALFGARMRPPLRAWPEAERQQLAAWVARQQQLTVERATERTRLKQACEPALRKSVERVIAFLGKEIERLEKQLAAWVAESKTWTEQEALLRTAPGVGPKTAVRLLAQLPELGRVHRRQIAALVGVAPFASDSGKWRGRRSIRGGRGGVRAALYLASWTAIRAEGALKSFYVRLVAAGKPKQLALIAVARKLLLALNEMMRSGQPWRAANAAVSA

SEQ ID NO: 383110 - protein, 352 aa, unidentified
MKASTSSRTIATIGIDIGKNTFHLVGLDERGAIVLRQKLSRGQVLVRLANILPCLLGMEACVGAHHLSRQLLALGHDVKLVVPGQFVKPFLKGQKNDFRDAEAVAEAVQRPTMRFVPTKSVDQLDLQALHRVRSRLVSQRTAIVNQIRAFLLERGIAVRQGLRFLRHALPDILANRADPLTPRMVNMIKDLARDLHHLDERIDEVTGEVETLARNDEACQRLMTVPGIGPIIASAMVATIGDGSAFRRGRDFGAWLGLVPRQISTGDRTILGRISKRGNGYLRMLFVQAARVVLLRPANWPKHSFGRWLEAAAKRMHHNVVATALANKLTRIAWSVLHHGRSYEPRFSAELI

SEQ ID NO: 383111 - protein, 343 aa, unidentified
MQFYAGIDLHTRNSVVCVIDQKERKLVTETAPNDLPSILSLLEKVPRRPTVAIEATLNWYWLVDGLEEAGYKVKLAHTMGLYMITGAKVKTDRRDAFSLAKLLRLDAIPEAYIYPKDTRPIRDVLRRRTRMVRLRAEAYVAIKRKFQQYGLPYSDKAIQGVNEQELLQSFTHPGIRASLKMEFERIRFYSRELKTVEKYILSTVKNKPIFEHLQTIPGVGKILALTIYYEVGDIARFASAKQFCSYARVVPGLAQSGDVIRRGRGSKQGNPHLKWAFNQAAAISVRHYGYVRSFRQKHLARRRSKARRMISLSIVGHKLAIAAYHVLRDDVPFNKELMFGKAS

SEQ ID NO: 383112 - protein, 320 aa, unidentified
MLSFGGIDVSKDRLDVVVLPEEECSSVPNDAAGWAELVERLRGSSIAAIGIEPSGGYERGAMRALLAAGMPVRQVNPFKLRQFARASGVLAKNDPLDARMIASFVTIMPTRPAQRQTPAAERLAEMLPLAASSAPRKSPPRMRPDCWKMRCCSAFLTAALFASPPTSTCSTSAWSRSLPTDDALVHRYRLLTSMPGVGAVLACTLIALLPELGRMSRKQVAALVGVAPYAFESGTLKGRRCIWGGRAHIRQVLYMAAMSASNWNPVLKAFHDRLTAAGKLPKVVIVAVMRKMITMLNAMVRDDVVWADRLSGRHVLPTAR

SEQ ID NO: 383113 - protein, 502 aa, unidentified
MPIRMYGWLLITRMLMGIGTTRDSLNKEWPMRTKALGIDPDASGGVCALVDVASERVTTKRFPITDEGMSQLVKWISRQGELIVAIEGRNGQSDPFERALRKAAIVFYSFTAHAVAKFRSAMLGQNKNNQKDAEAVARYALTLETQGLLERSRRVWFVDEELQTLTRLYAVKRRENTREISRLWKILHKVCGDLYLAFRGRHPDYRFHSSLLQQRGVVRLLAEQPDVSSWHLMSEKELMGILGGSSRERAETVVELQRLSASLAPLRPSHTVMVQTTAATLLTLSESLDRMKSGLDELTQENLSVCRLRRHAGIGVLTAATIIAEIIDIRRFPSNNHLASYAGLARREYKTGRSTTEIAPVLYNHRLKNAFFSAAKNFTLYNPDSHLSAYYRMLVARGMSITEAYKRVARALVRVFYRELTELVTDSAKTNGRNSERKSEDGMATGTDRQAQVASSNIPPSTEDHTPTQRQTEPEAKHIAKAIVAMISETENRRKRNVENFT

SEQ ID NO: 383114 - protein, 350 aa, unidentified
MKKICIGIDVSKETLDVTVIHIESYELVEKLGYSKFDNRPSGFRSMTAWVRKVIKSRGQMDEALFCMETTGSYDLPLCHWLHKNGLNVWRESALQIHCSKGFQRGKSDKEDSEVIAQYAARHQSRYTAFVPDAEAIADLKELICYRDSLVERRKECKVRLANKKETLVNRNSKAWKCIERLSKAEIKRLDKVIGECDEEIRNLMKEDEQMEKNYQHLTSIVGIGLINGAALIAYTGNFKKITTPNKMSCYCGCFTFYEDSGTSVHRKSPYRNACCKMLKGYLRMAAKSAMLANTELRKYSERLREKGKPYAVILNNVANKLLHIMFSLVKHDYDYEYNHEMVRRMEREIA

SEQ ID NO: 383115 - protein, 420 aa, unidentified
MTESLIVGIDPGRYGHGVVVLRPDGEEALRERVANEAAAIEVLVDRVVELAGGPGRALWVIEADGGDGAVLIGELLARDELVATLTPTEVAVRRKGRRQIHKSDLIDAELCARIGREEQATLRRLVAVPEAVAEVRVLARYQEGLIRDRTRLINRLRFLLSQYWPEFLAARAFAALDGDAVTALLAELPTPSAVRSKTPLELARFLAAQRYRRRPLERAEQILAAAQVGTRPQEAVYGRLVAEVAHELRALKLRIEALDVEIRDRFLLQPEAPIILSLPGMSHRTGPRFLAEVGALARFGSPDALAAYAGLTPTLWQSGRSSGTHFLSRRCNLHLRQACWSAALGSLKTPASRRFYDRKRSEGKSHASRITRPSSPSPAPSSGCSGRCSGPARCSAPSGLWKPLDKDGHPCRWSGVGAAG

SEQ ID NO: 383116 - protein, 455 aa, unidentified
MPTRPVKTTKALPVINPNAAGIDVGATEVYGAVPQDRAAQPVRRFATFTQDLQALADWLQTCGVQTVAMESTGVYWIPLFQILESRGIEVCLVNRRQVKNVPGRKSDIADCQWLQYLHAVGLLHASFRPPQAVCAVRALLRHRDMLVTYAASHIQHMQKALTQMNLQLHHVISDLTGKTGLAILDASLAGEHDPHKLAQLRDFRIKAPAQTIAKALVGDWREEHLFTLRQALAAYRHYQHLIAECDQEIERLLAQFDSQVDPATTPLPPATTSHRQPQRNEIRLARTDLRTELYRILGVDLTQVPGLQTTTIHTLLTELGPELSAFPTAKHFASWLGLCPDNRVSGGRVLSAKTRKVRNRAADALRLAAQSLHHSHSVLGDFYRRMRARLGAPKAITATAHKLARLLYHLLTTGQAYDASVFAQYEARYQQRRLQRLHREAAALGFTLTPQGSVS

SEQ ID NO: 383117 - protein, 319 aa, unidentified
MTQIVLGIDVSKRTLDVALIFEARTLCKQFKNSTDGFRSLADWLASLEIKQVHACLEATGIYGEAVALFLHEQEHLVSVVNPLRIKGYASANMQRNKTDRLDAQLIASFCLTQEPDRWQPPSAEVKHLQSLVRRVEVLEEMLQAEENRLTNAALEIKPSIERMITLIKEEISELERQIKQHISQNSNLKEQSELLQTIPGIGARTANLLLSEIEFERYSSARSIAAQAGVTPRKRQSGTSLKQTSLSKLGNARLRKALYFPAIVARQHNEIVKEFAKRLKKNGKTPMQIVCAAMRKLLHIAFGVLKHKRAFDASLAFSA

SEQ ID NO: 383118 - protein, 343 aa, unidentified
MKIVSLDVHTETSQLCLSNEDGTVVFEMQVSTQAEELRRVIGGIAGPKCVVFEEGPLTGMISDAVRDLVDEVISCDPAHNALIARAEDANDERDARRLAELVRLRSVRSVYVPQEPCRSLRSLLVYDLGLAGELGGVRNKIKGLCRRNGIPSAGTGVYGQSGRKRVMANLGSAAMRWQMESLCRLLDALQAERGNTSKRIDSLARKVGPVERLCTIPGVGPVIARTLVGWIAEPTRFKSRSALYSYAGLGLGQGWTNWQPVGRARASRRGNRCVKRALFLAARSASRGHSALARRYQARREEGWEDRKAIRDLARVILKIAVLLWRKGATYDDAAVSVPRTSR

SEQ ID NO: 383119 - protein, 346 aa, unidentified
MRYSTTVGVDLAKNVIQISVVNGRGKELSNRSLSRKKFAEFLGKQKPSLVAFESCATAHHWARAAERHGHEARIIPAKAVVPFRQGHKTDSNDALAVAEAARRPNIKEAPMKTTEQQGLQAIHRSRELLIQESTALSNHLRGILLEFGVAIPQGFASLLRTLPEVLEDGDNELPDLYRPTLHRMYTRLLELREDIEVMTAEVARLVQEHPVCSRLTAIEGIGPIGALLLYATMGSGKAFSGSREFAAYLGLAPRQYSSGGKTNIVGLSKKVGNSRLRSVLILGARAYTYRMKEPKGSKDKWLQAVVERNGVSRAAIALANKNVRTAWAMVTQGTEYQRRPQLEMAA

SEQ ID NO: 383120 - protein, 308 aa, unidentified
MSGLESDVAKATLAVWVRPLGEGWAVANTPAGHRQLCRRLTHCSVQRVVLEATGGYEQGVLAALTAAGWPVARINPLRARGFAMACGQLAKTDPIDAAVLAHMAQTLELPPTAAPTPDQRQVRALVQRREQRVQQRDDERRRLHQATLPLIRTSLQRCLRALQRELRQIETALTRAVGRADPALAERLHAVAGIGPVTTASLMAYLPELGTVDKRQIAALVGAAPYNCDSGQHAGQRHIRGGRAALRRVLYMATWSVIRLQPEFKARYARLRARGKCAKVALIACMRVLIIRLNAMVRDGTPWKTWAG

SEQ ID NO: 383121 - protein, 409 aa, unidentified
MWTLGIDVAKRAHCAHVLDEAGVERLSGFRFANSHAGLCALREKLAQCGAAPHTLRVGMEATGHYWMALHDQLRASGHAVAVLNPLVTHARRNMTIRGHKTDPADARIIAHVLREPGVPLSAVARDEVRQLRTLARMRFELSAQATADKLRLGALLDRAFPEYAQLMPCVTGTASLCVLSHYPTAVDMAQANLRRLSSLLQAGSAGKLGRDKAVALRDAARNSFCVTSALAALRMEITMCLQRLELYQRQCAALEDEFKNQLGPQQALLRSIPGIGPVWAATILAEVLPIFDPAHQEGGKKFVAYAGLDPKANDSGQSNGRARMSKRGSKYLRTAAMQAAEVAALRVADPMFRALYERHIAKGKHHANALSHVANKLLHVVFAVLRDNKNYEPHVPQHTERATTTNEIS

SEQ ID NO: 383122 - protein, 312 aa, unidentified
MSGESIFVGIDVSSQRLDVAIGDDPLESFGNDDAGVVALSQRLSAVGCELIVLEATGGYEALLVATLAGAGLPVRVINPRQARDFAKAMGLLAKTDALDAKLLRLFAERIRPVVLPHRSEAARELAALVARRRELVQMLTAEKNRLTLATRAVGRDITAHIRFLEKRIKDSDDELKRRIEAHTEFRITDELLRSVPSVGRVSSSTLIALLPELGALPHRQIVALVGLAPLNDDSGHRVGRRRIWGGRAEVRSVLYMATISALRSNPVIKTTYQRLVAAGKPKKVAIVACMRKLLTILNAIVRDQTPWNPAIA

SEQ ID NO: 383123 - protein, 362 aa, unidentified
MVYIGVDLHRKVSQVAALEADGELIWNRRIRSRPEEFSRIFGDLTVQPAGVAFEATYGWSWFADLLGDLGLPAHMAHPLATKAISSARVKNDAVDAKTLAHLLRTNLLPEAWIGPPECREARRLVRTRAALVRFRSRLKCQVLAVLADHGVQLPELRDMFGKDGRRFLEATAVPTQSQLCINADLRLIDELTKEIHQLDRELVAFFKADPRMPRLRAIHGIGFFTAAVIIAEVWDVDRFRRPDQLCSWAGLTPKERSSAGHIRRSHITKQGSRVLRWALVEAATVAPRDPGHRRYFMQVLHNERRRTKIARLALARRLLTLCYYALRDEGGCRAYPVGQRTRRLPVTGALGAVLASTDGRVI

SEQ ID NO: 383124 - protein, 412 aa, unidentified
MQTLVQCGCGLDVHQATVVACLLVALKDGKVKKQVRTFNTTTRELVNLREWLLSEGCTHLAMESTGVYWKPVYAILEGAFELVVANAQHVKKVPGRKTDVKDAEWIAELLCHGLLRSSFVPPKPIRDLRDLMRYRRKLVESRAAERNRLLKLLETANIKLASVATDVFGVSGLLILRALVDGKATPQEMAQLAKKKLRSKIPELELALEGKIEEHHRFLLKLQLDRLQAVEKDLTRLEQRIQDKLQPYAAQQVLLREIPGVDATLAAVIIAELGVDMSVFKSVSQLASWAGVCPGNNESAGKRKSSHIPKGNVYLKTALVEAANSAARAKGTYLRDKFYRLKARRGYKHAAVAIAHKILVSVYHMLSQQVSYNDLGDLYLDKLNKHHLTRNLVHRLERLGYTVTLTLEQKAA

SEQ ID NO: 383125 - protein, 346 aa, unidentified
MEHYAGLDVSLKEISICVVDHDGKTIARGICPADPEGVAGWFRTRSLTPHRIVHESGMLSIWLQRGMTKLGLPTTCIDARKAHKSLSARLNKSDAADAEGLAQLARTNWFTPVHIRSEEADRLRSLIGARERLIRLRKDLEGHIRGVLKTFGIRMTGVGQGRQRQAFRDQLAAAGETDPILRTIADGFIAAHSTLCQAADDLDKAVKKKAKAHPVARRLMTIPGVGPVNALSFIALVDNPDRFSRVTDVGAFLGLTPKRHQSGQMDWSGRVSKCGDGTMRGLLFEAASCLIRQVKRFSPLKSWAVRLAGRRGFRKAAVATARKIAVLMLTIWKSGADYYWTKEATA

SEQ ID NO: 383126 - protein, 347 aa, unidentified
MRATYVTTVGIDLGKNSFHVIGFDDRGAIVLRRKLSRGQLERWFANLPPSLIGMEACAGAHHIGRQLAALGHDVRLLPPKYVKPFLKGHKNDYRDAEACAEAVGRPTMRFVPLKSVDQLDLQALHRVRSRLVGQRTATINQIRGFLLEHGITVRQGAVALRLALPDILAIRTDALSPRIIRLIMDLADDWRRLDTRIDAVTTEIHTLASQADDCRRLMGAPGIGPITASAMVAAIGDGSTFARGRDFSAWLGLVPRQMSTGDRTILGGISKRGNRYLRTLFIQGAHAVLLRRNSWGKHGLGPWLTTAEHRLHRNVLVVALANKLARIAWGVLAKGRGYEPDLVAQSA

SEQ ID NO: 383127 - protein, 356 aa, unidentified
MSSNCQYIGLDVHKEAISIAVLNGTGKLVMESIIETKAVNLVQFLHSLGGELQVTLEEGTWAAWLYDVLKPHVAEIVVCNPRRNAYLKEGSKSDRVDARKLAELLRAGMLRAVYHGENGLRTLRELARSYQVISKDLRRVMNRLKATYRGWGIPCTGPKVYAPHSREEWLNKIKETGVRRRAQLFYQPLDGLQILRRQVRREFLAESRKHQEVKVLRQIPCIGPIRAGLLLAMIQTPHRFRSKRQLWTYSGLGVETHDSAQHRYVDGRLQRSQKPQQIRGLNENHNHEMKHIFKSTATRASACPGPFRDFYLALLAKGMKPEMARLTLARKIAAITLTLWKKGGRFDTQHLKAQAA

SEQ ID NO: 383128 - protein, 314 aa, unidentified
MKTPLFVGIDVSQSQLDVAVRPGARFAAPNDETGLATVVAQVSRLAPVLIVLEATGGLEVPLTGALAADGLPVVVVNPRQVRDFARATGQLAKTDALDAQILAHFAEVIRPAVRPLPDEQTQALAALATRRRQLVEMLTAEKHRLRTASPSIRKSLRTHIAWLQRELTHTDTDLAQAIQDSPVWREKDDLLRSVPGVGPVLTTTLLANLPELGTLTNKQIAALVGVAPLNRDSGTLHGKRMVWGGRAQVRTALYMAAVVATRHNPAIKTFYQRLCGLGKAKKVALIACMRKLLTMLNAMLKHRTPWRTEQPQHA

SEQ ID NO: 383129 - protein, 400 aa, unidentified
MLSIGIDVSKGKSTVCGMKPGGEIVYTPFEVQHTREGMSELVSLLRGSGEEVRAVLESTGSYHCPVVTALLENGIFVSVVNSLRMKRFCSQSIRKVKTDRIDAMQIALYGLAYWQELQPTKLPEDTYRELQLLARQYYQMTSLLIKAKVDFNALCDQVLPGMQELMSDHAGRHKLSDFVLRYCHTTHILEMGETRFRKDYCKWAEKKGYRNCERMAALIFATAQNGIPVLPNAPSTQIVITEAIRVLHTVEASRDAILTQMQALAKTLPEYSLVREMPCIGDTLAPRLIAEIGDVRRFHSKRALIAYAGIDAPPYQSGKFCANNRHISKRGNRYLRKTGYEVMQSYVMHKPANDPIFTFIEKKRGEGKSGKLAMVAGLNKFLRVYYGKVTELYRSLPAIE

SEQ ID NO: 383130 - protein, 341 aa, unidentified
MEQVITIGLDLAKSVFQAHGADAAGGVVFRKKLRRDQMLAFFADQPLCLVAMEACAGAHYWAREIGALGHEVRLIPPAYVKPFVKRQKNDMADAEAISEAAQRPTMRFVTPKSAESQAAAIVFRTRDLLVRQRTQLINALRGHLAEFGYVVRQGAGHAAKLFDLVADPSTDLPQQARAVLAVIVESLQALQAQIALLDKEIAARAKQDPVAKRLMTIPGVGAVVATALVALAPAASTFRRGRDFAAWLGLTPRQHSSGGKERLGRTTRMGERSLRRLLILGASSAAKAASRGSESASPWLRAMLAKKPRMLVTVALANKMARIVWALMAHGGTYKAPIAAT

SEQ ID NO: 383131 - protein, 421 aa, unidentified
MSKGRYSVRDCQAVDWTPLCERVRGAPVVFAVDVAKEAFVAAVMRDNGELLERIKWRHPAQTRLVLDALVALRGCAELAVVMESSGSYGDALRWQLHERGIAVYRVSSKHVHDSAEVYDGVPSVHDAKAADLIALLHVHGRSRRWEPLDAQRRALNAQVQRLEQLKGYQQRQRNRLEALLSRHWPELAALLDLNSVTAAALIAAVGSPVYLCAFAHKGPAIIHSASRGKLDAPRIEAILESARTTLGMPCLAEENAQLRALGSDLVAVHKELQQLTNALQAQVAEDDTLTPMATVIGAVSSAVLHAHLGAPSAYPSAQSYLKALGLNLKERSSGKHQGRLSITKRGPPEVRYYLYFAALRLIAQQPSVARWFQAKSQRPGACKGKLIVALMRRLAKGLWHQGQGQVFAIDKLFSSPPPCGA

SEQ ID NO: 383132 - protein, 347 aa, unidentified
MLYVGLDLSRKRLDWRALEPEGAVVGGGAVPPDRDGLGLLARRLGDAGQPIKAVIESMTGARFVHDQLELAGWDVRIADAVKARGIAPLACKTDRIDCWVLAELARLELVPEIWLPDPRVRAERERARFRLHLVKHRNSLKNRIHAILFQHGIANTSSDLFGAGGRRLLERLALPEPWASTVRASLQLIDSLDEQIDACALELRQLGADHRYIPLLLTCPGIGWVLAFTIASEIGDINRFPSPRKLVGYTGLCPRVDQSGERDRRGPLRKNGPNYLRWALVEAAHSAARSHPPYTTIRERMQTRHGKTRGTKIAAIEIARRLAEANWHMLTKNQPFTPASAPASLAA

SEQ ID NO: 383133 - protein, 343 aa, unidentified
MTIVILGVDLGKNSCSIVGVDAAGAIVTRRSMRRQTLIDYVLKLPPCVVAMEACCGAHHLGRLFVARGHAVRLMSPEYVRPYVKAQKNDDRDAEGIAEAASRPTMRFVDLKSEEQLDIQTLHRVRSRRVAERTNLINQLRAILLERGVIFPAGRRKFELGLEEMLAQHGGTVSPRIRQLAADLRDEWRTLDTRIEALNGEFVDLVRCDDAARRLTSIPGVGVLNASALVAAVGNASGFAKARDLGAWLGLVPRQHTTGGKPRLLGISKRGNTYLRTLLIHGARAALPSLSQAETPLGRWLKAMLERGVHRNAVVVALANKLARIAWATLRNGTTFERGYAVAG

SEQ ID NO: 383134 - protein, 389 aa, unidentified
MDIGKEHHHCVVIDDSGERLLSRRVRNDETELLALMADVLAIDVDALWAIDLNCGGAALLIGLLVNHDQPLVYITGLKVHRAAGTYRGEGKTDAKDAFVIADQARVRRDLGPLRAGDEISVDLRTLTNRRTDLVCDRTRAINRIRHQLLEYFPALERSLDLSRKGHLLLLTGYQTPDAIRGLGEQRLAHWLRHRKARNADTVAHLAIEAAEAQQTTLSGQKLAAAMVERLATGVLALNTEIAEIDTMIEERLRRHRHAEVMLTLPGFGPTLAAEFLAATGGEMTAFGSADRLAGYAGLAPVPRDSGRVHGNLRRPRRYHRGLLRACYLAAMASLPACPTSKAYYQRKRAEGKRHEQALLCLARRRLNVLWAMLRDNSRYHASPPIPAAA

SEQ ID NO: 383135 - protein, 322 aa, unidentified
MDIQYYILGIDIAKLKFDVALIVKDKFKSKVFHNTPEGFASLSEWLAQHGISQLHACMEATGVYWVALAEYLADAGHQVSVVNPAQISSYGKSILQRGKTDIQDARLIARFCERERPSVWQPEPLEQRQLLLLVRQLQHVNDCLYAERNRIQTAAPVVQASIQFIIDCLEKESRQLEKRIQDHIDQNPTLKRNQQLLDSIPGVGEKTAPWLLAYLGDGQRFSRGKQAAAFAGLSPHPFQSGSSVQGRSRISKTGHADLRRILYMPALATYGRKKAFQPFITRLKESGKAPMSIIVALMRKILTIAQAVLKAQQPFNPELHMN

SEQ ID NO: 383136 - protein, 434 aa, unidentified
MMRGNEQEPSLKEKRRCAMKMPPPAPSSEGAVIKYVCGIDIGSQCCVGCICRPDKSVVIKSITFANAREGWQIWEEKLKQLDAPAGEILIGMEATSRYGENLYQELEQRGYVLRLLHPGQTHHFHQQRGLRAKTDRLDAMTIARALLSGEARMGYVPDEQVATYRELVRLHTQLSDTAASYQNEIQALVVVLFPEFTQVFADPCLPTALAVLKAFPSAQALVEAGVEALVQVLRAQPAAHYGRPTAKKLVALANQSVSSGRARAGRSTSLRILCDQLEHTQANLARLNTEIEQLLNTDPGVKGLQQVPEFGPKTLAVLRAELGDVQRFSRIDEVIAYGGMDIEIKESGLWKGKAKLSKHGSGLLRRVLYMSALRCIHRKESAFGAYYQRLVQRGLKKGSALMAVMRKMLAVAAHLLMHEDEEYDRSLVCGSAAG

SEQ ID NO: 383137 - protein, 364 aa, unidentified
MDDSTMTVTVGLDVHARSIRLAVVRADELLEERTLPYDEEAVERALRRWPVVRCCYEAGPTGFGLQRHLVERGIDCQVVAPGLVPQRPGDRVKTDSRDARKLARLLAGGLLEPIHVPSRELEAARDLVRAREDARLDRMRDRHRLSKFCLRHGRALPTSSWTVVRRKWLSEQRFEFAAQQITFDTYVHAVDLVDARIEALERAIRETAEQEPWRELVARLRCLRGIDTLTALALVSEIGDFNRFRSAAELMAFVGLVPSEHSSGEKRRQGSITKVGNAHVRRLLVESAWHARRRPKVGYELARRQRGQDAVVVERAWRCQQRLYSRWQRMAGRGKPQQKIVVACARELAGFVWAIATEQPLRSS

SEQ ID NO: 383138 - protein, 463 aa, unidentified
MAAGKSLWGNRKERKEWARRLQSEDPGLEVVHPRAAGIDVGNSAHYAAVRPDRDMEPVRRFECFTADLYRLADWLRSCGVRTVAMQSTGVYWIPLYEILEERGFEVYLVNARHTKNLPGRKSDVQESQWLLKLHTYGLLSNSFQPSAEIRMLRTYWRQRATHVEGAATCIQRMQKALTQMNMQLANVISDISGLTGQAIIRFIIAGERDPHKLAALCHPRIHASQEEVAKSLEGNWRPELLFILHQEVEMYDTYQRRVAECDERLQKHLASFADTLSVRATMDKPKRKKAAKNAPHFDLSSELQRITGVDLTRIDGINVMVSQTILSEVGLDMSRWKTEGHFASWLGLCPDNRISGDKVLGKGTRRVVNRAATALRQAANTLIRSRSYLGAQYRRLRTKLGAPKAITAMAHRLARLVYRMLKYGQAYVDKGTEYYEERLRQQQIQLLRKRAAKLGLHVMEPQA

SEQ ID NO: 383139 - protein, 427 aa, unidentified
MAYRVAGIDIHKRMLAVVVADVAVETEYVFERRLVGTTPDQLRGLAAWFIECEVEEVVMESTAQYWRPVWDALERDWQSVRRLRPDAPPTAGALHLAQAQSNHGPRGRKKDFPDAERLVKRLVAHELILSFVPDVTQRLWRTVTRRKFQLTCNRVQLRNRLECLLEEMHLKVSSLVSDLLGLSARRMLRAVGAGVTDPATVAALGSPRLQATPDQLRDALGACTELHPVYRRLLTLTLDELDGLETHLRQLDEELAQLLREHQAAVQRLAAVPGLGVDSAQQIIAEVGPTAATFATAKRLASWVGACPGHDESAGVNHSRRSPNGNRQMRRLLNQAANAAVKTKGSIFELVYRRLVVRLGHAQAIGAIAHRLCRLVWKILHDGVTYEERGPAVTKVRAQRRAAKMIRELRGLGYRVLPVVSPASALA

SEQ ID NO: 383140 - protein, 411 aa, unidentified
MHNRQNYLYVGVDLHKEHHTAVIINCWQEKLGEIQFENKPSAFSKFLLEVETYVSAGVSVVFGLEDVGGYGRALAKYLVDHEQVVKEVNPALSFLERKSQVIIHKNDSWDAECVARILINKFNQLPDAKPNDLLWSIQQLVSRRNALVKVQSALKNQLHIQLNHHYPSYKKFFLELDGKTALAFWQQYPSPSCLEGANIKQLTAFLLDVSNNTCSVKKASDILKLVKEDGHTMKEYQETRDFLVRSIVRDIEFKKTEMKYIERELKQLVNLLEYQLETMPGIELVTASALIADIGDVRRFSNANKLARFAGIAPVYFGSGGKGKTHKSKQGNRALRALFYNLAVQQVQVAKGSKLPRNPVFHAYYQKKLKEGKTKGQALVCIMRRLVNIVYSMMKYKTAYELPVVEEKEVV

SEQ ID NO: 383141 - protein, 404 aa, unidentified
MYNAVGIDVSKGKSTIAVLQPGGTVIRKPFDVSHTSQRLIELARYLGSLEGSTKIVMECTGRYHEPMLKALYEAGLFVSVVNPHLIKNFGNNSLRRVKSDPADARRIARYTLDNWAELRQYSGMDNTRTQLKTLNSQFSFFMKQKVAAKANLIALLDNTYPGVNKLFDSPPREDGSEKWVDYAYSFWHVDCVRRIGLKTFTERYRAFCRKHHYIFQPDKPEKLFHASKELVAVFPKEKTYKLLIQQSIQQLNLASGHVERLRQEMNALASTLPEYSTVMGIYGVGKTYGPQLIAEIGDVSRFTHREALTAFAGVDPGVDESGQHKSKSNRASKVGSARLRKTLFQIMTTLLQNAPEDDPVYRFLDKKRAQGKPYYVYMTAGANKFLRIYYGKVKECLRNLEQAE

SEQ ID NO: 383142 - protein, 324 aa, unidentified
MDIGLLIEESGAISHLQVGNNDEGIIEMLNWLQSHQDFAIKDALFCMEHTGIYNYPLLQFINHHSAMVWVENLIQIKKSMGLQRGKNDKVDSIRIAQYAYQAKEKVKLWQPARKVVDRLKYLTNLRERLLETKKRLQTPVEELMKIGNKDMANLLKKSMSKTIKGLEKDLQSIEAQMKDVIEGDDELKKLFNLVTSVVGIGFVTAINLIICTNEFTSFNNYRQLACYSGVAPFEHRSGISVRGRTKVSHMANKKIKRYLHMASLSCVKLDTELKACYERKVLSGKSKMSVLNAVRNKLLARVFAVVKRGIPYQKNNYKNQLVLS

SEQ ID NO: 383143 - protein, 331 aa, unidentified
MQFSYFVGVDISKDTLDAALYPAKDRQKDFLHFDNTKKGLGEMMAWLKTLGVKRSDLLICAEYTGVYTNTLIEFADRKGIALSLNSPLDIKRSIGLVRGKNDAVDAARIAEFAYRRRENLRLYEKPCDAIMKMQYLLTERRQYVRQRTALMNLHSAMGPYETPSGRSRNESAILHIEKLIKKVEDQLLSVASEDASIKKNFDLVHSVKGIGLINAINTIVYTNNFKSFESPRKYACYIGVAPFDHTSGTSVKGKTQVSKICRTQQKSELSMAARSAIIHDPGLKRYYQRKIKEKGGGKSAHGIVLNAIKFKLILRMFAVVRSGEPYKVLNY

SEQ ID NO: 383144 - protein, 354 aa, unidentified
MDDAGVPQRNRNLANDLAKLIPVLGALSPGTPVAFEAAYGWGWLVDLLEELELEPHLVHPSRCKAIASARLKNDKVDAASLAQLLRADLLPEAWIAPQATRDLRALLCHRASLVRMGTACKNRVHAVLADRGIPGHSSLWTGPGRAWLADLKLPATPRGIIQDGCGLLDALTTPIGRLEREIAGLAKPDPRVQALMVLPGVGRLTAMTLVAEIGDIARFPTARKLCAWAGLTPQVRNSDRKVGHGHITKQGSPWVRGILQEAAQTAKRHPMFAPAYTQLARRRGTDIATTAIARRLLARSVHILTQLETAPAPEQASTGRACVRMSLPTRPPGLTEQPGSGLTVMPTPPSGPRS

SEQ ID NO: 383145 - protein, 340 aa, unidentified
MTITTVGIDLAKNVFAVHGVDQSGRTVLVKPKVSRAALPELIASLPPCVIGMEACSGAHYWARLFRQYGHGPRLMAAKFVSPYRMAGKSGKNDAADAQAICEAVRRPHMRFVPVKDESQQAMQCLHRTRQGFIEEKTATYNRLRGLISEFGFIAPQSADALRHMVSVQKSSLPLQVQQCVDDLMVHVDRIEANITEYDRILSRIAKTDHRSQRLMELKGVGPTTACALVASIGNAHDFKNGRQLAAWLGLTPSQYSSGGKSKLGRITKAGDSYLRTLLVQGARSVLIGAGKRTDSFSRWVCMLVERRGYWRAVVAIAAKNARLCWASLHYGDDFRLYSAN

SEQ ID NO: 383146 - protein, 417 aa, unidentified
MKKNNNSAKKSEPRSKRAKSRGPVQRDAKEVLAELVGKLREKLDPRVGATSAGQEDPRGGLRPNLDRLTVGVDLGDQWSHYCILDLEGETLAEGQLRTTQQDVAELFQALNAARVVVEVGTHSAWVREVICLYGHEVLVANPRLMEGSKRRKRKNDRIDANKLARLGRVDPQSLHPMQHRSKEVRQDLVMLRARDALVVVRTELINATRGLVKSMGTRLPKCSSPSFAQKVEEAVPAEIREALLPLVRMTAALSDCIQGYDEKIEKLASEKYGHTALLRQVKGVGPITSLAYVLTLENPKRFVKSREVGPYLGLVPKQEDSGESQPQLGISKAGDQMVRRLLVGSAQYILGPFGPDTDLRRYGLRLCERGGKNAKKRAAVAVARKLAVLLHRLWVTGEVYEPLRHGMSQTTAHAAAA

SEQ ID NO: 383147 - protein, 416 aa, unidentified
MAEEIEWFVGVDWGSQSHQVCLFDARGECLEERAVAHGGPGIEGLCDWLIARTGATPELIGVAIEITHGPVVEALLERGFCVYAINPKQLDRFRDRFTVAGAKDDRRDAQVLGDSLRTDRHAFRRLSNDEPVIVHLREWSRMADDLQQERCRLASRLREQLWRYYPQMLELADDLAADWFLDLWSQAPTPARAARLRATTIERFIKKYRLRRWQASEVLCILKQKPLSVAPGVVEAASDHIRTLAARIRLVNQQLKAAHRKLDELCAQLIPSKDDEPGQQCEQRDVVILRSMPGLGRIILAVLLAEGWQPLRRRDYHALRILSGVAPVTRRSGKTCVVVRRYARNKRLENALYHWARVATQHDALSRRRYAALRRRGHSHGRALRTVADRLLSVACTLLEQQTLFDPTHEVGDAAA

SEQ ID NO: 383148 - protein, 417 aa, unidentified
MTDASRQWFAGVDWASSKHDVTLTDDSGKIIGRRIFEHSGDGLTQMADWLLRESGAMPADIQVAIETPHGPVVETLLERGFSVYSINPKQLDRFRDRFTVAGAKDDRRDADVLASSLRTDAKAFRAVVPADPEIVELREWSRMAEAHGQDLRRYMSRLRDQLVRYFPAFLALKGDDDAAWKLTLLELAPTPAMARSLPRAKVARLIKAHRVRCHDADELLAILRAPAPAVSDATLAAAKAHVLSLLKSIRLAAEQLKEANATLDKLTDALAEPEESESGQTKQRDAAILRSSPGMGRTILATLLAETPQAVRERDYHALRCHGGAAPVTRQSGKRRYVVRRLACNRRLRNALYHWARNAIKNDARYRAKYEALRARGHSWGRALRSIADHLLYVTCAMLKAGTLYDPHHATEAIKPT

SEQ ID NO: 383149 - protein, 363 aa, unidentified
MAKIKEKTESREKISFQGKNIYVGLDVHKKNWFSTIYVEQQFVKTFHLESDGDILYRYLTNNYPDGNYHACYEAGFCGFSVYRQLESLGIKCTVVNPCDIPQTQKGALSKTDSSDSKRIAEAFSKQMLKGIYIPDKISEADRNLIRYRTKVQKDLKAKRQRVKSTLNIYGIKIPKQYDKPYWTLNFIKWLQSLPIKEYSAKATLDSLIEDVLFLRKKLFTTNGQIRKLSQSEKYKECFGLLCSIPGIGLITAMTIITEVVDIERFGSFIKFNSFIGLCPSEFSSGEKERKGKMTTRSHKWIRYLMIEAAWIAIRHDPALTLKYQELLVTKTKKRAIVVIARKLLSRLYNVWRTKKPYEKGVLK

SEQ ID NO: 383150 - protein, 370 aa, unidentified
MAEPTTLFVGLDVHKESIAVAHASPDRSSEVVCIGQIGTRDADIEKLLRRRHSQAARLVVAYEAGPCGYGLYRRLAEKGVSCRVVAPSLIPKKPGERVKTDRREAAQLARLLRSGDLTSVYVPTVEDEAVRDLSRAREAAIGVLKDAKLRLKSVLLRHGLNDSGRATWNEAHLRYLAKVVCPTPAQQIVFQESLRAVSEQTERVRRLEDELVDIAATWRLRPIVDAFQARRGVQSHTAVTIAAELGDLTRFDTPRQLAAFVGLIPSEYSTGGSRRLGPITKAGNGHARRALVEAAWAYRYPAKVSAHLQKRIERCPKPIQEIAWKAQVRLCKRYRRMVARGKNPNIVVTAIAREILAFLWAIAREVPISN

SEQ ID NO: 383151 - protein, 420 aa, unidentified
MKSASNTPINTTLPEEPPNDVTAGLDWARDDHAVSVVNGRGREVARSTVPHTAAGLRELVAFLGRHGVGEVAIERPDGPVVDTLLGAGLTVVVISPNQVKNLRGRYGSAGNKDDRFDAYVLADTLRTDRARLRPLVPDTDATVAIRRTCRARKDLVNHRVAVANQLRAHLRNVLPAAVGLFTDLESAISLAFLTRFDTQDKINWLTPQRLGDWLAKQGYSGKVDPAVLHQRILDAPPGATGGHGATQAHITASYIALLHTLVAQIKALSTHIDRQLDAHADAHIFTSLPRSGRVRAARLLAEIGDCRARFPTPESLTCLAGAAPSTRQSGKSRTVGFRWSCDKQLRDAVTDFAADTRHANPWAADLYNKARARGHDHPHAVRILARAWLHIIWHCWQDNLTYDPNKHRALQHILAQREAA

SEQ ID NO: 383152 - protein, 390 aa, unidentified
MYLIGIDISKFKHDCFIATETGQVVKSSFSFDNNQEGFNQLLTVLLSLDHSQQIRIGLEATGHYGTNLKLFLHEHNFSFMEFNPILSDRFRQVSSLRKTKNDKIDAKLISQMLLSFDYKPNSLLSYHISKLKSLTRFRKKLVKDCTIYKERLINILDLVFPEYSNYFTQVWGKVSLYILKNYPTIQDIANINVESVLPIIKSLSRGHYSMPKLIKLIEAAKVSIGCKNDSHTLELKLTINLIEQMNYAIENVENEITIIMNKYNFKTATIPGIGIISAASIVSEFNDFSNFNSSNQLLSFAGLEPSIYESGTQTTYGHLVKRGSSYLRETLMNVAPFVMNYNNVFYQYYLKKRNEGKHHRVALTHLVKKLLRVIYYLETNAVPFDSSKLK

SEQ ID NO: 383153 - protein, 405 aa, unidentified
MGDIVEVAWVGIDAGKVSHHATLVDADGTIVWSRQVRNDQAAVEQLIAKAAATATTVRWAVDLTSAGAALLLALLIAAGQRVVYVPGTVVNRMSDTFAGEAKTDSRDSYVIAETARLRRDLTELITPNELVAELALLAAHRADLMADWVRGVNRLRELLTRVFPALERSFDYTTRSALILVSRYSTPDAIRDADADQLAAYLRSEEAHRPSIPGMVAKAHAAAAAQTVRLPGEAATAALITRQARKLLDLDREIKDLDKQITERFRAHPQARIIESMPGMGPILGAEFIAITAGDLAAFGTAARLATYAGLAPVPDDSGKRKGVRHRPGRYHRRLRHVFYMAAFSSLKTDGPSREFYARKRSERQRHTRAMIALARRLVDVLWALLRDNRTWQPEPPTPLPATAA

SEQ ID NO: 383154 - protein, 351 aa, unidentified
MPHKSTVHAVTAIGMAMGKNTLHMVGLDLRGAIVLREKVSRGRVASRLANLQPCLIGIEAGMATHYVARELAALGHDVKQVPPTYAKPFRQGHKNDFRDAHAVAEAVQRPTTRFVPAKTNEQLDLQALHRVRSRLVSERTAVINQIRGFLLERGIIVRQGLRFLRQQLPDILAKRTDVLSPRMVRIVADLAGDWRQLDERIETVTNEIETLAKSDDNCRRVMTVPGIGPIISSAMVAAIGSGAAFARGRDYSAWLGLVPKQMSTGDRTILGRISKRGNGYLRTLFMQAARVILLRPANWPKHGFGAWLIRAAQRLHPNVLAAALANKLARIAWTVLAQERSYEARVTKAAA

SEQ ID NO: 383155 - protein, 427 aa, unidentified
MGFIGGVQQQEFSERFRGKDPERLLAVPIDVGKHSAAALVCDFWGEIIVSPFNFALNESGFKGLTAVLSKAQGDRGSLETRVGLEHAGHYHRNLEARLRAEGLEVALLNPAQVKENRAQNLLRSLKSDARDLGAIADLVIRGKGRINREAGAAIAAQAALVAHRRRKVKARSALKCQIHSSLDLVFPGLSGCFKNLIDSKLGRLLLREGLDPQRVKRLGEDRLRSFCLRRHVRTSRDKAHQVTEAARGALLLPEAIAKVHAGNLASDIELLDHLDKEVADTEAALAEVLASTPAAILLSLPRVAVVRASLYGAGVGEPSRFQNAAQVYRLSGLVPKLYESAGTTRTGTAISREGKVELREAILELGKALRHGNADFASYAKQLESRGKKPGVVACALGNRANRLAFAMIRDQRPFDDSLWLERTGAS

SEQ ID NO: 383156 - protein, 347 aa, unidentified
MLHAGLDLSRKKLDVCLLSDQGDHLDQLVVPPDVDSLITLARRIEEVHCEPVCAVIESMTGARVVHDTLEQQGWCVEIADAQKVKGLAPLACKTDKIDSMVLAVLSHRDLVPAIWLPDPSVREERELARFRLHLVKHKSALKNRIHSTLINFGKPCPVSDLFGAEGRQLLARLHVPEPWRGNINASIELIDDLEEQIAEINRRLKDGHAEHPYIPLLLTVPGIGWVLAFTIAAEIGEIERFSSPEKLTGYTGLCPRVNQSGEKDRRGPLTKHGPTYLRWALLEATMHALRHPAYAERYERTKRRLGKQRGAKVAQVDIARRLSHAIWHMLSRKEKFAPRGAAFRLAA

SEQ ID NO: 383157 - protein, 394 aa, unidentified
MDRMFVGVDVSKDSFSVAGLDGEGNECFTGSYSMDSDGFGKFLEILTTRCPDLQKVLVGMESTGCYHINLFSFLSSQGIQAVVINPLLIANFAKRSLRKTKTDKKDARTIAKFLMENREEISQLSVSQDLQDLRDLARERESVSHLITATKAEIKRVLRTTFPELESVGDLFTRSMLRFVKEYPSARRVKMARLKDLAKVLNQPHVGSKLSFSVEDILRAAHRSIATVSPAKEVILQGKIATLVHLQERLEELTKLLTEACKATRVEEWKILRSIKGVGPKTAVPFLAEMGSIENFSSPKKLIAFAGMDPSVCQSGKFIGKSKLSKRGNRHLRRAIYLMASAVVSQNAFFKAYFVRRKREGLKPQRALLATAHKLIRVIFAMLSHRTYFQPKTA

SEQ ID NO: 383158 - protein, 353 aa, unidentified
MVVIGIDPHKRSHTAVTVDEAGRKLGQLTVNADDEGFLRLWAWAGRYGAARDCSVRWAVEDGRGVAGRLVRALIGQGAAVVWVPPKLMAQCRASARTRGKSDPIDALAIAQAAIREPGLPAVQLDETAAELRLLSDRREHLVASRTELINQLRWRLHDLNPALDAGAPRLIGPQTLTRLASALAVLPASVSRDIAADLVADITRLGEQIRHLEHRLHVLVTPLAPTLLAIVGISTVTAAKIIGEVAGITRFRSSAAFAMHTGTAPIPVWSSGKPQYRLNRSGNRQLNTALHRIAITQLAHHQPARDYRDRWRTHHPHATGKAAIRALKRQLSNVVYRALTTDHQQQQQLSQTA

SEQ ID NO: 383159 - protein, 352 aa, unidentified
MKQQTKSSNITVGLDLGDRRHRFCALDERGEVVEQDSICNDRVSLKKLAGRYHGALGVMEAGAHSPWISRFLEALGWRVVVSNPRKVRAIYQHERKSDQRDALMLARIGRMDLALLYPVRHGTAEGQQDLLRIKLRDSLVRARVAVINSVRFTLKSLGYTVRNSSSARFHKVVMEEVPESVREMITPSVQALAELTARIKMLELEINTLAQMKYPQSAQLQQIPGVGPITALYFVLKIEDPNRFAHVRDVGAYAGLCPRRDQSGESDPQLRISKRGDAYLRRLLVSAAHYILGPFGPQSALRASVARKLAVLLLSLWKSQQPYQPFPAACLNGEQEDRRSGTIALHRMEATD

SEQ ID NO: 383160 - protein, 349 aa, unidentified
MIIIGVDFHPEFQQIAFVDTDTGELEERRLHHPDEAEAFYRALLNEGKTVRVGMEASGHGRWFERLMGELQIELWIGDAAEIRTKRVRKQKTDRQDAQLILKLMLKDDFPKIWVPSWENRDLRQLLWHRHRMVQARTRIMNQLQAVALNEGLRCKKRLWRTERPRLESFNLAPWASRRRHDLLELLDRLNPTIAELSQAIEREVEKYPEARRLATHPGVGPLTALAFVLIIGEAERFQCGKQVASYLGLVPLEDSSGSRRRLGHITKQGSSILRFLLVEAAQVTVRSLPEWRSRYFHLMMRRGRKIAKIAMARRLAVSLYWMLRQEWDYQQYVEFGSYAGQPGHRHGVK

SEQ ID NO: 383161 - protein, 363 aa, unidentified
MTVYIGVDFHPYEQSVAYASDEDGEIGYRRFLHSDKQSIRAFYRKCGADAVIGVEATGCLWWFEKMLADGGHKLKIGDPRMIRRAALSRHKNDFRDAETILDLLMRGAFPSIVPRSEESREVLDLLHYRQTLVQKRTSIANQLQAFARGKGLARFRMPAVKGRRKLVDAPVTEIETLLVTSRLVLFDELTAQMKALESRLEKLAAEDERARLLMTHPGIGVINALALVHTLGEVRRFRRKEEVVAFVGLDPLEKSSGQTKRIGQISKHGSRLARHLLGQAAQACRDHRIRKFYLEVSRRRGRPKAKVAAARKLLINCYVMLRDGIGYEEFQRRGEVGLCEGSGEVRAKASVSGGLMARPAISI

SEQ ID NO: 383162 - protein, 344 aa, unidentified
MGEVSTIGLDIAKAVFQVHGVDGAGTVVIRKRISREKMLEFFADLRPCLVGIEACPSAHHWGRELSGLGHTVKLMPPSYVKAYLKRSKNDANDAAAICEAVTRPSMRFVPIKTKQQQTALMLHRTRQLLVRQRTMLSNALRGHLAELGVVSAKGRNGTAELLKIIADIEDHRVPPVARGILDVLARQYGAIGAEIGSIDKSILAWHRSCDASRRLAEIPGIGPIVATALVAEIGDWKAFASGRNLAAWIGLVPKQHTTGGKDRLGSITKQGNRYLRWLLVIGATAVIRYAQKHGTKNRPWLGRLMERRPAKVAAVALANKIARMAWAIMVHGDRYKEPKLLMAA

SEQ ID NO: 383163 - protein, 338 aa, unidentified
MPTDQTGQTYALFVGVDIAAQTAMVATQRPGAKASRSLTIEQTPEGYTSLLRQLQATGFVPCQVLVVMEATGSYWISLATRLVHEGFAVSVMNPAQAHHFAKALLKRAKTDAIDAQTLAQLAMILQPEPWTPPPQIYYALQQRLAQRDDLLNLRQQVRNQLHALVQHPEVIAEVRARMESLLATFASQLTEVESEITAALSQDSAWAAAATRLQSIKGVGWVTAAWTLVTTLNLTSCDTVDALTAYAGLAPMPRQSGSSVWHRPSIGHTGNGRLRTAFYMATLSAAQPNPVIKAFYTRLREVGKPEKVARCAAARKLLHIAWAVVKKDQPFDPNYALG

SEQ ID NO: 383164 - protein, 341 aa, unidentified
MDIAVLGIDLGKNSCSIVGLDSSGKVVLRRRMQRKTIVTTAAKLSPCIIAMEACCGAHHLGRILAAQGHTVRLMSPEYVRPYVKAQKNDDRDAEAIAEAATRPTMRFVALKSEEQLDMQSLHRARDRVVVDRTSLMNQLRALLLERGIIVPQGRAKLRYRVTELLAQPCEELSPRILVLIEDMLTRWQALDERIAAFDTEFAAEVKQNEAARRLTSIPGIGALNATALVAAVGDARTFARGRDLAAWLGLVPRQATTGGKPRLLGITKRGSKYLRKMLIQGARAALPTLSRSSTLLGQWLRGLLARAHSNTVVVALAAKMARMVWALLRHGSTFEHRAITV

SEQ ID NO: 383165 - protein, 318 aa, unidentified
MNTNTLQNINVGVDTGKSQLDIYIRPLDIYFTVPNTDKGITDAIKTIKKHKPQRVVIEATGRLEMPFILACDKAKLPYVVANPLRIKRFAEAIGQRAKNDRLDAELIAHYAERVQPELTKLKSENIRLMSDLVTRRNQLLTMQTMERNRRQILPKNISSTITPILTALKNKLEKVEAKIAKLIESSPEYQAKGTILQSMPGVGKVLAASLISNVPELGFITNKQASSLIGVAPITRESGRFKGKRMIKGGRPQVRTVMYMAMMSAIQCNPVFKATYERLLAAGKPKKVAIVACMRKMVVALNSMLRDGAMWDKDSVKN

SEQ ID NO: 383166 - protein, 372 aa, unidentified
MPDVSSNQPADVRLWVSLDVHKLSIVAATLPPTGGQPEVHRIETTRVAIRRLIDRLGGPRGLAVCYEAGPGGFDLLRVLTELGVACDVVAPSLIPVRAGDRIKTDRRDAKKLVRLYRGGQLSFVQPPTPETEGLRDLMRCRDDLRRARTSARHRVGKQLLRHGRIYREGKKQWTQMHRAWIARQRLDDELAHAALEQMLLHLDGLDRQLDALDRDLEQIARGERWASTIETLTCFRGISTRAALGLIAEIGDFARFSHPRELCAWLGIVPSEYSSGQQRHRGHITKTGNHHARRLLIEAAWAYHHRPRRGSRDSAEPDARAWQAQIRLHRRYHHLTTERGKRSTVATVAVARELAGFLWAAATHQPLVLETA

SEQ ID NO: 383167 - protein, 427 aa, unidentified
MEVIYSKACGVDVHKSFIVAVICDSTNQTPKYIRKRFSTFNNQLIQFKNWLIENDCNNVCMESTGKYYVPVYNALEGFISNVVVANPKWVAIIKGEKDDNKDAKWIADLFKLGIVRSSFIPDKDFRILREFTRYRYKLTCNRTSEKNRFTNALTVGNCKLDMVFSDIFGKSSQSIINIILNNDSFSDEDIIGSLKKNCKSTHEDILSSVNGISLTNEQKLRIKIVEDHIEYLNSSIKTVNTIIDSLIAPYEDYINLLCTIPGIDRNSAITILSEIGTDMSQFKNHYRLTSWGGLAPGCNESAGKKKSVKISRAGVYLKPCLVEVAHCAVKDKINTYYANKFNKISKRRGKKRATIAIARKILVAIYHMLSTGEVWNPKDLASNETSDKDRIKFTKNNFKQSLNQLLSLGLTSEQLINLVNQNAILDS

SEQ ID NO: 383168 - protein, 400 aa, unidentified
MDDIDDVGVFLGLDVGKSAHHGHGLTPAGKKVFDKQLPNSEPKLRAVFDKLAAKFGTVLVIVDQPASIGALPLTVARDAGCKVAYLPGLSMRRIADLYPGEAKSDAKDAAVIADAARTMPHTLRSLELTDEITAELTVLVGFDQDLAAEATRTSNRIRGLLTQFHPSLERILGPRLDHPAVTWLLERYGSPAALRKAGRRKLVEVIRPKAPRMTQRLIDEVFDALDEQTVVVPGTGTLDVVIPSLARSFAAVHEQRRALETQIGQLLEAHPLSAVLTSIPGVAVRTAATLLVTVGDGSSFTTAAHLASYAGLAPTTRSSGTSIHGEHAPRGGNRQLKRAMFLSAFAALHDPASRTYYDKCRARGKTHTQALLRLARHRISVLFAMLRDGTFYEPRTPRLA

SEQ ID NO: 383169 - protein, 340 aa, unidentified
MLYIGLDVHKEFCQACVIDESGRALSNERFSSTNEELDRFLDRFQDAKFVLESTGIWEFIYEGIERRGFEAVLAHPLKVRAIAEARVKTDKVDAETLAQLLRADLIPRSWIPPKDIRDLRQLVRQRAYLVRQASRFKNRIHAEILRRGVRRPENLKTPFAQRSIRWMRSLDIPTVTSCLNCLESVQVQVQEINAQLLVEFERRGDAQLIATVPGIGFYGALLILAEVDDVRRFHHPEKLCAYAGLVPTVSQSASSVKYGSISKDGSAYLRWILTESVHVHTRYEPGSQLSRFHARIAKRRGRRVATVATSRKLLRIIYWMLVRHEPFHSHGFNPVKRLHS

SEQ ID NO: 383170 - protein, 320 aa, unidentified
MNTNTLQNINVGVDTGKSQLDIYIRPLDIYFNVSNDEKGIKQAIKTIKKYHPERIVIEATGRLEMPFILACDNAKLPYVIANPLHIKKFSGALGHRAKNDRLDAALIAHYAEAIKPKLTQLKSENIRLMSDLVTRRNQLLTMQTMEKNRSQIMPKTVASSIKSLLTMLKKQIENIETRIEKLIETCPDYQAKNELLQSVPGIGKIAAASIISNVPELGYITNKQAASLIGVAPITRESGSYKGKRMIKGGRMQVRTVLYMAMMSAMQCNPVFKQHYQKLLAAGKPKKVAIIACVRKMVVILNSMLRDGCMWDVNSAKINS

SEQ ID NO: 383171 - protein, 310 aa, unidentified
MDTFVGIDISKDSLDIGIEPGDEVLHLAYDDKGIAQVVARLMQVAPTLIVMEATGGLEVRLASELVAKGLPVAVINPRQARDFAKATGQLAKTDAVDAAVLARFARAIRPAVRPIKDVDTRELDDLVTRRRQLIDMRVQETLRLGTASKIQRKSVAAHIAWLDKRIGDLDDDLTKRLRASDLWRTKDDLLRGIPGVGAITSLTMLAKCPELGDLSRREIAALVGVAPRANDSGKHRGKRFVWGGRADVRAVLYMATVSAIRCNNDIKAFSARLKQAGKPAKVIIVACMRKLLTIMNAMIKNKAQWRPKIA

SEQ ID NO: 383172 - protein, 351 aa, unidentified
MRKIAYLGMDVHSKHCVLGDMDFKGNFKGTQTFPTSEQNITKALEAIKAKNKYLTLEEGNLAYWAAQVAAPYVTEVIPCDPKENALIYRGPQKNDKVDTRKLCRLLRLGELKRVYHPETDERAIFKAAAQHYMDLRDQQIALKQKIKAMYHHWGVIDVAGEAVYSTAKRNDYLRQIKHIEIRNQVSRLYYVMDQTESMQASALKAMKQLGRKYPEIKQFKKIPGIGDILAHFFDAFIQTPHRLANKHRLWRYCRLGVTDRTSDGKPLGFKRLDRSGVAELKSLSYRAWMSALRGDNEVRRFYTTSLQRTFSRVHARLNTQRKIIATMYGMWKRGEPYNPKRFLDSPQSGAV

SEQ ID NO: 383173 - protein, 346 aa, unidentified
MMIIGCDFHPSWQQVSWLDTETGETGEHKLVTAAGDAERFYRRIPTPALIGMEATGNCHWLVDLLAEIGHELWMGDAAQIRASYVRQQKTDRRDAAHILKLLVEGRFPRIWMPSSEVRDLRQLLLHRYKLVIIRARVKNELQHLALNKGVQKKHKLWSQAGQQWLRELPLKPWAGRRRDDLLRLMAMLDQQILPLEEAVKAEALRDKMALLLQTQPGVGPITSLAYVLTMGDVSRFPRGKQVASYLGLIPREHSSGGRQKLGAITKQGNRMMRMLLVEAAQSAVRYDPEFRREYQHLCHSKAQAVAKVAVARKLAVRLYWMLRTQKPYPAVVHVESSPRVPLVGAS

SEQ ID NO: 383174 - protein, 328 aa, unidentified
MTKHTTICAGIDTGKRKLDVAIEGRCEQLQVDNTPEGHELLLAWLRQHRVKRVGIEASGGYEQPVVIELRRQRFVVVLFQPAQVRAYGKFQLQLAKNDKIDAALIASCTAAIRKIHAAPDPRLQPFAERLTMIDQIGEDVSRLKNRIESCRNAMIKKLWQEDIARLEKREKAEFTLLLALIRKHRDLARRLELIHSVDGIGLPTAVAILVRLPEIGEITREQAVALAGLAPYDDDSGERSGVRHIAGGRKRLRRALYTAALAASFRWNRQLIELYQRLIAAGKEHKRALVACARKMLIFANTVVARGTPWCDEPPTAKASIAAASSVS

SEQ ID NO: 383175 - protein, 323 aa, unidentified
MTYIGIDISKDSFVAAFPKVSGYQTQTYPNTVKGIRKFIGLLSATEHHCVMEATGNYGFLLLYLLDRQGIAASMVNPKQIKHFSRMMMTVTKTDPKDACMIAMYGEKMNPPIYKMPSETVMLLKQKKTIIRQLKKQLTASKNLKGSLVALPFQDKNGIKALDKTISFLASQIESLESELADLASSEFDRQVKLLTSIKGIGITLATALIVATGGFSYFNNAKQVSRFIGICPTYQLSGTSVHIKGGINRNGDASLRSLLYVASWSALRSNTTCKECYVRLKANGKPSKVALIAVANKLVRQAFAVIKSDAPYVDGFVSTRQTK

SEQ ID NO: 383176 - protein, 387 aa, unidentified
MSRNARVPIPVTTLDQDSTLVVVLELSARSWLVGARVPGIGRMSRYALAPSAEALAAWLGTAKARAGATGRTVVRVVLAYEAGRDGFWLARYLEARGVEVYVIQPSSVLVDRRARRAKTDALDVEMLMRTLLAWLRGEPGVCSMVPIPEVAEEDGRRPVRERQGLIGERLALLNEIDGLLATLGITGYRPLRRDRRAQLAALRTPEGDPLATNAAARIGRILDRLELVMQQIAELEQVRDAVLAKEVASGEAETMIRGLARLKGIGAELATVLVWEAYVRSFPNRKALGAYAGLTGTPFASGSTTREQGISKAGNRRLRSSLVELAWLWLRYQPDSKLAAWFRSRTGSVGSRMRKVMIVALARKLLVALWRFCRDGVLPEGAALKAT

SEQ ID NO: 383177 - protein, 388 aa, unidentified
MQIITDRPQAPTAIRTDLGAIFISLELSRSTWLITSLLPGGGEKMSKHAVRSGDVAGLWARFSQLKDKVQVRTGQVVPIIVIQEAGLDGFWIHRLLQDEGVESHVVDPASIATSRRRRRAKTDKIDGEALVRALLAYKRGEPRVCAMVRAPTPQEEDRRRICRERKTLTAERIEHVNRIKGLLFAQGISDYEPLRRKRRERLEALRTGDGRLLPEHLKAQIGRELDRLELTLQQIKSVETERDAMLSPSDEGTPAPGAMLKSLKGIGPEFAAVLWAEGLFRSFSNRRQVAAYAGLAPTPWRSGSVAHEQGVSKAGNPRLRTTMIQLAWLWVRHQPRSILTLWFHQRVQLNGGRVRKMLIVALARKLLIAFWKYVTAGVVLEGAETTVA

SEQ ID NO: 383178 - protein, 338 aa, unidentified
MDKIMTIGLDLAKNVFHVVGCNEHGKIVRKRMLKRSQVLAYFANLPVSLVGMEACASAHYWARELDVLGHEVRLIPPQYVKPYVRGNKNDYNDALAIAEAVVRPEMRFVGAKTPEQQDIQALHRLRERCLGDRTALCNQLRGLLAEYGLVFPKGVATLRRRLPELLEDGENGLSDLFRQLLAQGYQQLQELDGHIDFYTQELVYQSQQDDTCQRLQTIPGFGPIVASVFHSVVGHGEAYRRGRDVSASIGLVPRQHSSGGKEVLLGISKRGDRYLRSLLIHGARSVVIQAKAKDDRLSRWINRLVSARGFNKAVVALANKMARIGWVILAKKTTYQAA

SEQ ID NO: 383179 - protein, 351 aa, unidentified
MTIIGVDYHPSFQQIAFVDTETGECGERRLVHANQEAESFYRELKERGVSVRLGMEATGHARWFERLMTEVGFELWIGDPAQIKAKRVRKQKTDRQDAQLILTLLIENRFPKVWVPSLENRDLRQLLWHRHRLVQMRTRLMNQLQAVAMNEGVRRKKGLWSKSGRAQLESFLLAPWATRRRQDLLDLLDRLNPNIAELSTAIEQEGKKRPEVVRLMTHPGVGPLTGLAFALIIGPPGRFRCGKQIGSYLGLIPCEDSSAGKQRLGHISKQGNSLLRFLLVEAAQIAARDDPNWRRRFVHLAMRRGRKIAKVAMARRLAVRLYWMSRKEWNYQQLLEFGSHAGQLETGHGVQ

SEQ ID NO: 383180 - protein, 345 aa, unidentified
MKLYGGIDLHSNNCVIAIINEQGETLSCKRLNNDISVILSFLAPYKDKLAGLVVESTFNWYWLVDALMDAGFKLHLANPAAIQQYSGLKHADDHSDARWLAEMLRLDILPEGYIYPRELRAVRDLMRKRMDIVQQSTKNLLSVQSCYMRHLGYKLGSNKIKQMAAIRKGVDTEQVHADFSSMNTALSVISNLSLIRCAQQQINAIEGAILKQTSLSPEFINLSSIDGIGNTLALTIMLETGTIKRFDSPGNFSSYCRCVKGARYSNGKKKGATNQKNGNRYLAWAFTEAANFAIRYNPTVKKYYQRKLAKTNKVVAIKTVAHKLARACYHVLKDNVPFDEHKAFA

SEQ ID NO: 383181 - protein, 426 aa, unidentified
MIDPDSSVVTFSQLTHFGGFDWAQSEHQLVVVDPKGQIVLSLRFEDDATGWANLREKIAAFPRLGIAIETNCGPAVERLLDLGLLVYPMNPKAAERYRDRKAPAGAKDDALDAWSFADALRTDGHGWRSLLPQDPLTTELRLLCRDEIKLIEQRTAMILQLKAALHEYYPAALDAFDDWTSEGSWRFVIQFPTPEALVKAGKRKWEKFLHAHKLYRPQTAQKRLEVFARATAFANPNAAVTKAKSLLAVTLAKQLCLLESQLNEYRARIVDLFHDHPDSGSFGSLPGAGPKLAPRLLSEFGSNREVFQTVEAIQCYAGTAPVTKQSGKSRIVTVRHACNKTLRATIHLWADLSRKTCVWAEAYYQKKRADGMNHATAIRCLGQRWLKIAWKMWQTRTHYDESLHLQNQTRHGSWVIALMPQATPAP

SEQ ID NO: 383182 - protein, 290 aa, unidentified
MQNDRQSSETVILGVDTHLDIHVGAVISQAGKLLGTHIIQTNQAGYLELLDWARSFGSLERAGIEGTGTYGAALTRYLIKNSIYVVEVNRPDRSKRRLEGKSDPLDAENAARTVLSGSSKAIPKMQSGACEALRIISVARRSAVKACTQAINQLRALLVSAPQDVRDKLWKSKPHECVTACINSEVSEHSPLRIALCSTLRSLAKRWMALTEELNELDESLDKLTRKYASNLRSQFGVGPQTAATLLAVAGDNPERLKNEAALASLCGVNPLPASSGKTVRHRLNRGWLT

SEQ ID NO: 383183 - protein, 324 aa, unidentified
MRGTNIIETNQSGYLKLLDWARTFGILERAGIEGTGTYGAALTRYLIKNGIYVVEVNRPDRSKRRLEGKSDPLDAENAARTVLSGSSKAIPKMQSGACEALRIISVARRSAVKARTQAINQLRALLVSAPQDVRDKLWKSKPHECVAACINSEVSECSPLRIALCSTLRSLAKRWMALTEELNELDESLDKLTRKYASNLRRQFGVGPHTAATLLAVAGDNPELLKNEAALASLCGVNPLPASSGKTVRHRLNRGGSREANNALWAITLVRMRSDPRTRIYVDRRTGEGLSTKEILRCLKRYIVRELYPLILSDLAYVNRPLLT

SEQ ID NO: 383184 - protein, 331 aa, unidentified
MKNTDFAGIDVSAKELVVAIKRGQRAPRLLTFDNNPAGHRKLVRFLTKGDRHACVCLESTGVYSLDPALALHRSARIDVMVANPRAIHDFAKARFQRSKTDTADAITILEFAQRMPFLPWQPPDQEILDLRALARRIAALTTATTREKNRLHAARRSAELTGAIGHDICAHIQHLKTSIAELTREAVLVIRKNPELLAKFDHLISIKGIAETSAVAILAELAVLPEDMAAREWVAHAGLDPRKYESGSSIHKPARISKTGNRRIRAALFMPAMVAAHHDPHISAFYEKLIKRGKKPLQAIVAVMRKLLHAIHGMFQNDQDFDGERFYALTA

SEQ ID NO: 383185 - protein, 417 aa, unidentified
MSSEWLPFTITTHKGECIMNSVGIDVSKGKSTVAIMRPFGEIVASPFEINHTEEDFEKLVSQIKSLKGESRIVMEYTGRYYEPLANYLYNSGLYISVVNAILIHDYDNSSIRRVKTDKKDAIKIANYGLNRWLDLPEYIPEEELRQALKIYNRQFTQYTKLKVALINNLISLSDQTFPGIDGLFGKTPRKDGHQKWIDFIKDYWHKDCITTKTIKSLERSYQKWCSKNGYHYQSNKVNDIYQLANQTVASMPANANTKLIITETAKELISLIDALEKIRQEMNRIASQLPEYPAVMSLPGVGTTLGPQLIAEIGDIRRFHSRKALIAYAGIDSSPYQSGTIDIKSRGISKRGSSALRKTLFTVMDCILRHQQIDDPVYQFLDKKRAEGKHYYVYMIAGCNKFLRIYYARINAYLNSI

SEQ ID NO: 383186 - protein, 389 aa, unidentified
MFYVGLDVASEKHDCCILNEKKRILRSFSISNSAAGFDSLLSALAELSSDEIKIGLEATGIYSENLSVFLRRKGFNVTTINPLLIKKHQCATTLRKTKTDKADAKGIALFVAEEGFQPDLPVSYHIQELKSLSRARFSVVQDRSALKNKVKRLVALLFPELLGEFSDIFGNSATALLKQYPSAARLAACHCDTLAALLRKTSRGRFGRAKAEHLRQLAQNSVGNHSSAKAMELRMLLKRIDLLSEQISEYDREIKLIMDKIDSPILSIPGISYTLGAIIVAEIGDISRFSSPAKLLAFAGLEPSIYQSGKFVPTSGKMVKRGSPFLRWALLQAAGYAPNYSSTFALYRSKKAAEGKPAPVVRSHVAKKLVRIIHSLLTHSATFSDQLPA

SEQ ID NO: 383187 - protein, 344 aa, unidentified
MDNHTQYSGFAGVDLAKKVMQIHFVSGDGEITDKQVKRAEFLDFFRNRSKCLIGMEACGASQDWARKLEAMGHEVHLMSPKAVKPFVSGQKNDYNDAIGIYKAIFNGVRRVPVKSTEIRDLQTLRRIRSQVTKDRVKEINHVRGLLAEYGIVMGKSITAFNKGISSALESLKERGDVSPLVAEELQTTVESIKTKIERQKRLDREIEQLARGCKNYENFLKTPGVGPFTAAMLCVLLCDPSIFANGRQFAAYIGLAPRSRGSGGKNYVTGIPSKFNCDSESRAVLVECAQAIARCKNKSLWVEEILRRKPKKVALIAIANKLARQVWAMANKGESFKQMVVLTA

SEQ ID NO: 383188 - protein, 411 aa, unidentified
MSDSVFVGIDVSTKSNKVCILDQQGNRLSKLSVDNNSHGSARIVERVLEALEKSNCSNVSFGLEATSVYGDGLIFFLKQEPSLKPYNSKVFLLNPKQVHSFKKAYSDLPKTDDVDAWVIADCLRFGRINLREVYFDEQHKALQRLTRARYFVAQNIVREKNRYLTNLFLKFSGMCQEKLFSNNLGATATELAGSEFSLDEIVHMPLDELATFINTTGKGKFADSEALAAEIQKAARSSYRLPKAVEDSVNQVLAVSVISIQGYLQQLKTLDKSISTLMEAIPNTLTSIKGIGLVYSAGIISEIGSINRFKDQASLAKYAGLSWSRYQSGNFDADNTHLINSGNRYLRYYLIEATNLVRRHDPELKRFYELKYRETLKSPHKRALALTARKFVRLVYALLRDQRLYSPPRVR

SEQ ID NO: 383189 - protein, 343 aa, unidentified
MKITRVGVDLAKHIFQVHGVDRTERAVWGKRLRRDRWIREVQNTVEPGAEIGMEACAGAHHWARVLQSKGYVVKLIAPQFVKPYVKSNKTDANDAQAVCEAMSRPSMRFVAVKTVEQQDIQAVHRVRAGLIAERVAKANQLRGLVYEYGLQAPQRIDCLRRAIPGWLEDASNGLTERFRKLLAGLYADLQALDARVRELNQEIRLLGQQNEAIGRVQQIRGIGPLVASALVAMIGDARQFRNGRDVAVSLGLTPRQHSSGNKERILGISKRGDSYVRMLLVHGARSALRTAPGKDDRMSRWAVELAKRSHANVATTALANKMARVAWALLRHGTDYEPNRQAA

SEQ ID NO: 383190 - protein, 372 aa, unidentified
MGHHSEAFIGIDTSKSRNAVAISEGGRGGEVRYFGEFPTTEAATRKLVGKLAAKYGRLTFCYEAGPTGYGLHRLITSLGHECQVAAPSLTPKMPGDHVKTNRRDAVSLARLSRAGELTAVWVPDERHEAMRDLSRARQAVKKDLQGKRQQISSLMLRLGRYYPGKKTWGPAHMKWLRSQKLEHREQRIALEELLEGVRQESERVERLEQAIREAVPEWSLAELVTAMQAMRGFDLIAAVTIAAEIGDLSRFQNPRELMGYLGLVPSESSTGDKVKRGGITKAGNGRARRILVEAAWSYRYPPRVGRDKQPKVAAAPRRVREIAWNAQTRLCARFRSLVRKGKRPTIAATAIARELSAFIWAINREIMGNRQV

SEQ ID NO: 383191 - protein, 374 aa, unidentified
MAGDYNAFVGLDLHKETISAAIADAGRDGEVRLIGVIQNQPEAIGKLARKLIARHGKVEFVYEAGPCGYGVYRQLIALGLDCRIVAPSHTPVRPGNRQKNDTRDAVMLARLLRAGELTYVWVPDPVHEAMRDLVRARHVASHDTRKARTLIQLFLLKHGLRYEGKSWSNRHRRWLTDRRFEHRGQQIAFQSYLNRLNQAEARKKELEMQIADLMPDWSLGPMVTALRSLKGVGMVVAATLVAEVGEFSRFASPRKLMAYLGLVPGEHSSGGSIRPRGITKAGNSDMRALLFEAAWSYRTTPKVGQWMSTCTSNVPQEAKDIAWKAQLRLNSRYRKLVGRGKKSNVAITAVARELVGFMWDLARRFEPAPGAVPA

SEQ ID NO: 383192 - protein, 341 aa, unidentified
MNVIYYIGLDIHKKTIAYCIKKIDGALVRQGTVASERKALRKWLAELPGPWYGAMEATIFSGWVYDFLRPHAVDLKVAHSAMLKAITAAKKKNDRADAEKIADLLRVNLLPECHMMPENLRELRRVLRFRNMIVSTAVKMKNKMSGLLMEVGAVYDKKRLHGRKYFGALLERVEDVPDSVKELLKLSRNGFEMFDDIQKKLVAALRKNGLIRERVERLMSIPGVGELTALTWVLEIGDVSRFSSSRQAISYCGLCSDQHESAGKEQRSPISKKRNKHLQTKLIEAAKLAPHWNEQLAQLHDKELARSHKNRATLVVARKLVEFMLAVDRRQTDFDLLKEAI

SEQ ID NO: 383193 - protein, 340 aa, unidentified
MSKGSSIQVQETMYCGIDVSAKSLTVVTQRVLQSVEQRSFPNNSIGHSALIVWLRKSKSPVRVSMEATGIYSLDLAFALDAAEGIEVAVLNPKVANRFAQAIRRSKTDAADAEVLAEYTRRMPFTAWVAPSPSSMRLRSIIRHVESLSVQSAQNQNRLHAAHGSTSTPGCIVQDLKRSVASLELRIRRLRREAMTLVRQDDLLRKRYELLVSIPGIAQVSAMQLLAELSTLPSDLTVREWVAHSGLDPAHEISGSSLRKASRISRAGNRHLRRALYMPALVASRCDPHAKAFFKSLLARKKARLQALIAVARKLLHAIYGIFRSGLNYDGTKLFPRIKLS

SEQ ID NO: 383194 - protein, 317 aa, unidentified
MKTVPFEQVILRGCGIDVHKDMVVATISGEGLKTETRSYKTFSSSLTELKEWLLSSGITHVAMESTGVYWKPVYKILECPDMKVWIVNARHIKYVPGHKTDKKDSAWICKLLLAGLLKPSYIPEREQRELRDLTRYRNKLIQHVSSEKNRIVRILEDCNIKLSSVVCSLDGVVANKLIDMLIDKGHVTMDDITCIYHKKLEASPELLYQACEGFIEPHHIYMLQTIRKDMEQTKAIIADLTCRIKEVLSPYENVMELLQKIPGLSRKTVEDLIAEIGVDMEAFPTEKHLASWAGVYPGNNESAGKTKVVEPPMATNS

SEQ ID NO: 383195 - protein, 311 aa, unidentified
MTETNIGIDISKDHLDVHRLPGDERRRFDNSKAGHKALIHWIGETPARVVYEPTGYYHRALERALAAAGMPIAKVNPRQARRFAEATGNLAKTDALDAAMLTRMGAVLSLEARPVPSGIINDLRDLRTARNALIKDQVAAQTRAKAITLPLLKRQNAARLKQIEAQREAVDAEINALIQSNSDLAQRFAILCSIPGIAEVSAAMLLIEMPELGSLDEKQVAALAGLAPIARQSGNWKGKSFIRGGRQQVRQGLYMPALVAIRFNADLKTKYEQLIKAGKAPKQAITAIMRKLIILANALLKKDRKWQTRVA

SEQ ID NO: 383196 - protein, 412 aa, unidentified
MEVWLGGRSCPISEGGGGMDSLLVGIDVSKESFSVAGIDSEGNESFSRSYSMDSSGFGEFLKTITSHCEDLSKIIIGMESTGCYHINLYSFLASQQIHTLVINPLLIANYAKLSLRKTKTDKKDARTIAKFLLDHRQEVCQLSVSQDLQDLRDLSRERESLCHLMSATKVEIKRVIRTTFPELESMGDLYTRTMIRFLQEYPSARLVRAAKSKAIAKALKRPSVGNKLTLTAEEIVKAAQSSVATVSPAKEIILRGKIATLLHLQERLAEVTKLLTDLCQSTKLEDLEILRSIKGVGPNTAAPLLAEMGEVKNYSSHKKIIAYAGMDPSVHESGKYVGMSKLSKRGNRHLRRAIYLMTASVVSQNAFFKAYFLKRKREGLAPQKALFATAHKLIRVIFAMLSQRTHFKVKEA

SEQ ID NO: 383197 - protein, 340 aa, unidentified
MESTTVAVDLAKSVYQLSFANRAGRVQVRKRLSRPQFEKLLASEPPTRIVMEACASAHHWARRAQAAGHEPVLLPPHHVSPYVRGNKTDSADADALVRAAADPSLHPVAVKSEDLQALQGLVRIRQQYQDTRRARINLVRGLLTEFGVVLPRGAAGIVPRLRQALGSLPRRLSATLHEVVEEIAALEDRIASLDRELAELARERDDTARLMTLPGIGPLTATAFVGAVPDIHGFRSARQFSSWLGLTPRERSSGNTRRLGAISKRGNVHLRTLLIHGARAALLAARRRARSGKALTRLQHWAVHLQDRIGHNKAAVALANRMGRIIWAMWTRELDYDPTR

SEQ ID NO: 383198 - protein, 361 aa, unidentified
MSSIVAEQTVSEQYEYVIGVDTHAATHTFALVAAATGGVLAYAEFPTSPAGLSRAQHWMTQRVGSRAALVVVEGTGSFGAILTVGLQAAGRHVVEAARMPAGDRRGTGKSDDLDATRIARAVLGSPLGALRVPRELSSERARVAMRVLVVAREQMTKERTRTINTLTALVRTVDLGIDARRALTARQITTIAGWRDRDEDTTTATCRREAVRLARRVHTLNDDLTRNRSDITELVAGDTPELLELTGVGAVVAAAVLIAWSHPGRVRSEAAMASLAGTCPIPASSGNTVRHRLNRGGDRRLNRVLTTITIVRMRIDPATRAYVTRRRAEGRTTKEIMRSLKRYITRQLFRTLTAAHPVPAT

SEQ ID NO: 383199 - protein, 342 aa, unidentified
MQVTTIGLDIAKNVFQVHGIDAKEKVVVRKQLRRSQVIAFFSALPPCLIGMEACATAHYWARELRKLGHEVRLMPAKDVKAYLKRNKNDAADAEAICEAVRRPTMRFVQIKSAEQQGQLMQHRTRDVLIRQRTQIINALRAHLAELGIVAAQGDAGVNELRAIVADDRDERLPIDARASVIVLAAQLEALQTLIGSIEKRIKMQHRSNETSQRVETIPGIGVLGASAIVATVADPTIFRSGRDFAAWIGLVPRQDSTGGKHKLGPISKQGDRYLRRILIVGAIAVLRRAQENPGKYPWLTQLLARRPFKVVAVALANKMARTAWALMAHGGTYRAPELAEAA

SEQ ID NO: 383200 - protein, 342 aa, unidentified
MARSSSHYRLFVGIDVAATTCAVAWMHATTSPSRAITIDQTPAGFADLQRKLLLIEPVPQAVLIVMEATGTYWMRLATSLSAAGFAIAVINPAQAHDFAKALLKRSKTDAIDAQTLTELGARLQPQCWTPPPQVFTELQQRLVHRDGLVAARTQFRNQLHALVQQPIVIASVQTRLESLITTLDKEIATLEQEIAAALQQEDAWAAAAARLATVTGLGTLTIAWILTTTLNFSLTITPEAAANYAGLAPQLRQSGSSVRGRPRVGHGGNARLRRALYMATLSAIQHNPVIKAFYTRLRAAGKPRKVAVCAAARKLLRIAWAVATKEQDFDPAYATSSRQEAA

SEQ ID NO: 383201 - protein, 401 aa, unidentified
MSKKNTRNALDTSLSYAVIGLDLAKADCAVAAVPCSDDELGLIDRMDYESLFEQAEKLEPTLFAMEPCCGYSQISLRLQNMGHGVKVISGHAVKNWIATHKSNQKTDLNDATALAKLALYDHDLQPIRVKNVEECRIASVQAIRIQLRTQATKSLVCFKSLCQCWGIVIRRGSLNTKKMAEAVAAVEKLLGAEVASSLMILRDAYKFTMKQINALDKLLDALVEANEQARTMKTVLGIGTQTAARLAVTTGDIKRFPMPRSYVAYFGLAPRNIITGHSGTPSPSKRDALKPVSSRGQGKVSRRGDRVARSFIIQGAATIYMLYCKDMLPECQLRRWLHEQIKRGKPYGKIIVSLAAKLLRIVWALLTYGEKFDIHKAGVPRSVLAAMEKPLKHDAAAESAA

SEQ ID NO: 383202 - protein, 346 aa, unidentified
MLCATDERGQELKRRRISGNSATGFAQFFSELGEETKVVMEACWNWGWLYDLLAKIEGIDEVVLAHPYKTRLIAEAQIKTDRLDAQMLAKLLRGDLIAQSHAPSAATRARKHLLRQRLFWVRLRTMLRNRMHAILDRQHGLERPQLKNFFSRRGQTWLEEVQLPCAEDQPLLKQDLEVAELLEGKIKQLDRSIGQSQSEEEKLLESIPGIGPLFSSVIATEIDGVGRFNSATKLAAYAGVVPTTHASGGRVFNGRLLWQCNKWLRWALIEASWSAIQFSGYFGSIYRCARARGKNKNIAITMVAHRMIKIIWLLLTERRPYTETLPDRSEDGMTVVVRRKVLGLAS

SEQ ID NO: 383203 - protein, 482 aa, unidentified
MASNQKPPNQPSKGGAKARNGKRRRRKGMCLEDRPILEQNAAGIDIGSREIFVAVPPDRDQNPVRVFATFTENLQDLAAWLLRCGVTTAAMESTGVYWIPLYDVLEQHGIKPCLVNARHMKNVPGRRTDWHECQWLQFLHSVGLLRSAFRPEGEVCAVRTLIRHRGELVQAASQHIQHLHKALTQMNLQIHHVISDLTGVTGLAILDAILAGERNPETLAQFRDPRIKATEETIRKSLVGNWRREHLFTLKQSRELYRIYQEHIVACDQEIESLLNQFTPRVDPTEKPLPPDRKRNRAAKKRRKKTGNPDTTFDLRIEAYKLFGVDVTQIPGVETIALPLFSEVGRDLSKWPTARHFASWLALCPDNDISGGHVLWRGMRKVNNQAGRLFRLAAYSLHHSQTPMGAYLRRMKSKIGPPAATTATAHKIAIVFYTMVKNQLEYNDTIWATRDIKRQQHLEAKLKRQAKQLGYELVPIGEKPAA

SEQ ID NO: 383204 - protein, 353 aa, unidentified
MEKYIGLDMDCKKTVGCAIVPGRSERSATFGPDIESIRRYLRQERQGGYRVHAAFEVSGQAGFLYDALVDEVDSLHVANPSKMTWIYRTAKKNDRIDARKMAVLLSIGELPQVYMPSKEVRQWRQTILHRQKLVRDIGQVKNRIRAALKSEGHSKPACRGGWWKCANRLWMARLCDEQGVADVLWRLHLRNLLDELALLEVQRDRVTAYLDAYLAKQSGAKLLMSIPGVGPRTAEAVLAYTDDVERFDNYKQYCAYFGVTPKLDESGSVRRLGHISKQGPSVVRWVLCESSWKVVRYCPSLKAFYERVMAGQPSRKKIAIVAVMRKLLCIMRAMLTTGELFNEKLVQDILKAA

SEQ ID NO: 383205 - protein, 412 aa, unidentified
MLKIVYPICCGMDVHKSFVVACIATTNDHGVTNYKSKRFSTFTGDLRRCADWLSENNCKDVCMESTGKYWIPIYNILEHTCNIVLAHPKYVKAIRGKKTDKRDAKWIADIFKHDLVSGSFIPPADIRQLRDLVRYHWKLTNFNVGEKNRAQNCLTVSNIKLDDVFSDVFGKAASAITTRLLESNEPFDVKPYLTKNIKKPIEQIQAAVDGEMCAEQAEKLRIIRSHMDSLELCKLNLESLILSTAEKYIPQLNLVMTAPGIQSFAAIGIISEIGVDMSVFPTSKHLCSWAGLTPQNNESAGKKKTTRISRAGAYIKPLLVQCALCAIRTKKFPEVRNRYLALKKRRGHKKAIIAIARMLLTAIYNILKWNEVYNSELYRKADRPPAHREVSVEEAVFILQRQGYLVTAPAVT

SEQ ID NO: 383206 - protein, 355 aa, unidentified
MNQEKYIGMDVHAATISAAVINAQGKVLTQCVMGTKASTILEFIQAQRGTLAVTFEEGTMAAWLHDLLKPHVSRLVVCDPRKNALMRDGNQNDRADARNLAELLRTNQVHAVYHGKHGIRALRELGRSYSTLTQDSTRVMNRIKSVYRSWAIPCAGTSVYSRRHRAEWLAKLVEPGVRIRAEHLYQQLDSLEPVRQAARRELLRESRKHAAVKLLRQIPTIGPIRSALLVAILQTPHRFRTKRQLWAYSGFAVQTYDSGEFRFERGKLKRNRERITVRGLNRNHNHDLKNLLKGAAISAIERPGPLQDFYAALVGKGMRPSMARLTLARKIAAIILITWKKGVSFDPKQLQRQTA

SEQ ID NO: 383207 - protein, 417 aa, unidentified
MALEPIYRRVIGLDIHQAKISACAISEQSDGSVVMEMQEFGGFKRDRRALAQWAKAFDPEIVVMESTGIYWKSPYAALESVGIVAWVVNARHVKTVPGRKTDVADAQWLATLARAGLLRGSFIPPANIRYLRLIARQRQKLGGMLASEKNRLHKILSDAGIRLGVLVSDIHGQAARAMIKAIIVGKPMADVLDLAGRLRASRTELFEALQPEELSGAHLFVLSEIMAHIEELEARMGRFDQALLQGLSAWQPQLALLQTVPGIDQIGAAMLLVEIGADMDSFGGAEKLASWVGICPGNNESAGKRKSGKTRKGNAWVRRLLCEFAQAASRSRCALKDKFGALSIRKGHKKSIVALAHKMLRIIFAVLKNNKPYHDRSVDYEALSVQRNAPRWLKMLTKHGFLPTNETTITPAATLAA

SEQ ID NO: 383208 - protein, 337 aa, unidentified
MEYFAGLDVSMAETQICVMARNGSVIHKAKVPSTPADIAAELAQLPTCRRIVFETGRMAPMLYHGLRQLGLPVICVESRQAYQALKLLATHKTDHNDARGLAHLARTGFFKPVHVKSLPAHAVRSLIIARKKLVGQRVTLENQIRGLAVVFGVRLPRALSSTFIRQALQASEGIPGLSAAMQGLVAARTAVLAAIVAIDGDIRRMVRASDACRRLMSIPGVGQLTALAFTAAVDNPGRFRRSRDIGAYLGLVPRRHQSGEIDYTGSISKCGDRRVRTLLYEAANVMLTRYKGALKLKEWAFAVAKRSTMRKARIALARRLAIIMHAMLRHGTEFKAA

SEQ ID NO: 383209 - protein, 355 aa, unidentified
MDSKKYIGMDVHQATISIAVMDSRGKVVMDSVIETKAATILEFIQGVRGALWVTFEEGTCAAWLYDLLKPHVAKVVVCDPRKNALLKVGNKNDRIDARKLAELLRGGLLSPVYHEGASVRTLTELARSYLTITKDLTRVRNRIKGLYRSWAIPCAGQKVYAPWYRSAWLKQLTEAGVQRRAEWLYQQLDDLQPLRREARRELVAESHKHPANKILCEVPWLGPIRVALLIALIQTPHRFRTKRQLWAYSGLALRTRVSGEYRVTGDQLQRVKRQPSLRGLNENHNHELKALFKSTATRASTAAGPFGDFYAALLATGMRPTMARLTVARKIAAIVLTIWKKGDRFDPEHLKRQAA

SEQ ID NO: 383210 - protein, 368 aa, unidentified
MDRKRVWVGLDTGADVSRICAIDDDMQTLIEETVPSDARAVKTALMPLARGRIRQIAVEAGSTSTRLTHDLRAAGFPVVIYEARQVSRFLRIRNNKTDGNDARGLAEIGKLLPNISQVHLKSPEVQRIRSQLLFRHKLTLQRVACEGMMRSLLRLHGGRLASSKSVGKFEANVTAELDRLMEDAGIDLSQSVLPLLELSVGMRRFLQSIEKELADWAANEPVCSRFQTIPGVGPICAVSFFTAIEDPHRFKRASDVGPYLGLTPVVLQSGHSLRHGRISKRGNKITRAHLNLAASVMLGARMADHSLKTWGLAIAERAGRGKARSAVARRLAVTMLAMWKNGSSFDKTLAAARQSTIKGRPSTGASGF

SEQ ID NO: 383211 - protein, 424 aa, unidentified
MNFIGVDLHKKSITVCVMDQSRKVLARKTIYCKETTEIVAFFRKFRPFKVVVEATASYPWFVELVEPLADEVVLANPKKLRIIAESTKKTDKLDAQILAEFLVLDMIPRAYQPTPRQREHRTLIRHRQYLQGRITSVRSKIHHILSNYNADRKDVFSVNGGPAYFKEVPLSDADRFVIKQLWALWQDVVAQRTALTKKIKAFVAKAPQREKEDRAILMTAPGVGFVTAEVILSELGDIGRFRNAKTVASYAGLVPAVRQSGDKRSKDMRITKEGSGLLRWALVESAWRLVGSSPKWSAMYGRLKERKGSKRAIVAVARKLLCVLYAMLRTRTPYKIVTTKIKASPAPRKRLVIVRTSTAQQTPTTETATVEQTPTTETAKPGTTRQRSAKAPAAKQSATAEKATPRTTRRRSSRASTAEQTITV

SEQ ID NO: 383212 - protein, 410 aa, unidentified
MKLFCGIDWAEDHHDVAIVDEDGQLVAKKRITDDPTGLAQLVELFAGVGDSTADPIPVAIETPRGLLVASLRATGRAIYSINPLAVARYRERHSVARAKSDHADAMTLANILRVDAHLHRRLPADSELCQAIAVLARAHQDATWRRIKAHNELRSMLREFFPTFIATFTKRFPLGIASPEARAILAIAPTPGAAAKLSTNRIAAALRRAGRSRGIDHASTMIKTALREPQMRHLAQVETAMGKQALALLAALNTACVSVEELGQACAELFHTHPDYAIITSFPGLGDSTGARVLAEIGDDRRRFVDARALKAYAGSAPITRASGKSVSITRRRIKNDRLAAAGWIWAFGAATHCRPAGEHYRQRREHGDRHAAAQRHLFNKLIGQLHYCLQNQQPFDEAKAFPVIVTAAA

SEQ ID NO: 383213 - protein, 346 aa, unidentified
MKVSFCVGIDIAKDKFDVCIKERKADGRSVVKGSRSFSNAEAGFEELGVWIEKRTREVTSLLFVMEATGVYYENLAYWLEEHGFNVSVELANKVKHYARSLSVKTKTDKVDASVLASMGLERELALWHPMSVVYRELRDVSRLKLAYKRNLNALKSQLSAMESAHNKYDMVLSLQKEQIAFYENAIDKLDEELKEIAQRDPELYNRINKVCTIKGLQFNTVVAVICETNGFRLFHSIKQVVSYSGLDVKFNESGKHKGRTSISKKGNARIREVMYMPSLAAIQHNKPISQLHKRICEKNPTARKKGVIAGMRKLLVLIYTLWKKNEEYIENYGVAGIVQTSGNEEN

SEQ ID NO: 383214 - protein, 342 aa, unidentified
MGEVSTIGLDIAKSIFQIHGVDADGAVVIRKRISRAKLLEFFATLPACLIGIEACPSAHYWSRQLQALGHTVRLLPPSYVKAYLKRSKNDANDAAAICEAVTRPSMRFVARKSQQQQCGLMLHRSRQLLVCQRTMLSNAIRGHMAELGVIASKGRNGTAELLKIIADEHDDRIPAAARLSLDVLARQYAAVRAEIVAIEKRIHAWHRSSEESRRLEEIPGVGPIVATALVAEVGDWKEFTSGRSLAAWIGLVPRQHSTGGKQRLGGISKQGNRHLRWLLVAGAMAVIRYARQRGTKRPWLARLMERRPIKVAAVALANKIARMAWAMMVRGERFKEPRLLPA

SEQ ID NO: 383215 - protein, 344 aa, unidentified
MMIIGCDFHPSWQQIAWLDDETGETGELKLVHANGDAERFYGQLSGPVRVGLESTGNSHWFVDLLTELGHEVWIGDAGQIRAKQVRKQKTDRRDAAHILDLLIKNDFPRIWTPSREERDQRQLLIHRYKLVTLRARVKNELQHLALNQGMQKGRSLWSKDGQKLLRELPLQYWAGERRANLLELLKTMDQKLVVLDLAVKKAAEENEKARLLMTQPGVGPITSLAFVLTIGDATRFQRGKQIASYLGLIPREYSSAGKQRLGSITKQGNRFMRMLLVEAAQVAVRYDPQFRSEYLHRCHQKPKAVAKVAAARKLAIRLFWMLRTNKPYPEVVRIESSSRVALGG

SEQ ID NO: 383216 - protein, 349 aa, unidentified
MEHYAGIDVSLELSSVCIVDAKGKIVREAKVASDPDALVAFFKQLGFPVARIGLEAGPLSQWLYTGLAQAGFEAVLLETRHVKAALLAMTVKTDRKDARGIAQLIRMGWFRPVHCKSPGSQEVRALLVARKQLLGKLLDVELSIRGILRGFGLKMGVVTRKTFEARARELSSGQTMLETVVGAMLTARAALQSEYAKLHKTMLVIVRDDKICRRLMTVPGVGPVVAITFKTAVDDPTRISKSKAVGPLFGLTPKKYQSGETDVTGGITCVGDMMVRTALYEAANILLSRVTRFSALKRGHGGGETARIEAGQGRARAQDRRDFASYVGRRDGFPMDESGVGLGRRGALS

SEQ ID NO: 383217 - protein, 312 aa, unidentified
MQDILETCCGLDVHKETVVACLLKGGTDAKPETNLRTFPTLIPGLEELKTWLEEENCRHVAMESTGVYWQPVYNILESAFDGNMVVIVANARHMKNVPGKKTDMKDAEWIATLLRAGLLQGSFIPSQPIRRLRELTRYRKSIVEEITSQKNRIEKHLQSCGFKLSTFLTDIFGVSGRAIMDHLARYGKISSQDVDQYVKRRARAKLNEIKLAVNGKMDRLQREFLKILLKRLDESYEHLQLIEQKIDEELEKYQRQLEQLDGIPGISKTAAAAILAEIGIDMTRFKTAEHICSWAGLSPGNNESAGKKSLPE

SEQ ID NO: 383218 - protein, 313 aa, unidentified
MYKYIGIDVSKATLDLYDGKKSYKVSNDTIGFKEIEKLSTKEKELCFIFEPTGIYSHAIILYCQKHKIKAIIVGSKEARDYARSIKQRSKTDKIDAKVLYRYHTQIEQEHITVPFLDTHMRKVTQRRNVYEKYQKVILQLNNLIEATDKADKVLLSSLKRQITSLEKSSEKLLVEIEKLLLNKEEHKEAFTHLQTIPGIAKKSALVILMEFLRYPEAKSNEMVALMGLDPVLKDSGVFKGKSRISKQGGKYFREKLYMSTVVAIQYNDRLKCFYERLVQNGKPKKLALIAAMRKLLRIAFAVIKNKEPYVALV

SEQ ID NO: 383219 - protein, 398 aa, unidentified
MKKNNITGYTTKKPRHRKRSKRNPMNMYLSSAPPTQTVGIDLGDKTSRYHVVDEAGVTKKEGSAATTKKGMAETFAQMTRSRIALEVGTHSAWVSRLLASFGHEVIVANARRVRAISDNNSKDDRMDAQLLARLARVDPGLLYPIRHRGEQSQQHLAMIRARAALVDGRTALINTARGLVKAFGKRLPACDADQMGVDKLEDLDGGEQAAVMGLLRSVEAMGEQIQEYDKQIAEIARKQYPETALLQQVHGVGQLIALTYILTLEDAERFERSRDVGCYVGLRPKRKESGESQPELSITKEGDEYLRRLLVQGAHCILSARAPDTDLKRWGLKLAGEGEQQAGAKESKAKKQKKSKRAKKRAVVAVARKLAILLHSLWASGEVYEPLRNSQAAAAAVA

SEQ ID NO: 383220 - protein, 391 aa, unidentified
MIYVGIDIAKDKHDCIIKNSVGEVVFKTFTIKNNLDGFNDLYQKIESVMEDVSKVKVGLEATGHYSYNLLGYLIDKGLPTFVINPLHTNLYRKSLSLRQTKTDKVDASTIVSMLMSDVNLKSYSDTSYHNEELKSLTRYRFDKVKERAKLKISISRLVCILFPELEKLVPTLHMNSVYSLLYEFPGAKQVASAHLTRLSNLLVETSKGHYDKDVAISFREAARASIGPNMPAKSLELKHTIKLIRELDSEIDEIEGEIKAIMDTINSPILSIPGISYRMGAMIIAEIGDFDRFDSADKILAYAGLSPSTYQSGQLDNCHPRMEKRGSRYLRYALFNATIYVCHWDSTFNAYLAKKRFEGKHYYVAVSHATKKLVRLIYQLEKNNQQYNKAF

SEQ ID NO: 383221 - protein, 444 aa, unidentified
MKALPVLDPKAAAIDVGSERLHVSIAGEEPKVFGTFTGDLEALRDWFKQEEVRTVAMEATGVYWLYLYEVLEAAALKTVVVNGRHVQNVPGRKTDMADCQWLATLHAHGLLRGGFVPPADIRQLQDYQRLRADHIIGAASQVQKMQQALERMNIKFHDVISDLTGVSGLKVVRAILKGERRPGELLALCDEQIQKKKSAAVKESLRGCWKKEQLFALRQALELWETYQQKIADCDREIESLLQQLAGPQGPQGGNAIVGPVKLAPAKMLGKNAPVIERCQELLARICGGRDATQIPGLGEYLVAQLISEVGVDMTRWQNEKHFTSWLGLAGGRKQSGKRKGAVKAHRNRAGRMFCAAARSLAQTVDKALGGFYRRLRGRVGGLAANVALARKLAQLFYRLLRYGADYVEKGLKVYEAKVLETEARLLRKLAKKQGFTLVPSSLN

SEQ ID NO: 383222 - protein, 348 aa, unidentified
MFVGIDVHKDTHTAVGISPYGEKLFEITVGNYKNDFETLEEKVKEHSGVLSPFFGLEDVRGYGERLAGYLYEKYPVYHVPSILVDRARQNATHPEKSDSLDALGVARVMIQSIDTLLPYTISQESEKAKQLKEISIDREDLVLERTRLKNQVHTLLYRIYNTEYEQKFKDPFSLKALRFWRNAKPKCDPYLLKTMKRKVRRLLDIHVEVVDLEKDMDKLLTEGKYTIQTASGCGVVLASTIVGEIGDINRFHSPGALSKYAGCSPRERSSGKKVRHVKSRSGNRRLNCAFHRMALAQISRMGNDRAKAYFKRKISEGKSKSQALVCLRRQMVNIIWMMLKHKTIYRDA

SEQ ID NO: 383223 - protein, 344 aa, unidentified
MEISVLGVDLGKNVCSVVGLDASGAVVMRRKVRRETLIALAEKLPACIVGMEACCGAHHLGRVFSAHGHDVRLMSPEYVRPYVKAQKNDDRDAEGIAEAATRPTMRFVELKSQDQLDMQTLHRSRDRLVGERTALINQLRAILLERGFVAPQGKRKLEGFLALLMDEQGGAGLTPRIILLVADARKQWAELDRRIAAFDAEFVRWVKENDEARRLTTIPGIGAIVASALVAAVGRAESFDRGRDLAAWLGLVPRQFTTGGRPKLLGISKRGNKYLRKQLIHGARAALPYVAERDTPLGRWAKGLISRAHRNVAIVAFANKLARIAWAVLRRHERFAAIGTPTAA

SEQ ID NO: 383224 - protein, 344 aa, unidentified
MKISTLSIDLAKNVFQVAGFNSNYKRECNKRLNRAKLNAFMANTPPCRVVMEACYSSHYWGRVFSSYGHTVDLIPAQHITPFVRGNKNDSNDALAIYEASLRPHIKFVPIKTEAQQEILMLHKIRERLLQNRIAATNQLRGLLVDFGYVFPVGMKALEQGIIALESDSELRPQLRIMVSDIYTEYKTLVKRIKAIEAMLTAHVERDTNAKILHSIPGVGVLNASAYAASIGNGQAFKNAKELGVWLGLTPKQYASGDKSKMSGITKRGNSYLRKQLIHGARALIARSHHKTDALSQWINQLREKKHFNCVVVATAHRLARLMWILLTKQTLYSPQYVQNTQKDA

SEQ ID NO: 383225 - protein, 350 aa, unidentified
MQKQTENMQATKNFPLWFGLDVSKDSFTAAGRSILRDEPTMFPSEGKYTLDRKGVGAFLKWAGSKAGVFEYGIAMETTGVYSGRLADLIRKAAPGRHVAVCNAASVSLYARSFTEEKSDKADAALIARYACDRNPPEPRQMSPEETRLREIARARNAMAEQLLQARNRMEGLEDRAVLKIQKRLVAAIERAIAGLERELEAAVKASPEIRAEVELMTTAPGVGFLSAACIYAELGSLKQYTRKQVSALSGVCPVNRTSGTSVRRHTMSHHGSRLLRRILFLDSTQAIRKMPSLGQFHDRLLARPDSSRMTAKCACMRKLLLILHAMVVNGASFDPDYKSEKRCKNVAEAT

SEQ ID NO: 383226 - protein, 345 aa, unidentified
MNNTIVGVDLAKNVIQVCIVKDNEVVSNKEIIPEQFMLWLLNTKPVTVVFEACGMSNYWKQEALKHGHDAKLVSARLVAMIRQNQKTDRNDALAVAQASQLADVNFINGKNFKQQEMQSIIRMRELALKQKVAVSQQITALLLEFNIRVSARQGGLSGVIQAVLEDADNGFAVAFRQALAATWQSYLSLLEGIKAYEVALERILKEHPECEKLLALEGVGVINAVNLYIAIGCSDIGVFKSGREMSACIGLTPVQHSSGGKVKIGSISKRARSHSLRSCLISGAMSIVNLMGKREPKTEKERWLKQLIERRGKLCAAIALANKTVRTAFALLTQGTEYKAQPLMA

SEQ ID NO: 383227 - protein, 322 aa, unidentified
MAMLSCCGIDVSKDRLDVMVLPEHQSFAVRNDASGWAELIARLRRFTIVAIGLEASGGYERGAMRALLAAGMPARRVNPLKLRQFARASRVLAKSDPLDARVIATFVAIMPTQPAQPRPPAIERLAEMLAVRRQLSAEKVAAENASALLEDAMLQRFSRRRIARLAADIDMLDHHLVEIVETDAALAHRYQLLTSMPGVGPALACTLIALLPELGTMSRKQVAALVGVAPYAFDSGKLKGRRCIWGGRAPVRQVLYMAAMSAGNWNPVLKAFRQRLKAAGKLPKVVIVAVMRKMITMLNAMVRDDVVWADHLHGRHTVPTAW

SEQ ID NO: 383228 - protein, 407 aa, unidentified
MPYTVGLDWAQDDHAVCVIDEQAQVHLRCTVVHSASGLADLIQQLRRVAGPAALPIAVERPSGLLIDTLVEAGFPVVPIHPNALKASRPRYSAAQGKSDPGDAFILADLLRTDGHRFRPLHPLSDDTRALRALARSRDDLVVQRVALANQLRALLESFWPGAAAIFADVDSPIALAFLARYPTPASAAHLGEKRLAAFLARHAYCGRRPAAELLDRLRAAPAGLAGPAECEAKGELVRTLGAVLEPLVTQLQQLTASLEHAVAQHPHGPIIMSFPRAGRVNAAQILAELGDDRARFSHPDQLAAEAGVAPVTYESGKHRGVGYRWACNKRLRRAVTCFADNSRHASPWSAQVYRRARDRGCDHPHAVRILGRAWLRVLWRCWQDRKPYDPAAHRRARPLLLAAHPAA

SEQ ID NO: 383229 - protein, 415 aa, unidentified
MLKIVYPICCGLDVHRDFVYSCVATTENGVTTYKSHRFSTFTKGLRELLSWLLQNNCRDVCMESTGKYWIPVYNILESDCKIVLAHPKYVKAIRGKKTDKKDAKWIADIFKHDLVSGSFIPPADIRQLRDLVRYNVKLTGYTTGEKNRAQNCLTVSNLKLDSVFSDVFGKASSNIIGCILKTPSEKISDVSVFRTKGMKATDEEVLDAVDGEMCPEQAEKLRIIRSHMDGLELCKANLMSLILTTAEKYLPEINLVSTAPGLTAHSAISVIGEVGVDMSVFPSSKHLCSWAGLAPQNDQSAGKKKTTRISRAGVYIKPLLVQCALAAIKSKNKHPEIVSRYNALKKRRGHKKAVIAIARMLLTAIYNILKKHEPYNPELYRKSDTPPEHRKVTVEEAVFILQRQGYIVSSPTPVG

SEQ ID NO: 383230 - protein, 415 aa, unidentified
MKFEKDTSGIKRYIGLDIHKEYALVGGQNAQQEWVMQPRRIGMEKLREWAAANLHKGDAVVIETTTNVWDVYDIVEPLVSYVVVAHAGGVRQIAEARVKTDKKDIERLLRLLIADIVPEVWVPPVEVRELRGMISYRNRLVKTSTMIRNRLQSLIHRHNLILPKGKLRDKGWWDAQQVSALEKIQIRQELAMLDELEKHKGEVDGELGRQSLGEVWGKQAMRLLQLSGFGVIVSVTVLSAIGDVSRFESAKKLVGYSGLGAGVHDSGKEHIEKRITKSGRKELRWAMVEAAWQAIRISPYWKEQYEKYLRRMRKPNQAIVVIARKLLVAVWHVLTKEETDVHASEEDLAYKMLVLAWDLDESVRMGLTYKQFAKYAMMKLGIQTDITRFVRRNVPRRVASNAEVLARMEELGIPA

SEQ ID NO: 383231 - protein, 303 aa, unidentified
MTSIGQWEMAQTCAKLESNAVVVGIDVSKDHLDAAQYPSGDLIQTSNDTKGLRTLLRWIGRQRAVHVVFEATGPFHRQLESHLAKAGIPFSRINPRHARKFAEATGKLAKTDRVDAVMLARMGALLEPRTSEICNEQQSALQELAAARRNLIRDRTALLNRQQNLQLSLLKRLTRYRLRQIEAQIAAIDQAISELITTDGSLSRKRAILVSIPGIGEATAAMLIADIPELGTLENGQDAALAGLAPVTRQSGKWQGKSFIRGGRIHVRNALYMPALVAMRHNPDLQSIYLRLTDKGKHAKMAR

SEQ ID NO: 383232 - protein, 367 aa, unidentified
MPTRKLQNLPDFRGQKFYVGIDVHKNSWSVSIHSIHLSLEYFSQPPSAKILINHLHQRYPGGEYYSVYEAGFCGTGIHEELCKAGVRNVIVNPADVPTTDKQNKNKSDLHDSRSLAFHLEKGNLHGIYIMPRQQQELRSLFRLRQSKARDLTRTTNRLKSFLSYCGIRFSQDFDGREYISAKVMTWLSQVEMASEAGKIALHKYMDDLVYHRGQLLKITKALRKQIQTKYHEPYECLLTVPGIGAITAIALLAEIGDFNRFDNHAQYCSFLGLVPWENSSGDRVHIKGMQPRSNKHLRPLIVEASWVAIKKEPYLLKYYRPHAIRNSKRAIIKVARKLALIAKSVAQNLQQYQSDYYLRTEKMKLMI

SEQ ID NO: 383233 - protein, 520 aa, unidentified
MSKSRSQPRRRKTNFVQKPNGALGPRVQAVGPERFGIVMVDVSKQRIQTQVCDFYGNEIVPFTVYEQSRSGCADCLRSIADARARAGLLDLVIAIERTGEYHRPFQRAAQQAKYDVRIVHPLATHHFRKLANPGNKTDPTDLGGIHRATVNGFGLIERILPPEYLQLQLLIRHRRDLVHKQTTLCCQIKETLHAIMPGYEQCFTRLWDSTLALPIARATGSAEAVLQHGVPGLAKLVEHGHWSRHQTTLHRIVQWAQAAPPSHPQNAIVRAVLNDLDGDRLEKNRQIHDLERSIAMHLAGTPFIRLLIIPGINVVSAADLAGEMGPIHHYANANAITGRAGHFPARHQSDQVDRPDGALIRAANRRLRAALMQIADNLVTCNHYFRAKATTWTAADKDPRWIRVKVAKSFTRIAYVILAGDAPFRHPCLQADSYVIQKLNAFHVAHATPMADVMTSVRAAIAQLPRAQHAHEARPWQQAYDRQQAARRRGPQPLSEIILEVLARLGVGTLQSTDEGSGLG

SEQ ID NO: 383234 - protein, 326 aa, unidentified
MTHAAEASKAEAIPASITIGIDVSKDHLDAARHPGGDTIRIANTRKGQTALLRWIGDITLVARVVFEPTGPYHRTLEERLASLGIPLIKVNPRQARRFAEATGRLAKTDRVDALMLARYGALLEPAPRPVWSETQNRLSALVAARRSLMRDRTATLNRLKTVTIGLLQRHARHRLRQIEAQVASLDAAIDGLVKEDAPLSRRRDVLASIPGLGTVTAHALLADMPELGTMEEGQAASLAGLAPITRQSGSWRGSSFIQGGRATLRQALYMPAIVAMRFNPDLKRVYDRLIAKGKHAKIGITAIMRKLVVLANALLRKDRLWTPKDA

SEQ ID NO: 383235 - protein, 390 aa, unidentified
MNQTEGKRIIGLDMHPDVFAAAALSADAKRQHADWVQDRLPTARLEEWAKKRLRKEDVVVLEASGNSFEVAARLHACGYTAVVLESAQAGKIRDNFCNDDRHSAVKLAKVYRSGLAKEVWQPDTKTREYREVFFAHRNAVKDATRCRNRIRAFLNEHCVRLKPGVRLTEAGGEATAKAARDWTPLQTDLLAQKFAQLREVETRRRQLERIMVRELVANARWASLWRLMGIRHRVAFALMAMVGDVHRFPTAKKLVGYFGLAPRKDQSGNDKDGRDKGLGKFGRGDVRGLLLQSAHNALIQRDSPLHKWGWKLLVRKHRNEAAVAVARKLTVSVWHLLMGHFTPLVEATDHLRVKLLKLATVIGKNGIESLGFANRDAFVDAQIKSLQLSP

SEQ ID NO: 383236 - protein, 431 aa, unidentified
MQVIYQKACGIDVHKSFIVAVICDSTSAEPKYIRKRFSTYQNSLIQFREWLISNDCQNVCMESTGKYYIPVYNALEGYISNVVVANPKWVRAIKGEKDDKKDAKWIADLFKLGIVRSSFIPSKDIRVLRELTRYLYKLTCMNSSEKNRYQNALTVGNCKIDLVFSDVFGKSASSIINLILSNDSYSDEEILSKVHKRCKSSKDDILDAVHGTQLTDIQKSRIQIVEEHMNHLKSLQSKISDLIESMITPYEQYIDLLCTIPGIKRKSAITIISEIGINMSQFSNHHRLSKWAGLSPGQNESAGKKKSVRISKAGVYLKPCLVEVAHAAVKDNQTPYYAIKFEKIKKRRGKKRAYIAIARKILVAIYHMFSTGESFNPKDLGDVETPTKQRINYISNNFKQSVKQLKSVGLTLEQILDIIQDTSDIKEVSTV

SEQ ID NO: 383237 - protein, 414 aa, unidentified
MKVVYSICCGVDVHKSFLVATIITTTDGIQPHYQKKRFSTYNGDICAFKDWLIANNCRDICMESTGKYWIPVFNILEKHGIVVTIANPKWVKAVKGNKDDTKDSKWIGDLFRLGLVPGSFIPPKQIRLLREFTRYRFKLVSMKSSEKNRFQNAFTVCNVALDSVVSDMFGKSATAITDYLISDEAFNPEHCVSLLKRSLKQKSNSVLESIEGYSIEPEQKVRMRIIRSHLDYITETIKNIDTAINSMVTGYESAISLLCTIPGVDRACAIIIISEIGTDMTQFESSKRLCRWAGLTPGNNESAGKKKSVRITRAGVYLKPALVQVAHAAVKSSNSPYYKHKYDQISKRRGKKRAIIAVARMILTAVFSMLSTGETWNPCDLFKIDMPEELREKQKQKAIKQAIKLLESQGLSVS

SEQ ID NO: 383238 - protein, 345 aa, unidentified
MPIVGGLDIHRKQITFDCLDSDTGELVRGRIAPADRAHLADWLARHLASRPEVHLAFEGCTGWRYVAEELARAGVSGHLAEPADTAALRGRKRHAKTDRADSQHLRQLLSDGRLPECWIPPAQVLEDRALLETYHDLRVEHTAWVQRIHAVLFHQGASRLCGELRSPQGQAELAAIATAELSAVGQLQVATALSMLTVLEAHLETLRRQLINAAGHLIGAKVLTARLYGVGPITALALTCWLGGAGRFSSARKAVRFAGLDVTVHSSDGKRSPGHLSRQGPEVLRWCLYEAGKNHARSTAPDHDYYAQTQQRIDGKRAALSEARKIVRQACHILTDLGDDAFTST

SEQ ID NO: 383239 - protein, 347 aa, unidentified
MSISMIGIDTAKNIFHLHGVDAQGKVELKRKLRREELIAVFERQPRCTVVMEACGAAHHWARVLGGLGHTVKLIASEAVKPYVKRGKKNDPADAAAICAAASRPDAKFVAVKGLEQQGVLALHSVRSLLVKQETMLANAMRGLATEFGLVVPKGMGKLEELVALVEEGEGIPEQARKAFVELREHRRATAERIDGLERQIVVHARHDDTARRLATIPGIGPITASLTAATVGDGIGDFKSARHFAAWLGLVPRQHSSGGRTRLGRITKTGNRAIRTLLVLGATSMVYRAGQWNSAAGAWVRGLLERRPVRHVTVALANKMARIAWAVMARNEVYRARRGVAPAAATA

SEQ ID NO: 383240 - protein, 326 aa, unidentified
MAKIEKICGIDISKKTFDASITKDGEIRSKKFTYDTLGMQSFLQFLPTESHCVMESTGTYHCRLAYFLHEQGVTLSVVNPLSVKRYAQSLMLRAKTDKADSRLLISYGKSFDLAQWHPREDCYIELQQLLNLQSQLIAQDRVWANQLEAISHSVVKNKLTIERLLEKRSQIKAELELIEKEQERIINECDRESFEYVTGIPGIGKKTAITLIATTQGFKNFDNSKQLCSYFGLSPRLVSSGTSVKGKGHICKMGLSEVRKLLYMCSLSAKRKNRACRELYERLLRNGKSKKLALIAVVNKLLKQVFAIVKKKIKYNDNFYPTKFAL

SEQ ID NO: 383241 - protein, 387 aa, unidentified
MTKNKGRVVGLDVHPDSFAGAVVEGSDPAQARVLSTSTRVQLEQLERWALRHTSTEDRLVLEASGNAFAVAERLRMIGRKVEILDSHCAGKVGKVYCANDRVDAVKIARIYLSALSPIVWQPDAKTLERREVFSAYQAVVKESTRAKQQLRSMLNEHCVRLEKGFRLCHPKAITRLLALREWTPARTMLLQQLHGSLVAARARRTLLRRHMAQEIVADDALMRLSRLCGINLVTLYGVVSAVGDVHRFTHSKKLVAYFGLNPSVSQSGNFEGSGALRRHGRGALRALLIQSGKKLLEVANPLQKWGLAVAARRGRNKAAVAVARKLCVAVWHVLMGHVIGALERLDTLETKLSKFATEIGPAALAALGYNNKADFVQKKLYVLRSYP

SEQ ID NO: 383242 - protein, 349 aa, unidentified
MTVYVAVDFHAREQTISYCNSTDGEIHRRKLRHQHDAVRACYQQFTGEVIVAFEASGYSAWFEQMLAELGHTVWLGNPAEIRRKAPRRQKNDRRDADLMLDLLLKGDFPKVHGFSEESRTVLRQLRYRHKLVKVRTIAKNSLHAIGINAGLPLKRRLLTEPGIAQLQALSLSPVLTQQRDEWLQLIALMNQRIATVEAQLQQRAKDDAAVALLQTHPGIGLLTSLALRYTLLPTSRFSSTRQVTAYVGLDCMEDQSAERRRMGSISKAGSKLLRFLLNEAGHTAARHDPELKKFYRRLLHRRDKPKAKVAVARKLLVRSFIMLRDQIDYAEFVRRGVAARVAREAHSLP

SEQ ID NO: 383243 - protein, 344 aa, unidentified
MGVAIGVDSHKSSFAAAAVDEVGRELERREFGNNAKGHSQALKWARAIGSDSIFGIEGSGRYGAGLARVLLASGEDVREVPPFLSHRERKRTPSKGKSDLSDAVAIARIVARGEGLVPLVGARLHEDLRLLSDHRDQLVHTRTRLANRVHKDLSIMHPGYEQQIPKLTRKKQLAAAEALLGADGSVRARLARERIEDLFHLDARIAAVTKEIAARVTETGTTLTRLTGISFVLAARILGEIGDPRRLGSKACFAMLNGTAPLEASSGNTRRHRLNRKGNRKLNFVLHRMAIVCCRVDADTKNYMAGKVAEGKSKKEALRCLKRHLSNVVHRQLLADLERGAIAA

SEQ ID NO: 383244 - protein, 464 aa, unidentified
MTARSRRSKSSTRNLQVLNPRSAGVDIGSRFHVAAVSPDLSDAPVRRFDSFTANLREMVEWFAACGVTTVAMESTGIYWIPLFELLMASGIEAVLVNARYAKNVPGRKTDINDAQWLQKLHSHGLLRASFRPDEQLAALRSYVRQRDMLVRRRASHIQHAQKALMQMNLQLHHVVADIMGVTGRFIIDAILGGERDPGKLAMLRDRRCKNSAAIIAAALDGNYQDEHLFELKVAITMFDAYGEQIQACERLIEEQLASIAQAGAQEGACHSVTPDRLPQSARLRKRSCSFDPRPMIRAMDCHRILEIPGIGPSSLLTIISECGLDMTKWPSAKHFTSWLGLAPHNKVSGGKVLSSTTNRGARQAASAFWTAALVLSRTSTALGAFHRRVAIRIGKAKAVVATARKLATIYYQVLRYDVSGKDPGVESYKASQQQRLMSGLERRAKQLGMGLVPLERTLSMTGVS

SEQ ID NO: 383245 - protein, 340 aa, unidentified
MSQVSIIGLDIAKSVFQVHGADASGRALLRKKVSRAKLLPFFASQPRCQVVLEACGGAHHWARELAKLGHDVRLIAPAYVKPFVKRQKNDAADAEAICEAAQRPSMRFVPVKSEEQQAAAMVFRARDLLVKQRTQISNAIRGHMTEHGWIAPQGLAHMKKLAALLDDPNAVPQAARSVLRTLLDQMTVLNERIAELDREIARRAREDETARRLMTIPGIGPITATAITALAPPLGTFAKGRDFAAWVGLTPRQHSTGGKQKLGAISKMGERTLRRLLIIGSSAVVLQASKRGAPKGSWLEQMLARKPRMLVTVALANKTARIVWAVLTKNEDYRAPVAAA

SEQ ID NO: 383246 - protein, 369 aa, unidentified
MKRNILYVGLDVHKNTIDVAIAEDCAEGEVRSYGKINSSLEALNKLIRKIRTKGSKLQFVYEAGPCGYEIHRYLTSKGHICAVVAPSMIPRRSGVRIKTDRRDAANLVRLFRAGELNSIYIPTQEDEAMRDLLRCRDDIRRFEHKARQRLIAFLLRHGFVYPGKNWTKGHHNWLASLKPDHPAQQIVLQEYIDAAQECADRLKRITEQIQALVPQWSRAPYVKAYQALRGVSLIVATTVASEIGDMSRFKNPKELMAYLGLVPSEHSSGNTVRRGSITRTGNGHVRRVLVEAGWTYKMRARKTITILKRQIGLSKSIQEISWKAQTRLCARYQRLFAKGKSKQTIATAIARELSAFIWAIDREVQQTMA

SEQ ID NO: 383247 - protein, 382 aa, unidentified
MRTDQTDMTNAGEVVLAVSLELARSKRKVALHDGRRDSPAIHTVAQLQSAARLQAVVSLIEQHRQKWALPASTRVVVSYEAGQDAFWICRALQARGIECYVVEPASIPVERHKRRAKTDRLDVIKLVINLRAWLRGERDRMHVVHVPSPQDEASRHLMRDREQLQKEVLQHRDRMRKLLATNGCQDEVDSRKFAGRLARSEVRCHDGVPLPTELRERLLRECERLALAEAQLAALEKARPASLPARERINHLTRLSGIGLVGGSRLALELFWRQFSNRRQVGACVGLVPQPYDSGESQVDQGISEQGNRPVRALPIEMAWSWIRYRPSSTLTKWFKERTQGTGPNRRARRIAIVAVARRLVIALWRYLKDGVIPEGATLKPA

SEQ ID NO: 383248 - protein, 402 aa, unidentified
MWYVGLDWADTHHDLVVLDEAGRRAGSRHVAHSQEGLEELKQFLLTITPDLEELACIVETSHGLLITFLLEAGIPVYPVNPKAANALRTVAGAKTDQIDAYLLAKTGRFGLADLRRLAPDSSTVQELKTLTRDQDSLIQMQTRLVNQLTACLKDYYPVALHLFCKLQQPCTLLFLQTYPTPQAAACASVAEIAAILRSGKYPNANAAAIKMGEQLHRPALTADAVTVRAKSRLMLSLVKQLAVVLPEIAAYDKEIECLFLSHADNETWSSLPGAGKRLAPRLLAEWGDDRTRYTDATSVQMLAGTAPVALQSGNYAKAHKRFACLKPLRNALYQFAWQSTSQEAWARNYYQRKRAEGKSHSMAVRALANVWVRIIYRMWVNKTSYHTETFAAAQLAHAKRAA

SEQ ID NO: 383249 - protein, 335 aa, unidentified
MLYVGLDVHQRTTTMCILDDNGRRVKQQTIRGTWDDVIAVVRELEGPLSICFEATCGYGYLYDALRRIAGRVIVAHPGHLRLIFRSKRKNDRVDAEKLAKLLYLDEVPPAYVPSIDVRHWRQLIEYRRRVVDKRTRCKNAIRALLRGSGIAAPRGLWTRKGLAWLRALAWPDLACRVQRDLLLAELETFNQQVRTVTGVLDQLGRTHPGMTLLQTIPGVGPRTAETIIAYVDDPGRFGRTRQLGSYFGLVPSQDASGGYNRLGHITKQGPATARKYLVEAAWQATLRSPTVRAYYQRILNDQPERRKIALVATAHYLLRCMHAMLRSGEVWREAA

SEQ ID NO: 383250 - protein, 365 aa, unidentified
MLYSGVDLHRRSIVICTVNESGSIVARKSMKTQHDLVTAYFQQWPDQHRAVVECTTGWYGFSDLLRSLGVDVVLAHAKYLKAISYAKVKTDAVDALTLAQLLRMGYIPEAHQLPPEYRAMRDLLRQRMVMEHKRTNIIQRVTSILAQFNITDLPLSPYQSGFADFLNQCPIPEEYRMTLMMYHFQCVQATEHRKQLEKYFKAQLRPTPAVQLLMSLPGIGDITGSIIAMETGDIHRFADAKHYCSYCRLVPGAKDSGGKHSHRSGSKDGNQYLKFAFTESAIKAMRFYPQIKHFAARLERRATKAIARTVVAKELAKISYYVLSRQQEFKTFKGIEINKLRNPPERVAGWLASCSSRCSGCRKAA

SEQ ID NO: 383251 - protein, 351 aa, unidentified
MMIIGVDYHPSFQTIAFLMEETGECGEQELNHSDGQAEKFYRDLKQRGISVRVGMEATGYSRWFERLLAELGFEVWMGDPAEIKAKRVKKQKFDREDARLLLRLMRENNFPQVWVPGPENRDLRQLLWHRHRLVQMRTRIMNQLQALAMNEGYRWKKKLFSEQGRAQLEKLALAPWASRRRQELLELLDRMNPTIEELTAAVEREARKRPEALRLMTHPGVGPLTALAYVLIIGTPTRFQRGKQIGTYVGMIPCEESSAGKQRLGHISKQGNSLLRFLLVEAAQAAARINPEWRRRYIHLAMRRHRSIAKVAMGRRLAVRLYWMWRNGCEYSPSLEFGSYAGQLGLVHGGK

SEQ ID NO: 383252 - protein, 411 aa, unidentified
MDIIYERCCGLDVHKRSVAACLIVAGTRGEPRKEIRTFGTMSEDLLELSDWLLLAAGCTHVAMESTGVYWKPIYNLLEAAFTPLLVNARHIKTVPGRKTDVKDCEWIADLLRHGLLRGSFVPERPQRELRELGRYRTALVRERAAEVSRLQKTLEGANIKLASVATDIMGKSGRQMLKALIAGSTDASEMAQLARGKLRAKIPQLEQALRGCFGAHQRFLIAQQLAHIDFLEETIEELSAEIAERMRPFGEAIERLETIPGVGRRTAEAILAEIGPDMSRFPTYRHLASWAGMCPGNDQSGGKRRSGKTTKGNPWLRAALVEAAHAAGRRRNTYLSAQYRRLASRRGKKRAAVADGHSILVIAYHLLQRSCGYEELGGDYFDKRDRQGVERRLVRRLEGLGYKVSLDPVAA

SEQ ID NO: 383253 - protein, 425 aa, unidentified
MNTTDFAATLGLDWADQKHDLWIHPADGTKSEHLRLEQTPEALHEWAAKLGERFGRRRVAIGIETSRGAVISALLAYDFIVFFPVNPKALKDYRAAFAVSGAKDDRTDAMLLEEFVRLHRDKLRALEPDTELTRKLGGLTANRRHLVDQRTRFVNQLHSLLKTYYPLAETLLDGRMTTPMAADFLARWPDLSTLQKAAVKTLRAFFYQHNSRGGKKMEERLAAVKTARALTQDQAIIAPARCLTTALAGLLKVLHQAIAGLDQDIARDFDQHPDAALFRSLPGAGPAMAPRLLAAFGTRRERFASAAEVAQFYGIAPVVKQSGNTKTTHMRSRCPKFGRQTFHENAGCALMKEPWAKRYYEDQKGKPDGRHHMACRALAFKLIRIYYACWKQNTAYDGQRYVKALEKNGSPLYKKLQTSAKTAGE

SEQ ID NO: 383254 - protein, 350 aa, unidentified
METKVLIGVDPHKATNAVAVIDEHGELLERAQFSADRRGLLALEQWARRFPERRWAVEGANGLGRVLAHKLASAGEAVVDVPPKLSARVRVLSVGNGRKNDELDATFAALAAWRNGRLAQVRPDDTIDVLRLLSERREDLVSERTRVLNRLHGLLPDLIPGGVPGRLSAERASRILRSVRPRRDSRSSAESVRRQLASELLREVRALNRRISDLDARIREEVEASGSALTDIFGIGPILAAKIIALVGDVRRFPSKAHFASYAGVAPVEVSSGEVVRHRLSLGGNRRLNHALHMIAINQVRYEGKGGVYYRKKIAEGKTHREAMRCLKRRVSDAVFKKLMVDLQEVSTAV

SEQ ID NO: 383255 - protein, 315 aa, unidentified
MSQMVVIAGIDVSKDKLDIHVLPSNQTFVVGRDRRGLTSLVRRLRKAGVEQVALEASGDYERIVIEALEAAGFVVHLLNPARVRAFAEAIGILAKTDPIDARLIALYCQHFPDKGLTRRPEQARKLGEFLNMRAMLLKVAGEIRNSLEHVREPGLKALADTLSADIAVKLKDVDGRIAKVIADDAATIRKARIIRSFTGAGPVLTSSLLARVPELGSVTRHAAARLSGIAPTDRQSGRSQRRSSIEGGRDQLRPVLHMAALAAMRSNSIIKAFAQKLSAAGKPKQLVIAACARKMVVILNAMLRDDTEWKYAKAA

SEQ ID NO: 383256 - protein, 336 aa, unidentified
MTISVIGIDIAKRVFQLHGVDDHGRTVLRKRLTRATFLMEMAAHPPCVVGMEAGSGAHHWGRCLAEMGHDVRLMPPQYVRPYVKGNKHDASDAEACCEAVQRPGMRFVPVKSETQQATLMLHRVRDHFIRRRTGAINALRGHLAEFGLVSASQRAGLNQLLLVVEDSGSGIPGEVTELLGMITSEIRAYDRSIAELDKRLKAQCKEADVSRRLREVPGVGPVIATAMPAFLTAGGCFDRASSFSAWLGITPRQHSSGGKERTFGITKRGNTYLRRQLINGARAVVRVARGRKGGMWDWINKMLDRRHFNVVTVAVANKMARIMWSMITKGTDYKMA

SEQ ID NO: 383257 - protein, 459 aa, unidentified
MTPHKDHFPHPGPRPRRRRTLSVTNPDAAGIDVGADEHWVAVPADRDAEPVRRFGTCTADLEAIAAWLQACGVTTVALESTGVYWIPLYELLAARGLQVLLVDARQLARAPGRPKTDPHDCQWIQRLHSYGLLAAAFRPADQVVVLRAYLRQRDMLVTYAGQHIQHMQKALEQMNVKLTEVVSDLTGVTGMAIVKAILRGERDPAQLARLRDPRCKESAATIARALLGTWRAEHLLALRQAVELYEFYHQQISACDQAIEAHLRTFADRSAGQPLPHRPRRRKREANEPRFDARARLYCVCGVDLTAIEGIDETTALVLLSEIGTDMSRWPSLKHFASWLGLCPQHKISGGKILSRRVRRGSSRAKRALRLAARSLHHSQSALGAFFRRIKARHGTALAITAAAHQLARLVYSLLKHGTAYVAQEMAGYEAKYRERKLQGITRQARALGFVLVPAAAAG

SEQ ID NO: 383258 - protein, 341 aa, unidentified
MTEIKRIAIDTSKSVFTLHGVDAAGRAVLRRNLRRGELLRFFERLPPVEVALEACGGSHHWGRALSAFGHQVRLIPPQYVKPFVKRSKNDRNDAEAIAVAAAQPSIGSVPIKSVEQQAAAMLLSVRELLVRQRTQLVNAMRGHAAEMGVVAPLGEKGFKELQAAIATADDAVVPAAAKQAIALLGREVERIEIRLRAIEATLMQQHKTNPLSRRLAAIPGIGPIGALNLALRVDAGQFASARHFAAWLGLVPRECSTAGKQRLGGISRAGDERLRQLLVLGATAVIQHARPGRPATSQWLLNLLSRKPRKLAAVALANKMARIVWAMMTSGEAYRPRPVVA

SEQ ID NO: 383259 - protein, 354 aa, unidentified
MSQKLNTAIAVIGIDIGKNSFHVVGLDKRGAIVLRQKWSRGQVETRLANMPPCLIGMEACVGAHHLSRKLKDLGHDARLMPAKYVRPYSKGQKNDFRDAEAIAEAVQRPTMRFVATKTAEQLDLQALHRVRERLVSQRTGVINQIRAFLLERGVAVRQGLRFLRAELPDLLATRTEALSPRMTRVIEDLAGDWRRLDERIESLSTEIAALAHQDAACNRLMTVPGVGPIISSAMVAAIGTGDVFSKGRDFGAWLGLVPKQISTGDRTILGKISRRGNRYLRVLFVQAAWVVLIRPKSWERYGLKPWIEAAKKRLHHNVLAIALANKLARIAWAVLNKERNFECNSMDKMASRPA

SEQ ID NO: 383260 - protein, 343 aa, unidentified
MEHYAGIDVSLERSSVCVVDATGRIVREAKVASEPEALVGFLAGLGVALTRIGLEAGPLSQWLHAGLSAAGFEAVLLETRHVKAALSAMVVKTDRKDARGIAQLLRMGWYRPVHRKSPPAREIRALLVGRKLLQGKLVDVELSIRGILRGFGLKLGEVSKGRFAARVRELVAGRPMLERVAEPMLRAREALRAEYQVLHRAVLAIVREDTACRRLMGVPGVGALVAITFTSAVDDPARFRRSRDVGAHFGLTPKKYQSGETDVTGGISKVGDALVRTALYEAANVMLTRAGRFSALKRWGLGVAQRRGMRRAKVALARKLATVSHRLWVDGSEFRFGQEAATA

SEQ ID NO: 383261 - protein, 318 aa, unidentified
MLSSNVKYIGLDVHKEAISIAVLNGAGKLVIESIVETKSCTLLDFLHGLRGELHVTLEEGTWAAWLYDVLKPHVREIVICNPRRNALLKEGSKSDKIDARKLAELLRAGLLRAVYHGENELRTLRELARSYLTISKDLKRVKNRLKALYRSWGISCVGKQVYTPRHREQWLNKIAQVGVRRRAELLYQQLDGLSVLRHTVRGELLAESRKHQAVKILRQVPLIGPLRATLLLALMQTPHRFRSKRQLWTYSGLAVVTHARQRAASLCRRTTAAFQKATTDPWSESESQPRDEGYLQKYGPERQLLRRTTAGLLCKIAG

SEQ ID NO: 383262 - protein, 411 aa, unidentified
MNPVVGLDVAKGESQVQMFLDKKIPYKNSVKVEHTVEGLEELHSYLLDLERQTRMKPPIVLEATGHYHAPVVQFLEAREYIVIIVNPLVSYRAKSSNLRKTKTDAIDAYHLGEMYYKEDLEPQKKRGIQLLNLRHLTRQHENMTGIMVQTKLQFQAVLDQVFPEYKGVFGNLYAEISLKTLQTFPTSESVLIAGVEEIAQFIDMHCKARSLDWAHEKAEQLIAAAERNPFQSTLYHSLLVSLNMYIDLLQAYHQQLSTLECEIDQLAVQLEEYELLQTIPGVGEKIAATIISEIGEIDRFSHPKKLVAFAGLDPSVFESGRFKGTKNHITKRGSARLRRMLYTAVRCSIRDSRKKKTTDETIARNKRLRAFYDLKREEGKPYRVAIIACANKLLHWIYAMLKTKTPFQETV

SEQ ID NO: 383263 - protein, 388 aa, unidentified
MIQVDDLSRSLIAFEQISTLVIVVELSQSSWLAAGVVPGIERRPLKKLDPDPTALLHLVEGWRDRATKAGRAITRTVLAFESGRDGFWLARWLRVRGVETFVMHSTSVAVSREPRRAKTDRLDTEMLIRVFLGWLRGEPRHCKMVAIPTLEEEDARRPSRERESLVGERTRIINRMKAALVRLGIRGFKPGLLTAPQKLDALRTPEETPIPPNMLDEMRRDMARLAWVREQINAIEQARLERLERAPATGRHAMVRMLARVIGVGVETADMLVQEVLSRNLRDRRAVARYAGLTGSPDESGSKRREQGLSKSGNARVRRGLIQLAWRFLRFQKESALAQWYRGRTEDAAGKRKRTMIVALARKLLIALWRLATIGEIPVGVALRPAVA

SEQ ID NO: 383264 - protein, 338 aa, unidentified
MQIKTVGIDLGKTVCDVAAMDGRGRVVLRRRLARVRLVAWLANLPPCLIGLEASCGAHHLARRLAGLGHEVRLMPAQYVRPFVKTNKHDAADAEAIAEAVQRPEMRFVPVKSAAQLDLQALHRARDRLVVQRTGLINQIRAFLLERGIAVRAGRAALAKALPDVLAATAELSPTIRALLGRLRTHWQALDDEIAALDQHIVLIARSHPGARLLMTIPGIGALIATALVAAIDDGQAFGRGRDLACWLGLVPRQHSTGGKVRLLGIAKRGNGYLRRLLVHAARALKRHAKSREDRLGAWLRSLEARAHANVATVALAAKLARWAWAVLARKQAYRVAVA

SEQ ID NO: 383265 - protein, 448 aa, unidentified
MSKSTTKSENVKRISQLPVIRTMAAGIDVSDTEMMVAYPISEEHLEVKAFGCFTSDLHCIAKCLKSNGITTVAMESTGVYWVALFLLLEEYGFEVCLVNAKHVKNVTGRKDDESDAEWIQKLHSCGLLRASFQPDVTIRTLREMVRHRKNMVQVSSSYINRMQKAMELMNLKLHTVISDIDGKTGTAIIEAILSGERDPEVLVELRDKRIKASKEEIIKSLEGHYTREHLFELKQCYQLYCYHRQSIVECDIEIEGLLIEHIASKNDGILPVIPKVKRKVAGKHKVQFDAASYLKEILGVDVTEVCGISELSALTVLSEVGTDMTKWKTEHHFTSWLGLAPNTKISGGKIISSRIMKKKNHAGQAFRTAANSLYRSENALGNYYRRIKAKAGAGKAVVATARKLAIIYYMMVLQKKAFDLKAMEAYQEKYKEKKIMQLKRKLAILEAA

SEQ ID NO: 383266 - protein, 301 aa, unidentified
MDNFYFIGVDVSKKKLDFCVLFEGKVLREEQVSNHQQAVARLIGELKNDLEMDNEQFLICAEHTGQYTFPLVCACKSVECKLWLENPSQIKYSSGMQRGKNDKVDAKRIAIYASRFGDKVKYYDRPTEEIERLKQLERERALYVTDLAKYKGQMYDQKDFMPAALYRKKTKRMKGLIQELQAAIDAITAEMEKIIGSTEVLARQMELLMSIDGVGKVVALNVIIETEAFSRFDNPRKFCCHAGVAPFSYTSGSSQHSKNKVSHRANKNIKKLLHMAAVSVTHRKEGELKAYYRDSHLIPSI

SEQ ID NO: 383267 - protein, 327 aa, unidentified
MVPTTWIGIDIAKQDFVAAQRSQTDFETQCFPMTEEGFEAFRQWLPKTSGLGIVFEATGPYWLPVARWLDGLEPTIPYACINPRRLRDFAKASPERSKTDAIDAALLVHFAETFPPALEPPKSRRAQTLRALWRHHLELQGLLDRARDRQEKALADPQLPTQLATRLQSLLDALKLELDQVEREAHDLVQQDPQTRQSYRLLLSIPGIGPKTALTLLAEYGPQLLQANPKQLTRYAGLEPILFESGSSVRKRPRISKQGNWRLRRALYMAALVGVRWNPILKTFYERKLQQGLAKKSALVAAMRKLLHLVYGVLLHQQPFNPQHEET

SEQ ID NO: 383268 - protein, 340 aa, unidentified
MENIHILGVDLAKRTFAICGADKNCYVKLRQKLTRPQFQKTLLELPPCIIAMEACGSAHHWGRVAQAAGHEVRLIPAQYVKAFVKRHKNDAIDAEAIVEAASRPSMRAVAVKDENQQAQAMMFRTREMFVKQRTQLINAVRAHLTEYGIVLPQQRRNGRLFAKRCRSEFDNAPEIVTSMIEIYLKQIEAIDVEVAELDIKIKKGVLRNPEARRLQTMPGVGPMSAMAIQAFCPPAQDFRKGRDFAAWLGLVPRQHSTGGKDRLGRITKMGQRDVRKLLIIGAMSVISASERKGHCEDPWLARMLEKRPRMVVAVALANRMARRLWAMMAKERDYEIQVAA

SEQ ID NO: 383269 - protein, 351 aa, unidentified
MIVLGADMHKGSHTIAAVAAATGELLGDRTVDVGERGFAAVVEWARAFGAERVWALEDCRHVSGSFERFLLVHGERVVRVATRLMAGERRGGRDRGKSDLIDALAVARAALREGFDRLPVAELAGVELDIRLLVDHRERLVRMRTALNNDLLWHLHDLWPEQTLPGSALLSKKWTTRIARRLAQAEQTARVRIARDELRHMRELSRTIDTLETEIAGLVEQVAPQLLAEPGFGPLTAAKLIGEIAGVQRFSSDAKLARAGGIAPIPVSSGKINRHRLDRGGNRQINTAIHRVAVTRARCHPETRIYIDRKRAEGKTHRDAIRCLKRHLARRIWHLLQPPTTRTPRLVPSTS

SEQ ID NO: 383270 - protein, 353 aa, unidentified
MTFYIGVDFHPHQQTLAWCDKRTGETQTLDMDHDLEKVREFYTSLKESAVIGVEASSRAEWFENMISETGHKLLVGNPVLIRKSAPSRHKNDRRDAEHMLELLMSGKFPSIWRRPRESNEILEVLRLRHKLVRQRTQVYNRLQALAHNIGMPKCRMSTIAVQQRLEVVEMSESGTLCRAHLFSVLSHLKERISELETWLKQKAEANSQVQLLMTQRGVGYLTALTFVHTMGDVTRFEKGTKGATHFAGYDSVEDSSAKRKRFGPISKAGSPLLRFQLGQAAHIAIRSDARLKAFYKRLAKKKPKAVAITATARRLLVKLTIMLRDNITAEEFDRRGSTVGNARCLTRSEMTVK

SEQ ID NO: 383271 - protein, 373 aa, unidentified
METVFVPLKYGVGIDMGKDKFHVCLSAIDAGGRIKIKATHQFANTPKGHAEFDRWCAHHAKDKSIPIHYLMEATGVYYEHLALTLHQKGAYVCVVLPQKAKYYVKALGIKSKTDGVDAQALAMMVCQQRLDAWRPISQTMYELRQLTRQQADLQVFKTKVSNHLMSLEQGMYQAKEVKKQMTKLLAEIDKQIDECEKLIAKAIAENAEWKRKVAQICAIKGVGLLTVAHLITETNEFTLFENQRQLVSYAGYDVVENQSGKRVGKSRISKRGNSRIRHSLHMAALMVVRYEQRPFGGLYERVFERTKIKMKGYVAVQRKLLTLIYALWKKDEKYVADYQSEEQKKVAPTEGATLHRPPVDVLEKANIGELAES

SEQ ID NO: 383272 - protein, 408 aa, unidentified
MNPLFVGIDVSSRSNVAYLMKPDGSKHSSFSVQNNLGGAKMLSERIVSALSSMRLSDVVIGLEATSIYGNNLVYALREDGSLSRFQRKIHVLNPKQVKKFKEAYPDLPKNDFVDAFVIADHLRFGRIAKEVYMDDYRYQALRTLTRARFDVIQNLTREKQRFANYLFLKCSGIAQEKDIQNTSATTIALMEHFETVDDLANTDLDELTDFIAQAGRGRFVDPDATARAVRAAAKGSYRLPKTVNDTVNQAMSVSIASMRALKEQVKVLDKAIEQQFEIIPNTLTSIPGIGKVYSAGIIAEIGDIHRFDSQASVAKFAGLVWTQHQSGEFEAEHSRMIKSGNRYLRYYLLEAANSVRRCDSEFRRYYDLKFKEVNKYQHKRALALTARKLVRLVFRLLKDNRLYIPSEG

SEQ ID NO: 383273 - protein, 347 aa, unidentified
MDRFIGLDAHVSSCTLAVVGGSGRKIRLDVVETQASALVAYVQGVAWPKRLCFEEGTLSEWLYELLSPHVTEVVVMGQNQRRQGPKSDARDALGLAQRLRVGDTGLHVCKDGGHYQRLRALTRSYTKLKRDQTRLKNRIVWLYHSRGVHPDTPSVYHATRRQEWIVQCPAALRPALQLHYEALDALAPVVAHCEQQLVEQVASEPIAKVLMTCPGIGPVRAAQVLTTVIQPARFRTKRQFWSYSGLGIETRSSSDWVQLQGHWTRANVAQCRGLSRRHNRTLKEVFKGAAMVVSARLNTEHPLRRYYDNLLGKGIKPNLAQLTLARKLAAVLLAMWKQQQEFNPSMI

SEQ ID NO: 383274 - protein, 361 aa, unidentified
MPGMVTYAGLDVHARSTHAAAIDVATGELVRVRFGPGVDEPVAWLQSLPGPVRACYEAGPTGFGLYRAAAAAGVAVEVIAPGKTPRGPSDRVKTDRKDAELLARLLLAGSLTPVVVPPVEVEAARELMRSHDACRRDLMTARHRVSKMLLRHGRVYPEFSTWTQAHRRWLAAQQFDEAASELVFADLLAAVDGLSARKEAIAERLSRLAGDDRWWPTVARLRCFKGVDTLTALALHLELGGDWERFTKASALSSWLGLTPSLQQSGESSRQGAITKTGSVFARRLLVESAWHYSRPPRIGATLKNRQQGQPDHVLQIANRAQQRIHRVHHRMRGRGKAHNVTVVACARELSCFLWAAATAD

SEQ ID NO: 383275 - protein, 342 aa, unidentified
MLIIGCDYHPSFQQIAYCDTTTGECGNQRLEHGGEAEAFYRRLQGQAARVGLEATGGTRWFERLLDECGIELWVGHPGKIRAAAPRKQKTDRRDAELLLDLLLQERFPRLVVPSPEQRNLRQLVGHRHRLVQMQTRVKNQLQALAMNEGLRLRRALWTRKGQAQLQALALPCWAEQKRVDLLQLLAELQRRGAVLDQAVEAAAQASSVVRCLRQQRGVGPVVGLAYELTLLDPTRFQTSRQVASYLGLIPSEHSSGGKQRLGHISKQGNALLRGLLVEAAHVAVRWEPEWRRQYVRLAMKKNRSIAAVAMARKLAVRLWWLWKSGLASGQIGGSGSHAEQPV

SEQ ID NO: 383276 - protein, 418 aa, unidentified
MSAEIKIVYPVCCGMDVHKSFIVACVAVTDQYGQTKHHIRRFSTFTGDLRKLAEWLASYNCKDVCMESTGKYWIPIFNILEKTCSVCLTHPKYVKAIKGKKTDKRDAKRISELFKCDLVRSSFIPPLDIRQLRDLCRYHAKLTYMNTSEKNRAQNCLTTSNFKLDDVFSDVFGKSAVRILDKLFEQGNSDFDVAPLLDKKCKATVEEVTAALDGEFDVSQSEKLKLIRKHQECIAELQTALEAVILRLAEQFQPQIALLMSVPGISTKLTAIRILAEIGVDMSVFETSKHLISWAGLCPQNNESGGKKKTTRIARAGVYLKPLLVQIALNVGKSDKCPELKNKYQILKKRRGGKKAVIAIARKLLTAIWHILDKGEFYNADLYHKADKPPVNRMLTPEQAFALLRSKGYEIIKPDTAA

SEQ ID NO: 383277 - protein, 346 aa, unidentified
MEPTSSCLLTWMGRRGAPADNPKLGKIMRPSATSIKAMLRVLGLDVAKATVVLFDPVSGRTLTIDNEPQALLEALKPFAGYELMVCEATGGHERSVLDAACALGLGAHRADAAKVKSYIRSHGGTAKTDAIDARWLSRYGQERGPVLPLWTPPSQEREAFASLVRHRQDLVATRTQTKNRLSAPGPEPLKRFLKAQLAFLESQLAELDRALKALLKADPGLGAAEARLRAIKGIGPVCARTLLALLPELGSLNRHQAASLAGLAPHPRDSGQTSGRRRTGRSGRGGLRPVLFMAALSAARAHPGLKVFAQRLIDTGKPKRVVFTAVARKLIVIANAVCKPPAPQLT

SEQ ID NO: 383278 - protein, 345 aa, unidentified
MEYYAGIDVSLESSSVCVVDDKGRIIREGKVASDPTALSKWLKELGLALTRIGLEAGPLSQWLYAGMTKSGLQVELLETRHVRAAFKTMPVKTDRKDARGIAQLMRLGWFQAVHCKSLPAQEMRALLTARKLMQGKLHAVELSLRGLLRGFGLKVGKTTPRTFDGRIRELVAGQPTLQVIADALLAAREVLARQFAGLDKRIHATARQDDRVKLMMSAPGVGSIVAMAFISAIDDPTRFKSSKSVGPHFGLTPKKYQSGETDITGRISKCGDEGVRALLFEAAHIILTKPVKKAGALKRWGMALAKRAGPRKAKVALARRLAVILHRIWVSGTPFDASKTAATTA

SEQ ID NO: 383279 - protein, 354 aa, unidentified
MLKYSVGLDVSSEDIHACFSVIDAEQRVKVISSKVVTNNSKGLVILTTWIEKSRKLKELPLVIGMEATGIYHEECAYYLHDKNYAVSVILPNYAKKFLQASGLKSKNDKIDAKGLAQMFAERSFRLWAPLGKFYYHLRGLTRQQESLQEVKTGIKNQLEAAKRGAFINKDVIKQLNETIKFLEKQTAEIEKKILAHIRSNTEIKEQVENVLTIKGIGIITLAILLAETNGFLLFSSTRQLVSFSGYDIVENQSGRHRGKTKISKKGNGHIRRALFFPAFTAVSNKCKPLLDLYNRTFDNHKIKMKSYVAVQKKLLVLVYTLWKKNVAFSENYSIENTREKEQVSTSLGSLVQAE

SEQ ID NO: 383280 - protein, 418 aa, unidentified
MDAIIETCCGLDVHQATVVACLLTGKANEKPRKQVRTFQTVTRDLTGLCDWLRTAGCTHIAMESTGVYWKPVYAVLEAGFEIVVGNAHHIRNVPGRKTDVKDSEWLANLLRHGLIRKSFVPPKPMRELRDLLRYRRKLVESAAAERNRLLAVLETANVKLANVATDVFGVSGRKMLEAIIEGTASPVQMASLAKGKLRKKLAELQLALEGSVQPHHRFLLAMQLGRIKSADNDLEQIDKLIDEKLEPYRTQHKRLMTIPGVNWVVAAVLIAEIGVDMCVFPTVGHLAAWAGVSPGNNESAGKRKGGKARRGNVYLKTALVTAATCAAKTKRGYLKDKYFRLKARRGGLRAAVAIAHKILTAAFHILSAGVAYHELGDSYLDNIDRTRTAKNLVRRLERLGFAVDLKATTTLENPNVFS

SEQ ID NO: 383281 - protein, 339 aa, unidentified
MNSMAVGVDIAKQVFQVHYVDQATGEIVNKPIKRAKFLEHFANRAPCLIGMEACGGAHHWARQLTRVGHEVRLMPAEFVKAFNIRNKNDAADAKAIWLAVQQPGKPVAVKTEMQQAMLALHRMREQLVKFRTMQVNGLRGLLTEYGEVMSRGRAKLDSELPAALGRIAERLPAALIDTLREQWNGLARLDEQIAEIERRMREWKKEDRAVKAISEIPGVGLLTATAAVAMMGDAKAFRSGREFAAWAGLVPKQTGSGGKVNLHGISKRGDTYLRTLLIHGARSVLTHANEPGEWVEQMKKRRPANVVIVALANKMARTIWAVLAHDRPYRKDYVSVKPA

SEQ ID NO: 383282 - protein, 449 aa, unidentified
MRSYAGVDWASDKHDVLVADEAGERLLAATFAHDEAGLTALCRALARLNVQLVAVERPDGVLIERLLDAGLRVMAIHPNQVAAARPRFRVSGGKSDRFDAFVLCELARTDSHRFRVLVPDSDETKALRALTRAREDLVQARVALGNQLLAELERFWPGAIEIFDDLVSPIALAFLERYPSPLDARGLGEKRLAAFLARHHYCGRKQPSALLAKLRAAPEGRAGEQETEARRAVVLALVAALRPLAAKITELTSEIAHRVRSHPDGETFLSLFRDPKSVVTAARLLAEIGDCRDRYPTADSLAADAGMSAVAIESGKRKVAAFRWGCDKRLRDATSTLADSTRHWHPWAGDHYARARARGHDHARAIRTVGRAWCRVLWRCWQDGVPYDPARHGGLQQHITVTIPSSSGPHPDLAATQRMAGAAVTQQAARRAERAALDGKPTSASALGG

SEQ ID NO: 383283 - protein, 347 aa, unidentified
MRYVGVDIGKWKCRAAVMDPEGSIIEEFTFPNDAEGIHDLASRLTTEDRVVMESTGSVWETLYNHLDERRIPVVLANPLKTKAIASARIKTDKVDARILAHLLRGDLVAECYVPPRELREIRALVRHRASLVRARTTVKNRVHAIVDQHGLRCEYSDLFGKRSLEWLRSLELGALDRLMLDNHLGHVESLNGQIRRVDEEIRGRASLDEDVRLLLSLTGVDIYTALLIRSEVGCIDRFPDYKRLVSWAGLAPSLHQSGSVEYSGGITRQGSKMLRWAMVEAARVAVRHDERMRVFYERVKRRRGDGKAVVAVACKMLKIIWFMLKRREPYQSRNEGRYGRKLKSLDR

SEQ ID NO: 383284 - protein, 469 aa, unidentified
MGHNRSRSRQRGGAKRAKHPSLLKRINRNAAGIDCGSEAHYVAVPSERDPEPVRSFKTFTADLHQLADWLEVCKIKTVAMESTGVYWIPIFEILEERGFEVVLVNARHIKNVPGRKTDVLDCQWIQELHSVGLLRGSFRPAAEIVSLRAYLRHRGKLVEGAASHIRRMQKVLVQMNLLLHNVISDITGVTGMRILRDIVAGVTDPMALAVHRDYRCRASLEEIAASLTGNYRAEHLFVLRQNLELFDTFQQQIQNCDAEIESLLHELATKQRKPEAPVPSPRCKPRFCDNEPRFEIRDPLYRLAGADLTQIDSIGPYTALKLIAEIGTDMSRWPTPGHFTSWLTLAPRNKITGGRLISSRTQPSANRAATVLRMCAMVVGRTSTALGAYYRRIAYRIGKPKAITATARKLAILVYRVLKGDLDYNDPGAQAYEEHYRTRAIRNLSKRAKQFGLGLVNVETGELIQGAVT

SEQ ID NO: 383285 - protein, 347 aa, unidentified
MRFYTQQHKHYCGIDLHARARYVCILDQHGAKLVHKNLPTTPEAFLRVIAPYRDDVVVGVECIFTWYWLADLCQQEGIAFVLGHALYMKAIHGGKAKNDKIDAHKIAVLLRGGMLPQAYVYPAEMRATRDLLRRRCHLVQKRAELLAHIQNTNSQYNLPEIGKRLAYKTNREGVAEHFPDPSVRKTIEVDISLIDHYDKLLGEVELYITRTAKTHDVQTFARLQSVPEIGQILALVILYEIQDITRFPRVQDFVSYCRLVKCAKESNGKRLGTSGKKIGNVHLRWAFAEAAVLFLRQSQPGKAYFAKLEHKHGKAKALTVLAHKLGRAVYYMLTREQAFDLQRFVTA

SEQ ID NO: 383286 - protein, 344 aa, unidentified
MESMYYIGLDVHKRKISYCVKDGGGQIRGEGSITATRLDLDHWMRSLPQPWSAAMEATMFTGWIYDHLKPHAAVLKVAHPLMLRAIAAAKKKNDRIDAGKICDCLRCDFLPECYMASSAIRERRRTLRYRNLLVRQMVQMKNKISALLMEAGVNYNKQRLHKAGYFRELLATNPDIDEGLSSLLRLCRETMVRLGKNESALVRSLERDSLLVERVERLMTIPAVGPITALTWALEIGDVQRFPSIKKAISYCGLCGAESSSGNTVQRTPLSKQRNKHLQTTLIEAAKMAPRNSAELAMLYDKEKQKGNSNRATLAVARKLVAYLLAVDRGHRKFQVVETSNIAA

SEQ ID NO: 383287 - protein, 349 aa, unidentified
MVILGMNAHKRTHTVVAIDQVGRQLGTKTTGATTTEAHLELVRWADRFGAERRWAVEDCRHLSRRLEADLLAAGEELVRVPPKLMAHARDAARTYGKSDPIDALAVARAALREPGLPLARLDGASRELRLLVDHREDLVRDRTAHINRLRWHLHELDPSWDPKPKCLVRYKHIDVVAARLEDFDGMVARIARDLASRIRELTHAANALEREIEGRMRELAPNLLEVVGVAALTAAKIVAETADVRRFRSKDAYARHNGTAPLPVWSSNRVRHRLSRTGNRQLNASIHRIAVTQKRCHEPAKIYLERRMANGNTKTEALRALKRKLSDVVYRALLADATSSADVVVGEAA

SEQ ID NO: 383288 - protein, 430 aa, unidentified
MTNRQPTPSDAALVAIDVSKSKNDVLIELPGMSRRRRLTVMNSRAEHDRLVELLTDLGCPVIAGFEATGNYHRPLAFRLLGAGFTLRLVSSVALARTREALHNGWDKNDPKDAQVILHMLKIGATQVYCDPIGAGIHDIQELSKTHEIISKAKTELWHRLLTHYLPLYFPEIARFAGNSRSDWFLAFLERFPTPASIMDYSKEAFIDAAWDVVGKKVSKARLLGDIYETSRTSIGLPVSIESPSIAMFRMLVAEGRSLVRQRDEIEERAHEVLSSNPDYQLLRTIPGIGPINAMTVLAEAGDLRRFRHHRQFLKFCGLDLATYQSGQFRGQTKLSKFGNARLRRAFWVAAQVAIRQRDNSFRSKYERYIARDRDNADLKRKALTAITAKMARTAHAVIKSGSDYRPFVEGPVPSGRTSLSKCREGASATL

SEQ ID NO: 383289 - protein, 368 aa, unidentified
MENDITVFVGLDVHKDSIAIAVAYAGREAPRFVGTVGPALPELLKALRRLGEPGQVLLAYEAGPCGFALARRLAAAGWRCQVIAVSKMPVRPGARIKTDRRDALTLAGYLRAGELTPVVVPDAGDEAIRDLSRAREDAVRARLKVRQQIKAMLLRHGMRYPGKTSWGPAHERYLSEIAFEHAAQQIAWAEYRSAIADAHERVLRITAALREQIEHWRFGAAVRALMCFKGIDLVAAVTLIAELGDLHRFEHPKQLMAYLGLVPSEHSSGQSRARGSITKTGNTHARWVLVEAAWSYRHSARMSRPVSDRNRGQPKPVRDIAWRAQLRLCERYRRLSARGMHSNKICVAVARELAGFVWEAARHAQPAH

SEQ ID NO: 383290 - protein, 458 aa, unidentified
MKIRLGIDIACRSPHHAACADETGKMLWSGHRFRTTPTDLAALWQRLPADALEVMVVMEPTRNAWVPLAAWFRRQGAVVVMVPSEQSADLRDYFSKHTKTDRLDAQLLARLPVLHPEGLHPVEALGPGDPLKRAVKIRAGLVHRRSTAMHRLDSLLEILGPGWVEALGSDMTQTAFRFLATYANPHQVKRLGRARLTRWFQHHTRKAWGSGRADLVVAAAEETLALWGHDGLDFEALAADIACEATLALELSEQIALLDRRIHDLYCEADPDGIVRSAPGVGNILAAQILGRLGDPHRFTSLAAARSFSGLVPRRNASGLADHAGGPTKQGDACLRAALFMAADHARKTDPQLAARYQRLISDGRHHNSAICTLATVLLTRIVACLRNGTPYQLRDTNGRSITPAEGRAIIVEHHQISPEIRAARRVLASTRPHPRRDERTPKGVAERSTVTPVPTPA

SEQ ID NO: 383291 - protein, 371 aa, unidentified
MDSSSPIGINVPNWSLHHQLTVKPEESTMKISRVGVDLAKNVFQLHGVDRHGETVLKRRLSRDKWIRVLVNSAEPGCEIGMEACGGAHHWARLLMKKGFRVKLIPPQFVTPYVKSNKNDAKDAEAICEAMSRPAMRFVKAKTVEQQDIQATHRIRSELMCHRTAKANQIRGLVTEYGLVAPLQMASLRVAIPRWLEDAENGLTERFRALLHGLWDDLLTLDQRIEILNKEIDCIAKNDPVAQRLQQLRGVGPLVATALIATVGNGDQFSKGRQMAASVGLTPRQHSSGGKDRLLGISKRGDAYLRSILIHGARAVVARAKHKEDRLSRWVTGLAERRHPNVAAVALANKTVRMAWAMMNHDADYDPEFAVS

SEQ ID NO: 383292 - protein, 321 aa, unidentified
MTGTVVIGIDVAKDTVEVALRPAGTTWRAATTPIELRRLAERLIGLHPTLIVLEATGGYEQPVVAVLSVAELPVSVVDPARVRHFARATGLLAKTDRIDALILARFAEQLRPAVRPLPDAPQRELALLVQRRRQLLDMLAAEEQRLDQQALFPRSPITGSLAAHVAYLRQQLADTDQALTTHLTAHPRWDTTHALVRSVPGVGPVTAATLLAEVPELGTLSRQQIAALIGVAPMARDSGQRRGARMISGGRATVRQVLYMATLTAVRCRQSPLRAFYHQLRARGKEFKVALVACMRRLLVILNAMVRDGRPWNPALCAAKT

SEQ ID NO: 383293 - protein, 345 aa, unidentified
MKPCGEILKPPFDINHTADELDSLISLIKSFDEEPRVVMEDTSHYHLPVATYLSSHNIFVCCVNALRMKKFCSQSIRRAKTDKIDSIKIAAFGITYWNKLVKAYPSDVIYDELKFLARQYYQVTGMLVKSKVNFSNLLDQVMPKINDVLSNQCENHKLTEFVSRYIHFQNILDMGERKFTSDYCKWAKKKGYRLNERKAAEIFALAQNGIPTLPNSQSVKSVVKEIDCIGDIHAPRIITEIGDVRKFKNKHSLIAYASIDAPSYQSGAFHASKRHISKRGNSYLRKTGYEIMQSLIKHKPADNVVYDFIQKKRSEGKCGKEAMIAGLNKFLRVYYGKVMELYSEH

SEQ ID NO: 383294 - protein, 356 aa, unidentified
MDKYIGFDIDCKKVVACVVENGKKDIYQTLGADIESMRKFLKEQKQFGDRLELVFEISGQAGFIYDSLIDYVDDIKVANPSKMTWIYRTAKKNDRIDARKMAVLLSIGEIPSVHMPSREVRQWRETILHRKKIVDKVVMVKNRIRATFKGHGLSRPAVKGGWWKKSNQLWMRSVCGVEAVEFDLWHIQASNLLDELGLLKSQLERVTQYLDGYLSKKAGGKLLMSIPGVGPRTAEAVLAYTDDVKRFNNYKQYCGYFGLTPKLDESGSTSRLGHISKQGPSVVRWVLCESSWKVIRYSKSLKGFYDRVKAGQNGRKKIAIVAVCRKLLSIMRAMLLTGEMFNEELVNKVDNLIEAA

SEQ ID NO: 383295 - protein, 331 aa, unidentified
MTRSVTEATLFLGLDIGKSEHAYAFVNSFGEVVDRGKLKTDKRSLGSFVLKTKKNHRDLVVGVEATGFYHEKIARTFLDAGIAVRVLNPQLTTMKAMRSSVRSVKSDASDAVGIAQKLREKRGEIGHVFSWDSDRRGLQALGRSYDHLLWHRQSLRAHVAAYSERGLKADSAPDLAAFDPEIARVRAALIVEAERVYPVEFKILITIPGIAEESAARILAESMGVERFHSAHAFAAFIGVDPRVKESGTSVRGKTSMTKNGSPILRYLFGWSGRNVAQWCEPFRKRLEYDIGRGKPAGVAYGSIARRLAVILYTCLKNKVAFDPDLVGART

SEQ ID NO: 383296 - protein, 409 aa, unidentified
MELLIPRCAGMDVHQATVVITVRLPGDDGGRRSLTETFGTMTPDLLALRDWLQAHGVTHVAMESTGVYWKPVYYVLEEAFTLLLINMHDLKRVPGRKTDVKDSEWLAQLLECGLLKASFVPPPPIRELRDLTRYRVQQVRDQAQETNRLHKVLEDAGVKLSTVVSDVMGVSGRAMLAALVEGKTDAVALADLARGRLRTKLPALQRALQGRFRAHHAFLLRQILSKIDFLEETIAQLTEEIDARIRPFEATLTALDTIPGVDRIAAMSIVAETGGDMQRFPSAGHLCSWGAMCPGQNESAGKRRSGKTRKGNVYLRRTLIQAALAATRKRDCALQTRYHRVKRQRGHKKAVVAVGHQILEIAYYIMRDGVTYHELGADYFTRRDRERTMRRSIKQLEALGYRVSIEDAA

SEQ ID NO: 383297 - protein, 340 aa, unidentified
MSEITTIGLDLAKHVFQVHGVDAEGTTVVRKRLRRGQVLAFFSRIPRCVVGLEACATAHYWARELGALGHEVRLMPAQYVKAYIKRNKHDAADAEAICEAVSRPTMRFVPVKTAEQQATQLLHRGREQLVRQRTMLANALRAHLAEFGLVAAQGLRNVGELIAIVRDDSDKRLPAVARQVLQVLANQIEQTEAAIAALERQLLAWHKANAVSQRLASIPGIGPIIATAIATTVADPNVFRSGREFAAWLGLVPRQNSTGGKTRLGGITKRGNRYLRRLLINGASANLLRSKATKADPWVIGLRRRRPPLVVAVALANKTARIAWAVMLREREYQPRAVAT

SEQ ID NO: 383298 - protein, 414 aa, unidentified
MKPTYRSVAGIDIHKAMLAVVVRRERDGKTEYEKRKFGTVRQEIEHLAAWLQQQQVSEVAMESTAQYWRPVWYGLEGLFQLHLCHPLKTKAPQGRKRDFRDAQRLADRWWSGDLEDSFVPDAEQRGWRWLTRTRVQMKRKLSVIQNHVEGLLEEGGIKLSAVVSDLFGVSGWTMLEDIAKGVTDAEAMAAKARGVLRRKDRELKEALAGKLDASYRFLLRQHMEQVQLLRRQIEEINRELAAAMKDQLTVLHRLSRIPGVDLHAAQELIAEIGPKAAAFASAENFASWVGVCPGSRESAGINYSHRSPKGNRFLRRLLCQIAWAAIHTKDTFFAGLFGRLKPRIEGKGAAWAVAHRVAKVIWLVLHREVEYQEKGSAPPNERTLLRKFRRLLKDFGNLGVDVQALLSHHIATPA

SEQ ID NO: 383299 - protein, 429 aa, unidentified
MKIIYPRVCGIDVHKKFIVAVICISESVEPVYLKKRFSTFHNDLIHFRDWLIQNDCQNVCMESTGKYYIPVYNILESHISNIVVANPKWVRAVKGEKDDDKDAKWIADLFKLGIVKSSFIPQKDFRILRELTRYKYKLVNMRSSEKNRYQNALTSGNCKLDMVFTDVFGKSASNIIDLILSDNPYTDEDILSKVHKNCKASPDMILNSINGTDLTPVQKSRIELVNDHIKQLSSNIQRLDKLIDLMIEPYEDYISFLCQIPGVSRNSAITILSEIGVDMNQFTSTRRLTSWAGLTPSSNQSAGKKKSVRISRAGVYLKPCLVEVAHAAVKDTNHPYYANKFNKISKRRGKKRAYIAIARKILVAAYHMLLTGEIWNPADLAEVETPVEQRIKYVKNNLKSDIKQLLDIGLTVEELTLMIQQNANNIATQ

SEQ ID NO: 383300 - protein, 340 aa, unidentified
MATVTTIGLDLAKNVFQVHGVDADGAAVLRQRLTRGRMLKFFAKLPPCLIGIEACASSHFWARQLMALGHDVKPMPAQYVKPYVKRGKNDAADAEAICEAVTRPTMRFVGIKSPEQQGAMMLHRVRLILNRQRTQLSNALRAHIAEFGIVAPIGRNGIDQLLDIVADTEDARLPTDVRTCLDMLAAQLRIVKEQILENDRRIMASARETEIGRRLMEIPGVGPLLASAIVATVPDPSIFRSGRDLAAWIGLVPRQNSSGGKERLGAITKAGHRYLRQMLIVGAVAVIRFAERHKSKRPWLVQLLARKKVKVAAVPLANKNARMIWAMMTNGERYREPQIA

SEQ ID NO: 383301 - protein, 338 aa, unidentified
MKLYCGIDLHSNNSVVVILDEADKVVYQKRLNNDLALILEQFSVYKDKITAIAIESTFNWYWLVDGLMEAGYTVKLVNTAAVQTYSGLKHTDDKDDARWLAHLLRLKILPTGYIYPKEERAVRDLLRKRSQLVRQSTTNILSLQNILARNTAQSLSSYKIKTLDDAYAEKLLDDPNTTLALKCNLNVIRCLQSTIAEIETTVLQQARIRAEFKYLLTVSGIGEILGLTIMLESGDMRRFPKVGNFSSYCRCVKSEKLSNGKKKGEGNRKSGNKYLAWAFIEAANFAIRYNDRIKAFYQKKKAKTNGIIATKAVANKLARACYHVLKHQVSFDVNKSFS

SEQ ID NO: 383302 - protein, 372 aa, unidentified
MTQHDATTQLPTCDTAVATENPAATLQVVGGVDTHKDTNTAAVIDTAGRTLGVAQFPTTPPGYGSLLAWLRSFGTVALVGIEGTGAYGAGLASYLHLAGVAMVEIDRPERKTRRWQGKSDPIDAEAAARAALTGRRTGTPKLRNGQVEALRVLRVARRGAVNNRADAQRQIKTLIVTAPDSLRSQLRELSDRRLIQVCATRRPDRAAAADPAVATVIALRSLARRHQQLTDEIDELDSLIAPLVEAINPRLYALLGVGPDVAGQLLVTAGQNPERLHSEAAFAMLCGAAPLPASSGRTHRHRLNRGGDRQANAALYRIVLSRLRWDPRTQAYAERRTTEGLSKKEIMRCLKRYIAREIYTALTSTKQLEPAA

SEQ ID NO: 383303 - protein, 410 aa, unidentified
MSRVYCGVDWAESHHDLALVDERGELVAKRRIAESAEGYMEFLQLLAEAGDDPADPIPVAIETPRGLLVTALRATGRPVFAINPMAVARYRERRTVAQSKSDHVDAMTLANILRTDMHAHRQLPHDSELVRSIAVLARAHQDAIWRRNRASNELRSLLREYFPGFLAIFAQRHGGLSSRVARAVLAIAPTPAKAARLSISRIAAALRRAGRQRGIDAFAVEVRDALRVAQLRQEPLVEQAMGIQALRLLATLDTECASVDELAAATAEAFAQHPDYAIITSFPGLADTAGARVLAEIGDDRDRFTGARALKAFAGSAPVTRASGRSIVITHRRVKNDRLAAAGFVWAFAALTGSSGARAHYDRRRAAGDRHAAATRHLFNRMLGQLYHCLQVGQRYDEIAAFGAPITATT

SEQ ID NO: 383304 - protein, 408 aa, unidentified
MARYYLGVDWADQSHQLYVSDESGRKIRELEVQQTADGLAELGRWLEESRGQGIELWAAIEKPEGRVVDFLLDHGVVVYPVNPKALDRARDRFRMSPSKSDGFDAYVLAEFLRTDHAHLRALEPNSAEGQELKMLTRDHQRLGRQKTRLLNQIGITLKEYYPVPLEVFESLDTKIALDFLKAYPTPQALSKLTRRGWKRFAKRDHHLSEARCGELWDKLNKPQLAVPTHVVRAKAKLLAALVMQLEASVKAVDSYSQEVQSFFAAMPAAEIAKTLPGGKSGTTVASIWAELGDAPKRWNSFRHLQAEGGAVPVTKASGKSRMVQFRFACNKHLRQAMYWFSFNSLQRSEWAKKYYRNQRAKGHSKHESLRALGAKWLKIIFVMWRDHKPYDENYHLANIARQMMRQAA

SEQ ID NO: 383305 - protein, 369 aa, unidentified
MLIIGCDYHPGFQQIAYVDTETGELQEQRLPHPEEAERFYRDLAAREARVRVGMEASGHGRWFERLLAELNFELWVGDAAAIRAKRVRKQRTDRQDAQHILNLLVEDRFPRIWVANWENRDLRQLLWHRHRMVQARTRVMNQLPAVALNEGLRCKKRLWREQGRQQLESLTLAPWTSRRRRELLELLDRLNPTIAGLNQVIEQEAEKNPEAQQLMTHPGVGALTALAYVLIIGDANRFSRGKQIASYLGLVPTEESSGDRRRLGHISKQGNCLLRFLLVEAAQVTVRTDAEWRSKYFHLAMRRGRKIRQGGDGQTVGSGFVLDVASKMELRAVAKVRFARGTAWKSLWCAVNHRRNDWASRSSSRRSLK

SEQ ID NO: 383306 - protein, 336 aa, unidentified
MLHYCGIDLHSNNHLVVVIDEEDKRVFEKRLNNDLSLTLDALSPFQASLQGVAVESTFNWYWLVDGLQEQGYDLRLVNTAAVKQYDGLKYSGDRHDAFHLAHLMRLGILPTGYIYPKEQRAIRDLLRRRLFLVRTASAQLISVQSQSWRTTGLRMASANLRKPDVVVPPVDIYTHQAVQAGLAVYQTIQREIDGLEKTAHQAVKLTGAFQLLQTVTGIGKILGLTIMLETGTIERFAGPGNFASYCRCVDSKRMSNGKKKGEGNAKAGNKYLSWAFSEAAHFAVRYEPLAQRFYERKKARTNGIIAIRAVARKLSRATWMMLKHEVPYDARLMFPG

SEQ ID NO: 383307 - protein, 359 aa, unidentified
MRTQSNKVNFNGENIYVGIDVHLKSWAVTIYTEHLHHKTFSQPPVPILLWKYLDENFPGGNYYSAYEAGFCGFHIHFELEKLNIKNIVVNPADIPTSQKEHVHKNDSCDSKKIARSLRAKELTGIHIPLIETLENRSLVRSREMLVKDLVRFKQRIKSFLHFYGIAYPPEFEKSSCHWSKRFLKWLKEISLNTQNGNEALSLLIREVEQQRLLLLEVNKKIHNLAISDKYIKEIELIRSVPGIGLITGLTFLLEIENIERFSNTDKLACFVGIIPTCHSSGETSNNGEMTFRGQNHLKKGLIESAWVASRIDPALTHSFIKLCKRMEPNKAIIRIARKLLNRIYYTLKKKHKYEYGMVK

SEQ ID NO: 383308 - protein, 374 aa, unidentified
MKECIKYIGLDVHKSSIAVAIAEAGSSEVRYHGEIQNTPEQITKTLRKLSNSGAKLSVCYEAGPCGYEVYRQLTDRGIDCMVVAPSMIPRKPGDRVKTDRRDSQMLARLHRAGELTAVWVPSAEQEALRDLVRARADFVLLQTQARQRLNAFLLRHGKRFDGKSKWTQAHFRWFETIKCSFPVQQVVLQEYIDAVTHMQKRIKTLDKQIEWAGNESTLWPLIQNYMALRGISRLVATALAAELGDLTRFANAPQLMAYLGLVPSEHSSGSSKVRGGITKTGNGYMRRLLTEAAWTYRHLARKTACVQRRAEQTPEQVQEIAWKAQQRLCARYRGYIQRGKVSVQACTAVARELVGFIWAIGQATGPLHEISVNA

SEQ ID NO: 383309 - protein, 336 aa, unidentified
MFETYLGIDVHKKRCVYTQLNTQGKIMDRGSFHNEIMEVSDFACRLDSGTHLVLEPVLNYLWLLDQFEPYVGSVHVATPYKVRVIAESKCKTDSYDSRILAELLRTNFLPESWIPPKELRSLRTLIRQRYHLVSSMVSFKNRIRYLLFTFGVHIPVSDISSEKAKRMISGSILPDTEMRSIHRCFEMIDMLKSSIGEIDESLDEASDGIEEIKLLRTIPGMGRIWSVTTYAEIGDINRFSSEKAFASYTGLVPSVRSSGDSCHHGGITHLGSKPLRHSLVEVAIRAIRRVPSLKRMHSRLLYRGNVQKARVAVARKLATIIYVMLKKKEPFRLESV

SEQ ID NO: 383310 - protein, 356 aa, unidentified
MRDRLGVVPGSDVFLGLDISSVSWHVTARSGGETLLSASFPPKREALNGLLGRLEGCRVHSVYETGPFGYGLHDWLRSRQVDSMVVSAAHVPGEIGNRVKTDRRDGLKLARTLEAGLLRPIFVPEARQRADRELVRQRHRVQRDRCAAMVRIKSFFLTYDIEVPEEAGAHWGGDFEAWLRGLKLADQSLDRVLGEQRGLYFDLDARVDGLTKELRQMARSSDYAPMVELLSTVPGIGWLTALTLVVEIVDFSRFPDGEALSSYAGLTPSEHSSGDRIRHGHITRQGNPVVRSVLVESSWILIGKDPEMRRFYDRIKVRRGGKRAIVAVARKLCHRLLAIAQSGQPYRVNFSQTKEN

SEQ ID NO: 383311 - protein, 338 aa, unidentified
MGTYAGIDLHSSNNYIGIMNQDHKRLFGKRLPNSLDEILMVLEPFKYDLKGVVVESTYNWYWLVDGLQEHGHRVHLANPSAIKQYEGIKHTDDKWDSFWLAHMKHLNILPEGYIYPKEQRAVRDLLRRRLFFVKHRTSNILSLQSTITRNLGIKMSSNAIKKLTMDDACDLFECSNLVFMAQNNISTIKHLAKIIKGIEKQVKPQVQLRKEFEMLTTIPGIGLILGLTIMLEVGHIGRFFKVGNYSSYCRCVSSKRLSNGKKKGENNKKNGNKYLAWAYVEAAHFAKRYIPKAQRFYQHKMAKSNGAVATKALANKLARASYFIMRDQVAFDEDMLFR

SEQ ID NO: 383312 - protein, 391 aa, unidentified
MTMYFVGIDISKYKHDCCIISAANQKVVSKFTFKNDKSGFEQLNLILNSLSTPEDIKIGFESTAHYALNLELFLENANHSFMEINPVLIKDFKKSQTLRRTKTDSIDCELIARWLMTVEYKPHSKGFYHAYSLKSLTRLRDKLIRQRSFYLIKITNVLDHTFPEFKPFFNERLSKTALYLLENYGSAEKMARMNSASYEKLRSLSRGKFSPQQFLRLKELAANTVGVNNSIFDVELNSLLSLYKSLVKEIDTIEKEINKLIEEVHPHYMSVPGIGPLSAAVIYSEYGDISNFTNPGQMLAFAGIEPGINESGTESHGGKMVKRGSSQLRYTLINCCLPLIRFDMTFATYYAKKRGEGKPHRVAITHVAKKLIRVIYALESQDIDFNAQKLR

SEQ ID NO: 383313 - protein, 396 aa, unidentified
MTTIGIDIGGRTHAVARCRQGQARADREILHVSQSRAGFAALDAWLGRQTEPVSLVTMESSGHYWMPLASHLGRRDVPVAVVNPLAAKYFAKSRLARTKSDPADARSLAEMAMRDTPPARDPLAGAELRQAARFAMTLVQEQAKVCQRLIRLVELGFPELGDLFDDPTCRTAREVLRVAPTARAAIRRKTSTLADANAGPGHRRLGSQKAEVLQAAAASSIAVPELDAEVAFEVGLLLDQYDLLERQIEAADRRVASLLDGETARRLQTIPGVGPSIAATLIAEIGDIGRFTDFDQLLAFAGVHPAERSSGRKGSNPETAWRMSKAGNSHLRAAAYRMAVVGVQHNPVIAAHYARKRAAGKSKMNALGHCMRKALSLIWGVWRNGHDFDPDWRVEV

SEQ ID NO: 383314 - protein, 340 aa, unidentified
MSEIKRIAIDTSKAVFTLHGVDDAGRPMLRRNVRRRELLPFFEKLPPVEVVLEACGGSHHWGRALSTIGHRVRLLPAQYVKPFVKRSKNDRNDAEAISVAASQPSISSVPIKSLEQQAAAMLLSVRELLVRQRTQLVNALRGHAAELGMVAPLGEKGLAELRTEIAAADERAVPAAAKQALMLLGQETHRIETRLAAIEVKLMQQHRANPVSRRLSGIPGVGPIGALNFALRIDPAQFRSARHLAAWLGLVPRECSTAGRQRLGGISRAGDERLRQLLVLGATAVIRHAKPGRPATSPWLLSLLGRKPRKLAAVALANKMARIIWAMMTSGQAYRLQPAA

SEQ ID NO: 383315 - protein, 401 aa, unidentified
MEIVVGWDWADGHHDVVVQDRPGHALWVGQVAHTRDALDALEARLLDWAEHVRRDVHVVIETSQGLVVDWLSTTGFWVYPVNPKVSDARRKPSGAKTDRLDAAILARLGWHERDQLRPLRPAGEDWVELRQLTRIDEDLAQQTTRLSNQLMAALKSYYPQVLAAFADINRPVALAFLAAWPDPVEARKLALSDLMSWLRQHRYPRAAQEAPRIWGALQQRALEASPGKRRAQVWAVRALVAQLQALQAEHRALREHLETLFLANPDADLWMSVPGVAVTLGARLLAGFGPDRDRFELVEAAQALAGTSPVLYQSGKLKRVHMRRACDKHFRATVHQLAFTSLSRCAWARQYYDQYRARGHGHHAALRALANVWMRILFRMWKSGQPYDQARFLADRERHAS

SEQ ID NO: 383316 - protein, 414 aa, unidentified
MDAIFKIVAGLDVHQKTVVACVRKTQPQGAIAEEVRTFGTMTGDLLQLSGWLAKEGVTHVAMESTGVLWKPVWNILDGRFELLLVNPRKLKRVPGRKTDVSDSQWIAHLLQCGLLASSFVPSRPQRELRDLTRQRTQLTREQTRIVNRIHKTLEDANIKLGAVASDILGKSGRAMLNALVAGERNPVKLADLAKKSLRGKIPELQQALQGHLTEHHVFMLQTLLAHLQYLEQEITAFSQRIEACLRPLVDADQMRRLDEIPGVNQRTIENVVAEIGTDMGRFPDDEHLSSWAGMSPGNEESAGKRIRRRTTKGDSWLRCALTEAAWAAGRTKNSYLGALYRRLAARRGRKRALTAVGHTILVIFYHMLKINVPYKDLGPDYFDKLKPEQYRRYLVKRLESLGFTVELKPKDTAA

SEQ ID NO: 383317 - protein, 358 aa, unidentified
MDRELYIGVDVSKKTLDLAYYDGETIDWKNAHIKVSNDDAGFKKIGSWVAKVGKDFDTFLFCMEYTGLYNQNFRLWLESKEYIYGMVEPRKMHHFEPDLDDDQRSLDRIKTDELDSFRIAIYCEQNHKKILRNPSKLPSPVYFKLKRLLVERKQNTKQSTLYKQQLHDICAYDTDLSVERKKLLLTNMQENQKAIDKEIDSYMNEDASISKNYDLLTSIPGIGRIIALETIVLTENFTAISNPRKYACYIGIAPFKKESGTSVRKRTAVSKKGFSEAKSDLSIAALSAITYNPAIRGYWIRKKKEKCGGIVLNAIKFKLVLRMFAVIKRGTPYVETDAYKNREYSKSELKLFPDQNYH

SEQ ID NO: 383318 - protein, 339 aa, unidentified
MTEIKRIAMDTSKAVFTLHGIDQHDQPRIRRDIRRAGLVDFFAKQPPTEVVMEACGGSHHWARVLSAQGHTVKLIPPQYVKPFVKRGKNDRNDAEAICEAAGRPNMSFVPVKSKQRQAELMVLRTRELLISQRTQLVNALRGHATEFGIIAGKGIERVGKLLELIAADDAIPQVARNVLAMLGAQIARLDTRLDEIDADLLAQHKANPVSVALAKIPGIGPITALTLVTEIDPGRFQSGRHLAAWIGLTPKERSTGGRQRLGGISRAGNERLRSLLVVGATAVIQHAKPGSKTASAWLLKLLERRPRKLAAVAWANKVARIAWAMMSTGEAYRGVPQAA

SEQ ID NO: 383319 - protein, 338 aa, unidentified
MLYSGLDLHKHTIAIHTVDAVGTCVRRTTLPTERVAIARYFDALPGPHRAVVESTGMWYWLRDLLVAQHVDLRLGHAKYLKAISYAKVKTDAIDAATLAQLLRAELIPEAHMISDAQRELRDCLRARLILVTRALQARRSMTVLLEKYNVATPEELPALPRLQADLFLAQRTLLLTQIRRIEAELRGHLVDRPDLQRLVWIPGIGARTAYTLLLEIDDIHRFPSVRHFHSYCRLVPGSQDSGGKTRHKRSKDGNRYLKIAFHHAAIRAVQYFPEIRAVYQDWARRKGTPIARALVAKELAQIVFFVLTKDAPYNDRFASITLTQRKPLTWPRRANPPA

SEQ ID NO: 383320 - protein, 343 aa, unidentified
MLHVGLDLSRRRLDYHVLDDVGETLAVDAVPPDADGLCRLSSRFPVPIRAAIESMTGARFVHDQLELAGWEVEIADAARVKGLAPLACKTDRIDARVLAELSWRDLVPSIWLPQPRIREERERARFRLHLVRHRTSLKNRVHSTLLAHGVPCPVSDLFGLRGRRLLERLRLPQPWLANVEASLELIDYLDSEIVRYEIELERLGADHPYVPLLRTIPGLGWVLAYTVAAEIGSIERFPTPTKLAGYTGLCPRVYQSGASDRRGSLSKQGPRYLRWALIEATSHACRHPAYATRYQQTKQRLGTQRGASVARVQLARTLAHAIWHMLTRNQPFAPASAAGPLAA

SEQ ID NO: 383321 - protein, 428 aa, unidentified
MTASSFSTLSPMWVAIDIAKTHHVVLVEHPDGRRRHFRIANTQEDFTKLSAFLSHSEGSCRIAFEPTGDYHRPLAHFLQAQGFTLALAFSVAVARTREALYNSWDKNDPKDAQVILHLLKTGATQLYHDPLLHGHHDLQELAGTYHQVSLHKVRLRHSLRTHYLPLYFPEAERYLHSTRAEWFTQLLILVPCPAAVLKYSPEQFIEAARRLDAHKNDKIRWLADFYPTARTSIGLPVREDSEAIRMFRVVLQEYLHRCRLRRELEEHAMVRLADHPDFRRLQTIPGIGPILALFIMAEAGDLRRFHHHRQFLKYCGLDLSTEQSGQFRGITKLSKRGNARLRYAFWVAGTVAVRAKQNSFCRKFQDYIRPDPLNPDRRRKAYTAVAAKMARVAYAIVKAGTDYRRFPEATMPGGRIPSARAVEAIPTS

SEQ ID NO: 383322 - protein, 347 aa, unidentified
MNYIGCDSHISSLDCAVVNERGQETKKQRMNTGVKELMEFVKSIPKPRTIIIEEGTLAGWLLEVCTAHGEKLIITDPKRNRWIGRAGQKNDTIDATKLAHLARGGYIKEIHHPIGHRRRFRELVLAYHDTVKSLTRIKNKLKAKFRQNGIRCSGETVYSARYREEWKKKLPQDKLVQVMVAGLWQQLDQVQEVQEELLGHMREQSRHYPEIKRFKQMPGIGTVHAATISAIVETPHRFAHKKKLWMYAGLGLAEKASGEKVYSRSLTRTYNRLLKNALKQAAEATIIAKDNQFRRQYLRLTIEKGIPSHRAKLTVARSMLATVYGIWKSGEDYDPDIDKRRAESDKT

SEQ ID NO: 383323 - protein, 357 aa, unidentified
MASRSMPQLQHGVTVGVDTHGDAHVAAAFTSDLGRPLGHLEIATTPAGYRRLLEWARSLGSEPRFGVEGTGSYGAGLARFLLAADCMVIEVSRPNRQTRYARGKSDPVDAEAAARAVLSGEATGPAKVDTDHIGMIRALRVARRSAIKMRTQTFQQMKALVVNAPADLREQLRSLTRDRLVDTAACMRPGAVTTLTAAAKLALKCLAQRYQLLNAEIETLDRDLERIVSAAAPALCALKGVGTDVAGAVLVTAGDNPERLRSEGAFANLCGVAPLPASSGKTTNRHRLNSGGDRQANCALWRVVIVRLATHQPTKDYMARRTQEGMSKAEIIRCLKRYVAREMYRELPPRVALAAAA

SEQ ID NO: 383324 - protein, 438 aa, unidentified
MRRKKNKATKKVHFESLPLIHPNAAGIDVGSKEHLVAVPPDRDPQPVRTFQAFTPDLHELAAWLKRCGIESVALESTGIYWISLYEVLEQYGFEVRVVNARHVKNVPGRSKSDVLDCQWIRKLHSFGLLNGSFRPDQQVRKLRTYMRLKDNLVVEGTQAIHHMQKALFEMNVQLSNVISDITGESGLRIIEAILAGERNPEQLAAFCSTRIKASRQTVAKSLHGNWDEALLFCLKTALDTYRFSQKKIQDCDQCIERQLATFEIKAPLPDSKQTLQTQLHQVCGVDLTKIPSIKEQTAQITISEVGLDMSRWNTEKQFSSFLGLCPNNLITGGKIIRRSTRKVYNRAADALRLCAQSLTHSKSALGAKYRRLRARLGAPKAIVAMAHHLARLVYRMLRYGQNYVEKGIHQYELKFRLQRIKWLKKEARSLNMQLVAAH

SEQ ID NO: 383325 - protein, 354 aa, unidentified
MKRTTKYVALDVHQATTVASVREESGRVIARSVLPTDGGALTEFVCGMRGTRHVTFEEGTQAQWLYDLLAPLVDRVVVCDRRGTPRQGNKGDQVDADQLSELLRRGALRAVYHGSADRATLKELTRTYRNLVEDATRVMLRLKALFRARAITTRGTQVYQARARGQWLAQLADPGARFRAEALYAELDVLRKLRPKAKAAMVTEARPDPAWPVLRTIPFLGPVRVALLLATMQTPWRFRTKRNLWAFAGLAVVTRSSADYTMVAGQAVRRRRSPMTRGLNRNHNRVLKDVFKGAATAATARPGPLQEFYRNLITRGLRPELARVTLTRRLAALTLRLWKKGEHYDSTKLTTPAR

SEQ ID NO: 383326 - protein, 454 aa, unidentified
MSRKKTRLQSVTEAPQIRRDACGIDISPEVIYVAVGPQQDAPAVRAFGTFTAELYRIANWLRACGVRTVAMESTGVYWIPLFQVLEDRGFEVLLVNARHYKNVPGRKTDVCDAAWLQYLHAVGLLQASFRPPQTVCSFRTLLRHRAGLVQAASQHIQHMQKALDQMNVQIHRVLSDITGVTGLAIVDAILQGERDGKQLAGLRHGGVKASEREIMAALQGDYRAEHLFTLRQSLESYRHYQKLIGECDQQLRQALDEFDSKQGGPPSAPSAQKKLRTKQDEELRQQYYRILGVDLTAVPSLNVGTVQTFVAEVGPDLSRFRSASALASWLGLCPDNQISGGKILSSRTRKVDNRLAAALRMAAESLCRDKSYLGQYYRRMRARLGGPQAITAAAHKLVRIIYRLITTGEGYNEGHFARIEARNSERFRLRLAQQARKLGFTLVPATRTVAEGVS

SEQ ID NO: 383327 - protein, 399 aa, unidentified
MADDAVAGIDWACEVHVACVLDGTGAVIDRFDFTHDAGSIRAMIKRLTRASVAKVAIERGDGPVVEELLDASMDVFVIPSRQVKALRTRYGSAGNKDDAFDAYVLADTLRTDGHRWKPLREDAAGTRAIRALCRSRKDLVETRVQILNQLRANLELAFPGAIGLFAKPNSTISLAFLRRFPTVSKACWLSPKRLGIWLSSVSYSGGISAEVLYARLAEAAPGLVGAEGDARGRITLGLVAMLGALNEQIAVLEDEIAARFAAHPDQHIFSSLPRSGTVRAASLLGEIGDCRERFPTDDALAGLAGACPSTRQSGKHERAVFRWSCNKVLRAAVMDFANGSRMADPWAADIYKRAIERGCRHPHAIRILARAWLRIIWRCWQDRVAFDPALHRGRQAAAA

SEQ ID NO: 383328 - protein, 441 aa, unidentified
MKKKRLPKSLKKMNLNAAGIDIGSTEHYVAVPEDRAVKNIRVFQTFTSDLYELGNWLKECKITTVAMESTGVYWIPLFQILEEMGFEVYLVNAHHVKNVPGRKTDVKDCQWLQELHTYGLLRASFQPESVVRQLRVFMRQRDMLIRYSSSHIQHIQKTLTLMNIKLSNVISDITGETGMGIIRDIVKGEHNPEELIKNCRRGLKNPMDVIEKSLDGNYTEEHVFLLSQNLELYDFYKKKIEACEKEINKLLNTISLNNGSNKVSQDGNTHKLEDLTTNDYLTKITGVDLLAVKGFNTNSLLAIISEVGLDMSKWQTVKHFTSWLGLSPNNKISGGKILHSGTKKTKSYASKAFRLCAQSLSKSHCYLGGFYRRLKSRLGAPKANVATARKLSIIFYTMLKNGIEYNDLGCDYFDERHKERSIKNLKKRAELLGYSIIECST

SEQ ID NO: 383329 - protein, 346 aa, unidentified
MEHYAGIDVSLELSSVCVVDAKGEIVKEAKVASEPDALVSFLQGLGFPVQRIGLEAGPLSQWLHAGLARAGFETVLLETRHVKAALSAMTVKTDRKDARGLAQLLRMGWFRPVHAKSIGSQEMRALLVARKQLLGKLIDVELSIRGILRGFGLKVGQVTRKEFEVRIWELVAGQATLERIAGAMLSARATLKAEYEKLHKAVLAIVREDAVCRKLMTVPGVGPLVAVTFKSAVDDPRRITKSKAVGALFGLTPKKYQSGEKDITGGITRAGDGMVRTALYEAANVLLSRTTRFSKLKRWGMDVAKRRGSKRAKVALARKIGVILHRMWVDGTTYRWREAKLIAARA

SEQ ID NO: 383330 - protein, 455 aa, unidentified
MAKRTSAERAELKPVKVGAAAIDVGSKIHMAAVDPSCTGMPVRAFGTFTQELHDLADWFKSCGVTSVAMESTGVYWIPVYEILEQRGFEVILVNARYAKNVPGRKTDVSDAAWLRQLHSYGLLRGSFRPDAEIASLRAYLRQRERLVEYAAAHIQHMQKALMEMNLQLHHVVSDITGATGMRIIRAIVAGERNPDVLAKYRDVRCHSSIETVRAALVGNDREEHVFALTQSLELYDTYQAKMLACDRKLESLIAALTDKGAKPVGKLSRPRVKTKQVNTPSFDVRGALFGILGVDLTEIHGLGPSLALKLIGECGTDLRAWPTAKHFTSWLCLAPGNKTSGGKVLSSRTRRSSSRAAALLRLAATSIGRSDTALGAFYRRLSSRAGKAKAVTATARKIAVLFYNTLRHGMTYRDPGADYYEEQYRSRVIANLKRRAKSLGLIVLPVPSDAEVAVS

SEQ ID NO: 383331 - protein, 430 aa, unidentified
MSYRIAGIDVHKKMLAVVVSDVEVEDEYKFERRMFGSNPEQLRSLAAWLLEQEVEEVVMESTAQYWKPVWEALERHWKPLRQKKEGASRRSGTLHLAQAQSNRGRRGRKRDFPDAERLVKRLVARELILSFVPDTEQRLWRTVTRRKYQLTRDRVRLQNQLESLLEEVHIKLSCLVSDLLGVSAQRMLKALADGETNPAALAALADRKLRATPEQLCDALGACTDLKPVYRRLLKMVLEQLQFLDQQIGQLDQEMAMLLNQHQDAVTRLAEVPGLGVDSAQQIIAEVGPTAATFPSAKCLSSWVGACPGDDESAGVNYSHRSPKGNRHMRRVLNQTANAAARTKGSIFEIVYRRCVPRLGHNQAIGAIAHRQCRLIWLILRQGVRYEEQGPAVTKQSKQRRTARMVRQLRALGYRIELPNPQHSSSAQVQ

SEQ ID NO: 383332 - protein, 430 aa, unidentified
MTTVQPAASNDEPAWFVGFDWGSEKHRVALFDRAGKLIERRDVAHSAAAYAELGDWLLRTTQASPAEIAVAIETTHGPVVDALIDRGFRVYAINPKQLDRFRDRYSVAGAKDDTRDADTLGRSLRTDPEAFRVLSPDNPLIVQLREASRTAAELTRDLGRLTNQLRDLLWRYYPQMLALDDNLAAPWLLELWQHAPTPAKGARLHKETVARILKTHRIRRLDADQVRTVLREPPLPSAPGVTEAATGHIRLLLPRIRLLNSQIKVVHAEIDALCQQLAGPQTIEPGESVPGQSIEQRDVAILHSVPGVGRIVGATLLAEASEPLRRRDYHAIRTLAGQAPVTKRSGKSCFVQRRLACNKRLANAMYHWARVAVVRDPRSKQRYAALRARGCSHGRTLRSVADRLLKLLCTLLQRQVSFDPNHNAKEAAAG

SEQ ID NO: 383333 - protein, 411 aa, unidentified
MSSLLQEALPAETLVVAIDPGKVANRVWLASGERGLIGEPVSLPTLRAGVDELARLIAASESAGQPLIAVEATGSLHRAWTAELERRFPGCVRLLVPSETQAARAQLGSRRFKSDDRDCAALVWLARQGLGRSPEEPTVEALLGVVRHRRQLVSELKVLRQRLHDQLNRLCPGLSAPQGHGRVLDLLQPSGRAVLACAVAFAGRAPTARSLLARSPGRLTRSNAEYWLERWRGCLAPPADADLRASRLGLDLDRLDVLLAALAHADGQLRQLLAQTQGQVLTSLPGVAGVRAASFAAHSLPIERFPTAERLYSATGLAPASYQSATISRRSGISRQGLADHRDALMAIAWGLSLASPAFRERAAEYRARGFAPIQVRVALARHACRLCHTLLRTQQPYDEERYRQARRRGR

SEQ ID NO: 383334 - protein, 391 aa, unidentified
MSSMTGEHGVVAGDVAGDVAGDVADDVAGGVVLGGVVVGGVDTHSEVHHAAVLDALGRELADRQFPATSAGYQALLGWLRSFGELTRVGVEGTSSYGAGLTRHLHTAGIVVVEVDRPDRRTRRARGKSDPIDAYAAARTALAGVRTVVPKVGDGIVEAIRTLRVTRRGAVKARTATINQLKALLVTAPAEIREPLAGLTTAVLIPACLALAPTGPVADPAHAVRLVLRRLARRYQFLSTEIRLADAELRNLVGTAAPGMLTRLGVGVEVTGQLLTTVGDNPDRMRSEAAFAHLCGVAPIPASSGKTRRHRLNRGGDRAANNALYTVVLARLRLDERTRAYAARRTAEGLSKREIIRCLQRYVARELYHALVRLPASSSSWPAHRLERVGQP

SEQ ID NO: 383335 - protein, 482 aa, unidentified
MKKRNIYQNQSQELLSLFESAGSSAKVMCVPMDYAKRDHLVMFCNGHGDILRKPFSVKNSPEGIKYLIDQVMRSCRRRGIKKEHVFLGGEDANSFAENFVSTLRFKGWLVAGVNARDAKKQRMNLQASTDRIDLMGIATMLLNCRANCCPAATGIYRNLRTLVRHRRKLVVMLTEVKNRAHGLVDRLFPGFLNEDKSGIVPFTQSSLYLMENRFSPKQICRRRRQRLIEILKRFGTSKAQETALKLQQYAATVLHTPDEYIDTLQISLAQHVKHIRCLKESIVLLEKEIAVNLAQTQGAFLTSVRGIGIVLAAGVSAEIGDPYEQKTLSHMVSYSGIIPRVKQTGGVDGKTYTGHVAKRCNRILKDYVVKSGFHLGLHGPEELKIDYKRRDASGQHADFGIGRRYLRMAMSLMRTSQIYLPPWLRKADSTLEERAGYYLMSWPYLREKWKKYGVLEAAFTKDRPLGIWRQIVQELYDIKLKL

SEQ ID NO: 383336 - protein, 424 aa, unidentified
MTEDAIDIEWFCGFDWASQTHVVCLMDRNGRTIGERGVAHGGAELTEFCDWLVAQTGAPRARIGVAIETPHGPIVEMLLERGFAVFAINPKQLDRFRDRFTVAGAKDDRRDAQTLGDSLRTDRRAFRLLAVDDPTVIELREWSRIAEDLAQERTRLANRIGQQWWRYYPQMLQLADDLAAENFLALWECAPTPARAAQIDEAAVAKVLKAHRVRRIGAAEARRLLRQKPLLTAAGVTEAAVAHIKIAAERARLVNRQLKDAHQKLDALCDRLERPMSGETENEPGQRSEQSDVTILRSLPGVGRTNLAVLLVAAPEPLRRRDYQVLRVLSGVAPVTRRSGKTRLVTRRMACNERLREAVDHWARVAMQTDPKCKERYAALRRRGHTHGRALRTLGDRLLATACAMLKSQTLFDPERNTPQPASA

SEQ ID NO: 383337 - protein, 323 aa, unidentified
MTTQACLGIDIAKRTFDAVLLQEGRTRHRQFANTIAGFQQLQTWLHDHATAPLHAGLEATGVYGDALALFLHQHDVQVSVINPARTHAFAKSELARTKTDKADAALMARFIAAHRPAAWTPPPPEQRQLQALVRRLDALQAMDRQERNRLDLEDATSILRESITTHLTHLDDQIRELQHRLREHVRAYPALQQRCGLLQSIPGIGECTALKLLAELPSPSCRTARQAAAHAGLCPRQRDSGSSVHGKTRLSKTGNARLRKALYLPAVVAMHHNPILREFALRLLLRGKPKMAVVGAVMRKLLHQAFGVLKHGQPFDPNYVRTP

SEQ ID NO: 383338 - protein, 409 aa, unidentified
MYYVGIDIAKSFHVVTIIDESEKKVTTKPIRVTNCIDGFNKFIAKLEKISSNTNDFIIGLEATGIYGENLWEFLNSHGYDVKLLNPFQTTRYREQHTMKKVKNDNIDSWIIALFLKDGKFSSGYVTDDEYQSLRTLYRNRASIQSDMKEVKKRILTQVTVTFPELENFIDIFSISGLALLDKYPTSQHYKHSSVDRIMKIFRHIQGNNFNNEKALKVLELAKNSIYSGKAKDARAIAIKSSIRLLRMYQEELSILEDEILALLDKQGISEEKDVPTNSLIENLKTIPGVSHKTIAAIISECGDLSRFSKPTKFIGYLGLFPTENSSGNSKSTGRLSKRGSSLAKHALYLASVSCMIHNPQLKQYYDTKRSQGKSKQEGLIAVSRKLATIIYSIFKYNTPYDPARVFSKS

SEQ ID NO: 383339 - protein, 311 aa, unidentified
MAEKVAGIDVAKNHLDVHLLPEGESFRVANDLDGQADLIRRLGQNRYRVVVESTGGYETDLVAELHAAAVAVAVVNPRQVRDFARATGRLAKTDRIDAMVLATFAQAVRPRLTGVPDEITLQIKALVTRRRQLIQARQAEVNHTEHATLGTVVGSIERMKKALEKELDWLERQLRKVIEASPLWQRKLEILVSVPAIGETTAAAVLAHLPELGGFNRREIAAMVGVAPLNRDSGMLRGKRTTGGGRAEVRRVLYMPTLVAIRHNPSIGQFYDHLLEQGKAKMTAIVACMRKLVILLNTLLRENRYWKPKCT

SEQ ID NO: 383340 - protein, 318 aa, unidentified
MSSAAPAFVGIDVAKAELVITIRPSGEHWTIANDVAGIHTLGQRVRGHAPTLIVLEATGGYERAAVAALAAAQLPVVVATPRQVRDFARATGQLAKTDRIDADILALFAERVRPAPRALPDDAAQALDALLTRRRQVLEMLIAERNRLEHAVPTVRRGITQHIRWLERQLADVDRDLDDSIQASPVWRAKENLLRSTPGVGPVLSRTLIGELPELGTLPRKQIAALVGVAPLARDRGTLKHKRLVWGGRAPVRAALFMAALVGTRCNPVLRAFYRRLLEAGKPKNVALTACMRKLLTILNAMMRTNTAWRHIDLSPTT

SEQ ID NO: 383341 - protein, 370 aa, unidentified
MGNASTLHVGLDVHKESIAVAYATEDGATAPVPLGAIGTRQGDIDALVRKLQSKSARLVFVYEAGPCGYWLYRYLTRKGLTCFVVAPSLIPRKPGDRVKTDTRDAVTLARLARSGDLTPVYVPAVPDEALRDLARAREDALHDLNAARFRLKALLLRNDVRYVGRANWGAEHRRWLARFVFPTPAQQIVFQEYVRTVTERTELLQRLEAELLEQAKTWRLSPVVEALQALRGVQFTVAITTIAELGDLTRFDTPRQLMSYLGLTPSEYSSGERRRLGGITKAGNRHARRVLIEAAKAYRHRAKVSEQIQVRQEHLPAVIRDIAWRAQVRLCGRYRKLLARGKHPNTVAAAIARELAAFMWAIAKARPVPA

SEQ ID NO: 383342 - protein, 386 aa, unidentified
MHHPTTLPVSEQTCSRDDCATLFVSLELSRSTWVATSLALGSRKMSKHTLVGGDARKLLDLVARLKSRAEQRITAPVKVVAIQEVGLDGFWIHRLLEANGVESHVVDPASIAVPRRHRRAKTDAIDGETLLRTLMAWNRGEPRVCAMTVPPTPNEEDRRRVSRERATLLRERIRHTNRIRGLLFGQAITNYNPLHKNRRKGLEEQRTGDGHPVPVHLKAEILREIDRLELVLRQINEIEAQRDEMLRLGQASSPVALLMRLKGIGPEFAAVLYLEGLFRHFENRRQLAAYAGLAPSPWKSGSVDHEQGISKAGNPRLRTTMVELAWMWVRYQPASALSCWFRQRVGSERGRIRRISIVALARKLLIALSRYINHGEIPAGAVVKPV

SEQ ID NO: 383343 - protein, 520 aa, unidentified
MVRTRTRRRSSRRQIATSLGKPRGVLHPRVQQVGPEHFGIVCFDCAKVRSKYLLADFYGRLLIPPTTVEHTRPALDGAVAHLRRAFEQHQLRDGLVAIERTGRYHRVVQRTFAAAGFETRILHPFVTKQYRQPVDPGNKTDDADLAAIHRATVTGCALLEATRDEAWTTLQLLIRHRRDLVCNGAALNCQIRDHLEAALPGYAACFDKLWDSVIPWHLLRHYPTATQIREAGVTTLCHSLRQADIRFQQRTIQTVVDWAEQAAPGDIAAGQHLRIALALYEDRQRKTQEIKALERDIAGRLVQTPYVLLLSFPGINVVSAADFAGEMGPIEHYLNAKSITGRAGLRPSRYQSDQVDKANGPLVRCCNHALRAAILTIADNLIVCNHHFNVLATQWAAQGKDPRHTRVKVGLRFCRIGFQMVAGRQVFRHPCIQDRHYILEKLTAFHREHDTGMVEVLRDLHAAIRHVPPREYAAEAKPLQDEYRRIQDGRRRGPQLLGNILPIVFARLGVGLVSSNESGE

SEQ ID NO: 383344 - protein, 353 aa, unidentified
MNNSIYIGMDLHKNTSTFSVKDEDGTVLDNRKIETEPSAIKGYLRKFPNAQLAVEPVSQWYFYADLIQKLGTEVHLANPLKVKAIASARIKTDSIDAGVLCDLLRTNLLPEAYFSSLDVRFWKEMVRFRASLINLRTQVKNKIHSILFKNALRHPFTDLFGVSGRKWLASLELDPHFAFNLNRYLELLDTLNRLVKEADEKIEQTVTDHTQARLLTSIPGISYCSALTIMAEIGTIERFPSAKKLMGYAGLVPSTYASGGTTRHGRITKQGSRWLRWTMIEIAQRQQLCKKTPGFGWYYDRIKKRKGTGAAAVATARKLLAVAWRILKDNRPFEVIPPRLEVQDTHRKTIVSR

SEQ ID NO: 383345 - protein, 342 aa, unidentified
MKELKQVVGIDVAQKELVVTIGRLLEDLSVDLFSYKVFKNNDKGFLSLVEWVTKLVENPQEVHYVMEATGVYHQKIAYFLDTNQLKVSIVLPNKISNYFRTLEVKTITDKTCSQVIARFGLERKLDLWKRPKTVYKNLQQLTRERDQIVAERVIVKNQLHAEKAEAEPNSMTLKRISERIKLLNKQENEIKNDISKILKNNPELKEEIDRMMTIPGIGELTAVIILAETNGFELIRNKKQLTSYAGLDVKEKQSGTSIKGKPKISKKGNRSIRKAMHFPSLVAVKWDENFKELYARLVSKHGIKMKALVSIQRKLLEMSYVLYKNQTIYDKEHKNSVQTQMA

SEQ ID NO: 383346 - protein, 347 aa, unidentified
MIHIGIDHHKKCSHVVAMNDQGQILWDGKCASSPEAFRTIKESLPQGESVQSVLEAGRNWGIMYDALEELGLNPKLANPLKMRLIAETFTKTDKIDATTHAIILKAGLTPLVHVPCKEVRDQKNLLRQRVWLVKMQTMIKNRIHNIIDRHHLEVPEKTDLFGSHGRAWVNALVLSYPDCNLLRQDMKLLDDVQSQVRQTEKWIDETLKYNPYVPILLSLPGIGKILAALIALEIDTIDRFASLSKFSSYCGLVNSTYSSAEKTFHGGLIPTCNRHLRYAFIEAAWTSSRVSPYFSSFFRRLKAKVGTHDAIGACARKLCQITFFCLKQKRNYKEKPYRFKYQQKLAA

SEQ ID NO: 383347 - protein, 342 aa, unidentified
MSISYVGVDLGSSNFHQVAISERGVITLNRELATSEANLVKAFSGMRGEIHVHLEAGELAPWASEIIRPLVTRVVCSHPQKNAWIARDRDKSDRVDAYKLASLLRLNEFQEVRYPQSQLRRDFKAVVQHYDELTQQQARLKTKIKARLRMQGVITRGQLVFSARGRKAGLQAVKSVLVRTAIQQLYEMLDQSLESQAEARLLMLRAAQALPEINIMRTAPGMGPIGACRFSAYVHAPQRFSSTRKLWKYCRLSVSHRSSNGKPLRRPRIDRSGCGRLKDVSRKAFEAALRRKDNNGFQRAYYRALAQTHDATHARLTVQRKIVSTLRAMWINQTPYSDQMTP

SEQ ID NO: 383348 - protein, 401 aa, unidentified
MPRQGFIGLDVAKDTFTAAFLIVDALSGQILHEQIATFSDDHPGWQRFLATWEPLHADFWWIGLEASDPYSALLEAHLLRLHRPNVSLHRLSPLQVRDFARARSRRRTKTDRLDACTIALFLRQQLTVQALPAPLQDHTPLRALAHLDQHLAQELTRTQNQVRQLLHFLFPELERAYARFPKALRTLLRHFPSAHAIAQAPLQDLHALLPPRHRLDLEALQALARASFGLHDPIRAQTLQLLLDRWAFLETLRARCFAALQQAVRPHHPQAWRLLRTIPGIGPRLAALFLALTGPLDRFPDRKALIADAGLDVTLHPSGRFAGRCRLSKRGDPLLRHVLYLIAAALKRYTRRFAQAFAYYRHQGRAVRETLVILSRKALGMLDHLLRHQVPFQDLPQPAPV

SEQ ID NO: 383349 - protein, 407 aa, unidentified
MRYYIGVDWADEEDAVWVANDAGDKMLSRRFAHTVAARSEWARWLRERQAEGIELWAAIERPHGRIVDFLLDHGVVVYPINPKSLDRARDRFRVGGSRSDPFDAKVLALFLRSDHLQLRPLRPNSEAAQELQGLTRDYRRQVHLQTRLLNQLTATLKEYYPRALELGEDLTAGWAQAFLARYPTPAAAAALTEPDWQAFAHAHRLSPTRTAALWETLQQPQLPLPAHVVRLKARLLQALLRELAPTLATIAEYRQAIDDFFATMPTAEIARSLPVGKSGTTVPTVWAELGDHADRWASFRHLQAYAGSVPETDCSGKHHVVKFRFACNPALRDAMHQLAFLSLPHSLWARAYYDRYRERGHTHHQALRALGAKWLKIIFVMWKRQVPYSETHHLATMARQHLHQTAA

SEQ ID NO: 383350 - protein, 466 aa, unidentified
MTPPTDFFLHPRPSTPPPPQPPARTGPLQVFNPHAAGIDIGEAEHWVAVPPDRAPQPVRRFGTFPADLDVLADWLIDCGITTVAMASTGVYGIPLFELLETRGVQGLLIDPRQATRAPGRPKTDRLDGQWLQRLQTSGLLAGALRPEAQGCVLRHALRHRQRLRTSAAPHIQPMHKALQQMHLTLTQVVSDIPGATGMAIRKALVAGERAAPRLAALRHAHGQHDEDDIAKALQGPWHAAHLFAFQHALSLYACSHPPLALCDQQITRHLATFADTSAGQPLPPKARRATKTTAPRFDARTPLYRLAGVDLTTIEGIEEHTALVILSAIGTDMQRWPRVKPFCRWLGRCPQHQISGGKVLSRRGRPGAHRVPVALRLAARSLPHSQSALGAFFRRMNVRLGTPKAITATAQKLARRVSSLRQHGSAYVQQGLDAYETPSRERKGTAMTTQAKALGYTLVPLAAQGA

SEQ ID NO: 383351 - protein, 340 aa, unidentified
MNATTYGLDVAKSVFQMYWVEAETGEILNRRFGRDELIRFLAQRPAGRVGLEACGSAHWWARKIKMLGHEVVLLHAKFIRPFVQTNKTDTADARAIWTAVQQPGMRTVAPKTEDQQAMLGLHRMRALLVKFRTMQVNQLRGLLYEFGASFRAGRAAGLAEIRSRIAELEAVLPGTLMRCLHDQLRRIDELQREIELLEKQIGVAQKEDAACCAISAVPGIGRLTATALVATIGDAKTFRSGREFAAFLGLVPRQTGTGGKVRLGSIAKRGDPYLRTLLIHGARSVLCNAKEPTRWQTDLKARRPANVAAVALASKIARTAWAILARGQEYQPNYVSVRPA

SEQ ID NO: 383352 - protein, 480 aa, unidentified
MGKEKFKHFGMSPRTALAAGIDVGKYELFAKVLGKFPGEFRELGQQTFTNDVNGRREACCFLDNFGLDIIVLEKTGAYSDAIHAALESHRGWKGQAPRVVSIQPVSVKRYPGEVHTDPRSAIMLAKLGLSGLLDVSYIPSMQGRQLRDLTRMYSKQAGDSTQCINKIKEQLSECGYMLPDLDVSSAWGLALLKILVSPEVMGNIKLVYDLVENDGVKLHGSSKQAILDRKPQYIRFCETKIPKTDCEIVRILMAKLAAENAVRDATCQSIEELVNDTPMIKRLVDKLSAIDGISMMSATIIIAEVDNIHRFPTQDKFLLYSGNTVAPDISGKHVGKPRMTKRCNHHLRDVFRVAGRTACEIVTIDSDIKHYARKQMQKNNRRKKKAYANTGAKIARVVYKLLRDDVEYERFHALHPPMKDAAIASQKQDEEIPFALKEITRRTRRFRNYIVRACETLPPGITKTLHERIREIWKEIAPEG

SEQ ID NO: 383353 - protein, 318 aa, unidentified
MVESSTKTAGIDTSKDKLDIAIYGEKAPFVVENTLAGWQDLAARLKAASVKLVGIEATGNYERGVMRHLETAGFVLRRLQPLQVKAFKDLRLQRAKTDQIDAILIAACTHALGEGVRMPREARFDELADHLTFIEQTEEDTARIKTRLEHMTDKRLRKLAEADVKRLQRRRADELARLLTSLRKHADLAERFDLVLSVPSIGERTAATLVVRMPELGQVTREQAASIAGLAPFVHQSGKQKGETHIGGGRKRLRRALYAAALAGAFRWNPGLKALYENMTKRGKKPKSGLVACARKLLTMANAVVARGTAWEDRTAAA

SEQ ID NO: 383354 - protein, 417 aa, unidentified
MKKDNNSAKKSEPTSKRGKSRGPEQRDAKEVMAEVLEKLTGKLDAPTVSTSAQENRRGSTVRPNLDRLTVGVDLGDRWSQYCILGLEGETLAEGQLRTTQEEVREFFQALTVARVVIEVGTHSAWVQDVITEWGHEVLVANPRLMEGSKRRKRKSDRIDANKLARLGRVDPQSLYPIRHRSREVRQDLVVLRARDALVSVRTELINTSRGLVKSMGTRLPGCSSPSFAEKVKDAIPVEVREALLPLVQLTETVNDCIARYDQRIEELGQKKYGYTTLLRQVKGVGPITSLAYVLTLEDPQRFSSSREVGPYLGLVPKQEDSGDCQPQLGISKAGDRMLRRLLVGSSQYMLGAFGPDSDLRRYGLRLCERGGKNAKKRAVVAVARKLAVLLHHLWVTGDVYEPLHHTGAETRTAPAAA

SEQ ID NO: 383355 - protein, 460 aa, unidentified
MNEDSEAGSGRKEEGIAALGRRVAGVDVGSKQHWVCAPVREGEGREVGVFGATTAQLEKMATWLIERKVESVALESTGVYWIAVYEVLEARGLKVLLVDSRALARVPGRPKTDRRDCQWMQRLHSCGLLQGAFRPPEQICMLRTLVRDKGNLVAEQGDWVRRMQKSLEQMNVRVHRAVADLTGATGMALVRAIVKGEREAGELAKLRDPRCHKSEEEIAEQLKGHWREDHLFSLGQALKMYEAIQERIQDYERAILEKLKAMEREECREQEPPELKNKKKAQTILHRGQEPLRQALYRASGADLTAIDGLGVETVQAVTSEYGTDLSAFPKEKQFVKHVLLAPNQSTSGGKPVKKKQKHDTASSRVAAALRMAALSLRHSQTALGAYYRHIARHKGDDVAVFATARKLATLIYRMLRWGRDYVDEGAEAYENRYREGRLRRLTSLARELGYQLAPLPAKP

SEQ ID NO: 383356 - protein, 369 aa, unidentified
MKVMYERVAGIDVHKDMIKVGVRSPGDKAWTRKTEILEYRTFYGVLQLMAADLRKRAVTHVVMEASGVYTEPVYYALCEQDFERVEVINPAHAKALKGHKTDAKDCARLAELYECGLLRGSYIPAAGLKELRDLTRYRVKTVQARTSEIQRLGKALESGGIKIGSVVSEITGKSATAMIEALIDGERRGAVLADLAIGRMRTAGKLADLSMALAGRFTEHHAMLCRLHLDRLAVFDTAVSGLDERITARAVPWRREQDLLKSVPGFGDIVSQAWLAEIGPAPHQWFSSHEKLASWVTLCPGNNISAGKRKHGRTGDAGTSSRCWCRPPGPRSGPRAGCRPGTAGWYAASAGRRTRPRRRRRSSRSRTPC

SEQ ID NO: 383357 - protein, 385 aa, unidentified
MQKLNDLSRSLTPLKPDRTLIAVIEMSLSSWLVAGIVPGIERQPLKKLEVDESTLLKLLIRWREEAKKSGHSIERIAVAFEAGRDGFWLARWLRARDIEAHIIHASSVAVSREHRRAKTDRLDTELLKRAFLGWLRGERDHCKMVAIPTIKDEDAKRPNRERESLVGEQSRIVNRMKAALVRLGIRGFNPKLKKAVERLDGLRTPEGEPIPPNTLAELRRDMARRRLVSDQIRQIEDTRLERLEQAPSDGPHAMVRLLARVIGVGIETADMLVQEVLSRNMRDRRAIARYAGLTGSPDESGRKRREKGLARSGNARVRRGMIQLAWRFLMFQKDSTLAQWFRARTENARSTRKTMIVALARKLLIGLWRLVREGVVPDGVVLRPA

SEQ ID NO: 383358 - protein, 343 aa, unidentified
MTLKVSFKWVNPQDINVLGLDVAKAKIDICFLGSNHSQFYQIANNSQAISQFSQELKTLGLNATIPFVLESTGSFHLLLATLLKNDGWNVKEINPIITHQYIKHTVRGTKTDTTDAQLLAKIGLIEGDNLKSFDRDLNIIKLRMFISFLAHLETLIQQSKASFNALEKGLTTLGLWKSQELEKMKEAIKILEQRAKGLEKEILNIQLSPEAQKQVDCLDSIVGISPFTAKVAYALFAHNTFSSKRAMLAYVGLDPKLKQSGTKTWALRISKRGHPYMRKRLFQSAFCSLQHSPYFKSIYDKHIQKWKHHFIAVLAVAKKMIYIMRALLKNNTQFDHNYHLLST

SEQ ID NO: 383359 - protein, 336 aa, unidentified
MRYVGLDFHTRQSTFCVLDENGKKLGSRTVRGHWPKVINELAKVKRPFSICFEASTGYGHLYERLKTVAQNVKVAHPGHLFWIYRTVRKNDPIDAEKLAKMLLLEMVPGVWVPSEKTRAWRGMIEFRSKTLQERTRVKNEIRALLRSKGIIVPMPLWTKKGMNWLKGVTITNDLDALRRDMLIEQIESLNNRLKRVEKELNKKGQEHPGVGLLMTIPGVGIRTGEAVTAYIDDPFRFSRNKAIGSYFGIVPCQDASAAMNRLGHITQQGPATVRRLIVEATWQGIRRSPEIRSYFERVKDGDRDRRKIAIVATAHYLLRVMLAMLRTGEMWRYCAA

SEQ ID NO: 383360 - protein, 344 aa, unidentified
MNKYAGLDVSLEETAIAVVDESGRVVREGKVASEIEAIDGWLRASGAVIARLGLEAGPLSSWLYAGLRACGWPAVCIETRRLRAVTQAMPVKSDRKDAEAIAQVMRTSWYRAVHVKSDDSQRLRVLLRHRQILQAKRQDIDNELRGTLKAFGLKLGKVGQAGFAARVTELVAGAPWLERLTQPMLAARAALRQSFAELHKLLLKIVREDTVCRRLMTAPGIGAVNALAYKTAIDDPTRFRHSADVGPHFGLTPRLYQSGETEYSGRISKCGDAMVRSLLFEAATALLHRVKAASPLKLWARRLAKKIGVRKATVALARRLAVIMHRMWVDGTDFDPELGRAAAH

SEQ ID NO: 383361 - protein, 351 aa, unidentified
MPHTSSVHAVTTIGMDMGKNTLHMIGLDSRGAIVLREKVSRGRIVSRLANLPSCLIGIEAGLATHYVARELAALGHDVKQVPPAYAKPFRQGHKNDFRDAHSVAEAVQRPTTRFVPAKTDEQLDLQALHRVRSRLVSERTAVINQIRGFLLERGIIVRQGLRFLRQALPDILAKRTDVLSPRMVRIVADLASDWRQLDERIEPVTDEIETLAKSDDGCRRVMTVPGIGPIISSAMVAAIGNGAAFARGRDFSAWIGLVPKQMSTGDRTILGRITKRGNGYLRTLFVQAARVILLRPASWPKHSFGVWLARAAQRLHRNVLAAALANKLARIAWTVLAQERSYEARIMNAAA

SEQ ID NO: 383362 - protein, 368 aa, unidentified
MKKIAYVGIDYHMNVVAIAVIIEGEKEFYDTIRLKNTDTLIAKYMQKLSHQFTIKACYEASSSGYCFQRKMRAWGYHCDVIAPSMVPKKPGSRRKNDFRDARELAQHYANGLLTIVHPPSEQDEALRGLIRCRQSLKEAEKRAKNQINSLLLSQGLHWQKSKWTLRHRQWLATLHLPHTYLQQVLDEHLALLHYLEARVLHFDRQIEALAQSELYAESVKKLCTIKGIRTLAAMILIAEITDFRRFASPRALMAFLGLIPAEHSSGDKQTGCAITKTGNKRCRTQLIEAALHYVKKPTIRGRLKSALSQVDASTATIALTCMQRLHKRYWALVMKGKEPKVARTAIARELAGFIWALMNQQPAPVTTV

SEQ ID NO: 383363 - protein, 335 aa, unidentified
MQIYGIDLAKEKFDVSFFDLTSKKVSNQPSHKVVKNNFKSIGRFLETLPSDAVLVAEHTGVYGDTLLKCCMDSNVKIAFVGGYVIHRYRATPDRAKTDVLDCALLRDFGERDPDKLKYKTFPEEALYELRQLARHREMLVEQRKQLITADKSEDCRPIRSLAVKRSMDRIKEMLDTEIAETEKEMLKVINGHESIRHNYELVKSVDGVGLITAVELLVKTENFTKITTARQYAAYAGTAPYEKSSGKMDKGAHISKIGNRRSKTLLYICAESARLHNKEIKLYYERRTLIDKKPRHYVLNAIANKLLRIIFTLVEKGEYYDANFIRQDPRVVKYN

SEQ ID NO: 383364 - protein, 392 aa, unidentified
MYIVGIDIGKNHHEASIVSPEGKQIGRSLRFATTHKGADSLMSFIFKNIGNSPCVFGMEATGHYWYPIYSFLKAKGYTICVINPIQSDSLRKMYIRQTKNDSIDSFLIAEVIRFGQFGTTSMADENILAMRQLCRYRDSVISSRTEIKLRIGTIMEQIFPEYEKQFSSLWVSTSMGILEKYLTPENIENAPIDELFEIIKDKSHNKLTMKKAFSIREAAADTFGIKIAQDAFSFQLKQLIDRMNFHDKQIEALDIEIMKYYEQFDCYLHTIPGIGIIGAATILAEIGDISRFKNSSALVAFAGIDPTVRQSGEFNSTHNHMSKRGSPYLRHAIFLAATTCSFHNSPLNAYYKKKRDQGKHHLTATGAVARKLTTIIYAVLRDSKPYEPKKFC

SEQ ID NO: 383365 - protein, 383 aa, unidentified
MKAVCGLDVHKDSIFLCILHSDGELFEQVFGVLTFQLEEMRKLLQKHHVFEVCMESTSIYWIPIWRVLSPHFTLRLVNPYFIKQLPGHKSDVKDAQWIAECTLKELVRGSFVPPEIIQQLRQYDRRIFDLNAEIVRKVSKVDGVLQRCNIRLSNYVSNIECKSYRDVVRRLSEGVTNPNELMKLVHGRIVNRHGAETILASLTGVVSQAEIDVLRQLHEEIGIAESHRNECQQRMLEICEKHFPEELERLQKIPGIKERAATSLIAEIGTDMSKFETANHLASWSGLRPRNDESNKKIKSRKITHGNVYLRNTSIQCAWAASRQKDCFFSRFSYHQTIVRRKNKMKVIVAVARKLLVAVWHVLHDKTDYVDFKPDREESANNG

SEQ ID NO: 383366 - protein, 440 aa, unidentified
MNEVDRTRLEEFRQFRKEVRGSTEYLLVGIDVAKDKHHAFFGTATGKTLLRRLVFENNLEGFRNLLVQAEAMKVQHGLKRVVFGMEPTGNYHKPLGEHLIRWGHLVVLVSGVAAHENRKTLDGRWDTNDPRDAANVADLISQGKCLFYEFPGGALQGLRNLLSLKRRLKRMEHGHRVRIRNHLVAKYFPELDRYYDQSESTTLAIVRWCLDPSEIAGWEYKRFVQVVGTARGRSSQERRLQTIWKMAVDSVGCEAGATVEFEARLMVEGLKQIRESIREIDEKIQEVCSQFPEYEFLRSIPGFGPDVSSKVLGAIGDPFRFQNGRQVLKMAGLDLSAERSGKSSPGAIPVISKKGKADLRYALYQAALIASVRDRHFIVYFTNQLRGREREPGIKTKMRVKLAAKLLIIAWTLMKKKEPFHPSYLRVEFQPFSAGAGRES

SEQ ID NO: 383367 - protein, 527 aa, unidentified
MALAVPGVRGETVLRYKANGSAEMTEKALVRARSGDSRCGASPPESLVRESSATVVSTVMCIPFMRSSRIRRLPWRCRSLTILEQTMAMRKRDDDLVYPNAAGIDVGGSSHWVAVPRHSCGEPVREFGAMTDDLNAMADWLLACGVDTVALESTGVYWIPVFEVLEQRGLKVFLVDARQMKYVPGRKSDVQDCQWLQRLMSQGYLRAAFRPTDEVCVVRAVARQRDVLLVEQASWVQRMQKTLVQMNIQLTEVLSDVMGLTGQAIIRAIVAGERDPKALARHRHSRVKASEQDIAKALTGNWRDEHLFVLRQALAMYDDIARHLGECDAKLHGLLSKLGQSKVDLGKTPRAGSKTRAEFDARQILANWAGVDLTRINGLGLAAVMKILSEIGPDLSRFANVKHFCSWLGLCPGTKISGGKVLSSKTKRAGNRVRQALKMAAMSLSHSDSALGAFYRRLSGRMDKPRANTATAHKLARMVYFMLTRGEAYVDQGQQHYEEQQRQRSIAALKRRAAALGFAVTPTPVPA

SEQ ID NO: 383368 - protein, 398 aa, unidentified
MTESSDYESVQVFIGVDVGKDTHHAVAINRSGKRLFDKALPNDENKLRSLISDLKQHGQILLVVDQPATIGALPVAVARSEGVLVGYLPGLAMRRIADLHAGEAKTDARDAAIIAEAARTLPHALRTLKLADEQIAELSMLCGFDDDLAAQTTQASNRIRGLLTQIHPALERVLGPRLEHPAVLDLLQRYPSPEKLASLGEKKLAAQLCKLAPRLGKRLAADIAQALAEQTVVVPGTNAAAVVLPRLALQLITLRKQRDEAALEVEQRVLAHPLYPVLTSMPGVGVRTAARLLTEVACRAFASAAHLAAYAGLAPVTRRSGSSIRGEHPSRRGNKALKRALFLSAFAALRDPLSRAYYTRKMSQGKRHNQALIALARRRCDVLFAMMRDGTFYTPQGS

SEQ ID NO: 383369 - protein, 387 aa, unidentified
MTKNKGRVVGLDVHPDSFAGAVVEGSDPAQARVLSTSTRVQLEQLERWALRHTSTEDRLVLEASGNAFAVAKRLRMIGRKVEILDSHCAGRVGKVYCANDRVDAVKIARIYLSALSPIVWQPDAKTLERREVFSAYQAVVKESTRAKQQLRSMLNEHCVRLEKGFRLCHPKAITRLLALREWTPARTMLLQQSHGSLVAARARRTLLRRHMAQEIVADDALMRLSRLCGINLVTLYGVVSAVGDVHRFTHSKKLVAYFGLNPSVSQSGNFEGSGALRRHGRGALRALLIQSGKKLLEVANPLQKWGLAVAARRGRNKAAVAVARKLCVAVWHVLMGHVIGALERLDTLETKLSKFATEIGPAALAALGYNNKADFVQKKLYVLRSYP

SEQ ID NO: 383370 - protein, 352 aa, unidentified
MMVFGVDPHKGSHTAAGADELGRARGQKTVPARRDGHRELIAWARQLAPDRRRWAVEDVRHTASGLVRELLAAGEEVVFVPTRMMAAARSGGRERGKSDPIDAMACARAALREDAYLPAARLDEQVLDIRRLADHRDDLVTERTRTVNRLRWLVHDLDPALNPPSRALTRTRTAARTLEAALQQLPATAGRRVALSLLARVTALSAEITALEADLAPLTQQLCPQLISICGISVVSAARLLGEAGDVRRFRSSAAYARHNGTAPIPAASGTHDVHRLNRGGNRQANAVIHRVALTQGRCHQGARRLLERRIQTIRETPKAARRVLKRHLSDVIYRALQADAWRLDQPRQPEA

SEQ ID NO: 383371 - protein, 433 aa, unidentified
MSKFFYSPTVGIDVSADFSYIAILAPNGDIYRKAFKIKHDVSGFNHLFKEIKKVEEEFNMKTAIFMESTGVYHLSLFHFLNKNFDNTFVINPLVTNSNKSSDIRKVKNDKKDALSIAQIGKFQNIKLSQGVSLDIFLLRSLIREYYKLTDTCSVFKKKLSADLRVIFPGYNTIFSNVASNSSIAILSDYPTPQSILEAPKEKILEILIGKSRKGVTWAEKVYLKLSTLANEATIIGLPLHGLAIKITSTITLINAIEAEITNLLTEIETLINSDNFPEQIKKNIDFVDSIPGIGSLTAITLIAEIGDIKSFIKPKHLVAFFGIDCSVAESGKFKGTQNNISKRGTRIGRRALYSIALASIRKNRSGVPINKVLLDYYQTNLNGKKPKVALVAIMHKIINYIFAVLRNQTTFEQRDPKLHKQMFLENKALVSAA

SEQ ID NO: 383372 - protein, 327 aa, unidentified
MKQLGIDISKATFDACFLNGNRSRAKKFKNNNEGFEDLIKWLGERSFHDIHVCMEGTGKLWEKLAEFLQGKGFMVSVVNPMRVKGFGKSEMLRSKTDELDAALIARFCRALKPQLWTPKRPEVKAVRDRQRYVTELKAQITAENNRLLAGPLDEQVAARIRAHVCFMQSSVEEVEAEIRKLIDQDEQLKAQKSLLCSIIGIGETTANIILGELPEVSSFPNARAVELYCGIAPRNFESGSSVKARSRMSKVGNNKLRTALFFPALAAMRSSPNIQKFCDRLLSKNKPKMVIVGAVMRKLLRIIFAVLKSGKPFCADYNSNLMTAPGY

SEQ ID NO: 383373 - protein, 341 aa, unidentified
MDHYAGIDVSLECSSICVVDATGKIVREGKVASEPEALIAWLRSAGLSLVRIGLEAGPLSQWLYAGMREAGLAVELLETRHVHNAFKAMPVKSDRNDARGIAQLMRLGWFRPVHCKSKTAQETRALLTARKLVQSKLRDIEASLRGTLRGFGLKVGATTSRRFAGRIKELVAGHPTLEVVAEALLAAHAVLLREFNGFERRVRTTARHDAKAQLLMSTPGVGPIVGLTFASAIDDPARFKSSKQVGAHFGMTPKKYQSGETDYTGRISKNGDKGVRTALFEAAHIILTKPVKGSALKSWAMRLAKRAGMMKAKVALARKLAVIMHRMLVDGTTFDFAAAAA

SEQ ID NO: 383374 - protein, 356 aa, unidentified
MNVIHYIGLDVHKKTISYCIKTAAGQIVKEGTLAAERSVLRSWARSLPQPWHGAMEATIFSAWIYDTLKPYAQQLDMGHPAKMKAITAGKKKSDTIDARTIADLVRCNLLPGCYVFSPELRDLRRLMRYRHMMVQQSVRMHNKTAGLLMESGVSFQKTKLQGKKYFADLIKSLEEVPESVKDLLRISRGTKDMFESVQNQLVRRLLADPTLKQRVECLSSIDGVGAITALTWALEVGDPHRFASIADAVSYCGLTAAFRSSAGKQQRGPLSKQRNAWLQSTLIEAAKLAPRWSPQLAQLYAQHLERGHANRATLQVARKLVGYLLSVDKSGQPFQVRTPPKPIPTRKKARRRLAAA

SEQ ID NO: 383375 - protein, 335 aa, unidentified
MSQKTDAVVISTIGIDTGKNTLHLVGLDDQGTIVLREKLSRSRIVSRLANVPRCLIGIEAGMGTHYVARELIALGHDVRQVPPVYARPFRQTHKNDFRDAYAIAEAVRRPSTRCVPVKTDDQLDLQALHRVRSRLISERTAVINQIRGFLLERGIPVRQGLRFLRQQLPEILAKRIDVLSPRMIRIIEDLSGDWRHLDQRIEHVTEEIEVLAHGTESCRQLMTVPGIGPIIASAMVAAIGNGVAFAKGRDFAAWLGLVPKQMSTGDRTILGRISKRGNRYLRMLFMQGARVILLRPANWAKHSFGSWLTAARNGCITMFWQLRSPISWRASLGRF

SEQ ID NO: 383376 - protein, 410 aa, unidentified
MSVLEVALDPATVIVAVDPGKVSNRVWISNGSGLLADPMSLPVSRDGIAQLELALNKHGPDAPVIAIEATGSLHRPWVTELERRHPGSVRLFAPSETKSARTQLGSGRFKTDDRDCAALTYMARQGGGRRHGQPAAVEALRAAVRHRRGLVADRKVAQQRLHDQLNALCPGLSAPSGHGRSLALDTPTGFAVLACAAAFSGRAPQLRSLMCRAPGRGRTETAQYWLQRWHGCLPPPADAEQRARRLGRDLDRYRRLRIDIDALDLEVLALLADTDGQILTTLPGVASIRAAAFAAHSLPIERFPDAEHLYSATGLAPALYQSATLNRRGRISRQGLAEHRDALMGIAWGLAQNSPSFAQRDAELRARGMAPIQARVALARHACRLAYRLLRTQQPFDEQRYRQGRLSGER

SEQ ID NO: 383377 - protein, 413 aa, unidentified
MPREKMLWGGGGEIVSIVADVYRWSPPMHTPNDLNQSRIVLKQDSTLIAVIEMSLSSWLVAGVVPGVERQPLKKLAVDESALLKLLNRWREEAEKVGRKIERIAVAFEAGRDGFWLARWLRARGIEAHVIHASSVAVSREHRRAKTDRLDTELLKRAFLGWLRGERDHCKMVAIPTIGDEDAKRPNRERESLVGEQTRIVNRMKAALSRLGIRGFNPKLKKAAERLEDLRTPEDEPIPPNTLAELRRDMERRRLVRSQIRDIEDARLGRLEKAPGDGPHAMVRLLARVIGVGIETADMLVQEVLSRNLRDRRAVARYGGLTGSPDESGKKRREKGLARSGNARVRRGMIQLAWRFLMFQKDSALAHWFYARTKQAPQTRKTMIVALARKLLIALWRLVREGVIPEGIVLRPAL

SEQ ID NO: 383378 - protein, 343 aa, unidentified
MDQYIGLDVSLKDTAISIREDGKRIWRGKRASDPKLLAQVIRKHAPHAKRVVFETGPLSTWFYHALMAEGVPAICIEARHAQKILHETLNKTDANDADGLAQMAEAGFYKAVRVKAFDSMLTRTLVAARNQLLSISTQLSNQIRGMMKTFGLIVSNGKGRVFDGKVRELLAGNDALAAIILPLLDAWRGIRKRAADLDRQLLAVARQSQPTKLLMTIPGIGAVTAVSYVAAIEDPENFKTSRSVGAWLGLTTRRYQSGEVDYDGHISRRGDSHLRGLLYEAATVLLTRTRPGNESRLRSWGLKLRERLGFKRTAVAVARKLAVIMHSMLRTGEVFNASAGAAA

SEQ ID NO: 383379 - protein, 377 aa, unidentified
MKNIRFVGLDVHAETIAVAVAEPNGEVRSLGTIPNREESVRRLVRKLGPVEQLHTCYEAGPTGYVLYWQLTALSVRCDVVAPTLIPMKSGDRVKTDRRDAEKLARCLRAGDLTPVWVPDAAHEALRDLVRAREAAKRDQHRARQRLGKFLLRHGIRRPETMKTAWSKPHLEWIKMKVHFDLLALEVTLTDYVHEVEHLALRLARLEAAISQAARSAPARMRVVIQALQALRGVAEIGAVTIVAEVGELSRFTGARQLMGYSGLVPSEHSSGGRRIQSRITKTGNAHLRRVMVEAAWAYQFRPWLGGYLLKRQTNLPQEVKEIAWKAQHRLHGRYRELLHNGKNKPQIVTAIGRELLGFIWAIGVMIEKQHNPLAAAA

SEQ ID NO: 383380 - protein, 310 aa, unidentified
MNGTIGVDISKASLEVWRLSDRKHMRFSNDKAGLRELCKWLGPDPVRVVYEATGRFHRDLEAAVAKAGHGPVKVNPSRARRFAQATGNIAKTDRVDARMLAQMGSTLALEATPIRSQSMHEIKELHVARVALIKDRTACRNRLDTARNKVVLSQLKARERQIDKQIAQIDAELVRLIKADPELARRYEILISIRGIGPVAATAMIVDMPELGTMTPKEAASLAGLAPVTRQSGSWKGKARIFGGRHGLRTLLFMPAVIATRYNAPLRKIYLALYEGGKPWKVAITAVMRKLIVLANALIRDNRKWAEIAP

SEQ ID NO: 383381 - protein, 372 aa, unidentified
MNYNTVYVGMDVHKESFTLCSCKYEDEKASHYQRTQASYKNVLRYLEFLRTIYGDDTRFVCGYEAGCLGYSLYRQLESFNVECVILAPTTMLEQRSKRRIKTDKRDAEIIARSLAQHNYSPVHIPTETDNQTKEFIRMRDDHKAELKKIKQQILSFCLRQGYQYDGSGNWTEKHVKWLRSLKPVGLYKEILDEYLLTYTTLTDKLNRLDHRIEELASKEEYKESVSKLTCFLGIRTHTALSVIVEVGDFQRFASARKFAGYLGLVPGQHSSGDDRNGLGITKAGNTHVRRLLTESAQSYTRGKIGYKSRVLRLRQAGNSPQVINYADRANERLRRRYYKMVLKDGKKYNIAKTAVARELACFIWGMMTDNIY

SEQ ID NO: 383382 - protein, 400 aa, unidentified
MHFAGIDWADDHHDIVVLDANGEVVKQLRIEQSGVGLDKLCAELKRIADPADIACIIETRHGILVNHLYEEGFKVYPVNPKTVDRHRSPARAKTDKIDAAILARHGRNELPHLRRLEQDNPIIQGLKLLTRDQVALIQQQTRLVNQLTACLKEYYPVALDIFCKLNQPTTLAFLQAFPTPDHLTLAGLAGVETFLRQRRYPRPEQLLDKLRLLLQQRMLHSNSVVAWAKSRLMLALVAQLAPLGDAIRAYDKDIEDLFRRHSDSKLFQSLPGAGGRLASRLLAEWGDNRTRYESHESVAALAGTSAVPYQSGRIRRARKRYACVKSFRAAMYQFAWLSTQQEPWAKEYYDRKRSEGKSHSVAVRSLSNQWVRIMYRMWIEREPYSREKYMAARARHALAA

SEQ ID NO: 383383 - protein, 354 aa, unidentified
MSQKLNAAMTVIGIDIGKNSFHIVGHDQRGAIVLRQKWSRGQVETRLANLPPCLIGMEACVGAHHLSRKLQVLGHDARLMPAKYVRPYSKGQKNDFRDAEAIAEAVQRPTMKFVATKTADQLDLQALHRVRERLVGQRTGIINQIRAFLLERGIAVRQGLRFLRTELPGILAMRTDVLSPRMLSIIEDLAGDWRRLDERIEGLSGEIEALARQDLACARLMTVPGIGPIISSAMVAAIGTGDAFSKGRDFGAWLGLVPKQTSTGDRTILGKISRRGNRYLRVLFVQAAWVVLVRLKRWERYGLKSWIEAAKKRLHHNVLAIALANKLARIAWAVLHKGRAFECSKTAETASRPA

SEQ ID NO: 383384 - protein, 338 aa, unidentified
MTLYCGIDLHANNSVISVIDNHDNVVYEKRHANELSEIRGILDPFRRELFACVVESTYNWYWLVDGLMEAGYRVHLANTAAIVQYEGLKYADDDTDARWLAKLLRLGLLPEGYIYPKEERPVRDLLRRRSKLVQQHTGNLHSVQNLMARNRGCSMSANRVKRLTDEEVDRLLPDAELALAVKSNLAVMRTLEAVITGLEKVVKARSKLRPEFEPLLSVSGIGPILGLTIMLETGEIGRFAKVGNYASYCRCVGSEHLSNGKRKGRGNTKNGNRYLAWAYMEAANFAVRHNPQIKRYYQRKQARTNGIVAIKTVAHKLARACYYILRDQVSFDVNKAFS

SEQ ID NO: 383385 - protein, 395 aa, unidentified
MFFLGIDIGKNNHVAGMIGDDGKPVFKAFSFANTQSGGESLLAKLETHGANAENLVVGLEATGHYWLSVYSFLRDKGFFQYVINPIQTDGWRKGVEIRKRKTDTIDSLLIADLVRYGDFIEARLPDEAILSLKNLTRFRTYLVDSISDLKRKVICVLDQVFPEYQRIFSDVFGATSKEILLQFGSPAELESLSADTLAELLAKFSRKKLGIDKADELSNAAKTSFGVTFCRDSFTFQLRMMIEQIKYIESQVKDTETEIKRIMQILASPIMTIPGIGKALGAVILGEIGDITKFDNPKKLVAFAGIDATVKQSGEFEGTQNRMSKRGSPYLRRALFQAAMIACVGTKPDPVLSAFYQKKIAEGKHHSTAVGAVARKMCNIIYYVLTENRSYEVRK

SEQ ID NO: 383386 - protein, 344 aa, unidentified
MTYYAALDVSLRSVHVCVIDDSGEIHSEIKLSSEVEDLVTFLRDLDYEICAVGFEAGTLTQYFTYGLQSAGFEVICMEARQVKAALSAMRNKTDKHDARGIAQILRSGWYSRVHVKSLESHRIRALLSSRKAVLSKCVDLENEIRGLFKVFGIKLPPRLRHGAFDAKVRPSIEADPALSRALLPLLDARLVLYRTFCELDNRTRQLAHRDTVCQRLMTAPGVGFVTALTFKAAVDDPTRFKRSRTVAAHFGLTPRRFQSGETNNPGRISRAGDPDVRCALYAAANVMMTRSARWSSLKLWGVQLVKTRGHRRAVVAVARKLAVILHRMWLDDTPFRWGAEEATP

SEQ ID NO: 383387 - protein, 411 aa, unidentified
MIKENYIYVGIDLHKETHTAVMIDCYNQKLGEITFPNRPADFPKLVAKVKKCNTDGKTIVFGLENAYGYGRALAVWLIDKGYLVKDVNTAISHRQAKHRGAMYRKSDSDDAEAIALATLNMLDKLPDAYPNDAYWSLGQLVHRRDNIMKQRTRLVNQLHEQLCIAYPSYKQFFNDISRPTALYFWEHYPSRKYLKGKSVEDLRAELVPVSHNKCSTRTCEKILDAIAGDKVKNNAYQDARDMVTLSIVSDLQHYDKQLAEVDKMLEQMYKMLGCTLTTIPGVNVITAVKILAEIGDIKRFANANKLAQFAGIAPLHLSSSGKGKDLATKQGNRRLQATIYFLAIQMVQISSKGTPRNPVVRAYYEKRKAEGKTSQQALICISRRLISIIYGMLKSGTEYRMPVMENTGETV

SEQ ID NO: 383388 - protein, 391 aa, unidentified
MILVGIDVAKDKHDCCIMTSEGEVLFKSFTIANNMDGFNQLYEKILFVTDNLDKVKIGLEATGHYSYNILGYLLDKGLTPFVINPLHTNLYRKSLSLRKTKTDKVDSRTIASMLMSDVSLKPYSDTLYHNEELKSLTRYRFDKVQQRARLKTSISRLVTILFPELEKLVPTLHMKSVYSLLYEFPSAKAISKTHLTKLTNLLYASSKGHYGKEKAISIREVAINSIGSYMPAKSLELRHTIKLIEELTSEIDEIEQEIKSIIDKLNSPILTIPGIGYSLGAQIIAEIGDFKNFDSPDKILAFAGLSPSTYQSGKLYSSNAKMEKRGSRYLRSALFNAAVCVCRLEPTFALYLAKKRAEGKHYYVALSHAIKKLVRLIFHLEKTGEHYIALT

SEQ ID NO: 383389 - protein, 313 aa, unidentified
MEATALFVGIDVLKDRLDVHVHGRDEWFDVPRDTEGIAALVERLRALAPQIIGIEATGGFENVVVASLAVAGLPVVVVNPAQVRAFANALGKRAKTDAIDAAVIARFVAATQPEIRPVKDEETRLLADLVARRRQILAMIKAENQRRANAPPRMQKSIDRLLKALGREIDSVNGDIDTGIRNSALWREKENLLRSVPGVGPTIARTLIAELPELGTLDRRAVASLVGLAPWTRQSGRWRGKSFIGGGRANVRSALFMGALVAARHNPVLREFRNRLVAQGKPKIVAIVATARKLLTMLNAIIRDKTPWQKQNA

SEQ ID NO: 383390 - protein, 435 aa, unidentified
MKEDKNMSTLIAGIDIGGSNNDVCAVSDTGEVIAAHQRFAHTRPGSEELAGWLVEQVTQGEFDRLQIAGESTGLHWFHLFWHLQHTAEFDDLDVELYLVNAHAVAKFKPSLGEQEKTDVKDAYAIAEWLRFRQRPHHQLYLDARFLPLQRLTRHRFHLMHNLAREKVYARQVALYLKMSTYQPQQPFSDPFAKSGWWVLLAHATLDEIAQRNLDELTADLRLASDNHLPDPRATAEQLQQLAQIAYPLPPGLAEAVNLMLAQLQAHITFLQQQLVTLDQQIEALAQTLPGYAHLASIPGIGPVYAAGLLAEIQDVQRFMTDHLGRPRPLHQGQAALAKFAGLWWPRHESSDFKADNRRLAKTGNRYLRYYLVEAANSVRLKLPDYRAFYQRKSREAVRYHHRRALVLTARKLARLVFSLLLNDRPYQLRGGDPAT

SEQ ID NO: 383391 - protein, 375 aa, unidentified
MKKRITMVDAKKRRETKKANKKRNNKQAGITTGIDLGDHSSAYHQIDRECNFVESGSVRTTREGFTKQFAGEPRMRIVIEAGTHSAWVAELLTELGHEVIVANSRAIPLISDSTRKNDDADAELLARLGRVDPALLKPIKHRGPQARQHILLIRVRAGIVEARTKLVNEVRGLVKNMGERIGSFDADQMTIEKLAALPESVRQPLTALAACCESLTEQIKDCDKQIEQIAAQQYPEVRYLTQISGVGTLIALTFILTIDDPNRFAKSRDVGCYIGLRPKQCESGESKPQLGISKEGDAYLRKMLVQAAHCVMSRRGPETDLKRWGTKLASRGGGNGKKRALVAVARKLGILMHRLWVDQAVYEPTRHTRPIAKAA

SEQ ID NO: 383392 - protein, 325 aa, unidentified
MNIVFLGIDLAKNVFQLCGLNQAGKPVYTKRTGRKELLQALANIPACLIGIEASTGAFYWQREFEKLGHKVKVISPQYVKPFVRGQKNDGNDAQAIAVALMQPTMQFVPPKSPEQQDIQALHRARQRIVNHRTATVCQIRGLLLDRGIPIGSAVSRARRAIPLILGDAENGLSSRMRRTIAELYDLFNDLGRRIHFFDKEIETVFRQSEACQRIAKVKGIGPKTATAVVAAIGKGTEFKNGRHFAAWLGLVPRQYSSGDRQVLMNMTKKGDRHLRTLFIHGAPAVVRVATNNNDGHMNQWVNQLKERRGFNKTTVAVANKNARII

SEQ ID NO: 383393 - protein, 318 aa, unidentified
MVCAGIDTGKYKLDVALNGSREQLQIDNTADGHAALSIWLKRHKVQRVGIEASGGYEQNVVARLRHDKFVVVVFQPAQVRAYARFLLQRAKNDKIDAALIAACTAATKKIHAPPDPRLAPLAERMTLIDQLTDQIARFKNYREGSRDGHGRQFWKEQIALFNKQIRAELKELVAAIRQHRDLAERLDLIESVDGVGLKTAVAILVRMPEIGRLSREQVASLAGLAPFDDQSGTHVGIRHIAGGRERLRGSLYNAALSAAFHWNPQLIALYRRLIAAGKLHKVALIACARKLLIFVNTVVERGTPWVSERASSAVRAAA

SEQ ID NO: 383394 - protein, 387 aa, unidentified
MKNNSNSKKQARGSEEWTSPKLAALQEAWRQKQGTEEKLTIGLDLGDRQSNYCVLEESGEVIGRGQVVTQSQPLEVWLGQMPPSRVVIEVGTHSPWVSRLVKQTGHEVVVANARRVKLISESSRKNDRVDAEMLARLGRVDVQLLSPIQHRSKQGQADLIGVRVRAELVELRTSAVNAVRGFVKSFGQRMPKCDAGVMNRSHAKEVDEAIRGEMELVLEVVEKLNEVIAKADGELKKVNAERYEKETAKLEQVTGVGTLTALTYVLTLEDAGRFRRSRDVGSYVGLRPKSSQSGERDPEMRISKEGDVYLRKLLVQCAQYILSKRGPDTDLKQWGLRIASKGKKKAKRRAVVAVARKLSVLLHRLWVSGEVYEPLRQRQRRQHSVAA

SEQ ID NO: 383395 - protein, 453 aa, unidentified
MSERLDYTDFGLSKQGGFLAVGKLLSCLAMNTPTAIAEANSKYVWSVGIDWADQKHDITQHCLTDGRYQTFQIGADAVSVRAWLKELKELSGPQGRAVVGFEQSRGSLFEMLREQKDWLDLYPLNPLTPTRYRQTFYSSGAKDDPLDSQLIEELVCKHLNRLRLYQPPEPVLCELDLLCQLRRKAVDNAVRFENQLRSHLKVYYPLVLELHEELDSTLTLHFLKRWPTLQALKRAKVQTLRSFYYQHHSRSQTLIEERLQKIAGAQAVTEDRTLIGPLVLSVQGLVSQLLAQKATEAAFDKAIQELARKHPDYPIFESLPGAGLQIAPRLMVAFGSDRSALTDPSQMQKKSGIAPVLDRSSQSEKIRRRWCRPKFLCQTFHEFAGCSIPHCAWAKAYYQNLLSRGKSHNTAVRALAFKWIRIIFRLWQDHTLYDDERHLRNLTKRHSPLSSKI

SEQ ID NO: 383396 - protein, 367 aa, unidentified
MKNTIVHYEGPASLEAVATKVKLRGAEIKIGLDVHARLYVAVAQYDHLLPKAARRLRPEQFVPWVETLLRQGHTVHVVYEACGFGFSLYRQLIAIGAHCYVIAPRKLDEECSRVKTDPRDATTLCQRLSRYLEGNTRELAVIRVPSQEEEQARHVSRQRTQLVCHRQKLEAQGRSLLISHALPAPAHWWKEQTFSRLGRHLPAWVTTRLQMARPALLSLQQQIDALTNELETSAPSTLPRGVGKLTSVVLTREICDWGRFNNRRAISSYTGLCPGERTSGSKRVPGRVTKRGNSRVRAALVECAWRLVRFQPQYPPVQKRLAVLAKGSRALGAVRKKAIVAVARRLAVDLWRLHTGRCTAEQLGLEL

SEQ ID NO: 383397 - protein, 467 aa, unidentified
MAKKAKKVKTAKGAELRIVNPDAAGIDIADGIMQVCVPAARSTDADRSKDNNRTFGAYTSDLHAISAWLRECGIKTVAMESTGVYWIPLFCRLQEDGLDVVLTNARDVKNITERKTDESDAEWLMLLHQYGLLKASFQPHNDAKRMRTLTRHRDTLSREASSIVLRMQKAMQQMNIKLTLVLSDITGKSGIRIIEAILAGERDPKRLAELADIQCKTPKEEITKALEGNWEEDLMFVLRQNYDTFKHYCIQLGECDAELEKLMENYRAEVAKVEGTSYSPAKKRRDYKKTRHTVGFDVERKAYEMWGVNVFEIPGISHLTALELMSELGHDFTRKFPSSKQFCCWCNISPNTKISGGKRISSHVPHRRNNVGLIFRSIASSLANAKNQLGNFYRRIRSRTGGKAAVIATAHKVAEIFFAMVANQTTYNPEKVGIDEKVLLEKRITRYKRELERITGTHIEIGNACVP

SEQ ID NO: 383398 - protein, 363 aa, unidentified
MFIERTSVGVDVHARSVAAAAIDGVTGELIQSRLTPSYDHIRSWVTGLPGPVAVAYEAGPTGFGLYRHLTAAGLRCEVVAPSKLQKPAGDRVKTDAKDAIHLARLLRLDEITPVSIPTVDQEAARDLVRAREDCRGDLMRARHRLSKLLLRHGIVYYGGNAWTGKHDTWLRTEALAQLSAGATRLAFDSDYETVLATRARRDRLDVAIEQMAAESEFTPIVRRLGCLRGIGTLTGFALAVELGDWHRFTGNTIGSFVGLVPSEHSSGQSRSQGSVTKTGNAHARRLLVEAAWHHRPRYTVGKTLRDRWDLAPAAARARGDEGNRRLHRRWVTFIDRRKRATIANVAIARELAGWCWSLAVMED

SEQ ID NO: 383399 - protein, 359 aa, unidentified
MNKQHKAHSPVVGGVDTHKIIHVAAVVDEHDRVLGSKTFATTTHGYKSLLTWMRSFGELERVGMECTGTYGAGLLRYLQRCDVKTLEVTSPDKTARRKRGKDDVIDAENAAHAAFAGIRTVTPKTRDGMTESLRVLKVCRKTAVAARRVALQIIQTQIVSAPDALRDHLRSMTRMKLIRTVAAWRPDLTGYRDVTMAYRIALKSLARRYIELHDEVAELDVMIKAIVDDLAPNLIARRSIGYESASQLLITAGDNSERLHSEASFAALCGASPVPASSGKTRRYRLNRGGDRAANSALHIIAIGRIHYDPVTQAYVKKRTEQGLTKLEIIRCLKRYIAREVYHIICARNHMINQVQIGT

SEQ ID NO: 383400 - protein, 352 aa, unidentified
MSNIARIGMDTSKSIFVLHGVSADDQVVLRKKLRRNQVLEFFSKLSPTQIGIEACGASHHWSRKLEELGHEVLLIAPQHVKPYVRRNKNDAADAEAICETMSRPRTWFVPAKTADQQAGLMLAGTRDALIRRRTQLSNMIRSYAAEFGLVSPRGLDKIEPLLGRIAADETLPDLAKEMFADLGGDYTQLQDRLTIIEKRLQLWHRSHEQSRRLAQIPGVGVVGAALMTMKVPDPKAFRSGRHFAAWLGLTPKDHSTAGKQRLGVITRAGDEALRSVLVVGATALLQQVRKGRSLQSRWLAELLRRKPPKLVAVALANKTARIAWKLMVSGEVYDRNRVTPPQDGITGELVAA

SEQ ID NO: 383401 - protein, 488 aa, unidentified
MPCCMTANTQPAPRSSRREPIRQAARGGGDFRLRHFSFGSANYEAAAQPGLPRAVFRYVQPSTHSEGVMLLANTTRLYVGTDISERVNRTRFYDARGGEVGGRVESQNDLPGSSGLAGEALSRAALCDAKEILWGLEATNLFWWHLATFLTTHPDLLAAGLKCYTFNPRQVKKFKESYPDIGKDDWTDAMVIADRLRFGRLPAECYLDERYQPLQRLTRYRRHLVTQLVREKQLALGYVYLKLSAYSLEKPLSDTFGAASQELLEGYLTPDEIVATPIEDLAALLKEHSRGRVADPEEVARVVKQAANRSYQLPKGMVEPVNLILSSSLTTVRALKGQLKPIEKAIATELAAVPAQTLATIPGLGPVFTAGIVSEIGDVGRFEREESLAKFCGLTWRRHQSGEFEGEQRPLTKTGNAYLRYYMVEAANSVRTSCPEFGSYYNKKFKEATRHKHRRALVLTARKLVRLVHSMLRSGRIYQPPGTRRIPL

SEQ ID NO: 383402 - protein, 316 aa, unidentified
MDGQAVHVGVDVSKERLDVAVRPSGEFFSEANDKRAVNRLVKRLAALDCMRVVVEATGGYETVVVAALCAAGVPVVVVNPRWVRDFAKSIGWLEKTDHIDAKLLALYAERAELKVQQLPDEATRQLRELCARRMDLLEMIDAEHNRLEHATSAVRRTIASHIDYLRKRLKRIERDIDGAVRSSELWRHQDKLMDSVPGVGPTLRASALAWLPELGQLNRGEAAKLVGIAPLPDDSGKTRGYRRIAGGRGPLRKVLFMATMGAMLHNPHLRAYYDRLRARGKQHKVALVATMRKLLLILNAIIKTDTPWSESCLTNL

SEQ ID NO: 383403 - protein, 451 aa, unidentified
MTQRKQRSGSNSRAAPLALTHPNAAGIDIGSASHFVAVPPDRDDEPVREFRSFTADLERLADWLGECGIDTVAMESTGVYWIALFELLDARGFAVLLVNARHVKNVTGRKSDVLDCQWLQQLMSYGLLRGAFRPGDAVCALRALVRQRATILRTQSRSVQHMQKALVQMNIQLATVIADVAGVSGQAILRAIVAGERDGQTLAALCDVRVKAGADEIATSLQGHWRAEHLFALKQALAGFDFCGQQLAECDAEIEAQLQRLRAHDGDPAKGKKRSKARNAPKFDLRTRLYQMCGVDLTRIDGIDVTTALVVVSEVGADMSKFPDDKHFASWLGLCPGTKITGGKVMSGKTARVANRASQALKLAAAALRTSQSALGAYYRRLCARMDKPKAVTAAAHKLARLIYAMLTRGQEYTDRGQAYYEERYRQRVVANLNRRAQQLGLQVVPIAAPA

SEQ ID NO: 383404 - protein, 392 aa, unidentified
MNPRALGWDNHRKFSKVSLMEQSPDGQIHAVERARLEHDDKDAMRAWLSHLDPEIPVALEATFGWPWVADLLEELGHPVHLGHPPVIRALAKHEAKTDRCDGDRLGKFQLRGILPESYLAPPEVRQRRERTRYRMALSALRTGVKNRVQAILHRFGILHDFSDLFGKAGRRFLESLELPEGSRQTLKGYLDVLDVLTRLMGEVEQWMQENLEEDELVRLLTSIPGIGLILAHVIRAEIGEIERFPTFRHLASYAGLAPMSDDTAGREGPRHCSMACNHVLRWAFIEAVHGVQRTKGPHGLRLRWLNARLSGQGRQKGRKSSAKVAVAHELSKLVYVVWTKRVPYTDTPPPRPGSREGRRQPKESPTVKTTLRSDQPRHPMVRRRETVGQTRL

SEQ ID NO: 383405 - protein, 372 aa, unidentified
MELVTYVGIDVDDEAFHGCGIIEGRPEKRVEFRCKPSVGALLKKLKVFMDLGQPVKLCYEATYLGFSLQRALALKGVLCEVVAPSSIPRRVGKAVKTDKVDCRELAEYYQKGLLSIVHIPDEKEESIRDLIRSRKFQKEQVNDLKRHILALCRRHKLDYRESRGSKKAAYWTKSHLNWLEAELGRLTERALEFNLKILLSQLHQMESSVAVYDEEILRIAEAPLYRKKVAALNCYRGIDTLTSMTLITELGDIQRFDHPRRLTSYAGLDLREYSSGGRHRRYQLSKMGNYRIRTSAVEACQMASRIPQLSVRLKEKRKGVDPKLVEIADRCMKRLHKKSSRLLYAGKPVNKVKVACARELLGFVWESLRAAA

SEQ ID NO: 383406 - protein, 367 aa, unidentified
MRKNSIVVKNGNKIFKQPALTIGLDLGDRTSCYCVLDELGNVIVERGVPTTPSGIRQAFGKMPRCRIALETGTHSPWVSRQLAQLGHEVIVAHARNVRLIGESSRKDDRLDARTLARLARIDPGLLGPVKHRSAEAQIQLTVIRARAALVSTRTALVNAARGLVKSYGERLKKCGTEQMNRDSSAGLSPELREALDPLLREIESLNERIKEYDRRIEQIAKEDHPEVARLKQVKGVGTLIALTYVLTLDDPRRFRHSRDAGCFLGLRPGRRNSGQSEPQLHISKEGDRYLRTLMVQGAHYILGPFGQDSDLRRWGLKLAERGGKNAKKRAVVAVARKLSVLLHKLWVSGEVYEPLRNNNQKAVRAVA

SEQ ID NO: 383407 - protein, 341 aa, unidentified
MSIVGAFDVHRRQLTFEYLDTVSGELKRGRVVPADREHLRAWLARFAGHDDVHFALEGCTGWRYVAEELAAAQVTAHLAEPADTTALRGRKRHAKTDKADARHLRVHLLAGDLPECWIPPEHVLEARATVRLYKDLVDERGAWHQRIAATFFHQGVPAGVSAAKPAGRAAAAEADLSPAGRQAVEAALRQVDRLTAELDPLRRQLDMYSRRQPGCAALRRAHFGIGAVTSVAIWAELGDVRRFTSSDHVVRHTGLDITVHSSDIKRPPGKLSRQGPPLLRWALYEAAKSASRPAAPDYGYYTATRERRDGGLATLSVARKLARRCYHTLRELGEEALAPAA

SEQ ID NO: 383408 - protein, 342 aa, unidentified
MRIIGCDLHARQQTIAMLDGVTGEVVERTLQHEGDTVREFYAALPRPVVVGIEATGSMGWFLTLMDALEITCCVGDPAAIRKAETRRQKHDRRDAHLLLQLLTERRFPSIWMPSIELRDLRALLRHRHQWVRMRTRVMNALQGIALAHGMRRGASLWSRSGQAMLASLPLPPHAGDRRTELQALRDHLTTQITDLDQRVDALARERPQARRLMTHPGVGSVTALATDVFLGDPARFADAKAVASYVGMIPSEYSSGPRQRLGKITKQGNSLLRFLWCEAAIHAVQRDAALRRFYRRKLQQKGLGKARVAAARKLGIRLWILLRDQIEYDEFCRRGRSQTATR

SEQ ID NO: 383409 - protein, 320 aa, unidentified
MTYIGIDVSKDSFVAAYPAKSGYSTKTFKNTTSGVRQFISSLPEGCHCVMESTGNYSMLLLYLLQQANITVSMENPQKIKHFARAMLSTTKTDEIDAKLIALYGEKMEPIPCKIPLESIILLKQKRTVLRQLKKQLLMMTNLQESMAVLPKQDPTSKASIEQTIKFLRKQISKMEEEITNLSNKEYKRQMDLLTSIKGISNTIASALIIATGGFTYFSSAKQISRFLGLCPTYQQSGTSVNVKGHINRNGDTYLRSQLYVAAVSSTACNSACREAFVKMRERGKAGKVAIIAVANKLIRQAFAVVTNNRPYVDGYVSSFA

SEQ ID NO: 383410 - protein, 343 aa, unidentified
MDYFAGLDVSVKDTSVCIVDDAGKIVREVKVASEPDALLQVLRNPAYCFKRIGLEAGPLSQWLFSALGEANLPVICVETRHMRAVLKAQINKTDRNDARGIAQMMRVGLYRPVHVKTLRSQKLRMLLTHRKLLQSKAIAIENDLRGTLRNFGLKVGIVGRTKFEARIEELVEHVPDLAVLVEPLLVVRRVLREQIAILHRRLLTIVRDDEVCRRLMTIPGVGSVVALTYRATVDVPARFRRSKSVGAVFGLTCSRDQSGERDRPGAISRCGDEMMRSMLYEAAQSMLVRSTRWSWLKAWAMQIAKRRGMKRAIVALARRLAVVMHRLWVDGTEFRWTREAAAV

SEQ ID NO: 383411 - protein, 374 aa, unidentified
MAVREEDATKTPTIYMALDLGRRRWTVGILLPGDRDARLFQIAGGDREALLELIRRRRQMIADPAVRVVSYYEAGRDGFWLHRWLRDQDIHNRVLDPASLEAPRRRRRVKTDRVDTLGLLRVLLRLERGETEMTRVVWVPAPAIEDARRHTRERERLVSERTAHRNRIQGLLAVQGVTAIKVGARDWLDQLAGARTGDGRTLGVALLAEIRREAERLALVERQIKEVEAAQHAALRADTALVARACKLKRLKGLGEVFSSGLTHEAFWRDFGNRRQVGGAFGLTPWPWDSGDMHSEQPISKVGNRRARTLAIECAWMWTFHQSGSALTRWWQQRFAGGGRRLRRIGIVALARKLMVALWRYLKEDLIPEGAVLA

SEQ ID NO: 383412 - protein, 431 aa, unidentified
MTEQEQQVVANQAAEPVFAAFVAIDWADKKHYWSLQVANSGKIERGCLENSPEAVEVWVAELSQRFEQRPIAVALEQRRGALAVMLSKYGQLHLYPVHPLTLSKYREAWYPSRSKDDIKDADLLLEIVTQHRERLRRLDPDTEEMRLLQFQVENRRKLIDERTALSNRMTDSLKIYFPQLLQWFDDVTAPVAANLLNKWPTLEALQKAKPSSLEKFFRENHCKTEKIPERLQQIKSAIPATYDAAVISGMVPMVQVWANQIAVLCKAIRELETRIERNAKSQADWAIFDSLPGAGDVMAPRLLAAMGTRRERFEAADQLQCFTGIAPVKEASGKTEWVHMRWACPKFLRQTFHEWAACSIPFCGWAKGYYDQQKAKGNSHHTAVRALAFKWMRILYACWRDRQPYQEEVYLASLAKRRISIPALAKAVKMP

SEQ ID NO: 383413 - protein, 278 aa, unidentified
MDNFYFIGVDVSKKKQDFCVLFEGKVLREEQVSNHQQAVARLIGELKNDLEMDNEQFLICAEHTGQYTFPLVCACKSVECKLWLENPSQIKYSSGMQRGKNDKVDAKRIAIYASRFGDKVKYYDRPSEEIERLKQLERERALYVTDLAKYKGQMYDQKDFMPAALYRKKTKRMKGLIQELQAAIDAITAEMEKIIGSTEVLARQMELLMSIDGVGKVVALNVIIETEAFSRFDNPRKFCCHAGVAPFSYTSGSSQHSKNKVSHRANKNIKKLLHMAAS

SEQ ID NO: 383414 - protein, 390 aa, unidentified
MRFAGIDIGSETHVVAIVDEHGQTLVKATKFTEDAAGYARLLEVLGPPDDCKVAMEATGHYWQNVFATLAAQGFEIALLNPIRTNRFAQEEMARTKTDAIDALGIARFAQQKRPVPTPLTDSATQELRELVRLRDRIVQDMGDASRRLHRLVDLGFPEFTRHVKHLNTALATTILSAHPTAAAFPSTARPLAKLVYDGRHKVGAELASALVEAAKTSVGRHHGDAYRVQVRYACEDVELARRRLNEIDRGIRSKLADHEVGQLLTTIDGVGPLTAARLVGEVGDFARFSGPEKLASYVGAIPGLKHSGKSQPRGAMTSIGNARLRAALWMPVLVAVRCNPWLRAYYERLVAGGKRRKVALVAAMRKLLHAVHSVAINRRPFVPRLAEVNP

SEQ ID NO: 383415 - protein, 405 aa, unidentified
MNAVGIDVSKGKSTVTIRRPGDVVLMPPCDIPHTQSGINDLIVYLQNLDGETKVCMEHTGRYYEPVASWLSDAGIFVSAVNPILIRDFGDGSLRTPKTDKADSKKIARYTLDRWAKLKQYGSMDKTRNQLKTMNRQSAFYMAQKTAMKNNLISLLDQTYPGANDFFNSPARSNGSQKWVDFVHTYWHVDCVRSKSLNAFTEHYQSWCRRRGYNFSADKAEKIHHLSSDLIAVFPKDDITKMLIRQAVALLNTASETEKSLRLKMNELASTLPEYPIVMDMDGVGPTLGPQLIAEIGDVTRFTHREALTAFAGVDPGRNDSGQHVQKSVRTSKKGSPYLRKALFQVMDSLIKRSPVDDPVYAFMDKKRAQGKPYYVYMTAGANKFLRIYYGRVKEYLTTLPENEGV

SEQ ID NO: 383416 - protein, 460 aa, unidentified
MTTEQSRTNKMNLKLRYKKSLEMLNPDTSGIDIGSEEIWVSVPEDRTEKNVLRYGAYTCDLHEIAKWLKKNQIKSVAMESTGVYWIPLFEVLEQKGFDVFLVNAREVKNVSGRPKTDKHDCQWIRRLQTYGLLRNSFRPSDEVCRLRTLARHRKNLDRQSSRHVQHMQKALHMMNLLLPKVVSDITGKTGMAIINAILNGEHDPYKLAKLRDPRIKSTKSEIAKALTGNYRREELFILKQAVEAYNYVLKQIGECSLQIQKQLDTMSSMMNEDIPSEDNAKGSFLKYNVNTVREHLISLNGIDVTKIMGIEVETALTLISEVGYDMFKWKDHKYFSSWLGLSPNNKVSGGKVLRTGTRRVQSRAAAAFRMSASTLRNSKCYLGAYYRKMSFRKGPAKALTATARKLAIIYYNMVKYKKEYTDLGADYYQKRYKDRYIKNMMKNAGKLGFILVPQEKAAEL

SEQ ID NO: 383417 - protein, 348 aa, unidentified
MTVRLNRARGSNLIAIPIDFKRISANLMTHQATIGIDISKAQFDAAHLDEKGRYRHKKFDNHPEGFAAFLAWVDSLDGAKPPVCMEATGAYSVPLAESLVGRGFRVSVVNPAKIHAFAKSELSRAKTDKADAKLIARYASKMQPPPWNPPPRNIRELQAMLRRVVDLLEMQQMERNRLDTADPVVVGAIKTHLEALEKELDSTRDAIRSHINLDPALKPRRDLLESTPGIGPATSAWLLVVLSEHYHFTDAKQAVAHVGLAPRLRQSGKWAGKTRLSKSGDPLVRKALYMPSMSARRHNPIIRAFCERLKANGKHGMAINCAAMRKMIHIAFAILKSGKPFNSNLVLA

SEQ ID NO: 383418 - protein, 448 aa, unidentified
MSKVKTKNETVKRISQLTVINPTAAGVDVSDTEMMVAYPINSVQLEVRAFGCYTIDLHSIAKTLKANGITTVAMESTGVYWIPLFLLLQEYGFEVCLVNAKHVKNVTGRKDDESDAEWIQKLHSCGLLRASFQPDNQTRTLRSIVRHRKSLESTCSVYINRIQKALELMNIKVHTIISDIDGKTGLFIIESILAGERNPEVLADLRDKRIKASREEIIKSLQGHYTTEHLFELRQCYQLYRTHRQMIEECDMEIEKQLIEQIASKNGGVIAEIAEVKRKVSKKHKLPFNATSYLKEIFGVDITEVFGISELSALTILSEVGTDMSKWKTEHHFTSWLGLAPNTKISGGKIISSRIMKKKHHAGQAFRMAANGLHNSKSPIGDYYRRLKAKAGAGKAVVATARKRAIIFYKMVACQQNFNPKMLIDFQEKYKQKKINQLKRKLQLLEAA

SEQ ID NO: 383419 - protein, 372 aa, unidentified
MVEYFAGLDVATVESALCVVDDKGDVVLETKVASDPASIAFALHPFAGGLRRIGHEAGSLSPWLQRELKVMGLPVHCLETRHVRAALDAQRNKTDRHDALGLAQMMRTGWFKSVHIKSEASYRLRLLISNRRNLKRKFLDLENAIRHSIKAFGIKIGAVSGRLGFDAKVRELTAYDPVLTTLCDAMLRARAALWAEYTRLHKLVVQVTLKDELCQRFMAIPGVGPVTALAFKSAVDDPSRFRRARNVGAHFGLTPKRWQSGTSIDFTGRISKAGEGEVRTLLYEAASCLMTRSRESCSLKRWGQAIAKRAGHKKAVVAVARRLSVIMLAMWRDGTYFEPGNPEAPPRRPRKASAPRRVMKTKTLSGPKAARA

SEQ ID NO: 383420 - protein, 346 aa, unidentified
MSSDYSSIVRVGVDLAKHVIQVHAVDSAGRPVVVKQLTRAAFMGWCTRLPFGCIVAMEATTGCHYWARVLEATAVDVRLISPSFVTPYRMQGPGGKNDANDAEAICEAAARPRMRYIAAKTPEQQSWLTVHRLRDGYIKERTATINRIKGILLEFGIVMSAYSAKVSTELKSILADPASGLPRLAIEGLEQCRLHLDMAAEHVKWCDRQIARHAREDEVARRALSVLGIGPLGASALAATVGNFAQFRNGRQFSSWLGLVPRQHSSGGTMRLGRITKRGDAYLRQLLIMGARSALIVAHKHDDPVSVWAVQVRERIGWAKASVALANKNARRLWRLSTPVIACASD

SEQ ID NO: 383421 - protein, 361 aa, unidentified
MGSRFAGIDWATEKHDVLVSNELGEKLLAATFAHDENGLSALCRTLVKMEVVLVAIERPDGVVVERLLDAGLRVLALHPNKVAAARDRFRVSGGKSDRFDAFVLCELARTDSHRFRVLEPDSDQTKALRAMTRAREDLVHTRTAVVNQLRAELDRCWPGPLRLFSHMDSEILLAFLERYPSPVDAHGLGIVRMQAFLKREGYSGGQKPEALLAKLRSAPEGRVGELELAARRQLVLTYVAMVRTLNGQIKSLEREIRTAVRAHPDGRVFLSLFKQAHSFITAAELLAEIGDCRARYPSRDALAADAGQSAVAKESGKRKTAQFRWGCNKRLRVAFSRLADSTRHWHPWAQAVYAQARQRGP

SEQ ID NO: 383422 - protein, 466 aa, unidentified
MGRFAWLPFLIGWAGCVGAADGPAEVANGARVAVAIAPLDLPGVTDVHYTLAVLNSASPTSSARPRNYVGLLVREIAYGRFTNREANMMNEETRNKLSANPNTLYIGADVGAAEMKLAAADRQRSRPLEKTLEPFDDVGLMDWLKAVRKGLGLEAGPVVFVHEAGRDGFSLHWWLEMLGVHSVVVDPASIETSSRRRRVKTDRLDARLLLTKARGYFGGDGGVFSVVRVPSEEVEDARRVSRELKALKEEATRGKTRINGLLAQKGVKLALSKDFVARLKEVMTPWGTSLPPHLKAEILRQVERLELAESQIAQLEQAHQVAMAEGATDADRQGAKLVQLVSIGMATAVTLPKEFFWRDFKNGKEVGAAAGLTGTPRVTGTSTDIEQGISKAGNSRVRTLMIEIAWMWVRLQPNSPITQWFYARVDGTKRSKRKNIVAVARKLLIALWRYATMDVVPEGARLKTAN

SEQ ID NO: 383423 - protein, 355 aa, unidentified
MVMIGTDSHKRTHTVVALDDVGRRLGEKTLAATSDGHLTLVQWAAQWPEVTFALEDCRHLTRRLERDLLTAGYRVVRVPTRLMAGARRGGREPGKSDPIDAEAVALAALRHPDLPIAELDGPTREIKLIVDYRRDLVAERTRVHNRLRWHLHELDPSLHVPSRGLRRYCVLDDLAAALQGFDGVVARLARELVDRARQLTIQINSLEAELRPIVRRTAPSLLAIPGCGILSAAMILGETAGAHRFRNKDAYARFTGTAPIPVWSGSTKGKVRLNRGGNRSLNTALHMIAVTQSRGYGPGKAYLDRLAAAGKGRTEAVRLLRRRLSDVAFTALRADERARSQNAEQGAPATLPAAA

SEQ ID NO: 383424 - protein, 336 aa, unidentified
MKHWIGIDVSKATLDVALLDERGTLTAETKVENTTRSVKTLLRRWTKEFAPVKGEYLVCLEPTGYYGHALLEVLVELEIPTWLAHPNDIKQSIGMTRGKSDRVDALRIADYARRFQDKSRLFTADQLKMNKLKQLLSKRQNYVMRKTMHQRQIKDMNKLMDKDLRGPFTRFDKAQIKALDKAIKELEGMIEDTINAEPELSKRFELLKSVEGVGLILGSHLRALTDGFTRFTSPRQLACHAGCAPFENRSGTSIRGRTRVSHNANHTLKALLHVSVVGLIRFPGEFRAYYDRKVAEGKHKMLVFNAMRNKLIHRVCAVIRKGVPYEIRTPLAHVIE

SEQ ID NO: 383425 - protein, 409 aa, unidentified
MRIIGLDIHRAFAEAVAWDDGKLQRLGRVDMRRPLLEAFAKKLSKDDVVVVEATGNASSVAAVIAPHVKKVVIANPMQVRIIAHAKIKTDTIDASVLAQLYASGFLPEVWIPDEPTQALRRQVTRRNQIVRQRSRLKNIIQSILHSHLIPSCPHADLCGASGRAWLFHQVLPEDERLAVERHLREFDRLDEDLKVIERDLARSALGDEGVKRLMTIPGVDMVVALAIVAAIGDVGRFEQSQKLVSYLGLNPSVRQSGPGPAYHGRITKQGRGHARGMLVEAAWAAARAPGPLRAFFLRVRARRGQHVAAVATARKLAVLIWHLLSKGESYVWARPALHARKLRDLELKAGYKAARGQRGAAHAYNIKSHRDQERRWVEQAETAYARFVSGWNPRGPKRVRTGAATEVRR

SEQ ID NO: 383426 - protein, 347 aa, unidentified
MAFIGVDLHTNSFTICRLHDDGSEAFETFTLSASALQAFCMSLDADDEISVEATGNTAWFCDEIRACVGRIVVVNPRQFQVIRKSVNKTDKNDARALAFFLSKDMLPETRLKSTAESELSSLVYTRDVFVKQRTMLLNKIHAMFVRRGTKLKKEGLASKKRLRELDVSQFTALEQVELNALRNQALGLTETLAELDKAIESAGADLPGHEGISSIKGIGSRSAAILLAGIGNIDDFESADKLAAYVGIVPKVSQSNDTDNRGRITKRGNKLMRTTLVQCTLIAIRYSGYLNAFYQRIKERRGAGKAIIATARKLLAIIYDTLKNGWVFEDFSEFKIKQNQCPTGQPS

SEQ ID NO: 383427 - protein, 344 aa, unidentified
MEHYAGLDVSLEQTSVCLVDGQGQVVREAKVASEPEALISFLEQQDLEIARVGLEAGPLSQWLHAGLVTAGFEAVLLETRHVKAALSAMTVKTDRHDARGIAQLLRLGWYRPVHAKSASAQEVRSLLTARKLIQGKLLDIESGIRGVLRGFGLKVGAISRGRFEARIRDLVEGQAMLETVIGSMLAARSALQAEFTRLHRALLALVRADPVCRRLMSVPGVGAVVAITFKSGVDDPTRFRRSRDVGPHFGLTPRKYQSGEIDVTGSISKVGDRMVRTALYEAASVMLSRTVRMSPLKSWGLAVARRRGAKKARVALARKLGVVLHRMWVDGTSFRWTGEDAAMA

SEQ ID NO: 383428 - protein, 400 aa, unidentified
MDRVEQGWIGIDAGKGHHHAVLIDRDGQRLLSRRVINDQPDLVALIDTVRDRVVDPVWAIDLAGGSASLVIALLLQHGQRVVYLPGIAVNRASAGYRGEGKTDAKDAAIIADQARMRRDLRELHVLDEDIAQLQLLSSYRADLAADRTRSINRLRGLLAGIFPALERVLDFTNRGPLILISGFQSPTAIRQLGAARLTGWLKRRGVHGAGRLAHAAVEAASRQTAHVPGQAAAASLIVRLAQTVLDLDRQLTDLDREVAGIFRAHHDAAIITSLTGIGNVLGAEFFAVVGGPLAGFASADHLAGYPGLAPAPHDSGYRTGNLHRPQRYNRQLQRVFYTSAMISIQHSPASRAYYDRKRAQGKRHTQAVLALARRRVNVLWAMLRDHRPYQEQPPSHVLAA

SEQ ID NO: 383429 - protein, 345 aa, unidentified
METMYYIGLDVHKKLISYCVKDVSGRMHAQGKIPATRYDLDLWMKTLPQPWTVAMEATIFTAWIYDHLQPHAAAVKVAHPLMLRAIAVAKKKNDRIDAKKIADCLRCDFLPECYMASTEIRERRRTLRYRNLLVRQAVQMKNKIAVLLMEAGVSYNKQKLHKVGYFRELLATNQDIDEGLKPLLRLCRETVVRLGKTESALVRSLERDSLLVERVERLMTIPAVGPITALTWALEVGDVQRFSSIKKAISYCGLCGAERSSADITKRTPLSKQRNKHLQTVLIEAAKMAPRNSPELAMVYEQEKQKGNANRATLAVARKIVAYLVAVDRRQKGFLVVETQNRTAA

SEQ ID NO: 383430 - protein, 375 aa, unidentified
MAANLHVNDSEAGAVLYMAFELSDKKWRLAFGGGERRRQVVIAAGALEELRAQIAKVREKWGLGEEVRVVSCYEAGRDGFWLHRQLASLGIVNHVVDAASIEVSRRARRAKTDRLDAEALLEKLIRYAHGERRVWRVVRVPEPRWEDLRQLHRERAQLKKACTAARNRLGSKLVAQGIRLAPGKDFLARLETVPLCDGSPLPAHLKAGLRREYERLQLTQTQLRAVEREIRTLIESEDGLEQVRTLMLLPGIGWVGAWTLVLEIFGWRAIRNRRELAALVGLVPTPYNSGTMAREQGISKAGNPRVRALLIQLAWLWLRYQPQSKHSRWFQERFGQGGSRQRRIGIVALARRLVIDLWRFAESGLVPEGTRLKVA

SEQ ID NO: 383431 - protein, 343 aa, unidentified
MQTITTIGLDIAKSVFQVHGIDAAGEVVIRRQLKRRSVLAFFQKLPPCLVGIEACASSHHWSRELQALGHTVRLMPPAYVKPYVKRQKNDMADAEAICEAVTRANMRFVPTKTPEQQSCLMLHRTRHLFIRQQTAVINSIRAHLAELGIVAPVGRKGVTELLHVVADPSDKRVPEVARACLAALGTQLLSLKKQIGEFDRMILAWHRSNQASKRLHYIPGVGPMLATALVASVADPRTFQSGRNFSAWIGLVPRQHSSGGKDRLGSISKQGDRYLRSLFVAGALAVIRYAKIHGTGHRPWLTALLGRRPAKVAAIALANKIARMAWAMMAKGERYKQPVALAA

SEQ ID NO: 383432 - protein, 342 aa, unidentified
MKHYCGIDLGKKSSHFHIVDGERQTVTAGKFANNVDAIRKVFAGRERLKIVVEASGKAFWMADRLTDLGHEVVVVDPGRTKAIGAARIKHDKLDARVLAELCQAGLLAAVDVPSQEQRLARLPFTSRDTLVRARAQTMNSVQSILDGEGVELPRVWAGSFSQVVRSVTPRMPAPMVPIVERLLRGVEELSKLIDECDQEIEVVAESDPDIKLLRTVPGVGPLTAAGFVHIIRDPSRFKSSRLVAAYLGLVPSLYASGQTFIKGGITKHGNAHLRWLLHIAAGALLRTIRDTALKRWALNLSARIGRKKAKSAIARKLATVLWAVWRRRAPFEARLPLPQPAE

SEQ ID NO: 383433 - protein, 371 aa, unidentified
MGESSKTLFVGLDVHKDTIAVAYAAEDRSTEVVSLGMIGTRQCDIDKLIRKLESKGAPFAIAYEAGPCGYWLYRYLTRRGLSCIVVAPSLIPRKPGDRVKTDRRDAVTLARLLRSGDLSSIYVPTVDDEAIRDLSRAREDAVRDLKRSKVRLKAFLLRQDIRYEGRANWNAAHLRWLARVVCPTAAQQIVFQEYVHTVTEQTERVQRLEVELHTAVKTWRLHPIVEAVQALRGVDLTGAVTLIAEVGDLTRFDTPRKLMSYLGLTPSEYSSGERRRQGGITKAGNGHARRALVEGAWAYRYPAKVSRHLQLRLENVPTEVRAIAWKAQLRLCKRYRLLSARGKHVNQVVVAIAREMAAFAWAIARTVPMAS

SEQ ID NO: 383434 - protein, 342 aa, unidentified
MQSYEKIYVGIDISKSKLDVAVYDAEKKKIANKFVIKNEADGIQSLFSTLKKEKINLEDCWFCFEHTGHYGFSLCYELEQICCVYSIIPALQIKLSLGMTRGKNDQVDAERIAMFAYTFRDKLQPSKMSSDCFQKIKQLLTYRNQMVRISTQLQNSLKSHQAVCQLTHFDYVVDEIKKQIIEVKVKIESIDELLMSEIKRDKTLENNFNLLKTIKGIGPIISIYLLVLTQNFESFTDARKFNCYAGIAPFEHSSGSSIRGKTKTSSLRNKTIKSLLFNGANAAALHDKEIKNYYKRKKEEGKHHQSVMNAIACKLVYRAFSVIKRQSPYVTLYAQNFKKNLV

SEQ ID NO: 383435 - protein, 343 aa, unidentified
MEHFAGLDVSVKQTSVCIVDGTGRLVREVRVASEPEALLPVLTNPLYRFKRIGLEAGPLSQWLFSALAEAGLPVICVETRHMRAVLQAQINKTDRNDARGIAQMMRAGLYRPVHVKTLRSQKLRMLLTHRKLLQSKAIAIENDLRATLRNFGLKVGVVGTVKFEARIRELVETLPDLAELVEPLLIVRRTLREQIGILHGRLLAIVRHDDVCRRLMTVPGVGPVVALTYRATVDVPARFRNSKAVGAVFGLTPSRYQSGEVNRTGAISRCGDEMMRVMLYEAAHTMLLRLAKWSWLKAWAMKIARQRGIKKAVVALARRLAVILHRIWVDGTEFRWTRETAAA

SEQ ID NO: 383436 - protein, 401 aa, unidentified
MKKLSGGIDVGSESHHIIILDEEDNFLYNQKVAHQLNEFTESIKLFRKIEKKEGGKISFALEGKNGYSAPFDRILLNQGFTLYNVDNFKLKRFREAFTGEWRDDERDSLMLSKMLKLKDYINSKREKVFIKIEKPSLVTESLKLLSRHQQTLIDEKVRLVNRLGKKLLEVCPQILELSKLKNKKIIAILAKYPDFSKYKRITLKSLLKIKGIGKIQAPFLLKRLNNIEYMSGLTDIYKTIILSYAKRILELQEEIKDIDKKLDEIGEKSKSVKHLKTIPGVAIKLSSRFIGEIGDINRFPSEKQLAVYCGVACVDNNSGKVTKAKAVYKANKICKQTLITMAGCSIRFSFQCKDYYLKKRAEGKAHNHALRCMARQLIKVIYKMLTEDRDYMVRKELRKIA

SEQ ID NO: 383437 - protein, 378 aa, unidentified
MHSMTQQDTLVVGGVDAHADAHHAAVLDDRGALLSTRSFATTTPGYRQLLDWLSSFGEIDAIAVESTGAYAAALVRYLREHDIAVVEVNQPHAHTRRRVGKSDPIDAEMAARLFLAGKAKAVPKQTDGIVESIRLLRVARHSAVKSRSAALVQVRDLIITAPQELRDQLSVRKTLRGKVTVCARFRLSGGELRSPSQAAKFALRSTAQRIETLDQEITALDRELEQLVATAAPRTVQLLGISTGHAGQLLITAGQNIDRLRGESSFAMLCGASPIPASSGKTTRHRLNYGGDRQANRALHLIAVCRLRYCERTRAYAKRRTAEGKTQREIMRCLKRYIAREVFNSLQADLAETTPPRPAVSTTIMCGNPGFGINRTRT

SEQ ID NO: 383438 - protein, 353 aa, unidentified
MGHKYVGLDVHQSSTVAAVHDEHGKSVMESIVATEAEAIRDFLKGLRGTIHGTFEEGTQAAWLYEIVRPVVAEVIVCNPRRNKSLAVGNKADRVDANKLAELLRCGQLKPVYHGTPAVRLLKELVHSYDSLVSDTTRVMNRVKAIYRGRAIGCAGRDVYYQRNREQWLEKLTEPGVRQRAMFLYQQLDTLRGLRREAKKAMLKESQRHRAYATLKQIPVLGPIRIAQILAKVASPQRFRTKRQFWAYCGLAVVTRSSADYHFVDGRAQKRGRPPMTRGLNPNFNHRLKYVFKSAALDGIHQAPFEGYYARLLVKGIRPEMARLTLARKIAAVTLTLWKRGERFDDLKVSEQAA

SEQ ID NO: 383439 - protein, 338 aa, unidentified
MTNYTFIGVDISKATFDFYFKTPKSSYGKLGNQQEGFESFLKKLPADPWVVMEASGPYYYQLACFLSHQNIPVSVVNPLVIKRFSQMKLQRTKSDKADARIISEYAQVATLNRWQPPSEDMHHIQQLFATLEQVIKQRTAFGKQMMAFQATGSVDEQVVRANESLVAQLDGTQKELENTLIDKVDKQSASLRKDLQSIPGIGPKTAMLLIVCCKGFAPFQHYKQVISFLGLAPRIYESGTSVRGRARICKMGMGKVRACLYMAARSARRYNTACRRLYDRLIAKGKPHRVAMIAVVNKLIKQAFAIVKSGVQYQKDFEPLNVSKQNNILTQNAARLAS

SEQ ID NO: 383440 - protein, 418 aa, unidentified
MFKIFRKNCCGLDVHKTWIYACIGITDANSRTEYFQARFSAFSKGLQELSHWLDKYNCKEVCMESAGKFWIPVFNILEKTCLVTLAHPKYTKPQKGNKTDRKDAKWICDLFMCDMIKPSFIPPPAIRHLRDLVRYRRKLTNMLTGEKNRAQNCLTVSNLKLDDVFADVFGKSARSITEYILAHPGEPFDVAQFVDRRCKSPLSEIQAAVDGAVSPEQAVKLRQCLDYIDQLRLLRQRLEQEILRICEPFADILQLLRTVPGLGNDPMTAIAVLSEIGGDMSVFPTAKNLCSWAGCCPRNDQSGAKVKSSRISRAGSYLKPLLVQVANALIHSRKHPEFAERYRRIKARRGHKKAIIAVCKMLLTAIWNILSKLVPYSPAGFLSTSHDLPPSKSLTVAQGLSLLRRRGFILTDDPLSAP

SEQ ID NO: 383441 - protein, 355 aa, unidentified
MDSIKYIGLDVHQSTISVAVLDADGKLVMQSVIATHATTILDLLHGLRGTLHVTFEEGTHSAWLYDLLVRRVAKLVVCNPRKNALLKAGNKSDTVDARKLAELLRAGLLSPVYHGQNSTAAVKHLGRSYAALTEDTTRIMGRLKALYRSQAIACAGKKPYGARHREEWLAKLSESGLQRRAERLYQQLDLLQELRRDARHDLILECRKHSETKLLRTVPWLGPIRAALLVGRVQTPHRFRSKRQFWAYCGLALETRSSADFGFVNGQLERRKKPVFIRGLNLNHNHDLKNLFKSAATTASGSNGPFRPFYENLLIKGMKPELARLTLARKIAAITLHVWKKGEPFDAEYLKPQAA

SEQ ID NO: 383442 - protein, 335 aa, unidentified
MTAYVGIDLHRRRSVAVCLNEEGDRLWWRRIENSPQTLTEIVDEAGPDPEVVIEATWGWYWAADVVTEAGGRVHLAHPLGIRGYENRRVKTDLADAFLLADLLRMGRLPESWIPPHSIRELRELVRYRHKLSQLRSGLKSQVHAVLGKEGVIPHLVEMWGPAGSRFLDETRLGDAYQHRVTSLRDLIALFDTEIRHLEARIHAQLKDDAGYRAIQHLNGVGPGHGAVFVAEIGDVSRFSHPKQLCSWAGLTPKLRESDTTSYRESITKQGSRLVRWSAVEAVSRYHGGPPIRDSYRRIAERRGVNIGRVAAARKLLTLVYYGLRDGEIRCLQQAG

SEQ ID NO: 383443 - protein, 372 aa, unidentified
MNYNTVYVGMDVHKESFSLCAYTIEAEKASHYQRTEADYKKVLNYLEFLRTIYGDDANFICGYEAGCFGYTLYHQLTANNVKCIILAPTTMIEQRSKKRIKTDRRDAEIIAKCLAQHNYSPVHIPTAKDEETKEFLRMRDDHKLALKKVKQQILAFCLRHNYRYDGKSHWTAAHLKWLKALTPEALYKEILDEYLLTYQTLSDKIERLDKRIEELATQDEYKEAVKKLCCFIGVKTHTALSVLVEVGDFKRFASAQHFASYLGLVPGEDSSGDDQNRLGITKAGNRHVRLLLTEASQCYARGQGGFKSKELKSRQSGNTPAVIAYADKANERLRRRYYKMVLNKYKKHNVAKTAIARELACFMWGMMTDNIA

SEQ ID NO: 383444 - protein, 371 aa, unidentified
MESIIYVGMDVHKDNYSICCYKASEDRFYYEKSILAESKRVIKYLQSVKKEFGEDTIFVCGYEAGPTGFGLYRDLQNAGYSCVVMAPTSLKHSASHKVKNDKVDARFLAKTLFTKDYSSVHVTTEHEESIKEFCRMRLNLKTALKKARQVLAAFLLRQDKKYTDGDTWTLRHRAWLKQLHFDEEYLNEVFNEYMISINSYEARLQAIERRLEEISQDKSIKESVDKLVCFCGIDTVSAVTIVSKIGDFKRFSKAYHFSNYLGLTCGENSSGQKEQHLGITKCGDKELRRIITESAKSIKRSNLKGEKSRRLLDRQKNKDPLVIAYADKCRLRLSGKIIHLEMRGKPANVATTAAARELACFIWGMMTNNIA

SEQ ID NO: 383445 - protein, 342 aa, unidentified
MKKYFIGIDVSKETVDVSFVESDFQRQPEYLAQYPNGKKGYRSMVRDLRLALRGTSSGQWLFCCETTGAYDRQMCHWLTEHGMHVWRESALQIRQSLGIRRGKNDKADSMAIADYARRHHDKANLFELPDKELAALKDLFLYRQTLVDKLKGVKNRLKAQKSQGQAASPAAKFIRRDANSELRRLERSIAECEKAMKEVISSDEQLQRNYELVKSIKGFGLVVTVALIVFSGNFQVVPTANKMATYCGVASFRNISGTTLDSRQDVRHLSNLRLKGVLTMAARTAIRHDDAMRQYYQRKIAQGKQHGVVINNVKNKLLHIAYALVRNGQDYQSGHVINGEAA

SEQ ID NO: 383446 - protein, 334 aa, unidentified
MEQVTTAGIDLAKHVLALHGVDAAGRVALRRTLRREQLLEVMAKLPPCVVGMEAGSGAHDWARQLQRLGHTPKLMAAKFVSPYRRKGKNDGNDAEAICEAVSRPGMRFVPVKSLEQQALLSLHRVRQGFIVERTATINRLRGLLAEFGVVLPLRAVVVRREACKAAESLPTLGHRAIEDLLAHLRTLDERIAAYDRELEQQARQCEPARRLMKIRGIGALSALAIVATVGTARDFRSGRQFAAWLGLTPRQHSSGGKTRLGHITKRGDAYLRCLLVQGARSVLHSASRHADRMSRWVQAVESRRGYHRTLVAIASKNARIAWALLSRNEVLRPA

SEQ ID NO: 383447 - protein, 428 aa, unidentified
MNYNQNEKIAQITSHTLIIGVDIAKFKHVARAQDFRGLEFGKPLYFENSKSGFNHFLDWINKLIIQLDMEKAIVGMEPTGHYWLNLAHFLKEHKIKFVVVNPMHVKKSKELDDNSPTKNDVKDARVIAQLVKDGRYAEPNIPQGVYAELRVARKIRDLLSVDRQVVQGQIHNWLDRYFPEFLTVFKDWEGKAALQLLKLNLLPNELVKLSNEEILIHVRQVVKRGIGISKIKDLTGVAQVSIGIREGSNIAKLELSTLIEKYELITEKFEELESNIDKLLDQIPGVSQMIAIKGIGKDTIAGFLAEVGDLSNYTHPRQIIKLAGLSLKENTSGKHKGQTKITKRGRKSLRALLFRVAMPLVAKNSAFKALHEYYTKRPNNPLKKMQSLIAICNKVIRILFAIGKKQCEFSEERMLQDIPHMAILKIAA

SEQ ID NO: 383448 - protein, 392 aa, unidentified
MYIVGIDIGKNHHEASIVSPEGKQIGRSLRFATTHKGADSLMRFIFKNIGNSPCVFGMEATGHYWYPIYSFLKAKGYTIYVINPIQSDSLRKMYIRQTKNDSIDSFLIAEVIRFGQFGTTSMADENILAMRQLCRYRDSVISSRTEIKLRIGTIMEQIFPEYEKQFSSLWVSTSMGILEKYLTPENIENAPIDELFEIIKDKSHNRLTRAKAISIKEAAADTFGIKIAQDAFSFQLKQLIDRMNFLDKQIEALDCQILEYYEKFDCYLHTIPGIGIIGAATILAEIGDISRFKNSSSLIAFAGIDPTVRQSGEFNSTHNHMSKRGSPYLRHAIFLAATTCSFHNSPLNAYYKKKRDQGKHHLTATGAVARKLTTVIYAVLRDSKPYEPKKFC

SEQ ID NO: 383449 - protein, 412 aa, unidentified
MESLITCCAGLDVHKKTVVACVRRIDAVGSIHSEVRTFGTTTAELLELADWLALRDVTHVAMESTGVYWKPIFYLLEASFDVLLVNPQHISQVPGRKTDVKDCEWIAQLLQCGLLKRSFVPPRPIRELRDLTRQRSQIVAEKASVANRIQKVLEDANIKLGSVATDVLGVSGRAMIRAMIAGNEDADDLAELARMRLRKRIPELRAALQGRVTAHHRFMLRMLMNHLEALEGLIAGFNAQIERATAPFAEEIQRLATIPGVDRRTAEAVIAEIGPDMSWFRTADHLAAWAGMSPGNNESAGKRKSGRTTRGDRWLRQALTQAAWAASHTKGTYLAAHYHRLAARRGKKRAIVAVGHTLLTIIYHLLTRKTEYHDLGADYLDRLNPDRLTRQLVRRLEKLGHKVTLEPRGEAA

SEQ ID NO: 383450 - protein, 330 aa, unidentified
MPERLGSLHKAGSTKMTQTSTTTAGIDTSKRKLDVALHGRAGHWQVPNSLAGWRELTVKLVEAGVGRVGIEATGGYERGVVDHLRAADLTVLVLQPMQVKAYGWAHLRRAKNDVLDAVLIAAFTASLDRIKAAPDPRLAELADHLTFLEQIEEDIRRYKTRLEHIGEPGLRRMVLGDIARLKARRLTQIRHLAKQLRAHRDLAVRFDLVLSIPGIGERTALALLIRMPELGQVSREEAAALAGLAPFDNDSGQQRGQRRIAGGRDRLRRSLFAAALPAAFRWNTALIALYTRLIARGKAHNAALIACARKLLIYANTVVQRGTPWTEKTA

SEQ ID NO: 383451 - protein, 419 aa, unidentified
MSFKILKNNCCGLDVHKTWIYACIGITDSLKRTEYKEARFSSFTKGLNELCEWLSKYNCTDVCMESTGKYWIPVFNVLEKNNIWVTLSHPKYTKPQKGNKTDRKDAKWICDLYMCGMVKPSFIPPADIRELRDLVRYRFKLTCMITGEKNRAHNCLTVSNLKLDDVFSDIFGKSSRSITEQILQHPGETFDVAPFVDGRCKTPIEEIQAAVDGAISKEQAVKLRQCLNHIDELEMHKAEIEREIFRLSDKYESVLSLIRTVPGFDKTPMTAIQVLSEIGGDMSVFPTAKNLVSWAGCCPRNDQSNHKIKSTRISRAGSYFKPVLVQVANALIKSKKHPEFTTRYRRIKARRGHKKAIIAICRMILTAIWHILTDLKPYTPEGFLESRPVNESKILTTSQALNLMKQRGYIIKDDVVPVT

SEQ ID NO: 383452 - protein, 450 aa, unidentified
MKQKLNRKKVKQSTKVSPLSVLNQQVAGIDVGATAHYVCVGALSDESVKRFGTFTQDLEAIADWLVSLGVTSVAMESTGIYWVNLYDVLESRGLEVCLANARYVRNVPGRKSDVSDSQWIQQLHSYGLLRGSFIAEGKIRELRAYVRQRENLEKQKGIQVALMGKSLQLLNIKIHQIASGTELQTSMNIIRSIVAGERSAKELAKFRHPQMKTSVEDFEKGLQGNWRAEHLFSLKQALMMYDFIKEQMLACEREIERTLGEINGIAGDESRTKTKAIRQNDYAFDAKSYLKEMVGVDLTQIRGMDEKTILTILSETGTDLSKWQTAQHFTSWLGLAPKPKITGEKIVGHFKHSVSNRANQAFRMTAWAVNKSKCYLGEFYRKLAARKGSFIAIKATARKIAVIFWNMMTKKIEFEIRSKAEYDTKYQDRQLKTLEKMAKRLGITLQKANV

SEQ ID NO: 383453 - protein, 364 aa, unidentified
MNKCHLNTELSSLEGTRCQFNGSRAIIKLGIDVHQDYYVVVRQEGGTNPKPAQRFRKEAFLHWVAKLQSQGGQIHAVYEACGFGFGLQRQLAALGITCQVVCPQKLDERNKRIKTDGLDAKALCLKLDRFVQGNRDALAIVRIPSEEEEQKRAIHRQREQLVKARKRLEAQGRSFMVNHGMETASNWWKPRTFALLSVPEWMKELLSNSQPILVALQEKIRALTQQLQAAARAGQGRGFGALSSVVIDREIGNWTRFNNRRQVGSYTGLCPGEYSSGNTRLQSCVTKHGNPRLRAALVETAWRLVRFQPNYKPVRKWRQTLAKGALATKAARKKAIVAVARQLAVDLWRIRTGRVTAEQMGLSI

SEQ ID NO: 383454 - protein, 406 aa, unidentified
MRVVHERCAGLDVHKSSVVACALLPEGKQLRTFGTLTWQLEQLAEWLRGLRVGVVAMESSGVYWKPVFNILEVAGLELLVVNARHIKAVPGRKTDVKDAEWIADLLRHGLLRPSFIPSREERELRELTRYRRTLIEERAHEVQRLQKVLEGANIKLEEVISNVVGLNGRRFLSALIAGDYDPETVAATANYGLQRKRELLAQALQGTLGTHQRFLLDQLLSHIDFLEQRVAALDQEVKQRSRPFEAAIARLDQIPGVGIRAAEEILAEIGTDMSRFPSARHLASWAKVCPGNNESAGKRRSGYAGKGNRWLRSILVESAWCATRKKDSYFKVQYHRLAARRGRKRALLAVGHSLLTVIYHLLNDGVIYQDLGPNYFDQRDRSHITRQAVRRLERLGYHVSLTEGAA

SEQ ID NO: 383455 - protein, 365 aa, unidentified
MWEAPVVVQRTNVGLDVHARSVVACGLDRQTGEVFEQRLTPSHEEIAAWIRSLPGPAAAVYEAGPTGFGLARSLRAVGIDCEVAAPSKLMRPSGDRVKTDTRDARHLARLLMLGDVTAVAIPSREQEAARDLVRAREDCRGDLMSTRHRLSKLLLRQGIVYSGGKAWTGKHELWLRCQRFDDPALQLAYDTSFEAMLAIIARRDRLDRAIEQMAADSEFTPVVSRLCCVRGVATLTAFGLAVEIGDWHRLTGRSIGAYLGLVPTEYSSGASRVQGGVTRTGNGHARRLLIEAAWHHRARYRPGATLRRRWDAASAPARARGQLANQRLHARWQTFDARKKRAVVANTAIARELAGWCWSLAVLDG

SEQ ID NO: 383456 - protein, 341 aa, unidentified
MDEVSTIGLDIAKSVFQVHGVDAAGAVVIRKRVSRAKVLEYFGELPPCLVGIEACPSAHHWGRELQGLGHTVRLIPPSYVKAYLKRGKNDANDAAAICEAVTRPSMRFVPIKTKEQQTALMLYRARQLLVRQRTMLSNALRGHLAELGVVSARGRNGTAELLRIIADGRVSPAVSGILTVLARQYGAIGTEIASIDKSIMALHRGCEASRRLAEIPGIGPIGATALVAEIGDWKTFSSGRSVAAWIGLVPKQHTTGGKDRLGSITKQGNRYLRWLLVVGAMAVIRYARKYGTQKRPWLGRLMERRPTKVAAVALANKIARIAWAIMVRGERYKEPKLLLAA

SEQ ID NO: 383457 - protein, 463 aa, unidentified
MRFEHRKAPWYYESCPKAGRQKGHLTRIPGGYKMNYNQNHKIAQITSQTLIIGVDIAKFKHVARAQDFRGLEFGKPYYFENTSSGFEGFLAWIQELSQKHGMEKTIIGVEPTGHYWLNLAHFLKEKAIKLVVVNPMHVKKSKELDDNSPTKNDVKDAKVIAQLVKDGRYAEPNIPQGVYAELRVARKIRDLLSVDLQAVQGQIHNWIDRYFPEFLRVFKDWEGKAALQLLKLNVLPYELIKLPDEEILAHLKKAVQRAVGVSKIRNLKQVASISIGIREGAEMAKLELRTLLEKYTLVKERFEELDSRIACLLEQIPGVDQMLAIKGIGRDTIAGFFAEVGDLRYYSHPKQIIKLAGLSLKENTSGKHKGQTKITKRGRKKLRALLFRVAMPLVAKNSAFKALHQYFTKRSNNPLKKMQSLIAICNKLIRVLFTIGKKQCEFSEERMLRDIPHMGVTSMTVAA

SEQ ID NO: 383458 - protein, 339 aa, unidentified
MANVAVLGIDIAKNVFQLHGVDADGQAVLKRRVMRDQLLQVTEAMPPCLIGIEACTGAFHWQRHFEAQGHTVKIIAPQYVKPFLKGQKNDGNDAQAICIAVQQPHMRFVPKKSIIQQDIQGLHRARQRLVNHRVALISQMRGLLLERGVAIAKSASIAQRTIPEIINNPTIDITELTRDIIGTLHAFLLQINEKIRYFDKQIDAVFRESDVCQRIAKIRGVGPKTATAVVAAVGEGADFKNGRHLAAWMGLVPRQHSSGDRRVLLGISKRGSQHLRTLLVHGGRSVVRTAQRKSDPASEWVNELRERRGYNRAAVAVANKNARVIWALLQHGGEYRANP

SEQ ID NO: 383459 - protein, 354 aa, unidentified
MKRTTKYVAFDVHQATTVASVREESGRVIARSVLPTDSGALTEFVRGMRGARHVTFEEGTQAQWLYELLAPLVDRVIVCDRRGAPRQGNKGDQVDADQLSELLRRGALRAVYHGSADRVTLKELTRTYRNLVEDATRVMLRLKALFRARGIATAGTAVYHPRHRARWLAQLLEGGARFRADALYAELDVLRQLRPKAKAVMVTEARRDPAWRVLRSIPFLGPVRVALLLATMQTPWRFRTKRPLWAYAGLAVVSRSSADYTLVAGAPVRRRRAPMTRGLNRNHNRVLKDVFKGAATAATARPGPLQDFYHRVMARGTREELARLTLTRKLAALTLRLWKKGERYDPTKLTTPAR

SEQ ID NO: 383460 - protein, 325 aa, unidentified
MNIPVRIGMDTSKSVFQLHGVDENEVVVIRRQFRRAEMIRYFERLPPVLVAIESCGSSHHWGRLLQSFGHEVKLIPPQYVKAYVKRGKNDAADAEALCEAVTRPSMRFVPVKSKERQAACMLMSVRERLVSVKSQLSNAFRSYAAEFGIVGPAGRQNVAALIKRVLEDDSLPEMARDLFRLQADEYAAVQARLAKIEAKLMKWHREDDISRRIATIPGVGPIGSSMLSMKAPPPETFRSGRDFAAWLGLTPKDHSTGGRQRLGGITKAGDSILRSTLIVGATALLRHVRKGRHKPTPWLASLLERKPPKLVAVALANKFAQSLGA

SEQ ID NO: 383461 - protein, 344 aa, unidentified
MEHFAGLDVSVKETSVCIVDDTGKIVREVKVASEPEELLAVLKNPAYRFKRIGLEAGPLSQWLFSALAEAGLPVICVETRHMRAVLKAQINKTDRNDARGMAQMMRVGLYRPVHVKTLRSQKLRMLLTHRQLLLSKAIAVENDLRGTLRNFGLKVGMVGKVKFEARIRELVENQPDLAVLVEPMLIVRRVLREQIVILHRRLLAIVRDDEVCRRLMTTPGVGPVVSLTYRATVDIPARFRKSKSVGAVFGLTCAKYQSGEVDWDGRISRCGDEMMRTMLYEAAQAMMRSKKWSWLKAWAMQIARRRGMKKAIVALARRLAVIMHRIWVDGTEFRWSREQTTAAA

SEQ ID NO: 383462 - protein, 421 aa, unidentified
MEQETRTQERTGIWVGIDWGGESHAISVVDEERTVVEQFEIGVDLSDLRQLVDHLNELGPVAGIAIETTRNPLVGHLASKKFTVYPVNPKLSKNWREGNSVAGVKSDRRDGLVLAQELARRHESLRPLQEDASAVAELAGLCEKVRDLVGQRTSLVQRLKATLHLYYPAAMGFFSDWTSPVAWRFLKRFPTPEALAHARKDTLIKFLKANRIGLKPIWLERIEKRGEATHWPTPANSIALETMALATIAQLQALQPYIDKCDRLIAQRSKDLPETQLLRSLPGAGERLAPALTAITAVTVAEQGNCEPLRCMSGVAPVEVQSGKRRRTQMRRRCNKHWRNTTYLFAMSSTKYCAWAKAFYDLHREHGDRHATALRKLADKWFKIINRMIDTGESYDDQRYVDALRRHGSPVYQQLCGKQCG

SEQ ID NO: 383463 - protein, 345 aa, unidentified
MTMLADGVELVIGVDTHKTSHTAAVVDRFGGVAETFEFTANPAGYRKALSRVATHLRPRVWGVEGTGSYGAGLTEFLAAAGERVVEVERPARPSRRNGAKSDAIDAVRAAREVLAAKDLIEPRRRGEREAVRVLLATRNGAVVARTKALNHLQALVVTAPERLRSRLGGLTTTELARRAARLRVSADQPIEDQATVRAMRACARRALACEQEATELEAELTRILTDQVPHLLAEPGIGPISAAAIYLAWSHHGRIRDDAAFATLAGVAPIPASSGQTTRHRLSRGGDRQLNRALHTITLSRLSCHPETRAYATRRLAEGKTPREIRRCLKRHIARRIYKLLENTP

SEQ ID NO: 383464 - protein, 359 aa, unidentified
MTENALDHRVTIGVDTHLDVHVAVALDERGVRLREIHVPTTLAGYRQLERWAVGVGPVEVFGIEGTGAYGAGLSRFLRERGHRVVEVNRPDRATRHRLGKSDPIDAEMAARAVLAGVATGTPKAGDGRVEMIRMLKIARDSAVKERTQSLNQIRALLVTAPAELRESLAGLTVGRLLDRCAAFRPGVLDSPTAVARHSLRLLARRNLQLRTEARELQVAIRGQILSTAPELLESFGVGPDGAATFLLTAGDNPGRLRSEAAFAALCGSSPIPASSGKTTRHRLNRGGDRQANAALHRVVVVRLRWHQPTRAYLARRLAEGKTKAEIMRCLKRYVAREIHGLLCPRGSGVGVADHGIEAA

SEQ ID NO: 383465 - protein, 377 aa, unidentified
MSKIMRYVGMDVHAESIAIAVVDEGGMERDVGVIPNRPEAIRKCLKKLGRTEELRCCYEAGPTGYVLYWQLVRMGIECAVVAPTLIPTKAGDRVKTDRRDARKLARYLRSGDLTAVWVPDEAHEALRDLVRARQAAKIDEKRARHRLQKFLLRHGQRPPEGVKAWSAPHRAWLQKLQLEPTTLQVVLTEYLHEVGHNEQRVDRLDTAIEQAVEEAPEQIRAVVAALQGLRGVRKVTATAVVAEIGQFSRFAHPRQLMGYSGAVPSEFSTGGPGNHRRGAITKAGNSHLRRLLGEAAWCYRFRPAVGYPLKKRQQGLPAEVSDISWKAQVRLCNRYRRMVARGKIKQKVVIAIARELLAFMWAIGVAVEKHEQTRAVA

SEQ ID NO: 383466 - protein, 412 aa, unidentified
MKVVHEICCGIDVHAKMLVACLIMANGEKQVRSFSTMTDDLLRLRDWLVAAQCTHVAIESTGVYWKPVFNILEDALTVILINPEHAHALRGRKTDVKDAEWLADLLRHGLLKASFIPPPEIRELRELTRYRESLVRERSAVANRVQKVIESGNIKLGQVASDALGASGRAMLRALAHGETDPDKLASLAQRQLKEKVPQLRRALQGRLTVNQRFVLGELLQRWEELERADRRVTSEIDKYLQARPKLARAREIVDSLPGIGPRVAEVVVAEIGVEMEAVFESDAHLASWAGICPGNKATGGKRLSGRTRKGNTYLRSALVQAAWGATMKKNCYLSSQYFRLVKRLGRKKALVAVAHSLLVIIYHVLQSDQTYTELGGDYFDRYHVEQQRDYYLRRLHMLGLKVTVEDLSKAA

SEQ ID NO: 383467 - protein, 419 aa, unidentified
MSNSTGYAFFVGIDWADSKHDVAVYSTAKGTNKVFIIEHSTEAIDAFISELLAEAKGAPIAIILEQSKGSLMHALMLRDNVDLYPINPKQFASYRESFRTTKGKSDKNDALLLARLLYERHKQLRVWKPEDENTRLIARLCSRRRVWVEQRTTQGQRLLDLVKSYFPVLLKLAKSKLYDSPLLLEILRKWPDPRRLKRANPELLAKVIASHGVKNQSKLEKIIACLKKAPIHSKDKSLLTVSAIEARYLSKQLTANQELIAQLDQEIKAALAKHPDKELFTSLRGAGNALAPRLLAAFGTDRKRFKNAEEVACYVGVAPVTKQSGKSCSVVRRRACNKYLLQTFHEFASAAAKWCTWSNAYYKMHREKGMKRHAILRKLAYRWIRILFRVWSTRTAFDPERYIRSLLAKCSEIKPYLSA

SEQ ID NO: 383468 - protein, 363 aa, unidentified
MTSMSGMTPGVTGGIDTHGQTHHAAVLDHVGRQLGDREFPTTPAGYRQLLAWLRGHGPLERVGVEGTGTYGAALARHLGSHSVPVVEVDRPDRKARRTKGKSDPLDAYAAARAALSGTAAGTPKAQDGPVEAIRALRVVRCGAVKARTQAMNQLKALLVTAPAELREQLRPLKTTALIATCARLRPTGELADPEQATKTALRRLAQRHQHLSEEIVEADTELRTLVSAAAPRLLALPGVGIEVAGQLLTTAGDNPHRLRSEAAFAHLCGVAPIPASSGRTHRHRLNRGGDRAANNALYIVVLGRLRYDPRTRRYADRRTTEGLSKPEIIRCLKRYVAREIYNLLATHTADDRPTTPPSMSRAA

SEQ ID NO: 383469 - protein, 348 aa, unidentified
MRFYNRQHAFYCGVDLHAKTMHVCLVNQAGDVLVHRNLPTEPERFLNAISPYRAHDVVVGVECMFTWYWLADLCAQHGIAFVLGHALYMKAIHGGKAKNDKIDSEKIAMLLRGGMLPEAYAYPHQMRATRDLLRRRMYLMHHRAEALAHIVNTASQYNLPAISKKLTYAANRAGIAEGFADPSVRLSIEADLGLVDHFDEELRRLELQLSRTAKVDDPQSYYLLRSVPGIGKILALVLLYEIHDIRRFPKAGNFLSYARLVKCAHESAGKRLGTGGKKIGNAHLKWAFSEATVLLMRQLPTAKEYVGALAKKHGKGKALSILSARLGRTVYLMLKRKEPFEAERFLQL

SEQ ID NO: 383470 - protein, 331 aa, unidentified
MKINKVIGIDLSKLTVDVFIHSTKDKAVLENTPEGLGPLTEWVFSKSDHTMEETFLVYEHTGIYAEHLTHVLAKEQLYHSAISGLEIKRSLGITRGKDDAIGAQRIALYGYRLREELQADRPVNVTMRKLRTLATLRKRIVRERAGYMASLKEQRHMSNGKGHQLVPSVQTRIIETLSREIGTIELETKALIDQDPELRRLYHLILSVKGVGPVTAVSLIIHTHKSSKFKTWRKFASYCGIAPFPYRSGSSIGGRTKVSDLANKEIETLLNMCALSAIEHNPEMKLYHQKRTELGKHKMSAINIIRNKLVARIFAVVNRGTEYVDVLKYAS

SEQ ID NO: 383471 - protein, 416 aa, unidentified
MDDEVYYERCAGIDVHKNFLVVCLRIGRKTEIRTFGTLTHEIREIVAWLKENGCQMVAMESSGSYWKPLYNIFEQERLPAMVCNAYHIKNVPGRKTDVNDAQWIARCLSQGLLNPSFIPDREQRELRDMTRFRKSQIEERSRNLNRLQKFLEGANIKLGSWVSEIEGKSATALLELIIKKPDFTIDDVAKRMHRGLKSTAEELFFALEGSITPTQREFLTHVMSVIREQSAQIEKTDLMIQRSLNDNYKEAVKALSAIPGIGKISAEQILAETSTDMRRFKNQHSFSKWAGVCPGNNESAGKRKSGKTPYGNKTLKSTLTQCAQSAKKNKKSFFSAQYSRLVSHRGKNRATMAVAHSLLIAIYFVLNGCVFEDLGADYYLKFNREKKINSHVKQLSKLGVIIPEDVLRDAIYPPGA

SEQ ID NO: 383472 - protein, 345 aa, unidentified
MKITTIGIDLAKNMFQVHGVDERGKAVLKKQVKRDQMAAFFAKLPVCLIGMEACGSAHHWARKLQGFGHTVRLMAPQFVKPYVKTNKNDVADAEAICEAVGRPNMRFVPIKSDDQLDLQSLHRVRERWVMRRTAVINQIRGLLLERGITLRKGRRHVDAALPGILEDASAKLSGALRMLLAQLKLELDHLQMRIDEADALIKKTAGDNEACRRLVAIPGIGPITSTAIIAAIGNGAALKKGREFAAWPGIVPGEYTTGAKQKLLGISKRGNSYLRRLFVHGARAVLQQSAKQSSGLSAWLAQLTIRTHRNVAAVALANKLARMAWAVLAKNEAYRPPILVGAAAA

SEQ ID NO: 383473 - protein, 365 aa, unidentified
MISVASAGERIYLGMDVSRDKIAVAVLRPGEDVPAVEVISSDGEMVRRLIGKFADRSVLRCCYEAGPGGYELYRLLASAGVACDVVAPSLVPKGGSDKVKTDRRDCVRLALSHRAGMLTAIRVPSEQEEAVRDLVRTRADLIDDRKRMMQRISALLQRHGRIWRAPRWTYQHRAWLDRQSFDEPALQAALRTYLAALDARDAELAVLESQLRGCWASVDPLASMVRQLGYRGIAELTGLTLAAEVADFRRFPSAPAFMGFTGLTPSEYSSGARTRRGAITKAGPQLIRSTLIEAAWAYRHRPAIGATLRRRQAGCPEQTLARSWKAQQRLHATYTKLTRRGKIPSVAVTAVARELAGFVWAEMTS

SEQ ID NO: 383474 - protein, 409 aa, unidentified
MTTYRFYVGIDWATEAHRVVVLDAERRGLHDRTVRHEGVALETFAHWLAQDVAAGVASDVAVALEVPRGAVVDTLLARGFHVFALNPKQLDRFRDRYTVAGAKDDRRDAQVLASALATDQPAFRRLEPEDPLIVELRELSRLEDDLRQELGRLTNRLREQLHRYFPPLLQLVPAADEPWLWALLERAPTPSAAQHLPRASIRTILTRHRIRRVDADTVRALLQSPALPVAPGTVPAAQRHLAVLLPRLRLVHQQQAECATLIDGLLERLAESQEHRDVPILRSMVGVGRVVAATMLAEASRLLAARDYHGLRAQAGVAPVTRQSGRRTLVAMRRACNPRLRHAAYHWGQSAARHDPVSRAHYAQLRARGHSHARAVRGIVDRLLRVLIAMLTAGTLYDPTRRRAVADAA

SEQ ID NO: 383475 - protein, 314 aa, unidentified
MATAPPVFVGIDVAKAELVVAARPTHESWVVRNDDQGIDQLVRRLHRDVPTLVVLEATGGYERAVVAALAAGSVPLVVANPRQIRDFARATGQLAKTDRIDADTLALFAERVRPEPRPLADDATRALEALLTRRRQVLDMLTAERHRLEHALPAIRRDLNQHIRWLERRLRDVDHDLDQMIQSSPVWRAKEDLLRSAPGIGPIVSRTLIGDLPELGTLNRKQIAALVGVAPLARDSGTLKSKRLVYGGRAPVRAALYMAALVASRRNPAIRAFYQRLIAAGKPPKLALTACMRKLLTILNAMVKTETPWRSAIA

SEQ ID NO: 383476 - protein, 361 aa, unidentified
MTGTMTWVGLDVHARSTDAAAIDSMSGELTRVRFGPGVDGPLAWLGELPGPVRACYEAGPTGFGLYRAAAAEGVGMQVIAPGKTPRGPSDRVKTDRKDAELLARLLLAGSLTRVVVPPPEVEAAREMTRAHDACRRDLMNARHRVSKMLLRHGRVYPKSTTWTAGHRRWLSAQQFEEPASAMVFADLVAAVDGLASRKAAIALRLSELATDERWWATVARLRSFRGIDTLTAFSLHLELGADWKRFETAPALSAWLGLTPSLSQSGESSRQGAITKTGSMLARRLLVESAWHYSREPRLGATLANRQAGQPDHILAISNRAQQRLHRVNRRMRARGKPHNVTVVACARELACFLWAAATAD

SEQ ID NO: 383477 - protein, 403 aa, unidentified
MNNVAGIDVSKGKSMVSVLRPFGEVVAKPFSIGHTGSELKELADYLKSLDGETRVVMEHTGRYYEPVARFLHDEGVFVSAVNPKLIKDYGNNTLRKVKTDKADSRKIARYGIDNWAELRQHTPMDTIRMQLKTLNRQQSLYSKTKTMMKNNLIALLDQTYPGVNALFDSPVREDGSQKWVDFATTFWHVDCVRNMSLTAFAERYRKWCKRHGYNFSQSKAVEVHAGAQDLIAMLPKDALTKTMVRQAIDALNAISTSLERLKAEMQALAAQLPEYPVVMAMHGVGDSLGPQLMAELGDVTRFTHRNAITAFAGVDPGADQSGTHEAKSTRVSKSGAPELRRALFLVMDCLLKTQPQDDPVYRFMDKKRAEGKPYLVYMTAGANKFLRIYYGRVKEYLAQLENS

SEQ ID NO: 383478 - protein, 392 aa, unidentified
MSQHFRFDASRSLTALEQDSTIIAVIEMSQTKWLVAALVPGVERQPLKKFDAHEETLLKLLHRWRHEADKAGRNIKRIVVAFEAGRDGFWLARWLRARDIEVYVIHPTSIAVSREHRRAKTDRLDTELLMRVFLGWLRGETRHCSMVAIPTIEEEDARRPNRERQNLVAEQTRITNQLKAIFTRFGIRTLRPTMRKVAETLEDVRTAEGTPLPQNTLAELRRHLARLSVVRDQIRAVEQERLRKLAVAPAAEKKSPHAMVRLIARILGVGVETADMLINEIFSRHWRDRKAVARYAGLTGSPDESGSRRRERGLARAGNVRVRSGMIQLAWRFVRFQKNSALAQWFAARTADGRASTRKTMIVALARKLLIALWRLVTRGEVPQGVVLRPAS

SEQ ID NO: 383479 - protein, 383 aa, unidentified
MLKVLWVGLDVHALTIAVAVAMASGEVRSLGVIPNTPESVSRLIRKLGKPQQLRVCYEAGPTGYVLYWQLTKLGVHCEVVAPTLIPIKAGDRVKTDRRDAEKLARCYRAGDLTPVWVPDAAHEALRDLVRAREAAKQDQLRARNRLGKFLLRQGRRAAEGTRAWTGKYLKWIKEQVRFEQPAQEATLLDYLHEVEHAAERIQRLERSIDQAIQTVPEKMRAVIQGLQSLRGIAKISAVSIVAELGEISRFPKPSQLMGYSGAVSSEHSSGERVQRGSISKAGNAHLRRIVVEAAWSYRHRPSVGAALAARHKDLGTQYAEEVKEMAWKAQHRLHSRYSKLSAKGKTKQKVVTAVGRELLGFVWAIGTHVERAVSVKTPKRRAA

SEQ ID NO: 383480 - protein, 340 aa, unidentified
MGDITTIGLDLAKNAFQVHAVDVAGSVVLRKRLRRGQVLAFFAELPPCLIGLEACATAHHWARELIALGHETRLMPPSYVKAYVKRNKHDVADAEAIREAVRRPSMRFVPLKTAEQQSALMMHRARDLLIRQRTMLVNALRGHLAEFGLVEAQGLHKVARLIAIVMDEMDARVPDIARQVLKVIVSQIEDIQTRIAGLETQVLAWHKSNPVSQRLATIPGIGPIIATAIAATVADPSTFRSGREFAAWLGLVPRQNSTGGKARLGGISKRGDSYLRRLLVNSAHTVLLCSKVAKTDPWLTSLLSRKPRLVVAVALANKTARMAWAIMSRPDLYRHAAVTA

SEQ ID NO: 383481 - protein, 367 aa, unidentified
MKKDNTIKKSARNRKGVNRKRTVGIDLGDRSSRYCILDEQGEVLAEGSVATTQKGFAQVFGSKLRSRIALEVGTHSPWVSRHLAELGHEVIVANPRRVRLITDSSRKDDRLDAKTLARLARIDPELLSPIRHRSEQAQADLMVIRARAALVEVRTMLVNCARGLAKSYGERLRSCGTGQVREELAGSLSEPLQSALKPLLAEVESVSERIREYDEQIENLGKSRYPEIELLQQVHGVGTLTALTYVLTVDDPHRFRRSRDAGAYFGLRPRRRESGNSRPQLRITKEGDAYVRKLLVQCAHHVLGPFGPDCDLRRWGLKLAERGGKNAKKRALVAVARKLAVLLHKLWVTGEVYEPLHVRRDGKAVAA

SEQ ID NO: 383482 - protein, 337 aa, unidentified
MEYFAGLDISMKETHICVIERDGKVVYEAKAATSPGAIAAELARAPAAQRIVFETGRMATTLYHGLQALGLTVVCIESRHAYQALKSLATHKTDRNDARGLAHLARTGFYKPVHVKSLPAHAVRALIIARKKLVGQRVTLENQIRGLALVFGIRLPRGLSPAFAAQVNSASGELPALSGALRGLLAARDALLGAIAAINRDVKWQARSCEDCKRLMTIPGVGHVTALAFVAAIDEPNRFRHSRDVGPYLGLVPRRWKSGEIDYTGSISKVGDQRVRTLLYEAANVMLTRYRGDLALKEWALRIGRRSTMRKARVALARRLAIIMHAMLRDGTEFQAV

SEQ ID NO: 383483 - protein, 342 aa, unidentified
MDVEYAGQRYVGIDLHRRRSVIVQMSSEGERLGVARIDNDPFELARQVASWGESPEVVLEATYGWYWAVDVLAEAGAVVHLAHPLGVKGFAYRRVKNDVRDASDLADLLRMGRLPEAWIAPPEVRGLREAVRHRAKLVAVRSGLKAQVHAVMAKQGVRVAVSDLFGVGGQRLLDRLALDAPFAARVTSLRRLIEAFTFEIDVLAQRITADLRGHRGYQAIQAIDGVGPLLAAVFVAEIGDVTRFARPQQLCSWAGMTPRHRESDTKVHRGRITKQGNHLVRWAAVEAVQRLHSGPLGSTRTRLAERRGANIAKVAAARKLLTLVYWGLRDGHIRCLARPACL

SEQ ID NO: 383484 - protein, 343 aa, unidentified
MDHSAGLDVSVKETSVCIVDDTGRIVREVKVASEPEALLSVLTNPGYHFKRIGLEAGPLSQWLYSALAEAGLPVICVETRHMRAVLKAQINKTDRNDARGMAQMMRVGLYRPVHVKTLRSQKLRMLLTHRKLLQSKAIAIENDLRGTLRNFGLKVGMVGKVKFEARIKELVENLPDLAELVEPLLVVRRVLREQFVIQHRRLLAIVRDDEVCRRLMTVPGVGPVVALTYRATVDVPARFRNSKAVGAVFGLTCSKYQSGESERSGRISRCGDEMMRVMLYEAAQSMLLHSKKWSWLKAWAMQIARRRGMKKAIVALARRLAVIMHRIWVDGTEFRWTREAAVA

SEQ ID NO: 383485 - protein, 342 aa, unidentified
MSEIITVGLDLAKNVFQVHGADGTGRALLRKKLRRDQVLEFFGQLPACVVAMEACGGAHFWGREIGKLGHDVRLIPPAYVKPFVKRQKNDAADAEAICEAALRPTMRFVPVKSEQTQGAAMVFRVRELLIRQRTQAINSLRGHLSEFGEIVPQGAANVSRLIALVEDPECTLPADAIPTLKVLVSALTLLEAEITKLDAEITRRAKENDVARRLMTVPGIGPLIATAIATLAPPPETFCKARDFAAWLGLTPRQHSTGGKQRLGATTKMGERSLRRLLIIGANSIIIKRHTHREAQPGTWLGNLLTRKPPMLVRVALANKMARIVWALMARGGVYQSPAAVA

SEQ ID NO: 383486 - protein, 409 aa, unidentified
MAEGYIPMGLDLSKSRYQVCYFDDNNELINKQRTPEEFDDLLLDFQAKGKKLLVGFEHCSGSNKLAQKILNMQFKCKVMNTAIVSGYKKNKDDAIDALALLQKVQSPFVKSEYIRDDDNLEMRRVAQDYEHTTKYLYDKVRKANSSLIEMGYIYKNKCTLNNIGKAVASVINQEEAFNKDVSYFNNLLQTLKSTNDNIKRMQNDNILKKIREDEKCQLAFTIPGMNAISVYYAIAAIGDISRFKSPKALAAYFGLIPGHTGTGGKIEMGRIQDGGDPLFRRAIFNAAVSLLARSKRENGKYSSDFLERVKAKDKHFKQLVIAIAVKMVKVLWAVLTFEEAYDPEKGGLGPCKSVKDPRCIDKGSRLETLLNQFQIDCEITDDEALLEDETGLNFIDYSYKLEKLGIFEF

SEQ ID NO: 383487 - protein, 347 aa, unidentified
MNFYTRQHNHYCGIDLHAKAMYVCILDQSGTKLVHKNLPTTPEAFLRIIAPYREDLVVGVECIFTWYWLADLCSKEGIAFVLGHALYMKAIHGGKAKNDKIDAHKIAVLLRGGMIPQAYVYPAEMRATRDLLRRRCHLVRKRAELLAHIQNTNSQYNLPEIGKKLAYKANREGVEEHFPDPSVRKTIEMDVSLIDHYDRLLGEVELYLTRSAKAHDGQTFTRLQSVPGIGQILALVLLYEIQDISRFPRVQDFVSYCRLVKCAKESNGKRLGTSGKKIGNVHLRWAFAEAAILFLRQNQLGKEYFTKLEHKHGKAKALTVLGHKLARAVYYMLTREQPFDLQRFVSA

SEQ ID NO: 383488 - protein, 445 aa, unidentified
MFIQSQDDSHCCYSFFIKVMILLMKLKYSICCGLDVHKNVIVATIVTTNKDGISEYKQKSFSTINSDIQRFHNWLIENNCYHVCMESTGKYWIPIFNYLEHDIDVCLTHPKYVKAIKGKKTDKKDSKWIADLYKFDLVRCSFIPPKDFRQLRELSRYRFKLVCMKSSEKNRIQNCMTVSNVGIASVLSDPFGKTATEIMSYLLEHTSDSMDEHAVRKLIKKGAKAKSDEIIEAIKGYNIETDQAKKLELARAHLEYLDNMITQTEVELYVRIKPYYEFVEFVSTMPGMTELSSTIVLAETGVDMSIFDDAKHLCSWCGLSPANNESAGKKKSVRIAKAGDYLKPMMVQCALAAIKSKKQPYFAIKYGRIKKRRGHKKAIIAIARMMIVCIYHMISEKKPFSPTDYEELMDPQNHVERVVLTENNVFAYLESLGYDSSKLVKRNDN

SEQ ID NO: 383489 - protein, 429 aa, unidentified
MSYRIAGIDVHKKMLAVVVSDVEIESEYEFERRKFSSSPEQLRSLAAWLLEQEAEEVVMESTAQYWKPVWEALERYWKPLCEKREGARRKSGTLHLAQALSNRGRRGRKRDFPDAERLVKRLVARELTLSFVPEAEQRLWRTVTRKKYQLRCDRIRLQNQLESLLEEAHIKLSSLVSDLLGLSARRMLKAIAEGATNPVTLAALADERLRATPEQLCDALGACTELHAVYRRLLKMALEELRLIDEQISRLDQEMASLLSEHQDAVQRLAEVPGLGVDSAQQIIAEVGPTAATFPSEKCLSSWVGACPGDDETAGVNYSHRSPKGNRHMRRLLNQAANAAARTKGSIFELAYRRSVPRLGHNQAIGAIAHRQCRLIWLILHQGVRYEERGPAVNKRSKQLRTWRMIRQLRNLGYRIEPPNPQPSQASAQ

SEQ ID NO: 383490 - protein, 340 aa, unidentified
MTIVMGLDQHRAQITTEWLDTETGEIGRARVAPAHREGVRRFLGRFAGRELEVALEATTGWRFVVEELRRVGAGVHLAEPAQTSALRGNKKRPKSDRADAKHLRELLMIGRLPESWIPPDHLLDLRSTVRLRHTLVDQRGEWQQRIRAVLYHHGLPHRRELDLLTSEGRAWLEGVGVPDAAREQITVAVTMIDALDTQITPLDKQLRSYARRQLGCRALMGHYGIGELTSVAILAELGDCRRFSSSRQAVRYAGMDITVYQSDQHRSPGHLSRQGPPALRWAIYEAAQVARRQGSPDRGYYDQAAERLGSNRACLAIARKLLLRSYHTLRELGEEALQPA

SEQ ID NO: 383491 - protein, 391 aa, unidentified
MEARVVNNLPPAAAHDGAVRCLVAIELSKKSWVAAVNTPLSDKISHYKLKPCDWKELLQLINRIRKRVSEELKKPVEVISCYEAGYDGFWLHRLLEAQGVRNHVIDPASLQVDRRARRAKTDGIDVGKLLRSLMAYLRGEPKVWSVVRVPTVIEEDDRRLHRERSRLINERIQHVNRIKGLLAIHGIYDYEPMHPERMRRLERLRTADHHSLPVRLKAEILRELQRLELVLKMIQTIETERDAIVSAKSKPQQTTSAKKIKDLVKLKSIGPEFATVLVGEVFYRIFNNRKQIGSYVGLTPSPFQSGSTSRDQGISKAGNTKARTTMIELAWMWLRYQPDSRLSVWFRERVGNRKGRIKRIAIVAMARKLIIALWRYLETGVVPEGAVLKSK

SEQ ID NO: 383492 - protein, 370 aa, unidentified
MKNATTYVGLDAHKKDIYVAMLVGPERVPVAWQLANEPHALRRLVRKLEREAPGPVQCCYEAGPCGYALQRQLTSERVRCQVIAPALIPRKPGDHIKTNRRDARKLAELLRAGLLTEVAPPTPADEAVRDLARARDDAREDLLRARHRLSKLLLRRGVHFAGPQRAWSEPHRRWVRSLTWDHAADRRVADDYLLAIEQLEARLAELDAALQDVAQTEPYREPVAWLRCFRGIDTLTAVIIVTELHDFRRFPSARALMAYLGLVPSEHSSGEHARRGRITKAGNAFVRRVLIEAAWHYQHRPGVGRALRGRQEGQPARVIAIADRAQQRRCRRFRRLVAEHKPTPKVVVAVARELAGFIWAALQRPLPVAA

SEQ ID NO: 383493 - protein, 347 aa, unidentified
MLADQLDYVIGVDPHRDVHALAVVEVRTGGVVFEGEVAATSVGYERALELACRHADGRRAFAVEGSGSFGAGLTRFLTARGEDVFEVGRLRRERRSGGKTDALDAVRAARVVLAQERPAQPRAGGEREALRALMAARDGAVNARRAALCQLRDLIITAPEPLRNQLRPLTRGQLLKRLAAVHPTRHHDVELRGTLHALRSLARRINQLTSEAGQLEAEIASLTRQLAPHLLDQPGIGTLAAAQLLLSWSHSGRVRNEAAFARLAGCAPIPASSGQTIRYRLDRSGDRQLNRALHMILITRRRWHQPTIDYLARRRADGKTSREANRCLKRYLARNLYRLLEHPPMAS

SEQ ID NO: 383494 - protein, 343 aa, unidentified
MMSVMIGIDPHKGSHTAVVINSDEVVIDAIRVRASAGQLAELQEWAAGYPERCWAVESARGLGHLLSQQLVGAGERVLDVPAMMASRVRVLGSGKSQKNDPNDARSVAITALRHSGLKTVTADDHPRVLGLLAKRHRDVARLKNKAACRLHALLAELKAGGLASEMTVNKAVSMLSSVEVTDEVMRQRIMIATELIEDIARFDTQLKASKKRITTAVTASGTGLCDITVIGPIGAATILGSVGDINRFPTKGHFASYNATAPIEASSGNNNRHRLNPRGNRKLNHVLHVAAVCQLRYPGQGRLYYDKKLAEGKTSKEAIRALKRRISDAIYRQLRTDAPNTIN

SEQ ID NO: 383495 - protein, 309 aa, unidentified
MHIASIGIDLGKTTFHLVALGERNKVLVRKKFSRAQLLAYCANLPSSLIGLEACTGAHFMGTRLREQGHEVRLIPAQFVKPYRKSNKNDFIDGEAIAEAVTKQNMGFAQLKTEEQLDVQAMHRVRDRLVQRRTALINEIRGFLLERGITFAANPIHLRKSLAGVMEDAEQNLSPRLRWLLERLWQEWKQVEIDIQTITDEIERISKENALCRRLRQIPGFGPLVSTATVAAIGNGAAFRRGRDFAAWVGIVPRQYSTGGKQKLFGISKRGNIYLRRMLIHGARAVLLRVKYDTGGFGRWVAPACPAGTT

SEQ ID NO: 383496 - protein, 408 aa, unidentified
MEVVHRRCCGIDVHQASLAVCVSIKEEGRMEKHRLRCGTTSRELLRLCDWLREHQVTHVAMEASGVYWKPVWHVLEGQFELLLANPTQVKALRGRKTDVRDGERIADFLQHGLLQGSFVPPQPVQQLRDLTRSRTVLIQEQVRISNRILKVLEDANVKLKTVMSNVMGVSGQQMLRAIIQGQTDPAKLAELARGRWRGKIPLLEQAAQGRLNEHHRFLLQQWVAIWDELAARIAQFDLRIEEQMRPFEPVVQAWRSLPGIDRRTAQTMVAEMGPDMRQFPSAAHAASWAALCPGEQESAGKRQSGRTRRGNVWLRRALTQAAWGARVTKGSYFKTLYHRLAVRKGKKRAIVAVAHALLVTGYLVVATGRPYQDLGADYFDRIDRQRLTTRLVKRLQALGHRVTLQPAA

SEQ ID NO: 383497 - protein, 428 aa, unidentified
MMKQEAQEQQEFGAYIGLDWADRTPVISLRGTDSGKVEHYQLVHKPEALAEWVSDLQRRFPGQRVAVALEQARGAVVHALMGYDFLVLYPVNPKTLAKYREAFSPSGAKDDPTDADLLLELVTLHRDKLRAWLPDDELTRTITLLVEYRRQLVATQTSLSNRLTSLLKLYYPQALAWAGELTTVQACDFLQRWPTLAQVQRAAPAKLRQFYLAHGCRKADVIEQRLQEIKLAQPLTRDGAVISASVVMVQATTTQLRPLMEAIARMEKQIAELFRQHADHELFSSFPGAGPVLAPRLLAALGADRGRFAAATEVQQLSGIAPVMERSGKTCWVHRRWACPKFVRQSFHEFAGQSIRWSTWARAFYDQQRQRGNGHHAAVRSLAYRWIRIIYRCWQMRVPYCEETYCRALQRRQSPLARVLAAPMQNAS

SEQ ID NO: 383498 - protein, 340 aa, unidentified
MKVYTGIDLHSSNSYLGIIDETGKRVFKRKLPNDPEMILAALAPYKNDIVGIVVESTYNWYWLVDLLMAEGFTLHLANPTAIQKYSGLKYSDDQHDAFWLAEMLRLGILPEGYIYPKEDRPIRDLLRKRSHLVRLRTSLVISLQNIINRNIGFKLRGSKMMASTTDHVAPLLEYNEDLALAGKVSKDSIDFLTLQIKALEAKIEGKVVLREPYAKLITIQGVGKILGLTIMLETGPISRFDKAGNYASYCRKVSSKWISNDKGKGKGNKKNGNKYLAWAFSEAAELARRYCPEARAYYNRKMRETNTVIAHAALAHKLARAAYYIMRDQVPFMPEKLFES

SEQ ID NO: 383499 - protein, 414 aa, unidentified
MFAVGVDVSNGRSMVAVLGARRSEVVQPHEVPHTADGFAELAARLHALDGEDRIVMEHTGRYYESFAMNMYRAGFFVSAVNPLAIKGYQEGISVRKVKTDKADALKIAQFAIDKWEILPHYTPMDTIRYDLKTLHRQFQLSSKTKTALNNNLIALLEQSYPGANRYFDSPVRPDGSQKWVDFVDTFWHVDCVARVSRKAFVERYQKWCKRHGYNFSEAKAVEIHEDARQRFRLVPKSDTCKLMVREAVAQLNAVSRTVETYRAEMDRLASQLPEYETVMAMTGVGKSMGPQLIAEIGDLRRFAHQKSLVGFAGTDPIKDDSGDKVSDSKPSSKRGSPYLRRTLFVIMTILLQLQPPDDPVYQFLDKKRSEGKPYYVYMTAGMTKFLRIYYGKVRDCLKEKGLWEQPNVDEVNPV

SEQ ID NO: 383500 - protein, 430 aa, unidentified
MNVEDIIRREQFCQIKDEIPRSDDYLVVGIDVAKDKHHAFMGSSTGKSLARKLVFENNLQGFGKLLQRSETVQTQHGLGKVVFGFEPTGNYHKPLGAHLIRCGRHVVLVTGKAVKNNRELLDGRWDKNDTKDAANIADLISRAKCLYYDVGSGNINEVRQSLSLRRRLKKEEHSVRMRIRNNLLAQYFPELDGFYSACESETLAIVRWCLDPRRIAGMEFDEFFLMVTRSRRGIAQKRRLQKIHQLAVESVGCSMGPAAEFEATLLVDKLKAVREQLKQVADQMQDICLQFADYNYLLTIPGFGPYVAARVLASIANPRRFDSSNQVLKMAGYDLGANRSGKTSDQAVPVISKRGNAELRYALYQAAHVASTRNRDFICYFTRMLRGRQRERGIKTKMKVKLAAKMLKIAWTLMKKQEVFDPDYLYQGID

SEQ ID NO: 383501 - protein, 438 aa, unidentified
MSNNVIFNLDELFISVGIDVGADFSWMSIALPNQQLVGKPYKILHNCMSSLTTAVSKIKEAEELYSLESRIFLESTGIYHYPLFCYLRDKGFNCSVINPIITKNSTNINIRKVHNDRFDSKKAALVGLKPDLKVSLMPSDLALNCRNLCREYYDLMDNRSAYVNKLQGELRMAFPQYLRIFSKVTINTSLTLLETYTSPEAFINADKQEIIDLIKSTARFGLTYAENKYNAIIQAANDANEFGCIIDSNIKRIRLYISFIRKYDEEIKGILESLHNLIDANEDTDFVRQIHLIETFKGAGFLSAVSLMGEIGDFSVFSKPKQLFAYFGLDPAVKQSGKLNCTKIQMSKRGSAIARRVIHMLTLQSISTSRTGEAKNPVLREYYLKKCESKPKLVAMGAVSHKVCNMIFAILRDNKPFEIITPQEHNKQYNAAKCDIAA

SEQ ID NO: 383502 - protein, 358 aa, unidentified
MRIIGVDLHARQQTIAMLDPETGELVEKTLKHEGETVREFYSALPHPVLVGIEATGSMHWFLELLEELGIERQVGHPAEIRAAEPRKQKHDRRDAALLLKLQVENRFPSIWVPSTELRDLRALLRHRHQWVRMRTRVQNTLQAIALSHGLRRGQSLWSQAGQQAIASLPLAPHAADRRTELQALYCKLGKQIDELGERVMDQALQRPGAKLLMTHPGVGPITALATDVFLGDPARFDDGKAVASYVGMIPSEYSSGGRQRLGGLSKQGNPLLRFLWCEAGIHAVRRDPELKRFYRRKLQQKGLGKTRVAVGRKLGIRLWIMLRDQIDYQEFCRRGQMRQKSGGARAGMPEGVHSPARS

SEQ ID NO: 383503 - protein, 429 aa, unidentified
MNSLFISVGIDVGSDFSYMSLALPNQTLIGKPFKILHANINSLELAVQLIEKACEAHSLQCRVVMESTGVYHIPLYCYLRGKGFSVVVINPIISKNSANMEIRKVENDKSTSKKLALIGLKPDLKISVMPSDTVLDLRNLVREYYNLMDCRSAYVNKLRGVLKVSFPGYASIFSKLTVQTSLALLEKYPSANDFLSAKKSSVVKILTKTARFGKAYAEAKYEAIIEAAKSAGIFGHFVPSNSIQIRLCVSFIRQYNDQISNVLAAIHRLVDEHADELFVRQIRLIETIPGAGFLSAVTVICEIGDFSVFKSPKQLFAYFGIDPAVKQSGNFTGTQVKMSKRGSAVARRAIFIIAVVGIGISRNGNANNPVLRDYYLHKCKSKIKMVALGAVMHKVCNIIFAVLRDNKPFTVISNEEHIAAYQDKLASGA

SEQ ID NO: 383504 - protein, 412 aa, unidentified
MTTSTPARFVALDVHRKYLVVGAVDAGQTVVLSPRRFGFEAFNAWAPTHLLPSDVVVLEATANAWLLYDQLKPFVADVLVAHPQAVKLISAARVKTDARDTIKLASLLAANLIPAIWVPPHPVRELRALVAHRKRLVEQRTQAGNRLHGVLHRRNLVLPPGKPFAAHQREWWLTLELPASEKLRVQQDLSLYQSLEELVKGVEAELSRLSLCEPWVKQVPFLVQLPGLGILSVMSVLAAIGDITRFPSAKHLVGYAGLGASVHDSGETHRGGRITKEGRSDLRGVMVEAAWVAVEHHPHWQAQFERLAKRIGKQKAIVAVARKLLVALWHVLTEQEADTNAHIEAVTRKLMNWIAHTGTTPGKKRDRLLLLYEQLDRLGLSEEVEQVDYYGSTYRLSTKQKLIRATQHRKET

SEQ ID NO: 383505 - protein, 345 aa, unidentified
MEKLIRIGMDTSKSVFQLHGVNAAEQPVLRKKLRRKDVVKFFAKLAPTVIGIEACGGAHHWARVLGALGHTVKLIAPQLVKPYVKRGKNDAADAAALCEAMSRPTMRFVPVKSSDQQAALMLMGLRDGLVRHRTQLCNAIRGYATEFGLVAAKGLEKIEPLLARVAAAQDLPALARDLFAAQGRQYARLQEQLAEIEARLMAWHRENECSRRLAQAPGIGPIGATMLVMKTPDPRAFRSGRHFAAWIGLTPKDHSTAGKVKLGAITRAGDEALRCVLVVGAMSVIRQARQAKGRRSAWLVGLLQRKPPKLAAVALANKMARVAWKMMATGECYDAGRLSPAPKSA

SEQ ID NO: 383506 - protein, 405 aa, unidentified
MLFVGDDWAEDHHDVEVMDSAGRKLAKARLPEGVAGIARLHAMIGAQLGDGEATEVAVGIETDRGPWVAALIAAGYTVYAVNPLQAARYRERSSVSGAKSDAADAHILADMVRTDAHQLRPVAGDSPKAEAVKVVARAHKTLIWERTRHTQRLRHALREYFPAALEAFEDLDAADTLELLGKAPDPTSAAKLTLNQIRVALKRARRRDIDAKATRIQAVLRGEQLGRAAVITTAYAVTTRSAVVVLATLDEQVKILEKQVEESFGQHPDAEIILSQPGLGPILGARVLAEFGDAPGRYNDAKARKNYAATSPITRASGKRKVVLARFVHNDRLVDALMSQAFSSLQASPGARAYYDQLRAREVGHSAALRQLANRLVGILHGCLKTRTLYNEATAWSHRTEKAAA

SEQ ID NO: 383507 - protein, 368 aa, unidentified
MEVTTIGIDLAKSVFAVSGADRRGKVVMRRQLRRAQVLEFMGQRAPCLVGMEACGGAHHWARAMAKLGHEVRLLSPARVRPYRTSPNKHDRNDADAICEAVRRPDIRYVEVKSIAQQDLLALHRVRALLMKQRIAQSNQIRALLHERGVVARLGAAGLRQALTQALAAENPELSGATGELLLELSGWLRESEQRIAAITRRIERAAKDDERCARLMEIPGAGPLTASALVAMVGNAREFKSGRALSAYLGLTPRQHSSGGKTVMLGISKHGDRYLRTLLIHGARSLLYRNRRGAHPRAAWAARLCARRGPNVAAVALANHNARVLWALLTRGASYRPTPNGAVFPRVPPTVVRRAREGKLLINQSERS

SEQ ID NO: 383508 - protein, 482 aa, unidentified
MKSKAYRAASVKDVKISEIISRLAEGPTWAGLDVGKGHTMVVIRDSQGTTLRPWKVLQPDEIRVIAELLKELKQHRPLVVAMEPTGTYGDALRQALHDAGLAVHRVSPKFTSDYAETYDGVPSQHDGKDAAVVAELAAFGKSRLWPMGPPAYGDLLQDVQWMDTQQDILQLWLGRLEGLLARHWPELTNLLELNSATLLRILAEYGGPQALCADAQASDNLKRWGRALLKPEKIEAVRESARSTQGVRMEPAECDFMQRCARAAQAARKEIQQVQNVLEKRAAGDEKLQRVGQAVGMVTACVLFATVGDPTEYSCGEAYRKAMGLNLKERSSGKHVGHLKITKRGPSMSRRWLYFSALRMIQHPAVKPWYEHKKSKHQDHGGQGVVGVMRKLSLAVYAVARGATFDAARLFPGRKPTAKPGPSETRGALPPDPRNLPPSHQSRTKNGTAGASDREPAARSASVTETALGSVSTGALSSVAAK

SEQ ID NO: 383509 - protein, 352 aa, unidentified
MSIIAFDSHKRYTWARVEDENGKNVQECRIEHQRGNIVTFLRRQQPGSAVAIETIGNWYWIVDEIEKAGMRPVLVHAGKAKLMMGCINKTDKLDAKGLNMLQRVGRLPTVWIPPADIRDKRELPRVRMVFGVGRTRLKNRIHSVLDKYGLQDEFEDISDIFGVKGIQRLNRVIEQLPEQTYCTTVLLLEHLEQTQQKIDCIEGRMKELFEETPQSILVETLPGVGFILAVVIIQEVGDIGRFRSAGCLASYCGATPRVHASGGKVRYGRLRPDTNHYLKWAFSEAGNSVALNSRRLPDRHVSQLYNRIRHRRNHGKAIGAVARHLAEATYWMLTKGEAYRERGLLEVSSTGA

SEQ ID NO: 383510 - protein, 391 aa, unidentified
MAVMIGIDPHKRSNTALVLDGRETILARRRFANDSAGYRDLKAFARGWKQRTWAVEGARGVGLSLAQRLAMEGEHVLDVPAVLSARVRALGGGSGRKTDEADAYAVAVAGLRGHGLQVVKPEDDVAVLKMLSDRRQQLVEQRIAAVNRLHDVLQDLLPGGASTRLTATKAHEILAALSLSDPVGQARKQLALEHADDVAELDVKIKTMAKRIAAAVAQRPSAVTDIKGIGAIGTALILGEVGDVRRFRSKHHFASYTGTAPIDVSSGDQNRHRLNRGGNRRLNYALHIAALVQIRFPGPGQDYYARKRAEGKKPLEAMRCLKRRLSDVVFHALQQDLQRRLEAAGPEGHSGATLQSSASDPTPMVSPSDQSLTGPATKNATPRRTRVKVAG

SEQ ID NO: 383511 - protein, 338 aa, unidentified
MKAYAGIDLHSSNNYTAIIDEQDKRLFGKRLPNDLGVVLSALDPFRGKLEGVVVESTYNWYWLVDGLEDAGYKVHLANPSAIKQYEGLKHTDDKWDSFWLAHMRRLKILPEGYIYPKEERPIRDMLRRRLLFVRHRTSHILSFQSAVTRNLSYKISVKEIKKLRKSDAAKFYEEPFLKLAAKCAIATIHFLSERIKEIEKAVMSQVRLRPEFQHLQTVPGIGKILGLTIMLEVGDINRFSEVGDYSSYCRCVKSDRETNKKKKGEGNRKNGNKYLGWAYVEAANFAIRHYSEARSFYQRKKSTTNGIVGIKALSNKLARASYYVMRDQVPYDANHLFR

SEQ ID NO: 383512 - protein, 338 aa, unidentified
MKKVSVLGLDLAKQVFQVHGVDERGHRSVSKRLRRASLPGFIAQLPPCLIGMEACGSAHYWARKFQGYGHEVRLISPQFVKPYVKSQKNDANDAEAICEAVSRPHMRFVPIKTPEQQDMQAEHRARQLLVKQRTALVNQIRELLGEYGIVIAQGMTAVRKRLPEILEDADNGLNPLVRVLFARLHEQVQALDAQIADSDQAIKQAVHSDERCQRLQSMDGIGPLIATALVAAVGDAQTFSNGRQLAAWLGLVPRQHSSGGKPTLLGISKRGDRYLRTLLIHGARAVIYRVKDASSRRALWLKQMIERCGINRATVALANKMARIAWALLACGEVCRAA

SEQ ID NO: 383513 - protein, 386 aa, unidentified
MRTDVAPTPQPATVAQPATILVSLELSQKSWVITVQPPDVEKMSRHGIEAGDTEKLLSLLHHHRTRTAARTGATPHIVSIQEAGLDGFWLHRWLEAAGIESHVVDAASIAAPRRKRRAKTDGIDGETLVRTLAAWRRREPHVCSMVAVPTVEQEDRRRLSRERERLMKERIGLTNRIYGLLASQGAGAYDALKTDRWPALAALRTGDGGELPPQLAAEIRRMLVRLDLIMEQIKAVEAERDAMLAAEAAEHGPVVALLCRLYGIGPQFAAVLVLECLYRTFGNRRQLAAFAGLAPTPWRSGSINREQGISGGGNPRLRKTLIEMAWMWLRWQPGSALGQWFQQRAAGANGRTRRILAVALARKLLIALWRYVQDGVVPQGAVLKAA

SEQ ID NO: 383514 - protein, 321 aa, unidentified
MAILSFCGIDVSKDRLDVMILPEQESFSVRNDAAGWAELVARLRGFAIAAIGLEASGGYERGAMRALLAAGLTACQINPFKLRQFARASGVLAKNDPLDTRMIASFVAIMPTRPAQPRPPAIERLAEMLAVRRQLNAEKVAAENASRLLEDAMLQRLSRRRIARLAADIDMLDRHLVEIVDADATLVHRYRLLTSMPGVGLVLACTLIALLPELGTMSRKQVAALVGVAPYAFESGKFKGRRCIWGGRAPVREVLYMAAMSAGNWNPVLKAFRKRLKAAGKLPKVAIVAVMRKMITMLNAMVRDDVGWADHLHGRHTVPTA

SEQ ID NO: 383515 - protein, 389 aa, unidentified
MLLDHPSDGPTAIRTYIAAIFVSLELSRSTWLVTSLSPGKGERMSKHSVTAGNVAELLTLFAELRRKAEVRTGQSYPIITIQEAGLDGFWLHRVLQQNGIESHVVDPASIATPRRRRRAKTDRLDGETLLRALLAYKRGEPRVCAMVVAPSPEEEDRRRLCRERTTLIAERITHVNRIKGLLFSQGISDYAPLRRDRRSRLETLRTGDGRELPSHLRTQIGRELDRIELLLEQIKAVEAERDALLAAARKPASKEAAPDAVTMLLALKGMGANFAAVLWSEAFYRQFANRRQVAAYAGLAATPWQSGGIRHEQGVSKAGNPRLRTTMIQFAWLWIRHQPQSALTRWFKERSQQGRKRAIVALARKLLVALWKYVTQGVVIEGAAMKPAA

SEQ ID NO: 383516 - protein, 323 aa, unidentified
MQDLENSRHVTDGVSYIGIDVSKSCLDIFVHPAAQAYHVNNDAAAHKQLAGKLKRLGQVFVVLEATGKYHRAVHRALAAHNIAVALINPYRSRSFSQSLGQLAKTDHIDARMLALYGAMLSPEATLPVDKALEDLKELVVARRQSVADRTGVSNQLGECQSIFVKTRLKARLKQLERHIADYDKQIRLVIKQDPAMKRRFEIITSVPGLGPVNAITMIAEMPELGSCNDKQVAALTGVAPMARDSGTFKGKRRIRGGRKPVRDALYMAAVTAVRSSSAMKTFYNRLIDNGKPYKVAITAIMRKLVILVNALINKNRLWQPIAP

SEQ ID NO: 383517 - protein, 408 aa, unidentified
MNPLFVGIDVSSKNNVAYLMKPDGSKHSSFSVQNNLGGAKLLSERIVSALGSMQLERVVIGLEATSIYGDSLVYALREDGRLGRFQRKIHVLNPKQVRKFKEAYSDLPKNDWVDAFVIADHLRFGRINREVYMDDYRYKALQTLTRARFDVIQNLTREKQRFANYLFLKCSGMAQDKDIQNTSATTIALMEHFETVDDLANADLEELTAFITETGRGKFADPDATAKAVRAAAKGSYRLPKTVNDTVNQAMAVSIASMRALKGQVKVLDKAIEQQFEIIPNTLTSIPGIGKVYSAGIIAEIGDIHRFDSQASVAKYAGLVWNRSQSGDFEAEHSRMIKSGNRYLRYYLLEAANSVRRCDSEFRRYYDLKFKEVNKYQHKRALALTARKLVRLVFRLLKDNRPYIPPEG

SEQ ID NO: 383518 - protein, 341 aa, unidentified
MEQATTIGLDIAKHVFQLHGADAAGHVLFRKRITRVKLLGFLAAQTRCVVAMEACAGAHYWAREIAKLGHHVRLIAPAYVKPFIKRQKNDAADAEAIREAAQRPSMRFVPVKTEQQQANGIVFRARDLLVRQRTQCVNALRGHLMEYGYVFPKGITHVEALVALVEDLQSSLPDSVRVILKLLVDTFTALEAQIAVLDAEINQRSKSDPTARRLMTIPGVGPITSTAITALVPAAEGFPAGRDFAAWLGLTPLQKSTGGKQKLGAVSKRGERTIRRLLIIGASAVVQQASRRGAPKGSWLAQMLARKPKMLVTVALANKMARVIWALLVKGGTYRAPAVAA

SEQ ID NO: 383519 - protein, 339 aa, unidentified
MRFYVQQHRFYCGVDLHARTMCVCLLDAQGQVLVHEDIAANPNSFLQLIAPYRDGIVVGVECMYGWYWLADLCQEHKLPFVLGHALYMRAIHGAKAKNDRIDSDKIARLLRGGAFPLAYAYPKGMRETRDLLRRRMYLVRQRAALLTHVQIVGSQYNLPPLGKRLSAANRAELKIAERFHDPSVCKSVTVDLSVADHLDGVISELEACLTRTAKVDDQDTYERLRTVPGIGKVLGLVLLYEMHNVSRFETVGQFLSYARLVRCAHESAGKKLGTGGAKIGNAHLKWAFSEAVCLFLRNSARQEVEAEANTKAWRRQGHGDPGGPAGACRLPHAAEEGSV

SEQ ID NO: 383520 - protein, 346 aa, unidentified
MMLIGCDFHPSWQQVCWLDQETGETSEQKLVHASGEAEKFYKQIPAPALIGMEATGNCQWFVEMVTAAGHEVWIGDAAKIRASDVRQQKHDRRDAALLLQLLLEGRFPRIWTPSGEEKDLRQLLIHRYKLVRLRATTKNELQHLAMNQGVTKKRKLWSKAGEKLLRELPLRPWASRRREDLFKVRGMLDEQIASLDAAVVEAAEKNEKAKLLMTQPGVGPITSMAFVLTMGDVNRFPRGKQVASYLGLIPREYSSGGKQRLGSISKQGNRFMRMLMVEAAQNAVRCDPGFRSEYLHRCHTKAKGVAKVAAARKLAIRLYWMLRTNTAYPEVVRVESSTRVALVGES

SEQ ID NO: 383521 - protein, 334 aa, unidentified
MHYCGIDLASKSSNICVIDQQGKVLRERVIATEAAELNEALAGFDDLTVIIEASPLAETAARVVEDIGKKPVIIDARAAKNLMSSMKKTDRRDAKALAEIGRSGWYTEVHRKSAKARELRSILGARQTILKTSKMIRSSIQGLLRSHGIKVGQVSEGLFAERVLALCEEYAPGLKASLAAMLETWEIAVKKAKALKKAVDEMGRDDAVSQRLQSIPGIGPLISTAYQATIDDPHRFNRAEEVADYLGLAPRIYQSGEVERRGRITKEGDVLLRWHLVEGAHVLLTLGRDCALKRWGQSLEERKGPAKAKVAVARKLAILMWKLWKNEKTFIAFP

SEQ ID NO: 383522 - protein, 408 aa, unidentified
MTVFVGDDWAEAHHDICVMDELGERLAGRRLPEGLDGIRALHDLVGGLVNDPGEVVVGIETDRGLWVAALAAAGYQVYAINPMSVARYRDRHNVAGAKSDAGDAKVLADLVRTDRHNHRAIAGDSPDAEAIKVLARAHQNLIWARGRHTNRLRNALREYYPAALEAFTDLAERDTLAVLNRAPTPEVGARLTVSQIRAALKRGGRQRNLERRATEIHRALHTVQLTAPAPIAAAFGATTKAAVGIITELNRQITELETELSTHFEQHPDTEIIRSLPGLGMILGARVLGEFGDDPNRYADAKSRRNYAGTSPITVASGTKRAVLARHVRNRRLYDAIDQWAFCSLTPSPGCRAFYDQRRAKGDLHHQALRALGNRLVGILHGCLTHQTHYNEQTAWAHRQPSANQIAA

SEQ ID NO: 383523 - protein, 418 aa, unidentified
MNEEGNTRGSRRYVALDIHKHYCVMAAVDREGRVVLNPVRVEHVDLEGWLKKNLCSTDHVVIESTTNAWHVYDLLEPLVERVVVANPIKVKQIAQARVKTDIRDTLILARLLAANLVPEVWVPPAHVREMRQLLSQRRQLVETHTQIVNRMHSVAHRHHLKHERGKRFNEKNTLWQKDKQLSKTEQFQLELEMENRAYTEKQIGRIGKAVAKMSHQKPWAESMTYLMQLPGFGVITAMTVLAAIGDVQRFGSAKHLASYSGLTGGVDQSGTHLVQKSITKEGRKELRWAMVEVAQRAVKSDPRWTRKFQELHQRMHRNQAIVAVARQLLELVWYVLTRRQPYRHFSQERIAYKYLTWSWQMDEAARDGLTRQQFARYYMMRLGIGHDLTRIALNPKYPRRLASETELLALRPELNQTE

SEQ ID NO: 383524 - protein, 407 aa, unidentified
MEVIYPRCAGLDVHKQTVVACVRIAGDGPPLQEVRTFATTTSGLLALADWLDSFGVEHVGMEATGVYWKPVWHILEGHFELVLANAAHVKNVPGRKTDVNDAMWLADLLAHGLIRASFVPPTAVQELRTLTRTRKQFVRERSAHVQRIEKVLEDANLKLSVVLSDIMGKSGRAVLQAIIDGHEDPKRLASCVSMRVKASSAEVLEALRGHISAHHRFMLKLHLGHVDALDKAIAEIEKEVGLGLEPFRQAAKLLSTMPGLSDVSAHVIVAEIGIDMSRFPTPGHLLSWACMCPRNDESAGKRRSTRLRRGGKWLKTTLVQAAWSAVKVKGSYLQAQFHRLRARRGANKAIIGVAASMLTAAWHMLRNGTEWHDLGAAHFDRADAHKTALRLIRRLQQIGYAVQVTPA

SEQ ID NO: 383525 - protein, 407 aa, unidentified
MEVLHPRCAGLDVHKNTVVACVRLIQGRKVSRETRTFGTTTSELLRLLEWLQKERVTQVAMEATGVYWKPVWHVLESSCALVLANARQIKRVPGRKSDVTDAEWIADLAAHGLIHGSFVPPAPIQALRDLTRTRKQLTRQRTQHIQRLQKVLEDANVKLDSVVSDLLGQSGRDMLEALASGESDPRWIARLAHPRLRASQAELEEALRGRVTDHHRFLIRLHLGQIDAADAAIRTLERHLEEELAPFRAHYERLQSIPGVSETVAAVILAEVGPDLSAFPQARNLLAWAGLSPGLDQSGPKQKNTRTRRRKWLKTTLVQAAWAAVKTKDSYYRAQYHRLKARRGSKKAIVAVAASMLTAAYHMIKNGTEYRELGADYFQGRDKQLLAKQLVRRLRRIGYDVEFRAAA

SEQ ID NO: 383526 - protein, 347 aa, unidentified
MTKIIRIGMDTSKQIFQLHGVGETEQVVVRRKLKRRQVLEFFGKLAPTAVGMEACGGSHYWARELRRLGHEVKLIAPQLVKPYVSRGKNDAADAEALCEAMSRPKMRFVPVKSAESQAALMLAGLRDRLVRNRTQLANAIRGYAAEFGLVAAKGKAKLEPLLLRLQTDETVPALAREMFAAHAKEYAQLEAQLAAIEAKLMAWHRANPVSRNLARIPGVGPVIASLLVMKTPDPHAFRSGRHFAAWLGLTPKDHSTAGKLRLGVITRAGDEILRSLLVVGATAVVWQVRRGTGRNPSPWLVELLKRKPPKLAAVALANKIARVAWKLMTTGEIYDANRALTATPAAA

SEQ ID NO: 383527 - protein, 316 aa, unidentified
MTEAGGFVGIDVAKAELEVVVRPSGARWTVTNNAAGLAQLQERLQASAPSLIVLEATGGYEVAVVAVLATAALPVVVLNARQVRDFARATGRLAKTDAIDAGVLAHFAEVVRPPVRPLPDAMTQSLQAWLMRRRQLVEMLLAEEQRRSRAPRPIQRQIDQHVRWLRAQLGAVEKDLAQTLRASPVWREKDDLLRSVPGVGPVLTTTLLGDVPELGQLNRKQIAALIGVAPLNRDSGTYRGRRAVWGGRARVRATLYMATLTAARYNPVIRAFYERLVAAGKPKKVALTACMRKLLTILNALIARRTAWKPPAAVSA

SEQ ID NO: 383528 - protein, 387 aa, unidentified
MPQPNDLSRSLVALDQNSTIIAVIEMSQSSWLVAGMLPGIERQPRKKLEPSPERLLGLLHRWQDEAVRAGRTITRIAVAFEAGRDGFWLARWLAARGVEAHVIHASSIAVSREHRRAKTDRLDTELLKRGFLGWLRGERGHCSMAHVPTIAEEDAKRPNRERDSLVGERTRIVNRIKSTLARLGIRDFKPTLRKAAERLATVHTPEGMPLPPNTLAELQRDMARLGFVVSQIREIEEARRKRLEQQHETGPHAMVRRLARIVGVGIETADMLVHELLSRPMRDRRAVARYAGLTGSPDESGARRREQGLARAGNARVRRAMIQLAWRFLMFQKESALALWYRARTADSRSGTRKTMIVALARKLIIALWRFVTTGEPLEGVVLRPAS

SEQ ID NO: 383529 - protein, 364 aa, unidentified
MCILYENGSKIESVFGVLTPELDKLRDLLVSHHVCEVALESTSIYWIPIWNILSVDFSLKLVNPYFIKQLPGRKSDVKDAEWIATVLQKGLIRGSYVPDCMIQCLRQYERRNHELSKNIVHAEQRMDMILQHCNIRISNYVSCISCKGYQKVVNAIISGESNPKVLVTLIHKRTLNKHGRQVVEDSLNGFVSDTDRDILRQYRDERMQMEQHKSENKAKMQAICEAHYCEELELLQTLPGIKEESAANIIAEIGVDMKMFLTASAIVGWAGLKPRNDQSAGKIKSRKITHGNKYLRKILVEAAWSAARTKDSRFMKMYQRLLARGKSKQKALIAVARKLLVLIWNMLSKKEAFNPEYKRRIQAA

SEQ ID NO: 383530 - protein, 346 aa, unidentified
MNSVGIDLHRKRSFIAVIDDQGELALSRRIVNDRETFLELLGGLEGESRIAVEATYGWEWLAELLEDAGYDMHLAHPLRTRAIAAARVKTDAVDAKTLAHLLRADLLPEAYIAPRELRDTRELLRHRAALVAMRSALKNRVHAILAKHGVHHEHADLFGKAGRRFLADLPLREAARRRLGSLLSLIDDFDREIATTTKEIDQHAKVDERVALLCQIRGVGRYTAMLIIAEVGDIRRFPTARHLCAWAGLTPTVRSSDRKTRLGRITKQGSHLLRWALVEAAQKTPTGGGPLRQQYERIAKRRGAKVARVAIAREILTLSYYGLRDGEIRRLNPPAPASPMKVSAAA

SEQ ID NO: 383531 - protein, 334 aa, unidentified
MENIALIGIDLGKNSFHIHCQDHRGKAVYRKKFTRPKLIEFLATCPATTIAMEACGGSHFMARKLEELGHFPKLISPQFVRPFVKSNKNDFVDAEAICEAASRPSMRFVQPRTESQQAMRALHRVRESLVQDKGKTTNQMHAFLLEFGISVPRGAAVISRLSTLLEDSSLPLYLSQLLLKLQQHYHYLVEQIKDLESQLKRKLDEDEVGQRLLRIPCVGTLTASTISTEIGAGKQYASSRDFAAATGLVPRQYSTGGRTTLLGISKRGNKKIRTLLVQCARVFIQKLEHQSGKLADWVRELLCRKSNFVVTCALANKLARIAWALTARQQTYEA

SEQ ID NO: 383532 - protein, 342 aa, unidentified
MDEYDGRQFVGIDLHRQRSVIVRQSESGEQLSAVRIHNDPLALQLELERAGTDPEVVLEATYGWYWAVDVLQAGGAHVHLAHPLGVKGFRYRRVKNDVRDAGDLADLLRMGRLPEAWIAPPQTRELRELVRYRAKLVAIRSGLKAQIHAVLAKAGVLIAVSDLFGVGGRQRLAEVALGGAYAERVRSVLELIDVLDGHEAQFAEMIAKRLDAHRGYQAIQQVPGIGPVLAAVFVAEIGDVNRFGDPAHLCSWAGLTPRHRESDTVVHRGHITKQGSKLVRWAAIEAVQRHQTTAKIVADKDRIEARRGKNIAKVAAARKLLTLVYYGLRDGHIRALDRARAV

SEQ ID NO: 383533 - protein, 282 aa, unidentified
MQGKVLPNRSATMEVYVGIDVCKDRLDIYLHPLGQSLRVANAKVGLRALKRQLAPVTVVRIVMEATGKYHRQAFRTLSAAGFAVCVINPLRARLFAEARGTLAKTDAIDARILAILGESLMPEARAPAPESLEALQELVHARAAATAEATALINRSKASATAFLKAELRRRIRALEGHIARLEAEIARHIAADPLLARRYAILQSIPGIGKVAASTLIVDLAEIGHASRRAVALLAGLAPIACDSGDTSGQRHIKGGRAIVRQALYMAAVAAARCNPDLAAF

SEQ ID NO: 383534 - protein, 339 aa, unidentified
MKLYGGIDLHSNNSYIVLMDSGGTVIQRSRVGNEIGLVLRSLAPYREQIDSLVVESTYNWYWLVDGLKAAGYAVKLANPSAMQQYQGLKYSDDRSDARWLAEMLRLGIVPTGYIYPEAQRPLRDLLRQRSFLVRQGTGQLLHTGNILCRNQGRKSSRQQIRQMTVADAQQLFPDRERTLAVESSLRVIEVLEQQIASIEKQVLSRIKPEAGFQNLQTVYGIGPILAMTIWLETGDIGRFHQVGDYASYCRCVASTRISNAKKKGENNSHNGNPYLAWAYVEAATYAARFYRQAARFVERKTAQVNRTLAIKALAHKLARACYYVLRDDVVFEPTRLLGS

SEQ ID NO: 383535 - protein, 456 aa, unidentified
MAKKGKQHTPTPEDMPLIHPHAAGIDVGAEEHWVCVPADRDAQPIQKFSAFTCDLHRLADWLKACGITTVAMESTGVYWIPLFQILETRGFEVALVNARHVKNVPGRPKTDRFDCRWLQKLHSSGLLAPSFRPPEDVCRLRSLLRHRDNLVHLSVKHIQHMQKSLDQMNLHLHHVISDVTGVTGMRIIRAIVAGERDPRTLATFRDYRIKSSEDTIAKALEGDYRPEHIFTLTQSLALYDFTQQQIAACDQEIERVLDTFASLIDPETHPLPPPTTAHRQPQRNEPAFDLRTHLYRITGVDITQVPGLQALTIHTVLSEIGLDMSKWPTDKHFASWLGLCPDNQISGGKVLSTGSRRVQNRASRALRMAAQSLRTSPRYLGAFYRRLRSKLGPAKATTATAHKLAKIIYHMLQEKTPYRTQSAEAYLQKDQARRLRQLRKQATQLGFDLIPQASNA

SEQ ID NO: 383536 - protein, 350 aa, unidentified
MQQFIGCDAHKRFSVFVAVDERGNATRPVRIEHVREDYAHFLSRLPEKSEIAIESTGHWYWLVDEMERAGHRVHLANPMEAKKRMGKTHKTDALDAKGLAILLRNGTLPESWIPPGALRDKRELLRTRMALRDLRSSLKHRIHAAVDRYGLHTDAITDLFGTKGREYLASRLAEFPPETARMLEVQLCALDELAAHIETIEQRIHTEIAPTPEVQLLLSVPGVGEILAPVIGLEIGDVNRFPRAENLASYAGLVPRVFSSGGHTRLGGISRFVNQYLKWAFVEAANCAVRLKSHRHSHVGCLYQRLLAKRGHGRAIVAVARHLAEASYWILRKQQPYRAPHQNRISSRNG

SEQ ID NO: 383537 - protein, 414 aa, unidentified
MKSARNTLPTEPAHGVTGGIDWACDDHAVSIVDHRGREIVRSTIEHNAAGLRKLLAVLERAGVAEVAIERPDGPVVDTLLNAGITVVVISPNQLKNLRGRYGSAGNKDDRFDAFVLADTLRTDRARLHPLLPDTAATVTLRQTCRARKDLVAHRVAVANQLRAHLKIVFPGAVGLFAALDSPISLAFLTRFPCQDRVDRLSANRLAAWLASLGYSGRTDPAVLYRRLTSAPRGTAGTDGTATTGAFVAVLTALAAQIKALDDEIADQLARHADAHIFTSLPRSGTVRAARLLSEIGDCRARFPTPEALACLAGVAPSTHQSGRVKHVGFRWAADKQLRDAVTDFAGDSRRANPWAADLYNRAIARGHDHPHAVRILARAWLYVIWHCWQDGNPYDPAKHRALQTLLERPQPEAA

SEQ ID NO: 383538 - protein, 425 aa, unidentified
MKRTQNEKILQIKNETLVVGIDIAKKFQFARAFDNRGLELGKLLRFENSAQGFANLDAWLQRIMQRNGMTEVIVGFEPTGHYWFNLGDHLVACGHKLAIVNPFHVKCARELDDNSPSKSDRKDPKTIAMLVKDGRYRDVYIPVGAYQELRELVCERERLQERLSALKNQIIRWMDIYFPEFTTVFKDWSKQAAWLALRHFSTPQNMVEAGPQEILSTWREEMKRPSLKRAERLCLVASQSVGRKEGTVAAISSLRFIMTEYELITMRLEQLKEEMAECLSQIPNAYRLLSIKGMGVVAVAIIISEIGDISRFTDPRQLIKYAGLNLRENSSGKYKGKTTISKRGRRRLRLGLFQAMIPILATNAEFRALHKHNTTRSQNPLTKMQSLIALCGKLLRVTFALLTKDIAYDPEKLALETTTDTVHAA

SEQ ID NO: 383539 - protein, 368 aa, unidentified
MEKSITYVGLDVHKNSIAVAFADEYGAEIRSYGTIGPDPESLDKVARRLVSQGKEPRFVYEAGPCGYKIYRHLRQQKFECMVAAPSLIPKKSGDRIKNDRRDAMMLARLYRSGELTPVRVPSAEDEAMRDLSRARGDAKKAERKARQQLGAFLLRHGFRYSGLSHWSLSHWRWISDIKMDHEAQQFTLQEYVDTVRSCTERVDRITEQIRLLVGKWRLGPVVEAFQALRGVSLVVASTVVAELGDLTRFDTPRQVMAYLGLIPSQHSSGDKIKLGPITKTGNGHARQMLTEAAWSYRMPARVSRRLRDRQQNLPEKVWQIAWKAQVRLCARYSRLLARGKPSQLVITAIARELAAFMWAIARTVEISA

SEQ ID NO: 383540 - protein, 320 aa, unidentified
MNVIGLDISKDTIDVCLDPTKGDKSYLKIENSINGCRVLQDWIKTKKVRKFLVAMEATGIYYEQAADYLSRHAPVYVINPLKIKEYAKSVFCHTKTDRADSALIADYAKRHSDRLNTYTIPHDRQLQRLINLQLQLKEQIKQAKNRLHASQDDFIADTHKAIICFLDAKLDQTASELDSLIKQQNALTRHFENIKTIPAIGKETALMLLHHLMAKPFQTANKFISFAGLSPKIEQSGTSVDRKRKNKYGHKKLKQSLFMPALVAFRMGAFPQFVKNLQESGTRKMVIIVAIMRNLAKLAYYIFKSGQPYDKSRHQAASHN

SEQ ID NO: 383541 - protein, 309 aa, unidentified
MKEELVYVGVDIAKAYLDTAMGNEKRRFSNDALGHRQLINWIKQMPASVQVICEPSGGYERALVRALVGAQLKISLVPANRVRQFARAKGILAKTDRIDAKLLCAFGEAMQPGTISASQLEQQHLRELESQRRHLTHLLVMEQNRAARMSDLCVCKMNRRLITQIKKQIEQLDLLIKGHIDQSHELSAKAAKLTAISGVGARTAALLLAQLPELGELNRREIAALVGVAPFNRDSGRMRGKRAIYGGRKPVRHGLYMAALVAAHHNPILRNFYLRLRAAGKPAKLALTATMRKLLIVLNSALKPDLSYA

SEQ ID NO: 383542 - protein, 351 aa, unidentified
MKEYIAFDSHKHYTLMEREDRQTARTVQLRVAHQPGAIRACLGNCESGTDVAVEATGNWYWIVSEIEQAGLKPQLVHPRKAKLMMGLINKTDKLDVHGLNRLQRNGTLPTVWIPPAELRDQRELTRTRLVLVAQRTRLKNRLQSTLAKYGLAVRDCSDAFGTGARSQWPELLARLPEQTQWVSQQLLKQLDVLEEQIGQCEKRLSHLLKITPQIERLKSLPGVGLILGASIAFEIGEVSRFPSAEHLASYAGTTPRVHSSGDKLRFGRLRPDINRYLRWAFVEAANVVALHHERRPERHVSYLYWRLKQRKGHAKAIGAVARHLAEATFHILSRQEDYVDPALRKGRSKPV

SEQ ID NO: 383543 - protein, 461 aa, unidentified
MKQEGRKKKGVPRKGGSGSFPIINNDAAGIDIGSEEHWVAVPEDRDENPVRPFGCFTADLHAMASWLKECGVTTVAMESTGVYWIPPFQVLEEHGLEVKLVNARHVKNVPGRKSDVSDCQWLQRLHTYGLLSGSFRPDDQICVLRSYWRHRANLVRYASDHIQHMQKALTQMNLHLHKVLSDVTGVTGMNIIRSIIAGERNPQKLALMREPGVKNTSETIAKALEGDYRQEHLFALKQAVELYDFYRRQIEACDREIERYLHTFEAKVDPAQNPLPQQKRKKEMRGQYFTDLRTELYRVSGVDFTQIPGLDVVAVQTILSEIGLDSGKLPTEKRFVSWLGLCPNNRITGGQVKSSKTRKTVNRAANAFRMAAQALANSNTGLGGFYRRIRARLGSPKAITATAHKLARIFYRMWTTGQAYADLGSDYYENRYKERVLRNIAKRARELGYEAVLQPIGQRVA

SEQ ID NO: 383544 - protein, 373 aa, unidentified
MPKYSTAFGMDVHLRSTTVCALDADTGEAVTRRFPGNPWGEIAGWMDGFPGPSLAAYESGYLGFAPQRELAGLGVECVVAAVSKIPRPAADSASKNDRNDAARMAKAILAHDISPVWVPSPEVEGIRDLAGAYDGATARLATAKQRLLAFLAKRGFVYGGTTPAGNPRKYWTYDFLRWLDKVRPEDDGGVRTLAALRNEVEAAAEARADLLSEYRAAVDASPIAAEVAALQSIKGCAFALAAAFSAEVGDFTRFRSGRQVTAYFGLAPSQRSSGDSVRLGGISGAGNALVRKLAVEGSWCYAAARHQPKLMPRDTGVPLEIRMHGRKGSERLLRRREEMLARGMPAAKANAATAAELVRWLWALGMMCREGAE

SEQ ID NO: 383545 - protein, 353 aa, unidentified
MSKILAIDLGKNNSAVCIFDRSSLKCKYKTLRTRKQVMHDLFVDFADQIEIVLFETGSQMGWVADILWALDIPFKAANTNHAAWKWKNNPNKSDRKDAQRLAMMYHTGFFPTVHVPKREVRQKRSLINYRDDVVKRITKIKNSIRAILGREDIHLPSGKKGWTIKALRSIREMAIPLKNIDEKGGLWKGHLYSELDQLDNTIEDLKAVESKLNALGEADEKIKLLRTIQGVGPRLSEAVVAIIDDPHRFKNGRHVSSYVGMVPRRWQSGQVDITGRISKCGNKLLRTLLVEVSWLGLREPWMREIYNKIKRGDKKRSKVAIVALARKLLVICWAMLKNGTTFDVDYAKRFAKC

SEQ ID NO: 383546 - protein, 344 aa, unidentified
MGEVSTIGLDIAKSVFQVHGVDVDGAVVIRKRLSRTKMLEFFAGLPPCLIGIEACPSSHHWGRALRELGHTVRLMPPSYVKAYLKRSKNDANDAAAICEAVTRPSMRFVPIKTKQQQTVLMLHRTRQLLVRQRTMLSNALRGHLAELGVVSAKGRNGTAELLRIIADSTDNRVPASARGILDALARQYSAIGVEIGSIDRSILVWHRSCEASRRLAGIPGVGPIVATALIAEIGDWKEFASGRNLAAWIGLVPKQHTTGGKDRLGSITKQGNRYLRWLLVVGATAVIRYAQKHGTKNRPWLGRLMGRRPTKVAAVALANKIARVAWAIMVRGDTYKEPKLVMAA

SEQ ID NO: 383547 - protein, 466 aa, unidentified
MENNYILYVGMDASKGKADAAILKVCDRRSVKPKFLRKKLSFKFVKSEVTSFLDTVRSYSDDNCTSICFALEVTGIYSTNVYNFIKANLNDNESIRFLNTDFVNQWRKAHNIAKSDPLDAQTISTIIGTDSDVQYVNDNVFENKNGYQDLKALIHRHYQIKKIYSQEINRLIAQCDCLFPELQYVFEPKSAAFIAVLSSYPTTHDIINASKFEVFNVVYEATKHRCSMDKIDKLFDLCRDTLVPDDISSYGRNIILDLVENIKNIKGQLKAIQRYIEDVVSLNPAYKLLLTMTGCGPITAATVIAETGDISRFKNADCFVSYSGSSPRNKRSGTSVETMGKISKKGSRYLRHAIYMIAEFARRHNPVLRHQFERIKNGNKKRHKLANIAIANKIARYIYSIMKNKSSFVILHEHIMRLPEETRDTFFNSISLDFPKNTRKQIYQYSDINGEVHKFVYIKSEDTMIV

SEQ ID NO: 383548 - protein, 391 aa, unidentified
MVCVGIDVAKDKHDCCILDSEGTTLVDCFTIPNNMDGFKSLLQTIQDCSQKSDKIKVGLEATGHYSYNIRGFLLDNDLPVYVMNPLHTNLYRKSLSLRKTKTDRVDAKTIATMLLSDVDLKSYTDTAYHNEELKSLTRYRFDKVQERAKLKQSVSRLVTILFPELEKLVSSIHGTSIYALLSEYPSAKQISEAHLTRLANILVKTSRGHYRKDKATHIRDAARTSIGSVMPAKSLELKHTIKLIQELTSEINEIEDAIRKIMDELKPPILSIPGMGFYSAAMILAEVGDFSNFNSPDKVLAYAGCSPSTYQSGKLTNCYAHMEKRGSRYLRYALYTATKYVCYWNPVFTEYLTKKQAEGKHYNVALSHATKKLVRLIYALQKSGKAYLAVT

SEQ ID NO: 383549 - protein, 416 aa, unidentified
MMFIGDDWAEDHHDVEIEGDDGRRLARARLPEGLEGISRLHTLVAEHAPAAWAELTPEQAAGRVVIGIETDRGPWVAALRAAGYQVFAINPLSAARYRERHSTSGAKSDAGDAHVLAEIVRLDRDHHRPVAGDSDLADAVKLLARAHQSAIWERTRHVLRLRSALLEFFPAVIAAFEDLAAEDALWVLGRAPDPTHAAKLTRSQLVTALRAARRHHVEAKADALLIALRAPGLRQSPALEGAYAAIVVGQVGVITALNEQIAQLQEVVAEHFGRHPDAEIYLSQPGLGAVLAPRVLGEFGDDKKRFIDARARKNYSGQSPITRASGKKSIVLARYATNRRLGAALHLQAYSALGASPGARSYYEALRGRNIGHHAALRQLANRLVGILHGCLKSGTLYSEGAAWSHQHADPARIAA

SEQ ID NO: 383550 - protein, 367 aa, unidentified
MRKIAYIGVDYHINSLSIAVMLEGEKDFLENVSLRNEYKVIRKYLQKLDKEYDLRVCYEASCSGYVFQRKVNSWGFHCDVIAPSLVPNKPGDRRKNDFRDAKKLARNYCNGDLTIVSPPNEEQESVRSLSRCRLALKDGVKRTKNQINSFLLAHDERWMRSNWTHAHRSWLSKIKFSNPHLQTVMDENMGLLEYLESRVKHVEQQIQDLACSEVYAPSVRKLCALRGIGPLSAMLLITEITDFRRFASPKALMAFLGLIPSEDSSGDKTKGKSITKAGNPRCRTQLVESVQHYSRRAVIGPSMKKNLAQVDAHSANIAVKCMNRLHKRYWALIMKGKIRQVAMTAVARELVGFIWAMMNTDPVASPA

SEQ ID NO: 383551 - protein, 405 aa, unidentified
MFVGIDWASQTHAVCVLDDAGTKHANFQVGHTADGLDQLIARLGRLGDPATLPVAIERPDGRLVDRLLEAGHPVVAVQPNAIKAWRDAEILSGAKNDPGDAHLLAEYLRLRRHRLRVLAPFSAETRALRAVVRTRGDLVDQRVATANQLGACLEAFWPGAKGIFADLATPIALDFLARYPTPESAANLGERRMAAFLTKHGYCGRRPPAQLLTRLRAAPPGLCGTVEVEARRDAVLALVGVLRALLAAIKDLDRSVVAHLGEHPDAESFTSLPRSGRINAAQVLAEWGDCRPAYADAEAVACLAGATPVTKQSGKHTAVSFRWACNKRFRQAICTFADNSRHASPWAAKVYADALARGHDHPHAVRVLARAWIRVIWRCWIDQTPYDPAKHGAAHKLTEMATTAA

SEQ ID NO: 383552 - protein, 384 aa, unidentified
MHKHNILFIGFDTHKTFTEVAHIEDFYGAKPIHHGKIKTTKAAITKLARQYQSKYPQATLHFVYEAGPCGYWIYRLLTSLGHCCYVVAPSLIPKKSGDKVKTDKRDALKLAKLLKSEDLTPIYVPEPEDEAIRDLSRARETAMKDLKDAKYQLKGLFLRNNITCKVNDNWSHQHLRWLTELVLPHPSQQIVLQEMIQTITERIKRVERLVNELTHQAKQWRYYPVVQALQSMRGIRFLVAIGTIAELGDLRRFDHPRKLMAYLGLVPKENSSGDNRKQGAITKCGNSRARRLLIEGAQTYKHKANISTEIQKRQEGLPKAVTDIAWQAQLRLCRRYQRLMQRGKHRNVVVAAIAREMIAFIWAISREVVLTPVDPNTRLSRVPA

SEQ ID NO: 383553 - protein, 348 aa, unidentified
MRFYTKQHKFYCGIDLHARTMYLCILDQEGKIVLHRDIKSRPDIFLKTIEPYRDDIVVAVECIFTWYWIADLCAEKNIPFVLGHALYMKAIHGGKAKNDKIDAYKIATLLRGGMLPLAYVYPSEMRATRDLLRRRTHLARKRAELIAHIQTTNHQYNFPDMGRISRKCDRNKHSVSDRFTDPSVQKSIELDISLIEHYDKLPSRLEHELSLTAKVHDADSYFRLRSIPGIGRVLGLTILYEIHDINRFPSVQEFVSYCRLVKSARESAGKISGSSGKKIGNAHLKWAFSEAAVLFLRRNPEALRYRAKLERKHGKATSLSILAHKLARAVYNILKRKEVFHPETFFAQ

SEQ ID NO: 383554 - protein, 322 aa, unidentified
MNCIGVDIGSQEHVAYFPDRQETFRFSNTNSGFAAFQQKLTSHAEQEKLLVVMEATGVYHQRLAQYLHHEQVQVVVLNPAQVKYYAKSQLRRSKTDPVDARIISEYASRHDLKSWVPLTTARQHLQQACTAREAVLKTQQQLQNVLHALQQQAEPCGAVLEVLTQLRQQLQEAQEVLEDGVQQTLESQAELQEEVQLLQSVPGIGPVVSVQLLANTGSLGRFSCSAALVCFAGMDVRMRQSGKHEAGRHLSKVGHASLRKAAYQAALGAIRSKSRLGEYYRGLRLRGKPGKVALCALARKILRIAFAVVKQGKPFDPAYPGP

SEQ ID NO: 383555 - protein, 347 aa, unidentified
MKAPQYYVGIDIASASFTCSVGKMEGRWQIVVRPASFANEYDSFSAYLNWLHDHGVKPDNSVICMEATGVYNEVLAHFLCANGYTVAIEPPLKVKRAFKPEGHKSDPVDSTQIAEYAYRFWDELSQWTPRKEILEQIKTLLTTREQFVVERSGHQNALQALKRKQVRTLMAEKMHEKAIEELKRHVQEIEAEIQHLIDQDPDLRNLAALLISIPGVGALLAAHMLLLFKSAPEPYNPKSLAAFIGICPYESSSGTSVRGPSTSRHYGPPALRKLLHLAAMSIATHQQQFRLYYLRKVKEGKPKQLVINNLANKLIKIMVAVARTRTKFIPNYCSVNPALLKMALTKS

SEQ ID NO: 383556 - protein, 351 aa, unidentified
MRFHQSTTEFNCGIDLHARCMYVCVVDRQGAKRLHQNIQHNDFAFFLKKIKPFQHDLTVTAECMFGWYWLADACARESIPFVLAHALYLRCIHGGKNKDDRIDSEKLARLLAGHLIPPAYVYPAAKRPVRALLRQRLTYVWRRAELLMRIQSMQLAEGHEPVPRGARNRDPWEARLIERYPNPHHQLALQTDLKTIRHYDRMILDLEGQLVRTTRRIASRDYALLQTVPGIGQALALTILYEVDDIHRFHSVQRFSSYCRLVKGTVASAGKIKGLRGAKLGNPYLRWAIGEAAVLGRRHCPLIAAWHEQLCQQKGKFKANAIVANQLGRALYFMLTNGTAFDVELLVGRPT

SEQ ID NO: 383557 - protein, 406 aa, unidentified
MELVPIHKRVIGLDIHQAQVTACAIIEESGGETRLEQRQFGAFKRDRRELAVWAAALAPDEVVMESTGIYWKSPYAALEAVGIRATVVNARHVKQVPGRKTDVGDAQWLATLARAGLLRGSFVPPAQLRELRLIARQRQKLVGLLSSEKNRMHKVLTDAGIRLGVVVSDIHGQSARAMIKGILRGQAPHEVLQLASRRLKASREELHDALQGELTASHVFVLDELLRHIEELEARIARFDARLLAELASEHNALALLQTLPGVDLIGAAMLLVEIGSDMSVFGTSDRLASWVGLCPGNNESAGKRKSGRVRKGNPYVRRLLCEFAHAASRTKSAFQAKFQSLIVRRGHKRAIVALAHKMLRTIFFMLKRGEHYRDSATNYEQLSVQRNASRWIKALTRFGFIPAAA

SEQ ID NO: 383558 - protein, 456 aa, unidentified
MGHARARKIPAQLVEDEDYQLRCERVAGIDIAKAKADVCTRLPPAREGGRRASRVEEVPATAREILALAARLVADRAELVVMESTSDYWRIWFYLLEAAGLSVQLVSSSQARQLAGRPKTDRLDAQWIARLAEMGLLRPSFVPPPEIRALRDLTRTRLQLVRDRTREWQRLEKLLEGIPVKLSSVVHSLARTETARVILAAIAGGGTSPKALAALADYRVRGGRAAVEESLEGMTLAACHPVLIRVHLDHITLLDRQVSAIEDEIEAALGAIPGAWGISAGGVPSPDPGPGAAVLPAAERLAEIPGVSRKLAMAIIAETGLDMTRFPAAAHLVSWAGLAPAARQSGPRNRKPAKGQGDSCLKGYCTQAATGAAGTGTFLGERLRRLSRRIGGTRARCAVGRSILVIIWHLLASPEARYADLGPDWHERKADHDRKTRAHLRGLQALGYDVTITPAA

SEQ ID NO: 383559 - protein, 396 aa, unidentified
MPLQLVMWEEHVHKPTTTIAGSARLGEQVDVVIGVDTHTDTLSACLVNPVGAVLAEITEPANPVGYRRLLTWSAKEQAKHGCPRLVWAVEGTRSHGAGVTRALRSAGQLVVEATRPPRAARRPGGKSDPKDAVHAARAALANTHHAEPRADGPREALRMLLGVRSAALTARTDAINELKALIMQAPDKLRGRLRGLTSSAQIAACRRLRVPATPDPEAVRHDPQVVLVDAETRARLACMRRLARRIGDLTIEIDDAADEILSLVEALDPGLLAEVGVGPITAAQILISWSHAGRLRSEAAFAALAGVSPLDASSGAQQRHRLNRHGDRALNSALHTIAVTRERCDPRTKAYIQRRVSEGKTRREARRMLKRYLARHIYRHLERAASVPTDGALLAA

SEQ ID NO: 383560 - protein, 388 aa, unidentified
MVAILRPFGEIVSTPFEVKHTVSGIRSLIGHIKAIDGESRIVMEHTGRYYEPLVRELSQADLFVSAVNPKLIKDFGDNSLRKVKSDKADAVKIARYTLDSWTELRQYSLMDEIRNQLKTMNRQFDFYMKHKTAMKNNLIGVLDQTYPGANTYFDSPAREDGSQKWVDFATTYWHVDCVRKLSLNAFINHYQKWCKRRKYNFSQSKAVEIYEASKEIVSVLPKDDLTKLIIKQAVEQLNMASQTVEQLRTMMNDAASKLPEYPVVMAMKGVGKSLGPQLMAEIGDVSRFTHKGAITAFAGVDPGVNESGSYEQKSVPASKRGSGTLRKTLFQVMDALIKTKPQDDPVYLFMDKKRSQGKPYYVYMTAGANKFLRIYYGRVKEYLSSLPK

SEQ ID NO: 383561 - protein, 317 aa, unidentified
MEVTPIFVGIDVSKAQLDVAIRPTGHRESVANDKAGIKALVKRLGKVGPAWIVLEASGGFERQVMHALVCAELPAVVVNPRQVRDFAKATGQLAKTDRIDAEMLARFGEAVRPALRPLPDTVTVELRALITRRRQITEMIVAERNRLAMASKAVTKRINAHIGWLESELEQVDKDLDRTIRHSPIWKLNEDLLRSVPGIGPVTSRVLLAELPELGKLNRKQISALVGVAPFNRDSGTLKGRRCIWGGRASVRAALYMAAWVAARRNSVIRKFYTRLISAGKERKVALVACMHKLLTILNSMIKHKTRWSEKISLQTT

SEQ ID NO: 383562 - protein, 342 aa, unidentified
MEEFVGLDVSMKEAAISIRRNGKRIWRGKCASDPKLIAELIRKHAPAAKRVVFETGALSIWFYHALTAEGLPTICIDARHAKAALDMAANKTDANDADGLAHLAEVGFFREVRVKGFDSMLARTLVAARNKMVKITTELSNQIRGLMKTFGLVVPSGKGSTFERHVRELFADQNGLAPILLPILEAWRSMRVRAVELGRQLVAGARRSEAFQILMSIPGVGAITATSFATAVEDPDNFKKSRSVGAWLGLTTRRYQSGEVDYDGHISRRGDRHLRGLLYEAATVILTRASAESALRTWGLKLRGRIGFKRAAVAVARKLAVMMHAMLKSGEVFDRAAGAVVA

SEQ ID NO: 383563 - protein, 458 aa, unidentified
MMKKKGQIKVSEESFKKKVFSQGLPVFHEHAAGIDIGDTMHAVAISNGKGGHEVREYPTFTENLKDLVAWLVSVGITTAGMESTGVYWLTLYLMLEEAGIEPYLVNAKYAKNVSGRKKDDTDAIWLQKLHSCGLLQKSFQPESEMRVLRTYVRQRNNLISISSDSVRRMQKAMELMNLKLHTVISDILGKTGLQMVNAILNGEHDPNELVKLKDHRIKASEEDIKKSLVGIWKDEYLFMLKQAYEQYVFYQSQIGSCEELIMGQLLKQAAKILDGDITGLQPKKKPKKKPKKNQFNNIIRPLLTIIAGVDLCAVSGISEVSSLNIISEMGSDMGQWFSAKHAAAWLNLAPNTKITGGKIISSKMQKKKNRAGQAFRMSASSLIHCKSPLGDYARKMRSRLGKKGGVVATAHKLAITVFTMIKYKCPYNPEMMANSQLTWKEKRIKSLEKQLSQLKCVV

SEQ ID NO: 383564 - protein, 338 aa, unidentified
MVLIGIDPHKSTHTAVAVDKEETALGELTVKADRHQIERLLKWAIDFPDRRWAIESANGLGFLLAQQLVAAGEDVVDVPPTLAARVRVLGSGKTQKNDPNDALSTAIAALRAKRLRTVVGEDHSAVLRLLADHHRDLGSLRTQAVCRLHALVRCLIPGGTGIRLSADRAAAVMRTVRPTNAVDTERKRMALGFVADIRRLDAEIVASKARIVDAVAASGTSVTELYGVGPVVAAFLIGHSGDMARFANRDHYASYNATAPIEASSGPRVRHRLNPKGNRRLNHAIHVIAMAQISHQSDGRTYFDRKLAEGKTTKEALRALKRHISNAVYRQLVIDSRK

SEQ ID NO: 383565 - protein, 331 aa, unidentified
MSQIYGIDLSKEKFNVNFIDSKGTINEMEVKNKYSIICEFLSKLNKDVTLCIEHTGIYGDLLVFLANSFEITICAIPGYEIKHSMGIQKGKSDPIDAARIREYGERFTDRLTPASYAEEDMHELRELHTLRELLVKHRKALLTHQKEKGRLPFKSIAAQINATQMLEEQNTRINDIENQIQELINANPEYSKNSQIVRSVKGIGPVTTNELIIKTHNFQKINTARRASSFAGICPFPNSSGKMVKKAKISSLGDRSLKTLLYLCATSAITHNKDMKQYYQRKTAEGKPSYVALNNVANKLLRTIYAIIESGQRYDENYLCLDPRLEQKNVA

SEQ ID NO: 383566 - protein, 411 aa, unidentified
MNPVIGLDVAKGESQVQAFLEKKKPYKKSFKVAHTLDGLQELQEFIDEVETVSGSKPPLVLESTGHYHIPVVQYFEKRGYLLIVVNPLISYKAKSSSLRKVKTDVIDAHHLCELYYKEDLEPYKKRGIQLLNLRNLTRQHENLTGMFIQAKLQFQSVLDQVFPAYVGVFGELYSDVSLRTLSAFPTSKQVLEAGEEILSKKIYDLCKSRSRQWACNQANKLVKAAGQNPFQQTLYHSHLISLEMLINILLEYKKHLSKLEEEIDALAKNIEEYKIIQSIPGIGEKIAATIISEIGEIDRFNHPKKLVAFAGIDPSVFESGTFKGTKNHITKRGSSRLRHALFTAVRCAIRDARKARTTKELIPRNKRLREFYDKKREEGKPYRVAIIACANKLLHWIYALLKSKSTFQDVA

SEQ ID NO: 383567 - protein, 354 aa, unidentified
MMIIGCDYHPGFQQIVFVDTKTGELQERRLEHGEEAEKFYRDLAAPGVKVRVGMEASGPARWLERLLAELQFELWTGDAAAINAKRVRKQKTDRQDAQLILRLMLKDDFPQIWVPSWENRDLRQLLWHRHRMVQARTRIMNQLQAVALNEGLRSKKRLWRDAGREQLESFRLAPWASRRRHDLLELLDRLTPTIAELTAAIEQEVEKCPAAQRLRTHPGVGALPALAFVLIIGRAERFQCGKQIACYLGLVPLEDSSGQRRRLGHITKQGNSLLRFLLVEAAQVTVRSLPEWRSKYCHMALRRGRKIAKVAMARKLAVRLYWMMRKEWNYAELSKFGSYAGKPGNRHGVKSNTE

SEQ ID NO: 383568 - protein, 427 aa, unidentified
MKDNTQHLRILSTLFVGIDVSKDSNQTCILNFQGDKLCNFSSSNNLDGAKQIEDKILSLLSKFDCKFVTIILESTGIYSLHIANYLSSQESLIAYECEVYVVNPMSTSNYSKVLGVIDKNDPKDAHALADFIRSGHHKNLKPFRGSQRLSLQRLTRHRKHVVELLSKEKAYVLNNIFLKFSDFNNANHDTRCFKDTFSETSTQILLKFNSPEQIANCKIDKLIELVIKYSKNKFKDPEAVAETLKKAARASFRLDKVSYSSLNIAIASSLNLIDCYEKEIKALDNAITKLISGLDNQNQYNSLISIPGIGPVFAAGILAEIGDAKIFKNDSSLAKYIGLTWNEHQSGNFSADDTKLSKAGNSYLRYYIIEAAESVICNIPEYNDFYHKKYNEVTIHQHARASVLTARKLVRLIYGLMSKDQLYNANK

SEQ ID NO: 383569 - protein, 314 aa, unidentified
MNKEEFFAGIDVSKSHLDLGLNPSGQFERFDNDETGIAGLVASLEQIRPALIVVEATGGLEMLVVVALRVAGLPIAVVNARQVRDFAKATGRLAKTDKLDALVLAHFAQAVRPAIREGRTEAEQELVEQVARRRQLVDMRAQEKARLSMASARQKVSIKEHIAWLDERISNLDDDLKTTLKTSDIWKERVDLLQSAPGVGPVTMLTLLSYLPELGRLNRREIAALAGLAPFNRDSGFQRGYRMIWGGRAEVRSVLYMATLSAVRGNNSISSFYKRLVEKGKPAKVALTASMRKLLTILNSMMKQNKHWSCPQNA

SEQ ID NO: 383570 - protein, 312 aa, unidentified
MYYIGLDVHKKTISYCVKDASGQVHREGTIGATRNELDCWVRTLPQPRIMAMEATIFTGWIYDHLLPHAEQVKVAHPLMLRAIAAAKKKNDRIDAGKIADCLRCDFLPECHMASTEIRDRRRTLRYRHLLVRQMVQMKNRISGLLMETGVSHNKQRLHKVGYFRELISNSAEIHESIRPLLRLSRETIVWCQKTEYALVSSLERDPLLAERLKRLRTVPGVGPITALTWALEMGDVSRFRSVKQAISYCGLCGEEKSSADKVLRTPLSKQRNKHIQHVLVEAAKLAPRQNHELAVVHEGRHRRGIETARPWP

SEQ ID NO: 383571 - protein, 328 aa, unidentified
MNTKVGVDGGKTKFDAAVMTSQGKYRTKVFDNNPAGFAAFAAWLDAYVPAGRSQAHVCMESTGSYHEALACFLFDAGIAVSVVNPLRVKRFMESEGVRNKTDRGDAKALARFAQKNEPERWEAPAPAVRTLQALVARLDALMEMRQAERNRQEVSHPSVQPSIEAMLGSIDEAIAEVRRQIAATIDDDPDLKRRSELLETIPGLGDRTIPQLLAYIGRPQRFKSVKALTAYACLSPLIRQSGTSLDRHKGTHPTGHHALRSALYFPAMVAGRHNPSVAAFWARLKAQHKPGKVIVVACMHKLLAIVYGVLKSGRPFDAQVALGHGPHS

SEQ ID NO: 383572 - protein, 429 aa, unidentified
MNYTQNAKIEQVTDEAMVVGVDIGSQVHYARAFDNRGRELTKRVFSFENDIEGFNTFNQWASKLMKDNGKTDVMIGCEPTGHYWFAFAKYVSDHQGKLVMVNPFSVKKIKELDDNSPKKTDAKDPKTIAKLVIDGRYSIPYTPEGIFAEIRDLVYSRDRIIKQHNIAANRIQRWLSIHFPEYLGLYTRFDATSGIAVLEKAPLPKDVIALGVDGIRKIWHEKKMRGRGVTEDRARTLVEAAHNSVGLDGGYGTKSELFMLLEEHRLWTSQLERINKVLDEAILKVEHVEKLLAIKGVGSITIAGFIAEVGDIRRFKSPKQIQKYAGLELVENSSGKHKGKSKISKRGRRKLRRVLYQVMIPLLARNKEFREIYDYYVTRVKNPLKRRQAMVAVSCKLIRVFYTVLTKGVDYDRFKMISDIHRESELQAA

SEQ ID NO: 383573 - protein, 345 aa, unidentified
MEYFAAIDVSLELSSVCVVDGTGKIVCEKKVASEPEALAAFFRGSGLILTRIGLEAGPLSQWLHAGLTAAGLPAILIETRHVKAALKAMTVKTDRNDARGMAQLMRMGWFRPVHVKTVPAQEIRALLTGRKLLLGKLRDVELGIRGLLRGFGLKVGQVSKGRYEARIRELTGGHPMLEPVAAAMLQARVSLRAEYGKLHRMLLGIVRTDATCRRLMTVPGVGPVVAVNYKTAVDDPARFRKSKDLGPYFGLTPSKYQSGEVDWTGRISKVGDAMVRTALFEAANVTLSRVTRFSTLKAWALRVAKLRGMKRAKVALARKLAVVLHRMWVDGTDFRWRKMPAATAA

SEQ ID NO: 383574 - protein, 411 aa, unidentified
MEVFHERCAGLDVHKEVIFLCVLIGQGRRSERHKEKFGTFPHQLLELRRRLVQLGVTHVLMESTGVYWMPIYDALEGFLEIVVGNAQHIMNVPGRKTDESDAEWLAKLLRFGLVKPSFVPVRFFRELRQVTRYRRALVQTRASEQNRVEKHLQIAGVKLSSVASHVFGVSGTDMLHHIAKGKTDPQQLAALARGRLRKKIPQLHEAFAGSISEHTQTLIAIQMEQMNRLEATIAQADLKIATKVESRNAVLERLDTIPGVNDRLAVDILAETGDDMSAWATHRQFAAMAGVCPGNYISAGKRLKNRSRQGNPYLKTMLVQAAASAINVNGSYLQAKFLRLKQRRGHKRALVAIAHVIAVALYYMLKKGEDYRELGAKFVSDDDSKRKKQALIKQFTSLGYSVVLTPIQPTA

SEQ ID NO: 383575 - protein, 356 aa, unidentified
MTSNIKYIGMDVHKESISACVRNSVGKVVMECVIETKASMILQFIDGLRGDLQVTFEEGTSAAWLYDLMKPHVTKLVVCDPRKNKSMREGNQNDKIDARRLAELLRLDHLTPVYHGEHGLRTLKELVRSYLTITKDRGRVMTRVKAIYRSWAIPCTGKQVYARRHRVEWLGKINEPGVRRRAEFYYQQLDALRVLRQEARRDLLAESKKQKAWKRLCGIPSIGPIRAAVLLGILQTPHRFRSKRPLWNYGGLAIEMHSSADHRSVDGQLQRSRKNVLVRGLNRNCNHDLKNLFKGAAVVASSKPGPFQEFYTALVAKGMRPEMARLTLARKIATIVLIVWKKGVCFDANHLKPQTA

SEQ ID NO: 383576 - protein, 347 aa, unidentified
MRFYTNSHRYYCGIDLHARSMYICIIDHQGEVVLHRNMDARPEPLLKAIEPFREDIVVGVECIFTWYWLANLCAEHDIPFILGHALYMKAIHGGKAKNDRIDSRKIAALMRGGTFPMAYVYPAKMRATRDLLRRRNHLTRKRADLLSHIQNTNSQYNMEPFEANISYKRNRVGVAEQFVDPDVRMSMEADLELIALLDDLKNRLELHIVRNAKNHDPQALYRLRTVPGIGPIISLVILYEIGDISRFPRVQDFASYARLVKCAKESAGKRSGTGGSKIGNVHLKWAFSEAAVLFLRGNPEGMKFRKRLEKKHGKAKSLSILAHKLGRAVYYVLKRDQAFDMEKFVRT

SEQ ID NO: 383577 - protein, 341 aa, unidentified
MDEYIGLDVSLKETAISVRRDGERVWRGKCPSDPRLLAEVIRKRAPLAKRVVFETGPLSVWFYHALRAEGLAAICIDARHAKAALDMSPNKTDANDADGLAQLAEVGFYREVRVKGYDSMLTRTLVAARTKLIRITIELSNQIRGLMKTFGLVVPSSKGGKFEVHVRRLLADHDELKAIILPVLEAWRGVRIHAADLGRQLLAGAQRSRSCKLLMTIPGVGAVTATAFTAAIEDPANFKTSRSVGAWLGLTTRRYQSGEVDYDGHISRRGDAHLRGLLYEAAMVIITRTQADSSLRAWGLKLREKLGFKRAAVAVARKLAVVMHAMLKSDTAFDRAAGAMA

SEQ ID NO: 383578 - protein, 357 aa, unidentified
MQTKTRTKARTSLRIRKNQNQPTRYLGVDLHRDSFLVCVRAGGEERLRRWSLGQVQEFARTLRAQDELAVEATGNTRWFCQQVAGRVGRVVVVNPHQFRVISESVKKTDRRDAALLAEYLEKDLLPEVRRKSALESELAQMAQARDQLVKMRTMLKNQLHGLFASYGVALPKKALASRRQRTALRGRSLSPLADVQRRVLLGQIEALDAGIAELEQALTEAARSLPGYEHLTSVKGIGSLGATILLSAIGRIEDFAEPGKLAAYFGLVPRVEQSNHTEHHGRITRRGNKLARTTLVQCALIAKRYSPHLRSFYERIQHRRGTGKAIVATARKLLTIVYYTLKNHWTFRDFTNFELAR

SEQ ID NO: 383579 - protein, 428 aa, unidentified
MDFTQNNRLAQINEQTLIIGVDIAKRKHVARAIDDRGRDLVKRLVFSNSLQGFTDLIEWAESLSNEYERPNIIIGMEPTGHYWLNLAYHLKARAIHVVVVNPMKVKRSKEMDDDSPTKNDTKDAKVIAQIIRDGRYHEPTLPEDVYAELREGMKLYDMIQEDMSSVKAQMHNALDRYFPEFLDVFKDWTGKAALHLLTRGYMPEDIRETSEDDLLSDVKQAAKRGVGIKRIQALKQAAEDSVGLTVGLRMARQEIHYLIDQYKALEERLIALEAQLEKLVLHIPGADQMIAIKGVSAITVAGFFAEVGDLSNYRDPRQIIKLAGLNLKLNQSGLFKGQTTITKRGRKRLRSLLYQVARPLSLHNEGFKQLHHYYRHRSDNPLTGKQSFVALSRKLIKIFYLLGTRKCTFSEERMIRDIPMISTLQEAA

SEQ ID NO: 383580 - protein, 414 aa, unidentified
MEQIHDRVAGLDVHRDVVVACARVPGARGGTVTEKERFQTTTGALARLAGWLADRYVTLVAMEATGVYWKPVYYALEDSFEVWLCNAHHVKNVPGRKTDMSDAEWLADVAAHGMIRPSFVPPPAIRELRELTRYRKTQTDARVAEIQRLEKVLQDAGVKLTSVASKVLTQSGRLMVEALIDGQRDPAELANLAKGKLRPKIPELTEALNAHFGAHHAVAAARILAHVDFLDATIKALTEQIDVRTKPYQAARELLMAVPGFDRLTIDTVIAETGADMSKFPGPGHLAKWAGVCPGNHESAGKRRRVGVTPGNPWLRRALVEAARAAARTKGSYFGAQYRQIAKRRGPNKAAVAVAHSLSDLIWHMLSTGEVYHDVGDGYFQRRRDPERETRRLVAQLEQLGFQVALTTLQDPAA

SEQ ID NO: 383581 - protein, 355 aa, unidentified
MTSTKYIGMDVHKESISIAVRDDAGKIVMECVIETKASMILQFINGLRGVVHVTFEEGTWAAWLYDLLKSHVAKVLVCDPRRNALLQEGNQNDRVDARKLAELLHNNQLRSVYHGDHGLRTLKELVRSYLTITQDLSRVMTRVKAIYRSWAIPCTGKQVYGPNHRAEWLAKINETGVRRRAEFYYQQLDALRCLRQEVRRELLAESKKHQAWKRLCGIPSIGPIRAAVLLGILQTPHRFRTKRQLWTYGGVGIETSSSADHHVVKGQLERKKKKVEIRGLNRNYNHDLKNLLKGAAIVAATKPGPFAEFYAELLAKGMRPEMARLTLARKIATIVLIVWKRGVCFDAQHLKPQTA

SEQ ID NO: 383582 - protein, 444 aa, unidentified
MVCSGMILIREVADAPVIMGISKPAGLKSPCGEVKIVNPLFVGIDVSSRSNVAYLMKPDGSKHSSFSVQNNLGGAKMLSERIVSALSSMRLSDVVIGLEATSIYGNNLVYALREDGSLSRFQRKIHVLNPKQVKKFKEAYPDLPKNDFVDAFVIADHLRFGRIAKEVYMDDYRYQALRTLTRARFDVIQNLTREKQRFANYLFLKCSGIAQEKDIQNTSATTIALMEHFETVDDLANTDLDELTDFIAQAGRGRFVDPDATARAVRAAAKGSYRLPKTVNDTVNQAMSVSIASMRALKEQVKVLDKAIEQQLEIIPNTLTSIPGIGKVYSAGIIAEIGDIHRFDSQASVAKFAGLVWTQHQSGEFEAEHSRMIKSGNRYLRYYLLEAANSVRRCDSEFRRYYDLKFKEVNKYQHKRALALTARKLVRLVFRLLKDNRLYIPSEG

SEQ ID NO: 383583 - protein, 391 aa, unidentified
MIYVGIDVAKDKHDCFITNSDGEVLFKAFTISNNLDGFNELYQKIESVMEDTTKVKVGLEATGHYSYNLLGYLIDKGLPTYVINPLHTNLYRKSLSLRQTKTDKVDARTIASMLMSDVNLKSYSDISYHNEELKSLTRYRFDKVKERAKLKTSVSRLVCILFPELEKLVPTLHIASVYAMLSEFPGAKQVANAHLTRFTNLLSEASKGRYGKETAIAFRDAARTSIGSNMPAKSLELKHTIKLIQELTSEIDEIEHEIKLIMDELNSPILSIPGINYRMGAMIIAEIGDFTRFDSPDKILAYAGFSPSTYQSGQLDGAYSHIEKRGSRYLRYALYNAAKYVCIWDPTFAEYLAKKRSEGKHYTVAISHAVKKLVRVIYHLEKTNQQYIKAA

SEQ ID NO: 383584 - protein, 320 aa, unidentified
MAQQDNAIIIGIDVCKDRLDIFEHESGRGYSIGNDAVSIETWLDGHAGRLRVALEPTNRYHEAVAEAAYARGHEVYWIDPFRLSHYRAGLGRRAKTDPQDAYLLARFLEREGGELRPWKPLSQGQQRFWRLLKRRSTLVRAKVQLRQSLTDMGTLQDEVDSLLRHCIRMIAKLDRALLAQAKELGWGESIARCRAIPGIGPLTAMALVATWHRGDFTNVDAFVAFLGLDVRVRQSGRWQGRRKLTRKGDGEIRRLLFNAAMQARRNELSEPYYLRLRDRGLSSTAAFVALSRKLTKVCFALLKNDSQFDPTAHRSACMST

SEQ ID NO: 383585 - protein, 314 aa, unidentified
MEAAKVYAGVDVAKDGLELWLRPSGEHRSYANDRRGIAALRGRLAELGCERIVLEASGGYETLVASSLWDAGLPVLVVNPRWVRDYGRSIGQLAKTDRLDARLLAQYAEHAELELRELPDAQTRALKELCARREELLEMMGAERNRLEHASKALRRRIERHVDYLRKQLAQIEHDIDQAIKNSPLWSDQRALLRSVPGVGPVLCSALLARLPELGRLNRGEVAKLVGVAPLNHDSGQLRGIRMIAGGRAALRRALYMSAFAAIRHNPPLRTYYEQLRARGKPFKVALVAAMRKLIIILNAMLKTNSPWRPPCPA

SEQ ID NO: 383586 - protein, 394 aa, unidentified
MGSDSATTRTGLPDAWKLELMHVAVGQPTQEVKETPMNNVGLDAHKTRCVACVKTPEGRILEQFAFQNNPHGHEELITHLKAYPEVQVAIESTGNLWIPIYNRLEDEHIHTILTNPKKTRMIAEAKIKTDRLDARILADLLRANLLSPSYVPPREIRMQRSIIRERARLTQLRTIIKNRIHTILDKHSIKTPYTDISGKHSLEWLFKLELPAGDRILLDVNLEQLNSLNHSIDRLTETIAISAIENPEVKLLMGFTGIDYYSAMLLINEIGPVARFASPKKLVSYAGLAPSTHESGNHTTHGHITKEGNIHIRWILVEAAQHASRHDPRLSQFYLRVMKRRGHNRAVVAVARKMLVTIYHVLNHHSQYRGLRPELYTNKIRRLERITSSSLQTA

SEQ ID NO: 383587 - protein, 429 aa, unidentified
MSYRISGIDVHKKMLAVVVSDVEIESEYQFERRMFGSSPDQLRTLAAWLLEQEAEEVVMESTAQYWKPVWETLERYWKPLRQKREGAGRRSGTLHLAQAQSNRGPRGRKRDFPDAERLVKRLVARELTLSFVPDAEQRLWRTVTRRKHQLTRDHVRLQNQLESLLEEAHIKLSSLVSDLLGASARRMLKALAEGETNPAALATLADERLRATPEQLCDALGACTDLKPVYRRLLKMVLEQLQFLEQQIGQLDQEMASLLSQHQDAVQRLAEVPGLGVDSAQQIIAEVGPTAATFPSEKCLSSWVGACPGDDESAGVNYNHRSPKGNRHMRRVLNQAANAAARTKGSIFEIVYRRTVPRLGHKQTIGAIAHRQCRLVWLILHQRVRYEERGPAVTKQSKQKRTARMIRQLRSLGYRIEAPNPQPSQVQAR

SEQ ID NO: 383588 - protein, 338 aa, unidentified
MNIVFLGIDLAKNVFQLCGLNQAGKPVYTKRTGRKELLQTLANIPACLIGIEASTGAFYWQREFEKLGHKVKVISPQYVKPFVRGQKNDGNDAQAIAVALMQPTMQFVPPKSPEQQDIQALHRARQRIVNHRTATVCQIRGLLLDRGIPIGSAVSRARRAIPLILEDAENGLSSRMRRTIAELYDLFNDPERRIHFFDKEIETVFRQSEACQRIDKVKGIGPETATAVVAAIGKGTEFKNGRHFAAWLGLVPRQHSSGDRQVLMNMTKKGDKHLRTLFIHDARAVVRVATNNNDGHMNQWVNQLKERRGFNKTTVAVANKNARIIWSMLRNETGYQVV

SEQ ID NO: 383589 - protein, 443 aa, unidentified
MSTLAVLDPRAAFVDVGSEKMHVSIAGGPPEVFGTVTSQLHALRDYLVAHQVRSVAMEATGVYWLPLYGVLEASGLEVVMVDGRRTRNVPGRKSDMKDCQWGATLHAHGLLRAGFVPPAHVRRLQDYLRLRGDHIAAAAGHVQHMQKALERMNIKLHDVISSLTGASGLAVIRAILAGERDPQVLLGLCHRQIRNIKAERVVESLRGNWAEEHLFALAQAVQSWDHYQGLIAACDRQIADILRQMPDATTPPPAASTKKASPRRQPGVNAPDIADLRDMLAQICGGKDLTILPAHTEYGVLQIIGEVGTDLTKWRTEKHFTSWMGLAPGSAQSGKRNARVKRRRNRVGRIFCVMARSLARSKYIALGGFYRRMAARRGGLVANKALARKLAALFWRAMVKGLDFVEMGVAQYEAKVLETKHRILHKLARQLGLQLMPKPIAVA

SEQ ID NO: 383590 - protein, 344 aa, unidentified
MSAEYDGRQVVGIDLHRHRSVIVRMSEAGERLDSVRIDNDPMTLAAEIAKAGEHPQVVLEATYGWYWAVDVLQEVGAEVHLAHPLGVKGFAYRRVKNDVRDASDLADLLRMGRLPEGWIAPPAVRELRELVRHRAKLVAWRSGLKASVHAVLAKQGLHIAVSDLFGPGGRQLLGTAPLDGAYRLRVNALCRLIDALDFELQAVSGPLRAGLAGHAGYQAIQAIPGVGPVLAAVFVAEIGEVDRFPDAARLASWAGLTPRHRESDTVVRRGPITKQGSTLVRWAAIEAAQSPHHTGWFTTTRTRIGERRGRNIATVAVARKLLTLVFYGLRDGHIRALTPANKAA

SEQ ID NO: 383591 - protein, 483 aa, unidentified
MKRKSIFKNDSQKLDAAFIEAGLPEKVLLVPLDFAKATHYACFCDGRGRYIRNAFTVKNSREGIDYLVQQIEKTRRSKSIRSKQHVIIGGEDSASYTCNFMDRLCELGYLTVRLNAREVNRQAESLDSSTDKTALRAIAKTMLNRDARHTTKNDQYTELRGLTRQRRRVVHLTTGVKNRIHTHVDRLFPGFLSKESAVTPFSKASLRLMEKSFSAATIRRRSEKVLAQQLSRHGAREASTAAAKLKEQANNAICADDLSTRLSAQLLAGELALYEALQSTLVDLEKESGRILIQLPEAFIVSTKGIGITLCSSICAEIAGPIHERDSDQINAYAGIVPKVKQTGGPESAASIKGKRQSFNRVLKDYTLQAGNHLYLHGPQELMEDAARRKLAGKAVDTAMARRFLRIARALTRDHCIYLPSHLRGDQTEADREARAQYIVQTWPDLLIKWKRLGLHHEAFGEEAPLGRWRIIVQEIYDIELPL

SEQ ID NO: 383592 - protein, 370 aa, unidentified
MDDSITYVGLDAHKKTISVAVAEPGRAGAVRSLGSIANQPATVARLAKKLAAAHGKLRFCYEAGPCGYGLQRQLRALGHDCVVAAPSLIPRRPGDRVKTDRRDGVTLARSDRAGELTLVWVADPAHEAMRDLVRGREQAVAELRRHRQQLQALLLRHGRLWLGKKSWTRAHLAWVAGLTWQHPAHRILVDDQLAAITAALARRDRLTGEIEALVPDWRLAPVVTALQAMRGIALISAVTLVAAIGDITRFQTARQLMGYLGLVPSEHSSGPKRRQGGITKAGNNSARRVLVEGAWTYRSPPRLTPAMQARQIGLPKAVRDIAWTAQRRLCARYRALTALRKPNPVIATAIAREMVGFIWAIARAAQPHQG

SEQ ID NO: 383593 - protein, 410 aa, unidentified
MTKVIIGVDPHKLSATIEVVDRHEKLLGSGRFRTDQAGYTAMRSYVKTWPERVWAVEGSNGAGRPLAQRLLESGEHVVDVPAKLAARVRLFDTGHNRKTDALDAHSIAVVAVRTEGLRVLQVDGELEALRMLSDRREELTRLRVQTVNRLHRLLAELVPGTAKKDLTALQAKAILASVRPRDIAGKTRRRIAAEELADLVAVEAKMKKATAELKVLVKARGSRLMDLRGVGPVVAARTLADVGDIARFPDRNRFASWTGTAPLDASSGEQNRHRLSRAGNRRMNHMIHIAAISQIRLDTDGRAYYRRKLAAGKTKLEALRCLKRRISDALYRQLVADAERAHLAAAADVGGTPGTGPGGHCGATQESSAVDLPPHIDTSDQPLPGPAKPTLQPPHSARKTASSRTESATR

SEQ ID NO: 383594 - protein, 379 aa, unidentified
MNRIIKIGMDVHTTNYTLCIFEPSFEHDGTVHCITQVKPEVKNIIHVIETFKKKHENEELNIVCGYEAGCLGYSLYHELKEKGIECVILAPTTMKTEKGGRKLKNDYRDAKMIAECLAYGGYSAVHVPTELDNSVKEFIRMRDDIKENLKSIKQQIIAFLTRNGKQFEGKSFWTRKHIDWINTVSFSEPLLQDTLKEYMIEYNHLCDRVETLDRQIEEISVKEEYVEKVQQLQCLIGIKTHTALSLIVETSDFNRFKKGNMYSAYLGLIPGDDSSGGHEDKLGITKAGNNHLRRLLVEAAQGYTRGRVGFKSKDLKSRQEKCSSEVVAYADRANERLRRKYYRMTLRGKKFNVAKTAIARELACFVWGIMTDHIDLCSL

SEQ ID NO: 383595 - protein, 340 aa, unidentified
MGDITTIGLDLAKNVFQLHAVDEAGSVVMRKRLRRGQVLAFFARIPPCLVGMEACATAHHWARELIALGHEARLMPPTYVKAYVKRNKHDVADAEAICEAVRRPSMRFVPVKTAEQQSALMMHRARDLLIRQRTMLVNALRGHLAEFGLIEAQGLHKVARLIAIVLDEKDGRVPDIARQVLKVIINEIEDIQTRIAGLETQVLAWHNSSPVSQRLATIPGIGPIIATAIAATVADPNIFRSGREFAAWLGLVPRQNSTGGKARLGGISKRGDSYLRRLLVNSAHTVLLCSKQAKTDPWLTSLLSRKPRLVAAVALANKTARVAWAIMRRQDTYRHAAVAA

SEQ ID NO: 383596 - protein, 328 aa, unidentified
MEREYIGIDLHKAFFQVCAVTSTGERQWEQRWPTTDLGIAGLLTRCGVHSRIAVEASSPTWAFVDRIVEHVGAVHVVDARKTRLKAGYAAKTDRLDAQRLADALRRESVVGIYYPPPAIRDLRELCRYRCHLSRMQASLKQRIQALLLRHGVQVPVKGLFTARGTAWLETLTLPGWAGASLTGLRQVVTDVRRQLLPVMAEIRTTAATDAIARVLDTRPGFGPVFSVTLRAEIGTMSRFPDGPHLASYAGLVPRVERSAQRHWSGRITKAGSPWMRWALIEAAIHQFRRQDDFGRWARQLAVRKGILKARVAVARALCDELFNAWPRP

SEQ ID NO: 383597 - protein, 370 aa, unidentified
MRIIGCDLHARQQTLAMLDTTTGEVVNLTLMHEGDKVREFYSELPRPALVGIEATGSMQWFLNLMEELGIECRVGHPAQIRAAEPRKQKHDRRDADLILKLLAENRFPAIWLPSKELLDLRALLLHRHQWVRMRVRMQNGLQAIALANGLRRGPALWSYDGQAKIAFLPLLPHAAYRRSALQAMYKNMQSEIENLTRRVAEQAGNRCGARLLMTHPGVGPVTALATEVFLGDPQRFTDSKTLASYVGIIPREYSSGEHQRLGGVTKQGSPLLRFLWGEAGAHAARRDPELKRFYRRKLVQKGLGKARVAVARKLGIRLWIMLRDEIDYQEFCRRGQIQQKTVRPVVGMPETGNGAKSHRQSDEATRLPES

SEQ ID NO: 383598 - protein, 364 aa, unidentified
MSTITLGVDLAKSVFSVCEVDGSGHVLRRLDFKRDAFAAWLAQVPAGTVVAMEACSGAHHWARRCIEHGLQPRLMAAQLVKPYRLSQRSKNDRNDAEAIATAARQGNMRFVPVKDLDQQARLSWHRVREGYKAESLAIGNRLRGLLAEFGIVVATSDMALRRVLGDLDQAALPGEFKELLRGLEAHWIEVRKALDACDARIDVHAREDARCVRLRAIIGIGPITADAMVASLGSAKDFKNGRQMSAWLGLVPTQHSSGGRARLGEISCRGDAYLRTLLIQGARSSLQRAKAVSVEKSTPEQIWIRQLACRVCFGKVLVAIANKHARQLWAMLAHDQTYDADAWLKHPMVQRPAGKHAITVAAMA

SEQ ID NO: 383599 - protein, 359 aa, unidentified
MPATASLQLTRSGHIVIGVDTHKHVHVAAALDSIGGIQATMTIATDSGGFKQLLEWAATLGQIIAFGIEGTGSYGAGLTSFVRRAGHRVVEVNRPDRRMRRLVGKSDTLDAENAARAVLAGFATAEPKTADGTVEMNRQLKVAHDTAVKDRSAAMITLKAILIHAPEQLRHDMAKKTQIMLARHLAALRPTRLETPDDSIRHTLKSLARRWQHLNAEATELEAMIKDLVTRTAPQLVEPFGIGVDTAAEILIVVGDNPERIRSEAALAKLAGISPIPASSGMTSGRQRINHGGHRQLNAAIYRTVIVRMRFHQPTIDYVARRTAEGLSKRDIIRCLKRYVIREVYHLIVPAKNVAQITS

SEQ ID NO: 383600 - protein, 397 aa, unidentified
MLFVGDDWAEDHHDIEIVDEHGKVLARRRLPEGLEGVTRLHGLIAEKMPAEWVNLDPAEAAGRVKIGIETDRGSWVAALTSAGYEVFAINPLSVARYRERHSTSGAKSDTADAHLLAEIVRLDRAHHRPVAGDSDEGEAIKLTARTHQSLIWDRTRHVLRLRSTLREYFPVALLAFEDLDAPDALELLGRAPDPDQAARLSLTVITAALKRARRRRAEDRAQELRTVLRAQELRQPPVLQSAYAAVVASEVAIIGALNVQIDRLGAVVAEHFGRHRDAEIYASLPGLGAILGARVLGEFGDSPDQYADAKARKNYAGTSPITRASGTKKVVLARYPQPPTRRRTAAMGVLLDARITWGEGLLPTAPSPQDRSSGRAPPARQSPCRHPARLPEDPHHL

SEQ ID NO: 383601 - protein, 371 aa, unidentified
MPTPQLWEVPTLQSSMSLVGLDVHASQTHAAVLNTKTGEIRVSKLRMTPLEVVDVLAGLPGPVRAVYESGPTGFGLAREGVARGIDVRVVAAGKVPRASGDRVKTDRRDAERLARLLAAGELRFAYVPSIADEQFRDVIRAIEDVRVDLMRARHRLGKFLLRRDLRFDGSTWTQAHLRWLRALRFEDVCSQATFIDYLSAVEMLMQRRGVLVDALERAIPASSHADTVARLRCFKGIDTLTAAGLCAEVGDWRRFPQPKRVAGFFGIVPTEHTSDTKRRQGAITKAGTGHGRRLLVEAAHNYNHPPRIGETLARRQQGQDPRVIKIAWKAQHRLSQRWRDLKTERNKPHNVVAIACARELAAFCWQAATLD

SEQ ID NO: 383602 - protein, 354 aa, unidentified
MKTYYVGMDVHRASIWIVVLNGAGKLVMQSVIETGAERVRGYLKQLRGKVYVTFEEGTQATWLHDIVRSLVTEVVVCDPRHNKLLQSGNKNDRVDAQKLAELLRNGALKAVYHGDHGMRTIKELVRNYDCLVSDSTRVMLRLKAIYRGRAISCAGHDIYRSERRAQWLEKLREPGARQRASFLYAQLAALKPLRHEAKLVMVKEARRQAAYPWLMSVPQLGSVSVAQLMAVVGTPHRFRTKRQFWPYVGLAVVTRSSADHEIVNGVLRRSRRPIATRGLNRNHNHLLKKVFKSAATSACHSGPFKAGYDARVAQGMDPSLARLTIARQLAAITLAVWKRGEKFNMQMMKQQLAA

SEQ ID NO: 383603 - protein, 337 aa, unidentified
MDYFAGLDISMDETHVCVLDREGMVVRESKTESTAQAIAGELAKAPTCRRIVFETGRMAPILFHGLNQLGLPVVCVESRQAYQALKSLATHKTDRNDARGLAHLARTGFFKPVHVKSLRAHALRSLISARKKLVGQRVTLENQIRGLAVVFGVRLPRALTAAFIDNALKASEGIAGLSAAMRGLIAARTAVMTAVAAIDADMRRMTRASAACRRLMTIPGVGQLTALAFVAAIDDPSRIRRSRDIGAYLGLVPTRHQSGELDYTGGISKCGDRRVRTLLYEAANVMLTRYKGQLKLKDWAFAIAKRSTMRKARVALARRLAIIMHAMLRDGTEFAFA

SEQ ID NO: 383604 - protein, 366 aa, unidentified
MSETIVAYRSFVGVDLHKCTVTFGVVDVDGQIKRLRISTKSTGKIEDWLRNLPGPVWMAVEACPFVEWFIDRFRECVDRIDIADATELAKRRGKRRKTDPNDALDIARRLARGECPLGFIADEELMQLRKRGRHWRNLSRLMSRSKHSMKSILNAANIRGPKFDAAGAHRWYLANRELLKPVQQQAFADFLDILMLVERQRERLRREIIIATRSERFLPIVSLLMSVPGIGEIWAAIIAAEIGPFDRFPNADTIEFWAGLTADMKESAGRMQSGSISKAGSVTLRWALCQAALTLCQCDAKQEATRQKLITRIGNAKANVAMGRRLLGILYAMVRDGKKYQGGAPRDRTAAANKTKQRRKQRKEAA

SEQ ID NO: 383605 - protein, 454 aa, unidentified
MAQGSGLTRADRNRNRKLAGLRQVVLKDRAVPAVDLGEDKQAAVLVDHEGRVLARRTVKNAKAYELAGLLEWMAGRAAGAGFAGLVVACEPTGHRWKALMGLADAAGHGFVCVQSLAVHKEREKDDYTRDKTDQRDAYLIGKLVTKLECYLPERASADWARLRHLGARRFALVADVTSCMQQAGDLLGCAWPAPLAAARRPLESVSWLAAMAVVTGRCNGIPARLRTMGYDKFLAAVRRELPRWDGKIVRHSIVRNVRDALTGTAGVAAQRRGALERLHLLLEDWRSLRGRLAATEALMTGMLADLGLAGLVASIDGMSALSGAVILAETGDLTRFASGRAVVKHAGLSPSEHTSATITGKTRISRRGRPGLRTAAWRAVRGALRHNRVLAGKYDRWTSRNQNQLTDGQARTACAATILRWLWAVVTTGRAWDARIAAGQIPARPAALAVAAAA

SEQ ID NO: 383606 - protein, 452 aa, unidentified
MTLPVRHGVCDRLVRCRATERYPLGRRARLELDGIAVKRHEEVVTLSITCGIDWAEAHHDVALIDEHGVAVARSRIDTGAAGFSALLALIAEHGGGVDDTPVAVETDKNLIVVALVEAGFTVYPINPRGVARYRERYGQAGAKSDPGDATVLAHVLRTDRHMHRRLPANTSQASAIKVLARQHQEAIWALHQTVSRLRSVLLEFYPQALQAFPNLQHHAATTVLAAVPTPAAAGKLTRTRVATLLRRSGRGNQAALAERILTELRVPSLRQPSYVEEAYGHTVQGLVGAVEAMRTAADALEKALACEFDQHPQSDLLRSVPGLGPVLAARVLAEIGDDPARFDNPQSLRAYAGTAPVTIASGRSRYVKARKVRNKRLADACHWWAFTTLTKSGGARAHYDRRRAAGDHHNAALRNLANKLIGRLWWCLANNQPWDEDDAWPNIARTEKATAA

SEQ ID NO: 383607 - protein, 428 aa, unidentified
MADQDSGTEPVVWMGIDIAKSWNAALVEHPDGRRQRFRFQHSMDEYDRLVGFLRGTGCIWRIAFEPTGDYHRPLGYRLLREGFDVCQISSVAGARYRDAMFNSWDKNDPKDAEVILRLLKQGVTQRYYDPLVNGTHNLKELSKVYQQVTRARARLRHRIVTHYLALYFPEVERYWYSTRNDWFVQFLLQFPTPDTIKALSREQFVAAAWDVVGRKVGKRQQLEELHGIAQRSIGLPVTADSPAIEAFRLQLTSYHALNDQRAMLEERAHALLKDRHDYQRLRELPGIGPIIALVILAEAGDLRRFGHHQQFLKYCGLDLAKVQSGVSRGQERLAKRGNARLRCALWQAATVAIRMRENAFRDKYARYVALDPESADLRRKAHTAVTAKMARVAYALVKFDQPYRGRFEVGLPSGSIPLTATLEAIGTS

SEQ ID NO: 383608 - protein, 440 aa, unidentified
MDAGNTECLTEPDWAAFIAIDWADQKHDWAMEVPGQSKREQGQMPHTPEAIDTWVMQLRERFADRPIAVTLEQSRGALLFTLSKYANLVLYPLHPGTVSYFRQAMYPSGSKSDPLDADVQIELLVKHRDRLQVWKPDTEETRLLQFLVEDRRRRVDQKTGLLNQLTSRLKLYFPQILRWFSSSDSVLMWQFLEHWPDLQSAQKASRQKLKALLMRDARSCPADVNEFIQQVREAIPATKDRAVVASAALFVQELVCQLQVLRNTIQKYEKQIEAITQQHPDFPIVSSFPGIGKALAPRLIAALGTQRERFPDAKSIQSYSGIAPVREASGRREWVHARWACPKFLKQTFQEWAQHSMTRCTWARKHYDSQRARGKGHQAAVRSLAFKWIRILFRCWQARTPYDETRYTEALGRRSALPNTDVQIRWKNVAGFSKPAAFSA

SEQ ID NO: 383609 - protein, 414 aa, unidentified
MKQLHSQFAAHIGLDWSDQKHDFCLASSDSGTSKYGTFDHTPESIEDWALALQKRFNNQAVAICLELKAGPVVYALLKYNFIVLFPISPKALAKYREAFTQSGAKDDPSDAFLQLDYLLKHRSALKPLLPDNEETRILQRMVEDRRALVADKVRLTNRITAALKSYYPQVLLWFDDIDTKIFCDFIERWPTLKQAKRVRRLTLSKFFKTHRCVRPAVIEMRTKAIKSALPLTEDDGVIVPLERLVRALTVQLSHILITIHEYDLDIARRFHRHADHEIFDSLPGAGPVFGPRLLVAFGTNRERFDSADEMNRLSGVAPVLKRSGKSAWIHWRYSCPTFLRQTFVEWANQSIRYSFWAKEFYDEKRALGKSHQATLRSLAFKWIRIIYRCWKNRTPYDESAYLFALKKRKTLANQ

SEQ ID NO: 383610 - protein, 347 aa, unidentified
MLHVGLDLSRTRLDVHVMDEAGAPLAVTTAAPDGGGLASLAHRVDEFGGPVAAAIESMNGARFVHDQLELHGWRVEIADAVKVKGFAPLACKTDRIDAWVLAELSRRDLVPSIWLPTPGIRAERERARWRLHLVRHRTALKNRIHATLLTFGHPCPVSDLFGAAGRRLLDSLALPEPWAADVVAALRLIDLLDGEIDDCEAALRRLGAEHAYVPLLMTAPGIGWVLGYTIAAEIGDIGRFATPKKLVGYTGLCPSVDQSGGHDWRGELAKNGPKYLRWALIEAATHAARHPVYAERYQRTKTRLGKQRGAKVARVDIARKLAEAIWWMLTTTKPFAPAGAPQRALAA

SEQ ID NO: 383611 - protein, 324 aa, unidentified
MTEPALGIDVSKDTLDVNIIVRAKPRGQQFANSPEGWRALIAWLRQHKIERVHACLEATGRYSLGAALALHEAGHIVSLVNPAQIKDFSRTRLGRNKTDRVDAALIRDFTALFAPKAWSPPSPALRRLCELRTMREGFVASRVEWQNRAGSGVADRRASELARATIAHFQAQIAAVDQAIAETIDGDDDLRGKRDLLLSIDGVGDTLAAAILAELPGPDVLSTSAQAVAYAGLNPRQFQSGASIRQPTRISKIGNARLRSALFMPAMSAMRCNTVIAALVARLRDKTQLKGKQIVVAAMRKLLVLCFGVLKTGKPFDPAIAMPK

SEQ ID NO: 383612 - protein, 338 aa, unidentified
MSNYCGIDLHSNNCVIVVIDSSDNIVLDRKTSTSIGDVLDSLSICRDSIKAIAVESTYNWYWLVDGLQEAGYHVELVNTSAVKQYEGLKYSDDKSDARHLAHLLRLGILPTGYIYPPEERAVRDLLRRRLQLVRQRTTHVQSMQNQLTRNTGKQFKANEIKKLSPATIKRMLPNPNIQEAILSNLTILSVLQATIKKLEKSIINQVKLKPEFKQLRTVPGIGVIMALTIMLETGDINRFAKVGNYVSYCRCVDSKRMSNKKQKGQGNRKSGNKYLAWAFIEVANFSLQFNEQAKRFYQKKLAKTKRVIALKALAHKMARACYYIMKNNEEFNNERLFA

SEQ ID NO: 383613 - protein, 391 aa, unidentified
MKLYTGMDLHSNNTYIGISDEDDKRVFKGRFPNQLPVILKVLEPYEPNIVGIVVESTFNWYWLVDGLMENVYEDRVHLAHPAGFNPYKGLKHSNDKTSAFFLGKLLRLGILPEGHILPKEDRHLRDLLRKRLMLVQQRTDHLLSLKSLLNRNFCLSPNRNELKRISQEDIDAFIRNEHLNLSAKTNIDVSHHLESRIKQLEKKILADTIAKPYYLKLLSVPGIGKVLALTITLETGDIKRFEDDGNYASYSRCVSSNRLSNEKNKGSNNRKNGNKYLGWAFVEAANFMTRYCPQAEAFHKKKCLKENYTLATKALACKIAKACFYIMRDDVDFDVGKMFGMPLKSKKDKGRGSKPDRGLASKPRAPIGKTAAADFSSGNNNPNIEKMQDKN

SEQ ID NO: 383614 - protein, 404 aa, unidentified
MELKPLYRCVAGLDVHQAKITVCVLHEDAVGGLHVEIREFGGFKRDRREMAEWIATFEPEEVVMESTGIYWKSPYAALERCGIQALVLNARHVKQVPGRKTDIGDAQWLAILARSGLLNGGFVPPANFRELRLTSRQMQKLTGILAAEKNRLHKVLTDAGIRLPVVVSDIHGQSARAMVKGLIAGERPEQVLAYASKRLKATEEELLDALAGELTDEHRFVLAELMDHIEDLERRIARFSDHLLKGLAPQQGLLQALQTIPGLDERGAAMLLVEIGDDMDAFGSAQKLSSWAGVCPGNHESAGKRKSGKKRKGNPYVRRILCEAANAAARTRSALAELFKSLLIRRGRKRAIFALAHKILKIVFVLISRGDYYRDATVDYEAMSVERNAPRWIRMLRKYGYISA

SEQ ID NO: 383615 - protein, 389 aa, unidentified
MPTEADRTETPTAIQTHFAAIFISLELSRSVWLITSLMPGGREKMSKHSVRAGDVAALLARFGELKQRALTRTGKAFPIVTIQEAGLDGFWLHRALEQEGIESHVVDPASIATSRRRRRAKTDRIDGEALLRALLAHKRGEPRVCAMVKAPTPAEEDRRRLCRERKVLIAERVEHVNRIKGLLFAQGISDYEPLRRNRRQRLDELTTGDGRPLPTHLRTQISRELDRLELLLNQIKLTEAERDALLAVQQTASPPPAGRMLLDFKGIGAEFAAVLWLEGLFRQFDNRRQLAAYAGLAPTPWQSGSIDREQGVSKAGNARLRTTLLQLAWLWLRHQPQSALSRWFHERVKRDGGRMKKTTIVALARKLLVALWKYVAAGVVIEGAVMKAA

SEQ ID NO: 383616 - protein, 404 aa, unidentified
MESEKTVIAGVDTHKDKHVLCLLDGLGRKLFSTSYPSDARGYEQLAEAIGNPDSCLAVGVEGTASFGAGLSAYLVSMGYPVVEVLRPKRDKRRKGKNDEIDAEIAARNAAAGDGTSVPKSHDGWVEGLRTLMVARNIEIQASTKAMNAVKSLLVTAPENVRAKYRSYNGCALMEKLSRNRTESGDVAANALMAALKSLARTWLELEQKSLDLMGLIGELLSENAPALLEIPGCGAINAADLAIAAGDNPERMKSESAFAALCGASPIEASSGKVIRHRLNRGGNRSANRALHMIVVSRMRHDENTVAYIKRRASEGKTKREAMRCLKRYIAREVYSILLNPTATKYPKGNELASKRSALGLSQKSVSKILGIPNARISEIERETRLHPEIRVEYARLLSALSED

SEQ ID NO: 383617 - protein, 456 aa, unidentified
MDSIRPNAVRVNRFRELKASLRTRRDRLLVGIDIGKAQHVAQIRLAHTRILDRQLRVPNTRAGFAAFWTHLAARQAETAATQIVAAVEPTGTYHQALALCLEAQRADVVLVSNHVAQLNRRTLDGTWGKSDPKDAHNLCDLLEQGKVLFYSLPGQPLADLRRLVRLLRRARVELAACRARFRNTLLPALSPAGEALPAPLAAALPAPVRALLPARQRAPGPAPAPLPPGLAADLADLAARLTAVQARITRLEAALVWFAEPLPAYALLHTIPGVGPTVAAILLAEIGDIAWYERPSQLRKLAGLDIVRLQSGQFAGTPRISKAGRPLLRWALYQAALGAARTPAWRGRRAAMRLKRQGDRFAFFKANVELAAKLLRIVWGVWRSGQPYDPARVGDPGQRAATAGDSAPRERSRRPGRRAGAGATALLGPPTGARATAAGAGDAVGRHHLLRPGRRS

SEQ ID NO: 383618 - protein, 345 aa, unidentified
MEHFAGIDVSLKDSSVCVVDAAGRIVREAKVASEPEALVAWFRGLGLKVTRIGLEAGPLSQWLHAGLSEAGFETVLLETRHVKAALSAMVVKTDRKDARGIAQLLRMGWFRPVHRKSADAQEVRALLVGRKLLQSKLRDVELSIRGILRGFGLKVGEISKGRFAARIRELVAGHEMLETVTGAMLAAREALLAEFMRLHRRMLAIVRADTVCRRLMTAPGVGALVSITFRTAVDDPGRFRSSKAVGAHFGLTPKRYQSGETDVIGGISKVGDAMVRTALYEAANAVLSRPTRFSTLKRWAMDVAKRRGLKRAKVALARKLGTVLHRMWIDGTAFRWGREAQGVAA

SEQ ID NO: 383619 - protein, 317 aa, unidentified
MNSSQIQTSVNIGVDVGKANLDIALHPSGQFYSIPNSEAHIRRFIKILKNYDIERIVVEATGRHEHALVQASNQAGLPIIVVNPISVRRYAQAIGVLAKTDRIDAQVIAKYAATLKPEFRPIPDKTSKKIRDLLARRAQLMEMSTMEKNRLQIMPKPLHRSIKSLLRMLQNQIEAVTRQIEQEVAKVGHWRTKMEVMTSIPGVGKVLAYTLLSELPELGSLNRKEIAALVGVAPINRDSGKLNGKRRIRGGRHRVRTVMFMAMLSSIQCNPVFKRFYERLKAQGKIPKVALIACMRKMIVVLNTMVKNQESWRGEMA

SEQ ID NO: 383620 - protein, 345 aa, unidentified
MQTMYYIGLDVHKRTISYCVKDSGGKVYAEGSLPATRIDLDHWMKTLPQPWSAAMEATMFTGWIYDHLKPHAAALKVAHPLMLRAIAAAKKKNDRIDANKMCDCLRCDFLPECYMASTAIRERRRTLRYRNLLVRQMVQMKIKISSLLMEAGVSYNKQRLHKAGYFRELLASNPDIDEGLRSLRRLCRETVVRLGKTESALVRSLEGDPLLVERVERLMTIPAVGPITALTWALEVGDVQRFSSIKKAVSYCGLCGDEQSSANRVQRTPLSKQRNKHLQTTLIEAAKMAPRYSPALALVYDREKQKGNANRATLAVARKLVAYLMAVDRGQRNFLVIENQARTAA

SEQ ID NO: 383621 - protein, 338 aa, unidentified
MIVIGVDVHKQSVTAVVIDEAGRPLDEKTVPVGSDELIDWASAFGNERLWAVGDCRSLTGWIERQLLGLGEQLVRVPPKLTVPERRAGRARGKSDPIDALAIARAALREPDLPRPRQGERVYVEIKLLVDHRDDIVEERRRAQQRLRWHLYQLDPTFAVPLRLLARPSHLERVSRWLARQEQQLQVQLARELAARIRTLTRMIVELDDELERRTVDTAPALLELPGCGPATAAKLLAEIGPIDRFKTDAQLARHSGVAPLEASSGRIQRHRLDRGGNRQLNAALYRIAITQARYHPAARAYLDRKRAEGKSRREAIRCLKRLLVRVVFQTLKTSPALT

SEQ ID NO: 383622 - protein, 389 aa, unidentified
MTIQAQVSFQSQVFTPRDYEIFAGLDVDKHSIAVTFCNHEGLLRSLRLPYSAPQLLNYVRRHFPEQRLAFVYEAGPTGFGLYDELVAEGHPCMVVAPSMVPTAPGQRVKTNRLDSQKLSEGLRGGQLRSIHVPASKYRELRHLVQLRDTQVQQLTATKCRIKALLLYEGIQFPDKGDHWSARVLDELLALPSSESVRFKLDQLIGTLHFHFNSAAAAQKQIRYHCQNDAELRQLINLLTTIPGIGVIVATHLVARLGDPTLITNVRQIAGFLGLVSSEHSTGEKQNRGAITRAGDSRLRNKLIQSAWVTIRKDPELREFYGRVYQRHAKKVAARKAIVAVARKLTTRIYAVLKEQRPFVLREVSAAPLTTEETAGPRERLDGQQNEQSR

SEQ ID NO: 383623 - protein, 349 aa, unidentified
MKYFAGLDVSQQTTSICIVDEEGKTVAERKVASCPEAISEALEPFAVTRAGLETGPLSVWLWNGLKERGVPIVCMDARHANAALKMMPAKTDRNDAIGLAQIVRTGWCKSVHVKSTASHEARALLATRSQFVRTRCDLENQIRGVLRTFGILFGKRVGGFAKRAEEIIDGELDASPTIQAVVEALMRARANILEQIRHLEAKVRLIARQNKVVRRLMSVPGVGVITALGFAATIDDPTRFKRSSSAGAYRGLTPRIYASGETMRSGRVSKRGDDFLRRSLYEAANALLTRIPRFSALKSWGLRIARRGGYRKAKVAVARKLAVILHAMWISGEPFRWSSQEPGDLASLQ

SEQ ID NO: 383624 - protein, 410 aa, unidentified
MVELFVGIDWAEDHHDVCVMDERGKVAAKGRVGNDLAGLARVHDLVASAVPDGVEDEDVEVVVGIETDRGLLVRALVAAGYRVLAVNPLAVDRYRDRARVSGAKSDPGDARVLADMARTDAHQHRPVAADSELADAIKLVARSHQSAIWSRRRLANQLRSALREFYPAALEAFDDLTHPDAMAVLAIAPTPELGRGLSRAKIASALRRGGRRLNIERRAAAIQGALRGEHLAQPATIAGAYGAITASLTRVIEAHNRQVAELEAVLSEHFGQHPDADILRSLPGLGVVTGARVLGEFGDDPTRYHDAKARRNYAGTSPLTIASGTRRVVRARHVRNRRLADALHWWAFNAITRSPGARALYDHRRALGDTHNGALRVVANRLVAILHGCLRTHTPYNETTAWAHRHHQAA

SEQ ID NO: 383625 - protein, 365 aa, unidentified
MPSTINKSIDFTGQSFYIGIDVHKKSWTVTVRALNIEIAHFTQQPDVGHLARYLQNRYPGGNFFSAYEAGFCGTSFHHLLCKAGIKNIIIHPADLPASDKQKKNKTDLHDSRAIARYLEGGVLSGIHIMPRDQQEQRSLFRLREAKVKDVTRCSNRLRSLLCYAGVELPEAFRDKEYMSQNFLLWLSKLQLTTQEGTQVLQQYIEELKYQRGQLLPITRKLKKAISAHFKDSYTSVLTVPGMGPVTTMALLAETGDLNRFKDPDPYCSYLGLVPSEQSSGERVYSTCIQPRCNTHLRPLLIEAAWTAIRRCPVLLAYYKKHAGRNPKKAIVKVARKLALIAKAVALNKTTYQPDYIHEPNKLLNI

SEQ ID NO: 383626 - protein, 352 aa, unidentified
MSATAAQNAIAVVGIDIGKNSFHIVALDDRGAIVLRQKWSRGQVEARFANMPPCLIGMEACVGAHHLSRKLKAFGHDARLMPAKYVRPYSKGQKNDFRDAEAIAEAVQRPTMKFVTTKTADQLDLQALHRVRERLVSQRTGIINQIRAFLLERGIAVRQGQRFLRTELPRILATPPDVLSTRMVRVIEGLTEDWRRLDQRIEELSSEIEELAKRDPACVRLMSVPGIGPIISSAMVAAIGTGDGFSKGRDFAAWLGLVPKQISTGDRTILGSISKRGNRYLRVLFVQAAWVTLVKVSPNRWEGHGLKPWIEAAKKRLHHNVLAIALANKLARIAWSVLARGRGFEASKLQLI

SEQ ID NO: 383627 - protein, 348 aa, unidentified
MAHFVGLDVSVKETSVCVVDDTGKVVCERKVPTEPDDIAVLLTSIGGDYVRVGIEAGPLSQWLVNGLTEAELPVICVETRHMKALLQAQQINKSDRNDARGIAQMMRVGLFKPVHVKTLAAQEQRMLLTSRKLLQRKLIDIESDMRGTLRNFGLKVGVVSMIGYEARIRHLVEGFPRLAAIVEPLLTVRRMMRQQFAVLHKMLLDTVRHDPVCKRLMTAPGVGAVVALTYRATVDQPQRFVHSRAVGAHVGLTPRRHQSGEIDFDGGISKSGDAMLRTMLYEAAQVLLTQSRHWSWLKAWGMKVAQRRGMRRAIVAVARRLAVVLHRMWTDGTDFRWGSEPGTAVAAA

SEQ ID NO: 383628 - protein, 379 aa, unidentified
MNKILYVAIDVDDNAYHGHALAGDETEGADFVTKPSAAHLIQTLRKIQRPGYQITICYEAGYLGYSLYRALVKAGFACDIIAPSLIPKPPGARVKTDRIDAQKLALYYKQGLLTKIHVPDETQEALRDLLRSRHFLRRQTVRVKHHLLSLLRRLGLDYRQQTQNPSAAHWTQVHRSWLTSRLKELENPLVKLNFETLLGRIRLLEEQIHSHDETLRTLALDPKVWPPVQALCCYRGLDVLSALTLVTELGDIRRFDHPRRLTSYAGMDLIEHSSGGKERRFSMSRMGNRHIRTTVIEACQYAFNTPVISQLLQKRRQETPAHLVAIADRCMQRLHQKARRLLYRDKPRNKIKAACAREMLGFIWESLNAVASTTTVRKG

SEQ ID NO: 383629 - protein, 370 aa, unidentified
MRIIGCDLHARQQTLAILDTTTGEAVNLTLMHESDEVREFYSQLPRPVLVGIEATGSMHWFLNLMEELGIECRVGHPAQIRAAEPRKQKHDRRDADLILKLLAENRFPAIWLPSKELLDLRALLLHRHQWVRMRVRMQNALQAIALANGLRRGPALWSYDGQAKIAFLPLLPHAAYRRSALQAMYKNMQSEIENLTRRVAEQAGNRCGARLLMTHPGVGPVTALATEVFLGDPQRFTDSKALASYVGIIPREYSSGGHQRLGGVTKQGSPLLRFLWGEAGAHAARHDPELKCFYRRKLVQKGLGKARVAVARKLGIRLWIMLRDEIDYQEFCRRGQMQQKTVRPVVGMPETGNGAKSHRPSDEATRLPES

SEQ ID NO: 383630 - protein, 391 aa, unidentified
MTKRKTETVNDLSRCLDPLDMDATVIAVIEMSQSSWLVAGIVPGVERQPLKKIAIDEHALLTLLSRWREEAEKKGHKITRVTVAFEAGHDGFWLARRLATLGIEVHVIHASSVAVTREHRRAKTDRLDTELLKRGFLGWLRGERGHCKMVVVPTLAEEDAKRPSRERETLVGEASRIITRLKAAFVRLGIRSFNPKLKAAAERLGTLRTPEGEPIPPNTLAALKRDLERHQIIKRQIREIEQTRLDRLAQAPAKGPHAMVLLLARVVGIGVETADMLVQEVLSRNMRDRRAVARYAGLTGSPDESGAKRREKGLARSGNARVRRGMIQLAWRFLMFQKDSALAEWYRQRTANALSMRKTFVVALARKLLIALWRLARDGVVPEGVRLRPAA

SEQ ID NO: 383631 - protein, 336 aa, unidentified
MIKYIGLDAHSSTCTFNVTDERGREVDNTTIESNGRLLVKYLRGVEGVKKLTFEECELSNWLYEILRPEVDELIVCNPVANGDYKKKKTDKMDARKLSNLLRGGFLVPVYHDGSKRERFRSLMSGYQDFIEEGVRLKNRYKSLFRKSGKKIKGEALYNDESFLEGLERADFKFIGTQIYQLLEKMEESRQEYVKEIVRCSKEFKEIKYLKSIPGIGSIQAAKIVSQVIDPERFSSKYKYYSYCGLVRHKRISDGRGYGSEKIWGNRILKCVYKMAGHSVLKGKSGLRNYYDTLRLKGISHDNAYNAVCRKIAAISLSVWRKSEKYNDRLITGNLIK

SEQ ID NO: 383632 - protein, 400 aa, unidentified
MIAVGIDVSKGKSTVTLLCDTGKVLKKAYDVPHTSCALLELAKLIKNYQDDVCVVMEATGNYHKPIANFLCEKGISVSVVNPKLIRDFGDNTLRKPKTDKKDAIKICRYALTYRAQLPDYSPENDARSTLKILNRQYSLAEKTLTMHKNLLISYLELVFPQVNKMFTSHIRNSDGHEKWIDFLVRFPHADMVANISLNEFCLKYKNWCKSAKYRFCESKAEELHQFSRECVCAVQNDEEMRFLVKEQAKMVNKLLEHMQNIRTKMTEIAQTLPEYDTVIEMYGLGSTLAVQMMAEVGDVRRFQNRRAVTAYFGYDSETDQSGTHESKSNPMTKKGSPYLRRTLYLVMVAHMQTQPDNAVYQFLDKKRSEGKNYYSYMTAGAAKFLRIYYAKVKKAMEQIT

SEQ ID NO: 383633 - protein, 361 aa, unidentified
MMSSVTSQPDARKVIVGVDTHKHVHVAVAIDILGTRLGGHAFVADSGGYQALIRWAEIHGPIEAFGIEGTGSYGAGLAATVRRAGHRVMEVNRGDRRTRRAAGKSDTIDAEVAARSVLAGQSTAIPKTADGAVEMIRQLKVARDTAVKARTVAMITLKQIVVHAPAPLREALQDLPDRRLLTRCAGLRPGPLDTPTASTKHTLRALARRWTTLAEEIATHDRHLARLTTETSPTLRASFAVGAHTAAEMLTLFGDNPDRIRSEAAFAKLCGACPIPASSGMTTGRHRLNRGGHRQANAALYRAVIVRMRFHQPTVDYVARRTAAGRTKRDIIRCLKRFLAREIYQRVMTDYRTRQHASQAA

SEQ ID NO: 383634 - protein, 341 aa, unidentified
MEQATTIGLDIAKHVFQLHGADAAGHVLFRKRITRVRLLSFLAAQTRCVVAMEACAGAHYWAREIAKLGHHVRLIAPAYVKPFIKRQKNDAADAEAICEAAQRPSMRFVPVKTEEQQANGIVFRARDLLVRQRTQCVNALRGHLMEYGYVFPKGITHVETLVALVEDLQSSLPDSVRVILKLLVDTFTALEAQIAVLDAEINQRSKSDPTARRLMTIPGVGPIASTAITALVPAAAGFPAGRDFAAWLGLTPLQKSTGGKQKLGAVSKRGERTIRRLLIIGASAVVQQASRRGAPKGSWLAQMLARKPKMLVTVALANKMARIIWAVMAKGGIYRALAASV

SEQ ID NO: 383635 - protein, 409 aa, unidentified
MEVIHRRCAGLDVHQETVVACVRIQTRGKARQEVRTFSTPTSGLLALSDWLVDQGVTHAVLESTGVYWKPVWHVLEGSVELVLANATQVRNLPGRKTDVADAVWLADLLAHGLVRGSFVPPVPIQELRDLTRTRTQLVREAGRHTQRIQKTLEDANIKLTSILTDVMGLSGRTILRAVVDGTTDPAALAALRRGNRLKATQEQFVEALTGKIRDHHRFLLKLHLDQVESIEATVALIEQRIGGLTEPFRGQIELLKTIPGVSDTIARALVAEIGLDMTRFPSAPHLVSWAGLCPRSDESAGKRRSTRLRKGDKWLKTLLVQAAWAASRKKDSYLRALFLRLKARRGPAKAAVAVAASILTSAYFILQRRQPWNDLGANYFDTRDRAKLANRLVKRLENLGLRVQLSDAA

SEQ ID NO: 383636 - protein, 413 aa, unidentified
MDIIYSHVAGLDLHDKTIVAEARWASQQGKTEQELRTFGTMTRDLLEMADWLAARGVTHVAMEATGVLWKPVWNILDGRFELLLVNPRELKQVPGRKSDVKDCQWIAQLLQHGLLRSSFVPSRPQRELRDLTRHRAQLQGERNRVINRIRKTLEDANIKLGSVASDLAGVSAQEMLRQLIDGQKDVQKLAKLARGRMKAKIPQLELALEGHFQEHHRFMLAQLMDHLAYLDQQVAEFTARIEELMAPFVDQELVEKLDEIPGVNTTMIQNITAETGVDMSVFPTDSHLASWAGMCPGNEESAGKRKRRKTTKGDRWLRRALAEAAWAASHTRDTYLASQYHRLAGRRGKKRALIAVGHTILVIVYHIIKHRVNYQDLGPDYFLRLEPERQKRYLVKRLQQLGYEVHLTGTAAA

SEQ ID NO: 383637 - protein, 372 aa, unidentified
MSQSSTLYVGMDVHKESIAVAYVAKDHDAAVISLGTFGTRQCDIDALIRKLQSKAKHLVFVYEAGPCGYWLYRYLAKKDYVCWVVAPSLIPKKAGDRVKTDRRDAMQLARLMRSGDLTPVYVPAVDDEAIRDLSRAREDTLRDLKAAKLRLKAFLLRHDIRYTGRANWSPAHLRWLSEVVCPTPAQQIVFQEYVQTVTEQSERLGRLELELHEQVHTWRLGPVVEAFQALRGVQFTVAVTTVAELGDLTRFENPRQLMNYLGLTPSEYSSGARRQQGSITKTGNTHARRALVEGAWAYRYPAKVSRHLQLRLEKLPTAIQAISWKAQVRLCKRYRQLMAKGKNANQVVVAIARELSAFMWAIAKQVAGLPKA

SEQ ID NO: 383638 - protein, 423 aa, unidentified
MNTSKDNTSVQSAPAAWIGLDWGDKEHAFAIQDAAGASEAGTLAHSAENLHAWLKTLGERFGARPIALAIEASRGAVIHALLEYPWLMIYPINPITGARYRSAFTPSGAKDDLPDAKVLLELVRDHAAKLRVLESQDPVTIKLAGLVEARRKLVDRRTQLILQVQSLLKSYYPQALEVAGDLKSEVALAFLNRWPDLISLKAARPATIKRFYYLHQVRSQDLITQRLALIAQAQALTTDAARVEVAVLHLRALLDQLKVFHQHIPRLDEAIHQTFASHADRDLFRNLPGAGRQLAPRLCVAFGTLRSLYPDPASLQKYAGVAPVREKSGNQVWTHWRWQASTFLRQTFVEWAGQTVHYSEWAKVYYQRMLKKGKKHAVVLRALAFKWIRVLWKCWQDRQPYDEARYLKQLIRRKSPNAVPAKS

SEQ ID NO: 383639 - protein, 491 aa, unidentified
MSSIFQRANPAIQELFKKAGDPKKVMCIPIDYAKRQHTALVCNGEGMPLRSPFNIHNTPEGIDFLEEVVNGLCRKHGISKEHVFFGGEDGSAIAFNFIYALVSRGYLGIGINARDAADERQNYVASTDKLDLLGIASVLINKKGGRTLSDQYSPARVLRDLTHHRRALVNAHTASALRIHHIVDQLLPGFLDEKKSGLTPLAKPSLWLMSSGLAPRRILARKSASLAEKLELFMVRNAGEKVRMIRELARSALPPPDGLCETLQYNLNHEVSVYEHLEGCIQELQRDIARRLAPTPGAMLTTVSGIGVILAAGLYAEIGDPLRDRGIRRMTSYAGIVARLKQSGGPDKEARSCGRTRRACVPLKRCLMDIALKMGQYGHDDLKTDYARRVNQGQDPRLTMGRRMLRICRHLVNHQDFFIPPSLLHADDPEALRAYYSRAWDKILIKWRDAAAIGQALAPGTPLEEWRTTLNQIYHINLSHTSPQYDRLRTR

SEQ ID NO: 383640 - protein, 358 aa, unidentified
MAGKVTETAVVGGVDTHKDLHVAAVVDQNNKVLGTQFFSTTRQGYRQMLAWMTSFGALKRIGVECTGTYGSGLLRYLQNAGLDVLEVTAPDRMERRKRGKSDTIDAECAAHAAFSGIRTVTPKTRNGMIESLRVLKTCRKTAISARRVALQIIHSNIISAPDELREQLRNMTRMQLIRTLGSWRPDASEYRNVTNVYRISLKSLARRYLELHDEIADLDVMIAAIVNELAPELIKRNAIGYESASQLLITAGDNPQRLRSESGFAALCGVSPVPVSSGKTNRYRLNRGGDRAANSALHIIAIGRLRTDDKTKEYVARRVAEGHTKMEAIRCLKRYISREVYTLLRNQNRQINSIPITA

SEQ ID NO: 383641 - protein, 343 aa, unidentified
MYFIGLDVHKKTISYCVRDAAGRVFKEGKIGSTRRELDEWIRTMPQPRTIAMEATIFTGWIYDHLLPHAAKVKVAHPLMLRAIAAAKKKNDRIDAGKIADCLRCDFLPECHMATTEIRDRRRTLRYRSLVIKQMVQMKNRVSGLLMETGVSYNKQRLHKVGYFAELMTGNEDVHESIRPLLKLSRDMISRAQKLDYALVSSLERDPLLKERLRRLRTVPGVGPITALTWALEIGDFTRFSSIKQAISYCGLCGDEKSSADKVMRMPISKQRNKHIQRVLIEAAKLAPRESPELAVIRARELERGNPNRATLAVARKMVSYMLAVERRKQDFVPAEEFSRTAAA

SEQ ID NO: 383642 - protein, 412 aa, unidentified
MMKLKYSICCGLDVHKTWIYACIGITDANGLTEYKQARFSSFSKGLRDLADWLAKYSCTEVCMESTGKYWIPVFNILEKSCSVTLAHPKYTKPQKGNKTDRKDAKWICDLFMCNMVKPSFIPPPEIRQLRDLIRYRVKLTNMLTGEKNRAQNCLTVSNLKLDDVFSDVFGKSSRSITNYMLEHPGETFDVTPFVDGRCKTPISEIQAAVDGAISPEQAVKLRQCLSHIDELEAHREKIEQEILRITEPFSAVLDLLHTLPGLDKNPMTAIAILSEIGPDMSVFPSSKHLVSWAGCCPRNDQSDCKVKSRRISRAGCYLKPLLVQVANALIKSNKHPEFKERYHRVKSHHGHKKAVIAVCKMLLTAIWNMLSKLEAYNPDGFLEHRPVNEKKILTASQALELFRRRGYTIIND

SEQ ID NO: 383643 - protein, 428 aa, unidentified
MNSTQNERINQITSTTLIIGVDIAKFKHVARAQDYRGVELGKPITFENNRGGFELFVSWFQKITAEQGFQDIIVGMEPTGHYWLNLAHYLSEQQIKYGVVNPLHVKKSKELDDNSPTKNDIKDARVIAQLVKDGRYAVPSLPQGIYAELREAMKIREHLKTDLCVVQARVHNWLDRYFPEFLTVFKDWECKSAIQMLSLYLLPHELVPVPDETLLKHLREAAKRGLGLERIKNLKAAASRSVGIQQGSELAKMELKLLLTQYEWLHNKLEELEAKLDELLLQIPHVQQLLAMKGIGRDTIAGFLAEVGDISQYRHPKQITKLAGLNLKTNSSGTHTGQTKITKRGRKRLRALLFRVMMPLVAKNAAFRSLHEYYTKRSINPLKKMQSLIALCNKLIRILFGILKKGHEFSEEKMMQDIPRCAELPQAA

SEQ ID NO: 383644 - protein, 417 aa, unidentified
MTRRLRLEPEDIIVGLDLAGEQHQATICRMEGERLTRFRVPHSLLGFDDLLMRTRLLASQSSSRRIFAFEATGHVWEALAHYLEVRGEEYVIVNPLATFRLREAREMNRHKTDLSDAEQIAELVRNDLVTETKLEAGPYLELRRAWGEYARLREERARLKTLLSHQLYGVFPELRSVWTDLLAPGCLAVLRLGLTPHEIAALPVNDFIRRAKEASRGRRVWRFKLIKVHERAERTVVPARGLAPLAGELARLAERVDLLSDQIDAVAHEIQEGLASIEEARYLLSIPGLAWSSAAGILAHIGSIDKYRHGRQLIKLAGTNPSRRDTGQRIGRRQGMTHRGRSGLRQVLYMATLSCLQHNPRIRAHFDRLVAREDRPLARMQAFGACMNKLLLYAFAVMKRREIFDVEWVGKGAALVA

SEQ ID NO: 383645 - protein, 343 aa, unidentified
MNRYYYIGLDIHKRIIAYCVKAIYGSLVDQGKVDADRQSLEVWVKGLPGPWIGAMEATIFTGWVYDFLKPHAIALKVAHPAMLKAITAAKKKNDRADAEKIADLLRVDLLPECYMLPEEIWELRRILRYRNHIVRTAVKMQNKMSGLLMEVGATYSKKRLHGKKYFRELLERVDDIPPSVKELLQLSRSGYEMFRSFQKRLVATLRTNQLIHDRVHRLMTIPGVGEMTALTWALEIGDTERFSSIRKAVSYCGLCSAQKESAGKEQRGPISKKRNKHLQTMLIEAAKLAPHWNEQLAIVHERELKKGNRNRATLAVARKLVAYMLAVDRKGADFKLPSEIRAA

SEQ ID NO: 383646 - protein, 344 aa, unidentified
MTQPAATQVTVGVDTHAEVHVAVANNNFGRRLDATSVPTTPAGYAELLGWAQGLGQIEAWGIEGTGSFGAGLTRFLRADGQVVVEVNRPDRQARRRRGKSDPLDAEAAARAVQAEQGSVPKAGDGQVEMIRSLRVARATAMKARTQAINVLKGLLVTAPAELREQLRGLSVVRLVQTAAALEPGPVTTPVAAARLGLRSLGRRYQVLSAELAVLDAELDRLTRAAAPKLVAFGVGADSAGALLVAAGDNPDRLRSNAAFSMLCGSSPIEASSGRTRRHRLNRGGDRQANAALHRIVVARLRHDQQTKDYLARRIREGKSKKEAIRCLIGGLSRSRLVGRAVASR

SEQ ID NO: 383647 - protein, 363 aa, unidentified
MFTERTSVGLDVHARSVAAAAIDGVTGELFQAKLTPSYDHITSWLQDKPGPVAVAYEAGPTGFGLYRHLSAAGIRCQVVAPSKLQKPAGDRVKTEAKDAIHLARLLRLDEHNTVAVHTAGQEAARDLVRAREDCRGDLMRARHRLSKLLLRHGIVYYGGDAWTGKHDLWLRHDALAQLASPATRLTFDNDYEAVAATLARRSRLDTAIQEMAADSEFTPLVRRLGCLRGIGTLTGFALAVEIGDWHRFTGRSIGSFVGLVPSEHSSGATRSQGSITKTGNTHLRRLLVEAAWHHKSRYVIGKTLRDRWDLAPAAARVRGDDGNRRLHARWSRFVARKKRTTIADVAVARELAGWCWSLAVLEE

SEQ ID NO: 383648 - protein, 390 aa, unidentified
MIYVGIDVAKTTHYAAAADSDGVVLVEPFAFDNDAPGFAKFISKIASFPKEQLIIGLESTGIYSENLICFLFDSGYKLAVINPIQTATLRKTNIRKTKTDKVDTLLIIKSLMVNSYRLYTEQDTQSLKLKSLCRFRQSLKKSKARLKIQLSGYVNLLFPELLSFFKSGIHISACYTLLKRCSSPAEIAALRLDSLSRLLSNASRGRFSRSTAEALKSLAKSSVGVKNPYISIQIAQTIQQIELLEQQIDEIENVIKDTICELDSVIMSIPGIGAIDGAMILGEIGNIDRFASPAKLLAYAGLDPTVCQSGKFKARSTKMSKRGSKILRFALINSAWQLTLKNDTFFNYYQLKLSQGLSHYGALGHVAHKLVRVIFTLLKHNVPFDPTRLV

SEQ ID NO: 383649 - protein, 411 aa, unidentified
MDLEVVVTHGAGLDVHKKVIVATVLTPTVKETRSFGTLTPDLLALADWLQSCGVTHVAMEATGVYWKPVVNLLEAYPFEAVMVVNPQHIKGMPGRKTDVQDSQWIAGLLRIGALKASYIPPRPQRELREIVRYRTSLQQARATEANRIQKVLEGANVKLGSVISDVLGVTGQRILAALADGMTDPAALADLADPRIRASRDTLIHALTGLVTAHQRLMLRVQLQHVAFLDRQIAALSEEIATRLANFDDALTRLQTIPGVERRTAEIIIAEIGTDLQRFPSAGHLVSWAGFSPGQNESAGKARPTRTRKGSKALRAALTQSGHAAGKTQTYLGAVYHRLAGRRGKQRAAVATGRHILIAVYAILRTPGAVYEDLGATYYDQRDRQALVRREIRRLEALGYRVMVEPTSAAS

SEQ ID NO: 383650 - protein, 367 aa, unidentified
MQKHIFVGIDLGDKNSVARIGVELEKSERFGFVNTKAGRARLIVEVKRRSEEAGAAVVVMAYEASSCGFVLRDQAQAAGIDCKVLAPTKMEKSVEQKRNKNDDRDADDVLEKLRGHVLAGNRLPTVWVPDLETRDDRELLRTRLALSERQTKVKTQIQMLLKRHGLEKPSELATTRSKQYRQWLESLSQWESLGWGTRQSLASLLRQLSVIEAEMENLEKLIRQLGSQPRHKPIVEALMKEKGVGLLAALVYRTEIGQAGRFHRGRHVGKFVGLTPTSHESGQQSDRKGHISRQGPPRLRKVLCQASWVHVRYDPYSREAYQRLVAKNPKKKKIALVAVMRRLAVRLWHRMREVELLQQSPTPLMKN

SEQ ID NO: 383651 - protein, 465 aa, unidentified
MAARRQKHKRMSAQLVEDEDYQLRYERVAGTGVAKASGMVCLRLPPGPGKARRTSRTWEVTAAVPDIGELAGELKAAGVALVSMESTSDYWRIWFAVLEEAGLAVQLVNSAQARNLPGRPKTDKADAQWIARLTEMGLLRASLVPPPEIRALRTYTRQLVHLAADRARYWQRLEKLLEDALCKLTSVASKLAGSDSCRAMIEAMIAGQRDPEALAGLARTRMRAKRAELVKAFTGMRFGEQHAFAAAGHLRAIDFLDAEIAALQEQVRVHVAQIPAAWGVDGDGATGPGAGLGGDAAVLPAVARLAEIPGVSEDLAIGLIAETGLDMTRFPTPGHLVSWAGLAPVARQSGPRTGRGKKGHGNSYARRLATAAGAGASKTDTFLGERHRRIRQRPGGGGWKKASCATGRSILVIAWHLLADPQARFTDLGPDHYARHADRNRKARSHLRQLHALGYDVTLTPREAA

SEQ ID NO: 383652 - protein, 366 aa, unidentified
MPSVTSAAGAIHLGMDTSKNTIVVGVLMPGEEIPVVDRIWNDEESVRRLAGRFASREVLRACYEAGPGGFELHRLLTSMGVACDVVAPSLIPKGARDRVKTDKRDASRLARLHRAGELTAIRVPSPAEEAVRDLVRARHALLADRQRAQKRLSAMLMRHGRIWRAGSPWTCAHYQWIAAQSFDQPALATALAHYRAALDARAAELAAIEAELSPWAARPPLAAAVARLGCYRGIAQLTGLTLAAEVADWRRFAAARAFMGFTGLVPSEYSSGDHVRRGAITKAGSEPVRTALIEAAWAYRHKPSIGATLRRRQHGASPATLARSWAAQRRLYAKYRQMTARGKPPGVAVTAMARELAGFAWAEMTS

SEQ ID NO: 383653 - protein, 339 aa, unidentified
MLYVGIDIAKNKHDVTALNVPGKTVLKPLTFSNNKAGFELLDLSLRQLNQDCLIALENTGHYAFNLLNFLHEQGYKVYTYTPLLIKEFAKSLSLRKTKTNKKDAHGIALKLLSDPNREQFQHDNRQVELKILARHIHRLKKKQSDWKVQYTRCLDIIFPELDKIVGKHSEYTYQLLTRYPNPQKRIEAGFDKLIEIKRLTASKIQDILSVAPRSIGTTSPAREFEIIKHYKRLIDKAETCVNDLMAEFNSVITTVTGIGNRLEAVILAEIRNIHAFDNPAQLQAFAGLDSSIYQSGQIDLAGRMIKRGSPHLRWALIQAAKACPRFSPAFKAYLKTKLE

SEQ ID NO: 383654 - protein, 347 aa, unidentified
MNNLSKSKLDGKISMFVGMDLHKNYLQIAVMNDKGKVLENSRINNDLRKVGRFFDENINDEKVRVVMESSSVWYNIYSYLSEEKHLNVVLSNPIKTRAIASAKIKTDKLDAAKLANLLRGGYIAECYVPDRKIMDLRELVRHRAALVRMRTKLKNKIHSIVLMKGIQISSKHSSFTHLYNEELKALNDYRINGYLHLIESLDSEIKDVSKKILMLAKEDEMASLLMTIPGIGYYSALLVVSEIGDINRFPDSYHLCSYAGLVPSTHSSGGITYHGSITKRGSKYLRWIMLECARAHIRTNKKSNITQFYTRLAKIKGNSKAAVAAASKLLKVVYWVMKEKRKYHHHS

SEQ ID NO: 383655 - protein, 355 aa, unidentified
MHLLDLEVEPTRRETWRSDIGESICIEISSRAACSWRTAGLNLSQWKLEELPQFLKKLRASDEIAVEITGNTRLFYDAVVEHVARVVVVDTNQFRVICQSVHKTDPHDARALALYLSKGLLPEVRMKSKQHAHLAGLTQTRDTLVKQRSALKNKINNLLSARGLNLRKEALSSEKKRAEILSLPFDEMVLVQLRVIADQIRSLNKSITELDETIAQASAELEGHTSLTSITGIGATTSAILLSVIGDVNDFPDEKRLASYFGIVPRVSNSNATERSGHIHKHGTKLGRTALVQSALVAAHYSPYLKRFYERVKAGRGAGKAIIALARKFLGIIYRTLKNKWVFEDFPNFVLAEGA

SEQ ID NO: 383656 - protein, 403 aa, unidentified
MNAVGIDVSKGKSMVTILRPFGEIVSSPFEIKHTSSDIHSLIKLIHSIEGESRVVMEHTGRYYEALAHQLSAADLFVSAVNPKLVKDFNNDSLRKIKSDKADSVKIARYALDKWQSLEPYSITNELRAQLKVMNRQFHFYVKQKTAMKNNLIGLIDQTYPNANTYFNSPTRSDGSQKWVDFVSTYWHVDCIRKMSLNAFVEHYQNWCKRKKYAFNKSKAEEIYTKTKELVPVFPKNEITKHIIRQAIDQLNSTSVTVETIRTLMNETASKLPEYSIVMQFKGIGPSLGPQLMAEIGDVTRFTHKGALTAFAGVDPGVNESGSYTQKSVPTSKRGSSNLRKTLFQVMDVLIKTMPQDDPVYQFMDRKRTQGKPYYVYMTAGANKFLRIYYGRVKEYLSVLPDPS

SEQ ID NO: 383657 - protein, 409 aa, unidentified
MKLFVGLDVSSFDIKVCFLNGEGNELKSFTVTNDLPGATMLRDEILNVVQDESVSELKIGLESTSVYSFHPSMFLHNDEHIRALGGQVLVMNPKQIANFKKSYSDMDKTDEIDAFVIADYLRFGRLPMSIVKEEQYVALQQLTRARYNVVRQITQEKQRFLQYLSYKCNTFTEEVESSVFGKAMMDLFLENYSLDELSNMPLEDLADYLRTKGKNRFPNPEYVAESIQKAVRSSYRLDKVVEDSIDTILGTSITLIRTFEKQIKELDKSIERIMKGVPQTLQTVPGIGPVFTAGIIAEIGQIERFEDETKIAKYAGLYWRKHQSGRFTADDTSLSRNGNQYLRYYLVEAANSVRRQNPEYNDYYAKKYQEVPKHQHKRALVLTARKFVRLVDALLRKNQIYTPERSVNT

SEQ ID NO: 383658 - protein, 404 aa, unidentified
MSVQVAPVTPSTIVVAGDVGKTSAMLSVTDSTRNRLLGPVEFVMSRSGLAGAVHRVVAVVPPAAQVKVGVEAAGHYHRPVLDYGWPVGWEVLEFNPAHVAEQRRVAGRRRVKTDVIDLEAITELALAGRGQVITERAVRIGELAAWAAHRSRRVATRTATKNQLLGQLDRAFPGLTLALPDVLGTKIGRLVAAEFADPARLCALGVNRLIRFAAVRDVAVRRPVAERVVSAARDARPTRDAVVARRVLATDLGLLADLDTQIENAERQLAALLPVSPFATLTSVPGWGVVRAANYAAALGDPDRWPGSRQIYRASGLSPMQYESAGKRRDGRISREGSVALRQALIDLGIGLWLTDPAAKAYAAALKSRGKPGGIIGCALAHRATRIAHALVRDHATYDPSRWS

SEQ ID NO: 383659 - protein, 335 aa, unidentified
MTKEDFIYVGIDLHKETHTAVMIDCYNNKLGEITFPNRPADFPKLVTKVKKCNTDAKEVVYGLENAYGYGRALAVWLIDKGYFVKDVNTAISHRQAKHRGAMYRKSDSDDAEAIALATLNMLDKLPDACPNDEYWSLGQLVHRRDNIMKQRTRLVNQLHEQLCIAYPSYKSFFNDISRPTALYFWEHYPSKKYLKGKSVEDLRAELVPVSHNKCSTKTCEKILDAVASDKVKNNAYQDARDMVTLSIVSDLQHYDSQLTEVDKMLEQMYKMLGCTLTTIPGVNVITAVKILAEIGDIKRFANANKLAQFAGIAPLHLSSSGKGKDVATKQGNRRL

SEQ ID NO: 383660 - protein, 346 aa, unidentified
MQAEYDGRQIVGIDLHRRRSVIVRMTETGEKLDTVRIDNDPVALGLEIAKAGPDPEVVLEATYGWYWAVDVLTAVGARVHLAHPLGVKGFAYRRVKNDARDAADLADLLRMGRLPEAYVAPPAVRELRELVRYRAKLVAWRSGLKASVHAVLAKQGVHIPVSDLFGVGGRELLARAPLDGAYRGRVSSLCRLIDAVDFEINAVAGPIRARLSRHPGYTAIQAIPGIGPVLAAVFVAEIGEVDRFPGPAQLTSWAGLTPRHRESDLVVHRGRITKQGSTLVRWAAVEAAHSVPHRAGWLVSRRAAIAERRGRNIATVAVARKLLTLVYYGLRDGHIRALAPATRAAA

SEQ ID NO: 383661 - protein, 454 aa, unidentified
MPRKTTGKKNKKVAMPILNADAAGVDIGATEIYVAVPADRDPEPIRMFPTFTLDLIHLAEWLQQCGVRTVAMESTGVYWVPLMQILEVRGLEVYLVNAKHVKNVPGRRTDVSDCQWLQYLHSVGLLRASFRPASDVCAIRSLLRHRDSLVEMATSHVQHMQKALDQMNLQIRHVISDITGTTGLAIIDAILGGNRDTQTLAALSDPRIRANQETIARSLVGDYRQEHLFTLQQSVDLYREYQCRIADCEEEMRRLMKTLETRADLRMSLPVAKDSVKKCKVMTPAKALELREEAYRVLGVDLTTIPGISVLHVQAILAELGRDVSKFRSAGAFSSWMGLCPDNDISGGKVLWTGTRKIKNRVAVTLRMAAQSLQKSQSALGEFYRRMRTRLGAPKAITAAAHKLARVIYHMLKTRESYDESVFARAEFKHRQRTENRLRALAQNLGYTLISAHS

SEQ ID NO: 383662 - protein, 321 aa, unidentified
MENTAVLGIDVSKDKLDAALLREGKYKTRLFRNNEKGFEELIEWMNKHTKQAIHVCLEATGIYGEEISIYLFDKGFMVSVVNPAKIKGFAQGELARTKTDKTDAQLIARFCLAMNPAAWEPPAPEIRELKILVRRLESLIKMKQEEDNRLSVSSEIVQGSIGRVIEILEGEIKEIREKIKNHIDNHPNLKNSKDLLETIPGVGPATIAQILSMDCTPERFDEIKDLVAFVGLNPKHRQSGSSIQGRSRISKTGDSTLRKALYLPAVSAKQHNPILKAFYERLLAAGKPKMVAICAVMRKLLHIIYGVLKTGKAFDPNYATT

SEQ ID NO: 383663 - protein, 375 aa, unidentified
MGLPSATGLKFKPSGILESSKFRPNRIRAWKLPVLPMKETSCSQKRFRLAITRPILGIDVDSKYLVVHLLLLDGTNRTRQFKNGPAGFKELVEWLAQLKASDALICMEATGRYGEKLAKYCHSLGFKVVVANPNFISRHKESLNKHNKTDPTDALAIADYARCFEGRLRAWEPLSPVREKLRDVLGQIAKLKKARTMFSNRNHCGLNDVLVRDSNDESIAFVSAQIDKLSEYRDSLFEELPALKVARAALMQTVGIGKEIATALVVRVQMQNFASGRELGAFLGCASAEWSSGKQKRRGRQPKAGDSDLRSLLRLGAASALRTSFYRDFVDRLTKRGLSKGQVIGAVARKMLLIAHAVLRSGKPFDRNYKSPLAT

SEQ ID NO: 383664 - protein, 421 aa, unidentified
MNDYRIAGIDVHKKMLAVVVAELTAAGELAFQRRPFDNTEAGIHQMRDWFVECQVREAVMESTAQYWRTVWLELEEKFRLHLAQAMSNRAPRGRKRDYADAERLVRRLIAGELVLSYVPGREQRLWRMLAREKHLARRARVQQVNALEAFLEQIRIKLSSVLSDITGVSGWRILEALAKGEPEPAKLAKLADPSVQCTREQIQAALAAAPHVCAEERAVLRQFLDRIELFGKQIADNDRLLAACLARYQDAVTRLAEIAGLGADSAQQMIAEIGPKAEAFDSPAQLSSWIGVCPGREESAGVSKSDRSPKGNRPMRRLLAQCANAAIKAKGSVFELYYRRKVAHLGHFQAVWAVAHKLCRVIWKVLHDGVRYEERGSRLNSKQEAKQLQRLKRTLRLLGYDPNSLRKLQAPNNIAPGLSMV

SEQ ID NO: 383665 - protein, 346 aa, unidentified
MTMPSRITGGVDTHLDVHVAAALDERGGLLGVETFPTTPAGYRQLCSWLGSFGTVDLVGVEGTGSYGAGLTRFLHAHQVAVVEVDRPNRQRRRRRGKSDPQDAISAARAAQSGDADGLAKTRDGNVESMRVLRVARSSARQSRTQALNQMRALIATAPDELRNELRDLNVHRLLERTAAYRHSRRRDVHATTKFALRTLARRAIALEAEITELDQLLTELAADTAPELVAINGVGTDVATALLVAAGDNPERLRTEATFAHLCGVAPIDASSGKHERHRLNRGGDRQANSALWHIVITRMVYDQRTRDYIARRIEEGRTKKEAMRCLKRYIAREIYHQLPRQELIT

SEQ ID NO: 383666 - protein, 398 aa, unidentified
MRHHTEAFIGIDTSKLRNAVAIAEGGRGGEVRFLGEFPATEAAMRKLVAKLAAKYDKLTFCYEAGPTGYGLYRLIKSLGHECAVVAPSLTPKKPGDRVKTNRRDAVSLARLSRAGELTAVVPDERHEAMRDLSRARQAAKKDLQGKRQQISSLMLRLGRCYPGKKTWGPAYMKWLRSQKLEHGEQRMALEELLEGVRQEGERVERLEQAIREAVPEWSLVELVTAVQAMRGFDLIAAVGVVAETGDLSRFQNPRELMGYLGLAPSESSTGDSVKRGGITKAGNGRARRILVEAAWAYRHPARVGREKQAKVAAAPRIVREIAWKAQTRLCRRFRFLERKGKRRTVVATAVARELAAFIWAINREVMQNRQATSAGAVDRSSRECARPAHSPSVAIQIK

SEQ ID NO: 383667 - protein, 338 aa, unidentified
MEEVSTIGLDLAKSVFQVHGIDAAGRVVVRRQLRRGEVLGFFARLRPCLVGMEACATAHHWGRELIKLGHTVKLMPPAYVKPYVKRGKTDAADAEAIAEAVTRPTMRFVAVKSMDQQAVLMLHKVRDLLVRQRTMLINALRGHLAEFGVVTARGPAGVKAAIAELHGMQDSLPPLARMALHGLLDRLGAVGLEIRKVEREIVAWCRHDDASRRLMTIPGIGPITASAIAATVSNASLFRSGRQFAAWLGLTPRARSSGGKERLGHISKQGDGYIRRLLVTGATAVIRLARQGNPSKVWATRLLERKPARVVSVALANKTARIAWAVLARNQSYVAPAM

SEQ ID NO: 383668 - protein, 485 aa, unidentified
MTEKRREAAQHEGQELADQRTLLRRAPGGLRRDCPGRQENGATGSRESGPPEGRYKANLAVPAPQLGVHGPEGGGRVRYYVGVDWADQTHAVWVVDESGTKITGRTVPHTAAGFSEWGRELDEWRAQGIERWAAIERPDGRVVDFLLDHGVVVYPVNPKALDRARDRFRQSGAKSDPFDARVLADFLRTDHRHLQALQPSSDAAQELKLLTEDCQRHIRQQTRLVNQLTATLKAYYPRALEVAELTTALAREFLQTYPTPEALTTLTARQWQRWARGRRVSAARIGALWAVLHQPQLPVPAHVVRAKARLMQSLVEQLTPVVTAVAQYRTAIDDFFARMPAAQWARTLPIGKHGITAPTLWARLGDAPGRWESFRHLQAQAGAVPVTKRSGKQRVVHFRFACDKSLRHVVDQVAFLSLLSSDWARAYYDQQRARGHAHHQALRALGAKWLKIIFVMWHRQVPYDEPYHLATMTRQPLRQRQTTIA
